United States Patent Application Publication US 2023/0026259 A1 - sequence listing, part 8

SEQ ID NO: 33423 - protein, 334 aa, Homo sapiens
  Payload ID: 6559
  Gene Symbol: GPR12
  Gene Name: G protein-coupled receptor 12
  Uniprot ID: P47775
  ENSP ID: ENSP00000370844
MNEDLKVNLSGLPRDYLDAAAAENISAAVSSRVPAVEPEPELVVNPWDIVLCTSGTLISCENAIVVLIIFHNPSLRAPMFLLIGSLALADLLAGIGLITNFVFAYLLQSEATKLVTIGLIVASFSASVCSLLAITVDRYLSLYYALTYHSERTVTFTYVMLVMLWGTSICLGLLPVMGWNCLRDESTCSVVRPLTKNNAAILSVSFLFMFALMLQLYIQICKIVMRHAHQIALQHHFLATSHYVTTRKGVSTLAIILGTFAACWMPFTLYSLIADYTYPSIYTYATLLPATYNSIINPVIYAFRNQEIQKALCLICCGCIPSSLAQRARSPSDV

SEQ ID NO: 33424 - protein, 334 aa, Homo sapiens; identical to SEQ ID NO: 33423
  Payload ID: 6559
  Gene Symbol: GPR12
  Gene Name: G protein-coupled receptor 12
  Uniprot ID: P47775
  ENSP ID: ENSP00000384932

SEQ ID NO: 33425 - protein, 380 aa, Homo sapiens
  Payload ID: 6560
  Gene Symbol: GPR132
  Gene Name: G protein-coupled receptor 132
  Uniprot ID: Q9UNW8
  ENSP ID: ENSP00000328818
MCPMLLKNGYNGNATPVTTTAPWASLGLSAKTCNNVSFEESRIVLVVVYSAVCTLGVPANCLTAWLALLQVLQGNVLAVYLLCLALCELLYTGTLPLWVIYIRNQHRWTLGLLACKVTAYIFFCNIYVSILFLCCISCDRFVAVVYALESRGRRRRRTAILISACIFILVGIVHYPVFQTEDKETCFDMLQMDSRIAGYYYARFTVGFAIPLSIIAFTNHRIFRSIKQSMGLSAAQKAKVKHSAIAVVVIFLVCFAPYHLVLLVKAAAFSYYRGDRNAMCGLEERLYTASVVFLCLSTVNGVADPIIYVLATDHSRQEVSRIHKGWKEWSMKTDVTRLTHSRDTEELQSPVALADHYTFSRPVHPPGSPCPAKRLIEESC

SEQ ID NO: 33426 - protein, 371 aa, Homo sapiens
  Payload ID: 6560
  Gene Symbol: GPR132
  Gene Name: G protein-coupled receptor 132
  Uniprot ID: Q9UNW8
  ENSP ID: ENSP00000376364
MPGNATPVTTTAPWASLGLSAKTCNNVSFEESRIVLVVVYSAVCTLGVPANCLTAWLALLQVLQGNVLAVYLLCLALCELLYTGTLPLWVIYIRNQHRWTLGLLACKVTAYIFFCNIYVSILFLCCISCDRFVAVVYALESRGRRRRRTAILISACIFILVGIVHYPVFQTEDKETCFDMLQMDSRIAGYYYARFTVGFAIPLSIIAFTNHRIFRSIKQSMGLSAAQKAKVKHSAIAVVVIFLVCFAPYHLVLLVKAAAFSYYRGDRNAMCGLEERLYTASVVFLCLSTVNGVADPIIYVLATDHSRQEVSRIHKGWKEWSMKTDVTRLTHSRDTEELQSPVALADHYTFSRPVHPPGSPCPAKRLIEESC

SEQ ID NO: 33427 - protein, 380 aa, Homo sapiens; identical to SEQ ID NO: 33425
  Payload ID: 6560
  Gene Symbol: GPR132
  Gene Name: G protein-coupled receptor 132
  Uniprot ID: Q9UNW8
  ENSP ID: ENSP00000438094

SEQ ID NO: 33428 - protein, 68 aa, Homo sapiens
  Payload ID: 6560
  Gene Symbol: GPR132
  Gene Name: G protein-coupled receptor 132
  ENSP ID: ENSP00000448513
MCPMLLKNGYNGAEARSVCGFLLTWRWDSMICNHRRPRSMNSARVGSQDTGAGGAGRAWGSHTTAHPA

SEQ ID NO: 33429 - protein, 10 aa, Homo sapiens
  Payload ID: 6560
  Gene Symbol: GPR132
  Gene Name: G protein-coupled receptor 132
  ENSP ID: ENSP00000448776
MCPMLLKNGY

SEQ ID NO: 33430 - protein, 494 aa, Homo sapiens
  Payload ID: 6561
  Gene Symbol: GPR135
  Gene Name: G protein-coupled receptor 135
  Uniprot ID: Q8IZ08
  ENSP ID: ENSP00000378548
MEEPQPPRPPASMALLGSQHSGAPSAAGPPGGTSSAATAAVLSFSTVATAALGNLSDASGGGTAAAPGGGGLGGSGAAREAGAAVRRPLGPEAAPLLSHGAAVAAQALVLLLIFLLSSLGNCAVMGVIVKHRQLRTVTNAFILSLSLSDLLTALLCLPAAFLDLFTPPGGSAPAAAAGPWRGFCAASRFFSSCFGIVSTLSVALISLDRYCAIVRPPREKIGRRRALQLLAGAWLTALGFSLPWELLGAPRELAAAQSFHGCLYRTSPDPAQLGAAFSVGLVVACYLLPFLLMCFCHYHICKTVRLSDVRVRPVNTYARVLRFFSEVRTATTVLIMIVFVICCWGPYCFLVLLAAARQAQTMQAPSLLSVVAVWLTWANGAINPVIYAIRNPNISMLLGRNREEGYRTRNVDAFLPSQGPGLQARSRSRLRNRYANRLGACNRMSSSNPASGVAGDVAMWARKNPVVLFCREGPPEPVTAVTKQPKSEAGDTSL

SEQ ID NO: 33431 - protein, 494 aa, Homo sapiens; identical to SEQ ID NO: 33430
  Payload ID: 6561
  Gene Symbol: GPR135
  Gene Name: G protein-coupled receptor 135
  Uniprot ID: Q8IZ08
  ENSP ID: ENSP00000432696

SEQ ID NO: 33432 - protein, 417 aa, Homo sapiens
  Payload ID: 6562
  Gene Symbol: GPR137
  Gene Name: G protein-coupled receptor 137
  Uniprot ID: Q96N19
  ENSP ID: ENSP00000321698
MESNLSGLVPAAGLVPALPPAVTLGLTAAYTTLYALLFFSVYAQLWLVLLYGHKRLSYQTVFLALCLLWAALRTTLFSFYFRDTPRANRLGPLPFWLLYCCPVCLQFFTLTLMNLYFAQVVFKAKVKRRPEMSRGLLAVRGAFVGASLLFLLVNVLCAVLSHRRRAQPWALLLVRVLVSDSLFVICALSLAACLCLVARRAPSTSIYLEAKGTSVCQAAAMGGAMVLLYASRACYNLTALALAPQSRLDTFDYDWYNVSDQADLVNDLGNKGYLVFGLILFVWELLPTTLLVGFFRVHRPPQDLSTSHILNGQVFASRSYFFDRAGHCEDEGCSWEHSRGESTRCQDQAATTTVSTPPHRRDPPPSPTEYPGPSPPHPRPLCQVCLPLLAQDPGGRGYPLLWPAPCCSCHSELVPSP

SEQ ID NO: 33433 - protein, 346 aa, Homo sapiens
  Payload ID: 6562
  Gene Symbol: GPR137
  Gene Name: G protein-coupled receptor 137
  Uniprot ID: Q96N19
  ENSP ID: ENSP00000366931
MESNLSGLVPAAGLVPALPPAVTLGLTAAYTTLYALLFFSVYAQLWLVLLYGHKRLSYQTVFLALCLLWAALRTTLFSFYFRDTPRANRLGPLPFWLLYCCPVCLQFFTLTLMNLYFAQVVFKAKVKRRPEMSRGLLAVRGAFVGASLLFLLVNVLCAVLSHRRRAQPWALLLVRVLVSDSLFVICALSLAACLCLVARRAPSTSIYLEAKADLVNDLGNKGYLVFGLILFVWELLPTTLLVGFFRVHRPPQDLSTSHILNGQVFASRSYFFDRAGHCEDEGCSWEHSRGESTSMSGSLGSGSWYGAIGREPGWYGGSQTKTTPLLFSQVPGPGGHHHSLYSTPQT

SEQ ID NO: 33434 - protein, 475 aa, Homo sapiens
  Payload ID: 6562
  Gene Symbol: GPR137
  Gene Name: G protein-coupled receptor 137
  Uniprot ID: Q96N19
  ENSP ID: ENSP00000411827
MLWAVRTRCYVVKAQLGPTVALEGRAPRAPGPSCLGNGNCQRPGPITSRNVTRASLPDMESNLSGLVPAAGLVPALPPAVTLGLTAAYTTLYALLFFSVYAQLWLVLLYGHKRLSYQTVFLALCLLWAALRTTLFSFYFRDTPRANRLGPLPFWLLYCCPVCLQFFTLTLMNLYFAQVVFKAKVKRRPEMSRGLLAVRGAFVGASLLFLLVNVLCAVLSHRRRAQPWALLLVRVLVSDSLFVICALSLAACLCLVARRAPSTSIYLEAKGTSVCQAAAMGGAMVLLYASRACYNLTALALAPQSRLDTFDYDWYNVSDQADLVNDLGNKGYLVFGLILFVWELLPTTLLVGFFRVHRPPQDLSTSHILNGQVFASRSYFFDRAGHCEDEGCSWEHSRGESTRCQDQAATTTVSTPPHRRDPPPSPTEYPGPSPPHPRPLCQVCLPLLAQDPGGRGYPLLWPAPCCSCHSELVPSP

SEQ ID NO: 33435 - protein, 396 aa, Homo sapiens
  Payload ID: 6562
  Gene Symbol: GPR137
  Gene Name: G protein-coupled receptor 137
  Uniprot ID: Q96N19
  ENSP ID: ENSP00000415698
MESNLSGLVPAAGLVPALPPAVTLGLTAAYTTLYALLFFSVYAQLWLVLLYGHKRLSYQTVFLALCLLWAALRTTLFSFYFRDTPRANRLGPLPFWLLYCCPVCLQFFTLTLMNLYFAQVVFKAKVKRRPEMSRGLLAVRGAFVGASLLFLLVNVLCAVLSHRRRAQPWALLLVRVLVSDSLFVICALSLAACLCLVARRAPSTSIYLEAKGTSVCQAAAMGGAMVLLYASRACYNLTALALAPQSRLDTFDYDWYNVSDQADLVNDLGNKGYLVFGLILFVWELLPTTLLVGFFRVHRPPQDLSTSHILNGQVFASRSYFFDRAGHCEDEGCSWEHSRGESTSMSGSLGSGSWYGAIGREPGWYGGSQTKTTPLLFSQVPGPGGHHHSLYSTPQT

SEQ ID NO: 33436 - protein, 139 aa, Homo sapiens
  Payload ID: 6562
  Gene Symbol: GPR137
  Gene Name: G protein-coupled receptor 137
  ENSP ID: ENSP00000438146
MESNLSGLVPAAGLVPALPPAVTLGLTAAYTTLYALLFFSVYAQLWLVLLYGHKRLSYQTVFLALCLLWAALRTTLFSFYFRDTPRANRLGPLPFWLLYCCPVCLQFFTLTLMNLYFAQVVFKAKVKRRPEMSRGLRTW

SEQ ID NO: 33437 - protein, 219 aa, Homo sapiens
  Payload ID: 6562
  Gene Symbol: GPR137
  Gene Name: G protein-coupled receptor 137
  ENSP ID: ENSP00000438716
MESNLSGLVPAAGLVPALPPAVTLGLTAAYTTLYALLFFSVYAQLWLVLLYGHKRLSYQTVFLALCLLWAALRTTLFSFYFRDTPRANRLGPLPFWLLYCCPVCLQFFTLTLMNLYFAQVVFKAKVKRRPEMSRGLLAVRGAFVGASLLFLLVNVLCAVLSHRRRAQPWALLLVRVLVSDSLFVICALSLAACLCLVARRAPSTSIYLEAKGTSVCQAA

SEQ ID NO: 33438 - protein, 31 aa, Homo sapiens
  Payload ID: 6562
  Gene Symbol: GPR137
  Gene Name: G protein-coupled receptor 137
  ENSP ID: ENSP00000440928
MNLYFAQVVFKAKVKRRPEMSRGLLAVRGAF

SEQ ID NO: 33439 - protein, 240 aa, Homo sapiens
  Payload ID: 6562
  Gene Symbol: GPR137
  Gene Name: G protein-coupled receptor 137
  ENSP ID: ENSP00000441003
MESNLSGLVPAAGLVPALPPAVTLGLTAAYTTLYALLFFSVYAQLWLVLLYGHKRLSYQTVFLALCLLWAALRTTLFSFYFRDTPRANRLGPLPFWLLYCCPVCLQFFTLTLMNLYFAQVVFKAKVKRRPEMSRGLLAVRGAFVGASLLFLLVNVLCAVLSHRRRAQPWALLLVRVLVSDSLFVICALSLAACLCLVARRAPSTSIYLEAKGTSVCQAAAMGGAMVLLYASRACYNLTAL

SEQ ID NO: 33440 - protein, 139 aa, Homo sapiens
  Payload ID: 6562
  Gene Symbol: GPR137
  Gene Name: G protein-coupled receptor 137
  ENSP ID: ENSP00000441034
MESNLSGLVPAAGLVPALPPAVTLGLTAAYTTLYALLFFSVYAQLWLVLLYGHKRLSYQTVFLALCLLWAALRTTLFSFYFRDTPRANRLGPLPFWLLYCCPVCLQFFTLTLMNLYFAQVVFKAKVKRRPEMSRGFGSQ

SEQ ID NO: 33441 - protein, 63 aa, Homo sapiens
  Payload ID: 6562
  Gene Symbol: GPR137
  Gene Name: G protein-coupled receptor 137
  ENSP ID: ENSP00000442322
MESNLSGLVPAAGLVPALPPAVTLGLTAAYTTLYALLFFSVYAQLWLVLLYGHKRLSYQTVFL

SEQ ID NO: 33442 - protein, 320 aa, Homo sapiens
  Payload ID: 6562
  Gene Symbol: GPR137
  Gene Name: G protein-coupled receptor 137
  Uniprot ID: Q96N19
  ENSP ID: ENSP00000442792
MESNLSGLVPAAGLVPALPPAVTLGLTAAYTTLYALLFFSVYAQLWLVLLYGHKRLSYQTVFLALCLLWAALRTTLFSFYFRDTPRANRLGPLPFWLLYCCPVCLQFFTLTLMNLYFAQVVFKAKVKRRPEMSRGLLAVRGAFVGASLLFLLVNVLCAVLSHRRRAQPWALLLVRVLVSDSLFVICALSLAACLCLVARRAPSTSIYLEAKGTSVCQAAAMGGAMVLLYASRACYNLTALALAPQSRLDTFDYDWYNVSDQADLVNDLGNKGYLVFGLILFVWELLPTTLLVGFFRVHRPPQDLYVGQSRLWELVWCHRA

SEQ ID NO: 33443 - protein, 156 aa, Homo sapiens
  Payload ID: 6562
  Gene Symbol: GPR137
  Gene Name: G protein-coupled receptor 137
  ENSP ID: ENSP00000442929
MESNLSGLVPAAGLVPALPPAVTLGLTAAYTTLYALLFFSVYAQLWLVLLYGHKRLSYQTVFLALCLLWAALRTTLFSFYFRDTPRANRLGPLPFWLLYCCPVCLQFFTLTLMNLYFAQVVFKAKVKRRPEMSRGLRAPSTSIYLEAKGTSVCQAA

SEQ ID NO: 33444 - protein, 88 aa, Homo sapiens
  Payload ID: 6562
  Gene Symbol: GPR137
  Gene Name: G protein-coupled receptor 137
  ENSP ID: ENSP00000443443
  MOD_RES (1)..(1): Any amino acid
XTKATWYLASSSSCGSYCPPPCWWASSGCTGPHRTCMSGSLGSGSWYGAIGREPGWYGGSQTKTTPLLFSQVPGPGGHHHSLYSTPQT

SEQ ID NO: 33445 - protein, 167 aa, Homo sapiens
  Payload ID: 6562
  Gene Symbol: GPR137
  Gene Name: G protein-coupled receptor 137
  ENSP ID: ENSP00000445000
MESNLSGLVPAAGLVPALPPAVTLGLTAAYTTLYALLFFSVYAQLWLVLLYGHKRLSYQTVFLALCLLWAALRTTLFSFYFRDTPRANRLGPLPFWLLYCCPVCLQFFTLTLMNLYFAQVVFKAKVKRRPEMSRGLLAVRGAFVGASLLFLLVNVLCAVLSHRRRAQ

SEQ ID NO: 33446 - protein, 225 aa, Homo sapiens
  Payload ID: 6562
  Gene Symbol: GPR137
  Gene Name: G protein-coupled receptor 137
  ENSP ID: ENSP00000445570
MASLPDMESNLSGLVPAAGLVPALPPAVTLGLTAAYTTLYALLFFSVYAQLWLVLLYGHKRLSYQTVFLALCLLWAALRTTLFSFYFRDTPRANRLGPLPFWLLYCCPVCLQFFTLTLMNLYFAQVVFKAKVKRRPEMSRGLLAVRGAFVGASLLFLLVNVLCAVLSHRRRAQPWALLLVRVLVSDSLFVICALSLAACLCLVARRAPSTSIYLEAKGTSVCQAA

SEQ ID NO: 33447 - protein, 132 aa, Homo sapiens
  Payload ID: 6562
  Gene Symbol: GPR137
  Gene Name: G protein-coupled receptor 137
  ENSP ID: ENSP00000446342
MESNLSGLVPAAGLVPALPPAVTLGLTAAYTTLYALLFFSVYAQLWLVLLYGHKRLSYQTVFLALCLLWAALRTTLFSFYFRDTPRANRLGPLPFWLLYCCPVCLQFFTLTLMNLYFAQVVFKAKVKRRPEM

SEQ ID NO: 33448 - protein, 78 aa, Homo sapiens
  Payload ID: 6562
  Gene Symbol: GPR137
  Gene Name: G protein-coupled receptor 137
  ENSP ID: ENSP00000446387
MESNLSGLVPAAGLVPALPPAVTLGLTAAYTTLYALLFFSVYAQLWLVLLYGHKRLSYQTVFLALCLLWAALRTTLFS

SEQ ID NO: 33449 - protein, 211 aa, Homo sapiens
  Payload ID: 6562
  Gene Symbol: GPR137
  Gene Name: G protein-coupled receptor 137
  ENSP ID: ENSP00000484728
MESNLSGLVPAAGLVPALPPAVTLGLTAAYTTLYALLFFSVYAQLWLVLLYGHKRLSYQTVFLALCLLWAALRTTLFSFYFRDTPRANRLGPLPFWLLYCCPVCLQFFTLTLMNLYFAQVVFKAKVKRRPEMSRGLLAVRGAFVGASLLFLLVNVLCAVLSHRRRAQPWALLLVRVLVSDSLFVICALSLAACLCLVAGGRPPLASTWRPR

SEQ ID NO: 33450 - protein, 399 aa, Homo sapiens
  Payload ID: 6563
  Gene Symbol: GPR137B
  Gene Name: G protein-coupled receptor 137B
  Uniprot ID: O60478
  ENSP ID: ENSP00000355551
MRPERPRPRGSAPGPMETPPWDPARNDSLPPTLTPAVPPYVKLGLTVVYTVFYALLFVFIYVQLWLVLRYRHKRLSYQSVFLFLCLFWASLRTVLFSFYFKDFVAANSLSPFVFWLLYCFPVCLQFFTLTLMNLYFTQVIFKAKSKYSPELLKYRLPLYLASLFISLVFLLVNLTCAVLVKTGNWERKVIVSVRVAINDTLFVLCAVSLSICLYKISKMSLANIYLESKGSSVCQVTAIGVTVILLYTSRACYNLFILSFSQNKSVHSFDYDWYNVSDQADLKNQLGDAGYVLFGVVLFVWELLPTTLVVYFFRVRNPTKDLTNPGMVPSHGFSPRSYFFDNPRRYDSDDDLAWNIAPQGLQGGFAPDYYDWGQQTNSFLAQAGTLQDSTLDPDKPSLG

SEQ ID NO: 33451 - protein, 230 aa, Homo sapiens
  Payload ID: 6563
  Gene Symbol: GPR137B
  Gene Name: G protein-coupled receptor 137B
  ENSP ID: ENSP00000395814
  MOD_RES (1)..(1): Any amino acid
XQVIFKAKSKYSPELLKYRLPLYLASLFISLVFLLVNLTCAVLVKTGNWERKVIVSVRVAINDTLFVLCAVSLSICLYKISKMSLANIYLESKGSSVCQVTAIGVTVILLYTSRACYNLFILSFSQNKSVHSFDYDWYNVSDQADLKNQLGDAGYVLFGVVLFVWELLPTTLVVYFFRVRNPTKDLTNPGMVPSHGFSPRSYFFDNPRRYDSDDDLAWNIAPQGLQGGLL

SEQ ID NO: 33452 - protein, 180 aa, Homo sapiens
  Payload ID: 6563
  Gene Symbol: GPR137B
  Gene Name: G protein-coupled receptor 137B
  ENSP ID: ENSP00000401841
MRPERPRPRGSAPGPMETPPWDPARNDSLPPTLTPAVPPYVKLGLTVVYTVFYALLFVFIYVQLWLVLRYRHKRLSYQSVFLFLCLFWASLRTVLFSFYFKDFVAANSLSPFVFWLLYCFPVCLQFFTLTLMNLYFTQVAPLPGLPLHQPCFPVGEFNLCCAGKDGKLGEEGYRLCASGH

SEQ ID NO: 33453 - protein, 429 aa, Homo sapiens
  Payload ID: 6564
  Gene Symbol: GPR137C
  Gene Name: G protein-coupled receptor 137C
  Uniprot ID: Q8N3F9
  ENSP ID: ENSP00000315106
MRVSVPGPAAAAAPAAGREPSTPGGGSGGGGAVAAASGAAVPGSVQLALSVLHALLYAALFAFAYLQLWRLLLYRERRLSYQSLCLFLCLLWAALRTTLFSAAFSLSGSLPLLRPPAHLHFFPHWLLYCFPSCLQFSTLCLLNLYLAEVICKVRCATELDRHKILLHLGFIMASLLFLVVNLTCAMLVHGDVPENQLKWTVFVRALINDSLFILCAISLVCYICKITKMSSANVYLESKGMSLCQTVVVGSVVILLYSSRACYNLVVVTISQDTLESPFNYGWDNLSDKAHVEDISGEEYIVFGMVLFLWEHVPAWSVVLFFRAQRLNQNLAPAGMINSHSYSSRAYFFDNPRRYDSDDDLPRLGSSREGSLPNSQSLGWYGTMTGCGSSSYTVTPHLNGPMTDTAPLLFTCSNLDLNNHHSLYVTPQN

SEQ ID NO: 33454 - protein, 399 aa, Homo sapiens
  Payload ID: 6564
  Gene Symbol: GPR137C
  Gene Name: G protein-coupled receptor 137C
  ENSP ID: ENSP00000439165
  MOD_RES (1)..(1): Any amino acid
XALSVLHALLYAALFAFAYLQLWRLLLYRERRLSYQSLCLFLCLLWAALRTTLFSAAFSLSGSLPLLRPPAHLHFFPHWLLYCFPSCLQFSTLCLLNLYLAEVICKVRCATELDRHKILLHLGFIMASLLFLVVNLTCAMLVHGDVPENQLKWTVFVRALINDSLFILCAISLVCYICKITKMSSANVYLESKITGSHSFLWLNSTPLCGMSLCQTVVVGSVVILLYSSRACYNLVVVTISQDTLESPFNYGWDNLSDKAHVEDISGEEYIVFGMVLFLWEHVPAWSVVLFFRAQRLNQNLAPAGMINSHSYSSRAYFFDNPRRYDSDDDLPRLGSSREGSLPNSQSLGWYGTMTGCGSSSYTVTPHLNGPMTDTAPLLFTCSNLDLNNHHSLYVTPQN

SEQ ID NO: 33455 - protein, 204 aa, Homo sapiens
  Payload ID: 6564
  Gene Symbol: GPR137C
  Gene Name: G protein-coupled receptor 137C
  ENSP ID: ENSP00000452563
  MOD_RES (1)..(1): Any amino acid
XWAALRTTLFSAAFSLSGSLPLLRPPAHLHFFPHWLLYCFPSCLQFSTLCLLNLYLAEVLQTGAVPIWPSWKEPILYLQMVICKVRCATELDRHKILLHLGFIMASLLFLVVNLTCAMLVHGDVPENQLKWTVFVRALINDSLFILCAISLVCYICKITKMSSANVYLESKGMSLCQTVVVGSVVILLYSSRACYNLVVVTISQ

SEQ ID NO: 33456 - protein, 50 aa, Homo sapiens
  Payload ID: 6565
  Gene Symbol: GPR139
  Gene Name: G protein-coupled receptor 139
  ENSP ID: ENSP00000370779
MEHTHAHLAANSSLSWWSPGSACGLGFVPVVYYSLLLCLGLPDIMKPIKL

SEQ ID NO: 33457 - protein, 353 aa, Homo sapiens
  Payload ID: 6565
  Gene Symbol: GPR139
  Gene Name: G protein-coupled receptor 139
  Uniprot ID: Q6DWJ6
  ENSP ID: ENSP00000458791
MEHTHAHLAANSSLSWWSPGSACGLGFVPVVYYSLLLCLGLPANILTVIILSQLVARRQKSSYNYLLALAAADILVLFFIVFVDFLLEDFILNMQMPQVPDKIIEVLEFSSIHTSIWITVPLTIDRYIAVCHPLKYHTVSYPARTRKVIVSVYITCFLTSIPYYWWPNIWTEDYISTSVHHVLIWIHCFTVYLVPCSIFFILNSIIVYKLRRKSNFRLRGYSTGKTTAILFTITSIFATLWAPRIIMILYHLYGAPIQNRWLVHIMSDIANMLALLNTAINFFLYCFISKRFRTMAAATLKAFFKCQKQPVQFYTNHNFSITSSPWISPANSHCIKMLVYQYDKNGKPIKVSP

SEQ ID NO: 33458 - protein, 305 aa, Homo sapiens
  Payload ID: 6566
  Gene Symbol: GPR141
  Gene Name: G protein-coupled receptor 141
  Uniprot ID: Q7Z602
  ENSP ID: ENSP00000334540
MPGHNTSRNSSCDPIVTPHLISLYFIVLIGGLVGVISILFLLVKMNTRSVTTMAVINLVVVHSVFLLTVPFRLTYLIKKTWMFGLPFCKFVSAMLHIHMYLTFLFYVVILVTRYLIFFKCKDKVEFYRKLHAVAASAGMWTLVIVIVVPLVVSRYGIHEEYNEEHCFKFHKELAYTYVKIINYMIVIFVIAVAVILLVFQVFIIMLMVQKLRHSLLSHQEFWAQLKNLFFIGVILVCFLPYQFFRIYYLNVVTHSNACNSKVAFYNEIFLSVTAISCYDLLLFVFGGSHWFKQKIIGLWNCVLCR

SEQ ID NO: 33459 - protein, 305 aa, Homo sapiens; identical to SEQ ID NO: 33458
  Payload ID: 6566
  Gene Symbol: GPR141
  Gene Name: G protein-coupled receptor 141
  Uniprot ID: Q7Z602
  ENSP ID: ENSP00000390410

SEQ ID NO: 33460 - protein, 104 aa, Homo sapiens
  Payload ID: 6566
  Gene Symbol: GPR141
  Gene Name: G protein-coupled receptor 141
  ENSP ID: ENSP00000396300
MPGHNTSRNSSCDPIVTPHLISLYFIVLIGGLVGVISILFLLVKMNTRSVTTMAVINLVVVHSVFLLTVPFRLTYLIKKTWMFGLPFCKFVSAMLHIHMYLTFL

SEQ ID NO: 33461 - protein, 462 aa, Homo sapiens
  Payload ID: 6567
  Gene Symbol: GPR142
  Gene Name: G protein-coupled receptor 142
  Uniprot ID: Q7Z601
  ENSP ID: ENSP00000335158
MSIMMLPMEQKIQWVPTSLQDITAVLGTEAYTEEDKSMVSHAQKSQHSCLSHSRWLRSPQVTGGSWDLRIRPSKDSSSFRQAQCLRKDPGANNHLESQGVRGTAGDADRELRGPSEKATAGQPRVTLLPTPHVSGLSQEFESHWPEIAERSPCVAGVIPVIYYSVLLGLGLPVSLLTAVALARLATRTRRPSYYYLLALTASDIIIQVVIVFAGFLLQGAVLARQVPQAVVRTANILEFAANHASVWIAILLTVDRYTALCHPLHHRAASSPGRTRRAIAAVLSAALLTGIPFYWWLDMWRDTDSPRTLDEVLKWAHCLTVYFIPCGVFLVTNSAIIHRLRRRGRSGLQPRVGKSTAILLGITTLFTLLWAPRVFVMLYHMYVAPVHRDWRVHLALDVANMVAMLHTAANFGLYCFVSKTFRATVRQVIHDAYLPCTLASQPEGMAAKPVMEPPGLPTGAEV

SEQ ID NO: 33462 - protein, 131 aa, Homo sapiens
  Payload ID: 6567
  Gene Symbol: GPR142
  Gene Name: G protein-coupled receptor 142
  ENSP ID: ENSP00000463521
MSIMMLPMEQKIQWVPTSLQDITAVLGTEAYTEEDKSMVSHAQKSQHSCLSHSRWLRSPQVTGGSWDLRIRPSKDSSSFRQAQCLRKDPGANNHLESQGVRGTAGDADRELRGPSEKATGDPGLRAPEHGA

SEQ ID NO: 33463 - protein, 101 aa, Homo sapiens
  Payload ID: 6567
  Gene Symbol: GPR142
  Gene Name: G protein-coupled receptor 142
  ENSP ID: ENSP00000464632
MSIMMLPMEQKIQWVPTSLQDITAVLGTEAYTEEDKSMVSHAQKSQHSCLSHSRWLRSPQVTGGSWDLRIRPSKDSSSFRQVNPAASQNRPSMGWDGSVSA

SEQ ID NO: 33464 - protein, 267 aa, Homo sapiens
  Payload ID: 6568
  Gene Symbol: GPR143
  Gene Name: G protein-coupled receptor 143
  ENSP ID: ENSP00000390546
MVIRSTVWLGFPNFVDSVSDMNHTEIWPAAFCVGSAMWIQLLYSACFWWLFCYAVDAYLVIRRSAGLSTILLYHIMAWGLATLLCVEGAAMLYYPSVSRCERGLDHAIPHYVTMYLPLLLVLVANPILFQKTVTAVASLLKGRQGIYTENERRMGAVIKIRFFKIMLVLIICWLSNIINESLLFYLEMQTDINGGSLKPVRTAAKTTWFIMGILNPAQGFLLSLAFYGWTGCSLGFQSPRKEIQWESLTTSAAEGAHPSPLMPHENP

SEQ ID NO: 33465 - protein, 171 aa, Homo sapiens
  Payload ID: 6568
  Gene Symbol: GPR143
  Gene Name: G protein-coupled receptor 143
  ENSP ID: ENSP00000406138
MVIRSTVWLGFPNFVDSVSDMNHTEIWPAAFCVGSAMWIQLLYSACFWWLFCYAVDAYLVIRRSAGLSTILLYHIMAWGLATLLCVEGAAMLYYPSVSRCERGLDHAIPHYVTMYLPLLLVLVANPILFQKTVTAVASLLKGRQGIYTENERRMGAVIKIRFFKIMLVLII

SEQ ID NO: 33466 - protein, 404 aa, Homo sapiens
  Payload ID: 6568
  Gene Symbol: GPR143
  Gene Name: G protein-coupled receptor 143
  Uniprot ID: P51810
  ENSP ID: ENSP00000417161
MASPRLGTFCCPTRDAATQLVLSFQPRAFHALCLGSGGLRLALGLLQLLPGRRPAGPGSPATSPPASVRILRAAAACDLLGCLGMVIRSTVWLGFPNFVDSVSDMNHTEIWPAAFCVGSAMWIQLLYSACFWWLFCYAVDAYLVIRRSAGLSTILLYHIMAWGLATLLCVEGAAMLYYPSVSRCERGLDHAIPHYVTMYLPLLLVLVANPILFQKTVTAVASLLKGRQGIYTENERRMGAVIKIRFFKIMLVLIICWLSNIINESLLFYLEMQTDINGGSLKPVRTAAKTTWFIMGILNPAQGFLLSLAFYGWTGCSLGFQSPRKEIQWESLTTSAAEGAHPSPLMPHENPASGKVSQVGGQTSDEALSMLSEGSDASTIEIHTASESCNKNEGDPALPTHGDL

SEQ ID NO: 33467 - protein, 333 aa, Homo sapiens
  Payload ID: 6569
  Gene Symbol: GPR146
  Gene Name: G protein-coupled receptor 146
  Uniprot ID: Q96CH1
  ENSP ID: ENSP00000297468
MWSCSWFNGTGLVEELPACQDLQLGLSLLSLLGLVVGVPVGLCYNALLVLANLHSKASMTMPDVYFVNMAVAGLVLSALAPVHLLGPPSSRWALWSVGGEVHVALQIPFNVSSLVAMYSTALLSLDHYIERALPRTYMASVYNTRHVCGFVWGGALLTSFSSLLFYICSHVSTRALECAKMQNAEAADATLVFIGYVVPALATLYALVLLSRVRREDTPLDRDTGRLEPSAHRLLVATVCTQFGLWTPHYLILLGHTVIISRGKPVDAHYLGLLHFVKDFSKLLAFSSSFVTPLLYRYMNQSFPSKLQRLMKKLPCGDRHCSPDHMGVQQVLA

SEQ ID NO: 33468 - protein, 333 aa, Homo sapiens; identical to SEQ ID NO: 33467
  Payload ID: 6569
  Gene Symbol: GPR146
  Gene Name: G protein-coupled receptor 146
  Uniprot ID: Q96CH1
  ENSP ID: ENSP00000380283

SEQ ID NO: 33469 - protein, 38 aa, Homo sapiens
  Payload ID: 6569
  Gene Symbol: GPR146
  Gene Name: G protein-coupled receptor 146
  ENSP ID: ENSP00000397853
MWSCSWFNGTGLVEELPACQDLQLGLSLLSLLGLVVGV

SEQ ID NO: 33470 - protein, 315 aa, Homo sapiens
  Payload ID: 6569
  Gene Symbol: GPR146
  Gene Name: G protein-coupled receptor 146
  ENSP ID: ENSP00000410743
MWSCSWFNGTGLVEELPACQDLQLGLSLLSLLGLVVGVPVGLCYNALLVLANLHSKASMTMPDVYFVNMAVAGLVLSALAPVHLLGPPSSRWALWSVGGEVHVALQIPFNVSSLVAMYSTALLSLDHYIERALPRTYMASVYNTRHVCGFVWGGALLTSFSSLLFYICSHVSTRALECAKMQNAEAADATLVFIGYVVPALATLYALVLLSRVRREDTPLDRDTGRLEPSAHRLLVATVCTQFGLWTPHYLILLGHTVIISRGKPVDAHYLGLLHFVKDFSKLLAFSSSFVTPLLYRYMNQSFPSKLQRLMKKLP

SEQ ID NO: 33471 - protein, 347 aa, Homo sapiens
  Payload ID: 6570
  Gene Symbol: GPR148
  Gene Name: G protein-coupled receptor 148
  Uniprot ID: Q8TDV2
  ENSP ID: ENSP00000308908
MGDELAPCPVGTTAWPALIQLISKTPCMPQAASNTSLGLGDLRVPSSMLYWLFLPSSLLAAATLAVSPLLLVTILRNQRLRQEPHYLLPANILLSDLAYILLHMLISSSSLGGWELGRMACGILTDAVFAACTSTILSFTAIVLHTYLAVIHPLRYLSFMSHGAAWKAVALIWLVACCFPTFLIWLSKWQDAQLEEQGASYILPPSMGTQPGCGLLVIVTYTSILCVLFLCTALIANCFWRIYAEAKTSGIWGQGYSRARGTLLIHSVLITLYVSTGVVFSLDMVLTRYHHIDSGTHTWLLAANSEVLMMLPRAMLTYLYLLRYRQLLGMVRGHLPSRRHQAIFTIS

SEQ ID NO: 33472 - protein, 731 aa, Homo sapiens
  Payload ID: 6571
  Gene Symbol: GPR149
  Gene Name: G protein-coupled receptor 149
  Uniprot ID: Q86SP6
  ENSP ID: ENSP00000374390
MSLFLSNLSTNDSSLWKENHNSTDLLNPPGTLNIYLFCLTCLMTFAALVGSIYSLISLLKMQNRTVVSMLVASWSVDDLMSVLSVTIFMFLQWPNEVPGYFQFLCTTSALMYLCQGLSSNLKATLLVSYNFYTMHRGVGSQTASRRSGQVLGVVLTVWAASLLLSALPLCGWGAFVRTPWGCLVDCSSSYVLFLSIVYALAFGLLVGLSVPLTHRLLCSEEPPRLHSNYQEISRGASIPGTPPTAGRVVSLSPEDAPGPSLRRSGGCSPSSDTVFGPGAPAAAGAEACRRENRGTLYGTRSFTVSVAQKRFALILALTKVVLWLPMMMHMVVQNVVGFQSLPLETFSFLLTLLATTVTPVFVLSKRWTHLPCGCIINCRQNAYAVASDGKKIKRKGFEFNLSFQKSYGIYKIAHEDYYDDDENSIFYHNLMNSECETTKDPQRDNRNIFNAIKVEISTTPSLDSSTQRGINKCTNTDITEAKQDSNNKKDAFSDKTGGDINYEETTFSEGPERRLSHEESQKPDLSDWEWCRSKSERTPRQRSGYALAIPLCAFQGTVSLHAPTGKTLSLSTYEVSAEGQKITPASKKIEVYRSKSVGHEPNSEDSSSTFVDTSVKIHLEVLEICDNEEALDTVSIISNISQSSTQVRSPSLRYSRKENRFVSCDLGETASYSLFLPTSNPDGDINISIPDTVEAHRQNSKRQHQERDGYQEEIQLLNKAYRKREEESKGS

SEQ ID NO: 33473 - protein, 360 aa, Homo sapiens
  Payload ID: 6572
  Gene Symbol: GPR15
  Gene Name: G protein-coupled receptor 15
  Uniprot ID: P49685
  ENSP ID: ENSP00000284311
MDPEETSVYLDYYYATSPNSDIRETHSHVPYTSVFLPVFYTAVFLTGVLGNLVLMGALHFKPGSRRLIDIFIINLAASDFIFLVTLPLWVDKEASLGLWRTGSFLCKGSSYMISVNMHCSVLLLTCMSVDRYLAIVWPVVSRKFRRTDCAYVVCASIWFISCLLGLPTLLSRELTLIDDKPYCAEKKATPIKLIWSLVALIFTFFVPLLSIVTCYCCIARKLCAHYQQSGKHNKKLKKSIKIIFIVVAAFLVSWLPFNTFKFLAIVSGLRQEHYLPSAILQLGMEVSGPLAFANSCVNPFIYYIFDSYIRRAIVHCLCPCLKNYDFGSSTETSDSHLTKALSTFIHAEDFARRRKRSVSL

SEQ ID NO: 33474 - protein, 434 aa, Homo sapiens
  Payload ID: 6573
  Gene Symbol: GPR150
  Gene Name: G protein-coupled receptor 150
  Uniprot ID: Q8NGU9
  ENSP ID: ENSP00000369344
MEDLFSPSILPPAPNISVPILLGWGLNLTLGQGAPASGPPSRRVRLVFLGVILVVAVAGNTTVLCRLCGGGGPWAGPKRRKMDFLLVQLALADLYACGGTALSQLAWELLGEPRAATGDLACRFLQLLQASGRGASAHLVVLIALERRRAVRLPHGRPLPARALAALGWLLALLLALPPAFVVRGDSPSPLPPPPPPTSLQPGAPPAARAWPGERRCHGIFAPLPRWHLQVYAFYEAVAGFVAPVTVLGVACGHLLSVWWRHRPQAPAAAAPWSASPGRAPAPSALPRAKVQSLKMSLLLALLFVGCELPYFAARLAAAWSSGPAGDWEGEGLSAALRVVAMANSALNPFVYLFFQAGDCRLRRQLRKRLGSLCCAPQGGAEDEEGPRGHQALYRQRWPHPHYHHARREPLDEGGLRPPPPRPRPLPCSCESAF

SEQ ID NO: 33475 - protein, 419 aa, Homo sapiens
  Payload ID: 6574
  Gene Symbol: GPR151
  Gene Name: G protein-coupled receptor 151
  Uniprot ID: Q8TDV0
  ENSP ID: ENSP00000308733
MLAAAFADSNSSSMNVSFAHLHFAGGYLPSDSQDWRTIIPALLVAVCLVGFVGNLCVIGILLHNAWKGKPSMIHSLILNLSLADLSLLLFSAPIRATAYSKSVWDLGWFVCKSSDWFIHTCMAAKSLTIVVVAKVCFMYASDPAKQVSIHNYTIWSVLVAIWTVASLLPLPEWFFSTIRHHEGVEMCLVDVPAVAEEFMSMFGKLYPLLAFGLPLFFASFYFWRAYDQCKKRGTKTQNLRNQIRSKQVTVMLLSIAIISALLWLPEWVAWLWVWHLKAAGPAPPQGFIALSQVLMFSISSANPLIFLVMSEEFREGLKGVWKWMITKKPPTVSESQETPAGNSEGLPDKVPSPESPASIPEKEKPSSPSSGKGKTEKAEIPILPDVEQFWHERDTVPSVQDNDPIPWEHEDQETGEGVK

SEQ ID NO: 33476 - protein, 470 aa, Homo sapiens
  Payload ID: 6575
  Gene Symbol: GPR152
  Gene Name: G protein-coupled receptor 152
  Uniprot ID: Q8TDT2
  ENSP ID: ENSP00000310255
MDTTMEADLGATGHRPRTELDDEDSYPQGGWDTVFLVALLLLGLPANGLMAWLAGSQARHGAGTRLALLLLSLALSDFLFLAAAAFQILEIRHGGHWPLGTAACRFYYFLWGVSYSSGLFLLAALSLDRCLLALCPHWYPGHRPVRLPLWVCAGVWVLATLFSVPWLVFPEAAVWWYDLVICLDFWDSEELSLRMLEVLGGFLPFLLLLVCHVLTQATACRTCHRQQQPAACRGFARVARTILSAYVVLRLPYQLAQLLYLAFLWDVYSGYLLWEALVYSDYLILLNSCLSPFLCLMASADLRTLLRSVLSSFAAALCEERPGSFTPTEPQTQLDSEGPTLPEPMAEAQSQMDPVAQPQVNPTLQPRSDPTAQPQLNPTAQPQSDPTAQPQLNLMAQPQSDSVAQPQADTNVQTPAPAASSVPSPCDEASPTPSSHPTPGALEDPATPPASEGESPSSTPPEAAPGAGPT

SEQ ID NO: 33477 - protein, 609 aa, Homo sapiens
  Payload ID: 6576
  Gene Symbol: GPR153
  Gene Name: G protein-coupled receptor 153
  Uniprot ID: Q6NV75
  ENSP ID: ENSP00000367125
MSDERRLPGSAVGWLVCGGLSLLANAWGILSVGAKQKKWKPLEFLLCTLAATHMLNVAVPIATYSVVQLRRQRPDFEWNEGLCKVFVSTFYTLTLATCFSVTSLSYHRMWMVCWPVNYRLSNAKKQAVHTVMGIWMVSFILSALPAVGWHDTSERFYTHGCRFIVAEIGLGFGVCFLLLVGGSVAMGVICTAIALFQTLAVQVGRQADRRAFTVPTIVVEDAQGKRRSSIDGSEPAKTSLQTTGLVTTIVFIYDCLMGFPVLVVSFSSLRADASAPWMALCVLWCSVAQALLLPVFLWACDRYRADLKAVREKCMALMANDEESDDETSLEGGISPDLVLERSLDYGYGGDFVALDRMAKYEISALEGGLPQLYPLRPLQEDKMQYLQVPPTRRFSHDDADVWAAVPLPAFLPRWGSGEDLAALAHLVLPAGPERRRASLLAFAEDAPPSRARRRSAESLLSLRPSALDSGPRGARDSPPGSPRRRPGPGPRSASASLLPDAFALTAFECEPQALRRPPGPFPAAPAAPDGADPGEAPTPPSSAQRSPGPRPSAHSHAGSLRPGLSASWGEPGGLRAAGGGGSTSSFLSSPSESSGYATLHSDSLGSAS

SEQ ID NO: 33478 - protein, 870 aa, Homo sapiens
  Payload ID: 6577
  Gene Symbol: GPR155
  Gene Name: G protein-coupled receptor 155
  Uniprot ID: Q7Z3F1
  ENSP ID: ENSP00000295500
MNSNLPAENLTIAVNMTKTLPTAVTHGFNSTNDPPSMSITRLFPALLECFGIVLCGYIAGRANVITSTQAKGLGNFVSRFALPALLFKNMVVLNFSNVDWSFLYSILIAKASVFFIVCVLTLLVASPDSRFSKAGLFPIFATQSNDFALGYPIVEALYQTTYPEYLQYIYLVAPISLMMLNPIGFIFCEIQKWKDTQNASQNKIKIVGLGLLRVLQNPIVFMVFIGIAFNFILDRKVPVYVENFLDGLGNSFSGSALFYLGLTMVGKIKRLKKSAFVVLILLITAKLLVLPLLCREMVELLDKGDSVVNHTSLSNYAFLYGVFPVAPGVAIFATQFNMEVEIITSGMVISTFVSAPIMYVSAWLLTFPTMDPKPLAYAIQNVSFDISIVSLISLIWSLAILLLSKKYKQLPHMLTTNLLIAQSIVCAGMMIWNFVKEKNFVGQILVFVLLYSSLYSTYLWTGLLAISLFLLKKRERVQIPVGIIIISGWGIPALLVGVLLITGKHNGDSIDSAFFYGKEQMITTAVTLFCSILIAGISLMCMNQTAQAGSYEGFDQSQSHKVVEPGNTAFEESPAPVNEPELFTSSIPETSCCSCSMGNGELHCPSIEPIANTSTSEPVIPSFEKNNHCVSRCNSQSCILAQEEEQYLQSGDQQLTRHVLLCLLLIIGLFANLSSCLWWLFNQEPGRLYVELQFFCAVFNFGQGFISFGIFGLDKHLIILPFKRRLEFLWNNKDTAENRDSPVSEEIKMTCQQFIHYHRDLCIRNIVKERRCGAKTSAGTFCGCDLVSWLIEVGLASDRGEAVIYGDRLVQGGVIQHITNEYEFRDEYLFYRFLQKSPEQSPPAINANTLQQERYKEIEHSSPPSHSPKT

SEQ ID NO: 33479 - protein, 870 aa, Homo sapiens; identical to SEQ ID NO: 33478
  Payload ID: 6577
  Gene Symbol: GPR155
  Gene Name: G protein-coupled receptor 155
  Uniprot ID: Q7Z3F1
  ENSP ID: ENSP00000376334

SEQ ID NO: 33480 - protein, 870 aa, Homo sapiens; identical to SEQ ID NO: 33478
  Payload ID: 6577
  Gene Symbol: GPR155
  Gene Name: G protein-coupled receptor 155
  Uniprot ID: Q7Z3F1
  ENSP ID: ENSP00000376335

SEQ ID NO: 33481 - protein, 842 aa, Homo sapiens
  Payload ID: 6577
  Gene Symbol: GPR155
  Gene Name: G protein-coupled receptor 155
  ENSP ID: ENSP00000481104
MNSNLPAENLTIAVNMTKTLPTAVTHGFNSTNDPPSMSITRLFPALLECFGIVLCGYIAGRANVITSTQAKGLGNFVSRFALPALLFKNMVVLNFSNVDWSFLYSILIAKASVFFIVCVLTLLVASPDSRFSKAGLFPIFATQSNDFALGYPIVEALYQTTYPEYLQYIYLVAPISLMMLNPIGFIFCEIQKWKDTQNASQNKIKIVGLGLLRVLQNPIVFMVFIGIAFNFILDRKVPVYVENFLDGLGNSFSGSALFYLGLTMVGKIKRLKKSAFVVLILLITAKLLVLPLLCREMVELLDKGDSVVNHTSLSNYAFLYGVFPVAPGVAIFATQFNMEVEIITSGMVISTFVSAPIMYVSAWLLTFPTMDPKPLAYAIQNVSFDISIVSLISLSIVCAGMMIWNFVKEKNFVGQILVFVLLYSSLYSTYLWTGLLAISLFLLKKRERVQIPVGIIIISGWGIPALLVGVLLITGKHNGDSIDSAFFYGKEQMITTAVTLFCSILIAGISLMCMNQTAQAGSYEGFDQSQSHKVVEPGNTAFEESPAPVNEPELFTSSIPETSCCSCSMGNGELHCPSIEPIANTSTSEPVIPSFEKNNHCVSRCNSQSCILAQEEEQYLQSGDQQLTRHVLLCLLLIIGLFANLSSCLWWLFNQEPGRLYVELQFFCAVFNFGQGFISFGIFGLDKHLIILPFKRRLEFLWNNKDTAENRDSPVSEEIKMTCQQFIHYHRDLCIRNIVKERRCGAKTSAGTFCGCDLVSWLIEVGLASDRGEAVIYGDRLVQGGVIQHITNEYEFRDEYLFYRFLQKSPEQSPPAINANTLQQERYKEIEHSSPPSHSPKT

SEQ ID NO: 33482 - protein, 814 aa, Homo sapiens
  Payload ID: 6578
  Gene Symbol: GPR156
  Gene Name: G protein-coupled receptor 156
  Uniprot ID: Q8NFN8
  ENSP ID: ENSP00000324553
MEPEINCSELCDSFPGQELDRRPLHDLCKTTITSSHHSSKTISSLSPVLLGIVWTFLSCGLLLILFFLAFTIHCRKNRIVKMSSPNLNIVTLLGSCLTYSSAYLFGIQDVLVGSSMETLIQTRLSMLCIGTSLVFGPILGKSWRLYKVFTQRVPDKRVIIKDLQLLGLVAALLMADVILLMTWVLTDPIQCLQILSVSMTVTGKDVSCTSTSTHFCASRYSDVWIALIWGCKGLLLLYGAYLAGLTGHVSSPPVNQSLTIMVGVNLLVLAAGLLFVVTRYLHSWPNLVFGLTSGGIFVCTTTINCFIFIPQLKQWKAFEEENQTIRRMAKYFSTPNKSFHTQYGEEENCHPRGEKSSMERLLTEKNAVIESLQEQVNNAKEKIVRLMSAECTYDLPEGAAPPASSPNKDVQAVASVHTLAAAQGPSGHLSDFQNDPGMAARDSQCTSGPSSYAQSLEGPGKDSSFSPGKEEKISDSKDFSDHLDSGCSQKPWTEQSLGPERGDQVPMNPSQSLLPERGGSDPQRQRHLENSEEPPERRSRVSSVIREKLQEVLQDLGLGPEASLSTAPSCHQQTWKNSAAFSPQKMPLSKELGFSPYMVRRRRAAQRARSHFPGSAPSSVGHRANRTVPGAHSRLHVQNGDSPSLAPQTTDSRVRRPSSRKPSLPSDPQDRPGTLEGSKQSQTEPEGARGSKAAFLRQPSGSGRAPSPAAPCLSKASPDLPEQWQLWPPVPSGCASLSSQHSYFDTESSSSDEFFCRCHRPYCEICFQSSSDSSDSGTSDTDPEPTGGLASWEKLWARSKPIVNFKDDLKPTLV

SEQ ID NO: 33483 - protein, 78 aa, Homo sapiens
  Payload ID: 6578
  Gene Symbol: GPR156
  Gene Name: G protein-coupled receptor 156
  ENSP ID: ENSP00000417191
MEPEINCSELCDSFPGQELDRRPLHDLCKTTITSSHHSSKTISSLSPVLLGIVWTFLSCGLLLILFFLAFTIHCRKNS

SEQ ID NO: 33484 - protein, 814 aa, Homo sapiens; identical to SEQ ID NO: 33482
  Payload ID: 6578
  Gene Symbol: GPR156
  Gene Name: G protein-coupled receptor 156
  Uniprot ID: Q8NFN8
  ENSP ID: ENSP00000417261

SEQ ID NO: 33485 - protein, 810 aa, Homo sapiens
  Payload ID: 6578
  Gene Symbol: GPR156
  Gene Name: G protein-coupled receptor 156
  Uniprot ID: Q8NFN8
  ENSP ID: ENSP00000418758
MEPEINCSELCDSFPGQELDRRPLHDLCKTTITSSHHSSKTISSLSPVLLGIVWTFLSCGLLLILFFLAFTIHCRKNRIVKMSSPNLNIVTLLGSCLTYSSAYLFGIQDVLVGSSMETLIQTRLSMLCIGTSLVFGPILGKSWRLYKVFTQRVPDKRVIIKDLQLLGLVAALLMADVILLMTWVLTDPIQCLQILSVTGKDVSCTSTSTHFCASRYSDVWIALIWGCKGLLLLYGAYLAGLTGHVSSPPVNQSLTIMVGVNLLVLAAGLLFVVTRYLHSWPNLVFGLTSGGIFVCTTTINCFIFIPQLKQWKAFEEENQTIRRMAKYFSTPNKSFHTQYGEEENCHPRGEKSSMERLLTEKNAVIESLQEQVNNAKEKIVRLMSAECTYDLPEGAAPPASSPNKDVQAVASVHTLAAAQGPSGHLSDFQNDPGMAARDSQCTSGPSSYAQSLEGPGKDSSFSPGKEEKISDSKDFSDHLDSGCSQKPWTEQSLGPERGDQVPMNPSQSLLPERGGSDPQRQRHLENSEEPPERRSRVSSVIREKLQEVLQDLGLGPEASLSTAPSCHQQTWKNSAAFSPQKMPLSKELGFSPYMVRRRRAAQRARSHFPGSAPSSVGHRANRTVPGAHSRLHVQNGDSPSLAPQTTDSRVRRPSSRKPSLPSDPQDRPGTLEGSKQSQTEPEGARGSKAAFLRQPSGSGRAPSPAAPCLSKASPDLPEQWQLWPPVPSGCASLSSQHSYFDTESSSSDEFFCRCHRPYCEICFQSSSDSSDSGTSDTDPEPTGGLASWEKLWARSKPIVNFKDDLKPTLV

SEQ ID NO: 33486 - protein, 335 aa, Homo sapiens
  Payload ID: 6579
  Gene Symbol: GPR157
  Gene Name: G protein-coupled receptor 157
  Uniprot ID: Q5UAW9
  ENSP ID: ENSP00000366628
MQPSPPPTELVPSERAVVLLSCALSALGSGLLVATHALWPDLRSRARRLLLFLSLADLLSAASYFYGVLQNFAGPSWDCVLQGALSTFANTSSFFWTVAIALYLYLSIVRAARGPRTDRLLWAFHVVSWGVPLVITVAAVALKKIGYDASDVSVGWCWIDLEAKDHVLWMLLTGKLWEMLAYVLLPLLYLLVRKHINRAHTALSEYRPILSQEHRLLRHSSMADKKLVLIPLIFIGLRVWSTVRFVLTLCGSPAVQTPVLVVLHGIGNTFQGGANCIMFVLCTRAVRTRLFSLCCCCCSSQPPTKSPAGTPKAPAPSKPGESQESQGTPGELPST

SEQ ID NO: 33487 - protein, 66 aa, Homo sapiens
  Payload ID: 6579
  Gene Symbol: GPR157
  Gene Name: G protein-coupled receptor 157
  ENSP ID: ENSP00000468362
  MOD_RES (1)..(1): Any amino acid
XWMLLTGKLWEMLAYVLLPLLYLLVRKHINRAGIGNTFQGGANCIMFVLCTRAVRTRLFSLCCCCC

SEQ ID NO: 33488 - protein, 1215 aa, Homo sapiens
  Payload ID: 6580
  Gene Symbol: GPR158
  Gene Name: G protein-coupled receptor 158
  Uniprot ID: Q5T848
  ENSP ID: ENSP00000365529
MGAMAYPLLLCLLLAQLGLGAVGASRDPQGRPDSPRERTPKGKPHAQQPGRASASDSSAPWSRSTDGTILAQKLAEEVPMDVASYLYTGDSHQLKRANCSGRYELAGLPGKWPALASAHPSLHRALDTLTHATNFLNVMLQSNKSREQNLQDDLDWYQALVWSLLEGEPSISRAAITFSTDSLSAPAPQVFLQATREESRILLQDLSSSAPHLANATLETEWFHGLRRKWRPHLHRRGPNQGPRGLGHSWRRKDGLGGDKSHFKWSPPYLECENGSYKPGWLVTLSSAIYGLQPNLVPEFRGVMKVDINLQKVDIDQCSSDGWFSGTHKCHLNNSECMPIKGLGFVLGAYECICKAGFYHPGVLPVNNFRRRGPDQHISGSTKDVSEEAYVCLPCREGCPFCADDSPCFVQEDKYLRLAIISFQALCMLLDFVSMLVVYHFRKAKSIRASGLILLETILFGSLLLYFPVVILYFEPSTFRCILLRWARLLGFATVYGTVTLKLHRVLKVFLSRTAQRIPYMTGGRVMRMLAVILLVVFWFLIGWTSSVCQNLEKQISLIGQGKTSDHLIFNMCLIDRWDYMTAVAEFLFLLWGVYLCYAVRTVPSAFHEPRYMAVAVHNELIISAIFHTIRFVLASRLQSDWMLMLYFAHTHLTVTVTIGLLLIPKFSHSSNNPRDDIATEAYEDELDMGRSGSYLNSSINSAWSEHSLDPEDIRDELKKLYAQLEIYKRKKMITNNPHLQKKRCSKKGLGRSIMRRITEIPETVSRQCSKEDKEGADHGTAKGTALIRKNPPESSGNTGKSKEETLKNRVFSLKKSHSTYDHVRDQTEESSSLPTESQEEETTENSTLESLSGKKLTQKLKEDSEAESTESVPLVCKSASAHNLSSEKKTGHPRTSMLQKSLSVIASAKEKTLGLAGKTQTAGVEERTKSQKPLPKDKETNRNHSNSDNTETKDPAPQNSNPAEEPRKPQKSGIMKQQRVNPTTANSDLNPGTTQMKDNFDIGEVCPWEVYDLTPGPVPSESKVQKHVSIVASEMEKNPTFSLKEKSHHKPKAAEVCQQSNQKRIDKAEVCLWESQGQSILEDEKLLISKTPVLPERAKEENGGQPRAANVCAGQSEELPPKAVASKTENENLNQIGHQEKKTSSSEENVRGSYNSSNNFQQPLTSRAEVCPWEFETPAQPNAGRSVALPASSALSANKIAGPRKEEIWDSFKV

SEQ ID NO: 33489 - protein, 338 aa, Homo sapiens
  Payload ID: 6581
  Gene Symbol: GPR160
  Gene Name: G protein-coupled receptor 160
  Uniprot ID: Q9UJ42
  ENSP ID: ENSP00000348161
MTALSSENCSFQYQLRQTNQPLDVNYLLFLIILGKILLNILTLGMRRKNTCQNFMEYFCISLAFVDLLLLVNISIILYFRDFVLLSIRFTKYHICLFTQIISFTYGFLHYPVFLTACIDYCLNFSKTTKLSFKCQKLFYFFTVILIWISVLAYVLGDPAIYQSLKAQNAYSRHCPFYVSIQSYWLSFFMVMILFVAFITCWEEVTTLVQAIRITSYMNETILYFPFSSHSSYTVRSKKIFLSKLIVCFLSTWLPFVLLQVIIVLLKVQIPAYIEMNIPWLYFVNSFLIATVYWFNCHKLNLKDIGLPLDPFVNWKCCFIPLTIPNLEQIEKPISIMIC

SEQ ID NO: 33490 - protein, 33 aa, Homo sapiens
  Payload ID: 6581
  Gene Symbol: GPR160
  Gene Name: G protein-coupled receptor 160
  ENSP ID: ENSP00000418531
MTALSSENCSFQYQLRQTNQPLDVNYLLFLIIL

SEQ ID NO: 33491 - protein, 88 aa, Homo sapiens
  Payload ID: 6581
  Gene Symbol: GPR160
  Gene Name: G protein-coupled receptor 160
  ENSP ID: ENSP00000419400
MTALSSENCSFQYQLRQTNQPLDVNYLLFLIILGKILLNILTLGMRRKNTCQNFMEYFCISLAFVDLLLLVNISIILYFRDFVLLSIR

SEQ ID NO: 33492 - protein, 163 aa, Homo sapiens
  Payload ID: 6581
  Gene Symbol: GPR160
  Gene Name: G protein-coupled receptor 160
  ENSP ID: ENSP00000419546
MTALSSENCSFQYQLRQTNQPLDVNYLLFLIILGKILLNILTLGMRRKNTCQNFMEYFCISLAFVDLLLLVNISIILYFRDFVLLSIRFTKYHICLFTQIISFTYGFLHYPVFLTACIDYCLNFSKTTKLSFKCQKLFYFFTVILIWISVLAYVLGDPAIYQS

SEQ ID NO: 33493 - protein, 143 aa, Homo sapiens
  Payload ID: 6581
  Gene Symbol: GPR160
  Gene Name: G protein-coupled receptor 160
  ENSP ID: ENSP00000420751
MTALSSENCSFQYQLRQTNQPLDVNYLLFLIILGKILLNILTLGMRRKNTCQNFMEYFCISLAFVDLLLLVNISIILYFRDFVLLSIRFTKYHICLFTQIISFTYGFLHYPVFLTACIDYCLNFSKTTKLSFKCQKLFYFFTV

SEQ ID NO: 33494 - protein, 546 aa, Homo sapiens
  Payload ID: 6582
  Gene Symbol: GPR161
  Gene Name: G protein-coupled receptor 161
  ENSP ID: ENSP00000271357
MKVVQHALPTPRRGALTMSLNSSLSCRKELSNLTEEEGGEGGVIITQFIAIIVITIFVCLGNLVIVVTLYKKSYLLTLSNKFVFSLTLSNFLLSVLVLPFVVTSSIRREWIFGVVWCNFSALLYLLISSASMLTLGVIAIDRYYAVLYPMVYPMKITGNRAVMALVYIWLHSLIGCLPPLFGWSSVEFDEFKWMCVAAWHREPGYTAFWQIWCALFPFLVMLVCYGFIFRVARVKARKVHCGTVVIVEEDAQRTGRKNSSTSTSSSGSRRNAFQGVVYSANQCKALITILVVLGAFMVTWGPYMVVIASEALWGKSSVSPSLETWATWLSFASAVCHPLIYGLWNKTVRKELLGMCFGDRYYREPFVQRQRTSRLFSISNRITDLGLSPHLTALMAGGQPLGHSSSTGDTGFSCSQDSGTDMMLLEDYTSDDNPPSHCTCPPKRRSSVTFEDEVEQIKEAAKNSILHVKAEVHKSLDSYAASLAKAIEAEAKINLFGEEALPGVLVTARTVPGGGFGGRRGSRTLVSQRLQLQSIEEGDVLAAEQR

SEQ ID NO: 33495 - protein, 529 aa, Homo sapiens
  Payload ID: 6582
  Gene Symbol: GPR161
  Gene Name: G protein-coupled receptor 161
  Uniprot ID: Q8N6U8
  ENSP ID: ENSP00000356809
MSLNSSLSCRKELSNLTEEEGGEGGVIITQFIAIIVITIFVCLGNLVIVVTLYKKSYLLTLSNKFVFSLTLSNFLLSVLVLPFVVTSSIRREWIFGVVWCNFSALLYLLISSASMLTLGVIAIDRYYAVLYPMVYPMKITGNRAVMALVYIWLHSLIGCLPPLFGWSSVEFDEFKWMCVAAWHREPGYTAFWQIWCALFPFLVMLVCYGFIFRVARVKARKVHCGTVVIVEEDAQRTGRKNSSTSTSSSGSRRNAFQGVVYSANQCKALITILVVLGAFMVTWGPYMVVIASEALWGKSSVSPSLETWATWLSFASAVCHPLIYGLWNKTVRKELLGMCFGDRYYREPFVQRQRTSRLFSISNRITDLGLSPHLTALMAGGQPLGHSSSTGDTGFSCSQDSGTDMMLLEDYTSDDNPPSHCTCPPKRRSSVTFEDEVEQIKEAAKNSILHVKAEVHKSLDSYAASLAKAIEAEAKINLFGEEALPGVLVTARTVPGGGFGGRRGSRTLVSQRLQLQSIEEGDVLAAEQR

SEQ ID NO: 33496 - protein, 397 aa, Homo sapiens
  Payload ID: 6582
  Gene Symbol: GPR161
  Gene Name: G protein-coupled receptor 161
  Uniprot ID: Q8N6U8
  ENSP ID: ENSP00000356810
MVYPMKITGNRAVMALVYIWLHSLIGCLPPLFGWSSVEFDEFKWMCVAAWHREPGYTAFWQIWCALFPFLVMLVCYGFIFRVARVKARKVHCGTVVIVEEDAQRTGRKNSSTSTSSSGSRRNAFQGVVYSANQCKALITILVVLGAFMVTWGPYMVVIASEALWGKSSVSPSLETWATWLSFASAVCHPLIYGLWNKTVRKELLGMCFGDRYYREPFVQRQRTSRLFSISNRITDLGLSPHLTALMAGGQPLGHSSSTGDTGFSCSQDSGTDMMLLEDYTSDDNPPSHCTCPPKRRSSVTFEDEVEQIKEAAKNSILHVKAEVHKSLDSYAASLAKAIEAEAKINLFGEEALPGVLVTARTVPGGGFGGRRGSRTLVSQRLQLQSIEEGDVLAAEQR

SEQ ID NO: 33497 - protein, 529 aa, Homo sapiens; identical to SEQ ID NO: 33495
  Payload ID: 6582
  Gene Symbol: GPR161
  Gene Name: G protein-coupled receptor 161
  Uniprot ID: Q8N6U8
  ENSP ID: ENSP00000356812

SEQ ID NO: 33498 - protein, 451 aa, Homo sapiens
  Payload ID: 6582
  Gene Symbol: GPR161
  Gene Name: G protein-coupled receptor 161
  Uniprot ID: Q8N6U8
  ENSP ID: ENSP00000437576
MGGRRCVPGTLPMRAAPPGAKRLHVPLRAKGVGRSGHAPRLESVRTSYYAVLYPMVYPMKITGNRAVMALVYIWLHSLIGCLPPLFGWSSVEFDEFKWMCVAAWHREPGYTAFWQIWCALFPFLVMLVCYGFIFRVARVKARKVHCGTVVIVEEDAQRTGRKNSSTSTSSSGSRRNAFQGVVYSANQCKALITILVVLGAFMVTWGPYMVVIASEALWGKSSVSPSLETWATWLSFASAVCHPLIYGLWNKTVRKELLGMCFGDRYYREPFVQRQRTSRLFSISNRITDLGLSPHLTALMAGGQPLGHSSSTGDTGFSCSQDSGTDMMLLEDYTSDDNPPSHCTCPPKRRSSVTFEDEVEQIKEAAKNSILHVKAEVHKSLDSYAASLAKAIEAEAKINLFGEEALPGVLVTARTVPGGGFGGRRGSRTLVSQRLQLQSIEEGDVLAAEQR

SEQ ID NO: 33499 - protein, 549 aa, Homo sapiens
  Payload ID: 6582
  Gene Symbol: GPR161
  Gene Name: G protein-coupled receptor 161
  Uniprot ID: Q8N6U8
  ENSP ID: ENSP00000441039
MSARGVVQHALPTPRRGALTMSLNSSLSCRKELSNLTEEEGGEGGVIITQFIAIIVITIFVCLGNLVIVVTLYKKSYLLTLSNKFVFSLTLSNFLLSVLVLPFVVTSSIRREWIFGVVWCNFSALLYLLISSASMLTLGVIAIDRYYAVLYPMVYPMKITGNRAVMALVYIWLHSLIGCLPPLFGWSSVEFDEFKWMCVAAWHREPGYTAFWQIWCALFPFLVMLVCYGFIFRVARVKARKVHCGTVVIVEEDAQRTGRKNSSTSTSSSGSRRNAFQGVVYSANQCKALITILVVLGAFMVTWGPYMVVIASEALWGKSSVSPSLETWATWLSFASAVCHPLIYGLWNKTVRKELLGMCFGDRYYREPFVQRQRTSRLFSISNRITDLGLSPHLTALMAGGQPLGHSSSTGDTGFSCSQDSGTDMMLLEDYTSDDNPPSHCTCPPKRRSSVTFEDEVEQIKEAAKNSILHVKAEVHKSLDSYAASLAKAIEAEAKINLFGEEALPGVLVTARTVPGGGFGGRRGSRTLVSQRLQLQSIEEGDVLAAEQR

SEQ ID NO: 33500 - protein, 415 aa, Homo sapiens
  Payload ID: 6582
  Gene Symbol: GPR161
  Gene Name: G protein-coupled receptor 161
  Uniprot ID: Q8N6U8
  ENSP ID: ENSP00000444348
MLVPVGWMNESYYAVLYPMVYPMKITGNRAVMALVYIWLHSLIGCLPPLFGWSSVEFDEFKWMCVAAWHREPGYTAFWQIWCALFPFLVMLVCYGFIFRVARVKARKVHCGTVVIVEEDAQRTGRKNSSTSTSSSGSRRNAFQGVVYSANQCKALITILVVLGAFMVTWGPYMVVIASEALWGKSSVSPSLETWATWLSFASAVCHPLIYGLWNKTVRKELLGMCFGDRYYREPFVQRQRTSRLFSISNRITDLGLSPHLTALMAGGQPLGHSSSTGDTGFSCSQDSGTDMMLLEDYTSDDNPPSHCTCPPKRRSSVTFEDEVEQIKEAAKNSILHVKAEVHKSLDSYAASLAKAIEAEAKINLFGEEALPGVLVTARTVPGGGFGGRRGSRTLVSQRLQLQSIEEGDVLAAEQR

SEQ ID NO: 33501 - protein, 588 aa, Homo sapiens
  Payload ID: 6583
  Gene Symbol: GPR162
  Gene Name: G protein-coupled receptor 162
  Uniprot ID: Q16538
  ENSP ID: ENSP00000311528
MARGGAGAEEASLRSNALSWLACGLLALLANAWIILSISAKQQKHKPLELLLCFLAGTHILMAAVPLTTFAVVQLRRQASSDYDWNESICKVFVSTYYTLALATCFTVASLSYHRMWMVRWPVNYRLSNAKKQALHAVMGIWMVSFILSTLPSIGWHNNGERYYARGCQFIVSKIGLGFGVCFSLLLLGGIVMGLVCVAITFYQTLWARPRRARQARRVGGGGGTKAGGPGALGTRPAFEVPAIVVEDARGKRRSSLDGSESAKTSLQVTNLVSAIVFLYDSLTGVPILVVSFFSLKSDSAPPWMVLAVLWCSMAQTLLLPSFIWSCERYRADVRTVWEQCVAIMSEEDGDDDGGCDDYAEGRVCKVRFDANGATGPGSRDPAQVKLLPGRHMLFPPLERVHYLQVPLSRRLSHDETNIFSTPREPGSFLHKWSSSDDIRVLPAQSRALGGPPEYLGQRHRLEDEEDEEEAEGGGLASLRQFLESGVLGSGGGPPRGPGFFREEITTFIDETPLPSPTASPGHSPRRPRPLGLSPRRLSLGSPESRAVGLPLGLSAGRRCSLTGGEESARAWGGSWGPGNPIFPQLTL

SEQ ID NO: 33502 - protein, 284 aa, Homo sapiens
  Payload ID: 6583
  Gene Symbol: GPR162
  Gene Name: G protein-coupled receptor 162
  ENSP ID: ENSP00000371752
MVLAVLWCSMAQTLLLPSFIWSCERYRADVRTVWEQCVAIMSEEDGDDDGGCDDYAEGRVCKVRFDANGATGPGSRDPAQVKLLPGRHMLFPPLERVHYLQVPLSRRLSHDETNIFSTPREPGSFLHKWSSSDDIRVLPAQSRALGGPPEYLGQRHRLEDEEDEEEAEGGGLASLRQFLESGVLGSGGGPPRGPGFFREEITTFIDETPLPSPTASPGHSPRRPRPLGLSPRRLSLGSPESRAVGLPLGLSAGRRCSLTGGEESARAWGGSWGPGNPIFPQLTL

SEQ ID NO: 33503 - protein, 304 aa, Homo sapiens
  Payload ID: 6583
  Gene Symbol: GPR162
  Gene Name: G protein-coupled receptor 162
  Uniprot ID: Q16538
  ENSP ID: ENSP00000399670
MLSTGVVSFFSLKSDSAPPWMVLAVLWCSMAQTLLLPSFIWSCERYRADVRTVWEQCVAIMSEEDGDDDGGCDDYAEGRVCKVRFDANGATGPGSRDPAQVKLLPGRHMLFPPLERVHYLQVPLSRRLSHDETNIFSTPREPGSFLHKWSSSDDIRVLPAQSRALGGPPEYLGQRHRLEDEEDEEEAEGGGLASLRQFLESGVLGSGGGPPRGPGFFREEITTFIDETPLPSPTASPGHSPRRPRPLGLSPRRLSLGSPESRAVGLPLGLSAGRRCSLTGGEESARAWGGSWGPGNPIFPQLTL

SEQ ID NO: 33504 - protein, 228 aa, Homo sapiens
  Payload ID: 6583
  Gene Symbol: GPR162
  Gene Name: G protein-coupled receptor 162
  ENSP ID: ENSP00000475912
  MOD_RES (1)..(1): Any amino acid
XITFYQTLWARPRRARQARRVGGGGGTKAGGPGALGTRPAFEVPAIVVEDARGKRRSSLDGSESAKTSLQVTNLVVSFFSLKSDSAPPWMVLAVLWCSMAQTLLLPSFIWSCERYRADVRTVWEQCVAIMSEEDGDDDGGCDDYAEGRVCKVRFDANGATGPGSRDPAQVKLLPGRHMLFPPLERVHYLQLKKLDLAAAAAHTFFVANPMHLQMREDMAKYRRMSGVR

SEQ ID NO: 33505 - protein, 367 aa, Homo sapiens
  Payload ID: 6584
  Gene Symbol: GPR17
  Gene Name: G protein-coupled receptor 17
  Uniprot ID: Q13304
  ENSP ID: ENSP00000272644
MSKRSWWAGSRKPPREMLKLSGSDSSQSMNGLEVAPPGLITNFSLATAEQCGQETPLENMLFASFYLLDFILALVGNTLALWLFIRDHKSGTPANVFLMHLAVADLSCVLVLPTRLVYHFSGNHWPFGEIACRLTGFLFYLNMYASIYFLTCISADRFLAIVHPVKSLKLRRPLYAHLACAFLWVVVAVAMAPLLVSPQTVQTNHTVVCLQLYREKASHHALVSLAVAFTFPFITTVTCYLLIIRSLRQGLRVEKRLKTKAVRMIAIVLAIFLVCFVPYHVNRSVYVLHYRSHGASCATQRILALANRITSCLTSLNGALDPIMYFFVAEKFRHALCNLLCGKRLKGPPPSFEGKTNESSLSAKSEL

SEQ ID NO: 33506 - protein, 367 aa, Homo sapiens; identical to SEQ ID NO: 33505
  Payload ID: 6584
  Gene Symbol: GPR17
  Gene Name: G protein-coupled receptor 17
  Uniprot ID: Q13304
  ENSP ID: ENSP00000376741

SEQ ID NO: 33507 - protein, 136 aa, Homo sapiens
  Payload ID: 6584
  Gene Symbol: GPR17
  Gene Name: G protein-coupled receptor 17
  ENSP ID: ENSP00000387970
MSKRSWWAGSRKPPREMLKLSGSDSSQSMNGLEVAPPGLITNFSLATAEQCGQETPLENMLFASFYLLDFILALVGNTLALWLFIRDHKSGTPANVFLMHLAVADLSCVLVLPTRLVYHFSGNHWPFGEIACRLTG

SEQ ID NO: 33508 - protein, 367 aa, Homo sapiens; identical to SEQ ID NO: 33505
  Payload ID: 6584
  Gene Symbol: GPR17
  Gene Name: G protein-coupled receptor 17
  Uniprot ID: Q13304
  ENSP ID: ENSP00000442982

SEQ ID NO: 33509 - protein, 319 aa, Homo sapiens
  Payload ID: 6585
  Gene Symbol: GPR171
  Gene Name: G protein-coupled receptor 171
  Uniprot ID: O14626
  ENSP ID: ENSP00000308479
MTNSSFFCPVYKDLEPFTYFFYLVFLVGIIGSCFATWAFIQKNTNHRCVSIYLINLLTADFLLTLALPVKIVVDLGVAPWKLKIFHCQVTACLIYINMYLSIIFLAFVSIDRCLQLTHSCKIYRIQEPGFAKMISTVVWLMVLLIMVPNMMIPIKDIKEKSNVGCMEFKKEFGRNWHLLTNFICVAIFLNFSAIILISNCLVIRQLYRNKDNENYPNVKKALINILLVTTGYIICFVPYHIVRIPYTLSQTEVITDCSTRISLFKAKEATLLLAVSNLCFDPILYYHLSKAFRSKVTETFASPKETKAQKEKLRCENNA

SEQ ID NO: 33510 - protein, 18 aa, Homo sapiens
  Payload ID: 6585
  Gene Symbol: GPR171
  Gene Name: G protein-coupled receptor 171
  ENSP ID: ENSP00000420109
MTNSSFFCPVYKDLEPFT

SEQ ID NO: 33511 - protein, 319 aa, Homo sapiens; identical to SEQ ID NO: 33509
  Payload ID: 6585
  Gene Symbol: GPR171
  Gene Name: G protein-coupled receptor 171
  Uniprot ID: O14626
  ENSP ID: ENSP00000482588

SEQ ID NO: 33512 - protein, 373 aa, Homo sapiens
  Payload ID: 6586
  Gene Symbol: GPR173
  Gene Name: G protein-coupled receptor 173
  Uniprot ID: Q9NS66
  ENSP ID: ENSP00000331600
MANTTGEPEEVSGALSPPSASAYVKLVLLGLIMCVSLAGNAILSLLVLKERALHKAPYYFLLDLCLADGIRSAVCFPFVLASVRHGSSWTFSALSCKIVAFMAVLFCFHAAFMLFCISVTRYMAIAHHRFYAKRMTLWTCAAVICMAWTLSVAMAFPPVFDVGTYKFIREEDQCIFEHRYFKANDTLGFMLMLAVLMAATHAVYGKLLLFEYRHRKMKPVQMVPAISQNWTFHGPGATGQAAANWIAGFGRGPMPPTLLGIRQNGHAASRRLLGMDEVKGEKQLGRMFYAITLLFLLLWSPYIVACYWRVFVKACAVPHRYLATAVWMSFAQAAVNPIVCFLLNKDLKKCLRTHAPCWGTGGAPAPREPYCVM

SEQ ID NO: 33513 - protein, 52 aa, Homo sapiens
  Payload ID: 6586
  Gene Symbol: GPR173
  Gene Name: G protein-coupled receptor 173
  ENSP ID: ENSP00000364615
MANTTGEPEEVSGALSPPSASAYVKLVLLGLIMCVSLAGNAILSLLVLKERA

SEQ ID NO: 33514 - protein, 333 aa, Homo sapiens
  Payload ID: 6587
  Gene Symbol: GPR174
  Gene Name: G protein-coupled receptor 174
  Uniprot ID: Q9BXC1
  ENSP ID: ENSP00000276077
MPANYTCTRPDGDNTDFRYFIYAVTYTVILVPGLIGNILALWVFYGYMKETKRAVIFMINLAIADLLQVLSLPLRIFYYLNHDWPFGPGLCMFCFYLKYVNMYASIYFLVCISVRRFWFLMYPFRFHDCKQKYDLYISIAGWLIICLACVLFPLLRTSDDTSGNRTKCFVDLPTRNVNLAQSVVMMTIGELIGFVTPLLIVLYCTWKTVLSLQDKYPMAQDLGEKQKALKMILTCAGVFLICFAPYHFSFPLDFLVKSNEIKSCLARRVILIFHSVALCLASLNSCLDPVIYYFSTNEFRRRLSRQDLHDSIQLHAKSFVSNHTASTMTPELC

SEQ ID NO: 33515 - protein, 514 aa, Homo sapiens
  Payload ID: 6588
  Gene Symbol: GPR176
  Gene Name: G protein-coupled receptor 176
  ENSP ID: ENSP00000299092
MGHNGSWISPNASEPHNASGAEAAGVNRSALGEFGEAQLYRQFTTTVQVVIFIGSLLEFGNMEVTRKLDKSRLPGIKFIKNLACSGICASLVCVPFDIILSTSPHCCWWIYTMLFCKVVKFLHKVFCSVTILSFPAIALDRYYSVLYPLERKISDAKSRELVMYIWAHAVVASVPVFAVTNVADIYATSTCTEVWSNSLGHLVYVLVYNITTVIVPVVVVFLFLILIRRALSASQKKKVIIAALRTPQNTISIPYASQREAELHATLLSMVMVFILCSVPYATLVVYQTVLNVPDTSVFLLLTAVWLPKVSLLANPVLFLTVNKSVRKCLIGTLVQLHHRYSRRNVVSTGSGMAEASLEPSIRSGSQLLEMFHIGQQQIFKPTEDEEESEAKYIGSADFQAKEIFSTCLEGEQGPQFAPSAPPLSTVDSVSQVAPAAPVEPETFPDKYSLQFGFGPFELPPQWLSETRNSKKRLLPPLGNTPEELIQTKVPKVGRVERKMSRNNKVSIFPKVDS

SEQ ID NO: 33516 - protein, 470 aa, Homo sapiens
  Payload ID: 6588
  Gene Symbol: GPR176
  Gene Name: G protein-coupled receptor 176
  ENSP ID: ENSP00000439361
MPAPLLLISRTLGNFMVLWSTCRTTVFKSVTNRFIKNLACSGICASLVCVPFDIILSTSPHCCWWIYTMLFCKVVKFLHKVFCSVTILSFPAIALDRYYSVLYPLERKISDAKSRELVMYIWAHAVVASVPVFAVTNVADIYATSTCTEVWSNSLGHLVYVLVYNITTVIVPVVVVFLFLILIRRALSASQKKKVIIAALRTPQNTISIPYASQREAELHATLLSMVMVFILCSVPYATLVVYQTVLNVPDTSVFLLLTAVWLPKVSLLANPVLFLTVNKSVRKCLIGTLVQLHHRYSRRNVVSTGSGMAEASLEPSIRSGSQLLEMFHIGQQQIFKPTEDEEESEAKYIGSADFQAKEIFSTCLEGEQGPQFAPSAPPLSTVDSVSQVAPAAPVEPETFPDKYSLQFGFGPFELPPQWLSETRNSKKRLLPPLGNTPEELIQTKVPKVGRVERKMSRNNKVSIFPKVDS

SEQ ID NO: 33517 - protein, 515 aa, Homo sapiens
  Payload ID: 6588
  Gene Symbol: GPR176
  Gene Name: G protein-coupled receptor 176
  Uniprot ID: Q14439
  ENSP ID: ENSP00000453076
MGHNGSWISPNASEPHNASGAEAAGVNRSALGEFGEAQLYRQFTTTVQVVIFIGSLLGNFMVLWSTCRTTVFKSVTNRFIKNLACSGICASLVCVPFDIILSTSPHCCWWIYTMLFCKVVKFLHKVFCSVTILSFPAIALDRYYSVLYPLERKISDAKSRELVMYIWAHAVVASVPVFAVTNVADIYATSTCTEVWSNSLGHLVYVLVYNITTVIVPVVVVFLFLILIRRALSASQKKKVIIAALRTPQNTISIPYASQREAELHATLLSMVMVFILCSVPYATLVVYQTVLNVPDTSVFLLLTAVWLPKVSLLANPVLFLTVNKSVRKCLIGTLVQLHHRYSRRNVVSTGSGMAEASLEPSIRSGSQLLEMFHIGQQQIFKPTEDEEESEAKYIGSADFQAKEIFSTCLEGEQGPQFAPSAPPLSTVDSVSQVAPAAPVEPETFPDKYSLQFGFGPFELPPQWLSETRNSKKRLLPPLGNTPEELIQTKVPKVGRVERKMSRNNKVSIFPKVDS

SEQ ID NO: 33518 - protein, 2368 aa, Homo sapiens [sequence omitted]

SEQ ID NO: 33519 - protein, 2367 aa, Homo sapiens
  Payload ID: 6589
  Gene Symbol: GPR179
  Gene Name: G protein-coupled receptor 179
  ENSP ID: ENSP00000483469
MGTRGAVMPPPMWGLLGCCFVCAWALGGPRPIRSLPPLSSQVKPGSVPMQVPLEGAEAALAYLYSGDAQQLSQVNCSERYEARGAGAMPGLPPSLQGAAGTLAQAANFLNMLLQANDIRESSVEEDVEWYQALVRSVAEGDPRVYRALLTFNPPPGASHLQLALQATRTGEETILQDLSGNWVQEENPPGDLDTPALKKRVLTNDLGSLGSPKWPQADGYVGDTQQVRLSPPFLECQEGRLRPGWLITLSATFYGLKPDLSPEVRGQVQMDVDLQSVDINQCASGPGWYSNTHLCDLNSTQCVPLESQGFVLGRYLCRCRPGFYGASPSGGLEESDFQTTGQFGFPEGRSGRLLQCLPCPEGCTSCMDATPCLVEEAAVLRAAVLACQACCMLAIFLSMLVSYRCRRNKRIWASGVVLLETVLFGFLLLYFPVFILYFKPSVFRCIALRWVRLLGFAIVYGTIILKLYRVLQLFLSRTAQRSALLSSGRLLRHLGLLLLPVLGFLAVWTVGALERGIQHAPLVIRGHTPSGRHFYLCHHDRWDYIMVVAELLLLCWGSFLCYATRAVLSAFHEPRYMGIALHNELLLSAAFHTARFVLVPSLHPDWTLLLFFFHTHSTVTTTLALIFIPKFWKLGAPPREEMVDEVCEDELDLQHSGSYLGSSIASAWSEHSLDPGDIRDELKKLYAQLEVHKTKEMAANNPHLPKKRGSSCQGLGRSFMRYLAEFPEALARQHSRDSGSPGHGSLPGSSRRRLLSSSLQEPEGTPALHKSRSTYDQRREQDPPLLDSLLRRKLAKKASRTESRESVEGPPALGFRSASAHNLTVGERLPRARPASLQKSLSVASSREKALLMASQAYLEETYRQAKEREERKKAKAAMASLVRRPSARRLERPRGAPLSAPPSPAKSSSVDSSHTSGRLHEEARRRLPHPPIRHQVSTPILALSGGLGEPRMLSPTSTLAPALLPALAPTPAPALAPVPVSPQSPNLLTYICPWENAELPAKQENVPQEGPSGPERGHHSPAPARARLWRALSVAVEKSRAGENEMDAEDAHHQREANDVDEDRPKIFPKSHSLKAPVQQGSMRSLGLAIKALTRSRSTYREKESVEESPEGQNSGTAGESMGAPSRSPRLGRPKAVSKQAALIPSDDKESLQNQQNAHTSRMLQVCQREGSREQEDRGRRMTQGLGERKAERAGKTGLAMLRQVSRDKNIKQSKETPVGWQELPKAGLQSLGSADHRVAEVCPWEVTESETRQPDSGNKAEICPWETSEGAPESRALRQDPGDSQKKRGEARGKSEPIDVVPMMRKKPERLVREQEAVCPWESADRGGLSPGSAPQDPGRIRDKSEAGDSVEARKVEKPGWEAAGPEAHTPDITKAEPCPWEASEGGEDGKPAQEAVKDLPQEKQKTRKATFWKEQKPGGDLESLCPWESTDFRGPSAVSIQAPGSSECSGSLGSGIAEVCLWEAGDAPAIQKAEICPWELDDNVMGQEMLSLGTGRESLQEKEKASRKGSFGEMGEQTVKAVQKLSQQQESVCPRESTVPGHSSPCLDNSSSKAGSQFLCNGGSRATQVCPQEDLRPEAQEATPAKTEICPWEVNERTREEWTSAQVPRGGESQKDKEKMPGKSEIEDVTAWEKPEGQIQKQEAVGPWESVDPGSFSPQPRPQDTERPQTLLQMSGSVGSKAADICPLDVEENLTAGKAEICPWEVGAGAGEERALGAEAIRKSPNDTGKVSADLGPRERAVTAPEKPQKPTPEWEVACPWGSVGPGACSQHPGTLDADGPKAGFQELDHMGCRPGEVCPWEAQEAATSEKAKICPWEVSEGTTGKGLDQKAGSESAEQREKALEKGRLTSLGEDVSKGMAKLCQQQETICIWENKDLRESPAQAPKISDLPSSMSSEVAEGHSLEATEKGDLRQDPKTGSFPEHITQEKAPAADTEEFTTEDGEKTSHELQSVCPWETTAPADSVSHLDRQRPDQPKASSQRLVSTGGRAADVCPWDVPDAGVYKSDSSAKAETCPWEVTERIPVKGVSRQDGKGDSQEEKGRAPEKSEPKGVPVQKKPEMADFRQQEAVCPWESQDGKGLSPQPAPDASDRSRGSSEAAGSVETRVAEVCLWEVVEAPSAKKAEICPWEAGGGAAEEGEQERESQGQGEMFLQKAGPGGTEEHFSKAAAKPREQEAVCPGEGTGSGGLLPQSGALDPELKVSPKEAGSMGSRMAELCQWEITDPEGNKIKGTMADICPGEETGVPSEESGLLALTATRREFFPTAPEKPLCLLVHGPLDHFFPESKIPCPKVSRPASTFTLEGVRELQGPSGLEPRTSLAPEPSLQEAESQSSSLTEDSGQVAFEAQYEEFTPPTVYPWDWE

SEQ ID NO: 33520 - protein, 2367 aa, Homo sapiens
  Payload ID: 6589
  Gene Symbol: GPR179
  Gene Name: G protein-coupled receptor 179
  Uniprot ID: Q6PRD1
  ENSP ID: ENSP00000484951
MGTRGAVMPPPMWGLLGCCFVCAWALGGPRPIRSLPPLSSQVKPGSVPMQVPLEGAEAALAYLYSGDAQQLSQVNCSERYEARGAGAMPGLPPSLQGAAGTLAQAANFLNMLLQANDIRESSVEEDVEWYQALVRSVAEGDPRVYRALLTFNPPPGASHLQLALQATRTGEETILQDLSGNWVQEENPPGDLDTPALKKRVLTNDLGSLGSPKWPQADGYVGDTQQVRLSPPFLECQEGRLRPGWLITLSATFYGLKPDLSPEVRGQVQMDVDLQSVDINQCASGPGWYSNTHLCDLNSTQCVPLESQGFVLGRYLCRCRPGFYGASPSGGLEESDFQTTGQFGFPEGRSGRLLQCLPCPEGCTSCMDATPCLVEEAAVLRAAVLACQACCMLAIFLSMLVSYRCRRNKRIWASGVVLLETVLFGFLLLYFPVFILYFKPSVFRCIALRWVRLLGFAIVYGTIILKLYRVLQLFLSRTAQRSALLSSGRLLRRLGLLLLPVLGFLAVWTVGALERGIQHAPLVIRGHTPSGRHFYLCHHDRWDYIMVVAELLLLCWGSFLCYATRAVLSAFHEPRYMGIALHNELLLSAAFHTARFVLVPSLHPDWTLLLFFFHTHSTVTTTLALIFIPKFWKLGAPPREEMVDEVCEDELDLQHSGSYLGSSIASAWSEHSLDPGDIRDELKKLYAQLEVHKTKEMAANNPHLPKKRGSSCQGLGRSFMRYLAEFPEALARQHSRDSGSPGHGSLPGSSRRRLLSSSLQEPEGTPALHKSRSTYDQRREQDPPLLDSLLRRKLAKKASRTESRESVEGPPALGFRSASAHNLTVGERLPRARPASLQKSLSVASSREKALLMASQAYLEETYRQAKEREERKKAKAAMASLVRRPSARRLERPRGAPLSAPPSPAKSSSVDSSHTSGRLHEEARRRLPHPPIRHQVSTPILALSGGLGEPRMLSPTSTLAPALLPALAPTPAPALAPVPVSPQSPNLLTYICPWENAELPAKQENVPQEGPSGPERGHHSPAPARARLWRALSVAVEKSRAGENEMDAEDAHHQREANDVDEDRPKIFPKSHSLKAPVQQGSMRSLGLAIKALTRSRSTYREKESVEESPEGQNSGTAGESMGAPSRSPRLGRPKAVSKQAALIPSDDKESLQNQQNAHTSRMLQVCQREGSREQEDRGRRMTQGLGERKAERAGKTGLAMLRQVSRDKNIKQSKETPVGWQELPKAGLQSLGSADHRVAEVCPWEVTESETRQPDSGNKAEICPWETSEGAPESRALRQDPGDSQKKRGEARGKSEPIDVVPMMRKKPERLVREQEAVCPWESADRGGLSPGSAPQDPGRIRDKSEAGDSVEARKVEKPGWEAAGPEAHTPDITKAEPCPWEASEGGEDGKPAQEAVKDLPQEKQKTRKATFWKEQKPGGDLESLCPWESTDFRGPSAVSIQAPGSSECSGSLGSGIAEVCLWEAGDAPAIQKAEICPWELDDNVMGQEMLSLGTGRESLQEKEKASRKGSFGEMGEQTVKAVQKLSQQQESVCPRESTVPGHSSPCLDNSSSKAGSQFLCNGGSRATQVCPQEDLRPEAQEATPAKTEICPWEVNERTREEWTSAQVPRGGESQKDKEKMPGKSEIEDVTAWEKPEGQIQKQEAVGPWESVDPGSFSPQPRPQDTERPQTLLQMSGSVGSKAADICPLDVEENLTAGKAEICPWEVGAGAGEERALGAEAIRKSPNDTGKVSADLGPRERAVTAPEKPQKPTPEWEVACPWGSVGPGACSQHPGTLDADGPKAGFQELDHMGCRPGEVCPWEAQEAATSEKAKICPWEVSEGTTGKGLDQKAGSESAEQREKALEKGRLTSLGEDVSKGMAKLCQQQETICIWENKDLRESPAQAPKISDLPSSMSSEVAEGHSLEATEKGDLRQDPKTGSFPEHITQEKAPAADTEEFTTEDGEKTSHELQSVCPWETTAPADSVSHLDRQRPDQPKASSQRLVSTGGRAADVCPWDVPDAGVYKSDSSAKAETCPWEVTERIPVKGVSRQDGKGDSQEEKGRAPEKSEPKGVPVQKKPEMADFRQQEAVCPWESQDGKGLSPQPAPDASDRSRGSSEAAGSVETRVAEVCLWEVVEAPSAKKAEICPWEAGGGAAEEGEQERESQGQGEMFLQKAGPGGTEEHFSKAAAKPREQEAVCPGEGTGSGGLLPQSGALDPELKVSPKEAGSMGSRMAELCQWEITDPEGNKIKGTMADICPGEETGVPSEESGLLALTATRREFFPTAPEKPLCLLVHGPLDHFFPESKIPCPKVSRPASTFTLEGVRELQGPSGLEPRTSLAPEPSLQEAESQSSSLTEDSGQVAFEAQYEEFTPPTVYPWDWE

SEQ ID NO: 33521 - protein, 331 aa, Homo sapiens
  Payload ID: 6590
  Gene Symbol: GPR18
  Gene Name: G protein-coupled receptor 18
  Uniprot ID: Q14330
  ENSP ID: ENSP00000343428
MITLNNQDQPVPFNSSHPDEYKIAALVFYSCIFIIGLFVNITALWVFSCTTKKRTTVTIYMMNVALVDLIFIMTLPFRMFYYAKDEWPFGEYFCQILGALTVFYPSIALWLLAFISADRYMAIVQPKYAKELKNTCKAVLACVGVWIMTLTTTTPLLLLYKDPDKDSTPATCLKISDIIYLKAVNVLNLTRLTFFFLIPLFIMIGCYLVIIHNLLHGRTSKLKPKVKEKSIRIIITLLVQVLVCFMPFHICFAFLMLGTGENSYNPWGAFTTFLMNLSTCLDVILYYIVSKQFQARVISVMLYRNYLRSMRRKSFRSGSLRSLSNINSEML

SEQ ID NO: 33522 - protein, 331 aa, Homo sapiens; identical to SEQ ID NO: 33521
  Payload ID: 6590
  Gene Symbol: GPR18
  Gene Name: G protein-coupled receptor 18
  Uniprot ID: Q14330
  ENSP ID: ENSP00000380610

SEQ ID NO: 33523 - protein, 331 aa, Homo sapiens; identical to SEQ ID NO: 33521
  Payload ID: 6590
  Gene Symbol: GPR18
  Gene Name: G protein-coupled receptor 18
  Uniprot ID: Q14330
  ENSP ID: ENSP00000380613

SEQ ID NO: 33524 - protein, 98 aa, Homo sapiens
  Payload ID: 6590
  Gene Symbol: GPR18
  Gene Name: G protein-coupled receptor 18
  ENSP ID: ENSP00000401611
MITLNNQDQPVPFNSSHPDEYKIAALVFYSCIFIIGLFVNITALWVFSCTTKKRTTVTIYMMNVALVDLIFIMTLPFRMFYYAKDEWPFGEYFCQILG

SEQ ID NO: 33525 - protein, 440 aa, Homo sapiens
  Payload ID: 6591
  Gene Symbol: GPR180
  Gene Name: G protein-coupled receptor 180
  Uniprot ID: Q86V85
  ENSP ID: ENSP00000366157
MGGLRLLAVALTCCWWPQGSQGKTLRGSFSSTAAQDAQGQRIGHFEFHGDHALLCVRINNIAVAVGKEAKLYLFQAQEWLKLQQSSHGYSCSEKLSKAQLTMTMNQTEHNLTVSQIPSPQTWHVFYADKYTCQDDKENSQVEDIPFEMVLLNPDAEGNPFDHFSAGESGLHEFFFLLVLVYFVIACIYAQSLWQAIKKGGPMHMILKVLTTALLLQAGSALANYIHFSSYSKDGIGVPFMGSLAEFFDIASQIQMLYLLLSLCMGWTIVRMKKSQSRPLQWDSTPASTGIAVFIVMTQSVLLLWEQFEDISHHSYHSHHNLAGILLIVLRICLALSLGCGLYQIITVERSTLKREFYITFAKGCILWFLCHPVLACISVIFSDYQRDKVITIGVILCQSVSMVILYRLFLSHSLYWEVSSLSSVTLPLTISSGHKSRPHF

SEQ ID NO: 33526 - protein, 404 aa, Homo sapiens
  Payload ID: 6592
  Gene Symbol: GPR182
  Gene Name: G protein-coupled receptor 182
  Uniprot ID: O15218
  ENSP ID: ENSP00000300098
MSVKPSWGPGPSEGVTAVPTSDLGEIHNWTELLDLFNHTLSECHVELSQSTKRVVLFALYLAMFVVGLVENLLVICVNWRGSGRAGLMNLYILNMAIADLGIVLSLPVWMLEVTLDYTWLWGSFSCRFTHYFYFVNMYSSIFFLVCLSVDRYVTLTSASPSWQRYQHRVRRAMCAGIWVLSAIIPLPEVVHIQLVEGPEPMCLFMAPFETYSTWALAVALSTTILGFLLPFPLITVFNVLTACRLRQPGQPKSRRHCLLLCAYVAVFVMCWLPYHVTLLLLTLHGTHISLHCHLVHLLYFFYDVIDCFSMLHCVINPILYNFLSPHFRGRLLNAVVHYLPKDQTKAGTCASSSSCSTQHSIIITKGDSQPAAAAPHPEPSLSFQAHHLLPNTSPISPTQPLTPS

SEQ ID NO: 33527 - protein, 196 aa, Homo sapiens
  Payload ID: 6592
  Gene Symbol: GPR182
  Gene Name: G protein-coupled receptor 182
  ENSP ID: ENSP00000486086
MISEGGWGWQGWGRSQGLRPAPCSWVSRMVSPPAAIQETQLHFLADTLPSPLSILLPPHKQEELSQSQLLIADLLPASDLGNFQTSRETQSYQKAQPTPISFSPDHRKVSRDVIPGAALGTASSRCWQMLCPSPSVPGTRWGRPQWKLLNSVTGQSSDTVISQFSLAMSFPNFPVPQLRFLNTCSTDETKKSSVNK

SEQ ID NO: 33528 - protein, 55 aa, Homo sapiens
  Payload ID: 6592
  Gene Symbol: GPR182
  Gene Name: G protein-coupled receptor 182
  ENSP ID: ENSP00000487111
  MOD_RES (1)..(1): Any amino acid
XSSSSCSTQHSIIITKGDSQPAAAAPHPEPSLSFQAHHLLPNTSPISPTQPLTPS

SEQ ID NO: 33529 - protein, 361 aa, Homo sapiens [sequence omitted]

SEQ ID NO: 33530 - protein, 415 aa, Homo sapiens
  Payload ID: 6594
  Gene Symbol: GPR19
  Gene Name: G protein-coupled receptor 19
  Uniprot ID: Q15760
  ENSP ID: ENSP00000333744
MVFAHRMDNSKPHLIIPTLLVPLQNRSCTETATPLPSQYLMELSEEHSWMSNQTDLHYVLKPGEVATASIFFGILWLFSIFGNSLVCLVIHRSRRTQSTTNYFVVSMACADLLISVASTPFVLLQFTTGRWTLGSATCKVVRYFQYLTPGVQIYVLLSICIDRFYTIVYPLSFKVSREKAKKMIAASWVFDAGFVTPVLFFYGSNWDSHCNYFLPSSWEGTAYTVIHFLVGFVIPSVLIILFYQKVIKYIWRIGTDGRTVRRTMNIVPRTKVKTIKMFLILNLLFLLSWLPFHVAQLWHPHEQDYKKSSLVFTAITWISFSSSASKPTLYSIYNANFRRGMKETFCMSSMKCYRSNAYTITTSSRMAKKNYVGISEIPSMAKTITKDSIYDSFDREAKEKKLAWPINSNPPNTFV

SEQ ID NO: 33531 - protein, 415 aa, Homo sapiens; identical to SEQ ID NO: 33530
  Payload ID: 6594
  Gene Symbol: GPR19
  Gene Name: G protein-coupled receptor 19
  Uniprot ID: Q15760
  ENSP ID: ENSP00000441832

SEQ ID NO: 33532 - protein, 59 aa, Homo sapiens
  Payload ID: 6594
  Gene Symbol: GPR19
  Gene Name: G protein-coupled receptor 19
  ENSP ID: ENSP00000441963
MVFAHRMDNSKPHLIIPTLLVPLQNRSCTETATPLPSQYLMELSEEHSWMSNQTDLHYV

SEQ ID NO: 33533 - protein, 358 aa, Homo sapiens
  Payload ID: 6595
  Gene Symbol: GPR20
  Gene Name: G protein-coupled receptor 20
  Uniprot ID: Q99678
  ENSP ID: ENSP00000366970
MPSVSPAGPSAGAVPNATAVTTVRTNASGLEVPLFHLFARLDEELHGTFPGLWLALMAVHGAIFLAGLVLNGLALYVFCCRTRAKTPSVIYTINLVVTDLLVGLSLPTRFAVYYGARGCLRCAFPHVLGYFLNMHCSILFLTCICVDRYLAIVRPEGSRRCRQPACARAVCAFVWLAAGAVTLSVLGVTGSRPCCRVFALTVLEFLLPLLVISVFTGRIMCALSRPGLLHQGRQRRVRAMQLLLTVLIIFLVCFTPFHARQVAVALWPDMPHHTSLVVYHVAVTLSSLNSCMDPIVYCFVTSGFQATVRGLFGQHGEREPSSGDVVSMHRSSKGSGRHHILSAGPHALTQALANGPEA

SEQ ID NO: 33534 - protein, 358 aa, Homo sapiens; identical to SEQ ID NO: 33533
  Payload ID: 6595
  Gene Symbol: GPR20
  Gene Name: G protein-coupled receptor 20
  Uniprot ID: Q99678
  ENSP ID: ENSP00000479665

SEQ ID NO: 33535 - protein, 349 aa, Homo sapiens
  Payload ID: 6596
  Gene Symbol: GPR21
  Gene Name: G protein-coupled receptor 21
  Uniprot ID: Q99679
  ENSP ID: ENSP00000362746
MNSTLDGNQSSHPFCLLAFGYLETVNFCLLEVLIIVFLTVLIISGNIIVIFVFHCAPLLNHHTTSYFIQTMAYADLFVGVSCVVPSLSLLHHPLPVEESLTCQIFGFVVSVLKSVSMASLACISIDRYIAITKPLTYNTLVTPWRLRLCIFLIWLYSTLVFLPSFFHWGKPGYHGDVFQWCAESWHTDSYFTLFIVMMLYAPAALIVCFTYFNIFRICQQHTKDISERQARFSSQSGETGEVQACPDKRYAMVLFRITSVFYILWLPYIIYFLLESSTGHSNRFASFLTTWLAISNSFCNCVIYSLSNSVFQRGLKRLSGAMCTSCASQTTANDPYTVRSKGPLNGCHI

SEQ ID NO: 33536 - protein, 433 aa, Homo sapiens
  Payload ID: 6597
  Gene Symbol: GPR22
  Gene Name: G protein-coupled receptor 22
  Uniprot ID: Q99680
  ENSP ID: ENSP00000302676
MCFSPILEINMQSESNITVRDDIDDINTNMYQPLSYPLSFQVSLTGFLMLEIVLGLGSNLTVLVLYCMKSNLINSVSNIITMNLHVLDVIICVGCIPLTIVILLLSLESNTALICCFHEACVSFASVSTAINVFAITLDRYDISVKPANRILTMGRAVMLMISIWIFSFFSFLIPFIEVNFFSLQSGNTWENKTLLCVSTNEYYTELGMYYHLLVQIPIFFFTVVVMLITYTKILQALNIRIGTRFSTGQKKKARKKKTISLTTQHEATDMSQSSGGRNVVFGVRTSVSVIIALRRAVKRHRERRERQKRVFRMSLLIISTFLLCWTPISVLNTTILCLGPSDLLVKLRLCFLVMAYGTTIFHPLLYAFTRQKFQKVLKSKMKKRVVSIVEADPLPNNAVIHNSWIDPKRNKKITFEDSEIREKCLVPQVVTD

SEQ ID NO: 33537 - protein, 361 aa, Homo sapiens
  Payload ID: 6598
  Gene Symbol: GPR25
  Gene Name: G protein-coupled receptor 25
  Uniprot ID: O00155
  ENSP ID: ENSP00000301917
MAPTEPWSPSPGSAPWDYSGLDGLEELELCPAGDLPYGYVYIPALYLAAFAVGLLGNAFVVWLLAGRRGPRRLVDTFVLHLAAADLGFVLTLPLWAAAAALGGRWPFGDGLCKLSSFALAGTRCAGALLLAGMSVDRYLAVVKLLEARPLRTPRCALASCCGVWAVALLAGLPSLVYRGLQPLPGGQDSQCGEEPSHAFQGLSLLLLLLTFVLPLVVTLFCYCRISRRLRRPPHVGRARRNSLRIIFAIESTFVGSWLPFSALRAVFHLARLGALPLPCPLLLALRWGLTIATCLAFVNSCANPLIYLLLDRSFRARALDGACGRTGRLARRISSASSLSRDDSSVFRCRAQAANTASASW

SEQ ID NO: 33538 - protein, 337 aa, Homo sapiens
  Payload ID: 6599
  Gene Symbol: GPR26
  Gene Name: G protein-coupled receptor 26
  Uniprot ID: Q8NDV2
  ENSP ID: ENSP00000284674
MNSWDAGLAGLLVGTMGVSLLSNALVLLCLLHSADIRRQAPALFTLNLTCGNLLCTVVNMPLTLAGVVAQRQPAGDRLCRLAAFLDTFLAANSMLSMAALSIDRWVAVVFPLSYRAKMRLRDAALMVAYTWLHALTFPAAALALSWLGFHQLYASCTLCSRRPDERLRFAVFTGAFHALSFLLSFVVLCCTYLKVLKVARFHCKRIDVITMQTLVLLVDLHPSVRERCLEEQKRRRQRATKKISTFIGTFLVCFAPYVITRLVELFSTVPIGSHWGVLSKCLAYSKAASDPFVYSLLRHQYRKSCKEILNRLLHRRSIHSSGLTGDSHSQNILPVSE

SEQ ID NO: 33539 - protein, 375 aa, Homo sapiens
  Payload ID: 6600
  Gene Symbol: GPR27
  Gene Name: G protein-coupled receptor 27
  Uniprot ID: Q9NS67
  ENSP ID: ENSP00000303149
MANASEPGGSGGGEAAALGLKLATLSLLLCVSLAGNVLFALLIVRERSLHRAPYYLLLDLCLADGLRALACLPAVMLAARRAAAAAGAPPGALGCKLLAFLAALFCFHAAFLLLGVGVTRYLAIAHHRFYAERLAGWPCAAMLVCAAWALALAAAFPPVLDGGGDDEDAPCALEQRPDGAPGALGFLLLLAVVVGATHLVYLRLLFFIHDRRKMRPARLVPAVSHDWTFHGPGATGQAAANWTAGFGRGPTPPALVGIRPAGPGRGARRLLVLEEFKTEKRLCKMFYAVTLLFLLLWGPYVVASYLRVLVRPGAVPQAYLTASVWLTFAQAGINPVVCFLFNRELRDCFRAQFPCCQSPRTTQATHPCDLKGIGL

SEQ ID NO: 33540 - protein, 330 aa, Homo sapiens
  Payload ID: 6601
  Gene Symbol: GPR3
  Gene Name: G protein-coupled receptor 3
  Uniprot ID: P46089
  ENSP ID: ENSP00000363136
MMWGAGSPLAWLSAGSGNVNVSSVGPAEGPTGPAAPLPSPKAWDVVLCISGTLVSCENALVVAIIVGTPAFRAPMFLLVGSLAVADLLAGLGLVLHFAAVFCIGSAEMSLVLVGVLAMAFTASIGSLLAITVDRYLSLYNALTYYSETTVTRTYVMLALVWGGALGLGLLPVLAWNCLDGLTTCGVVYPLSKNHLVVLAIAFFMVFGIMLQLYAQICRIVCRHAQQIALQRHLLPASHYVATRKGIATLAVVLGAFAACWLPFTVYCLLGDAHSPPLYTYLTLLPATYNSMINPIIYAFRNQDVQKVLWAVCCCCSSSKIPFRSRSPSDV

SEQ ID NO: 33541 - protein, 319 aa, Homo sapiens
  Payload ID: 6602
  Gene Symbol: GPR31
  Gene Name: G protein-coupled receptor 31
  Uniprot ID: O00270
  ENSP ID: ENSP00000355799
MPFPNCSAPSTVVATAVGVLLGLECGLGLLGNAVALWTFLFRVRVWKPYAVYLLNLALADLLLAACLPFLAAFYLSLQAWHLGRVGCWALHFLLDLSRSVGMAFLAAVALDRYLRVVHPRLKVNLLSPQAALGVSGLVWLLMVALTCPGLLISEAAQNSTRCHSFYSRADGSFSIIWQEALSCLQFVLPFGLIVFCNAGIIRALQKRLREPEKQPKLQRAQALVTLVVVLFALCFLPCFLARVLMHIFQNLGSCRALCAVAHTSDVTGSLTYLHSVLNPVVYCFSSPTFRSSYRRVFHTLRGKGQAAEPPDFNPRDSYS

SEQ ID NO: 33542 - protein, 356 aa, Homo sapiens
  Payload ID: 6603
  Gene Symbol: GPR32
  Gene Name: G protein-coupled receptor 32
  Uniprot ID: O75388
  ENSP ID: ENSP00000270590
MNGVSEGTRGCSDRQPGVLTRDRSCSRKMNSSGCLSEEVGSLRPLTVVILSASIVVGVLGNGLVLWMTVFRMARTVSTVCFFHLALADFMLSLSLPIAMYYIVSRQWLLGEWACKLYITFVFLSYFASNCLLVFISVDRCISVLYPVWALNHRTVQRASWLAFGVWLLAAALCSAHLKFRTTRKWNGCTHCYLAFNSDNETAQIWIEGVVEGHIIGTIGHFLLGFLGPLAIIGTCAHLIRAKLLREGWVHANRPKRLLLVLVSAFFIFWSPFNVVLLVHLWRRVMLKEIYHPRMLLILQASFALGCVNSSLNPFLYVFVGRDFQEKFFQSLTSALARAFGEEEFLSSCPRGNAPRE

SEQ ID NO: 33543 - protein, 333 aa, Homo sapiens
  Payload ID: 6604
  Gene Symbol: GPR33
  Gene Name: G protein-coupled receptor 33 (gene/pseudogene)
  Uniprot ID: Q49SQ1
  ENSP ID: ENSP00000421557
MDLINSTDYLINASTLVRNSTQFLAPASKMIIALSLYISSIIGTITNGLYLWVLRFKMKQTVNTLLFFHLILSYFISTMILPFMATSQLQDNHWNFGTALCKVFNGTLSLGMFTSVFFLSAIGLDRYLLTLHPVWSQQHRTPRWASSIVLGVWISAAALSIPYLIFRETHHDRKGKVTCQNNYAVSTNWESKEMQASRQWIHVACFISRFLLGFLLPFFIIIFCYERVASKVKERSLFKSSKPFKVMMTAIISFFVCWMPYHIHQGLLLTTNQSLLLELTLILTVLTTSFNTIFSPTLYLFVGENFKKVFKKSILALFESTFSEDSSVERTQT

SEQ ID NO: 33544 - protein, 381 aa, Homo sapiens
  Payload ID: 6605
  Gene Symbol: GPR34
  Gene Name: G protein-coupled receptor 34
  Uniprot ID: Q9UPC5
  ENSP ID: ENSP00000367378
MRSHTITMTTTSVSSWPYSSHRMRFITNHSDQPPQNFSATPNVTTCPMDEKLLSTVLTTSYSVIFIVGLVGNIIALYVFLGIHRKRNSIQIYLLNVAIADLLLIFCLPFRIMYHINQNKWTLGVILCKVVGTLFYMNMYISIILLGFISLDRYIKINRSIQQRKAITTKQSIYVCCIVWMLALGGFLTMIILTLKKGGHNSTMCFHYRDKHNAKGEAIFNFILVVMFWLIFLLIILSYIKIGKNLLRISKRRSKFPNSGKYATTARNSFIVLIIFTICFVPYHAFRFIYISSQLNVSSCYWKEIVHKTNEIMLVLSSFNSCLDPVMYFLMSSNIRKIMCQLLFRRFQGEPSRSESTSEFKPGYSLHDTSVAVKIQSSSKST

SEQ ID NO: 33545 - protein, 381 aa, Homo sapiens; identical to SEQ ID NO: 33544
  Payload ID: 6605
  Gene Symbol: GPR34
  Gene Name: G protein-coupled receptor 34
  Uniprot ID: Q9UPC5
  ENSP ID: ENSP00000367384

SEQ ID NO: 33546 - protein, 334 aa, Homo sapiens
  Payload ID: 6605
  Gene Symbol: GPR34
  Gene Name: G protein-coupled receptor 34
  ENSP ID: ENSP00000480296
MDEKLLSTVLTTSYSVIFIVGLVGNIIALYVFLGIHRKRNSIQIYLLNVAIADLLLIFCLPFRIMYHINQNKWTLGVILCKVVGTLFYMNMYISIILLGFISLDRYIKINRSIQQRKAITTKQSIYVCCIVWMLALGGFLTMIILTLKKGGHNSTMCFHYRDKHNAKGEAIFNFILVVMFWLIFLLIILSYIKIGKNLLRISKRRSKFPNSGKYATTARNSFIVLIIFTICFVPYHAFRFIYISSQLNVSSCYWKEIVHKTNEIMLVLSSFNSCLDPVMYFLMSSNIRKIMCQLLFRRFQGEPSRSESTSEFKPGYSLHDTSVAVKIQSSSKST

SEQ ID NO: 33547 - protein, 309 aa, Homo sapiens
  Payload ID: 6606
  Gene Symbol: GPR35
  Gene Name: G protein-coupled receptor 35
  Uniprot ID: Q9HC97
  ENSP ID: ENSP00000322731
MNGTYNTCGSSDLTWPPAIKLGFYAYLGVLLVLGLLLNSLALWVFCCRMQQWTETRIYMTNLAVADLCLLCTLPFVLHSLRDTSDTPLCQLSQGIYLTNRYMSISLVTAIAVDRYVAVRHPLRARGLRSPRQAAAVCAVLWVLVIGSLVARWLLGIQEGGFCFRSTRHNFNSMAFPLLGFYLPLAVVVFCSLKVVTALAQRPPTDVGQAEATRKAARMVWANLLVFVVCFLPLHVGLTVRLAVGWNACALLETIRRALYITSKLSDANCCLDAICYYYMAKEFQEASALAVAPSAKAHKSQDSLCVTLA

SEQ ID NO: 33548 - protein, 309 aa, Homo sapiens; identical to SEQ ID NO: 33547
  Payload ID: 6606
  Gene Symbol: GPR35
  Gene Name: G protein-coupled receptor 35
  Uniprot ID: Q9HC97
  ENSP ID: ENSP00000384263

SEQ ID NO: 33549 - protein, 309 aa, Homo sapiens; identical to SEQ ID NO: 33547
  Payload ID: 6606
  Gene Symbol: GPR35
  Gene Name: G protein-coupled receptor 35
  Uniprot ID: Q9HC97
  ENSP ID: ENSP00000385140

SEQ ID NO: 33550 - protein, 340 aa, Homo sapiens
  Payload ID: 6606
  Gene Symbol: GPR35
  Gene Name: G protein-coupled receptor 35
  Uniprot ID: Q9HC97
  ENSP ID: ENSP00000411788
MLSGSRAVPTPHRGSEELLKYMLHSPCVSLTMNGTYNTCGSSDLTWPPAIKLGFYAYLGVLLVLGLLLNSLALWVFCCRMQQWTETRIYMTNLAVADLCLLCTLPFVLHSLRDTSDTPLCQLSQGIYLTNRYMSISLVTAIAVDRYVAVRHPLRARGLRSPRQAAAVCAVLWVLVIGSLVARWLLGIQEGGFCFRSTRHNFNSMAFPLLGFYLPLAVVVFCSLKVVTALAQRPPTDVGQAEATRKAARMVWANLLVFVVCFLPLHVGLTVRLAVGWNACALLETIRRALYITSKLSDANCCLDAICYYYMAKEFQEASALAVAPSAKAHKSQDSLCVTLA

SEQ ID NO: 33551 - protein, 309 aa, Homo sapiens; identical to SEQ ID NO: 33547
  Payload ID: 6606
  Gene Symbol: GPR35
  Gene Name: G protein-coupled receptor 35
  Uniprot ID: Q9HC97
  ENSP ID: ENSP00000415890

SEQ ID NO: 33552 - protein, 613 aa, Homo sapiens
  Payload ID: 6607
  Gene Symbol: GPR37
  Gene Name: G protein-coupled receptor 37 (endothelin receptor type B-like)
  Uniprot ID: O15354
  ENSP ID: ENSP00000306449
MRAPGALLARMSRLLLLLLLKVSASSALGVAPASRNETCLGESCAPTVIQRRGRDAWGPGNSARDVLRARAPREEQGAAFLAGPSWDLPAAPGRDPAAGRGAEASAAGPPGPPTRPPGPWRWKGARGQEPSETLGRGNPTALQLFLQISEEEEKGPRGAGISGRSQEQSVKTVPGASDLFYWPRRAGKLQGSHHKPLSKTANGLAGHEGWTIALPGRALAQNGSLGEGIHEPGGPRRGNSTNRRVRLKNPFYPLTQESYGAYAVMCLSVVIFGTGIIGNLAVMCIVCHNYYMRSISNSLLANLAFWDFLIIFFCLPLVIFHELTKKWLLEDFSCKIVPYIEVASLGVTTFTLCALCIDRFRAATNVQMYYEMIENCSSTTAKLAVIWVGALLLALPEVVLRQLSKEDLGFSGRAPAERCIIKISPDLPDTIYVLALTYDSARLWWYFGCYFCLPTLFTITCSLVTARKIRKAEKACTRGNKRQIQLESQMNCTVVALTILYGFCIIPENICNIVTAYMATGVSQQTMDLLNIISQFLLFFKSCVTPVLLFCLCKPFSRAFMECCCCCCEECIQKSSTVTSDDNDNEYTTELELSPFSTIRREMSTFASVGTHC

SEQ ID NO: 33553 - protein, 481 aa, Homo sapiens
  Payload ID: 6608
  Gene Symbol: GPR37L1
  Gene Name: G protein-coupled receptor 37 like 1
  Uniprot ID: O60883
  ENSP ID: ENSP00000356251
MRWLWPLAVSLAVILAVGLSRVSGGAPLHLGRHRAETQEQQSRSKRGTEDEEAKGVQQYVPEEWAEYPRPIHPAGLQPTKPLVATSPNPGKDGGTPDSGQELRGNLTGAPGQRLQIQNPLYPVTESSYSAYAIMLLALVVFAVGIVGNLSVMCIVWHSYYLKSAWNSILASLALWDFLVLFFCLPIVIFNEITKQRLLGDVSCRAVPFMEVSSLGVTTFSLCALGIDRFHVATSTLPKVRPIERCQSILAKLAVIWVGSMTLAVPELLLWQLAQEPAPTMGTLDSCIMKPSASLPESLYSLVMTYQNARMWWYFGCYFCLPILFTVTCQLVTWRVRGPPGRKSECRASKHEQCESQLNSTVVGLTVVYAFCTLPENVCNIVVAYLSTELTRQTLDLLGLINQFSTFFKGAITPVLLLCICRPLGQAFLDCCCCCCCEECGGASEASAANGSDNKLKTEVSSSIYFHKPRESPPLLPLGTPC

SEQ ID NO: 33554 - protein, 453 aa, Homo sapiens
  Payload ID: 6609
  Gene Symbol: GPR39
  Gene Name: G protein-coupled receptor 39
  Uniprot ID: O43194
  ENSP ID: ENSP00000327417
MASPSLPGSDCSQIIDHSHVPEFEVATWIKITLILVYLIIFVMGLLGNSATIRVTQVLQKKGYLQKEVTDHMVSLACSDILVFLIGMPMEFYSIIWNPLTTSSYTLSCKLHTFLFEACSYATLLHVLTLSFERYIAICHPFRYKAVSGPCQVKLLIGFVWVTSALVALPLLFAMGTEYPLVNVPSHRGLTCNRSSTRHHEQPETSNMSICTNLSSRWTVFQSSIFGAFVVYLVVLLSVAFMCWNMMQVLMKSQKGSLAGGTRPPQLRKSESEESRTARRQTIIFLRLIVVTLAVCWMPNQIRRIMAAAKPKHDWTRSYFRAYMILLPFSETFFYLSSVINPLLYTVSSQQFRRVFVQVLCCRLSLQHANHEKRLRVHAHSTTDSARFVQRPLLFASRRQSSARRTEKIFLSTFQSEAEPQSKSQSLSLESLEPNSGAKPANSAAENGFQEHEV

SEQ ID NO: 33555 - protein, 300 aa, Homo sapiens
  Payload ID: 6609
  Gene Symbol: GPR39
  Gene Name: G protein-coupled receptor 39
  ENSP ID: ENSP00000477972
MASPSLPGSDCSQIIDHSHVPEFEVATWIKITLILVYLIIFVMGLLGNSATIRVTQVLQKKGYLQKEVTDHMVSLACSDILVFLIGMPMEFYSIIWNPLTTSSYTLSCKLHTFLFEACSYATLLHVLTLSFERYIAICHPFRYKAVSGPCQVKLLIGFVWVTSALVALPLLFAMGTEYPLVNVPSHRGLTCNRSSTRHHEQPETSNMSICTNLSSRWTVFQSSIFGAFVVYLVVLLSVAFMCWNMMQVLMKSQKGSLAGGTRPPQLRKSESEESRTARRQTIIFLRLGFLPLWVCSLPDQ

SEQ ID NO: 33556 - protein, 362 aa, Homo sapiens
  Payload ID: 6610
  Gene Symbol: GPR4
  Gene Name: G protein-coupled receptor 4
  Uniprot ID: P46093
  ENSP ID: ENSP00000319744
MGNHTWEGCHVDSRVDHLFPPSLYIFVIGVGLPTNCLALWAAYRQVQQRNELGVYLMNLSIADLLYICTLPLWVDYFLHHDNWIHGPGSCKLFGFIFYTNIYISIAFLCCISVDRYLAVAHPLRFARLRRVKTAVAVSSVVWATELGANSAPLFHDELFRDRYNHTFCFEKFPMEGWVAWMNLYRVFVGFLFPWALMLLSYRGILRAVRGSVSTERQEKAKIKRLALSLIAIVLVCFAPYHVLLLSRSAIYLGRPWDCGFEERVFSAYHSSLAFTSLNCVADPILYCLVNEGARSDVAKALHNLLRFLASDKPQEMANASLTLETPLTSKRNSTAKAMTGSWAATPPSQGDQVQLKMLPPAQ

SEQ ID NO: 33557 - protein, 346 aa, Homo sapiens
  Payload ID: 6611
  Gene Symbol: GPR42
  Gene Name: G protein-coupled receptor 42 (gene/pseudogene)
  Uniprot ID: O15529
  ENSP ID: ENSP00000410925
MDTGPDQSYFSGNHWFVFSVYLLTFLVGLPLNLLALVVFVGKLRCRPVAVDVLLLNLTASDLLLLLFLPFRMVEAANGMHWPLPFILCPLSGFIFFTTIYLTALFLAAVSIERFLSVAHPLWYKTRPRLGQAGLVSVACWLLASAHCSVVYVIEFSGDISHSQGTNGTCYLEFWKDQLAILLPVRLEMAVVLFVVPLIITSYCYSRLVWILGRGGSHRRQRRVAGLVAATLLNFLVCFGPYNVSHVVGYICGESPVWRIYVTLLSTLNSCVDPFVYYFSSSGFQADFHELLRRLCGLWGQWQQESSMELKEQKGGEEQRADRPAERKTSEHSQGCGTGGQVACAEN

SEQ ID NO: 33558 - protein, 346 aa, Homo sapiens; identical to SEQ ID NO: 33557
  Payload ID: 6611
  Gene Symbol: GPR42
  Gene Name: G protein-coupled receptor 42 (gene/pseudogene)
  Uniprot ID: O15529
  ENSP ID: ENSP00000473212

SEQ ID NO: 33559 - protein, 372 aa, Homo sapiens
  Payload ID: 6612
  Gene Symbol: GPR45
  Gene Name: G protein-coupled receptor 45
  Uniprot ID: Q9Y5Y3
  ENSP ID: ENSP00000258456
MACNSTSLEAYTYLLLNTSNASDSGSTQLPAPLRISLAIVMLLMTVVGFLGNTVVCIIVYQRPAMRSAINLLLATLAFSDIMLSLCCMPFTAVTLITVRWHFGDHFCRLSATLYWFFVLEGVAILLIISVDRFLIIVQRQDKLNPRRAKVIIAVSWVLSFCIAGPSLTGWTLVEVPARAPQCVLGYTELPADRAYVVTLVVAVFFAPFGVMLCAYMCILNTVRKNAVRVHNQSDSLDLRQLTRAGLRRLQRQQQVSVDLSFKTKAFTTILILFVGFSLCWLPHSVYSLLSVFSQRFYCGSSFYATSTCVLWLSYLKSVFNPIVYCWRIKKFREACIELLPQTFQILPKVPERIRRRIQPSTVYVCNENQSAV

SEQ ID NO: 33560 - protein, 617 aa, Homo sapiens
  Payload ID: 6613
  Gene Symbol: GPR50
  Gene Name: G protein-coupled receptor 50
  Uniprot ID: Q13585
  ENSP ID: ENSP00000218316
MGPTLAVPTPYGCIGCKLPQPEYPPALIIFMFCAMVITIVVDLIGNSMVILAVTKNKKLRNSGNIFVVSLSVADMLVAIYPYPLMLHAMSIGGWDLSQLQCQMVGFITGLSVVGSIFNIVAIAINRYCYICHSLQYERIFSVRNTCIYLVITWIMTVLAVLPNMYIGTIEYDPRTYTCIFNYLNNPVFTVTIVCIHFVLPLLIVGFCYVRIWTKVLAARDPAGQNPDNQLAEVRNFLTMFVIFLLFAVCWCPINVLTVLVAVSPKEMAGKIPNWLYLAAYFIAYFNSCLNAVIYGLLNENFRREYWTIFHAMRHPIIFFSGLISDIREMQEARTLARARAHARDQAREQDRAHACPAVEETPMNVRNVPLPGDAAAGHPDRASGHPKPHSRSSSAYRKSASTHHKSVFSHSKAASGHLKPVSGHSKPASGHPKSATVYPKPASVHFKADSVHFKGDSVHFKPDSVHFKPASSNPKPITGHHVSAGSHSKSAFSAATSHPKPTTGHIKPATSHAEPTTADYPKPATTSHPKPTAADNPELSASHCPEIPAIAHPVSDDSDLPESASSPAAGPTKPAASQLESDTIADLPDPTVVTTSTNDYHDVVVIDVEDDPDEMAV

SEQ ID NO: 33561 - protein, 615 aa, Homo sapiens
  Payload ID: 6613
  Gene Symbol: GPR50
  Gene Name: G protein-coupled receptor 50
  ENSP ID: ENSP00000484496
MGPTLAVPTPYGCIGCKLPQPEYPPALIIFMFCAMVITIVVDLIGNSMVILAVTKNKKLRNSGNIFVVSLSVADMLVAIYPYPLMLHAMSIGGWDLSQLQCQMVGFITGLSVVGSIFNIVAIAINRYCYICHSLQYERIFSVRNTCIYLVITWIMTVLAVLPNMYIGTIEYDPRTYTCIFNYLNNPVFTVTIVCIHFVLPLLIVGFCYVRIWTKVLAARDPAGQNPDNQLAEVRNFLTMFVIFLLFAVCWCPINVLTVLVAVSPKEMAGKIPNWLYLAAYFIAYFNSCLNAVIYGLLNENFRREYWTIFHAMRHPIIFFSGLISDIREMQEARTLARARAHARDQAREQDRAHACPAVEETPMNVRNVPLPGDAAAGHPDRASGHPKPHSRSSSAYRKSASTHHKSVFSHSKAASGHLKPVSGHSKPASGHPKSATVYPKPASVHFKADSVHFKGDSVHFKPDSVHFKPASSNPKPITGHHVSAGSHSKSAFSAATSHPKPTTPHQASYQAEPTTADYPKPATTSHPKPTAADNPELSASHCPEIPAIAHPVSDDSDLPESASSPAAGPTKPAASQLESDTIADLPDPTVVTTSTNDYHDVVVIDVEDDPDEMAV

SEQ ID NO: 33562 - protein, 361 aa, Homo sapiens
  Payload ID: 6614
  Gene Symbol: GPR52
  Gene Name: G protein-coupled receptor 52
  Uniprot ID: Q9Y2T5
  ENSP ID: ENSP00000356658
MNESRWTEWRILNMSSGIVNVSERHSCPLGFGHYSVVDVCIFETVVIVLLTFLIIAGNLTVIFVFHCAPLLHHYTTSYFIQTMAYADLFVGVSCLVPTLSLLHYSTGVHESLTCQVFGYIISVLKSVSMACLACISVDRYLAITKPLSYNQLVTPCRLRICIILIWIYSCLIFLPSFFGWGKPGYHGDIFEWCATSWLTSAYFTGFIVCLLYAPAAFVVCFTYFHIFKICRQHTKEINDRRARFPSHEVDSSRETGHSPDRRYAMVLFRITSVFYMLWLPYIIYFLLESSRVLDNPTLSFLTTWLAISNSFCNCVIYSLSNSVFRLGLRRLSETMCTSCMCVKDQEAQEPKPRKRANSCSI

SEQ ID NO: 33563 - protein, 319 aa, Homo sapiens
  Payload ID: 6615
  Gene Symbol: GPR55
  Gene Name: G protein-coupled receptor 55
  Uniprot ID: Q9Y2T6
  ENSP ID: ENSP00000375893
MSQQNTSGDCLFDGVNELMKTLQFAVHIPTFVLGLLLNLLAIHGFSTFLKNRWPDYAATSIYMINLAVFDLLLVLSLPFKMVLSQVQSPFPSLCTLVECLYFVSMYGSVFTICFISMDRFLAIRYPLLVSHLRSPRKIFGICCTIWVLVWTGSIPIYSFHGKVEKYMCFHNMSDDTWSAKVFFPLEVFGFLLPMGIMGFCCSRSIHILLGRRDHTQDWVQQKACIYSIAASLAVFVVSFLPVHLGFFLQFLVRNSFIVECRAKQSISFFLQLSMCFSNVNCCLDVFCYYFVIKEFRMNIRAHRPSRVQLVLQDTTISRG

SEQ ID NO: 33564 - protein, 319 aa, Homo sapiens; identical to SEQ ID NO: 33563
  Payload ID: 6615
  Gene Symbol: GPR55
  Gene Name: G protein-coupled receptor 55
  Uniprot ID: Q9Y2T6
  ENSP ID: ENSP00000375894

SEQ ID NO: 33565 - protein, 319 aa, Homo sapiens; identical to SEQ ID NO: 33563
  Payload ID: 6615
  Gene Symbol: GPR55
  Gene Name: G protein-coupled receptor 55
  Uniprot ID: Q9Y2T6
  ENSP ID: ENSP00000410267

SEQ ID NO: 33566 - protein, 242 aa, Homo sapiens
  Payload ID: 6615
  Gene Symbol: GPR55
  Gene Name: G protein-coupled receptor 55
  ENSP ID: ENSP00000412768
MSQQNTSGDCLFDGVNELMKTLQFAVHIPTFVLGLLLNLLAIHGFSTFLKNRWPDYAATSIYMINLAVFDLLLVLSLPFKMVLSQVQSPFPSLCTLVECLYFVSMYGSVFTICFISMDRFLAIRYPLLVSHLRSPRKIFGICCTIWVLVWTGSIPIYSFHGKVEKYMCFHNMSDDTWSAKVFFPLEVFGFLLPMGIMGFCCSRSIHILLGRRDHTQDWVQQKACIYSIAASLAVFVVSFLPV

SEQ ID NO: 33567 - protein, 319 aa, Homo sapiens; identical to SEQ ID NO: 33563
  Payload ID: 6615
  Gene Symbol: GPR55
  Gene Name: G protein-coupled receptor 55
  Uniprot ID: Q9Y2T6
  ENSP ID: ENSP00000482381

SEQ ID NO: 33568 - protein, 362 aa, Homo sapiens
  Payload ID: 6616
  Gene Symbol: GPR6
  Gene Name: G protein-coupled receptor 6
  Uniprot ID: P46095
  ENSP ID: ENSP00000275169
MNASAASLNDSQVVVVAAEGAAAAATAAGGPDTGEWGPPAAAALGAGGGANGSLELSSQLSAGPPGLLLPAVNPWDVLLCVSGTVIAGENALVVALIASTPALRTPMFVLVGSLATADLLAGCGLILHFVFQYLVPSETVSLLTVGFLVASFAASVSSLLAITVDRYLSLYNALTYYSRRTLLGVHLLLAATWTVSLGLGLLPVLGWNCLAERAACSVVRPLARSHVALLSAAFFMVFGIMLHLYVRICQVVWRHAHQIALQQHCLAPPHLAATRKGVGTLAVVLGTFGASWLPFAIYCVVGSHEDPAVYTYATLLPATYNSMINPIIYAFRNQEIQRALWLLLCGCFQSKVPFRSRSPSEV

SEQ ID NO: 33569 - protein, 377 aa, Homo sapiens
  Payload ID: 6616
  Gene Symbol: GPR6
  Gene Name: G protein-coupled receptor 6
  Uniprot ID: P46095
  ENSP ID: ENSP00000406986
MTLLAWCTRGANPAAMNASAASLNDSQVVVVAAEGAAAAATAAGGPDTGEWGPPAAAALGAGGGANGSLELSSQLSAGPPGLLLPAVNPWDVLLCVSGTVIAGENALVVALIASTPALRTPMFVLVGSLATADLLAGCGLILHFVFQYLVPSETVSLLTVGFLVASFAASVSSLLAITVDRYLSLYNALTYYSRRTLLGVHLLLAATWTVSLGLGLLPVLGWNCLAERAACSVVRPLARSHVALLSAAFFMVFGIMLHLYVRICQVVWRHAHQIALQQHCLAPPHLAATRKGVGTLAVVLGTFGASWLPFAIYCVVGSHEDPAVYTYATLLPATYNSMINPIIYAFRNQEIQRALWLLLCGCFQSKVPFRSRSPSEV

SEQ ID NO: 33570 - protein, 451 aa, Homo sapiens
  Payload ID: 6617
  Gene Symbol: GPR61
  Gene Name: G protein-coupled receptor 61
  Uniprot ID: Q9BZJ8
  ENSP ID: ENSP00000385422
MESSPIPQSSGNSSTLGRVPQTPGPSTASGVPEVGLRDVASESVALFFMLLLDLTAVAGNAAVMAVIAKTPALRKFVFVFHLCLVDLLAALTLMPLAMLSSSALFDHALFGEVACRLYLFLSVCFVSLAILSVSAINVERYYYVVHPMRYEVRMTLGLVASVLVGVWVKALAMASVPVLGRVSWEEGAPSVPPGCSLQWSHSAYCQLFVVVFAVLYFLLPLLLILVVYCSMFRVARVAAMQHGPLPTWMETPRQRSESLSSRSTMVTSSGAPQTTPHRTFGGGKAAVVLLAVGGQFLLCWLPYFSFHLYVALSAQPISTGQVESVVTWIGYFCFTSNPFFYGCLNRQIRGELSKQFVCFFKPAPEEELRLPSREGSIEENFLQFLQGTGCPSESWVSRPLPSPKQEPPAVDFRIPGQIAEETSEFLEQQLTSDIIMSDSYLRPAASPRLES

SEQ ID NO: 33571 - protein, 451 aa, Homo sapiens; identical to SEQ ID NO: 33570
  Payload ID: 6617
  Gene Symbol: GPR61
  Gene Name: G protein-coupled receptor 61
  Uniprot ID: Q9BZJ8
  ENSP ID: ENSP00000432456

SEQ ID NO: 33572 - protein, 451 aa, Homo sapiens; identical to SEQ ID NO: 33570
  Payload ID: 6617
  Gene Symbol: GPR61
  Gene Name: G protein-coupled receptor 61
  Uniprot ID: Q9BZJ8
  ENSP ID: ENSP00000433661

SEQ ID NO: 33573 - protein, 451 aa, Homo sapiens; identical to SEQ ID NO: 33570
  Payload ID: 6617
  Gene Symbol: GPR61
  Gene Name: G protein-coupled receptor 61
  Uniprot ID: Q9BZJ8
  ENSP ID: ENSP00000484035

SEQ ID NO: 33574 - protein, 451 aa, Homo sapiens; identical to SEQ ID NO: 33570
  Payload ID: 6617
  Gene Symbol: GPR61
  Gene Name: G protein-coupled receptor 61
  Uniprot ID: Q9BZJ8
  ENSP ID: ENSP00000484797

SEQ ID NO: 33575 - protein, 368 aa, Homo sapiens
  Payload ID: 6618
  Gene Symbol: GPR62
  Gene Name: G protein-coupled receptor 62
  Uniprot ID: Q9BZJ7
  ENSP ID: ENSP00000319250
MANSTGLNASEVAGSLGLILAAVVEVGALLGNGALLVVVLRTPGLRDALYLAHLCVVDLLAAASIMPLGLLAAPPPGLGRVRLGPAPCRAARFLSAALLPACTLGVAALGLARYRLIVHPLRPGSRPPPVLVLTAVWAAAGLLGALSLLGTPPAPPPAPARCSVLAGGLGPFRPLWALLAFALPALLLLGAYGGIFVVARRAALRPPRPARGSRLHSDSLDSRLSILPPLRPRLPGGKAALAPALAVGQFAACWLPYGCACLAPAARAAEAEAAVTWVAYSAFAAHPFLYGLLQRPVRLALGRLSRRALPGPVRACTPQAWHPRALLQCLQRPPEGPAVGPSEAPEQTPELAGGRSPAYQGPPESSLS

SEQ ID NO: 33576 - protein, 419 aa, Homo sapiens
  Payload ID: 6619
  Gene Symbol: GPR63
  Gene Name: G protein-coupled receptor 63
  Uniprot ID: Q9BZJ6
  ENSP ID: ENSP00000229955
MVFSAVLTAFHTGTSNTTFVVYENTYMNITLPPPFQHPDLSPLLRYSFETMAPTGLSSLTVNSTAVPTTPAAFKSLNLPLQITLSAIMIFILFVSFLGNLVVCLMVYQKAAMRSAINILLASLAFADMLLAVLNMPFALVTILTTRWIFGKFFCRVSAMFFWLFVIEGVAILLIISIDRFLIIVQRQDKLNPYRAKVLIAVSWATSFCVAFPLAVGNPDLQIPSRAPQCVFGYTTNPGYQAYVILISLISFFIPFLVILYSFMGILNTLRHNALRIHSYPEGICLSQASKLGLMSLQRPFQMSIDMGFKTRAFTTILILFAVFIVCWAPFTTYSLVATFSKHFYYQHNFFEISTWLLWLCYLKSALNPLIYYWRIKKFHDACLDMMPKSFKFLPQLPGHTKRRIRPSAVYVCGEHRTVV

SEQ ID NO: 33577 - protein, 337 aa, Homo sapiens
  Payload ID: 6620
  Gene Symbol: GPR65
  Gene Name: G protein-coupled receptor 65
  Uniprot ID: Q8IYL9
  ENSP ID: ENSP00000267549
MNSTCIEEQHDLDHYLFPIVYIFVIIVSIPANIGSLCVSFLQAKKESELGIYLFSLSLSDLLYALTLPLWIDYTWNKDNWTFSPALCKGSAFLMYMNFYSSTAFLTCIAVDRYLAVVYPLKFFFLRTRRFALMVSLSIWILETIFNAVMLWEDETVVEYCDAEKSNFTLCYDKYPLEKWQINLNLFRTCTGYAIPLVTILICNRKVYQAVRHNKATENKEKKRIIKLLVSITVTFVLCFTPFHVMLLIRCILEHAVNFEDHSNSGKRTYTMYRITVALTSLNCVADPILYCFVTETGRYDMWNILKFCTGRCNTSQRQRKRILSVSTKDTMELEVLE

SEQ ID NO: 33578 - protein, 338 aa, Homo sapiens
  Payload ID: 6621
  Gene Symbol: GPR68
  Gene Name: G protein-coupled receptor 68
  ENSP ID: ENSP00000432740
MGNITADNSSMSCTIDHTIHQTLAPVVYVTVLVVGFPANCLSLYFGYLQIKARNELGVYLCNLTVADLFYICSLPFWLQYVLQHDNWSHGDLSCQVCGILLYENIYISVGFLCCISVDRYLAVAHPFRFHQFRTLKAAVGVSVVIWAKELLTSIYFLMHEEVIEDENQHRVCFEHYPIQAWQRAINYYRFLVGFLFPICLLLASYQGILRAVRRSHGTQKSRKDQIQRLVLSTVVIFLACFLPYHVLLLVRSVWEASCDFAKGVFNAYHFSLLLTSFNCVADPVLYCFVSETTHRDLARLRGACLAFLTCSRTGRAREAYPLGAPEASGKSGAQGEEP

SEQ ID NO: 33579 - protein, 365 aa, Homo sapiens
  Payload ID: 6621
  Gene Symbol: GPR68
  Gene Name: G protein-coupled receptor 68
  Uniprot ID: Q15743
  ENSP ID: ENSP00000434045
MGNITADNSSMSCTIDHTIHQTLAPVVYVTVLVVGFPANCLSLYFGYLQIKARNELGVYLCNLTVADLFYICSLPFWLQYVLQHDNWSHGDLSCQVCGILLYENIYISVGFLCCISVDRYLAVAHPFRFHQFRTLKAAVGVSVVIWAKELLTSIYFLMHEEVIEDENQHRVCFEHYPIQAWQRAINYYRFLVGFLFPICLLLASYQGILRAVRRSHGTQKSRKDQIQRLVLSTVVIFLACFLPYHVLLLVRSVWEASCDFAKGVFNAYHFSLLLTSFNCVADPVLYCFVSETTHRDLARLRGACLAFLTCSRTGRAREAYPLGAPEASGKSGAQGEEPELLTKLHPAFQTPNSPGSGGFPTGRLA

SEQ ID NO: 33580 - protein, 365 aa, Homo sapiens; identical to SEQ ID NO: 33579
  Payload ID: 6621
  Gene Symbol: GPR68
  Gene Name: G protein-coupled receptor 68
  Uniprot ID: Q15743
  ENSP ID: ENSP00000440797

SEQ ID NO: 33581 - protein, 540 aa, Homo sapiens
  Payload ID: 6622
  Gene Symbol: GPR75
  Gene Name: G protein-coupled receptor 75
  Uniprot ID: O95800
  ENSP ID: ENSP00000378195
MNSTGHLQDAPNATSLHVPHSQEGNSTSLQEGLQDLIHTATLVTCTFLLAVIFCLGSYGNFIVFLSFFDPAFRKFRTNFDFMILNLSFCDLFICGVTAPMFTFVLFFSSASSIPDAFCFTFHLTSSGFIIMSLKTVAVIALHRLRMVLGKQPNRTASFPCTVLLTLLLWATSFTLATLATLKTSKSHLCLPMSSLIAGKGKAILSLYVVDFTFCVAVVSVSYIMIAQTLRKNAQVRKCPPVITVDASRPQPFMGVPVQGGGDPIQCAMPALYRNQNYNKLQHVQTRGYTKSPNQLVTPAASRLQLVSAINLSTAKDSKAVVTCVIIVLSVLVCCLPLGISLVQVVLSSNGSFILYQFELFGFTLIFFKSGLNPFIYSRNSAGLRRKVLWCLQYIGLGFFCCKQKTRLRAMGKGNLEVNRNKSSHHETNSAYMLSPKPQKKFVDQACGPSHSKESMVSPKISAGHQHCGQSSSTPINTRIEPYYSIYNSSPSQEESSPCNLQPVNSFGFANSYIAMHYHTTNDLVQEYDSTSAKQIPVPSV

SEQ ID NO: 33582 - protein, 363 aa, Homo sapiens
  Payload ID: 6623
  Gene Symbol: GPR78
  Gene Name: G protein-coupled receptor 78
  Uniprot ID: Q96P69
  ENSP ID: ENSP00000371927
MGPGEALLAGLLVMVLAVALLSNALVLLCCAYSAELRTRASGVLLVNLSLGHLLLAALDMPFTLLGVMRGRTPSAPGACQVIGFLDTFLASNAALSVAALSADQWLAVGFPLRYAGRLRPRYAGLLLGCAWGQSLAFSGAALGCSWLGYSSAFASCSLRLPPEPERPRFAAFTATLHAVGFVLPLAVLCLTSLQVHRVARRHCQRMDTVTMKALALLADLHPSVRQRCLIQQKRRRHRATRKIGIAIATFLICFAPYVMTRLAELVPFVTVNAQWGILSKCLTYSKAVADPFTYSLLRRPFRQVLAGMVHRLLKRTPRPASTHDSSLDVAGMVHQLLKRTPRPASTHNGSVDTENDSCLQQTH

SEQ ID NO: 33583 - protein, 261 aa, Homo sapiens
  Payload ID: 6623
  Gene Symbol: GPR78
  Gene Name: G protein-coupled receptor 78
  ENSP ID: ENSP00000424326
MGPGEALLAGLLVMVLAVALLSNALVLLCCAYSAELRTRASGVLLVNLSLGHLLLAALDMPFTLLGVMRGRTPSAPGACQVIGFLDTFLASNAALSVAALSADQWLAVGFPLRYAGRLRPRYAGLLLGCAWGQSLAFSGAALGCSWLGYSSAFASCSLRLPPEPERPRFAAFTATLHAVGFVLPLAVLCLTSLQVHRVARRHCQRMDTVTMKALALLADLHPSVRQRCLIQQKRRRHRATRKIGIAIATFLICFAPYVMTR

SEQ ID NO: 33584 - protein, 336 aa, Homo sapiens
  Payload ID: 6624
  Gene Symbol: GPR82
  Gene Name: G protein-coupled receptor 82
  Uniprot ID: Q96P67
  ENSP ID: ENSP00000303549
MNNNTTCIQPSMISSMALPIIYILLCIVGVFGNTLSQWIFLTKIGKKTSTHIYLSHLVTANLLVCSAMPFMSIYFLKGFQWEYQSAQCRVVNFLGTLSMHASMFVSLLILSWIAISRYATLMQKDSSQETTSCYEKIFYGHLLKKFRQPNFARKLCIYIWGVVLGIIIPVTVYYSVIEATEGEESLCYNRQMELGAMISQIAGLIGTTFIGFSFLVVLTSYYSFVSHLRKIRTCTSIMEKDLTYSSVKRHLLVIQILLIVCFLPYSIFKPIFYVLHQRDNCQQLNYLIETKNILTCLASARSSTDPIIFLLLDKTFKKTLYNLFTKSNSAHMQSYG

SEQ ID NO: 33585 - protein, 423 aa, Homo sapiens
  Payload ID: 6625
  Gene Symbol: GPR83
  Gene Name: G protein-coupled receptor 83
  Uniprot ID: Q9NYM4
  ENSP ID: ENSP00000243673
MVPHLLLLCLLPLVRATEPHEGRADEQSAEAALAVPNASHFFSWNNYTFSDWQNFVGRRRYGAESQNPTVKALLIVAYSFIIVFSLFGNVLVCHVIFKNQRMHSATSLFIVNLAVADIMITLLNTPFTLVRFVNSTWIFGKGMCHVSRFAQYCSLHVSALTLTAIAVDRHQVIMHPLKPRISITKGVIYIAVIWTMATFFSLPHAICQKLFTFKYSEDIVRSLCLPDFPEPADLFWKYLDLATFILLYILPLLIISVAYARVAKKLWLCNMIGDVTTEQYFALRRKKKKTIKMLMLVVVLFALCWFPLNCYVLLLSSKVIRTNNALYFAFHWFAMSSTCYNPFIYCWLNENFRIELKALLSMCQRPPKPQEDRPPSPVPSFRVAWTEKNDGQRAPLANNLLPTSQLQSGKTDLSSVEPIVTMS

SEQ ID NO: 33586 - protein, 381 aa, Homo sapiens
  Payload ID: 6625
  Gene Symbol: GPR83
  Gene Name: G protein-coupled receptor 83
  ENSP ID: ENSP00000441550
MVPHLLLLCLLPLVRATEPHEGRADEQSAEAALAVPNASHFFSWNNYTFSDWQNFVGRRRYGAESQNPTVKALLIVAYSFIIVFSLFGNVLVCHVIFKNQRMHSATSLFIVNLAVADIMITLLNTPFTLVIMHPLKPRISITKGVIYIAVIWTMATFFSLPHAICQKLFTFKYSEDIVRSLCLPDFPEPADLFWKYLDLATFILLYILPLLIISVAYARVAKKLWLCNMIGDVTTEQYFALRRKKKKTIKMLMLVVVLFALCWFPLNCYVLLLSSKVIRTNNALYFAFHWFAMSSTCYNPFIYCWLNENFRIELKALLSMCQRPPKPQEDRPPSPVPSFRVAWTEKNDGQRAPLANNLLPTSQLQSGKTDLSSVEPIVTMS

SEQ ID NO: 33587 - protein, 396 aa, Homo sapiens
  Payload ID: 6626
  Gene Symbol: GPR84
  Gene Name: G protein-coupled receptor 84
  Uniprot ID: Q9NQS5
  ENSP ID: ENSP00000267015
MWNSSDANFSCYHESVLGYRYVAVSWGVVVAVTGTVGNVLTLLALAIQPKLRTRFNLLIANLTLADLLYCTLLQPFSVDTYLHLHWRTGATFCRVFGLLLFASNSVSILTLCLIALGRYLLIAHPKLFPQVFSAKGIVLALVSTWVVGVASFAPLWPIYILVPVVCTCSFDRIRGRPYTTILMGIYFVLGLSSVGIFYCLIHRQVKRAAQALDQYKLRQASIHSNHVARTDEAMPGRFQELDSRLASGGPSEGISSEPVSAATTQTLEGDSSEVGDQINSKRAKQMAEKSPPEASAKAQPIKGARRAPDSSSEFGKVTRMCFAVFLCFALSYIPFLLLNILDARVQAPRVVHMLAANLTWLNGCINPVLYAAMNRQFRQAYGSILKRGPRSFHRLH

SEQ ID NO: 33588 - protein, 396 aa, Homo sapiens; identical to SEQ ID NO: 33587
  Payload ID: 6626
  Gene Symbol: GPR84
  Gene Name: G protein-coupled receptor 84
  Uniprot ID: Q9NQS5
  ENSP ID: ENSP00000450310

SEQ ID NO: 33589 - protein, 370 aa, Homo sapiens
  Payload ID: 6627
  Gene Symbol: GPR85
  Gene Name: G protein-coupled receptor 85
  Uniprot ID: P60893
  ENSP ID: ENSP00000297146
MANYSHAADNILQNLSPLTAFLKLTSLGFIIGVSVVGNLLISILLVKDKTLHRAPYYFLLDLCCSDILRSAICFPFVFNSVKNGSTWTYGTLTCKVIAFLGVLSCFHTAFMLFCISVTRYLAIAHHRFYTKRLTFWTCLAVICMVWTLSVAMAFPPVLDVGTYSFIREEDQCTFQHRSFRANDSLGFMLLLALILLATQLVYLKLIFFVHDRRKMKPVQFVAAVSQNWTFHGPGASGQAAANWLAGFGRGPTPPTLLGIRQNANTTGRRRLLVLDEFKMEKRISRMFYIMTFLFLTLWGPYLVACYWRVFARGPVVPGGFLTAAVWMSFAQAGINPFVCIFSNRELRRCFSTTLLYCRKSRLPREPYCVI

SEQ ID NO: 33590 - protein, 370 aa, Homo sapiens; identical to SEQ ID NO: 33589
  Payload ID: 6627
  Gene Symbol: GPR85
  Gene Name: G protein-coupled receptor 85
  Uniprot ID: P60893
  ENSP ID: ENSP00000396763

SEQ ID NO: 33591 - protein, 370 aa, Homo sapiens; identical to SEQ ID NO: 33589
  Payload ID: 6627
  Gene Symbol: GPR85
  Gene Name: G protein-coupled receptor 85
  Uniprot ID: P60893
  ENSP ID: ENSP00000401178

SEQ ID NO: 33592 - protein, 121 aa, Homo sapiens
  Payload ID: 6627
  Gene Symbol: GPR85
  Gene Name: G protein-coupled receptor 85
  ENSP ID: ENSP00000415699
MANYSHAADNILQNLSPLTAFLKLTSLGFIIGVSVVGNLLISILLVKDKTLHRAPYYFLLDLCCSDILRSAICFPFVFNSVKNGSTWTYGTLTCKVIAFLGVLSCFHTAFMLFCISVTRYL

SEQ ID NO: 33593 - protein, 71 aa, Homo sapiens
  Payload ID: 6627
  Gene Symbol: GPR85
  Gene Name: G protein-coupled receptor 85
  ENSP ID: ENSP00000416722
MANYSHAADNILQNLSPLTAFLKLTSLGFIIGVSVVGNLLISILLVKDKTLHRAPYYFLLDLCCSDILRSA

SEQ ID NO: 33594 - protein, 370 aa, Homo sapiens; identical to SEQ ID NO: 33589
  Payload ID: 6627
  Gene Symbol: GPR85
  Gene Name: G protein-coupled receptor 85
  Uniprot ID: P60893
  ENSP ID: ENSP00000476863

SEQ ID NO: 33595 - protein, 358 aa, Homo sapiens
  Payload ID: 6628
  Gene Symbol: GPR87
  Gene Name: G protein-coupled receptor 87
  Uniprot ID: Q9BY21
  ENSP ID: ENSP00000260843
MGFNLTLAKLPNNELHGQESHNSGNRSDGPGKNTTLHNEFDTIVLPVLYLIIFVASILLNGLAVWIFFHIRNKTSFIFYLKNIVVADLIMTLTFPFRIVHDAGFGPWYFKFILCRYTSVLFYANMYTSIVFLGLISIDRYLKVVKPFGDSRMYSITFTKVLSVCVWVIMAVLSLPNIILTNGQPTEDNIHDCSKLKSPLGVKWHTAVTYVNSCLFVAVLVILIGCYIAISRYIHKSSRQFISQSSRKRKHNQSIRVVVAVFFTCFLPYHLCRIPFTFSHLDRLLDESAQKILYYCKEITLFLSACNVCLDPIIYFFMCRSFSRRLFKKSNIRTRSESIRSLQSVRRSEVRIYYDYTDV

SEQ ID NO: 33596 - protein, 384 aa, Homo sapiens
  Payload ID: 6629
  Gene Symbol: GPR88
  Gene Name: G protein-coupled receptor 88
  Uniprot ID: Q9GZN0
  ENSP ID: ENSP00000314223
MTNSSSTSTSSTTGGSLLLLCEEEESWAGRRIPVSLLYSGLAIGGTLANGMVIYLVSSFRKLQTTSNAFIVNGCAADLSVCALWMPQEAVLGLLPTGSAEPPADWDGAGGSYRLLRGGLLGLGLTVSLLSHCLVALNRYLLITRAPATYQALYQRRHTAGMLALSWALALGLVLLLPPWAPRPGAAPPRVHYPALLAAAALLAQTALLLHCYLGIVRRVRVSVKRVSVLNFHLLHQLPGCAAAAAAFPGAQHAPGPGGAAHPAQAQPLPPALHPRRAQRRLSGLSVLLLCCVFLLATQPLVWVSLASGFSLPVPWGVQAASWLLCCALSALNPLLYTWRNEEFRRSVRSVLPGVGDAAAAAVAATAVPAVSQAQLGTRAAGQHW

SEQ ID NO: 33597 - protein, 455 aa, Homo sapiens
  Payload ID: 6630
  Gene Symbol: GPR89A
  Gene Name: G protein-coupled receptor 89A
  Uniprot ID: B7ZAQ6
  ENSP ID: ENSP00000319673
MSFLIDSSIMITSQILFFGFGWLFFMRQLFKDYEIRQYVVQVIFSVTFAFSCTMFELIIFEILGVLNSSSRYFHWKMNLCVILLILVFMVPFYIGYFIVSNIRLLHKQRLLFSCLLWLTFMYFFWKLGDPFPILSPKHGILSIEQLISRVGVIGVTLMALLSGFGAVNCPYTYMSYFLRNVTDTDILALERRLLQTMDMIISKKKRMAMARRTMFQKGEVHNKPSGFWGMIKSVTTSASGSENLTLIQQEVDALEELSRQLFLETADLYATKERIEYSKTFKGKYFNFLGYFFSIYCVWKIFMATINIVFDRVGKTDPVTRGIEITVNYLGIQFDVKFWSQHISFILVGIIIVTSIRGLLITLTKFFYAISSSKSSNVIVLLLAQIMGMYFVSSVLLIRMSMPLEYRTIITEVLGELQFNFYHRWFDVIFLVSALSSILFLYLAHKQAPEKQMAP

SEQ ID NO: 33598 - protein, 55 aa, Homo sapiens
  Payload ID: 6630
  Gene Symbol: GPR89A
  Gene Name: G protein-coupled receptor 89A
  ENSP ID: ENSP00000432212
MSFLIDSSIMITSQPRLSGDWPAAVRVPTRHPSPEFRSTFGSGPPTSRLRAGAAS

SEQ ID NO: 33599 - protein, 430 aa, Homo sapiens
  Payload ID: 6630
  Gene Symbol: GPR89A
  Gene Name: G protein-coupled receptor 89A
  Uniprot ID: B7ZAQ6
  ENSP ID: ENSP00000432248
MRQLFKDYEIRQYVVQVIFSVTFAFSCTMFELIIFEILGVLNSSSRYFHWKMNLCVILLILVFMVPFYIGYFIVSNIRLLHKQRLLFSCLLWLTFMYFFWKLGDPFPILSPKHGILSIEQLISRVGVIGVTLMALLSGFGAVNCPYTYMSYFLRNVTDTDILALERRLLQTMDMIISKKKRMAMARRTMFQKGEVHNKPSGFWGMIKSVTTSASGSENLTLIQQEVDALEELSRQLFLETADLYATKERIEYSKTFKGKYFNFLGYFFSIYCVWKIFMATINIVFDRVGKTDPVTRGIEITVNYLGIQFDVKFWSQHISFILVGIIIVTSIRGLLITLTKFFYAISSSKSSNVIVLLLAQIMGMYFVSSVLLIRMSMPLEYRTIITEVLGELQFNFYHRWFDVIFLVSALSSILFLYLAHKQAPEKQMAP

SEQ ID NO: 33600 - protein, 229 aa, Homo sapiens
  Payload ID: 6630
  Gene Symbol: GPR89A
  Gene Name: G protein-coupled receptor 89A
  ENSP ID: ENSP00000433482
MSFLIDSSIMITSQIRQYVVQVIFSVTFAFSCTMFELIIFEILGVLNSSSRYFHWKMNLCVILLILVFMVPFYIGYFIVSNIRLLHKQRLLFSCLLWLTFMYFFWKLGDPFPILSPKHGILSIEQLISRVGVIGVTLMALLSGFGAVNCPYTYMSYFLRNVTDTDILALERRLLQTMDMIISKKKRMAMARRTMFQKGEVHNKPSGFWGMIKSVTTSASGSESILCPSA

SEQ ID NO: 33601 - protein, 124 aa, Homo sapiens
  Payload ID: 6630
  Gene Symbol: GPR89A
  Gene Name: G protein-coupled receptor 89A
  Uniprot ID: B7ZAQ6
  ENSP ID: ENSP00000434108
MSFLIDSSIMITSQILFFGFGWLFFMRQLFKDYEIRQYVVQVIFSVTFAFSCTMFELIIFEILGVLNSSSRYFHWKMNLCVILLILVFMVPFYIGYFIVSNIRLLLSPLSQCINNDCFFPVSYG

SEQ ID NO: 33602 - protein, 430 aa, Homo sapiens; identical to SEQ ID NO: 33599
  Payload ID: 6630
  Gene Symbol: GPR89A
  Gene Name: G protein-coupled receptor 89A
  Uniprot ID: B7ZAQ6
  ENSP ID: ENSP00000434495

SEQ ID NO: 33603 - protein, 124 aa, Homo sapiens; identical to SEQ ID NO: 33601
  Payload ID: 6630
  Gene Symbol: GPR89A
  Gene Name: G protein-coupled receptor 89A
  Uniprot ID: B7ZAQ6
  ENSP ID: ENSP00000436705

SEQ ID NO: 33604 - protein, 455 aa, Homo sapiens; identical to SEQ ID NO: 33597
  Payload ID: 6631
  Gene Symbol: GPR89B
  Gene Name: G protein-coupled receptor 89B
  Uniprot ID: P0CG08
  ENSP ID: ENSP00000358233

SEQ ID NO: 33605 - protein, 216 aa, Homo sapiens
  Payload ID: 6631
  Gene Symbol: GPR89B
  Gene Name: G protein-coupled receptor 89B
  ENSP ID: ENSP00000475253
MSFLIDSSIMITSQIRQYVVQVIFSVTFAFSCTMFELIIFEILGVLNSSSRYFHWKMNLCVILLILVFMVPFYIGYFIVSNIRLLHKQRLLFSCLLWLTFMYFFWKLGDPFPILSPKHGILSIEQLISRVGVIGVTLMALLSGFGAVNCPYTYMSYFLRNVTDTDILALERRLLQTMDMIISKKKRMAMARRTMFQKGEVHNKPSGFWGMIKSVTT

SEQ ID NO: 33606 - protein, 93 aa, Homo sapiens
  Payload ID: 6631
  Gene Symbol: GPR89B
  Gene Name: G protein-coupled receptor 89B
  ENSP ID: ENSP00000480007
  MOD_RES (1)..(1): Any amino acid
XCPYTYMSYFLRNVTDTDILALERRLLQTMDMIISKKKRMAMARRTMFQKGEVHNKPSGFWGMIKSVTTSASGSETSLSLCAKWITPWHKTIP

SEQ ID NO: 33607 - protein, 128 aa, Homo sapiens
  Payload ID: 6631
  Gene Symbol: GPR89B
  Gene Name: G protein-coupled receptor 89B
  ENSP ID: ENSP00000480018
  MOD_RES (1)..(1): Any amino acid
XLSPKHGILSIEQLISRVGVIGVTLMALLSGFGAVNCPYTYMSYFLRNVTDTDILALERRLLQTMDMIISKKKRMAMARRTMFQKGEVHNKPSGFWGMIKSVTTSASGSETSLSLCAKWITPWHKTIP

SEQ ID NO: 33608 - protein, 124 aa, Homo sapiens; identical to SEQ ID NO: 33601
  Payload ID: 6631
  Gene Symbol: GPR89B
  Gene Name: G protein-coupled receptor 89B
  ENSP ID: ENSP00000480882

SEQ ID NO: 33609 - protein, 1395 aa, Homo sapiens
  Payload ID: 6632
  Gene Symbol: GPRASP1
  Gene Name: G protein-coupled receptor associated sorting protein 1
  Uniprot ID: Q5JY77
  ENSP ID: ENSP00000355146
MTGAEIESGAQVKPEKKPGEEVVGGAEIENDVPLVVRPKVRTQAQIMPGARPKNKSKVMPGASTKVETSAVGGARPKSKAKAIPVSRFKEEAQMWAQPRFGAERLSKTERNSQTNIIASPLVSTDSVLVAKTKYLSEDRELVNTDTESFPRRKAHYQAGFQPSFRSKEETNMGSWCCPRPTSKQEASPNSDFKWVDKSVSSLFWSGDEVTAKFHPGNRVKDSNRSMHMANQEANTMSRSQTNQELYIASSSGSEDESVKTPWFWARDKTNTWSGPREDPNSRSRFRSKKEVYVESSSGSEHEDHLESWFGAGKEAKFRSKMRAGKEANNRARHRAKREACIDFMPGSIDVIKKESCFWPEENANTFSRPMIKKEARARAMTKEEAKTKARARAKQEARSEEEALIGTWFWATDESSMADEASIESSLQVEDESIIGSWFWTEEEASMGTGASSKSRPRTDGERIGDSLFGAREKTSMKTGAEATSESILAADDEQVIIGSWFWAGEEVNQEAEEETIFGSWFWVIDAASVESGVGVSCESRTRSEEEEVIGPWFWSGEQVDIEAGIGEEARPGAEEETIFGSWFWAENQTYMDCRAETSCDTMQGAEEEEPIIGSWFWTRVEACVEGDVNSKSSLEDKEEAMIPCFGAKEEVSMKHGTGVRCRFMAGAEETNNKSCFWAEKEPCMYPAGGGSWKSRPEEEEDIVNSWFWSRKYTKPEAIIGSWLWATEESNIDGTGEKAKLLTEEETIINSWFWKEDEAISEATDREESRPEAEEGDIIGSWFWAGEEDRLEPAAETREEDRLAAEKEGIVGSWFGAREETIRREAGSCSKSSPKAEEEEVIIGSWFWEEEASPEAVAGVGFESKPGTEEEEITVGSWFWPEEEASIQAGSQAVEEMESETEEETIFGSWFWDGKEVSEEAGPCCVSKPEDDEEMIVESWFWSRDKAIKETGTVATCESKPENEEGAIVGSWFEAEDEVDNRTDNGSNCGSRTLADEDEAIVGSWFWAGDEAHFESNPSPVFRAICRSTCSVEQEPDPSRRPQSWEEVTVQFKPGPWGRVGFPSISPFRFPKEAASLFCEMFGGKPRNMVLSPEGEDQESLLQPDQPSPEFPFQYDPSYRSVQEIREHLRAKESTEPESSSCNCIQCELKIGSEEFEELLLLMEKIRDPFIHEISKIAMGMRSASQFTRDFIRDSGVVSLIETLLNYPSSRVRTSFLENMIRMAPPYPNLNIIQTYICKVCEETLAYSVDSPEQLSGIRMIRHLTTTTDYHTLVANYMSGFLSLLATGNAKTRFHVLKMLLNLSENLFMTKELLSAEAVSEFIGLFNREETNDNIQIVLAIFENIGNNIKKETVFSDDDFNIEPLISAFHKVEKFAKELQGKTDNQNDPEGDQEN

SEQ ID NO: 33610 - protein, 1395 aa, Homo sapiens; identical to SEQ ID NO: 33609
  Payload ID: 6632
  Gene Symbol: GPRASP1
  Gene Name: G protein-coupled receptor associated sorting protein 1
  Uniprot ID: Q5JY77
  ENSP ID: ENSP00000393691

SEQ ID NO: 33611 - protein, 1395 aa, Homo sapiens; identical to SEQ ID NO: 33609
  Payload ID: 6632
  Gene Symbol: GPRASP1
  Gene Name: G protein-coupled receptor associated sorting protein 1
  Uniprot ID: Q5JY77
  ENSP ID: ENSP00000409420

SEQ ID NO: 33612 - protein, 1395 aa, Homo sapiens; identical to SEQ ID NO: 33609
  Payload ID: 6632
  Gene Symbol: GPRASP1
  Gene Name: G protein-coupled receptor associated sorting protein 1
  Uniprot ID: Q5JY77
  ENSP ID: ENSP00000445683

SEQ ID NO: 33613 - protein, 838 aa, Homo sapiens
  Payload ID: 6633
  Gene Symbol: GPRASP2
  Gene Name: G protein-coupled receptor associated sorting protein 2
  Uniprot ID: Q96D09
  ENSP ID: ENSP00000339057
MTGAEIEPSAQAKPEKKAGEEVIAGPERENDVPLVVRPKVRTQATTGARPKTETKSVPAARPKTEAQAMSGARPKTEVQVMGGARPKTEAQGITGARPKTDARAVGGARSKTDAKAIPGARPKDEAQAWAQSEFGTEAVSQAEGVSQTNAVAWPLATAESGSVTKSKGLSMDRELVNVDAETFPGTQGQKGIQPWFGPGEETNMGSWCYSRPRAREEASNESGFWSADETSTASSFWTGEETSVRSWPREESNTRSRHRAKHQTNPRSRPRSKQEAYVDSWSGSEDEASNPFSFWVGENTNNLFRPRVREEANIRSKLRTNREDCFESESEDEFYKQSWVLPGEEANSRFRHRDKEDPNTALKLRAQKDVDSDRVKQEPRFEEEVIIGSWFWAEKEASLEGGASAICESEPGTEEGAIGGSAYWAEEKSSLGAVAREEAKPESEEEAIFGSWFWDRDEACFDLNPCPVYKVSDRFRDAAEELNASSRPQTWDEVTVEFKPGLFHGVGFRSTSPFGIPEEASEMLEAKPKNLELSPEGEEQESLLQPDQPSPEFTFQYDPSYRSVREIREHLRARESAESESWSCSCIQCELKIGSEEFEEFLLLMDKIRDPFIHEISKIAMGMRSASQFTRDFIRDSGVVSLIETLLNYPSSRVRTSFLENMIHMAPPYPNLNMIETFICQVCEETLAHSVDSLEQLTGIRMLRHLTMTIDYHTLIANYMSGFLSLLTTANARTKFHVLKMLLNLSENPAVAKKLFSAKALSIFVGLFNIEETNDNIQIVIKMFQNISNIIKSGKMSLIDDDFSLEPLISAFREFEELAKQLQAQIDNQNDPEVGQQS

SEQ ID NO: 33614 - protein, 838 aa, Homo sapiens; identical to SEQ ID NO: 33613
  Payload ID: 6633
  Gene Symbol: GPRASP2
  Gene Name: G protein-coupled receptor associated sorting protein 2
  Uniprot ID: Q96D09
  ENSP ID: ENSP00000437394

SEQ ID NO: 33615 - protein, 838 aa, Homo sapiens; identical to SEQ ID NO: 33613
  Payload ID: 6633
  Gene Symbol: GPRASP2
  Gene Name: G protein-coupled receptor associated sorting protein 2
  Uniprot ID: Q96D09
  ENSP ID: ENSP00000437872

SEQ ID NO: 33616 - protein, 563 aa, Homo sapiens
  Payload ID: 6634
  Gene Symbol: GRK1
  Gene Name: G protein-coupled receptor kinase 1
  Uniprot ID: Q15835
  ENSP ID: ENSP00000334876
MDFGSLETVVANSAFIAARGSFDGSSSQPSRDKKYLAKLKLPPLSKCESLRDSLSLEFESVCLEQPIGKKLFQQFLQSAEKHLPALELWKDIEDYDTADNDLQPQKAQTILAQYLDPQAKLFCSFLDEGIVAKFKEGPVEIQDGLFQPLLQATLAHLGQAPFQEYLGSLYFLRFLQWKWLEAQPMGEDWFLDFRVLGKGGFGEVSACQMKATGKLYACKKLNKKRLKKRKGYQGAMVEKKILMKVHSRFIVSLAYAFETKADLCLVMTIMNGGDIRYHIYNVNEENPGFPEPRALFYTAQIICGLEHLHQRRIVYRDLKPENVLLDNDGNVRISDLGLAVELLDGQSKTKGYAGTPGFMAPELLQGEEYDFSVDYFALGVTLYEMIAARGPFRARGEKVENKELKHRIISEPVKYPDKFSQASKDFCEALLEKDPEKRLGFRDETCDKLRAHPLFKDLNWRQLEAGMLMPPFIPDSKTVYAKDIQDVGAFSTVKGVAFDKTDTEFFQEFATGNCPIPWQEEMIETGIFGELNVWRSDGQMPDDMKGISGGSSSSSKSGMCLVS

SEQ ID NO: 33617 - protein, 207 aa, Homo sapiens
  Payload ID: 6634
  Gene Symbol: GRK1
  Gene Name: G protein-coupled receptor kinase 1
  ENSP ID: ENSP00000488329
  MOD_RES (1)..(1): Any amino acid
XFMAPELLQGEEYDFSVDYFALGVTLYEMIAARGPFRARGEKVENKELKHRIISEPVKYPDKFSQASKDFCEALLEKDPEKRLGFRDETCDKLRAHPLFKDLNWRQLEAGMLMPPFIPDSKTVYAKDIQDVGAFSTVKGVAFDKTDTEFFQEFATGNCPIPWQEEMIETGIFGELNVWRSDGQMPDDMKGISGGSSSSSKSGMCLVS

SEQ ID NO: 33618 - protein, 546 aa, Homo sapiens
  Payload ID: 6635
  Gene Symbol: GRK4
  Gene Name: G protein-coupled receptor kinase 4
  Uniprot ID: P32298
  ENSP ID: ENSP00000264764
MELENIVANSLLLKARQEKDYSSLCDKQPIGRRLFRQFCDTKPTLKRHIEFLDAVAEYEVADDEDRSDCGLSILDRFFNDKLAAPLPEIPPDVVTECRLGLKEENPSKKAFEECTRVAHNYLRGEPFEEYQESSYFSQFLQWKWLERQPVTKNTFRHYRVLGKGGFGEVCACQVRATGKMYACKKLQKKRIKKRKGEAMALNEKRILEKVQSRFVVSLAYAYETKDALCLVLTIMNGGDLKFHIYNLGNPGFDEQRAVFYAAELCCGLEDLQRERIVYRDLKPENILLDDRGHIRISDLGLATEIPEGQRVRGRVGTVGYMAPEVVNNEKYTFSPDWWGLGCLIYEMIQGHSPFKKYKEKVKWEEVDQRIKNDTEEYSEKFSEDAKSICRMLLTKNPSKRLGCRGEGAAGVKQHPVFKDINFRRLEANMLEPPFCPDPHAVYCKDVLDIEQFSVVKGIYLDTADEDFYARFATGCVSIPWQNEMIESGCFKDINKSESEEALPLDLDKNIHTPVSRPNRGFFYRLFRRGGCLTMVPSEKEVEPKQC

SEQ ID NO: 33619 - protein, 500 aa, Homo sapiens
  Payload ID: 6635
  Gene Symbol: GRK4
  Gene Name: G protein-coupled receptor kinase 4
  Uniprot ID: P32298
  ENSP ID: ENSP00000381128
MELENIVANSLLLKARQEKDYSSLCDKQPIGRRLFRQFCDTKPTLKRHIEFLDAVAEYEVADDEDRSDCGLSILDRFFNDKLAAPLPEIPPDVVTECRLGLKEENPSKKAFEECTRVAHNYLRGEPFEEYQESSYFSQFLQWKWLERQPVTKNTFRHYRVLGKGGFGEVCACQVRATGKMYACKKLQKKRIKKRKGEAMALNEKRILEKVQSRFVVSLAYAYETKDALCLVLTIMNGGDLKFHIYNLGNPGFDEQRAVFYAAELCCGLEDLQRERIVYRDLKPENILLDDRGHIRISDLGLATEIPEGQRVRGRVGTVGYMAPEVVNNEKYTFSPDWWGLGCLIYEMIQGHSPFKKYKEKVKWEEVDQRIKNDTEEYSEKFSEDAKSICRMLLTKNPSKRLGCRGEGAAGVKQHPVFKDINFRRLEANMLEPPFCPDPHAVYCKDVLDIEQFSVVKGIYLDTADEDFYARFATGCVSIPWQNEGCLTMVPSEKEVEPKQC

SEQ ID NO: 33620 - protein, 578 aa, Homo sapiens [sequence omitted]

SEQ ID NO: 33621 - protein, 84 aa, Homo sapiens
  Payload ID: 6635
  Gene Symbol: GRK4
  Gene Name: G protein-coupled receptor kinase 4
  ENSP ID: ENSP00000421650
MELENIVANSLLLKARQVLCIPPQKHQLVQPFSGRPPQSSVQSSVSDLMSPLPASQESWRQSLGPQVPVLATVVLHTPSLLRNC

SEQ ID NO: 33622 - protein, 532 aa, Homo sapiens
  Payload ID: 6635
  Gene Symbol: GRK4
  Gene Name: G protein-coupled receptor kinase 4
  Uniprot ID: P32298
  ENSP ID: ENSP00000427445
MELENIVANSLLLKARQGGYGKKSGRSKKWKEILTLPPVSQCSELRHSIEKDYSSLCDKQPIGRRLFRQFCDTKPTLKRHIEFLDAVAEYEVADDEDRSDCGLSILDRFFNDKLAAPLPEIPPDVVTECRLGLKEENPSKKAFEECTRVAHNYLRGEPFEEYQESSYFSQFLQWKWLERQPVTKNTFRHYRVLGKGGFGEVCACQVRATGKMYACKKLQKKRIKKRKGEAMALNEKRILEKVQSRFVVSLAYAYETKDALCLVLTIMNGGDLKFHIYNLGNPGFDEQRAVFYAAELCCGLEDLQRERIVYRDLKPENILLDDRGHIRISDLGLATEIPEGQRVRGRVGTVGYMAPEVVNNEKYTFSPDWWGLGCLIYEMIQGHSPFKKYKEKVKWEEVDQRIKNDTEEYSEKFSEDAKSICRMLLTKNPSKRLGCRGEGAAGVKQHPVFKDINFRRLEANMLEPPFCPDPHAVYCKDVLDIEQFSVVKGIYLDTADEDFYARFATGCVSIPWQNEGCLTMVPSEKEVEPKQC

SEQ ID NO: 33623 - protein, 590 aa, Homo sapiens
  Payload ID: 6636
  Gene Symbol: GRK5
  Gene Name: G protein-coupled receptor kinase 5
  Uniprot ID: P34947
  ENSP ID: ENSP00000376609
MELENIVANTVLLKAREGGGGKRKGKSKKWKEILKFPHISQCEDLRRTIDRDYCSLCDKQPIGRLLFRQFCETRPGLECYIQFLDSVAEYEVTPDEKLGEKGKEIMTKYLTPKSPVFIAQVGQDLVSQTEEKLLQKPCKELFSACAQSVHEYLRGEPFHEYLDSMFFDRFLQWKWLERQPVTKNTFRQYRVLGKGGFGEVCACQVRATGKMYACKRLEKKRIKKRKGESMALNEKQILEKVNSQFVVNLAYAYETKDALCLVLTIMNGGDLKFHIYNMGNPGFEEERALFYAAEILCGLEDLHRENTVYRDLKPENILLDDYGHIRISDLGLAVKIPEGDLIRGRVGTVGYMAPEVLNNQRYGLSPDYWGLGCLIYEMIEGQSPFRGRKEKVKREEVDRRVLETEEVYSHKFSEEAKSICKMLLTKDAKQRLGCQEEGAAEVKRHPFFRNMNFKRLEAGMLDPPFVPDPRAVYCKDVLDIEQFSTVKGVNLDHTDDDFYSKFSTGSVSIPWQNEMIETECFKELNVFGPNGTLPPDLNRNHPPEPPKKGLLQRLFKRQHQNNSKSSPSSKTSFNHHINSNHVSSNSTGSS

SEQ ID NO: 33624 - protein, 576 aa, Homo sapiens
  Payload ID: 6637
  Gene Symbol: GRK6
  Gene Name: G protein-coupled receptor kinase 6
  Uniprot ID: P43250
  ENSP ID: ENSP00000347655
MELENIVANTVLLKAREGGGGNRKGKSKKWRQMLQFPHISQCEELRLSLERDYHSLCERQPIGRLLFREFCATRPELSRCVAFLDGVAEYEVTPDDKRKACGRQLTQNFLSHTGPDLIPEVPRQLVTNCTQRLEQGPCKDLFQELTRLTHEYLSVAPFADYLDSIYFNRFLQWKWLERQPVTKNTFRQYRVLGKGGFGEVCACQVRATGKMYACKKLEKKRIKKRKGEAMALNEKQILEKVNSRFVVSLAYAYETKDALCLVLTLMNGGDLKFHIYHMGQAGFPEARAVFYAAEICCGLEDLHRERIVYRDLKPENILLDDHGHIRISDLGLAVHVPEGQTIKGRVGTVGYMAPEVVKNERYTFSPDWWALGCLLYEMIAGQSPFQQRKKKIKREEVERLVKEVPEEYSERFSPQARSLCSQLLCKDPAERLGCRGGSAREVKEHPLFKKLNFKRLGAGMLEPPFKPDPQAIYCKDVLDIEQFSTVKGVELEPTDQDFYQKFATGSVPIPWQNEMVETECFQELNVFGLDGSVPPDLDWKGQPPAPPKKGLLQRLFSRQDCCGNCSDSEEELPTRL

SEQ ID NO: 33625 - protein, 560 aa, Homo sapiens
  Payload ID: 6637
  Gene Symbol: GRK6
  Gene Name: G protein-coupled receptor kinase 6
  Uniprot ID: P43250
  ENSP ID: ENSP00000348230
MELENIVANTVLLKAREGGGGNRKGKSKKWRQMLQFPHISQCEELRLSLERDYHSLCERQPIGRLLFREFCATRPELSRCVAFLDGVAEYEVTPDDKRKACGRQLTQNFLSHTGPDLIPEVPRQLVTNCTQRLEQGPCKDLFQELTRLTHEYLSVAPFADYLDSIYFNRFLQWKWLERQPVTKNTFRQYRVLGKGGFGEVCACQVRATGKMYACKKLEKKRIKKRKGEAMALNEKQILEKVNSRFVVSLAYAYETKDALCLVLTLMNGGDLKFHIYHMGQAGFPEARAVFYAAEICCGLEDLHRERIVYRDLKPENILLDDHGHIRISDLGLAVHVPEGQTIKGRVGTVGYMAPEVVKNERYTFSPDWWALGCLLYEMIAGQSPFQQRKKKIKREEVERLVKEVPEEYSERFSPQARSLCSQLLCKDPAERLGCRGGSAREVKEHPLFKKLNFKRLGAGMLEPPFKPDPQAIYCKDVLDIEQFSTVKGVELEPTDQDFYQKFATGSVPIPWQNEMVETECFQELNVFGLDGSVPPDLDWKGQPPAPPKKGLLQRLFSRQR

SEQ ID NO: 33626 - protein, 542 aa, Homo sapiens
  Payload ID: 6637
  Gene Symbol: GRK6
  Gene Name: G protein-coupled receptor kinase 6
  ENSP ID: ENSP00000377204
MELENIVANTVLLKAREGGGGNRKGKSKKWRQMLQFPHISQCEELRLSLERDYHSLCERQPIGRLLFREFCATRPELSRCVAFLDGVAEYEVTPDDKRKACGRQLTQNFLSHTGPDLIPEVPRQLVTNCTQRLEQGPCKDLFQELTRLTHEYLSVAPFADYLDSIYFNRFLQWKWLERQPVTKNTFRQYRVLGKGGFGEVCACQVRATGKMYACKKLEKKRIKKRKGEAMALNEKQILEKVNSRFVAGFPEARAVFYAAEICCGLEDLHRERIVYRDLKPENILLDDHGHIRISDLGLAVHVPEGQTIKGRVGTVGYMAPEVVKNERYTFSPDWWALGCLLYEMIAGQSPFQQRKKKIKREEVERLVKEVPEEYSERFSPQARSLCSQLLCKDPAERLGCRGGSAREVKEHPLFKKLNFKRLGAGMLEPPFKPDPQAIYCKDVLDIEQFSTVKGVELEPTDQDFYQKFATGSVPIPWQNEMVETECFQELNVFGLDGSVPPDLDWKGQPPAPPKKGLLQRLFSRQDCCGNCSDSEEELPTRL

SEQ ID NO: 33627 - protein, 253 aa, Homo sapiens
  Payload ID: 6637
  Gene Symbol: GRK6
  Gene Name: G protein-coupled receptor kinase 6
  ENSP ID: ENSP00000421055
MLQFPHISQCEELRLSLERDYHSLCERQPIGRLLFREFCATRPELSRCVAFLDGVAEYEVTPDDKRKACGRQLTQNFLSHTGPDLIPEVPRQLVTNCTQRLEQGPCKDLFQELTRLTHEYLSVAPFADYLDSIYFNRFLQWKWLERQPVTKNTFRQYRVLGKGGFGEVCACQVRATGKMYACKKLEKKRIKKRKGEAMALNEKQILEKVNSRFVVSLAYAYETKDALCLVLTLMNGGDLKFHIYHMGQAGFPE

SEQ ID NO: 33628 - protein, 17 aa, Homo sapiens
  Payload ID: 6637
  Gene Symbol: GRK6
  Gene Name: G protein-coupled receptor kinase 6
  ENSP ID: ENSP00000422342
MLQFPHISQCEELRLSL

SEQ ID NO: 33629 - protein, 63 aa, Homo sapiens
  Payload ID: 6637
  Gene Symbol: GRK6
  Gene Name: G protein-coupled receptor kinase 6
  ENSP ID: ENSP00000422873
MLQFPHISQCEELRLSLERDYHSLCERQPIGRLLFREFCATRPELSRCVAFLDGVAEYEVTPD

SEQ ID NO: 33630 - protein, 88 aa, Homo sapiens
  Payload ID: 6637
  Gene Symbol: GRK6
  Gene Name: G protein-coupled receptor kinase 6
  ENSP ID: ENSP00000423174
AEYEVTPDDKRKACGRQLTQNFLSHTADPRVPERGPFCRLPRQHLLQPFPAVEVAGKAASDQKHLQAIPSPGQRWLWGGVRLPGAGHR

SEQ ID NO: 33631 - protein, 129 aa, Homo sapiens
  Payload ID: 6637
  Gene Symbol: GRK6
  Gene Name: G protein-coupled receptor kinase 6
  ENSP ID: ENSP00000425391
MLQFPHISQCEELRLSLERDYHSLCERQPIGRLLFREFCATRPELSRCVAFLDGVAEYEVTPDDKRKACGRQLTQNFLSHTGPDLIPEVPRQLVTNCTQRLEQGPCKDLFQELTRLTHEYLSVAPFADY

SEQ ID NO: 33632 - protein, 475 aa, Homo sapiens
  Payload ID: 6637
  Gene Symbol: GRK6
  Gene Name: G protein-coupled receptor kinase 6
  ENSP ID: ENSP00000427581
MELENIVANTVLLKAREGGGGNRKGKSKKWRQMLQFPHISQCEELRLSLERDYHSLCERQPIGRLLFREFCATRPELSRCVAFLDGVAEYEVTPDDKRKACGRQLTQNFLSHTGPDLIPEVPRQLVTNCTQRLEQGPCKDLFQELTRLTHEYLSVAPFADYLDSIYFNRFLQWKWLERQPVTKNTFRQYRVLGKGGFGEVCACQVRATGKMYACKKLEKKRIKKRKGEAMALNEKQILEKVNSRFVVSLAYAYETKDALCLVLTLMNGGDLKFHIYHMGQAGFPEARAVFYAAEICCGLEDLHRERIVYRDLKPENILLDDHGHIRISDLGLAVHVPEGQTIKGRVGTVGYMAPEVVKNERYTFSPDWWALGCLLYEMIAGQSPFQQRKKKIKREEVERLVKEVPEEYSERFSPQARSLCSQLLCKDPAERLGCRGGSAREVKEHPLFKKLNFKRLGAGMLEPPFKPDVSAAHSC

SEQ ID NO: 33633 - protein, 589 aa, Homo sapiens
  Payload ID: 6637
  Gene Symbol: GRK6
  Gene Name: G protein-coupled receptor kinase 6
  Uniprot ID: P43250
  ENSP ID: ENSP00000433511
MELENIVANTVLLKAREGGGGNRKGKSKKWRQMLQFPHISQCEELRLSLERDYHSLCERQPIGRLLFREFCATRPELSRCVAFLDGVAEYEVTPDDKRKACGRQLTQNFLSHTGPDLIPEVPRQLVTNCTQRLEQGPCKDLFQELTRLTHEYLSVAPFADYLDSIYFNRFLQWKWLERQPVTKNTFRQYRVLGKGGFGEVCACQVRATGKMYACKKLEKKRIKKRKGEAMALNEKQILEKVNSRFVVSLAYAYETKDALCLVLTLMNGGDLKFHIYHMGQAGFPEARAVFYAAEICCGLEDLHRERIVYRDLKPENILLDDHGHIRISDLGLAVHVPEGQTIKGRVGTVGYMAPEVVKNERYTFSPDWWALGCLLYEMIAGQSPFQQRKKKIKREEVERLVKEVPEEYSERFSPQARSLCSQLLCKDPAERLGCRGGSAREVKEHPLFKKLNFKRLGAGMLEPPFKPDPQAIYCKDVLDIEQFSTVKGVELEPTDQDFYQKFATGSVPIPWQNEMVETECFQELNVFGLDGSVPPDLDWKGQPPAPPKKGLLQRLFSRQRIAVETAATARKSSPPASSPQPEAPTSSWR

SEQ ID NO: 33634 - protein, 553 aa, Homo sapiens
  Payload ID: 6638
  Gene Symbol: GRK7
  Gene Name: G protein-coupled receptor kinase 7
  Uniprot ID: Q8WTQ7
  ENSP ID: ENSP00000264952
MVDMGALDNLIANTAYLQARKPSDCDSKELQRRRRSLALPGLQGCAELRQKLSLNFHSLCEQQPIGRRLFRDFLATVPTFRKAATFLEDVQNWELAEEGPTKDSALQGLVATCASAPAPGNPQPFLSQAVATKCQAATTEEERVAAVTLAKAEAMAFLQEQPFKDFVTSAFYDKFLQWKLFEMQPVSDKYFTEFRVLGKGGFGEVCAVQVKNTGKMYACKKLDKKRLKKKGGEKMALLEKEILEKVSSPFIVSLAYAFESKTHLCLVMSLMNGGDLKFHIYNVGTRGLDMSRVIFYSAQIACGMLHLHELGIVYRDMKPENVLLDDLGNCRLSDLGLAVEMKGGKPITQRAGTNGYMAPEILMEKVSYSYPVDWFAMGCSIYEMVAGRTPFKDYKEKVSKEDLKQRTLQDEVKFQHDNFTEEAKDICRLFLAKKPEQRLGSREKSDDPRKHHFFKTINFPRLEAGLIEPPFVPDPSVVYAKDIAEIDDFSEVRGVEFDDKDKQFFKNFATGAVPIAWQEEIIETGLFEELNDPNRPTGCEEGNSSKSGVCLLL

SEQ ID NO: 33635 - protein, 761 aa, Homo sapiens
  Payload ID: 6639
  Gene Symbol: GIT1
  Gene Name: G protein-coupled receptor kinase interacting ArfGAP 1
  Uniprot ID: Q9Y2X7
  ENSP ID: ENSP00000225394
MSRKGPRAEVCADCSAPDPGWASISRGVLVCDECCSVHRSLGRHISIVKHLRHSAWPPTLLQMVHTLASNGANSIWEHSLLDPAQVQSGRRKANPQDKVHPIKSEFIRAKYQMLAFVHKLPCRDDDGVTAKDLSKQLHSSVRTGNLETCLRLLSLGAQANFFHPEKGTTPLHVAAKAGQTLQAELLVVYGADPGSPDVNGRTPIDYARQAGHHELAERLVECQYELTDRLAFYLCGRKPDHKNGHYIIPQMADSLDLSELAKAAKKKLQALSNRLFEELAMDVYDEVDRRENDAVWLATQNHSTLVTERSAVPFLPVNPEYSATRNQGRQKLARFNAREFATLIIDILSEAKRRQQGKSLSSPTDNLELSLRSQSDLDDQHDYDSVASDEDTDQEPLRSTGATRSNRARSMDSSDLSDGAVTLQEYLELKKALATSEAKVQQLMKVNSSLSDELRRLQREIHKLQAENLQLRQPPGPVPTPPLPSERAEHTPMAPGGSTHRRDRQAFSMYEPGSALKPFGGPPGDELTTRLQPFHSTELEDDAIYSVHVPAGLYRIRKGVSASAVPFTPSSPLLSCSQEGSRHTSKLSRHGSGADSDYENTQSGDPLLGLEGKRFLELGKEEDFHPELESLDGDLDPGLPSTEDVILKTEQVTKNIQELLRAAQEFKHDSFVPCSEKIHLAVTEMASLFPKRPALEPVRSSLRLLNASAYRLQSECRKTVPPEPGAPVDFQLLTQQVIQCAYDIAKAAKQLVTITTREKKQ

SEQ ID NO: 33636 - protein, 147 aa, Homo sapiens
  Payload ID: 6639
  Gene Symbol: GIT1
  Gene Name: G protein-coupled receptor kinase interacting ArfGAP 1
  ENSP ID: ENSP00000334125
MSRKGPRAEVCADCSAPGVCWCVTSAAACTGAWDATSPLSSTFATAPGLPRCCRWCTRLPATGPTPSGSTPCWTPHKCRAAGVKPTPKTKSTPSSQSSSGPSTRCWHLCTSFPAGTMMESPPKTSASNYTRACGQATWRHVCACSPW

SEQ ID NO: 33637 - protein, 770 aa, Homo sapiens
  Payload ID: 6639
  Gene Symbol: GIT1
  Gene Name: G protein-coupled receptor kinase interacting ArfGAP 1
  Uniprot ID: Q9Y2X7
  ENSP ID: ENSP00000378338
MSRKGPRAEVCADCSAPDPGWASISRGVLVCDECCSVHRSLGRHISIVKHLRHSAWPPTLLQMVHTLASNGANSIWEHSLLDPAQVQSGRRKANPQDKVHPIKSEFIRAKYQMLAFVHKLPCRDDDGVTAKDLSKQLHSSVRTGNLETCLRLLSLGAQANFFHPEKGTTPLHVAAKAGQTLQAELLVVYGADPGSPDVNGRTPIDYARQAGHHELAERLVECQYELTDRLAFYLCGRKPDHKNGHYIIPQMADRSRQKCMSQSLDLSELAKAAKKKLQALSNRLFEELAMDVYDEVDRRENDAVWLATQNHSTLVTERSAVPFLPVNPEYSATRNQGRQKLARFNAREFATLIIDILSEAKRRQQGKSLSSPTDNLELSLRSQSDLDDQHDYDSVASDEDTDQEPLRSTGATRSNRARSMDSSDLSDGAVTLQEYLELKKALATSEAKVQQLMKVNSSLSDELRRLQREIHKLQAENLQLRQPPGPVPTPPLPSERAEHTPMAPGGSTHRRDRQAFSMYEPGSALKPFGGPPGDELTTRLQPFHSTELEDDAIYSVHVPAGLYRIRKGVSASAVPFTPSSPLLSCSQEGSRHTSKLSRHGSGADSDYENTQSGDPLLGLEGKRFLELGKEEDFHPELESLDGDLDPGLPSTEDVILKTEQVTKNIQELLRAAQEFKHDSFVPCSEKIHLAVTEMASLFPKRPALEPVRSSLRLLNASAYRLQSECRKTVPPEPGAPVDFQLLTQQVIQCAYDIAKAAKQLVTITTREKKQ

SEQ ID NO: 33638 - protein, 747 aa, Homo sapiens
  Payload ID: 6639
  Gene Symbol: GIT1
  Gene Name: G protein-coupled receptor kinase interacting ArfGAP 1
  ENSP ID: ENSP00000462775
MSRKGPRAEVCADCSAPDPGWASISRGVLVCDECCSVHRSLGRHISIVKHLRHSAWPPTLLQMVHTLASNGANSIWEHSLLDPAQVQSGRRKANPQDKVHPIKSEFIRAKYQMLAFVHKLPCRDDDGVTAKDLSKQLHSSVRTGNLETCLRLLSLGAQANFFHPEKGTTPLHVAAKAGQTLQAELLVVYGADPGSPDVNGRTPIDYARQAGHHELAERLVECQYELTDRLAFYLCGRKPDHKNGHYIIPQMADRSRQKCMSQSLDLSELAKAAKKKLQALSNRLFEELAMDVYDEVDRRENDAVWLATQNHSTLVTERSAVPFLPVNPEYSATRNQGRQKLARFNAREFATLIIDILSEAKRRQQGKSLSSPTDNLELSLRSQSDLDDQHDYDSVASDEDTDQEPLRSTGATRSNRARSMDSSDLSDGAVTLQEYLELKKALATSEAKVQQLMKVNSSLSDELRRLQREIHKLQAENLQLRQPPGPVPTPPLPSERAEHTPMAPGGSTHRRDRQAFSMYEPGSALKPFGGPPGDELTTRLQPFHSTELEDDAIYSVHVPAGLYREGSRHTSKLSRHGSGADSDYENTQSGDPLLGLEGKRFLELGKEEDFHPELESLDGDLDPGLPSTEDVILKTEQVTKNIQELLRAAQEFKHDSFVPCSEKIHLAVTEMASLFPKRPALEPVRSSLRLLNASAYRLQSECRKTVPPEPGAPVDFQLLTQQVIQCAYDIAKAAKQLVTITTREKKQ

SEQ ID NO: 33639 - protein, 177 aa, Homo sapiens
  Payload ID: 6639
  Gene Symbol: GIT1
  Gene Name: G protein-coupled receptor kinase interacting ArfGAP 1
  ENSP ID: ENSP00000463435
ELEDDAIYSVHVPAGLYRIRKGVSASAVPFTPSSPLLSCSQEGSRHTSKLSRHGSGADSDYENTQSGDPLLGLEGKRFLELGKEEDFHPELESLDGDLDPGLPSTEDVILKTEQVTKNIQELLRAAQEFKHDSFVPCSEKIHLAVTEMASLFPKVQGPKRGPGVGGPRAGAGVENPI

SEQ ID NO: 33640 - protein, 228 aa, Homo sapiens
  Payload ID: 6639
  Gene Symbol: GIT1
  Gene Name: G protein-coupled receptor kinase interacting ArfGAP 1
  ENSP ID: ENSP00000463543
DHKNGHYIIPQMADSLDLSELAKAAKKKLQALSNRLFEELAMDVYDEVDRRENDAVWLATQNHSTLVTERSAVPFLPVNPEYSATRNQGRQKLARFNAREFATLIIDILNNLELSLRSQSDLDDQHDYDSVASDEDTDQEPLRSTGATRSNRARSMDSSDLSDGAVTLQEYLELKKALATSEAKVQQLMKVNSSLSDELRRLQREIHKLQAENLQLRQPPGPVPTPPL

SEQ ID NO: 33641 - protein, 149 aa, Homo sapiens
  Payload ID: 6639
  Gene Symbol: GIT1
  Gene Name: G protein-coupled receptor kinase interacting ArfGAP 1
  ENSP ID: ENSP00000463746
  MOD_RES (1)..(1): Any amino acid
XENLQLRQPPGPVPTPPLPSERAEHTPMAPGGSTHRRDRQAFSMYEPGSALKPFGGPPGDELTTRLQPFHSTELEDDAIYSVHVPAGLYRAGREEVSRAGQRGRLPPRAGKPGWRPRSWASQHRGCHLEDRAGHQEHSGTVAGSPGVQA

SEQ ID NO: 33642 - protein, 694 aa, Homo sapiens
  Payload ID: 6639
  Gene Symbol: GIT1
  Gene Name: G protein-coupled receptor kinase interacting ArfGAP 1
  ENSP ID: ENSP00000464388
MSRKGPRAEVCADCSAPDPGWASISRGVLVCDECCSVHRSLGRHISIVKHLRHSAWPPTLLQMVHTLASNGANSIWEHSLLDPAQVQSGRRKANPQDKVHPIKSEFIRAKYQMLAFVHKLPCRDDDGVTAKDLSKQLHSSVRTGNLETCLRLLSLGAQANFFHPEKGTTPLHVAAKAGQTLQAELLVVYGADPGSPDVNGRTPIDYARQAGHHELAERLVECQYELTDRLAFYLCGRKPDHKNGHYIIPQMADSLDLSELAKAAKKKLQALSNRLFEELAMDVYDEVDRRENDAVWLATQNHSTLVTERSAVPFLPVNPEYSATRNQGRQKLARFNAREFATLIIDILSEAKRRQQGKSLSSPTDNLELSLRSQSDLDDQHDYDSVASDEDTDQEPLRSTGATRSNRARSMDSSDLSDGAVTLQEYLELKKALATSEAKVQQLMKVNSSLSDELRRLQREIHKLQAENLQLRQPPGPVPTPPLPSERAEHTPMAPGGSTHRRDRQAFSMYEPGSALKPFGGPPGDELTTRLQPFHSTELEDDAIYSVHVPAGLYRIRKGVSASAVPFTPSSPLLSCSQEGSRHTSKLSRHGSGADSDYENTQSGDPLLGLEGKRFLELGKEEDFHPELESLDGDLDPGLPSTEDVILKTEQVTKNIQELLRAAQEFKHDSFVPCSEKIHLAVTEMASLFPKLVA

SEQ ID NO: 33643 - protein, 52 aa, Homo sapiens
  Payload ID: 6639
  Gene Symbol: GIT1
  Gene Name: G protein-coupled receptor kinase interacting ArfGAP 1
  ENSP ID: ENSP00000464933
MVHTLASNGANSIWEHSLLDPAQVQSGRRKANPQDKVHPIKSEFIRAKYQML

SEQ ID NO: 33644 - protein, 173 aa, Homo sapiens
  Payload ID: 6639
  Gene Symbol: GIT1
  Gene Name: G protein-coupled receptor kinase interacting ArfGAP 1
  ENSP ID: ENSP00000466824
MEHRHSPQPLPAALTAPAEEGHRGLYSHLDPGWASISRGVLVCDECCSVHRSLGRHISIVKHLRHSAWPPTLLQMVHTLASNGANSIWEHSLLDPAQVQSGRRKANPQDKVHPIKSEFIRAKYQMLAFVHKLPCRDDDGVTAKDLSKQLHSSVRTGNLETCLRLLSLGAQANF

SEQ ID NO: 33645 - protein, 421 aa, Homo sapiens
  Payload ID: 6640
  Gene Symbol: GIT2
  Gene Name: G protein-coupled receptor kinase interacting ArfGAP 2
  ENSP ID: ENSP00000323833
MSKRLRSSEVCADCSGPDPSWASVNRGTFLCDECCSVHRSLGRHISQVRHLKHTPWPPTLLQMVETLYNNGANSIWEHSLLDPASIMSGRRKANPQDKVHPNKAEFIRAKYQMLAFVHRLPCRDDDSVTAKDLSKQLHSSVRTGNLETCLRLLSLGAQANFFHPEKGNTPLHVASKAGQILQAELLAVYGADPGTQDSSGKTPVDYARQGGHHELAERLVEIQYELTDRLAFYLCGRKPDHKNGQHFIIPQMADSSLDLSELAKAAKKKLQSLSNHLFEELAMDVYDEVDRRETDAVWLATQNHSALVTETTVVPFLPVNPEYSSTRNQGRQKLARFNAHEFATLVIDILSDAKRRQQGSSLSGSKDNVELILKTINNQHSVESQDNDQPDYDSVASDEDTDLETTASKTNRQKLLGKDAN

SEQ ID NO: 33646 - protein, 681 aa, Homo sapiens [sequence omitted]

SEQ ID NO: 33647 - protein, 759 aa, Homo sapiens
  Payload ID: 6640
  Gene Symbol: GIT2
  Gene Name: G protein-coupled receptor kinase interacting ArfGAP 2
  Uniprot ID: Q14161
  ENSP ID: ENSP00000347464
MSKRLRSSEVCADCSGPDPSWASVNRGTFLCDECCSVHRSLGRHISQVRHLKHTPWPPTLLQMVETLYNNGANSIWEHSLLDPASIMSGRRKANPQDKVHPNKAEFIRAKYQMLAFVHRLPCRDDDSVTAKDLSKQLHSSVRTGNLETCLRLLSLGAQANFFHPEKGNTPLHVASKAGQILQAELLAVYGADPGTQDSSGKTPVDYARQGGHHELAERLVEIQYELTDRLAFYLCGRKPDHKNGQHFIIPQMADSSLDLSELAKAAKKKLQSLSNHLFEELAMDVYDEVDRRETDAVWLATQNHSALVTETTVVPFLPVNPEYSSTRNQGRQKLARFNAHEFATLVIDILSDAKRRQQGSSLSGSKDNVELILKTINNQHSVESQDNDQPDYDSVASDEDTDLETTASKTNRQKSLDSDLSDGPVTVQEFMEVKNALVASEAKIQQLMKVNNNLSDELRIMQKKLQTLQSENSNLRKQATTNVYQVQTGSEYTDTSNHSSLKRRPSARGSRPMSMYETGSGQKPYLPMGEASRPEESRMRLQPFPAHIGRSALVTSSSSLPSFPSTLSWSRDESARRASRLEKQNSTPESDYDNTPNDMEPDGMGSSRKGRQRSMVWPGDGLVPDTAEPHVAPSPTLPSTEDVIRKTEQITKNIQELLRAAQENKHDSYIPCSERIHVAVTEMAALFPKKPKSDMVRTSLRLLTSSAYRLQSECKKTLPGDPGSPTDVQLVTQQVIQCAYDIAKAAKQLVTITTKENNN

SEQ ID NO: 33648 - protein, 729 aa, Homo sapiens
  Payload ID: 6640
  Gene Symbol: GIT2
  Gene Name: G protein-coupled receptor kinase interacting ArfGAP 2
  Uniprot ID: Q14161
  ENSP ID: ENSP00000354282
MSKRLRSSEVCADCSGPDPSWASVNRGTFLCDECCSVHRSLGRHISQVRHLKHTPWPPTLLQMVETLYNNGANSIWEHSLLDPASIMSGRRKANPQDKVHPNKAEFIRAKYQMLAFVHRLPCRDDDSVTAKDLSKQLHSSVRTGNLETCLRLLSLGAQANFFHPEKGNTPLHVASKAGQILQAELLAVYGADPGTQDSSGKTPVDYARQGGHHELAERLVEIQYELTDRLAFYLCGRKPDHKNGQHFIIPQMADSSLDLSELAKAAKKKLQSLSNHLFEELAMDVYDEVDRRETDAVWLATQNHSALVTETTVVPFLPVNPEYSSTRNQGRQKLARFNAHEFATLVIDILSDAKRRQQGSSLSGSKDNVELILKTINNQHSVESQDNDQPDYDSVASDEDTDLETTASKTNRQKSLDSDLSDGPVTVQEFMEVKNALVASEAKIQQLMKVNNNLSDELRIMQKKLQTLQSENSNLRKQATTNVYQVQTGSEYTDTSNHSSLKRRPSARGSRPMSMYETGSGQKPYLPMGEASRPEESRMRLQPFPAHASRLEKQNSTPESDYDNTPNDMEPDGMGSSRKGRQRSMVWPGDGLVPDTAEPHVAPSPTLPSTEDVIRKTEQITKNIQELLRAAQENKHDSYIPCSERIHVAVTEMAALFPKKPKSDMVRTSLRLLTSSAYRLQSECKKTLPGDPGSPTDVQLVTQQVIQCAYDIAKAAKQLVTITTKENNN

SEQ ID NO: 33649 - protein, 681 aa, Homo sapiens
  Payload ID: 6640
  Gene Symbol: GIT2
  Gene Name: G protein-coupled receptor kinase interacting ArfGAP 2
  Uniprot ID: Q14161
  ENSP ID: ENSP00000391813
MSKRLRSSEVCADCSGPDPSWASVNRGTFLCDECCSVHRSLGRHISQVRHLKHTPWPPTLLQMVETLYNNGANSIWEHSLLDPASIMSGRRKANPQDKVHPNKAEFIRAKYQMLAFVHRLPCRDDDSVTAKDLSKQLHSSVRTGNLETCLRLLSLGAQANFFHPEKGNTPLHVASKAGQILQAELLAVYGADPGTQDSSGKTPVDYARQGGHHELAERLVEIQYELTDRLAFYLCGRKPDHKNGQHFIIPQMADRRLSLDLSELAKAAKKKLQSLSNHLFEELAMDVYDEVDRRETDAVWLATQNHSALVTETTVVPFLPVNPEYSSTRNQGRQKLARFNAHEFATLVIDILSDAKRRQQGSSLSGSKDNVELILKTINNQHSVESQDNDQPDYDSVASDEDTDLETTASKTNRQKLQTLQSENSNLRKQATTNVYQVQTGSEYTDTSNHSSLKRRPSARGSRPMSMYETGSGQKPYLPMGEASRPEESRMRLQPFPAHASRLEKQNSTPESDYDNTPNDMEPDGMGSSRKGRQRSMVWPGDGLVPDTAEPHVAPSPTLPSTEDVIRKTEQITKNIQELLRAAQENKHDSYIPCSERIHVAVTEMAALFPKKPKSDMVRTSLRLLTSSAYRLQSECKKTLPGDPGSPTDVQLVTQQVIQCAYDIAKAAKQLVTITTKENNN

SEQ ID NO: 33650 - protein, 631 aa, Homo sapiens
  Payload ID: 6640
  Gene Symbol: GIT2
  Gene Name: G protein-coupled receptor kinase interacting ArfGAP 2
  Uniprot ID: Q14161
  ENSP ID: ENSP00000447465
MSKRLRSSEVCADCSGPDPSWASVNRGTFLCDECCSVHRSLGRHISQVRHLKHTPWPPTLLQMVETLYNNGANSIWEHSLLDPASIMSGRRKANPQDKVHPNKAEFIRAKYQMLAFVHRLPCRDDDSVTAKDLSKQLHSSVRTGNLETCLRLLSLGAQANFFHPEKGNTPLHVASKAGQILQAELLAVYGADPGTQDSSGKTPVDYARQGGHHELAERLVEIQYELTDRLAFYLCGRKPDHKNGQHFIIPQMADSSLDLSELAKAAKKKLQSLSNHLFEELAMDVYDEVDRRETDAVWLATQNHSALVTETTVVPFLPVNPEYSSTRNQGRQKLARFNAHEFATLVIDILSDAKRRQQGSSLSGSKDNVELILKTINNQHSVESQDNDQPDYDSVASDEDTDLETTASKTNRQKSLDSDLSDGPVTVQEFMEVKNALVASEAKIQQLMKASRLEKQNSTPESDYDNTPNDMEPDGMGSSRKGRQRSMVWPGDGLVPDTAEPHVAPSPTLPSTEDVIRKTEQITKNIQELLRAAQENKHDSYIPCSERIHVAVTEMAALFPKKPKSDMVRTSLRLLTSSAYRLQSECKKTLPGDPGSPTDVQLVTQQVIQCAYDIAKAAKQLVTITTKENNN

SEQ ID NO: 33651 - protein, 708 aa, Homo sapiens
  Payload ID: 6640
  Gene Symbol: GIT2
  Gene Name: G protein-coupled receptor kinase interacting ArfGAP 2
  ENSP ID: ENSP00000448832
MSKRLRSSEVCADCSGPDPSWASVNRGTFLCDECCSVHRSLGRHISQVRHLKHTPWPPTLLQMVETLYNNGANSIWEHSLLDPASIMSGRRKANPQDKVHPNKAEFIRAKYQMLAFVHRLPCRDDDSVTAKDLSKQLHSSVRTGNLETCLRLLSLGAQANFFHPEKGNTPLHVASKAGQILQAELLAVYGADPGTQDSSGKTPVDYARQGGHHELAERLVEIQYELTDRLAFYLCGRKPDHKNGQHFIIPQMADSLDLSELAKAAKKKLQSLSNHLFEELAMDVYDEVDRRETDAVWLATQNHSALVTETTVVPFLPVNPEYSSTRNQGRQKLARFNAHEFATLVIDILSDAKRRQQGSSLSGSKDNVELILKTINNQHSVESQDNDQPDYDSVASDEDTDLETTASKTNRQKLQTLQSENSNLRKQATTNVYQVQTGSEYTDTSNHSSLKRRPSARGSRPMSMYETGSGQKPYLPMGEASRPEESRMRLQPFPAHIGRSALVTSSSSLPSFPSTLSWSRDESARRASRLEKQNSTPESDYDNTPNDMEPDGMGSSRKGRQRSMVWPGDGLVPDTAEPHVAPSPTLPSTEDVIRKTEQITKNIQELLRAAQENKHDSYIPCSERIHVAVTEMAALFPKKPKSDMVRTSLRLLTSSAYRLQSECKKTLPGDPGSPTDVQLVTQQVIQCAYDIAKAAKQLVTITTKENNN

SEQ ID NO: 33652 - protein, 471 aa, Homo sapiens
  Payload ID: 6640
  Gene Symbol: GIT2
  Gene Name: G protein-coupled receptor kinase interacting ArfGAP 2
  Uniprot ID: Q14161
  ENSP ID: ENSP00000450348
MSKRLRSSEVCADCSGPDPSWASVNRGTFLCDECCSVHRSLGRHISQVRHLKHTPWPPTLLQMVETLYNNGANSIWEHSLLDPASIMSGRRKANPQDKVHPNKAEFIRAKYQMLAFVHRLPCRDDDSVTAKDLSKQLHSSVRTGNLETCLRLLSLGAQANFFHPEKGNTPLHVASKAGQILQAELLAVYGADPGTQDSSGKTPVDYARQGGHHELAERLVEIQYELTDRLAFYLCGRKPDHKNGQHFIIPQMADSSLDLSELAKAAKKKLQSLSNHLFEELAMDVYDEVDRRETDAVWLATQNHSALVTETTVVPFLPVNPEYSSTRNQGRQKLARFNAHEFATLVIDILSDAKRRQQGSSLSGSKDNVELILKTINNQHSVESQDNDQPDYDSVASDEDTDLETTASKTNRQKSLDSDLSDGPVTVQEFMEVKNALVASEAKIQQLMKVNNNLSDELRIMQKKLLGKDAN

SEQ ID NO: 33653 - protein, 641 aa, Homo sapiens
  Payload ID: 6640
  Gene Symbol: GIT2
  Gene Name: G protein-coupled receptor kinase interacting ArfGAP 2
  ENSP ID: ENSP00000473637
MVETLYNNGANSIWEHSLLDPASIMSGRRKANPQDKVHPNKAEFIRAKYQMLAFVHRLPCRDDDSVTAKDLSKQLHSSVRTGNLETCLRLLSLGAQANFFHPEKGNTPLHVASKAGQILQAELLAVYGADPGTQDSSGKTPVDYARQGGHHELAERLVEIQYELTDRLAFYLCGRKPDHKNGQHFIIPQMADSSLDLSELAKAAKKKLQSLSNHLFEELAMDVYDEVDRRETDAVWLATQNHSALVTETTVVPFLPVNPEYSSTRNQGRQKLARFNAHEFATLVIDILSDAKRRQQGSSLSGSKDNVELILKTINNQHSVESQDNDQPDYDSVASDEDTDLETTASKTNRQKSLDSDLSDGPVTVQEFMEVKNALVASEAKIQQLMKVNNNLSDELRIMQKKLQTLQSENSNLRKQATTNVYQVQTGSEYTDTSNHSSLKRRPSARGSRPMSMYETGSGQKPYLPMGEASRPEESRMRLQPFPAHASRLEKQNSTPESDYDNTPNDMEPDGMGSSRKGRQRSMVWPGDGLVPDTAEPHVAPSPTLPSTEDVIRKTEQITKNIQELLRAAQENKHDSYIPCSERIHVAVTEMAALFPKKPKSDMVRTSLRLLTSSAYRLQSECKKTLPGDPGSPTDVQLVTQ

SEQ ID NO: 33654 - protein, 357 aa, Homo sapiens
  Payload ID: 6641
  Gene Symbol: GPRC5A
  Gene Name: G protein-coupled receptor, class C, group 5, member A
  Uniprot ID: Q8NFJ5
  ENSP ID: ENSP00000014914
MATTVPDGCRNGLKSKYYRLCDKAEAWGIVLETVATAGVVTSVAFMLTLPILVCKVQDSNRRKMLPTQFLFLLGVLGIFGLTFAFIIGLDGSTGPTRFFLFGILFSICFSCLLAHAVSLTKLVRGRKPLSLLVILGLAVGFSLVQDVIAIEYIVLTMNRTNVNVFSELSAPRRNEDFVLLLTYVLFLMALTFLMSSFTFCGSFTGWKRHGAHIYLTMLLSIAIWVAWITLLMLPDFDRRWDDTILSSALAANGWVFLLAYVSPEFWLLTKQRNPMDYPVEDAFCKPQLVKKSYGVENRAYSQEEITQGFEETGDTLYAPYSTHFQLQNQPPQKEFSIPRAHAWPSPYKDYEVKKEGS

SEQ ID NO: 33655 - protein, 66 aa, Homo sapiens
  Payload ID: 6641
  Gene Symbol: GPRC5A
  Gene Name: G protein-coupled receptor, class C, group 5, member A
  ENSP ID: ENSP00000439430
PMDYPVEDAFCKPQLVKKSYGVENRAYSQEEITQGFEETGDTLYAPYSTHFQLQVSDFFLPLHQRH

SEQ ID NO: 33656 - protein, 273 aa, Homo sapiens
  Payload ID: 6641
  Gene Symbol: GPRC5A
  Gene Name: G protein-coupled receptor, class C, group 5, member A
  ENSP ID: ENSP00000441627
MATTVPDGCRNGLKSKYYRLCDKAEAWGIVLETVATAGVVTSVAFMLTLPILVCKVQDSNRRKMLPTQFLFLLGVLGIFGLTFAFIIGLDGSTGPTRFFLFGILFSICFSCLLAHAVSLTKLVRGRKPLSLLVILGLAVGFSLVQDVIAIEYIVLTMNRTNVNVFSELSAPRRNEDFVLLLTYVLFLMALTFLMSSFTFCGSFTGWKRHGAHIYLTMLLSIAIWVAWITLLMLPDFDRRWDDTILSSALAANGWVFLLAYVSPEFWLLTKQRN

SEQ ID NO: 33657 - protein, 403 aa, Homo sapiens
  Payload ID: 6642
  Gene Symbol: GPRC5B
  Gene Name: G protein-coupled receptor, class C, group 5, member B
  Uniprot ID: Q9NZH0
  ENSP ID: ENSP00000300571
MFVASERKMRAHQVLTFLLLFVITSVASENASTSRGCGLDLLPQYVSLCDLDAIWGIVVEAVAGAGALITLLLMLILLVRLPFIKEKEKKSPVGLHFLFLLGTLGLFGLTFAFIIQEDETICSVRRFLWGVLFALCFSCLLSQAWRVRRLVRHGTGPAGWQLVGLALCLMLVQVIIAVEWLVLTVLRDTRPACAYEPMDFVMALIYDMVLLVVTLGLALFTLCGKFKRWKLNGAFLLITAFLSVLIWVAWMTMYLFGNVKLQQGDAWNDPTLAITLAASGWVFVIFHAIPEIHCTLLPALQENTPNYFDTSQPRMRETAFEEDVQLPRAYMENKAFSMDEHNAALRTAGFPNGSLGKRPSGSLGKRPSAPFRSNVYQPTEMAVVLNGGTIPTAPPSHTGRHLW

SEQ ID NO: 33658 - protein, 404 aa, Homo sapiens
  Payload ID: 6642
  Gene Symbol: GPRC5B
  Gene Name: G protein-coupled receptor, class C, group 5, member B
  Uniprot ID: Q9NZH0
  ENSP ID: ENSP00000442858
MFVASERKMRAHQVLTFLLLFVITSVASENASTSRGCGLDLLPQYVSLCDLDAIWGIVVEAVAGAGALITLLLMLILLVRLPFIKEKEKKSPVGLHFLFLLGTLGLFGLTFAFIIQEDETICSVRRFLWGVLFALCFSCLLSQAWRVRRLVRHGTGPAGWQLVGLALCLMLVQVIIAVEWLVLTVLRDTRPACAYEPMDFVMALIYDMVLLVVTLGLALFTLCGKFKRWKLNGAFLLITAFLSVLIWVAWMTMYLFGNVKLQQGDAWNDPTLAITLAASGWVFVIFHAIPEIHCTLLPALQENTPNYFDTSQPRMRETAFEEDVQLPRAYMENKAFSMDEHNAALRTAGFPNGSLGKRPSGSLGKRPSAPFRSNVYQPTEMAVVLNGGTEMVTHPRSLESFGAF

SEQ ID NO: 33659 - protein, 177 aa, Homo sapiens
  Payload ID: 6642
  Gene Symbol: GPRC5B
  Gene Name: G protein-coupled receptor, class C, group 5, member B
  ENSP ID: ENSP00000454667
MFVASERKMRAHQVLTFLLLFVITSVASENASTSRGCGLDLLPQYVSLCDLDAIWGIVVEAVAGAGALITLLLMLILLVRLPFIKEKEKKSPVGLHFLFLLGTLGLFGLTFAFIIQEDETICSVRRFLWGVLFALCFSCLLSQAWRVRRLVRHGTGPAGWQLVGLALCLMLVQVIIA

SEQ ID NO: 33660 - protein, 403 aa, Homo sapiens; identical to SEQ ID NO: 33657
  Payload ID: 6642
  Gene Symbol: GPRC5B
  Gene Name: G protein-coupled receptor, class C, group 5, member B
  Uniprot ID: Q9NZH0
  ENSP ID: ENSP00000454727

SEQ ID NO: 33661 - protein, 148 aa, Homo sapiens
  Payload ID: 6642
  Gene Symbol: GPRC5B
  Gene Name: G protein-coupled receptor, class C, group 5, member B
  ENSP ID: ENSP00000455960
MFVASERKMRAHQVLTFLLLFVITSVASENASTSRGCGLDLLPQYVSLCDLDAIWGIVVEAVAGAGALITLLLMLILLVRLPFIKEKEKKSPVGLHFLFLLGTLGLFGLTFAFIIQEDETICSVRRFLWGVLFALCFSCLLSQAWRVR

SEQ ID NO: 33662 - protein, 86 aa, Homo sapiens
  Payload ID: 6642
  Gene Symbol: GPRC5B
  Gene Name: G protein-coupled receptor, class C, group 5, member B
  ENSP ID: ENSP00000456724
MFVASERKMRAHQVLTFLLLFVITSVASENASTSRGCGLDLLPQYVSLCDLDAIWGIVVEAVAGAGALITLLLMLILLVRLPFIKE

SEQ ID NO: 33663 - protein, 25 aa, Homo sapiens
  Payload ID: 6642
  Gene Symbol: GPRC5B
  Gene Name: G protein-coupled receptor, class C, group 5, member B
  ENSP ID: ENSP00000457018
MFVASERKMRAHQVLTFLLLFVITS

SEQ ID NO: 33664 - protein, 90 aa, Homo sapiens
  Payload ID: 6642
  Gene Symbol: GPRC5B
  Gene Name: G protein-coupled receptor, class C, group 5, member B
  ENSP ID: ENSP00000457080
MFVASERKMRAHQVLTFLLLFVITSVASENASTSRGCGLDLLPQYVSLCDLDAIWGIVVEAVAGAGALITLLLMLILLVRLPFIKEKEKK

SEQ ID NO: 33665 - protein, 403 aa, Homo sapiens; identical to SEQ ID NO: 33657
  Payload ID: 6642
  Gene Symbol: GPRC5B
  Gene Name: G protein-coupled receptor, class C, group 5, member B
  Uniprot ID: Q9NZH0
  ENSP ID: ENSP00000457283

SEQ ID NO: 33666 - protein, 126 aa, Homo sapiens
  Payload ID: 6643
  Gene Symbol: GPRC5C
  Gene Name: G protein-coupled receptor, class C, group 5, member C
  ENSP ID: ENSP00000340595
MYPTRGVGYETILKEQKGQSMFVENKAFSMDEPVAAKRPVSPYSGYNGQLLTSVYQPTEMALMHKVPSEGAYDIILPRATANSQVMGSANSTLRAEDMYSAQSHQAATPPKDGKNSQVFRNPYVWD

SEQ ID NO: 33667 - protein, 486 aa, Homo sapiens
  Payload ID: 6643
  Gene Symbol: GPRC5C
  Gene Name: G protein-coupled receptor, class C, group 5, member C
  ENSP ID: ENSP00000376403
MRGRGSQQQQPTRRQGQKLPSPSPAGKYESAQPGGTQPEPGLGARMAIHKALVMCLGLPLFLFPGAWAQGHVPPGCSQGLNPLYYNLCDRSGAWGIVLEAVAGAGIVTTFVLTIILVASLPFVQDTKKRSLLGTQVFFLLGTLGLFCLVFACVVKPDFSTCASRRFLFGVLFAICFSCLAAHVFALNFLARKNHGPRGWVIFTVALLLTLVEVIINTEWLIITLVRGSGEGGPQGNSSAGWAVASPCAIANMDFVMALIYVMLLLLGAFLGAWPALCGRYKRWRKHGVFVLLTTATSVAIWVVWIVMYTYGNKQHNSPTWDDPTLAIALAANAWAFVLFYVIPEVSQVTKSSPEQSYQGDMYPTRGVGYETILKEQKGQSMFVENKAFSMDEPVAAKRPVSPYSGYNGQLLTSVYQPTEMALMHKVPSEGAYDIILPRATANSQVMGSANSTLRAEDMYSAQSHQAATPPKDGKNSQVFRNPYVWD

SEQ ID NO: 33668 - protein, 462 aa, Homo sapiens
  Payload ID: 6643
  Gene Symbol: GPRC5C
  Gene Name: G protein-coupled receptor, class C, group 5, member C
  ENSP ID: ENSP00000376404
  MOD_RES (1)..(1): Any amino acid
XKYESAQPGGTQPEPGLGARMAIHKALVMCLGLPLFLFPGAWAQGHVPPGCSQGLNPLYYNLCDRSGAWGIVLEAVAGAGIVTTFVLTIILVASLPFVQDTKKRSLLGTQVFFLLGTLGLFCLVFACVVKPDFSTCASRRFLFGVLFAICFSCLAAHVFALNFLARKNHGPRGWVIFTVALLLTLVEVIINTEWLIITLVRGSGEGGPQGNSSAGWAVASPCAIANMDFVMALIYVMLLLLGAFLGAWPALCGRYKRWRKHGVFVLLTTATSVAIWVVWIVMYTYGNKQHNSPTWDDPTLAIALAANAWAFVLFYVIPEVSQVTKSSPEQSYQGDMYPTRGVGYETILKEQKGQSMFVENKAFSMDEPVAAKRPVSPYSGYNGQLLTSVYQPTEMALMHKVPSEGAYDIILPRATANSQVMGSANSTLRAEDMYSAQSHQAATPPKDGKNSQAQSPQSKTRW

SEQ ID NO: 33669 - protein, 453 aa, Homo sapiens
  Payload ID: 6643
  Gene Symbol: GPRC5C
  Gene Name: G protein-coupled receptor, class C, group 5, member C
  Uniprot ID: Q9NQ84
  ENSP ID: ENSP00000376405
MGTQPEPGLGARMAIHKALVMCLGLPLFLFPGAWAQGHVPPGCSQGLNPLYYNLCDRSGAWGIVLEAVAGAGIVTTFVLTIILVASLPFVQDTKKRSLLGTQVFFLLGTLGLFCLVFACVVKPDFSTCASRRFLFGVLFAICFSCLAAHVFALNFLARKNHGPRGWVIFTVALLLTLVEVIINTEWLIITLVRGSGEGGPQGNSSAGWAVASPCAIANMDFVMALIYVMLLLLGAFLGAWPALCGRYKRWRKHGVFVLLTTATSVAIWVVWIVMYTYGNKQHNSPTWDDPTLAIALAANAWAFVLFYVIPEVSQVTKSSPEQSYQGDMYPTRGVGYETILKEQKGQSMFVENKAFSMDEPVAAKRPVSPYSGYNGQLLTSVYQPTEMALMHKVPSEGAYDIILPRATANSQVMGSANSTLRAEDMYSAQSHQAATPPKDGKNSQVFRNPYVWD

SEQ ID NO: 33670 - protein, 150 aa, Homo sapiens
  Payload ID: 6643
  Gene Symbol: GPRC5C
  Gene Name: G protein-coupled receptor, class C, group 5, member C
  ENSP ID: ENSP00000462147
MRGRGSQQQQPTRRQGQKLPSPSPAGKYESAQPGGTQPEPGLGARMAIHKALVMCLGLPLFLFPGAWAQGHVPPGCSQGLNPLYYNLCDRSGAWGIVLEAVAGAGIVTTFVLTIILVASLPFVQDTKKRSLLGTQLRGRCHHTAGTMGSC

SEQ ID NO: 33671 - protein, 153 aa, Homo sapiens
  Payload ID: 6643
  Gene Symbol: GPRC5C
  Gene Name: G protein-coupled receptor, class C, group 5, member C
  ENSP ID: ENSP00000462440
MQAPAHPRRKQGALPGDRPARERATQRAWLSLGPRERQALRPGPGPAIPARTGPGPAPRAASLPPPPAPRLGLELAPNAALERGRRRVPGTQPEPGLGARMAIHKALVMCLGLPLFLFPGAWAQGHVPPGCSQGLNPLYYNLCDRSGAWGIVL

SEQ ID NO: 33672 - protein, 355 aa, Homo sapiens
  Payload ID: 6643
  Gene Symbol: GPRC5C
  Gene Name: G protein-coupled receptor, class C, group 5, member C
  ENSP ID: ENSP00000463090
  MOD_RES (1)..(1): Any amino acid
XNLCDRSGAWGIVLEAVAGAGIVTTFVLTIILVASLPFVQDTKKRSLLGTQVFFLLGTLGLFCLVFACVVKPDFSTCASRRFLFGVLFAICFSCLAAHVFALNFLARKNHGPRGWVIFTVALLLTLVEVIINTEWLIITLVRGSGEGGPQGNSSAGWAVASPCAIANMDFVMALIYVMLLLLGAFLGAWPALCGRYKRWRKHGVFVLLTTATSVAIWVVWIVMYTYGNKQHNSPTWDDPTLAIALAANAWAFVLFYVIPEVSQDDDQSSSLERCPVVSPTALWCYPRPQQPVPLSLAYFSRAKLGEQSLQSRIAALTVAPDLSVLPVEVHEQNVISLQWKGSRELCGPHAALGLA

SEQ ID NO: 33673 - protein, 145 aa, Homo sapiens
  Payload ID: 6643
  Gene Symbol: GPRC5C
  Gene Name: G protein-coupled receptor, class C, group 5, member C
  ENSP ID: ENSP00000463813
MAIHKALVMCLGLPLFLFPGAWAQGHVPPGCSQGLNPLYYNLCDRSGAWGIVLEAVAGAGIVTTFVLTIILVASLPFVQDTKKRSLLGTQVFFLLGTLGLFCLVFACVVKPDFSTCASRRFLFGVLFAICFSCLAAHVFALNFLA

SEQ ID NO: 33674 - protein, 345 aa, Homo sapiens
  Payload ID: 6644
  Gene Symbol: GPRC5D
  Gene Name: G protein-coupled receptor, class C, group 5, member D
  Uniprot ID: Q9NZD1
  ENSP ID: ENSP00000228887
MYKDCIESTGDYFLLCDAEGPWGIILESLAILGIVVTILLLLAFLFLMRKIQDCSQWNVLPTQLLFLLSVLGLFGLAFAFIIELNQQTAPVRYFLFGVLFALCFSCLLAHASNLVKLVRGCVSFSWTTILCIAIGCSLLQIIIATEYVTLIMTRGMMFVNMTPCQLNVDFVVLLVYVLFLMALTFFVSKATFCGPCENWKQHGRLIFITVLFSIIIWVVWISMLLRGNPQFQRQPQWDDPVVCIALVTNAWVFLLLYIVPELCILYRSCRQECPLQGNACPVTAYQHSFQVENQELSRARDSDGAEEDVALTSYGTPIQPQTVDPTQECFIPQAKLSPQQDAGGV

SEQ ID NO: 33675 - protein, 300 aa, Homo sapiens
  Payload ID: 6644
  Gene Symbol: GPRC5D
  Gene Name: G protein-coupled receptor, class C, group 5, member D
  Uniprot ID: Q9NZD1
  ENSP ID: ENSP00000379624
MYKDCIESTGDYFLLCDAEGPWGIILESLAILGIVVTILLLLAFLFLMRKIQDCSQWNVLPTQLLFLLSVLGLFGLAFAFIIELNQQTAPVRYFLFGVLFALCFSCLLAHASNLVKLVRGCVSFSWTTILCIAIGCSLLQIIIATEYVTLIMTRGMMFVNMTPCQLNVDFVVLLVYVLFLMALTFFVSKATFCGPCENWKQHGRLIFITVLFSIIIWVVWISMLLRGNPQFQRQPQWDDPVVCIALVTNAWVFLLLYIVPELCILYRSCRQECPLQGNACPVTAYQHSFQVENQELSRDC

SEQ ID NO: 33676 - protein, 120 aa, Homo sapiens
  Payload ID: 6644
  Gene Symbol: GPRC5D
  Gene Name: G protein-coupled receptor, class C, group 5, member D
  ENSP ID: ENSP00000440530
MYKDCIESTGDYFLLCDAEGPWGIILESLAILGIVVTILLLLAFLFLMRKIQDCSQWNVLPTQLLFLLSVLGLFGLAFAFIIELNQQTAPVRYFLFGVLFALCFSCLLAHASNLVKLVRG

SEQ ID NO: 33677 - protein, 926 aa, Homo sapiens
  Payload ID: 6645
  Gene Symbol: GPRC6A
  Gene Name: G protein-coupled receptor, class C, group 6, member A
  Uniprot ID: Q5T6X5
  ENSP ID: ENSP00000309493
MAFLIILITCFVIILATSQPCQTPDDFVAATSPGHIIIGGLFAIHEKMLSSEDSPRRPQIQECVGFEISVFLQTLAMIHSIEMINNSTLLPGVKLGYEIYDTCTEVTVAMAATLRFLSKFNCSRETVEFKCDYSSYMPRVKAVIGSGYSEITMAVSRMLNLQLMPQVGYESTAEILSDKIRFPSFLRTVPSDFHQIKAMAHLIQKSGWNWIGIITTDDDYGRLALNTFIIQAEANNVCIAFKEVLPAFLSDNTIEVRINRTLKKIILEAQVNVIVVFLRQFHVFDLFNKAIEMNINKMWIASDNWSTATKITTIPNVKKIGKVVGFAFRRGNISSFHSFLQNLHLLPSDSHKLLHEYAMHLSACAYVKDTDLSQCIFNHSQRTLAYKANKAIERNFVMRNDFLWDYAEPGLIHSIQLAVFALGYAIRDLCQARDCQNPNAFQPWELLGVLKNVTFTDGWNSFHFDAHGDLNTGYDVVLWKEINGHMTVTKMAEYDLQNDVFIIPDQETKNEFRNLKQIQSKCSKECSPGQMKKTTRSQHICCYECQNCPENHYTNQTDMPHCLLCNNKTHWAPVRSTMCFEKEVEYLNWNDSLAILLLILSLLGIIFVLVVGIIFTRNLNTPVVKSSGGLRVCYVILLCHFLNFASTSFFIGEPQDFTCKTRQTMFGVSFTLCISCILTKSLKILLAFSFDPKLQKFLKCLYRPILIIFTCTGIQVVICTLWLIFAAPTVEVNVSLPRVIILECEEGSILAFGTMLGYIAILAFICFIFAFKGKYENYNEAKFITFGMLIYFIAWITFIPIYATTFGKYVPAVEIIVILISNYGILYCTFIPKCYVIICKQEINTKSAFLKMIYSYSSHSVSSIALSPASLDSMSGNVTMTNPSSSGKSATWQKSKDLQAQAFAHICRENATSVSKTLPRKRMSSI

SEQ ID NO: 33678 - protein, 855 aa, Homo sapiens
  Payload ID: 6645
  Gene Symbol: GPRC6A
  Gene Name: G protein-coupled receptor, class C, group 6, member A
  Uniprot ID: Q5T6X5
  ENSP ID: ENSP00000357537
MAFLIILITCFVIILATSQPCQTPDDFVAATSPGHIIIGGLFAIHEKMLSSEDSPRRPQIQECVGFEISVFLQTLAMIHSIEMINNSTLLPGVKLGYEIYDTCTEVTVAMAATLRFLSKFNCSRETVEFKCDYSSYMPRVKAVIGSGYSEITMAVSRMLNLQLMPQVGYESTAEILSDKIRFPSFLRTVPSDFHQIKAMAHLIQKSGWNWIGIITTDDDYGRLALNTFIIQAEANNVCIAFKEVLPAFLSDNTIEVRINRTLKKIILEAQVNVIVVFLRQFHVFDLFNKAIEMNINKMWIASDNWSTATKITTIPNVKKIGKVVGFAFRRGNISSFHSFLQNLHLLPSDSHKLLHEYAMHLSACAYVKDTDLSQCIFNHSQRTLAYKANKAIERNFVMRNDFLWDYAEPGLIHSIQLAVFALGYAIRDLCQARDCQNPNAFQPWEQIQSKCSKECSPGQMKKTTRSQHICCYECQNCPENHYTNQTDMPHCLLCNNKTHWAPVRSTMCFEKEVEYLNWNDSLAILLLILSLLGIIFVLVVGIIFTRNLNTPVVKSSGGLRVCYVILLCHFLNFASTSFFIGEPQDFTCKTRQTMFGVSFTLCISCILTKSLKILLAFSFDPKLQKFLKCLYRPILIIFTCTGIQVVICTLWLIFAAPTVEVNVSLPRVIILECEEGSILAFGTMLGYIAILAFICFIFAFKGKYENYNEAKFITFGMLIYFIAWITFIPIYATTFGKYVPAVEIIVILISNYGILYCTFIPKCYVIICKQEINTKSAFLKMIYSYSSHSVSSIALSPASLDSMSGNVTMTNPSSSGKSATWQKSKDLQAQAFAHICRENATSVSKTLPRKRMSSI

SEQ ID NO: 33679 - protein, 751 aa, Homo sapiens
  Payload ID: 6645
  Gene Symbol: GPRC6A
  Gene Name: G protein-coupled receptor, class C, group 6, member A
  Uniprot ID: Q5T6X5
  ENSP ID: ENSP00000433465
MAFLIILITCFVIILATSQPCQTPDDFVAATSPGHIIIGGLFAIHEKMLSSEDSPRRPQIQECVGFEISVFLQTLAMIHSIEMINNSTLLPGVKLGYEIYDTCTEVTVAMAATLRFLSKFNCSRETVEFKCDYSSYMPRVKAVIGSGYSEITMAVSRMLNLQLMPQVGYESTAEILSDKIRFPSFLRTVPSDFHQIKAMAHLIQKSGWNWIGIITTDDDYGRLALNTFIIQAEANNVCIAFKEVLPAFLSDNTIEVRINRTLKKIILEAQLLGVLKNVTFTDGWNSFHFDAHGDLNTGYDVVLWKEINGHMTVTKMAEYDLQNDVFIIPDQETKNEFRNLKQIQSKCSKECSPGQMKKTTRSQHICCYECQNCPENHYTNQTDMPHCLLCNNKTHWAPVRSTMCFEKEVEYLNWNDSLAILLLILSLLGIIFVLVVGIIFTRNLNTPVVKSSGGLRVCYVILLCHFLNFASTSFFIGEPQDFTCKTRQTMFGVSFTLCISCILTKSLKILLAFSFDPKLQKFLKCLYRPILIIFTCTGIQVVICTLWLIFAAPTVEVNVSLPRVIILECEEGSILAFGTMLGYIAILAFICFIFAFKGKYENYNEAKFITFGMLIYFIAWITFIPIYATTFGKYVPAVEIIVILISNYGILYCTFIPKCYVIICKQEINTKSAFLKMIYSYSSHSVSSIALSPASLDSMSGNVTMTNPSSSGKSATWQKSKDLQAQAFAHICRENATSVSKTLPRKRMSSI

SEQ ID NO: 33680 - protein, 103 aa, Homo sapiens
  Payload ID: 6646
  Gene Symbol: G0S2
  Gene Name: G0/G1 switch 2
  Uniprot ID: P27469
  ENSP ID: ENSP00000355996
METVQELIPLAKEMMAQKRKGKMVKLYVLGSVLALFGVVLGLMETVCSPFTAARRLRDQEAAVAELQAALERQALQKQALQEKGKQQDTVLGGRALSNRQHAS

SEQ ID NO: 33681 - protein, 637 aa, Homo sapiens
  Payload ID: 6647
  Gene Symbol: GSPT1
  Gene Name: G1 to S phase transition 1
  Uniprot ID: P15170
  ENSP ID: ENSP00000398131
MDPGSGGGGGGGGGGGSSSGSSSSDSAPDCWDQADMEAPGPGPCGGGGSLAAAAEAQRENLSAAFSRQLNVNAKPFVPNVHAAEFVPSFLRGPAAPPPPVGGAANNHGAGSGAGGRAAPVESSQEEQSLCEGSNSAVSMELSEPIVENGETEMSPEESWEHKEEISEAEPGGGSLGDGRPPEESAHEMMEEEEEIPKPKSVVAPPGAPKKEHVNVVFIGHVDAGKSTIGGQIMYLTGMVDKRTLEKYEREAKEKNRETWYLSWALDTNQEERDKGKTVEVGRAYFETEKKHFTILDAPGHKSFVPNMIGGASQADLAVLVISARKGEFETGFEKGGQTREHAMLAKTAGVKHLIVLINKMDDPTVNWSNERYEECKEKLVPFLKKVGFNPKKDIHFMPCSGLTGANLKEQSDFCPWYIGLPFIPYLDNLPNFNRSVDGPIRLPIVDKYKDMGTVVLGKLESGSICKGQQLVMMPNKHNVEVLGILSDDVETDTVAPGENLKIRLKGIEEEEILPGFILCDPNNLCHSGRTFDAQIVIIEHKSIICPGYNAVLHIHTCIEEVEITALICLVDKKSGEKSKTRPRFVKQDQVCIARLRTAGTICLETFKDFPQMGRFTLRDEGKTIAIGKVLKLVPEKD

SEQ ID NO: 33682 - protein, 499 aa, Homo sapiens
  Payload ID: 6647
  Gene Symbol: GSPT1
  Gene Name: G1 to S phase transition 1
  Uniprot ID: P15170
  ENSP ID: ENSP00000399539
MELSEPIVENGETEMSPEESWEHKEEISEAEPGGGSLGDGRPPEESAHEMMEEEEEIPKPKSVVAPPGAPKKEHVNVVFIGHVDAGKSTIGGQIMYLTGMVDKRTLEKYEREAKEKNRETWYLSWALDTNQEERDKGKTVEVGRAYFETEKKHFTILDAPGHKSFVPNMIGGASQADLAVLVISARKGEFETGFEKGGQTREHAMLAKTAGVKHLIVLINKMDDPTVNWSNERYEECKEKLVPFLKKVGFNPKKDIHFMPCSGLTGANLKEQSDFCPWYIGLPFIPYLDNLPNFNRSVDGPIRLPIVDKYKDMGTVVLGKLESGSICKGQQLVMMPNKHNVEVLGILSDDVETDTVAPGENLKIRLKGIEEEEILPGFILCDPNNLCHSGRTFDAQIVIIEHKSIICPGYNAVLHIHTCIEEVEITALICLVDKKSGEKSKTRPRFVKQDQVCIARLRTAGTICLETFKDFPQMGRFTLRDEGKTIAIGKVLKLVPEKD

SEQ ID NO: 33683 - protein, 636 aa, Homo sapiens
  Payload ID: 6647
  Gene Symbol: GSPT1
  Gene Name: G1 to S phase transition 1
  Uniprot ID: P15170
  ENSP ID: ENSP00000408399
MDPGSGGGGGGGGGGGSSSGSSSSDSAPDCWDQADMEAPGPGPCGGGGSLAAAAEAQRENLSAAFSRQLNVNAKPFVPNVHAAEFVPSFLRGPAAPPPPVGGAANNHGAGSGAGGRAAPVESSQEEQSLCEGSNSAVSMELSEPIENGETEMSPEESWEHKEEISEAEPGGGSLGDGRPPEESAHEMMEEEEEIPKPKSVVAPPGAPKKEHVNVVFIGHVDAGKSTIGGQIMYLTGMVDKRTLEKYEREAKEKNRETWYLSWALDTNQEERDKGKTVEVGRAYFETEKKHFTILDAPGHKSFVPNMIGGASQADLAVLVISARKGEFETGFEKGGQTREHAMLAKTAGVKHLIVLINKMDDPTVNWSNERYEECKEKLVPFLKKVGFNPKKDIHFMPCSGLTGANLKEQSDFCPWYIGLPFIPYLDNLPNFNRSVDGPIRLPIVDKYKDMGTVVLGKLESGSICKGQQLVMMPNKHNVEVLGILSDDVETDTVAPGENLKIRLKGIEEEEILPGFILCDPNNLCHSGRTFDAQIVIIEHKSIICPGYNAVLHIHTCIEEVEITALICLVDKKSGEKSKTRPRFVKQDQVCIARLRTAGTICLETFKDFPQMGRFTLRDEGKTIAIGKVLKLVPEKD

SEQ ID NO: 33684 - protein, 499 aa, Homo sapiens; identical to SEQ ID NO: 33682
  Payload ID: 6647
  Gene Symbol: GSPT1
  Gene Name: G1 to S phase transition 1
  Uniprot ID: P15170
  ENSP ID: ENSP00000454351

SEQ ID NO: 33685 - protein, 94 aa, Homo sapiens
  Payload ID: 6647
  Gene Symbol: GSPT1
  Gene Name: G1 to S phase transition 1
  ENSP ID: ENSP00000454538
MRTDGARSHLAPVESSQEEQSLCEGSNSAVSMELSEPIENGETEMSPEESWEHKEEISEAEPGGGSLGDGRPPEESAHEMMEEEEEIPKPKSVV

SEQ ID NO: 33686 - protein, 475 aa, Homo sapiens
  Payload ID: 6647
  Gene Symbol: GSPT1
  Gene Name: G1 to S phase transition 1
  ENSP ID: ENSP00000456057
  MOD_RES (1)..(1): Any amino acid
XSNSAVSMELSEPIENGETEMSPEESWEHKEEISEAEPGGGSLGDGRPPEESAHEMMEEEEEIPKPKSVVAPPGAPKKEHVNVVFIGHVDAGKSTIGGQIMYLTGMVDKRTLEKYEREAKEKNRETWYLSWALDTNQEERDKGKTVEVGRAYFETEKKHFTILDAPGHKSFVPNMIGGASQADLAVLVISARKGEFETGFEKGGQTREHAMLAKTAGVKHLIVLINKMDDPTVNWSNERYEECKEKLVPFLKKVGFNPKKDIHFMPCSGLTGANLKEQSDFCPWYIGLPFIPYLDNLPNFNRSVDGPIRLPIVDKYKDMGTVVLGKLESGSICKGQQLVMMPNKHNVEVLGILSDDVETDTVAPGENLKIRLKGIEEEEILPGFILCDPNNLCHSGRTFDAQALICLVDKKSGEKSKTRPRFVKQDQVCIARLRTAGTICLETFKDFPQMGRFTLRDEGKTIAIGKVLKLVPEKD

SEQ ID NO: 33687 - protein, 199 aa, Homo sapiens
  Payload ID: 6647
  Gene Symbol: GSPT1
  Gene Name: G1 to S phase transition 1
  ENSP ID: ENSP00000456897
MRTDGARSHLAPVESSQEEQSLCEGSNSAVSMELSEPIVENGETEMSPEESWEHKEEISEAEPGGGSLGDGRPPEESAHEMMEEEEEIPKPKSVVAPPGAPKKEHVNVVFIGHVDAGKSTIGGQIMYLTGMVDKRTLEKYEREAKEKNRETWYLSWALDTNQEERDKGKTVEVGRAYFETEKKHFTILDAPGHKSFVPN

SEQ ID NO: 33688 - protein, 628 aa, Homo sapiens
  Payload ID: 6648
  Gene Symbol: GSPT2
  Gene Name: G1 to S phase transition 2
  Uniprot ID: Q8IYD1
  ENSP ID: ENSP00000341247
MDSGSSSSDSAPDCWDQVDMESPGSAPSGDGVSSAVAEAQREPLSSAFSRKLNVNAKPFVPNVHAAEFVPSFLRGPTQPPTLPAGSGSNDETCTGAGYPQGKRMGRGAPVEPSREEPLVSLEGSNSAVTMELSEPVVENGEVEMALEESWEHSKEVSEAEPGGGSSGDSGPPEESGQEMMEEKEEIRKSKSVIVPSGAPKKEHVNVVFIGHVDAGKSTIGGQIMFLTGMVDKRTLEKYEREAKEKNRETWYLSWALDTNQEERDKGKTVEVGRAYFETERKHFTILDAPGHKSFVPNMIGGASQADLAVLVISARKGEFETGFEKGGQTREHAMLAKTAGVKHLIVLINKMDDPTVNWSIERYEECKEKLVPFLKKVGFSPKKDIHFMPCSGLTGANIKEQSDFCPWYTGLPFIPYLDNLPNFNRSIDGPIRLPIVDKYKDMGTVVLGKLESGSIFKGQQLVMMPNKHNVEVLGILSDDTETDFVAPGENLKIRLKGIEEEEILPGFILCDPSNLCHSGRTFDVQIVIIEHKSIICPGYNAVLHIHTCIEEVEITALISLVDKKSGEKSKTRPRFVKQDQVCIARLRTAGTICLETFKDFPQMGRFTLRDEGKTIAIGKVLKLVPEKD

SEQ ID NO: 33689 - protein, 739 aa, Homo sapiens
  Payload ID: 6649
  Gene Symbol: GTSE1
  Gene Name: G-2 and S-phase expressed 1
  Uniprot ID: Q9NYZ3
  ENSP ID: ENSP00000415430
MEGGGGRDEPSACRAGDVNMDDPKKEDILLLADEKFDFDLSLSSSSANEDDEVFFGPFGHKERCIAASLELNNPVPEQPPLPTSESPFAWSPLAGEKFVEVYKEAHLLALHIESSSRNQAAQAAKPEDPRSQGVERFIQESKLKINLFEKEKEMKKSPTSLKRETYYLSDSPLLGPPVGEPRLLASSPALPSSGAQARLTRAPGPPHSAHALPRESCTAHAASQAATQRKPGTKLLLPRAASVRGRSIPGAAEKPKKEIPASPSRTKIPAEKESHRDVLPDKPAPGAVNVPAAGSHLGQGKRAIPVPNKLGLKKTLLKAPGSTSNLARKSSSGPVWSGASSACTSPAVGKAKSSEFASIPANSSRPLSNISKSGRMGPAMLRPALPAGPVGASSWQAKRVDVSELAAEQLTAPPSASPTQPQTPEGGGQWLNSSCAWSESSQLNKTRSIRRRDSCLNSKTKVMPTPTNQFKIPKFSIGDSPDSSTPKLSRAQRPQSCTSVGRVTVHSTPVRRSSGPAPQSLLSAWRVSALPTPASRRCSGLPPMTPKTMPRAVGSPLCVPARRRSSEPRKNSAMRTEPTRESNRKTDSRLVDVSPDRGSPPSRVPQALNFSPEESDSTFSKSTATEVAREEAKPGGDAAPSEALLVDIKLEPLAVTPDAASQPLIDLPLIDFCDTPEAHVAVGSESRPLIDLMTNTPDMNKNVAKPSPVVGQLIDLSSPLIQLSPEADKENVDSPLLKF

SEQ ID NO: 33690 - protein, 706 aa, Homo sapiens
  Payload ID: 6650
  Gene Symbol: G2E3
  Gene Name: G2/M-phase specific E3 ubiquitin protein ligase
  Uniprot ID: Q7L622
  ENSP ID: ENSP00000206595
MNESKPGDSQNLACVFCRKHDDCPNKYGEKKTKEKWNLTVHYYCLLMSSGIWQRGKEEEGVYGFLIEDIRKEVNRASKLKCCVCKKNGASIGCVAPRCKRSYHFPCGLQRECIFQFTGNFASFCWDHRPVQIITSNNYRESLPCTICLEFIEPIPSYNILRSPCCKNAWFHRDCLQVQAINAGVFFFRCTICNNSDIFQKEMLRMGIHIPEKDASWELEENAYQELLQHYERCDVRRCRCKEGRDYNAPDSKWEIKRCQCCGSSGTHLACSSLRSWEQNWECLECRGIIYNSGEFQKAKKHVLPNSNNVGITDCLLEESSPKLPRQSPGSQSKDLLRQGSKFRRNVSTLLIELGFQIKKKTKRLYINKANIWNSALDAFRNRNFNPSYAIEVAYVIENDNFGSEHPGSKQEFLSLLMQHLENSSLFEGSLSKNLSLNSQALKENLYYEAGKMLAISLVHGGPSPGFFSKTLFNCLVYGPENTQPILDDVSDFDVAQIIIRINTATTVADLKSIINECYNYLELIGCLRLITTLSDKYMLVKDILGYHVIQRVHTPFESFKQGLKTLGVLEKIQAYPEAFCSILCHKPESLSAKILSELFTVHTLPDVKALGFWNSYLQAVEDGKSTTTMEDILIFATGCSSIPPAGFKPTPSIECLHVDFPVGNKCNNCLAIPITNTYKEFQENMDFTIRNTLRLEKEESSHYIGH

SEQ ID NO: 33691 - protein, 660 aa, Homo sapiens
  Payload ID: 6650
  Gene Symbol: G2E3
  Gene Name: G2/M-phase specific E3 ubiquitin protein ligase
  ENSP ID: ENSP00000391068
MSSGIWQRGKEEEGVYGFLIEDIRKEVNRASKLKCCVCKKNGASIGCVAPRCKRSYHFPCGLQRECIFQFTGNFASFCWDHRPVQIITSNNYRESLPCTICLEFIEPIPSYNILRSPCCKNAWFHRDCLQVQAINAGVFFFRCTICNNSDIFQKEMLRMGIHIPEKDASWELEENAYQELLQHYERCDVRRCRCKEGRDYNAPDSKWEIKRCQCCGSSGTHLACSSLRSWEQNWECLECRGIIYNSGEFQKAKKHVLPNSNNVGITDCLLEESSPKLPRQSPGSQSKDLLRQGSKFRRNVSTLLIELGFQIKKKTKRLYINKANIWNSALDAFRNRNFNPSYAIEVAYVIENDNFGSEHPGSKQEFLSLLMQHLENSSLFEGSLSKNLSLNSQALKENLYYEAGKMLAISLVHGGPSPGFFSKTLFNCLVYGPENTQPILDDVSDFDVAQIIIRINTATTVADLKSIINECYNYLELIGCLRLITTLSDKYMLVKDILGYHVIQRVHTPFESFKQGLKTLGVLEKIQAYPEAFCSILCHKPESLSAKILSELFTVHTLPDVKALGFWNSYLQAVEDGKSTTTMEDILIFATGCSSIPPAGFKPTPSIECLHVDFPVGNKCNNCLAIPITNTYKEFQENMDFTIRNTLRLEKEESSHYIGH

SEQ ID NO: 33692 - protein, 101 aa, Homo sapiens
  Payload ID: 6650
  Gene Symbol: G2E3
  Gene Name: G2/M-phase specific E3 ubiquitin protein ligase
  ENSP ID: ENSP00000446535
  MOD_RES (1)..(1): Any amino acid
XCRCKEGRDYNAPDSKWEIKRCQCCGSSGTHLACSSLRSWEQNWECLECRGIIYNSGEFQKAKKHVLPNSNNVGITDCLLEESSPKLPRQSPGSQSKDLLR

SEQ ID NO: 33693 - protein, 176 aa, Homo sapiens
  Payload ID: 6650
  Gene Symbol: G2E3
  Gene Name: G2/M-phase specific E3 ubiquitin protein ligase
  ENSP ID: ENSP00000446615
MNESKPGDSQNLACVFCRKHDDCPNKYGEKKTKEKWNLTVHYYCLLMSSGIWQRGKEEEGVYGFLIEDIRKEVNRASKLKCCVCKKNGASIGCVAPRCKRSYHFPCGLQRECIFQFTGNFASFCWDHRPVQIITSNNYRESLPCTICLEFIEPIPSYNILRSPCCKNAWFHRDCLQ

SEQ ID NO: 33694 - protein, 123 aa, Homo sapiens
  Payload ID: 6650
  Gene Symbol: G2E3
  Gene Name: G2/M-phase specific E3 ubiquitin protein ligase
  ENSP ID: ENSP00000448515
  MOD_RES (1)..(1): Any amino acid
XEVLVVRTLGFIETVYSKWEIKRCQCCGSSGTHLACSSLRSWEQNWECLECRGIIYNSGEFQKAKKHVLPNSNNVGITDCLLEESSPKLPRQSPGSQSKDLLRQGSKFRRNVSTLLIELGFQI

SEQ ID NO: 33695 - protein, 120 aa, Homo sapiens
  Payload ID: 6650
  Gene Symbol: G2E3
  Gene Name: G2/M-phase specific E3 ubiquitin protein ligase
  ENSP ID: ENSP00000448745
MNESKPGDSQNLACVFCRKHDDCPNKYGEKKTKEKWNLTVHYYCLLMSSGIWQRGKEEEGVYGFLIEDIRKEVNRASKLKCCVCKKNGASIGCVAPRCKRSYHFPCGLQRECIFQFTGNF

SEQ ID NO: 33696 - protein, 131 aa, Homo sapiens
  Payload ID: 6650
  Gene Symbol: G2E3
  Gene Name: G2/M-phase specific E3 ubiquitin protein ligase
  ENSP ID: ENSP00000451147
MNESKPGDSQNLACVFCRKHDDCPNKYGEKKTKEKWNLTVHYYCLLMSSGIWQRGKEEEGVYGFLIEDIRKEVNRASKLKCCVCKKNGASIGCVAPRCKRSYHFPCGLQRECIFQFTGNFASFCWDHRPVQ

SEQ ID NO: 33697 - protein, 736 aa, Homo sapiens
  Payload ID: 6650
  Gene Symbol: G2E3
  Gene Name: G2/M-phase specific E3 ubiquitin protein ligase
  ENSP ID: ENSP00000451653
MLIPALQISDSESVGLEDGIEQSAYLTESKMNESKPGDSQNLACVFCRKHDDCPNKYGEKKTKEKWNLTVHYYCLLMSSGIWQRGKEEEGVYGFLIEDIRKEVNRASKLKCCVCKKNGASIGCVAPRCKRSYHFPCGLQRECIFQFTGNFASFCWDHRPVQIITSNNYRESLPCTICLEFIEPIPSYNILRSPCCKNAWFHRDCLQVQAINAGVFFFRCTICNNSDIFQKEMLRMGIHIPEKDASWELEENAYQELLQHYERCDVRRCRCKEGRDYNAPDSKWEIKRCQCCGSSGTHLACSSLRSWEQNWECLECRGIIYNSGEFQKAKKHVLPNSNNVGITDCLLEESSPKLPRQSPGSQSKDLLRQGSKFRRNVSTLLIELGFQIKKKTKRLYINKANIWNSALDAFRNRNFNPSYAIEVAYVIENDNFGSEHPGSKQEFLSLLMQHLENSSLFEGSLSKNLSLNSQALKENLYYEAGKMLAISLVHGGPSPGFFSKTLFNCLVYGPENTQPILDDVSDFDVAQIIIRINTATTVADLKSIINECYNYLELIGCLRLITTLSDKYMLVKDILGYHVIQRVHTPFESFKQGLKTLGVLEKIQAYPEAFCSILCHKPESLSAKILSELFTVHTLPDVKALGFWNSYLQAVEDGKSTTTMEDILIFATGCSSIPPAGFKPTPSIECLHVDFPVGNKCNNCLAIPITNTYKEFQENMDFTIRNTLRLEKEESSHYIGH

SEQ ID NO: 33698 - protein, 79 aa, Homo sapiens
  Payload ID: 6650
  Gene Symbol: G2E3
  Gene Name: G2/M-phase specific E3 ubiquitin protein ligase
  ENSP ID: ENSP00000452275
MNESKPGDSQNLACVFCRKHDDCPNKYGEKKTKEKWNLTVHYYCLLMSSGIWQRGKEEEGVYGFLIEDIRKEVNRASKL

SEQ ID NO: 33699 - protein, 454 aa, Homo sapiens
  Payload ID: 6651
  Gene Symbol: GABPA
  Gene Name: GA binding protein transcription factor, alpha subunit 60kDa
  Uniprot ID: Q06546
  ENSP ID: ENSP00000346886
MTKREAEELIEIEIDGTEKAECTEESIVEQTYAPAECVSQAIDINEPIGNLKKLLEPRLQCSLDAHEICLQDIQLDPERSLFDQGVKTDGTVQLSVQVISYQGIEPKLNILEIVKPADTVEVVIDPDAHHAESEAHLVEEAQVITLDGTKHITTISDETSEQVTRWAAALEGYRKEQERLGIPYDPIQWSTDQVLHWVVWVMKEFSMTDIDLTTLNISGRELCSLNQEDFFQRVPRGEILWSHLELLRKYVLASQEQQMNEIVTIDQPVQIIPASVQSATPTTIKVINSSAKAAKVQRAPRISGEDRSSPGNRTGNNGQIQLWQFLLELLTDKDARDCISWVGDEGEFKLNQPELVAQKWGQRKNKPTMNYEKLSRALRYYYDGDMICKVQGKRFVYKFVCDLKTLIGYSAAELNRLVTECEQKKLAKMQLHGIAQPVTAVALATASLQTEKDN

SEQ ID NO: 33700 - protein, 454 aa, Homo sapiens; identical to SEQ ID NO: 33699
  Payload ID: 6651
  Gene Symbol: GABPA
  Gene Name: GA binding protein transcription factor, alpha subunit 60kDa
  Uniprot ID: Q06546
  ENSP ID: ENSP00000382948

SEQ ID NO: 33701 - protein, 395 aa, Homo sapiens
  Payload ID: 6652
  Gene Symbol: GABPB1
  Gene Name: GA binding protein transcription factor, beta subunit 1
  Uniprot ID: Q06547
  ENSP ID: ENSP00000220429
MSLVDLGKKLLEAARAGQDDEVRILMANGAPFTTDWLGTSPLHLAAQYGHYSTTEVLLRAGVSRDARTKVDRTPLHMAASEGHASIVEVLLKHGADVNAKDMLKMTALHWATEHNHQEVVELLIKYGADVHTQSKFCKTAFDISIDNGNEDLAEILQIAMQNQINTNPESPDTVTIHAATPQFIIGPGGVVNLTGLVSSENSSKATDETGVSAVQFGNSSTSVLATLAALAEASAPLSNSSETPVVATEEVVTAESVDGAIQQVVSSGGQQVITIVTDGIQLGNLHSIPTSGIGQPIIVTMPDGQQVLTVPATDIAEETVISEEPPAKRQCIEIIENRVESAEIEEREALQKQLDEANREAQKYRQQLLKKEQEAEAYRQKLEAMTRLQTNKEAV

SEQ ID NO: 33702 - protein, 348 aa, Homo sapiens
  Payload ID: 6652
  Gene Symbol: GABPB1
  Gene Name: GA binding protein transcription factor, beta subunit 1
  Uniprot ID: Q06547
  ENSP ID: ENSP00000351923
MSLVDLGKKLLEAARAGQDDEVRILMANGAPFTTDWLGTSPLHLAAQYGHYSTTEVLLRAGVSRDARTKVDRTPLHMAASEGHASIVEVLLKHGADVNAKDMLKMTALHWATEHNHQEVVELLIKYGADVHTQSKFCKTAFDISIDNGNEDLAEILQIAMQNQINTNPESPDTVTIHAATPQFIIGPGGVVNLTDETGVSAVQFGNSSTSVLATLAALAEASAPLSNSSETPVVATEEVVTAESVDGAIQQVVSSGGQQVITIVTDGIQLGNLHSIPTSGIGQPIIVTMPDGQQVLTVPATDIAEETVISEEPPAKRQCIEIIENRVESAEIEVRSLLPGVLCRSHPK

SEQ ID NO: 33703 - protein, 383 aa, Homo sapiens
  Payload ID: 6652
  Gene Symbol: GABPB1
  Gene Name: GA binding protein transcription factor, beta subunit 1
  Uniprot ID: Q06547
  ENSP ID: ENSP00000370259
MSLVDLGKKLLEAARAGQDDEVRILMANGAPFTTDWLGTSPLHLAAQYGHYSTTEVLLRAGVSRDARTKVDRTPLHMAASEGHASIVEVLLKHGADVNAKDMLKMTALHWATEHNHQEVVELLIKYGADVHTQSKFCKTAFDISIDNGNEDLAEILQIAMQNQINTNPESPDTVTIHAATPQFIIGPGGVVNLTDETGVSAVQFGNSSTSVLATLAALAEASAPLSNSSETPVVATEEVVTAESVDGAIQQVVSSGGQQVITIVTDGIQLGNLHSIPTSGIGQPIIVTMPDGQQVLTVPATDIAEETVISEEPPAKRQCIEIIENRVESAEIEEREALQKQLDEANREAQKYRQQLLKKEQEAEAYRQKLEAMTRLQTNKEAV

SEQ ID NO: 33704 - protein, 348 aa, Homo sapiens; identical to SEQ ID NO: 33702
  Payload ID: 6652
  Gene Symbol: GABPB1
  Gene Name: GA binding protein transcription factor, beta subunit 1
  Uniprot ID: Q06547
  ENSP ID: ENSP00000379728

SEQ ID NO: 33705 - protein, 360 aa, Homo sapiens
  Payload ID: 6652
  Gene Symbol: GABPB1
  Gene Name: GA binding protein transcription factor, beta subunit 1
  Uniprot ID: Q06547
  ENSP ID: ENSP00000395771
MSLVDLGKKLLEAARAGQDDEVRILMANGAPFTTDWLGTSPLHLAAQYGHYSTTEVLLRAGVSRDARTKVDRTPLHMAASEGHASIVEVLLKHGADVNAKDMLKMTALHWATEHNHQEVVELLIKYGADVHTQSKFCKTAFDISIDNGNEDLAEILQIAMQNQINTNPESPDTVTIHAATPQFIIGPGGVVNLTGLVSSENSSKATDETGVSAVQFGNSSTSVLATLAALAEASAPLSNSSETPVVATEEVVTAESVDGAIQQVVSSGGQQVITIVTDGIQLGNLHSIPTSGIGQPIIVTMPDGQQVLTVPATDIAEETVISEEPPAKRQCIEIIENRVESAEIEVRSLLPGVLCRSHPK

SEQ ID NO: 33706 - protein, 319 aa, Homo sapiens
  Payload ID: 6652
  Gene Symbol: GABPB1
  Gene Name: GA binding protein transcription factor, beta subunit 1
  ENSP ID: ENSP00000442500
MAASEGHASIVEVLLKHGADVNAKDMLKMTALHWATEHNHQEVVELLIKYGADVHTQSKFCKTAFDISIDNGNEDLAEILQIAMQNQINTNPESPDTVTIHAATPQFIIGPGGVVNLTGLVSSENSSKATDETGVSAVQFGNSSTSVLATLAALAEASAPLSNSSETPVVATEEVVTAESVDGAIQQVVSSGGQQVITIVTDGIQLGNLHSIPTSGIGQPIIVTMPDGQQVLTVPATDIAEETVISEEPPAKRQCIEIIENRVESAEIEEREALQKQLDEANREAQKYRQQLLKKEQEAEAYRQKLEAMTRLQTNKEAV

SEQ ID NO: 33707 - protein, 347 aa, Homo sapiens
  Payload ID: 6652
  Gene Symbol: GABPB1
  Gene Name: GA binding protein transcription factor, beta subunit 1
  ENSP ID: ENSP00000453463
MSLVDLGKKLLEAARAGQDDEVRILMANGAPFTTDWLGTSPLHLAAQYGHYSTTEVLLRAGVSRDARTKVDRTPLHMAASEGHASIVEVLLKHGADVNAKDMLKMTALHWATEHNHQEVVELLIKYGADVHTQSKFCKTAFDISIDNGNEDLAEILQIAMQNQINTNPESPDTVTIHAATPQFIIGPGGVVNLTDETGVSAVQFGNSSTSVLATLAALAEASAPLSNSSETPVATEEVVTAESVDGAIQQVVSSGGQQVITIVTDGIQLGNLHSIPTSGIGQPIIVTMPDGQQVLTVPATDIAEETVISEEPPAKRQCIEIIENRVESAEIEVRSLLPGVLCRSHPK

SEQ ID NO: 33708 - protein, 89 aa, Homo sapiens
  Payload ID: 6652
  Gene Symbol: GABPB1
  Gene Name: GA binding protein transcription factor, beta subunit 1
  ENSP ID: ENSP00000453578
MSLVDLGKKLLEAARAGQDDEVRILMANGAPFTTDWLGTSPLHLAAQYGHYSTTEVLLRAGVSRDARTKVDRTPLHMAASEGHASIVEV

SEQ ID NO: 33709 - protein, 203 aa, Homo sapiens
  Payload ID: 6652
  Gene Symbol: GABPB1
  Gene Name: GA binding protein transcription factor, beta subunit 1
  ENSP ID: ENSP00000453806
  MOD_RES (1)..(1): Any amino acid
XIHAATPQFIIGPGGVVNLTGLVSSENSSKATDETGVSAVQFGNSSTSVLATLAALAEASAPLSNSSETPVVATEEVVTAESVDGAIQQVVSSGGQQVITIVTDGIQLGNLHSIPTSGIGQPIIVTMPDGQQVLTVPATDIAEETVISEEPPAKRQCIEIIENRVESAEIERGCLAMLPRLVLDSWPQVILPPQPPEELRLLA

SEQ ID NO: 33710 - protein, 89 aa, Homo sapiens; identical to SEQ ID NO: 33708
  Payload ID: 6652
  Gene Symbol: GABPB1
  Gene Name: GA binding protein transcription factor, beta subunit 1
  ENSP ID: ENSP00000454211

SEQ ID NO: 33711 - protein, 410 aa, Homo sapiens
  Payload ID: 6653
  Gene Symbol: GABPB2
  Gene Name: GA binding protein transcription factor, beta subunit 2
  ENSP ID: ENSP00000357912
MSLVDLGKRLLEAARKGQDDEVRTLMANGAPFTTDWLGTSPLHLAAQYGHYSTAEVLLRAGVSRDARTKVDRTPLHMAAADGHAHIVELLVRNGADVNAKDMLKMTALHWATERHHRDVVELLIKYGADVHAFSKFDKSAFDIALEKNNAEILVILQEAMQNQVNVNPERANPVTDPVSMAAPFIFTSGEVVNLASLISSTNTKTTSANTEEIIEGNSVDSSIQQVMGSGGQRVITIVTDGVPLGNIQTSIPTGGIGQPFIVTVQDGQQVLTVPAGKVAEETVIKEEEEEKLPLTKKPRIGEKTNSVEESKEGNERELLQQQLQEANRRAQEYRHQLLKKEQEAEQYRLKLEAIARQQPNGVDFTMVEEVAEVDAVVVTEGELEERETKVTGSAGTTEPHTRVSMATVSS

SEQ ID NO: 33712 - protein, 448 aa, Homo sapiens
  Payload ID: 6653
  Gene Symbol: GABPB2
  Gene Name: GA binding protein transcription factor, beta subunit 2
  Uniprot ID: Q8TAK5
  ENSP ID: ENSP00000357914
MSLVDLGKRLLEAARKGQDDEVRTLMANGAPFTTDWLGTSPLHLAAQYGHYSTAEVLLRAGVSRDARTKVDRTPLHMAAADGHAHIVELLVRNGADVNAKDMLKMTALHWATERHHRDVVELLIKYGADVHAFSKFDKSAFDIALEKNNAEILVILQEAMQNQVNVNPERANPVTDPVSMAAPFIFTSGEVVNLASLISSTNTKTTSGDPHASTVQFSNSTTSVLATLAALAEASVPLSNSHRATANTEEIIEGNSVDSSIQQVMGSGGQRVITIVTDGVPLGNIQTSIPTGGIGQPFIVTVQDGQQVLTVPAGKVAEETVIKEEEEEKLPLTKKPRIGEKTNSVEESKEGNERELLQQQLQEANRRAQEYRHQLLKKEQEAEQYRLKLEAIARQQPNGVDFTMVEEVAEVDAVVVTEGELEERETKVTGSAGTTEPHTRVSMATVSS

SEQ ID NO: 33713 - protein, 117 aa, Homo sapiens
  Payload ID: 6654
  Gene Symbol: GABARAP
  Gene Name: GABA(A) receptor-associated protein
  Uniprot ID: O95166
  ENSP ID: ENSP00000306866
MKFVYKEEHPFEKRRSEGEKIRKKYPDRVPVIVEKAPKARIGDLDKKKYLVPSDLTVGQFYFLIRKRIHLRAEDALFFFVNNVIPPTSATMGQLYQEHHEEDFFLYIAYSDESVYGL

SEQ ID NO: 33714 - protein, 98 aa, Homo sapiens
  Payload ID: 6654
  Gene Symbol: GABARAP
  Gene Name: GABA(A) receptor-associated protein
  ENSP ID: ENSP00000458476
MKFVYKEEHPFEKRRSEGEKIRKKYPDRVPVIVEKAPKARIGDLDKKKYLVPSDLTVGQFYFLIRKRIHLRAEDALFFFVNNVIPPTSATMGQLYQVW

SEQ ID NO: 33715 - protein, 27 aa, Homo sapiens
  Payload ID: 6654
  Gene Symbol: GABARAP
  Gene Name: GABA(A) receptor-associated protein
  ENSP ID: ENSP00000459345
MGQLYQEHHEEDFFLYIAYSDESVYGL

SEQ ID NO: 33716 - protein, 36 aa, Homo sapiens
  Payload ID: 6654
  Gene Symbol: GABARAP
  Gene Name: GABA(A) receptor-associated protein
  ENSP ID: ENSP00000460489
MKFVYKEEHPFEKRRSEGEKIRKKYPDRVPLVSSTS

SEQ ID NO: 33717 - protein, 27 aa, Homo sapiens
  Payload ID: 6654
  Gene Symbol: GABARAP
  Gene Name: GABA(A) receptor-associated protein
  ENSP ID: ENSP00000460855
MGQLYQEHHEEDFFLYIAYSDESVYGL

SEQ ID NO: 33718 - protein, 27 aa, Homo sapiens
  Payload ID: 6654
  Gene Symbol: GABARAP
  Gene Name: GABA(A) receptor-associated protein
  ENSP ID: ENSP00000461882
MGQLYQEHHEEDFFLYIAYSDESVYGL

SEQ ID NO: 33719 - protein, 117 aa, Homo sapiens
  Payload ID: 6655
  Gene Symbol: GABARAPL1
  Gene Name: GABA(A) receptor-associated protein like 1
  Uniprot ID: Q9H0R8
  ENSP ID: ENSP00000266458
MKFQYKEDHPFEYRKKEGEKIRKKYPDRVPVIVEKAPKARVPDLDKRKYLVPSDLTVGQFYFLIRKRIHLRPEDALFFFVNNTIPPTSATMGQLYEDNHEEDYFLYVAYSDESVYGK

SEQ ID NO: 33720 - protein, 146 aa, Homo sapiens
  Payload ID: 6655
  Gene Symbol: GABARAPL1
  Gene Name: GABA(A) receptor-associated protein like 1
  Uniprot ID: Q9H0R8
  ENSP ID: ENSP00000411256
MKFQYKEDHPFEYRKKEGEKIRKKYPDRVPVIVEKAPKARVPDLDKRKYLVPSDLTVGQFYFLIRKRIHLRPEDALFFFVNNTIPPTSATMGQLYEVMVLVAQYWMPSSAVWHPLALVLDALITHLRSGAEGVIYPDPLTYGSVRL

SEQ ID NO: 33721 - protein, 10 aa, Homo sapiens
  Payload ID: 6655
  Gene Symbol: GABARAPL1
  Gene Name: GABA(A) receptor-associated protein like 1
  ENSP ID: ENSP00000437451
MGQLYEDNHE

SEQ ID NO: 33722 - protein, 43 aa, Homo sapiens
  Payload ID: 6655
  Gene Symbol: GABARAPL1
  Gene Name: GABA(A) receptor-associated protein like 1
  ENSP ID: ENSP00000438029
MKFQYKEDHPFEYRKKEGEKIRKKYPDRVPAPGLVWGQPASSC

SEQ ID NO: 33723 - protein, 27 aa, Homo sapiens
  Payload ID: 6655
  Gene Symbol: GABARAPL1
  Gene Name: GABA(A) receptor-associated protein like 1
  ENSP ID: ENSP00000439734
MGQLYEDNHEEDYFLYVAYSDESVYGK

SEQ ID NO: 33724 - protein, 36 aa, Homo sapiens
  Payload ID: 6655
  Gene Symbol: GABARAPL1
  Gene Name: GABA(A) receptor-associated protein like 1
  ENSP ID: ENSP00000441165
MKFQYKEDHPFEYRKKEGEKIRKKYPDRVPLASSTS

SEQ ID NO: 33725 - protein, 43 aa, Homo sapiens; identical to SEQ ID NO: 33722
  Payload ID: 6655
  Gene Symbol: GABARAPL1
  Gene Name: GABA(A) receptor-associated protein like 1
  ENSP ID: ENSP00000443122

SEQ ID NO: 33726 - protein, 43 aa, Homo sapiens; identical to SEQ ID NO: 33722
  Payload ID: 6655
  Gene Symbol: GABARAPL1
  Gene Name: GABA(A) receptor-associated protein like 1
  ENSP ID: ENSP00000443720

SEQ ID NO: 33727 - protein, 43 aa, Homo sapiens; identical to SEQ ID NO: 33722
  Payload ID: 6655
  Gene Symbol: GABARAPL1
  Gene Name: GABA(A) receptor-associated protein like 1
  ENSP ID: ENSP00000444055

SEQ ID NO: 33728 - protein, 70 aa, Homo sapiens
  Payload ID: 6655
  Gene Symbol: GABARAPL1
  Gene Name: GABA(A) receptor-associated protein like 1
  ENSP ID: ENSP00000444108
MKFQYKEDHPFEYRKKEGEKIRKKYPDRVPVIVEKAPKARVPDLDKRKYLVPSDLTVGQFYFLIRKRIHL

SEQ ID NO: 33729 - protein, 117 aa, Homo sapiens; identical to SEQ ID NO: 33719
  Payload ID: 6655
  Gene Symbol: GABARAPL1
  Gene Name: GABA(A) receptor-associated protein like 1
  Uniprot ID: Q9H0R8
  ENSP ID: ENSP00000444186

SEQ ID NO: 33730 - protein, 27 aa, Homo sapiens
  Payload ID: 6655
  Gene Symbol: GABARAPL1
  Gene Name: GABA(A) receptor-associated protein like 1
  ENSP ID: ENSP00000444209
MGQLYEDNHEEDYFLYVAYSDESVYGK

SEQ ID NO: 33731 - protein, 27 aa, Homo sapiens
  Payload ID: 6655
  Gene Symbol: GABARAPL1
  Gene Name: GABA(A) receptor-associated protein like 1
  ENSP ID: ENSP00000444738
MGQLYEDNHEEDYFLYVAYSDESVYGK

SEQ ID NO: 33732 - protein, 103 aa, Homo sapiens
  Payload ID: 6655
  Gene Symbol: GABARAPL1
  Gene Name: GABA(A) receptor-associated protein like 1
  ENSP ID: ENSP00000445709
MKFQYKEDHPFEYRKKEGEKIRKKYPDRVPVSVEERRGWEGKGPRGRGRVVEMASLGRPGGSGEGRFRELLNPERPSVPEPMDVQTVELLKPRMPGPRTPLQG

SEQ ID NO: 33733 - protein, 146 aa, Homo sapiens; identical to SEQ ID NO: 33720
  Payload ID: 6655
  Gene Symbol: GABARAPL1
  Gene Name: GABA(A) receptor-associated protein like 1
  Uniprot ID: Q9H0R8
  ENSP ID: ENSP00000445857

SEQ ID NO: 33734 - protein, 36 aa, Homo sapiens; identical to SEQ ID NO: 33724
  Payload ID: 6655
  Gene Symbol: GABARAPL1
  Gene Name: GABA(A) receptor-associated protein like 1
  ENSP ID: ENSP00000446297

SEQ ID NO: 33735 - protein, 27 aa, Homo sapiens
  Payload ID: 6655
  Gene Symbol: GABARAPL1
  Gene Name: GABA(A) receptor-associated protein like 1
  ENSP ID: ENSP00000446456
MGQLYEDNHEEDYFLYVAYSDESVYGK

SEQ ID NO: 33736 - protein, 43 aa, Homo sapiens; identical to SEQ ID NO: 33722
  Payload ID: 6655
  Gene Symbol: GABARAPL1
  Gene Name: GABA(A) receptor-associated protein like 1
  ENSP ID: ENSP00000486133

SEQ ID NO: 33737 - protein, 117 aa, Homo sapiens
  Payload ID: 6656
  Gene Symbol: GABARAPL2
  Gene Name: GABA(A) receptor-associated protein like 2
  Uniprot ID: P60520
  ENSP ID: ENSP00000037243
MKWMFKEDHSLEHRCVESAKIRAKYPDRVPVIVEKVSGSQIVDIDKRKYLVPSDITVAQFMWIIRKRIQLPSEKAIFLFVDKTVPQSSLTMGQLYEKEKDEDGFLYVAYSGENTFGF

SEQ ID NO: 33738 - protein, 57 aa, Homo sapiens
  Payload ID: 6656
  Gene Symbol: GABARAPL2
  Gene Name: GABA(A) receptor-associated protein like 2
  ENSP ID: ENSP00000455606
MWIIRKRIQLPSEKAIFLFVDKTVPQSSLTMGQLYEKEKDEDGFLYVAYSGENTFGF

SEQ ID NO: 33739 - protein, 88 aa, Homo sapiens
  Payload ID: 6656
  Gene Symbol: GABARAPL2
  Gene Name: GABA(A) receptor-associated protein like 2
  ENSP ID: ENSP00000456773
MKWMFKEDHSLEHRCVESAKIRAKYPDRVPVIVEKVSGSQIVDIDKRKYLVPSDITVAQFMWIIRKRIQLPSEKAIFLFVDKTVPQSR

SEQ ID NO: 33740 - protein, 42 aa, Homo sapiens
  Payload ID: 6656
  Gene Symbol: GABARAPL2
  Gene Name: GABA(A) receptor-associated protein like 2
  ENSP ID: ENSP00000457448
MKWMFKEDHSLEHRCVESAKIRAKYPDRVPPNYGTALREGKR

SEQ ID NO: 33741 - protein, 392 aa, Homo sapiens
  Payload ID: 6657
  Gene Symbol: GALK1
  Gene Name: galactokinase 1
  Uniprot ID: P51570
  ENSP ID: ENSP00000225614
MAALRQPQVAELLAEARRAFREEFGAEPELAVSAPGRVNLIGEHTDYNQGLVLPMALELMTVLVGSPRKDGLVSLLTTSEGADEPQRLQFPLPTAQRSLEPGTPRWANYVKGVIQYYPAAPLPGFSAVVVSSVPLGGGLSSSASLEVATYTFLQQLCPDSGTIAARAQVCQQAEHSFAGMPCGIMDQFISLMGQKGHALLIDCRSLETSLVPLSDPKLAVLITNSNVRHSLASSEYPVRRRQCEEVARALGKESLREVQLEELEAARDLVSKEGFRRARHVVGEIRRTAQAAAALRRGDYRAFGRLMVESHRSLRDDYEVSCPELDQLVEAALAVPGVYGSRMTGGGFGGCTVTLLEASAAPHAMRHIQEHYGGTATFYLSQAADGAKVLCL

SEQ ID NO: 33742 - protein, 184 aa, Homo sapiens
  Payload ID: 6657
  Gene Symbol: GALK1
  Gene Name: galactokinase 1
  ENSP ID: ENSP00000464765
GMPCGIMDQFISLMGQKGHALLIDCSEYPVRRRQCEEVARALGKESLREVQLEELEAARDLVSKEGFRRARHVVGEIRRTAQAAAALRRGDYRAFGRLMVESHRSLRDDYEVSCPELDQLVEAALAVPGVYGSRMTGGGFGGCTVTLLEASAAPHAMRHIQEHYGGTATFYLSQAADGAKVLCL

SEQ ID NO: 33743 - protein, 392 aa, Homo sapiens; identical to SEQ ID NO: 33741
  Payload ID: 6657
  Gene Symbol: GALK1
  Gene Name: galactokinase 1
  Uniprot ID: P51570
  ENSP ID: ENSP00000465930

SEQ ID NO: 33744 - protein, 120 aa, Homo sapiens
  Payload ID: 6657
  Gene Symbol: GALK1
  Gene Name: galactokinase 1
  ENSP ID: ENSP00000468288
MAALRQPQVAELLAEARRAFREEFGAEPELAVSAPGRVNLIGEHTDYNQGLVLPMALELMTVLVGSPRKDGLVSLLTTSEGADEPQRLQFPLPTAQRSLEPGTPRWANYVKGVIQYYPEP

SEQ ID NO: 33745 - protein, 91 aa, Homo sapiens
  Payload ID: 6657
  Gene Symbol: GALK1
  Gene Name: galactokinase 1
  ENSP ID: ENSP00000468341
DEPQRLQFPLPTAQRSLEPGTPRWANYVKGVIQYYPAAPLPGFSAVVVSSVPLGGGLSSSASLEVATYTFLQQLCPALASPPHPVLQTRAQ

SEQ ID NO: 33746 - protein, 447 aa, Homo sapiens
  Payload ID: 6658
  Gene Symbol: GALK2
  Gene Name: galactokinase 2
  Uniprot ID: Q01415
  ENSP ID: ENSP00000316632
MPVLYDRLLKLKEMFNSKFGSIPKFYVRAPGRVNIIGEHIDYCGYSVLPMAVEQDVLIAVEPVKTYALQLANTNPLYPDFSTSANNIQIDKTKPLWHNYFLCGLKGIQEHFGLSNLTGMNCLVDGNIPPSSGLSSSSALVCCAGLVTLTVLGRNLSKVELAEICAKSERYIGTEGGGMDQSISFLAEEGTAKLIEFSPLRATDVKLPSGAVFVIANSCVEMNKAATSHFNIRVMECRLAAKLLAKYKSLQWDKVLRLEEVQAKLGISLEEMLLVTEDALHPEPYNPEEICRCLGISLEELRTQILSPNTQDVLIFKLYQRAKHVYSEAARVLQFKKICEEAPENMVQLLGELMNQSHMSCRDMYECSCPELDQLVDICRKFGAQGSRLTGAGWGGCTVSMVPADKLPSFLANVHKAYYQRSDGSLAPEKQSLFATKPGGGALVLLEA

SEQ ID NO: 33747 - protein, 434 aa, Homo sapiens
  Payload ID: 6658
  Gene Symbol: GALK2
  Gene Name: galactokinase 2
  ENSP ID: ENSP00000379766
MFNSKFGSIPKFYVRAPGRVNIIGEHIDYCGYSVLPMAVEQDVLIAVEPVKTYALQLANTNPLYPDFSTSANNIQIDKTKPLWHNYFLCGLKGIQEHFGLSNLTGMNCLVDGNIPPSSGLSSSSALVCCAGLVTLTVLGRNLSKVELAEICAKSERYIGTEGGGMDQSISFLAEEGTAKLIEFSPLRATDVKLPSGAVFVIANSCVEMNKAATSHFNIRVMECRLAAKLLAKYKSLQWDKVLRLEEVQAKLGISLEEMLLVTEDALHPEPYNPEEICRCLGISLEELRTQILSPNTQDVLIFKLYQRAKHVYSEAARVLQFKKICEEAPENMVQLLGELMNQSHMSCRDMYECSCPELDQLVDICRKFGAQGSRLTGAGWGGCTVSMVPADKLPSFLANVHKAYYQRSDGSLAPEKQSLFATKPGGGALVLLEA

SEQ ID NO: 33748 - protein, 434 aa, Homo sapiens; identical to SEQ ID NO: 33747
  Payload ID: 6658
  Gene Symbol: GALK2
  Gene Name: galactokinase 2
  ENSP ID: ENSP00000440312

SEQ ID NO: 33749 - protein, 209 aa, Homo sapiens
  Payload ID: 6658
  Gene Symbol: GALK2
  Gene Name: galactokinase 2
  ENSP ID: ENSP00000452614
MFNSKFGSIPKFYVRAPGRVNIIGEHIDYCGYSVLPMAVEQDVLIAVEPVKTYALQLANTNPLYPDFSTSANNIQIDKTKPLWHNYFLCGLKGIQEHFGLSNLTGMNCLVDGNIPPSSGLSSSSALVCCAGLVTLTVLGRNLSKAKLIEFSPLRATDVKLPSGAVFVIANSCVEMNKAATSHFNIRVMECRLAAKVQAKLGISLEEMLL

SEQ ID NO: 33750 - protein, 110 aa, Homo sapiens
  Payload ID: 6658
  Gene Symbol: GALK2
  Gene Name: galactokinase 2
  ENSP ID: ENSP00000452637
  MOD_RES (1)..(1): Any amino acid
XEEAPENMVQLLGELMNQSHMSCRDMYECSCPELDQLVDICRKFGAQGSRLTGAGWGGCTVSMVPADKLPSFLANVHKAYYQRSDGSLAPEKQSLFATKPGASERYENNT

SEQ ID NO: 33751 - protein, 77 aa, Homo sapiens
  Payload ID: 6658
  Gene Symbol: GALK2
  Gene Name: galactokinase 2
  ENSP ID: ENSP00000452679
MFNSKFGSIPKFYVRAPGRVNIIGEHIDYCGYSVLPMAVEQDVLIAVEPVKTYALQLANTNPLYPSSGLQGSLRQRL

SEQ ID NO: 33752 - protein, 458 aa, Homo sapiens
  Payload ID: 6658
  Gene Symbol: GALK2
  Gene Name: galactokinase 2
  Uniprot ID: Q01415
  ENSP ID: ENSP00000453129
MATESPATRRVQVAEHPRLLKLKEMFNSKFGSIPKFYVRAPGRVNIIGEHIDYCGYSVLPMAVEQDVLIAVEPVKTYALQLANTNPLYPDFSTSANNIQIDKTKPLWHNYFLCGLKGIQEHFGLSNLTGMNCLVDGNIPPSSGLSSSSALVCCAGLVTLTVLGRNLSKVELAEICAKSERYIGTEGGGMDQSISFLAEEGTAKLIEFSPLRATDVKLPSGAVFVIANSCVEMNKAATSHFNIRVMECRLAAKLLAKYKSLQWDKVLRLEEVQAKLGISLEEMLLVTEDALHPEPYNPEEICRCLGISLEELRTQILSPNTQDVLIFKLYQRAKHVYSEAARVLQFKKICEEAPENMVQLLGELMNQSHMSCRDMYECSCPELDQLVDICRKFGAQGSRLTGAGWGGCTVSMVPADKLPSFLANVHKAYYQRSDGSLAPEKQSLFATKPGGGALVLLEA

SEQ ID NO: 33753 - protein, 434 aa, Homo sapiens; identical to SEQ ID NO: 33747
  Payload ID: 6658
  Gene Symbol: GALK2
  Gene Name: galactokinase 2
  ENSP ID: ENSP00000453133

SEQ ID NO: 33754 - protein, 41 aa, Homo sapiens
  Payload ID: 6658
  Gene Symbol: GALK2
  Gene Name: galactokinase 2
  ENSP ID: ENSP00000453193
MPVLYDSLECSGMISAHYNLRLLGSSDSPASASLEAGITGY

SEQ ID NO: 33755 - protein, 45 aa, Homo sapiens
  Payload ID: 6658
  Gene Symbol: GALK2
  Gene Name: galactokinase 2
  ENSP ID: ENSP00000453241
MPVLYDRWSLALSPVLEARVQVARSWLTATSASWVEVILLPPPPE

SEQ ID NO: 33756 - protein, 157 aa, Homo sapiens
  Payload ID: 6658
  Gene Symbol: GALK2
  Gene Name: galactokinase 2
  ENSP ID: ENSP00000453252
  MOD_RES (1)..(1): Any amino acid
XLAAKLLAKYKSLQWDKVLRLEEVQAKLGISLEEMLLVTEDALHPEPYNPEEICRCLGISLEELRTQILSPNTQDVLIFKLYQRAKHVYSEAARVLQFKKICEEAPENMVQLLGELMNQSHMSCRDMYECSCPELDQLVDICRCFGNTSQLMHLKII

SEQ ID NO: 33757 - protein, 162 aa, Homo sapiens
  Payload ID: 6658
  Gene Symbol: GALK2
  Gene Name: galactokinase 2
  ENSP ID: ENSP00000453257
CRCLGISLEELRTQILSPNTQDVLIFKLYQRAKHVYSEAARVLQFKKICEEAPENMVQLLGELMNQSHMSCRDMYECSCPELDQLVDICRKFGAQGSRLTGAGWGGCTVSMVPADKLPSFLANVHKAYYQRSDGSLAPEKQSLFATKPGGALEIPASSCILR

SEQ ID NO: 33758 - protein, 49 aa, Homo sapiens
  Payload ID: 6658
  Gene Symbol: GALK2
  Gene Name: galactokinase 2
  ENSP ID: ENSP00000453457
MPVLYDRWSLALLPSLECSGMISAHYNLRLLGSSDSPASASLEAGITGY

SEQ ID NO: 33759 - protein, 77 aa, Homo sapiens; identical to SEQ ID NO: 33751
  Payload ID: 6658
  Gene Symbol: GALK2
  Gene Name: galactokinase 2
  ENSP ID: ENSP00000453652

SEQ ID NO: 33760 - protein, 101 aa, Homo sapiens
  Payload ID: 6658
  Gene Symbol: GALK2
  Gene Name: galactokinase 2
  ENSP ID: ENSP00000453844
MATESPATRRVQVAEHPRLLKLKEMFNSKFGSIPKFYVRAPGRVNIIGEHIDYCGYSVLPMAVEQDVLIAVEPVKTYALQLANTNPLYPSSGLQGSLRQRL

SEQ ID NO: 33761 - protein, 49 aa, Homo sapiens; identical to SEQ ID NO: 33758
  Payload ID: 6658
  Gene Symbol: GALK2
  Gene Name: galactokinase 2
  ENSP ID: ENSP00000453849

SEQ ID NO: 33762 - protein, 66 aa, Homo sapiens
  Payload ID: 6658
  Gene Symbol: GALK2
  Gene Name: galactokinase 2
  ENSP ID: ENSP00000453909
MFNSKFGSIPKFYVRAPGRVNIIGEHIDYCGYSVLPMAVEQDVLIAVEPVKTYALQLANTNPLYPK

SEQ ID NO: 33763 - protein, 131 aa, Homo sapiens
  Payload ID: 6658
  Gene Symbol: GALK2
  Gene Name: galactokinase 2
  ENSP ID: ENSP00000453961
MFNSKFGSIPKFYVRAPGRVNIIGEHIDYCGYSVLPMAVEQDVLIAVEPVKTYALQLANTNPLYPDFSTSANNIQIDKTKPLWHNYFLCGLKGIQEHFGLSNLTGMNCLVDGNIPPSSGLSSSSALVCCAG

SEQ ID NO: 33764 - protein, 80 aa, Homo sapiens
  Payload ID: 6658
  Gene Symbol: GALK2
  Gene Name: galactokinase 2
  ENSP ID: ENSP00000454123
MFNSKFGSIPKFYVRAPGRVNIIGEHIDYCGYSVLPMAVEQDVLIAVEPVKTYALQLANTNPLYPDFSTSANNIQIDKTK

SEQ ID NO: 33765 - protein, 522 aa, Homo sapiens
  Payload ID: 6659
  Gene Symbol: GALNS
  Gene Name: galactosamine (N-acetyl)-6-sulfatase
  Uniprot ID: P34059
  ENSP ID: ENSP00000268695
MAAVVAATRWWQLLLVLSAAGMGASGAPQPPNILLLLMDDMGWGDLGVYGEPSRETPNLDRMAAEGLLFPNFYSANPLCSPSRAALLTGRLPIRNGFYTTNAHARNAYTPQEIVGGIPDSEQLLPELLKKAGYVSKIVGKWHLGHRPQFHPLKHGFDEWFGSPNCHFGPYDNKARPNIPVYRDWEMVGRYYEEFPINLKTGEANLTQIYLQEALDFIKRQARHHPFFLYWAVDATHAPVYASKPFLGTSQRGRYGDAVREIDDSIGKILELLQDLHVADNTFVFFTSDNGAALISAPEQGGSNGPFLCGKQTTFEGGMREPALAWWPGHVTAGQVSHQLGSIMDLFTTSLALAGLTPPSDRAIDGLNLLPTLLQGRLMDRPIFYYRGDTLMAATLGQHKAHFWTWTNSWENFRQGIDFCPGQNVSGVTTHNLEDHTKLPLIFHLGRDPGERFPLSFASAEYQEALSRITSVVQQHQEALVPAQPQLNVCNWAVMNWAPPGCEKLGKCLTPPESIPKKCLWSH

SEQ ID NO: 33766 - protein, 69 aa, Homo sapiens
  Payload ID: 6659
  Gene Symbol: GALNS
  Gene Name: galactosamine (N-acetyl)-6-sulfatase
  ENSP ID: ENSP00000454484
SAAGMGASGAPQPPNILLLLMDDRGRHCSQDGYPSAMASTPPTPMPETPTHRRRLWAASQTRSSSCRSF

SEQ ID NO: 33767 - protein, 116 aa, Homo sapiens
  Payload ID: 6659
  Gene Symbol: GALNS
  Gene Name: galactosamine (N-acetyl)-6-sulfatase
  ENSP ID: ENSP00000455006
MAAVVAATRWWQLLLVLSAAGMGASGAPQPPNILLLLMDDESLPPPRAAGSPRWAPVLPDGCLCPLENAERSDCFPEHALQRPGVRVLTAVAGPFSALSGISLLKILCFRISSFHF

SEQ ID NO: 33768 - protein, 170 aa, Homo sapiens
  Payload ID: 6659
  Gene Symbol: GALNS
  Gene Name: galactosamine (N-acetyl)-6-sulfatase
  ENSP ID: ENSP00000455174
MTGTASSLAARAALLTGRLPIRNGFYTTNAHARNAYTPQEIVGGIPDSEQLLPELLKKAGYVSKIVGKWHLGHRPQFHPLKHGFDEWFGSPNCHFGPYDNKARPNIPVYRDWEMVGRYYEEFPINLKTGEANLTQIYLQEALDFIKRQARHHPFFLYWAVDATHAPVYAS

SEQ ID NO: 33769 - protein, 78 aa, Homo sapiens
  Payload ID: 6659
  Gene Symbol: GALNS
  Gene Name: galactosamine (N-acetyl)-6-sulfatase
  ENSP ID: ENSP00000456884
MAAVVAATRWWQLLLVLSAAGMGASGAPQPPNILLLLMDDESLPPPRAAGSPRWAPVLPDGCLCPLENAERRSGVPKV

SEQ ID NO: 33770 - protein, 51 aa, Homo sapiens
  Payload ID: 6659
  Gene Symbol: GALNS
  Gene Name: galactosamine (N-acetyl)-6-sulfatase
  ENSP ID: ENSP00000457921
SAAGMGASGAPQPPNILLLLMDDMHVFRGQLLRACRCWCQAGRRQTDTFPT

SEQ ID NO: 33771 - protein, 342 aa, Homo sapiens
  Payload ID: 6660
  Gene Symbol: GALM
  Gene Name: galactose mutarotase (aldose 1-epimerase)
  Uniprot ID: Q96C23
  ENSP ID: ENSP00000272252
MASVTRAVFGELPSGGGTVEKFQLQSDLLRVDIISWGCTITALEVKDRQGRASDVVLGFAELEGYLQKQPYFGAVIGRVANRIAKGTFKVDGKEYHLAINKEPNSLHGGVRGFDKVLWTPRVLSNGVQFSRISPDGEEGYPGELKVWVTYTLDGGELIVNYRAQASQATPVNLTNHSYFNLAGQASPNINDHEVTIEADTYLPVDETLIPTGEVAPVQGTAFDLRKPVELGKHLQDFHLNGFDHNFCLKGSKEKHFCARVHHAASGRVLEVYTTQPGVQFYTGNFLDGTLKGKNGAVYPKHSGFCLETQNWPDAVNQPRFPPVLLRPGEEYDHTTWFKFSVA

SEQ ID NO: 33772 - protein, 194 aa, Homo sapiens
  Payload ID: 6660
  Gene Symbol: GALM
  Gene Name: galactose mutarotase (aldose 1-epimerase)
  ENSP ID: ENSP00000386233
MASVTRAVFGELPSGGGTVEKFQLQSDLLRVDIISWGCTITALEVKDRQGRASDVVLGFAELEGEVAPVQGTAFDLRKPVELGKHLQDFHLNGFDHNFCLKGSKEKHFCARVHHAASGRVLEVYTTQPGVQFYTGNFLDGTLKGKNGAVYPKHSGFCLETQNWPDAVNQPRFPPVLLRPGEEYDHTTWFKFSVA

SEQ ID NO: 33773 - protein, 218 aa, Homo sapiens
  Payload ID: 6660
  Gene Symbol: GALM
  Gene Name: galactose mutarotase (aldose 1-epimerase)
  ENSP ID: ENSP00000399473
RVLSNGVQFSRISPDGEEGYPGELKVWVTYTLDGGELIVNYRAQASQATPVNLTNHSYFNLAGQASPNINDHEVTIEADTYLPVDETLIPTGEVAPVQGTAFDLRKPVELGKHLQDFHLNGFDHNFCLKGSKEKHFCARVHHAASGRVLEVYTTQPGVQFYTGNFLDGTLKGKNGAVYPKHSGFCLETQNWPDAVNQFPFQHGIIWRQRNLEDNSRIL

SEQ ID NO: 33774 - protein, 194 aa, Homo sapiens
  Payload ID: 6660
  Gene Symbol: GALM
  Gene Name: galactose mutarotase (aldose 1-epimerase)
  ENSP ID: ENSP00000409083
LLRVDIISWGCTITALEVKDRQGRASDVVLGFAELEGYLQKQPYFGAVIGRVANRIAKGTFKVDGKEYHLAINKEPNSLHGGVRGFDKVLWTPRVLSNGVQFSRISPDGEEGYPGELKVWVTYTLDGGELIVNYRAQASQATPVNLTNHSYFNLAGQASPNINDHEVTIEADTYLPVDETLIPTGGTNRRFLQG

SEQ ID NO: 33775 - protein, 379 aa, Homo sapiens
  Payload ID: 6661
  Gene Symbol: GALT
  Gene Name: galactose-1-phosphate uridylyltransferase
  Uniprot ID: P07902
  ENSP ID: ENSP00000368119
MSRSGTDPQQRQQASEADAAAATFRANDHQHIRYNPLQDEWVLVSAHRMKRPWQGQVEPQLLKTVPRHDPLNPLCPGAIRANGEVNPQYDSTFLFDNDFPALQPDAPSPGPSDHPLFQAKSARGVCKVMCFHPWSDVTLPLMSVPEIRAVVDAWASVTEELGAQYPWVQIFENKGAMMGCSNPHPHCQVWASSFLPDIAQREERSQQAYKSQHGEPLLMEYSRQELLRKERLVLTSEHWLVLVPFWATWPYQTLLLPRRHVRRLPELTPAERDDLASIMKKLLTKYDNLFETSFPYSMGWHGAPTGSEAGANWNHWQLHAHYYPPLLRSATVRKFMVGYEMLAQAQRDLTPEQAAERLRALPEVHYHLGQKDRETATIA

SEQ ID NO: 33776 - protein, 270 aa, Homo sapiens
  Payload ID: 6661
  Gene Symbol: GALT
  Gene Name: galactose-1-phosphate uridylyltransferase
  Uniprot ID: P07902
  ENSP ID: ENSP00000401956
MTLSTLCVLGPSEPTESKVMCFHPWSDVTLPLMSVPEIRAVVDAWASVTEELGAQYPWVQIFENKGAMMGCSNPHPHCQVWASSFLPDIAQREERSQQAYKSQHGEPLLMEYSRQELLRKERLVLTSEHWLVLVPFWATWPYQTLLLPRRHVRRLPELTPAERDDLASIMKKLLTKYDNLFETSFPYSMGWHGAPTGSEAGANWNHWQLHAHYYPPLLRSATVRKFMVGYEMLAQAQRDLTPEQAAERLRALPEVHYHLGQKDRETATIA

SEQ ID NO: 33777 - protein, 120 aa, Homo sapiens
  Payload ID: 6661
  Gene Symbol: GALT
  Gene Name: galactose-1-phosphate uridylyltransferase
  ENSP ID: ENSP00000432839
MSRSGTDPQQRQQASEADAAAATFRANDHQHIRYNPLQDEWVLVSAHRMKRPWQGQVEPQLLKTVPRHDPLNPLCPGAIRANGELCSLMPPVQDPVIIPFSKQSLLEESVRSCASTPGRM

SEQ ID NO: 33778 - protein, 90 aa, Homo sapiens
  Payload ID: 6661
  Gene Symbol: GALT
  Gene Name: galactose-1-phosphate uridylyltransferase
  ENSP ID: ENSP00000450419
MSRSGTDPQQRQQASEADAAAATFRANDHQHIRYNPLQDEWVLVSAHRMKRPWQGQVEPQLLKTVPRHDPLNPLCPGAIRANGEPILVGR

SEQ ID NO: 33779 - protein, 84 aa, Homo sapiens
  Payload ID: 6661
  Gene Symbol: GALT
  Gene Name: galactose-1-phosphate uridylyltransferase
  ENSP ID: ENSP00000450942
MSRSGTDPQQRQQASEADAAAATFRANDHQHIRYNPLQDEWVLVSAHRMKRPWQGQVEPQLLKTVPRHDPLNPLCPGAIRANGE

SEQ ID NO: 33780 - protein, 84 aa, Homo sapiens; identical to SEQ ID NO: 33779
  Payload ID: 6661
  Gene Symbol: GALT
  Gene Name: galactose-1-phosphate uridylyltransferase
  ENSP ID: ENSP00000451435

SEQ ID NO: 33781 - protein, 59 aa, Homo sapiens
  Payload ID: 6661
  Gene Symbol: GALT
  Gene Name: galactose-1-phosphate uridylyltransferase
  ENSP ID: ENSP00000451756
  MOD_RES (1)..(1): Any amino acid
XEWVLVSAHRMKRPWQGQVEPQLLKTVPRHDPLNPLCPGAIRANGEGGPSLLPCSLSSL

SEQ ID NO: 33782 - protein, 423 aa, Homo sapiens
  Payload ID: 6662
  Gene Symbol: GAL3ST1
  Gene Name: galactose-3-O-sulfotransferase 1
  Uniprot ID: Q99999
  ENSP ID: ENSP00000343234
MLPPQKKPWESMAKGLVLGALFTSFLLLVYSYAVPPLHAGLASTTPEAAASCSPPALEPEAVIRANGSAGECQPRRNIVFLKTHKTASSTLLNILFRFGQKHRLKFAFPNGRNDFDYPTFFARSLVQDYRPGACFNIICNHMRFHYDEVRGLVPTNAIFITVLRDPARLFESSFHYFGPVVPLTWKLSAGDKLTEFLQDPDRYYDPNGFNAHYLRNLLFFDLGYDNSLDPSSPQVQEHILEVERRFHLVLLQEYFDESLVLLKDLLCWELEDVLYFKLNARRDSPVPRLSGELYGRATAWNMLDSHLYRHFNASFWRKVEAFGRERMAREVAALRHANERMRTICIDGGHAVDAAAIQDEAMQPWQPLGTKSILGYNLKKSIGQRHAQLCRRMLTPEIQYLMDLGANLWVTKLWKFIRDFLRW

SEQ ID NO: 33783 - protein, 423 aa, Homo sapiens; identical to SEQ ID NO: 33782
  Payload ID: 6662
  Gene Symbol: GAL3ST1
  Gene Name: galactose-3-O-sulfotransferase 1
  Uniprot ID: Q99999
  ENSP ID: ENSP00000384122

SEQ ID NO: 33784 - protein, 423 aa, Homo sapiens; identical to SEQ ID NO: 33782
  Payload ID: 6662
  Gene Symbol: GAL3ST1
  Gene Name: galactose-3-O-sulfotransferase 1
  Uniprot ID: Q99999
  ENSP ID: ENSP00000384388

SEQ ID NO: 33785 - protein, 423 aa, Homo sapiens; identical to SEQ ID NO: 33782
  Payload ID: 6662
  Gene Symbol: GAL3ST1
  Gene Name: galactose-3-O-sulfotransferase 1
  Uniprot ID: Q99999
  ENSP ID: ENSP00000385207

SEQ ID NO: 33786 - protein, 423 aa, Homo sapiens; identical to SEQ ID NO: 33782
  Payload ID: 6662
  Gene Symbol: GAL3ST1
  Gene Name: galactose-3-O-sulfotransferase 1
  Uniprot ID: Q99999
  ENSP ID: ENSP00000385735

SEQ ID NO: 33787 - protein, 423 aa, Homo sapiens; identical to SEQ ID NO: 33782
  Payload ID: 6662
  Gene Symbol: GAL3ST1
  Gene Name: galactose-3-O-sulfotransferase 1
  Uniprot ID: Q99999
  ENSP ID: ENSP00000385825

SEQ ID NO: 33788 - protein, 102 aa, Homo sapiens
  Payload ID: 6662
  Gene Symbol: GAL3ST1
  Gene Name: galactose-3-O-sulfotransferase 1
  ENSP ID: ENSP00000389876
MLPPQKKPWESMAKGLVLGALFTSFLLLVYSYAVPPLHAGLASTTPEAAASCSPPALEPEAVIRANGSAGECQPRRNIVFLKTHKTASSTLLNILFRFGQKH

SEQ ID NO: 33789 - protein, 71 aa, Homo sapiens
  Payload ID: 6662
  Gene Symbol: GAL3ST1
  Gene Name: galactose-3-O-sulfotransferase 1
  ENSP ID: ENSP00000390068
MLPPQKKPWESMAKGLVLGALFTSFLLLVYSYAVPPLHAGLASTTPEAAASCSPPALEPEAVIRANGSAGE

SEQ ID NO: 33790 - protein, 279 aa, Homo sapiens
  Payload ID: 6662
  Gene Symbol: GAL3ST1
  Gene Name: galactose-3-O-sulfotransferase 1
  ENSP ID: ENSP00000390545
MLPPQKKPWESMAKGLVLGALFTSFLLLVYSYAVPPLHAGLASTTPEAAASCSPPALEPEAVIRANGSAGECQPRRNIVFLKTHKTASSTLLNILFRFGQKHRLKFAFPNGRNDFDYPTFFARSLVQDYRPGACFNIICNHMRFHYDEVRGLVPTNAIFITVLRDPARLFESSFHYFGPVVPLTWKLSAGDKLTEFLQDPDRYYDPNGFNAHYLRNLLFFDLGYDNSLDPSSPQVQEHILEVERRFHLVLLQEYFDESLVLLKDLLCWELEDVLYFKLN

SEQ ID NO: 33791 - protein, 170 aa, Homo sapiens
  Payload ID: 6662
  Gene Symbol: GAL3ST1
  Gene Name: galactose-3-O-sulfotransferase 1
  ENSP ID: ENSP00000391485
MLPPQKKPWESMAKGLVLGALFTSFLLLVYSYAVPPLHAGLASTTPEAAASCSPPALEPEAVIRANGSAGECQPRRNIVFLKTHKTASSTLLNILFRFGQKHRLKFAFPNGRNDFDYPTFFARSLVQDYRPGACFNIICNHMRFHYDEVRGLVPTNAIFITVLRDPARLF

SEQ ID NO: 33792 - protein, 149 aa, Homo sapiens
  Payload ID: 6662
  Gene Symbol: GAL3ST1
  Gene Name: galactose-3-O-sulfotransferase 1
  ENSP ID: ENSP00000391996
MLPPQKKPWESMAKGLVLGALFTSFLLLVYSYAVPPLHAGLASTTPEAAASCSPPALEPEAVIRANGSAGECQPRRNIVFLKTHKTASSTLLNILFRFGQKHRLKFAFPNGRNDFDYPTFFARSLVQDYRPGACFNIICNHMRFHYDEV

SEQ ID NO: 33793 - protein, 85 aa, Homo sapiens
  Payload ID: 6662
  Gene Symbol: GAL3ST1
  Gene Name: galactose-3-O-sulfotransferase 1
  ENSP ID: ENSP00000394912
MLPPQKKPWESMAKGLVLGALFTSFLLLVYSYAVPPLHAGLASTTPEAAASCSPPALEPEAVIRANGSAGECQPRRNIVFLKTHK

SEQ ID NO: 33794 - protein, 265 aa, Homo sapiens
  Payload ID: 6662
  Gene Symbol: GAL3ST1
  Gene Name: galactose-3-O-sulfotransferase 1
  ENSP ID: ENSP00000395080
MLPPQKKPWESMAKGLVLGALFTSFLLLVYSYAVPPLHAGLASTRTPEAAASCSPPALEPEAVIRANGSAGECQPRRNIVFLKTHKTASSTLLNILFRFGQKHRLKFAFPNGRNDFDYPTFFARSLVQDYRPGACFNIICNHMRFHYDEVRGLVPTNAIFITVLRDPARLFESSFHYFGPVVPLTWKLSAGDKLTEFLQDPDRYYDPNGFNAHYLRNLLFFDLGYDNSLDPSSPQVQEHILEVERRFHLVLLQEYFDESLVLLKD

SEQ ID NO: 33795 - protein, 163 aa, Homo sapiens
  Payload ID: 6662
  Gene Symbol: GAL3ST1
  Gene Name: galactose-3-O-sulfotransferase 1
  ENSP ID: ENSP00000397092
MLPPQKKPWESMAKGLVLGALFTSFLLLVYSYAVPPLHAGLASTRTPEAAASCSPPALEPEAVIRANGSAGECQPRRNIVFLKTHKTASSTLLNILFRFGQKHRLKFAFPNGRNDFDYPTFFARSLVQDYRPGACFNIICNHMRFHYDEVRGLVPTNAIFITV

SEQ ID NO: 33796 - protein, 100 aa, Homo sapiens
  Payload ID: 6662
  Gene Symbol: GAL3ST1
  Gene Name: galactose-3-O-sulfotransferase 1
  ENSP ID: ENSP00000398380
MLPPQKKPWESMAKGLVLGALFTSFLLLVYSYAVPPLHAGLASTTPEAAASCSPPALEPEAVIRANGSAGECQPRRNIVFLKTHKTASSTLLNILFRFGQ

SEQ ID NO: 33797 - protein, 75 aa, Homo sapiens
  Payload ID: 6662
  Gene Symbol: GAL3ST1
  Gene Name: galactose-3-O-sulfotransferase 1
  ENSP ID: ENSP00000399649
MLPPQKKPWESMAKGLVLGALFTSFLLLVYSYAVPPLHAGLASTTPEAAASCSPPALEPEAVIRANGSAGECQPR

SEQ ID NO: 33798 - protein, 112 aa, Homo sapiens
  Payload ID: 6662
  Gene Symbol: GAL3ST1
  Gene Name: galactose-3-O-sulfotransferase 1
  ENSP ID: ENSP00000401074
MLPPQKKPWESMAKGLVLGALFTSFLLLVYSYAVPPLHAGLASTRTPEAAASCSPPALEPEAVIRANGSAGECQPRRNIVFLKTHKTASSTLLNILFRFGQKHRLKFAFPNG

SEQ ID NO: 33799 - protein, 199 aa, Homo sapiens
  Payload ID: 6662
  Gene Symbol: GAL3ST1
  Gene Name: galactose-3-O-sulfotransferase 1
  ENSP ID: ENSP00000401426
MLPPQKKPWESMAKGLVLGALFTSFLLLVYSYAVPPLHAGLASTTPEAAASCSPPALEPEAVIRANGSAGECQPRRNIVFLKTHKTASSTLLNILFRFGQKHRLKFAFPNGRNDFDYPTFFARSLVQDYRPGACFNIICNHMRFHYDEVRGLVPTNAIFITVLRDPARLFESSFHYFGPVVPLTWKLSAGDKLTEFLQD

SEQ ID NO: 33800 - protein, 242 aa, Homo sapiens
  Payload ID: 6662
  Gene Symbol: GAL3ST1
  Gene Name: galactose-3-O-sulfotransferase 1
  ENSP ID: ENSP00000405017
MLPPQKKPWESMAKGLVLGALFTSFLLLVYSYAVPPLHAGLASTTPEAAASCSPPALEPEAVIRANGSAGECQPRRNIVFLKTHKTASSTLLNILFRFGQKHRLKFAFPNGRNDFDYPTFFARSLVQDYRPGACFNIICNHMRFHYDEVRGLVPTNAIFITVLRDPARLFESSFHYFGPVVPLTWKLSAGDKLTEFLQDPDRYYDPNGFNAHYLRNLLFFDLGYDNSLDPSSPQVQEHILEV

SEQ ID NO: 33801 - protein, 143 aa, Homo sapiens
  Payload ID: 6662
  Gene Symbol: GAL3ST1
  Gene Name: galactose-3-O-sulfotransferase 1
  ENSP ID: ENSP00000405381
MLPPQKKPWESMAKGLVLGALFTSFLLLVYSYAVPPLHAGLASTTPEAAASCSPPALEPEAVIRANGSAGECQPRRNIVFLKTHKTASSTLLNILFRFGQKHRLKFAFPNGRNDFDYPTFFARSLVQDYRPGACFNIICNHMR

SEQ ID NO: 33802 - protein, 95 aa, Homo sapiens
  Payload ID: 6662
  Gene Symbol: GAL3ST1
  Gene Name: galactose-3-O-sulfotransferase 1
  ENSP ID: ENSP00000412995
MLPPQKKPWESMAKGLVLGALFTSFLLLVYSYAVPPLHAGLASTTPEAAASCSPPALEPEAVIRANGSAGECQPRRNIVFLKTHKTASSTLLNIL

SEQ ID NO: 33803 - protein, 98 aa, Homo sapiens
  Payload ID: 6662
  Gene Symbol: GAL3ST1
  Gene Name: galactose-3-O-sulfotransferase 1
  ENSP ID: ENSP00000414542
MLPPQKKPWESMAKGLVLGALFTSFLLLVYSYAVPPLHAGLASTTPEAAASCSPPALEPEAVIRANGSAGECQPRRNIVFLKTHKTASSTLLNILFRF

SEQ ID NO: 33804 - protein, 398 aa, Homo sapiens
  Payload ID: 6663
  Gene Symbol: GAL3ST2
  Gene Name: galactose-3-O-sulfotransferase 2
  Uniprot ID: Q9H3Q3
  ENSP ID: ENSP00000192314
MMSMLGGLQRYFRVILLLLLALTLLLLAGFLHSDLELDTPLFGGQAEGPPVTNIMFLKTHKTASSTVLNILYRFAETHNLSVALPAGSRVHLGYPWLFLARYVEGVGSQQRFNIMCNHLRFNLPQVQKVMPNDTFYFSILRNPVFQLESSFIYYKTYAPAFRGAPSLDAFLASPRTFYNDSRHLRNVYAKNNMWFDFGFDPNAQCEEGYVRARIAEVERRFRLVLIAEHLDESLVLLRRRLRWALDDVVAFRLNSRSARSVARLSPETRERARSWCALDWRLYEHFNRTLWAQLRAELGPRRLRGEVERLRARRRELASLCLQDGGALKNHTQIRDPRLRPYQSGKADILGYNLRPGLDNQTLGVCQRLVMPELQYMARLYALQFPEKPLKNIPFLGA

SEQ ID NO: 33805 - protein, 389 aa, Homo sapiens
  Payload ID: 6663
  Gene Symbol: GAL3ST2
  Gene Name: galactose-3-O-sulfotransferase 2
  ENSP ID: ENSP00000484626
  MOD_RES (1)..(1): Any amino acid
XYFRVILLLLLALTLLLLAGFLHSDLELDTPLFGGQAEGPPVTNIMFLKTHKTASSTVLNILYRFAETHNLSVALPAGSRVHLGYPWLFLARYVEGVGSQQRFNIMCNHLRFNLPQVQKVMPNDTFYFSILRNPVFQLESSFIYYKTYAPAFRGAPSLDAFLASPRTFYNDSRHLRNVYAKNNMWFDFGFDPNAQCEEGYVRARIAEVERRFRLVLIAEHLDESLVLLRRRLRWALDDVVAFRLNSRSARSVARLSPETRERARSWCALDWRLYEHFNRTLWAQLRAELGPRRLRGEVERLRARRRELASLCLQDGGALKNHTQIRDPRLRPYQSGKADILGYNLRPGLDNQTLGVCQRLVMPELQYMARLYALQFPEKPLKNIPFLGA

SEQ ID NO: 33806 - protein, 389 aa, Homo sapiens
  Payload ID: 6663
  Gene Symbol: GAL3ST2
  Gene Name: galactose-3-O-sulfotransferase 2
  ENSP ID: ENSP00000488118
RYFRVILLLLLALTLLLLAGFLHSDLELDTPLFGGQAEGPPVTNIMFLKTHKTASSTVLNILYRFAETHNLSVALPAGSRVHLGYPWLFLARYVEGVGSQQRFNIMCNHLRFNLPQVQKVMPNDTFYFSILRNPVFQLESSFIYYKTYAPAFRGAPSLDAFLASPRTFYNDSRHLRNVYAKNNMWFDFGFDPNAQCEEGYVRARIAEVERRFRLVLIAEHLDESLVLLRRRLRWALDDVVAFRLNSRSARSVARLSPETRERARSWCALDWRLYEHFNRTLWAQLRAELGPRRLRGEVERLRARRRELASLCLQDGGALKNHTQIRDPRLRPYQSGKADILGYNLRPGLDNQTLGVCQRLVMPELQYMARLYALQFPEKPLKNIPFLGA

SEQ ID NO: 33807 - protein, 431 aa, Homo sapiens
  Payload ID: 6664
  Gene Symbol: GAL3ST3
  Gene Name: galactose-3-O-sulfotransferase 3
  Uniprot ID: Q96A11
  ENSP ID: ENSP00000308591
MPPILQRLQQATKMMSRRKILLLVLGCSTVSLLIHQGAQLSWYPKLFPLSCPPLRNSPPRPKHMTVAFLKTHKTAGTTVQNILFRFAERHNLTVALPHPSCEHQFCYPRNFSAHFVHPATRPPHVLASHLRFDRAELERLMPPSTVYVTILREPAAMFESLFSYYNQYCPAFRRVPNASLEAFLRAPEAYYRAGEHFAMFAHNTLAYDLGGDNERSPRDDAAYLAGLIRQVEEVFSLVMIAEYFDESLVLLRRLLAWDLDDVLYAKLNARAASSRLAAIPAALARAARTWNALDAGLYDHFNATFWRHVARAGRACVEREARELREARQRLLRRCFGDEPLLRPAAQIRTKQLQPWQPSRKVDIMGYDLPGGGAGPATEACLKLAMPEVQYSNYLLRKQKRRGGARARPEPVLDNPPPRPIRVLPRGPQGP

SEQ ID NO: 33808 - protein, 431 aa, Homo sapiens; identical to SEQ ID NO: 33807
  Payload ID: 6664
  Gene Symbol: GAL3ST3
  Gene Name: galactose-3-O-sulfotransferase 3
  Uniprot ID: Q96A11
  ENSP ID: ENSP00000434829

SEQ ID NO: 33809 - protein, 486 aa, Homo sapiens
  Payload ID: 6665
  Gene Symbol: GAL3ST4
  Gene Name: galactose-3-O-sulfotransferase 4
  Uniprot ID: Q96RP7
  ENSP ID: ENSP00000353142
MGPLSPARTLRLWGPRSLGVALGVFMTIGFALQLLGGPFQRRLPGLQLRQPSAPSLRPALPSCPPRQRLVFLKTHKSGSSSVLSLLHRYGDQHGLRFALPARYQFGYPKLFQASRVKGYRPQGGGTQLPFHILCHHMRFNLKEVLQVMPSDSFFFSIVRDPAALARSAFSYYKSTSSAFRKSPSLAAFLANPRGFYRPGARGDHYARNLLWFDFGLPFPPEKRAKRGNIHPPRDPNPPQLQVLPSGAGPRAQTLNPNALIHPVSTVTDHRSQISSPASFDLGSSSFIQWGLAWLDSVFDLVMVAEYFDESLVLLADALCWGLDDVVGFMHNAQAGHKQGLSTVSNSGLTAEDRQLTARARAWNNLDWALYVHFNRSLWARIEKYGQGRLQTAVAELRARREALAKHCLVGGEASDPKYITDRRFRPFQFGSAKVLGYILRSGLSPQDQEECERLATPELQYKDKLDAKQFPPTVSLPLKTSRPLSP

SEQ ID NO: 33810 - protein, 220 aa, Homo sapiens
  Payload ID: 6665
  Gene Symbol: GAL3ST4
  Gene Name: galactose-3-O-sulfotransferase 4
  ENSP ID: ENSP00000399066
MGPLSPARTLRLWGPRSLGVALGVFMTIGFALQLLGGPFQRRYFRSCLLTASFFPLSETQRLWLALPSPTINPPHQPSASHHLWLPSWPILEASTGLGPVGTTTLATYYGLTLACPFPQRRGPREGIFIPPETPTPHSCRSCLLVLALEPKPSIPMPSSILFPLLLIIAARYQALPLSIWGLHPSSSGVWHGWTLSLTWSWWLSTSMSHWFCWQMPCAGV

SEQ ID NO: 33811 - protein, 486 aa, Homo sapiens; identical to SEQ ID NO: 33809
  Payload ID: 6665
  Gene Symbol: GAL3ST4
  Gene Name: galactose-3-O-sulfotransferase 4
  Uniprot ID: Q96RP7
  ENSP ID: ENSP00000400451

SEQ ID NO: 33812 - protein, 220 aa, Homo sapiens; identical to SEQ ID NO: 33810
  Payload ID: 6665
  Gene Symbol: GAL3ST4
  Gene Name: galactose-3-O-sulfotransferase 4
  ENSP ID: ENSP00000414733

SEQ ID NO: 33813 - protein, 132 aa, Homo sapiens
  Payload ID: 6665
  Gene Symbol: GAL3ST4
  Gene Name: galactose-3-O-sulfotransferase 4
  ENSP ID: ENSP00000487594
MGPLSPARTLRLWGPRSLGVALGVFMTIGFALQLLGGPFQRRLPGLQLRQPSAPSLRPALPSCPPRQRLVFLKTHKSGSSSVLSLLHRYGDQHGLRFALPARYQFGYPKLFQASRVKGYRPQGGGTQLPFHI

SEQ ID NO: 33814 - protein, 118 aa, Homo sapiens
  Payload ID: 6665
  Gene Symbol: GAL3ST4
  Gene Name: galactose-3-O-sulfotransferase 4
  ENSP ID: ENSP00000488586
MGPLSPARTLRLWGPRSLGVALGVFMTIGFALQLLGGPFQRRYFRSCLLTASFFPLSETQRLWLALPSPTINPPHQPSASHHLWLPSWPILEASTGLGPVGTTTLATYYGLTLACPFP

SEQ ID NO: 33815 - protein, 110 aa, Homo sapiens
  Payload ID: 6665
  Gene Symbol: GAL3ST4
  Gene Name: galactose-3-O-sulfotransferase 4
  ENSP ID: ENSP00000488800
MGPLSPARTLRLWGPRSLGVALGVFMTIGFALQLLGGPFQRRLPGLQLRQPSAPSLRPALPSCPPRQRLVFLKTHKSGSSSVLSLLHRYGDQHGLRFALPARYQFGYPKL

SEQ ID NO: 33816 - protein, 429 aa, Homo sapiens
  Payload ID: 6666
  Gene Symbol: GLA
  Gene Name: galactosidase, alpha
  Uniprot ID: P06280
  ENSP ID: ENSP00000218516
MQLRNPELHLGCALALRFLALVSWDIPGARALDNGLARTPTMGWLHWERFMCNLDCQEEPDSCISEKLFMEMAELMVSEGWKDAGYEYLCIDDCWMAPQRDSEGRLQADPQRFPHGIRQLANYVHSKGLKLGIYADVGNKTCAGFPGSFGYYDIDAQTFADWGVDLLKFDGCYCDSLENLADGYKHMSLALNRTGRSIVYSCEWPLYMWPFQKPNYTEIRQYCNHWRNFADIDDSWKSIKSILDWTSFNQERIVDVAGPGGWNDPDMLVIGNFGLSWNQQVTQMALWAIMAAPLFMSNDLRHISPQAKALLQDKDVIAINQDPLGKQGYQLRQGDNFEVWERPLSGLAWAVAMINRQEIGGPRSYTIAVASLGKGVACNPACFITQLLPVKRKLGFYEWTSRLRSHINPTGTVLLQLENTMQMSLKDLL

SEQ ID NO: 33817 - protein, 222 aa, Homo sapiens
  Payload ID: 6666
  Gene Symbol: GLA
  Gene Name: galactosidase, alpha
  ENSP ID: ENSP00000476935
MQLRNPELHLGCALALRFLALVSWDIPGARALDNGLARTPTMGWLHWERFMCNLDCQEEPDSCISEKLFMEMAELMVSEGWKDAGYEYLCIDDCWMAPQRDSEGRLQADPQRFPHGIRQLANYVHSKGLKLGIYADVGNKTCAGFPGSFGYYDIDAQTFADWGVDLLKFDGCYCDSLENLADGYKHMSLALNRTGRSIVYSCEWPLYMWPFQKSSTLFGSIC

SEQ ID NO: 33818 - protein, 546 aa, Homo sapiens
  Payload ID: 6667
  Gene Symbol: GLB1
  Gene Name: galactosidase, beta 1
  ENSP ID: ENSP00000305920
MPGFLVRILPLLLVLLLLGPTRGLRNATQRMFEIDYSRDSFLKDGQPFRYISGSIHYSRVPRFYWKDRLLKMKMAGLNAIQTLPGSCGQVVGSPSAQDEASPLSEWRASYNSAGSNITDAFLSQRKCEPKGPLINSEFYTGWLDHWGQPHSTIKTEAVASSLYDILARGASVNLYMFIGGTNFAYWNGANSPYAAQPTSYDYDAPLSEAGDLTEKYFALRNIIQKFEKVPEGPIPPSTPKFAYGKVTLEKLKTVGAALDILCPSGPIKSLYPLTFIQVKQHYGFVLYRTTLPQDCSNPAPLSSPLNGVHDRAYVAVDGIPQGVLERNNVITLNITGKAGATLDLLVENMGRVNYGAYINDFKGLVSNLTLSSNILTDWTIFPLDTEDAVCSHLGGWGHRDSGHHDEAWAHNSSNYTLPAFYMGNFSIPSGIPDLPQDTFIQFPGWTKGQVWINGFNLGRYWPARGPQLTLFVPQHILMTSAPNTITVLELEWAPCSSDDPELCAVTFVDRPVIGSSVTYDHPSKPVEKRLMPPPPQKNKDSWLDHV

SEQ ID NO: 33819 - protein, 677 aa, Homo sapiens
  Payload ID: 6667
  Gene Symbol: GLB1
  Gene Name: galactosidase, beta 1
  Uniprot ID: P16278
  ENSP ID: ENSP00000306920
MPGFLVRILPLLLVLLLLGPTRGLRNATQRMFEIDYSRDSFLKDGQPFRYISGSIHYSRVPRFYWKDRLLKMKMAGLNAIQTYVPWNFHEPWPGQYQFSEDHDVEYFLRLAHELGLLVILRPGPYICAEWEMGGLPAWLLEKESILLRSSDPDYLAAVDKWLGVLLPKMKPLLYQNGGPVITVQVENEYGSYFACDFDYLRFLQKRFRHHLGDDVVLFTTDGAHKTFLKCGALQGLYTTVDFGTGSNITDAFLSQRKCEPKGPLINSEFYTGWLDHWGQPHSTIKTEAVASSLYDILARGASVNLYMFIGGTNFAYWNGANSPYAAQPTSYDYDAPLSEAGDLTEKYFALRNIIQKFEKVPEGPIPPSTPKFAYGKVTLEKLKTVGAALDILCPSGPIKSLYPLTFIQVKQHYGFVLYRTTLPQDCSNPAPLSSPLNGVHDRAYVAVDGIPQGVLERNNVITLNITGKAGATLDLLVENMGRVNYGAYINDFKGLVSNLTLSSNILTDWTIFPLDTEDAVCSHLGGWGHRDSGHHDEAWAHNSSNYTLPAFYMGNFSIPSGIPDLPQDTFIQFPGWTKGQVWINGFNLGRYWPARGPQLTLFVPQHILMTSAPNTITVLELEWAPCSSDDPELCAVTFVDRPVIGSSVTYDHPSKPVEKRLMPPPPQKNKDSWLDHV

SEQ ID NO: 33820 - protein, 647 aa, Homo sapiens
  Payload ID: 6667
  Gene Symbol: GLB1
  Gene Name: galactosidase, beta 1
  Uniprot ID: P16278
  ENSP ID: ENSP00000382333
MFEIDYSRDSFLKDGQPFRYISGSIHYSRVPRFYWKDRLLKMKMAGLNAIQTYVPWNFHEPWPGQYQFSEDHDVEYFLRLAHELGLLVILRPGPYICAEWEMGGLPAWLLEKESILLRSSDPDYLAAVDKWLGVLLPKMKPLLYQNGGPVITVQVENEYGSYFACDFDYLRFLQKRFRHHLGDDVVLFTTDGAHKTFLKCGALQGLYTTVDFGTGSNITDAFLSQRKCEPKGPLINSEFYTGWLDHWGQPHSTIKTEAVASSLYDILARGASVNLYMFIGGTNFAYWNGANSPYAAQPTSYDYDAPLSEAGDLTEKYFALRNIIQKFEKVPEGPIPPSTPKFAYGKVTLEKLKTVGAALDILCPSGPIKSLYPLTFIQVKQHYGFVLYRTTLPQDCSNPAPLSSPLNGVHDRAYVAVDGIPQGVLERNNVITLNITGKAGATLDLLVENMGRVNYGAYINDFKGLVSNLTLSSNILTDWTIFPLDTEDAVCSHLGGWGHRDSGHHDEAWAHNSSNYTLPAFYMGNFSIPSGIPDLPQDTFIQFPGWTKGQVWINGFNLGRYWPARGPQLTLFVPQHILMTSAPNTITVLELEWAPCSSDDPELCAVTFVDRPVIGSSVTYDHPSKPVEKRLMPPPPQKNKDSWLDHV

SEQ ID NO: 33821 - protein, 147 aa, Homo sapiens
  Payload ID: 6667
  Gene Symbol: GLB1
  Gene Name: galactosidase, beta 1
  ENSP ID: ENSP00000387989
MPGFLVRILPLLLVLLLLGPTRGLRSRFLPWAFHLPRQAPKSQLPLHKRGTKTAPNEHASSNRSGRRRRRQQWNATQRMFEIDYSRDSFLKDGQPFRYISGSIHYSRVPRFYWKDRLLKMKMAGLNAIQTYVPWNFHEPWPGQYQFS

SEQ ID NO: 33822 - protein, 41 aa, Homo sapiens
  Payload ID: 6667
  Gene Symbol: GLB1
  Gene Name: galactosidase, beta 1
  ENSP ID: ENSP00000401250
MPGFLVRILPLLLVLLLLGPTRGLRITWQLWTSGWESFCPR

SEQ ID NO: 33823 - protein, 102 aa, Homo sapiens
  Payload ID: 6667
  Gene Symbol: GLB1
  Gene Name: galactosidase, beta 1
  ENSP ID: ENSP00000403264
MFEIDYSRDSFLKDGQPFRYISGSIHYSRVPRFYWKDRLLKMKMAGLNAIQTYVPWNFHEPWPGQYQFSEDHDVEYFLRLAHELGLLVILRPGPYICAEWEM

SEQ ID NO: 33824 - protein, 84 aa, Homo sapiens
  Payload ID: 6667
  Gene Symbol: GLB1
  Gene Name: galactosidase, beta 1
  ENSP ID: ENSP00000407365
MFEIDYSRDSFLKDGQPFRYISGSIHYSRVPRFYWKDRLLKMKMAGLNAIQTLPGSCGQVVGSPSAQDEASPLSEWRASYNSAG

SEQ ID NO: 33825 - protein, 114 aa, Homo sapiens
  Payload ID: 6667
  Gene Symbol: GLB1
  Gene Name: galactosidase, beta 1
  ENSP ID: ENSP00000411769
MGGLPAWLLEKESILLRSSDPDYLAAVDKWLGVLLPKMKPLLYQNGGPVITVQVENEYGSYFACDFDYLRFLQKRFRHHLGDDVVLFTTDGAHKTFLKCGALQGLYTTVDFGTG

SEQ ID NO: 33826 - protein, 185 aa, Homo sapiens
  Payload ID: 6667
  Gene Symbol: GLB1
  Gene Name: galactosidase, beta 1
  ENSP ID: ENSP00000411813
MPGFLVRILPLLLVLLLLGPTRGLRVENEYGSYFACDFDYLRFLQKRFRHHLGDDVVLFTTDGAHKTFLKCGALQGLYTTVDFGTGSNITDAFLSQRKCEPKGPLINSEFYTGWLDHWGQPHSTIKTEAVASSLYDILARGASVNLYMFIGGTNFAYWNGANSPYAAQPTSYDYDAPLSEAGDLT

SEQ ID NO: 33827 - protein, 654 aa, Homo sapiens
  Payload ID: 6668
  Gene Symbol: GLB1L
  Gene Name: galactosidase, beta 1-like
  Uniprot ID: Q6UWU2
  ENSP ID: ENSP00000295759
MAPKKLSCLRSLLLPLSLTLLLPQADTRSFVVDRGHDRFLLDGAPFRYVSGSLHYFRVPRVLWADRLLKMRWSGLNAIQFYVPWNYHEPQPGVYNFNGSRDLIAFLNEAALANLLVILRPGPYICAEWEMGGLPSWLLRKPEIHLRTSDPDFLAAVDSWFKVLLPKIYPWLYHNGGNIISIQVENEYGSYRACDFSYMRHLAGLFRALLGEKILLFTTDGPEGLKCGSLRGLYTTVDFGPADNMTKIFTLLRKYEPHGPLVNSEYYTGWLDYWGQNHSTRSVSAVTKGLENMLKLGASVNMYMFHGGTNFGYWNGADKKGRFLPITTSYDYDAPISEAGDPTPKLFALRDVISKFQEVPLGPLPPPSPKMMLGPVTLHLVGHLLAFLDLLCPRGPIHSILPMTFEAVKQDHGFMLYRTYMTHTIFEPTPFWVPNNGVHDRAYVMVDGVFQGVVERNMRDKLFLTGKLGSKLDILVENMGRLSFGSNSSDFKGLLKPPILGQTILTQWMMFPLKIDNLVKWWFPLQLPKWPYPQAPSGPTFYSKTFPILGSVGDTFLYLPGWTKGQVWINGFNLGRYWTKQGPQQTLYVPRFLLFPRGALNKITLLELEDVPLQPQVQFLDKPILNSTSTLHRTHINSLSADTLSASEPMELSGH

SEQ ID NO: 33828 - protein, 654 aa, Homo sapiens; identical to SEQ ID NO: 33827
  Payload ID: 6668
  Gene Symbol: GLB1L
  Gene Name: galactosidase, beta 1-like
  Uniprot ID: Q6UWU2
  ENSP ID: ENSP00000375939

SEQ ID NO: 33829 - protein, 564 aa, Homo sapiens
  Payload ID: 6668
  Gene Symbol: GLB1L
  Gene Name: galactosidase, beta 1-like
  Uniprot ID: Q6UWU2
  ENSP ID: ENSP00000386354
MAPKKLSCLRSLLLPLSLTLLLPQADTRSFVVDRGHDRFLLDGAPFRYVSGSLHYFRVPRVLWADRLLKMRWSGLNAIQFYVPWNYHEPQPGVYNFNGSRDLIAFLNEAALANLLVILRPGPYICAEWEMGGLPSWLLRKPEIHLRTSDPADNMTKIFTLLRKYEPHGPLVNSEYYTGWLDYWGQNHSTRSVSAVTKGLENMLKLGASVNMYMFHGGTNFGYWNGADKKGRFLPITTSYDYDAPISEAGDPTPKLFALRDVISKFQEVPLGPLPPPSPKMMLGPVTLHLVGHLLAFLDLLCPRGPIHSILPMTFEAVKQDHGFMLYRTYMTHTIFEPTPFWVPNNGVHDRAYVMVDGVFQGVVERNMRDKLFLTGKLGSKLDILVENMGRLSFGSNSSDFKGLLKPPILGQTILTQWMMFPLKIDNLVKWWFPLQLPKWPYPQAPSGPTFYSKTFPILGSVGDTFLYLPGWTKGQVWINGFNLGRYWTKQGPQQTLYVPRFLLFPRGALNKITLLELEDVPLQPQVQFLDKPILNSTSTLHRTHINSLSADTLSASEPMELSGH

SEQ ID NO: 33830 - protein, 185 aa, Homo sapiens
  Payload ID: 6668
  Gene Symbol: GLB1L
  Gene Name: galactosidase, beta 1-like
  ENSP ID: ENSP00000387703
  MOD_RES (1)..(1): Any amino acid
XKMRWSGLNAIQFYVPWNYHEPQPGVYNFNGSRDLIAFLNEAALANLLVILRPGPYICAEWEMGGLPSWLLRKPEIHLRTSDPDFLAAVDSWFKVLLPKIYPWLYHNGGNIISIQVENEYGSYRACDFSYMRHLAGLFRALLGEKILLFTTDGPEGLKCGSLRGLYTTVDFGPGLKQGLGVESGE

SEQ ID NO: 33831 - protein, 9 aa, Homo sapiens
  Payload ID: 6668
  Gene Symbol: GLB1L
  Gene Name: galactosidase, beta 1-like
  ENSP ID: ENSP00000392018
MAPKKLSCL

SEQ ID NO: 33832 - protein, 50 aa, Homo sapiens
  Payload ID: 6668
  Gene Symbol: GLB1L
  Gene Name: galactosidase, beta 1-like
  ENSP ID: ENSP00000396263
MAPKKLSCLRSLLLPLSLTLLLPQTGPRSAMCLAACTTFGYRGCFGPTGF

SEQ ID NO: 33833 - protein, 114 aa, Homo sapiens
  Payload ID: 6668
  Gene Symbol: GLB1L
  Gene Name: galactosidase, beta 1-like
  ENSP ID: ENSP00000400738
MAPKKLSCLRSLLLPLSLTLLLPQADTRSFVVDRGHDRFLLDGAPFRYVSGSLHYFRVPRVLWADRLLKMRWSGLNAIQFYVPWNYHEPQPGVYNFNGSRDLIAFLNEAALANL

SEQ ID NO: 33834 - protein, 26 aa, Homo sapiens
  Payload ID: 6668
  Gene Symbol: GLB1L
  Gene Name: galactosidase, beta 1-like
  ENSP ID: ENSP00000404698
MAPKKLSCLRSLLLPLSLTLLLPQAD

SEQ ID NO: 33835 - protein, 636 aa, Homo sapiens
  Payload ID: 6669
  Gene Symbol: GLB1L2
  Gene Name: galactosidase, beta 1-like 2
  Uniprot ID: Q8IW92
  ENSP ID: ENSP00000344659
MTTWSLRRRPARTLGLLLLVVLGFLVLRRLDWSTLVPLRLRHRQLGLQAKGWNFMLEDSTFWIFGGSIHYFRVPREYWRDRLLKMKACGLNTLTTYVPWNLHEPERGKFDFSGNLDLEAFVLMAAEIGLWVILRPGPYICSEMDLGGLPSWLLQDPGMRLRTTYKGFTEAVDLYFDHLMSRVVPLQYKRGGPIIAVQVENEYGSYNKDPAYMPYVKKALEDRGIVELLLTSDNKDGLSKGIVQGVLATINLQSTHELQLLTTFLFNVQGTQPKMVMEYWTGWFDSWGGPHNILDSSEVLKTVSAIVDAGSSINLYMFHGGTNFGFMNGAMHFHDYKSDVTSYDYDAVLTEAGDYTAKYMKLRDFFGSISGIPLPPPPDLLPKMPYEPLTPVLYLSLWDALKYLGEPIKSEKPINMENLPVNGGNGQSFGYILYETSITSSGILSGHVHDRGQVFVNTVSIGFLDYKTTKIAVPLIQGYTVLRILVENRGRVNYGENIDDQRKGLIGNLYLNDSPLKNFRIYSLDMKKSFFQRFGLDKWSSLPETPTLPAFFLGSLSISSTPCDTFLKLEGWEKGVVFINGQNLGRYWNIGPQKTLYLPGPWLSSGINQVIVFEETMAGPALQFTETPHLGRNQYIK

SEQ ID NO: 33836 - protein, 636 aa, Homo sapiens; identical to SEQ ID NO: 33835
  Payload ID: 6669
  Gene Symbol: GLB1L2
  Gene Name: galactosidase, beta 1-like 2
  Uniprot ID: Q8IW92
  ENSP ID: ENSP00000444628

SEQ ID NO: 33837 - protein, 313 aa, Homo sapiens
  Payload ID: 6670
  Gene Symbol: GLB1L3
  Gene Name: galactosidase, beta 1-like 3
  Uniprot ID: Q8NCI6
  ENSP ID: ENSP00000374537
MKSPPLLSPCLSWKRMAGIFFLPFISSGFAPRFKQEENFMLGRAHPSQPRFNWSHLTPLELKNRSVGLGTESTGRGKPHFTLEGHKFLIFGGSIHYFRVPREYWRDRLLKLKACGFNTVTTYVPWNLHEPERGKFDFSGNLDLEAFVLMAAEIGLWVILRPGRYICSEMDLGGLPSWLLQDPRLLLRTTNKSFIEAVEKYFDHLIPRVIPLQYRQAGPVIAVQVENEYGSFNKDKTYMPYLHKALLRRGIVELLLTSDGEKHVLSGHTKGVLAAINLQKLHQDTFNQLHKVQGASIDAGLLSDASQAATSSSL

SEQ ID NO: 33838 - protein, 653 aa, Homo sapiens
  Payload ID: 6670
  Gene Symbol: GLB1L3
  Gene Name: galactosidase, beta 1-like 3
  Uniprot ID: Q8NCI6
  ENSP ID: ENSP00000396615
MKSPPLLSPCLSWKRMAGIFFLPFISSGFAPRFKQEENFMLGRAHPSQPRFNWSHLTPLELKNRSVGLGTESTGRGKPHFTLEGHKFLIFGGSIHYFRVPREYWRDRLLKLKACGFNTVTTYVPWNLHEPERGKFDFSGNLDLEAFVLMAAEIGLWVILRPGRYICSEMDLGGLPSWLLQDPRLLLRTTNKSFIEAVEKYFDHLIPRVIPLQYRQAGPVIAVQVENEYGSFNKDKTYMPYLHKALLRRGIVELLLTSDGEKHVLSGHTKGVLAAINLQKLHQDTFNQLHKVQRDKPLLIMEYWVGWFDRWGDKHHVKDAKEVEHAVSEFIKYEISFNVYMFHGGTNFGFMNGATYFGKHSGIVTSYDYDAVLTEAGDYTEKYLKLQKLFQSVSATPLPRVPKLPPKAVYPPVRPSLYLPLWDALSYLNEPVRSRQPVNMENLPINNGSGQSYGLVLYEKSICSGGRLRAHAHDVAQVFLDETMIGILNENNKDLHIPELRDCRYLRILVENQGRVNFSWQIQNEQKGITGSVSINNSSLEGFTIYSLEMKMSFFERLRSATWKPVPDSHQGPAFYCGTLKAGPSPKDTFLSLLNWNYGFVFINGRNLGRYWNIGPQKTLYLPGVWLHPEDNEVILFEKMMSGSDIKSTDKPTL

SEQ ID NO: 33839 - protein, 186 aa, Homo sapiens
  Payload ID: 6670
  Gene Symbol: GLB1L3
  Gene Name: galactosidase, beta 1-like 3
  ENSP ID: ENSP00000397929
  MOD_RES (1)..(1): Any amino acid
XLKMQRVEHAVSEFIKYEISFNVYMFHGGTNFGFMNGATYFGKHSGIVTSYDYDAVLTEAGDYTEKYLKLQKLFQSVSATPLPRVPKLPPKAVYPPVRPSLYLPLWDALSYLNEPVRSRQPVNMENLPINNGSGQSYGLVLYEKSICSGGRLRAHAHDVAQVFLDETMIGILNENNKDLHIPELRE

SEQ ID NO: 33840 - protein, 685 aa, Homo sapiens
  Payload ID: 6671
  Gene Symbol: GALC
  Gene Name: galactosylceramidase
  ENSP ID: ENSP00000261304
MAEWLLSASWQRRAKAMTAAAGSAGRAAVPLLLCALLAPGGAYVLDDSDGLGREFDGIGAVSGGGATSRLLVNYPEPYRSQILDYLFKPNFGASLHILKVEIGGDGQTTDGTEPSHMHYALDENYFRGYEWWLMKEAKKRNPNITLIGLPWSFPGWLGKGFDWPYVNLQLTAYYVVTWIVGAKRYHDLDIDYIGIWNERSYNANYIKILRKMLNYQGLQRVKIIASDNLWESISASMLLDAELFKVVDVIGAHYPGTHSAKDAKLTGKKLWSSEDFSTLNSDMGAGCWGRILNQNYINGYMTSTIAWNLVASYYEQLPYGRCGLMTAQEPWSGHYVVESPVWVSAHTTQFTQPGWYYLKTVGHLEKGGSYVALTDGLGNLTIIIETMSHKHSKCIRPFLPYFNVSQQFATFVLKGSFSEIPELQVWYTKLGKTSERFLFKQLDSLWLLDSDGSFTLSLHEDELFTLTTLTTGRKGSYPLPPKSQPFPSTYKDDFNVDYPFFSEAPNFADQTGVFEYFTNIEDPGEHHFTLRQVLNQRPITWAADASNTISIIGDYNWTNLTIKCDVYIETPDTGGVFIAGRVNKGGILIRSARGIFFWIFANGSYRVTGDLAGWIIYALGRVEVTAKKWYTLTLTIKGHFTSGMLNDKSLWTDIPVNFPKNGWAAIGTHSFEFAQFDNFLVEATR

SEQ ID NO: 33841 - protein, 662 aa, Homo sapiens
  Payload ID: 6671
  Gene Symbol: GALC
  Gene Name: galactosylceramidase
  ENSP ID: ENSP00000377198
MAEWLLSASWQRRAKAMTAAAGSAGRAAVPLLLCALLAPGGAYVLDDSDGLGREFDGIGAVSGGGPNFGASLHILKVEIGGDGQTTDGTEPSHMHYALDENYFRGYEWWLMKEAKKRNPNITLIGLPWSFPGWLGKGFDWPYVNLQLTAYYVVTWIVGAKRYHDLDIDYIGIWNERSYNANYIKILRKMLNYQGLQRVKIIASDNLWESISASMLLDAELFKVVDVIGAHYPGTHSAKDAKLTGKKLWSSEDFSTLNSDMGAGCWGRILNQNYINGYMTSTIAWNLVASYYEQLPYGRCGLMTAQEPWSGHYVVESPVWVSAHTTQFTQPGWYYLKTVGHLEKGGSYVALTDGLGNLTIIIETMSHKHSKCIRPFLPYFNVSQQFATFVLKGSFSEIPELQVWYTKLGKTSERFLFKQLDSLWLLDSDGSFTLSLHEDELFTLTTLTTGRKGSYPLPPKSQPFPSTYKDDFNVDYPFFSEAPNFADQTGVFEYFTNIEDPGEHHFTLRQVLNQRPITWAADASNTISIIGDYNWTNLTIKCDVYIETPDTGGVFIAGRVNKGGILIRSARGIFFWIFANGSYRVTGDLAGWIIYALGRVEVTAKKWYTLTLTIKGHFTSGMLNDKSLWTDIPVNFPKNGWAAIGTHSFEFAQFDNFLVEATR

SEQ ID NO: 33842 - protein, 659 aa, Homo sapiens
  Payload ID: 6671
  Gene Symbol: GALC
  Gene Name: galactosylceramidase
  ENSP ID: ENSP00000377199
MLGKSHGRATHGPLPLADLGIHLPCVKVLHQVTPEEKPAATSRLLVNYPEPYRSQILDYLFKPNFGASLHILKVEIGGDGQTTDGTEPSHMHYALDENYFRGYEWWLMKEAKKRNPNITLIGLPWSFPGWLGKGFDWPYVNLQLTAYYVVTWIVGAKRYHDLDIDYIGIWNERSYNANYIKILRKMLNYQGLQRVKIIASDNLWESISASMLLDAELFKVVDVIGAHYPGTHSAKDAKLTGKKLWSSEDFSTLNSDMGAGCWGRILNQNYINGYMTSTIAWNLVASYYEQLPYGRCGLMTAQEPWSGHYVVESPVWVSAHTTQFTQPGWYYLKTVGHLEKGGSYVALTDGLGNLTIIIETMSHKHSKCIRPFLPYFNVSQQFATFVLKGSFSEIPELQVWYTKLGKTSERFLFKQLDSLWLLDSDGSFTLSLHEDELFTLTTLTTGRKGSYPLPPKSQPFPSTYKDDFNVDYPFFSEAPNFADQTGVFEYFTNIEDPGEHHFTLRQVLNQRPITWAADASNTISIIGDYNWTNLTIKCDVYIETPDTGGVFIAGRVNKGGILIRSARGIFFWIFANGSYRVTGDLAGWIIYALGRVEVTAKKWYTLTLTIKGHFTSGMLNDKSLWTDIPVNFPKNGWAAIGTHSFEFAQFDNFLVEATR

SEQ ID NO: 33843 - protein, 589 aa, Homo sapiens
  Payload ID: 6671
  Gene Symbol: GALC
  Gene Name: galactosylceramidase
  Uniprot ID: P54803
  ENSP ID: ENSP00000437513
MGFMVADLWATSRLLVNYPEPYRSQILDYLFKPNFGASLHILKVEIGGDGQTTDGTEPSHMHYALDENYFRGYEWWLMKEAKKRNPNITLIGLPWSFPGWLGKGFDWPYVNLQLTAYYVVTWIVGAKRYHDLDIDYIGIWNERSYNANYIKILRKMLNYQGLQRVKIIASDNLWESISASMLLDAELFKVVDVIGAHYPGTHSAKDAKLTGKKLWSSEDFSTLNSDMGAGCWGRILNQNYINGYMTSTIAWNLVASYYEQLPYGRCGLMTAQEPWSGHYVVESPVWVSAHTTQFTQPGWYYLKTVGHLEKGGSYVALTDGLGNLTIIIETMSHKHSKCIRPFLPYFNVSQQFATFVLKGSFSEIPELQVWYTKLGKTSERFLFKQLDSLWLLDSDGSFTLSLHEDELFTLTTLTTGRKGSYPLPPKSQPFPSTYKDDFNVDYPFFSEAPNFADQTGVFEYFTNIEDPGEHHFTLRQVLNQRPITWAADASNTISIIGDYNWTNLTIKCDVYIETPDTGGVFIAGRVNKGGILIRSARGIFFWIFANGSYRVTGDLAGWIIYALGRVEVTAKKWYTLTLTIKVAGRRKKT

SEQ ID NO: 33844 - protein, 434 aa, Homo sapiens
  Payload ID: 6671
  Gene Symbol: GALC
  Gene Name: galactosylceramidase
  ENSP ID: ENSP00000450472
MLNYQGLQRVKIIASDNLWESISASMLLDAELFKVVDVIGAHYPGTHSAKDAKLTGKKLWSSEDFSTLNSDMGAGCWGRILNQNYINGYMTSTIAWNLVASYYEQLPYGRCGLMTAQEPWSGHYVVESPVWVSAHTTQFTQPGWYYLKTVGHLEKGGSYVALTDGLGNLTIIIETMSHKHSKCIRPFLPYFNVSQQFATFVLKGSFSEIPELQVWYTKLGKTSERFLFKQLDSLWLLDSDGSFTLSLHEDELFTLTTLTTGRKGSYPLPPKSQPFPSTYKDDFNVDYPFFSEAPNFADQTGVFEYFTNIEDPGEHHFTLRQVLNQRPITWAADASNTISIIGDYNWTNLTIKCDVYIETPDTGGVFIAGRVNKGGILIRSARGIFFWIFANGSYRVTGDLAGWIIYALGRVEVTAKKWYTLTLTIKVAGRRKKT

SEQ ID NO: 33845 - protein, 72 aa, Homo sapiens
  Payload ID: 6671
  Gene Symbol: GALC
  Gene Name: galactosylceramidase
  ENSP ID: ENSP00000451480
  MOD_RES (1)..(1): Any amino acid
XKLGKTSERFLFKQLDSLWLLDSDGSFTLSLHEDELFTLTTLTTGRKGSYPLPPKSQPFPSTYKDDFNVGPI

SEQ ID NO: 33846 - protein, 112 aa, Homo sapiens
  Payload ID: 6671
  Gene Symbol: GALC
  Gene Name: galactosylceramidase
  ENSP ID: ENSP00000451884
MAEWLLSASWQRRAKAMTAAAGSAGRAAVPLLLCALLAPGGAYVLDDSDGLGREFDGIGAVSGGGATSRLLVNYPEPYRSQILDYLFKPNFGASLHILKVEIGGDGQTTDIL

SEQ ID NO: 33847 - protein, 62 aa, Homo sapiens
  Payload ID: 6671
  Gene Symbol: GALC
  Gene Name: galactosylceramidase
  ENSP ID: ENSP00000452208
KAMTAAAGSAGRAAVPLLLCALLAPGGAYVLDDSDGLGREFDGIGAVSGGGDWCLKVSLKGR

SEQ ID NO: 33848 - protein, 211 aa, Homo sapiens
  Payload ID: 6671
  Gene Symbol: GALC
  Gene Name: galactosylceramidase
  ENSP ID: ENSP00000452314
MAEWLLSASWQRRAKAMTAAAGSAGRAAVPLLLCALLAPGGAYVLDDSDGLGREFDGIGAVSGGGATSRLLVNYPEPYRSQILDYLFKPNFGASLHILKVEIGGDGQTTDGTEPSHMHYALDENYFRGYEWWLMKEAKKRNPNITLIGLPWSFPGWLGKGFDWPYVNLQLTAYYVVTWIVGAKRYHDLDIDYIGIWNERSYNANYIKVFGE

SEQ ID NO: 33849 - protein, 404 aa, Homo sapiens
  Payload ID: 6671
  Gene Symbol: GALC
  Gene Name: galactosylceramidase
  ENSP ID: ENSP00000480649
  MOD_RES (1)..(1): Any amino acid
XLLSASWQRRAKAMTAAAGSAGRAAVPLLLCALLAPGGAYVLDDSDGLGREFDGIGAVSGGGATSRLLVNYPEPYRSQILDYLFKPNFGASLHILKVEIGGDGQTTDGTEPSHMHYALDENYFRGYEWWLMKEAKKRNPNITLIGLPWSFPGWLGKGFDWPYVNLQLTAYYVVTWIVGAKRYHDLDIDYIGIWNERSYNANYIKILRKMLNYQGLQRVKIIASDNLWESISASMLLDAELFKVVDVIGAHYPGTHSAKDAKLTGKKLWSSEDFSTLNSDMGAGCWGRILNQNYINGYMTSTIAWNLVASYYEQLPYGRCGLMTAQEPWSGHYVVESPVWVSAHTTQFTQPGWYYLKTVGHLEKGGSYVALTDGLGNLTIIIETMVNFCCCYWINSLLYYWKNKI

SEQ ID NO: 33850 - protein, 349 aa, Homo sapiens
  Payload ID: 6672
  Gene Symbol: GALR1
  Gene Name: galanin receptor 1
  Uniprot ID: P47211
  ENSP ID: ENSP00000299727
MELAVGNLSEGNASWPEPPAPEPGPLFGIGVENFVTLVVFGLIFALGVLGNSLVITVLARSKPGKPRSTTNLFILNLSIADLAYLLFCIPFQATVYALPTWVLGAFICKFIHYFFTVSMLVSIFTLAAMSVDRYVAIVHSRRSSSLRVSRNALLGVGCIWALSIAMASPVAYHQGLFHPRASNQTFCWEQWPDPRHKKAYVVCTFVFGYLLPLLLICFCYAKVLNHLHKKLKNMSKKSEASKKKTAQTVLVVVVVFGISWLPHHIIHLWAEFGVFPLTPASFLFRITAHCLAYSNSSVNPIIYAFLSENFRKAYKQVFKCHIRKDSHLSDTKESKSRIDTPPSTNCTHV

SEQ ID NO: 33851 - protein, 387 aa, Homo sapiens
  Payload ID: 6673
  Gene Symbol: GALR2
  Gene Name: galanin receptor 2
  Uniprot ID: O43603
  ENSP ID: ENSP00000329684
MNVSGCPGAGNASQAGGGGGWHPEAVIVPLLFALIFLVGTVGNTLVLAVLLRGGQAVSTTNLFILNLGVADLCFILCCVPFQATIYTLDGWVFGSLLCKAVHFLIFLTMHASSFTLAAVSLDRYLAIRYPLHSRELRTPRNALAAIGLIWGLSLLFSGPYLSYYRQSQLANLTVCHPAWSAPRRRAMDICTFVFSYLLPVLVLGLTYARTLRYLWRAVDPVAAGSGARRAKRKVTRMILIVAALFCLCWMPHHALILCVWFGQFPLTRATYALRILSHLVSYANSCVNPIVYALVSKHFRKGFRTICAGLLGRAPGRASGRVCAAARGTHSGSVLERESSDLLHMSEAAGALRPCPGASQPCILEPCPGPSWQGPKAGDSILTVDVA

SEQ ID NO: 33852 - protein, 368 aa, Homo sapiens
  Payload ID: 6674
  Gene Symbol: GALR3
  Gene Name: galanin receptor 3
  Uniprot ID: O60755
  ENSP ID: ENSP00000249041
MADAQNISLDSPGSVGAVAVPVVFALIFLLGTVGNGLVLAVLLQPGPSAWQEPGSTTDLFILNLAVADLCFILCCVPFQATIYTLDAWLFGALVCKAVHLLIYLTMYASSFTLAAVSVDRYLAVRHPLRSRALRTPRNARAAVGLVWLLAALFSAPYLSYYGTVRYGALELCVPAWEDARRRALDVATFAAGYLLPVAVVSLAYGRTLRFLWAAVGPAGAAAAEARRRATGRAGRAMLAVAALYALCWGPHHALILCFWYGRFAFSPATYACRLASHCLAYANSCLNPLVYALASRHFRARFRRLWPCGRRRRHRARRALRRVRPASSGPPGCPGDARPSGRLLAGGGQGPEPREGPVHGGEAARGPE

SEQ ID NO: 33853 - protein, 123 aa, Homo sapiens
  Payload ID: 6675
  Gene Symbol: GAL
  Gene Name: galanin/GMAP prepropeptide
  Uniprot ID: P22466
  ENSP ID: ENSP00000265643
MARGSALLLASLLLAAALSASAGLWSPAKEKRGWTLNSAGYLLGPHAVGNHRSFSDKNGLTSKRELRPEDDMKPGSFDRSIPENNIMRTIIEFLSFLHLKEAGALDRLLDLPAAASSEDIERS

SEQ ID NO: 33854 - protein, 116 aa, Homo sapiens
  Payload ID: 6676
  Gene Symbol: GALP
  Gene Name: galanin-like peptide
  Uniprot ID: Q9UBC7
  ENSP ID: ENSP00000349884
MAPPSVPLVLLLVLLLSLAETPASAPAHRGRGGWTLNSAGYLLGPVLHLPQMGDQDGKRETALEILDLWKAIDGLPYSHPPQPSKRNVMETFAKPEIGDLGMLSMKIPKEEDVLKS

SEQ ID NO: 33855 - protein, 49 aa, Homo sapiens
  Payload ID: 6676
  Gene Symbol: GALP
  Gene Name: galanin-like peptide
  Uniprot ID: Q9UBC7
  ENSP ID: ENSP00000411521
MAPPSVPLVLLLVLLLSLAETPASAPAHRSSTFPKWVTKTERGRQPLRS

SEQ ID NO: 33856 - protein, 49 aa, Homo sapiens; identical to SEQ ID NO: 33855
  Payload ID: 6676
  Gene Symbol: GALP
  Gene Name: galanin-like peptide
  Uniprot ID: Q9UBC7
  ENSP ID: ENSP00000464698

SEQ ID NO: 33857 - protein, 144 aa, Homo sapiens
  Payload ID: 6677
  Gene Symbol: GRIFIN
  Gene Name: galectin-related inter-fiber protein
  Uniprot ID: A4D1Z8
  ENSP ID: ENSP00000481185
MAVQSKAFCAGGLAPGWKLLVQGHADSGEDRFETNFLLETGDIAFHIKPRFSSATVVGNAFQYGRWGPEQVSSIFPLAPGEPFEIEVSWDAEHFHVYAPEHKVLQFPCRQRPLGATTRVRVLSDHCLAQVELAKRGLSWGDRGY

SEQ ID NO: 33858 - protein, 167 aa, Homo sapiens
  Payload ID: 6678
  Gene Symbol: GTSF1
  Gene Name: gametocyte specific factor 1
  Uniprot ID: Q8WW33
  ENSP ID: ENSP00000304185
MEETYTDSLDPEKLLQCPYDKNHQIRACRFPYHLIKCRKNHPDVASKLATCPFNARHQVPRAEISHHISSCDDRSCIEQDVVNQTRSLRQETLAESTWQCPPCDEDWDKDLWEQTSTPFVWGTTHYSDNNSPASNIVTEHKNNLASGMRVPKSLPYVLPWKNNGNAQ

SEQ ID NO: 33859 - protein, 167 aa, Homo sapiens; identical to SEQ ID NO: 33858
  Payload ID: 6678
  Gene Symbol: GTSF1
  Gene Name: gametocyte specific factor 1
  Uniprot ID: Q8WW33
  ENSP ID: ENSP00000446485

SEQ ID NO: 33860 - protein, 176 aa, Homo sapiens
  Payload ID: 6678
  Gene Symbol: GTSF1
  Gene Name: gametocyte specific factor 1
  ENSP ID: ENSP00000446918
MEETYTDSLDPEKLLQCPYDKNHQIRACRFPYHLIKCRKNHPDVASKLATCPFNARHQVPRAEISHHISSCDDRSCIEQDVVNQTRSLRQETLAESTWQCPPCDEDWDKDLWEQTSTPFVWGTTHYSDNNSPASNIVTEHKNNLASGMRVPKSLPYVLPWKNNSDSLDFSLCYCLS

SEQ ID NO: 33861 - protein, 176 aa, Homo sapiens; identical to SEQ ID NO: 33860
  Payload ID: 6678
  Gene Symbol: GTSF1
  Gene Name: gametocyte specific factor 1
  ENSP ID: ENSP00000487405

SEQ ID NO: 33862 - protein, 148 aa, Homo sapiens
  Payload ID: 6679
  Gene Symbol: GTSF1L
  Gene Name: gametocyte specific factor 1-like
  Uniprot ID: Q9H1H1
  ENSP ID: ENSP00000362094
MEPEAFEICPYDPHHRIPLSRFQYHLASCRRKNPKKAKKMATCKYNACHVVPIKNLEEHEAVCVNRSAVEEEDTENPLKVSPPSSEQNDDTQQVSPCLPSPDIWNVDGANCQHVFVLKTFFPQKVVCENDTKESARETSPQKILRPGQ

SEQ ID NO: 33863 - protein, 123 aa, Homo sapiens
  Payload ID: 6679
  Gene Symbol: GTSF1L
  Gene Name: gametocyte specific factor 1-like
  Uniprot ID: Q9H1H1
  ENSP ID: ENSP00000362096
MEPEAFEICPYDPHHRIPLSRFQYHLASCRRKNPKKAKKMATCKYNACHVVPIKNLEEHEAVCVNRSAVEEEDTENPLKVSPPSSEQNDDTQQTFFPQKVVCENDTKESARETSPQKILRPGQ

SEQ ID NO: 33864 - protein, 652 aa, Homo sapiens
  Payload ID: 6680
  Gene Symbol: GGN
  Gene Name: gametogenetin
  Uniprot ID: Q86UU5
  ENSP ID: ENSP00000334940
MGNLQSEPSAGGGSRKVQPSDRAPDSRRTSLVEPEMTSQAMRLTRGLGVWFPGSATPPGLMVPREPQASPSTLPLTLERPSPVMPPPEEAAAVSAPPPAPAGTLLPGPSKWQKPAGTPVPRIRRLLEASHRGQGDPPSLRPLKPPPPPRQLSVKDTVPRAPSQFPPPLETWKPPPPLPSERQPADRRITPALATPASPPTESQAGPRNQGQTAGRARGGAPPHAGEGEMAQPADSESGLSLLCKITFKSRPSLAPPAASSSLAAKASLGGGGGGGLFAASGAISYAEVLKQGPLPPGAARPLGEVSRGAQEAEGGDGDGEGCSGPPSAPASQARALPPPPYTTFPGSKPKFDWVSAPDGPERHFRFNGAGGGIGAPRRRAAALSGPWGSPPPPPEQIHSAPGPRRPAPALLAPPTFIFPAPTNGEPMRPGPPGLQELPPLPPPTPPPTLQPPALQPTPLPVAPPLTPGLGHKESALAPTAAPALPPALAADQAPAPSPAPAPTVAEPSPPVSAPAPAAAPIKTRTRRNKGSRAARGATRKDGLHGDGPRERATATVPDSSGGGGGGSGASQTGAANTRAARHWLPFQVLNSCPCKCYCHHQPRHRRLPRNVSAWLSTSTNHLGEPPWVATIKLSGSLVAKLEHYDLQATHSN

SEQ ID NO: 33865 - protein, 59 aa, Homo sapiens
  Payload ID: 6680
  Gene Symbol: GGN
  Gene Name: gametogenetin
  ENSP ID: ENSP00000465186
MGNLQSEPSAGGGSRKVQPSDRAPDSRRTSLVEPEMTSQAMRLTRGLGVWFPGSATPPG

SEQ ID NO: 33866 - protein, 82 aa, Homo sapiens
  Payload ID: 6680
  Gene Symbol: GGN
  Gene Name: gametogenetin
  ENSP ID: ENSP00000467084
MPPPEEAAAVSAPPPAPAGTLLPGPSKWQKPAGTPVPRIRRLLEASHRGQGDPPSLRPLKPPPPPRQLSVKDTVPRAPSQFP

SEQ ID NO: 33867 - protein, 457 aa, Homo sapiens
  Payload ID: 6680
  Gene Symbol: GGN
  Gene Name: gametogenetin
  Uniprot ID: Q86UU5
  ENSP ID: ENSP00000467295
MPPPEEAAAVSAPPPAPAGTLLPGPSKWQKPAGTPVPRIRRLLEASHRGQGDPPSLRPLKPPPPPRQLSVKDTVPRAPSQFPPPLETWKPPPPLPSERQPADRRITPALATPASPPTESQAGPRNQGQTAGRARGGAPPHAGEGEMAQPADSESGLSLLCKITFKSRPSLAPPAASSSLAAKASLGGGGGGGLFAASGAISYAEVLKQGPLPPGAARPLGEVSRGAQEAEGGDGDGEGCSGPPSAPASQARALPPPPYTTFPGSKPKFDWVSAPDGPERHFRFNGAGGGIGAPRRRAAALSGPWGSPPPPPEQIHSAPGPRRPAPALLAPPTFIFPAPTNGEPMRPGPPGLQELPPLPPPTPPPTLQPPALQPTPLPVAPPLTPGLGHKESALAPTAAPALPPALAADQAPAPSPAPAPTVAEPSPPVSAPAPAAAPIKTRTRRNKGSRAARGATRA

SEQ ID NO: 33868 - protein, 697 aa, Homo sapiens
  Payload ID: 6681
  Gene Symbol: GGNBP2
  Gene Name: gametogenetin binding protein 2
  Uniprot ID: Q9H3C7
  ENSP ID: ENSP00000478220
MARLVAVCRDGEEEFPFERRQIPLYIDDTLTMVMEFPDNVLNLDGHQNNGAQLKQFIQRHGMLKQQDLSIAMVVTSREVLSALSQLVPCVGCRRSVERLFSQLVESGNPALEPLTVGPKGVLSVTRSCMTDAKKLYTLFYVHGSKLNDMIDAIPKSKKNKRCQLHSLDTHKPKPLGGCWMDVWELMSQECRDEVVLIDSSCLLETLETYLRKHRFCTDCKNKVLRAYNILIGELDCSKEKGYCAALYEGLRCCPHERHIHVCCETDFIAHLLGRAEPEFAGGRRERHAKTIDIAQEEVLTCLGIHLYERLHRIWQKLRAEEQTWQMLFYLGVDALRKSFEMTVEKVQGISRLEQLCEEFSEEERVRELKQEKKRQKRKNRRKNKCVCDIPTPLQTADEKEVSQEKETDFIENSSCKACGSTEDGNTCVEVIVTNENTSCTCPSSGNLLGSPKIKKGLSPHCNGSDCGYSSSMEGSETGSREGSDVACTEGICNHDEHGDDSCVHHCEDKEDDGDSCVECWANSEENDTKGKNKKKKKKSKILKCDEHIQKLGSCITDPGNRETSGNTMHTVFHRDKTKDTHPESCCSSEKGGQPLPWFEHRKNVPQFAEPTETLFGPDSGKGAKSLVELLDESECTSDEEIFISQDEIQSFMANNQSFYSNREQYRQHLKEKFNKYCRLNDHKRPICSGWLTTAGAN

SEQ ID NO: 33869 - protein, 697 aa, Homo sapiens; identical to SEQ ID NO: 33868
  Payload ID: 6681
  Gene Symbol: GGNBP2
  Gene Name: gametogenetin binding protein 2
  Uniprot ID: Q9H3C7
  ENSP ID: ENSP00000478954

SEQ ID NO: 33870 - protein, 68 aa, Homo sapiens
  Payload ID: 6681
  Gene Symbol: GGNBP2
  Gene Name: gametogenetin binding protein 2
  ENSP ID: ENSP00000483332
MARLVAVCRDGEEEFPFERRQIPLYIDDTLTVSGPGRAGPAAPLAAVSPPPPPPGRALRTGERVCCNS

SEQ ID NO: 33871 - protein, 158 aa, Homo sapiens
  Payload ID: 6681
  Gene Symbol: GGNBP2
  Gene Name: gametogenetin binding protein 2
  ENSP ID: ENSP00000484094
MARLVAVCRDGEEEFPFERRQIPLYIDDTLTMVMEFPDNVLNLDGHQNNGAQLKQFIQRHGMLKQQDLSIAMVVTSREVLSALSQLVPCVGCRRSVERLFSQLVESGNPALEPLTVGPKGVLSVTRSCMTDAKKLYTLFYVHGSKLNDMIDAIPKSKK

SEQ ID NO: 33872 - protein, 133 aa, Homo sapiens
  Payload ID: 6681
  Gene Symbol: GGNBP2
  Gene Name: gametogenetin binding protein 2
  ENSP ID: ENSP00000484329
  MOD_RES (1)..(1): Any amino acid
XDTKGKNKKKKKKSKILKCDEHIQKLGSCITDPGNRETSGNTMHTVFHRDKTKDTHPESCCSSEKGGQPLPWFEHRKNVPQFAEPTETLFGPDSGKGAKSLVELLVSIPCGLTVHNCLGTGWMWEGIVFEGLR

SEQ ID NO: 33873 - protein, 133 aa, Homo sapiens; identical to SEQ ID NO: 33872
  Payload ID: 6681
  Gene Symbol: GGNBP2
  Gene Name: gametogenetin binding protein 2
  ENSP ID: ENSP00000487803
  MOD_RES (1)..(1): Any amino acid

SEQ ID NO: 33874 - protein, 158 aa, Homo sapiens; identical to SEQ ID NO: 33871
  Payload ID: 6681
  Gene Symbol: GGNBP2
  Gene Name: gametogenetin binding protein 2
  ENSP ID: ENSP00000487906

SEQ ID NO: 33875 - protein, 68 aa, Homo sapiens; identical to SEQ ID NO: 33870
  Payload ID: 6681
  Gene Symbol: GGNBP2
  Gene Name: gametogenetin binding protein 2
  ENSP ID: ENSP00000488752

SEQ ID NO: 33876 - protein, 456 aa, Homo sapiens
  Payload ID: 6682
  Gene Symbol: GABRA1
  Gene Name: gamma-aminobutyric acid (GABA) A receptor, alpha 1
  Uniprot ID: P14867
  ENSP ID: ENSP00000023897
MRKSPGLSDCLWAWILLLSTLTGRSYGQPSLQDELKDNTTVFTRILDRLLDGYDNRLRPGLGERVTEVKTDIFVTSFGPVSDHDMEYTIDVFFRQSWKDERLKFKGPMTVLRLNNLMASKIWTPDTFFHNGKKSVAHNMTMPNKLLRITEDGTLLYTMRLTVRAECPMHLEDFPMDAHACPLKFGSYAYTRAEVVYEWTREPARSVVVAEDGSRLNQYDLLGQTVDSGIVQSSTGEYVVMTTHFHLKRKIGYFVIQTYLPCIMTVILSQVSFWLNRESVPARTVFGVTTVLTMTTLSISARNSLPKVAYATAMDWFIAVCYAFVFSALIEFATVNYFTKRGYAWDGKSVVPEKPKKVKDPLIKKNNTYAPTATSYTPNLARGDPGLATIAKSATIEPKEVKPETKPPEPKKTFNSVSKIDRLSRIAFPLLFGIFNLVYWATYLNREPQLKAPTPHQ

SEQ ID NO: 33877 - protein, 456 aa, Homo sapiens; identical to SEQ ID NO: 33876
  Payload ID: 6682
  Gene Symbol: GABRA1
  Gene Name: gamma-aminobutyric acid (GABA) A receptor, alpha 1
  Uniprot ID: P14867
  ENSP ID: ENSP00000377517

SEQ ID NO: 33878 - protein, 456 aa, Homo sapiens; identical to SEQ ID NO: 33876
  Payload ID: 6682
  Gene Symbol: GABRA1
  Gene Name: gamma-aminobutyric acid (GABA) A receptor, alpha 1
  Uniprot ID: P14867
  ENSP ID: ENSP00000393097

SEQ ID NO: 33879 - protein, 456 aa, Homo sapiens; identical to SEQ ID NO: 33876
  Payload ID: 6682
  Gene Symbol: GABRA1
  Gene Name: gamma-aminobutyric acid (GABA) A receptor, alpha 1
  Uniprot ID: P14867
  ENSP ID: ENSP00000415441

SEQ ID NO: 33880 - protein, 168 aa, Homo sapiens
  Payload ID: 6682
  Gene Symbol: GABRA1
  Gene Name: gamma-aminobutyric acid (GABA) A receptor, alpha 1
  ENSP ID: ENSP00000430435
MRKSPGLSDCLWAWILLLSTLTGRSYGQPSLQDELKDNTTVFTRILDRLLDGYDNRLRPGLGERVTEVKTDIFVTSFGPVSDHDMEYTIDVFFRQSWKDERLKFKGPMTVLRLNNLMASKIWTPDTFFHNGKKSVAHNMTMPNKLLRITEDGTLLYTMRLTVRAECPM

SEQ ID NO: 33881 - protein, 113 aa, Homo sapiens
  Payload ID: 6682
  Gene Symbol: GABRA1
  Gene Name: gamma-aminobutyric acid (GABA) A receptor, alpha 1
  ENSP ID: ENSP00000430507
MVQVSIASNEVSYPSELLQPAMRKSPGLSDCLWAWILLLSTLTGRSYGQPSLQDELKDNTTVFTRILDRLLDGYDNRLRPGLGERVTEVKTDIFVTSFGPVSDHDMEYTIDVF

SEQ ID NO: 33882 - protein, 91 aa, Homo sapiens
  Payload ID: 6682
  Gene Symbol: GABRA1
  Gene Name: gamma-aminobutyric acid (GABA) A receptor, alpha 1
  ENSP ID: ENSP00000430895
MLLQPAMRKSPGLSDCLWAWILLLSTLTGRSYGQPSLQDELKDNTTVFTRILDRLLDGYDNRLRPGLGERVTEVKTDIFVTSFGPVSDHDM

SEQ ID NO: 33883 - protein, 35 aa, Homo sapiens
  Payload ID: 6682
  Gene Symbol: GABRA1
  Gene Name: gamma-aminobutyric acid (GABA) A receptor, alpha 1
  ENSP ID: ENSP00000489033
MRKSPGLSDCLWAWILLLSTLTGRSYGQPSLQDEL

SEQ ID NO: 33884 - protein, 285 aa, Homo sapiens
  Payload ID: 6682
  Gene Symbol: GABRA1
  Gene Name: gamma-aminobutyric acid (GABA) A receptor, alpha 1
  ENSP ID: ENSP00000489434
MRKSPGLSDCLWAWILLLSTLTGRSYGQPSLQDELKDNTTVFTRILDRLLDGYDNRLRPGLGERVTEVKTDIFVTSFGPVSDHDMEYTIDVFFRQSWKDERLKFKGPMTVLRLNNLMASKIWTPDTFFHNGKKSVAHNMTMPNKLLRITEDGTLLYTMRLTVRAECPMHLEDFPMDAHACPLKFGSYAYTRAEVVYEWTREPARSVVVAEDGSRLNQYDLLGQTVDSGIVQSSTGEYVVMTTHFHLKRKIGYFVIQTYLPCIMTVILSQVSFWLNRESVPARTVF

SEQ ID NO: 33885 - protein, 451 aa, Homo sapiens
  Payload ID: 6683
  Gene Symbol: GABRA2
  Gene Name: gamma-aminobutyric acid (GABA) A receptor, alpha 2
  Uniprot ID: P47869
  ENSP ID: ENSP00000348897
MKTKLNIYNMQFLLFVFLVWDPARLVLANIQEDEAKNNITIFTRILDRLLDGYDNRLRPGLGDSITEVFTNIYVTSFGPVSDTDMEYTIDVFFRQKWKDERLKFKGPMNILRLNNLMASKIWTPDTFFHNGKKSVAHNMTMPNKLLRIQDDGTLLYTMRLTVQAECPMHLEDFPMDAHSCPLKFGSYAYTTSEVTYIWTYNASDSVQVAPDGSRLNQYDLLGQSIGKETIKSSTGEYTVMTAHFHLKRKIGYFVIQTYLPCIMTVILSQVSFWLNRESVPARTVFGVTTVLTMTTLSISARNSLPKVAYATAMDWFIAVCYAFVFSALIEFATVNYFTKRGWAWDGKSVVNDKKKEKASVMIQNNAYAVAVANYAPNLSKDPVLSTISKSATTPEPNKKPENKPAEAKKTFNSVSKIDRMSRIVFPVLFGTFNLVYWATYLNREPVLGVSP

SEQ ID NO: 33886 - protein, 451 aa, Homo sapiens; identical to SEQ ID NO: 33885
  Payload ID: 6683
  Gene Symbol: GABRA2
  Gene Name: gamma-aminobutyric acid (GABA) A receptor, alpha 2
  Uniprot ID: P47869
  ENSP ID: ENSP00000371033

SEQ ID NO: 33887 - protein, 451 aa, Homo sapiens; identical to SEQ ID NO: 33885
  Payload ID: 6683
  Gene Symbol: GABRA2
  Gene Name: gamma-aminobutyric acid (GABA) A receptor, alpha 2
  Uniprot ID: P47869
  ENSP ID: ENSP00000421300

SEQ ID NO: 33888 - protein, 66 aa, Homo sapiens
  Payload ID: 6683
  Gene Symbol: GABRA2
  Gene Name: gamma-aminobutyric acid (GABA) A receptor, alpha 2
  ENSP ID: ENSP00000421639
MKTKLNIYNMQFLLFVFLVWDPARLVLANIQEDEAKNNITIFTRILDRLLDGYDNRLRPGLGGIYN

SEQ ID NO: 33889 - protein, 451 aa, Homo sapiens; identical to SEQ ID NO: 33885
  Payload ID: 6683
  Gene Symbol: GABRA2
  Gene Name: gamma-aminobutyric acid (GABA) A receptor, alpha 2
  Uniprot ID: P47869
  ENSP ID: ENSP00000421828

SEQ ID NO: 33890 - protein, 159 aa, Homo sapiens
  Payload ID: 6683
  Gene Symbol: GABRA2
  Gene Name: gamma-aminobutyric acid (GABA) A receptor, alpha 2
  ENSP ID: ENSP00000422642
MKTKLNIYNMQFLLFVFLVWDPARLVLANIQEDEAKNNITIFTRILDRLLDGYDNRLRPGLGDSITEVFTNIYVTSFGPVSDTDMEYTIDVFFRQKWKDERLKFKGPMNILRLNNLMASKIWTPDTFFHNGKKSVAHNMTMPNKLLRIQDDGTLLYTMR

SEQ ID NO: 33891 - protein, 73 aa, Homo sapiens
  Payload ID: 6683
  Gene Symbol: GABRA2
  Gene Name: gamma-aminobutyric acid (GABA) A receptor, alpha 2
  ENSP ID: ENSP00000422805
MKTKLNIYNMQFLLFVFLVWDPARLVLANIQEDEAKNNITIFTRILDRLLDGYDNRLRPGLGVSRVESPVCVT

SEQ ID NO: 33892 - protein, 367 aa, Homo sapiens
  Payload ID: 6683
  Gene Symbol: GABRA2
  Gene Name: gamma-aminobutyric acid (GABA) A receptor, alpha 2
  ENSP ID: ENSP00000423840
MKTKLNIYNMQFLLFVFLVWDPARLVLANIQEDEAKNNITIFTRILDRLLDGYDNRLRPGLGDSITEVFTNIYVTSFGPVSDTDMEYTIDVFFRQKWKDERLKFKGPMNILRLNNLMASKIWTPDTFFHNGKKSVAHNMTMPNKLLRIQDDGTLLYTMRLTVQAECPMHLEDFPMDAHSCPLKFGSYAYTTSEVTYIWTYNASDSVQVAPDGSRLNQYDLLGQSIGKETIKSSTGEYTVMTAHFHLKRKIGYFVIQTYLPCIMTVILSQVSFWLNRESVPARTVFGVTTVLTMTTLSISARNSLPKVAYATAMDWFIAVCYAFVFSALIEFATVNYFTKRGWAWDGKSVVNDKVSESFRVIIIKKIP

SEQ ID NO: 33893 - protein, 137 aa, Homo sapiens
  Payload ID: 6683
  Gene Symbol: GABRA2
  Gene Name: gamma-aminobutyric acid (GABA) A receptor, alpha 2
  ENSP ID: ENSP00000424093
MKTKLNIYNMQFLLFVFLVWDPARLVLANIQEDEAKNNITIFTRILDRLLDGYDNRLRPGLGDSITEVFTNIYVTSFGPVSDTDMEYTIDVFFRQKWKDERLKFKGPMNILRLNNLMASKIWTPDTFFHNGKKSVAH

SEQ ID NO: 33894 - protein, 151 aa, Homo sapiens
  Payload ID: 6683
  Gene Symbol: GABRA2
  Gene Name: gamma-aminobutyric acid (GABA) A receptor, alpha 2
  ENSP ID: ENSP00000424362
MKTKLNIYNMQFLLFVFLVWDPARLVLANIQEDEAKNNITIFTRILDRLLDGYDNRLRPGLGDSITEVFTNIYVTSFGPVSDTDMEYTIDVFFRQKWKDERLKFKGPMNILRLNNLMASKIWTPDTFFHNGKKSVAHNMTMPNKLLRIQDD

SEQ ID NO: 33895 - protein, 56 aa, Homo sapiens
  Payload ID: 6683
  Gene Symbol: GABRA2
  Gene Name: gamma-aminobutyric acid (GABA) A receptor, alpha 2
  ENSP ID: ENSP00000425240
SSTGEYTVMTAHFHLKRKIGYFVIQTYLPCIMTVILSQVSFWLNRESVPARTVFGE

SEQ ID NO: 33896 - protein, 66 aa, Homo sapiens; identical to SEQ ID NO: 33888
  Payload ID: 6683
  Gene Symbol: GABRA2
  Gene Name: gamma-aminobutyric acid (GABA) A receptor, alpha 2
  ENSP ID: ENSP00000425526

SEQ ID NO: 33897 - protein, 511 aa, Homo sapiens
  Payload ID: 6683
  Gene Symbol: GABRA2
  Gene Name: gamma-aminobutyric acid (GABA) A receptor, alpha 2
  ENSP ID: ENSP00000427603
MKTKLNIYNMQFLLFVFLVWDPARLVLANIQEDEAKNNITIFTRILDRLLDGYDNRLRPGLGDSITEVFTNIYVTSFGPVSDTDMEYTIDVFFRQKWKDERLKFKGPMNILRLNNLMASKIWTPDTFFHNGKKSVAHNMTMPNKLLRIQDDGTLLYTMRLTVQAECPMHLEDFPMDAHSCPLKFGSYAYTTSEVTYIWTYNASDSVQVAPDGSRLNQYDLLGQSIGKETIKSSTGEYTVMTAHFHLKRKIGYFVIQTYLPCIMTVILSQVSFWLNRESVPARTVFGVTTVLTMTTLSISARNSLPKVAYATAMDWFIAVCYAFVFSALIEFATVNYFTKRGWAWDGKSVVNDKSPSIKAEGITLTYNSVKAILQGAKLIWSKYIAFSWPSLFQEKTLEYLEKWMDCLTFKQSSKKEKASVMIQNNAYAVAVANYAPNLSKDPVLSTISKSATTPEPNKKPENKPAEAKKTFNSVSKIDRMSRIVFPVLFGTFNLVYWATYLNREPVLGVSP

SEQ ID NO: 33898 - protein, 427 aa, Homo sapiens
  Payload ID: 6683
  Gene Symbol: GABRA2
  Gene Name: gamma-aminobutyric acid (GABA) A receptor, alpha 2
  ENSP ID: ENSP00000444409
MEYTIDVFFRQKWKDERLKFKGPMNILRLNNLMASKIWTPDTFFHNGKKSVAHNMTMPNKLLRIQDDGTLLYTMRLTVQAECPMHLEDFPMDAHSCPLKFGSYAYTTSEVTYIWTYNASDSVQVAPDGSRLNQYDLLGQSIGKETIKSSTGEYTVMTAHFHLKRKIGYFVIQTYLPCIMTVILSQVSFWLNRESVPARTVFGVTTVLTMTTLSISARNSLPKVAYATAMDWFIAVCYAFVFSALIEFATVNYFTKRGWAWDGKSVVNDKSPSIKAEGITLTYNSVKAILQGAKLIWSKYIAFSWPSLFQEKTLEYLEKWMDCLTFKQSSKKEKASVMIQNNAYAVAVANYAPNLSKDPVLSTISKSATTPEPNKKPENKPAEAKKTFNSVSKIDRMSRIVFPVLFGTFNLVYWATYLNREPVLGVSP

SEQ ID NO: 33899 - protein, 66 aa, Homo sapiens; identical to SEQ ID NO: 33888
  Payload ID: 6683
  Gene Symbol: GABRA2
  Gene Name: gamma-aminobutyric acid (GABA) A receptor, alpha 2
  ENSP ID: ENSP00000486333

SEQ ID NO: 33900 - protein, 492 aa, Homo sapiens
  Payload ID: 6684
  Gene Symbol: GABRA3
  Gene Name: gamma-aminobutyric acid (GABA) A receptor, alpha 3
  Uniprot ID: P34903
  ENSP ID: ENSP00000359337
MIITQTSHCYMTSLGILFLINILPGTTGQGESRRQEPGDFVKQDIGGLSPKHAPDIPDDSTDNITIFTRILDRLLDGYDNRLRPGLGDAVTEVKTDIYVTSFGPVSDTDMEYTIDVFFRQTWHDERLKFDGPMKILPLNNLLASKIWTPDTFFHNGKKSVAHNMTTPNKLLRLVDNGTLLYTMRLTIHAECPMHLEDFPMDVHACPLKFGSYAYTTAEVVYSWTLGKNKSVEVAQDGSRLNQYDLLGHVVGTEIIRSSTGEYVVMTTHFHLKRKIGYFVIQTYLPCIMTVILSQVSFWLNRESVPARTVFGVTTVLTMTTLSISARNSLPKVAYATAMDWFIAVCYAFVFSALIEFATVNYFTKRSWAWEGKKVPEALEMKKKTPAAPAKKTSTTFNIVGTTYPINLAKDTEFSTISKGAAPSASSTPTIIASPKATYVQDSPTETKTYNSVSKVDKISRIIFPVLFAIFNLVYWATYVNRESAIKGMIRKQ

SEQ ID NO: 33901 - protein, 492 aa, Homo sapiens; identical to SEQ ID NO: 33900
  Payload ID: 6684
  Gene Symbol: GABRA3
  Gene Name: gamma-aminobutyric acid (GABA) A receptor, alpha 3
  Uniprot ID: P34903
  ENSP ID: ENSP00000443527

SEQ ID NO: 33902 - protein, 554 aa, Homo sapiens [sequence omitted]

SEQ ID NO: 33903 - protein, 36 aa, Homo sapiens
  Payload ID: 6685
  Gene Symbol: GABRA4
  Gene Name: gamma-aminobutyric acid (GABA) A receptor, alpha 4
  ENSP ID: ENSP00000422152
MVSAKKFKRIPRTEPKGGEIVHRKFHPHPGQFARWL

SEQ ID NO: 33904 - protein, 36 aa, Homo sapiens
  Payload ID: 6685
  Gene Symbol: GABRA4
  Gene Name: gamma-aminobutyric acid (GABA) A receptor, alpha 4
  ENSP ID: ENSP00000424386
MVSAKKVPAIALSAGVSFALLRFLCLAVWSCYRSEN

SEQ ID NO: 33905 - protein, 36 aa, Homo sapiens; identical to SEQ ID NO: 33903
  Payload ID: 6685
  Gene Symbol: GABRA4
  Gene Name: gamma-aminobutyric acid (GABA) A receptor, alpha 4
  ENSP ID: ENSP00000425445

SEQ ID NO: 33906 - protein, 462 aa, Homo sapiens
  Payload ID: 6686
  Gene Symbol: GABRA5
  Gene Name: gamma-aminobutyric acid (GABA) A receptor, alpha 5
  Uniprot ID: P31644
  ENSP ID: ENSP00000335592
MDNGMFSGFIMIKNLLLFCISMNLSSHFGFSQMPTSSVKDETNDNITIFTRILDGLLDGYDNRLRPGLGERITQVRTDIYVTSFGPVSDTEMEYTIDVFFRQSWKDERLRFKGPMQRLPLNNLLASKIWTPDTFFHNGKKSIAHNMTTPNKLLRLEDDGTLLYTMRLTISAECPMQLEDFPMDAHACPLKFGSYAYPNSEVVYVWTNGSTKSVVVAEDGSRLNQYHLMGQTVGTENISTSTGEYTIMTAHFHLKRKIGYFVIQTYLPCIMTVILSQVSFWLNRESVPARTVFGVTTVLTMTTLSISARNSLPKVAYATAMDWFIAVCYAFVFSALIEFATVNYFTKRGWAWDGKKALEAAKIKKKREVILNKSTNAFTTGKMSHPPNIPKEQTPAGTSNTTSVSVKPSEEKTSESKKTYNSISKIDKMSRIVFPVLFGTFNLVYWATYLNREPVIKGAASPK

SEQ ID NO: 33907 - protein, 462 aa, Homo sapiens; identical to SEQ ID NO: 33906
  Payload ID: 6686
  Gene Symbol: GABRA5
  Gene Name: gamma-aminobutyric acid (GABA) A receptor, alpha 5
  Uniprot ID: P31644
  ENSP ID: ENSP00000347557

SEQ ID NO: 33908 - protein, 462 aa, Homo sapiens; identical to SEQ ID NO: 33906
  Payload ID: 6686
  Gene Symbol: GABRA5
  Gene Name: gamma-aminobutyric acid (GABA) A receptor, alpha 5
  Uniprot ID: P31644
  ENSP ID: ENSP00000382953

SEQ ID NO: 33909 - protein, 85 aa, Homo sapiens
  Payload ID: 6686
  Gene Symbol: GABRA5
  Gene Name: gamma-aminobutyric acid (GABA) A receptor, alpha 5
  ENSP ID: ENSP00000450529
MPTSSVKDETNDNITIFTRILDGLLDGYDNRLRPGLGERITQVRTDIYVTSFGPVSDTEMEYTIDVFFRQSWKDERLRFKGPMQR

SEQ ID NO: 33910 - protein, 166 aa, Homo sapiens
  Payload ID: 6686
  Gene Symbol: GABRA5
  Gene Name: gamma-aminobutyric acid (GABA) A receptor, alpha 5
  ENSP ID: ENSP00000450653
MPTSSVKDETNDNITIFTRILDGLLDGYDNRLRPGLGERITQVRTDIYVTSFGPVSDTEMEYTIDVFFRQSWKDERLRFKGPMQRLPLNNLLASKIWTPDTFFHNGKKSIAHNMTTPNKLLRLEDDGTLLYTMRLTISAECPMQLEDFPMDAHACPLKFGSYAYPN

SEQ ID NO: 33911 - protein, 165 aa, Homo sapiens
  Payload ID: 6686
  Gene Symbol: GABRA5
  Gene Name: gamma-aminobutyric acid (GABA) A receptor, alpha 5
  ENSP ID: ENSP00000450717
MDNGMFSGFIMIKNLLLFCISMNLSSHFGFSQMPTSSVKDETNDNITIFTRILDGLLDGYDNRLRPGLGERITQVRTDIYVTSFGPVSDTEMEYTIDVFFRQSWKDERLRFKGPMQRLPLNNLLASKIWTPDTFFHNGKKSIAHNMTTPNKLLRLEDDGTLLYTM

SEQ ID NO: 33912 - protein, 148 aa, Homo sapiens
  Payload ID: 6686
  Gene Symbol: GABRA5
  Gene Name: gamma-aminobutyric acid (GABA) A receptor, alpha 5
  ENSP ID: ENSP00000450806
MDNGMFSGFIMIKNLLLFCISMNLSSHFGFSQMPTSSVKDETNDNITIFTRILDGLLDGYDNRLRPGLGERITQVRTDIYVTSFGPVSDTEMEYTIDVFFRQSWKDERLRFKGPMQRLPLNNLLASKIWTPDTFFHNGKKSIAHNMTT

SEQ ID NO: 33913 - protein, 16 aa, Homo sapiens
  Payload ID: 6686
  Gene Symbol: GABRA5
  Gene Name: gamma-aminobutyric acid (GABA) A receptor, alpha 5
  ENSP ID: ENSP00000450932
MDNGMFSGFIMIKNLL

SEQ ID NO: 33914 - protein, 86 aa, Homo sapiens
  Payload ID: 6686
  Gene Symbol: GABRA5
  Gene Name: gamma-aminobutyric acid (GABA) A receptor, alpha 5
  ENSP ID: ENSP00000451527
MDNGMFSGFIMIKNLLLFCISMNLSSHFGFSQMPTSSVKDETNDNITIFTRILDGLLDGYDNRLRPGLGERITQVRTDIYVTSFGP

SEQ ID NO: 33915 - protein, 453 aa, Homo sapiens
  Payload ID: 6687
  Gene Symbol: GABRA6
  Gene Name: gamma-aminobutyric acid (GABA) A receptor, alpha 6
  Uniprot ID: Q16445
  ENSP ID: ENSP00000274545
MASSLPWLCIILWLENALGKLEVEGNFYSENVSRILDNLLEGYDNRLRPGFGGAVTEVKTDIYVTSFGPVSDVEMEYTMDVFFRQTWTDERLKFGGPTEILSLNNLMVSKIWTPDTFFRNGKKSIAHNMTTPNKLFRIMQNGTILYTMRLTINADCPMRLVNFPMDGHACPLKFGSYAYPKSEIIYTWKKGPLYSVEVPEESSSLLQYDLIGQTVSSETIKSNTGEYVIMTVYFHLQRKMGYFMIQIYTPCIMTVILSQVSFWINKESVPARTVFGITTVLTMTTLSISARHSLPKVSYATAMDWFIAVCFAFVFSALIEFAAVNYFTNLQTQKAKRKAQFAAPPTVTISKATEPLEAEIVLHPDSKYHLKKRITSLSLPIVSSSEANKVLTRAPILQSTPVTPPPLSPAFGGTSKIDQYSRILFPVAFAGFNLVYWVVYLSKDTMEVSSSVE

SEQ ID NO: 33916 - protein, 191 aa, Homo sapiens
  Payload ID: 6687
  Gene Symbol: GABRA6
  Gene Name: gamma-aminobutyric acid (GABA) A receptor, alpha 6
  ENSP ID: ENSP00000427989
LMVSKIWTPDTFFRNGKKSIAHNMTTPNKLFRIMQNGTILYTMRLTINADCPMRLVNFPMDGHACPLKFGSYNVHFEGKKDNSSNSLLYLICFKYLDAYPKSEIIYTWKKGPLYSVEVPEESSSLLQYDLIGQTVSSETIKSNTGEYVIMTVYFHLQRKMGYFMIQIYTPCIMTVILSQVSFWINKESVPA

SEQ ID NO: 33917 - protein, 197 aa, Homo sapiens
  Payload ID: 6687
  Gene Symbol: GABRA6
  Gene Name: gamma-aminobutyric acid (GABA) A receptor, alpha 6
  ENSP ID: ENSP00000429943
  MOD_RES (1)..(1): Any amino acid
XIEDGPVGVLGTLFQEYTMDVFFRQTWTDERLKFGGPTEILSLNNLMVSKIWTPDTFFRNGKKSIAHNMTTPNKLFRIMQNGTILYTMRLTINADCPMRLVNFPMDGHACPLKFGSYAYPKSEIIYTWKKGPLYSVEVPEESSSLLQYDLIGQTVSSETIKSNTGEYVIMTVYFHLQRKMGYFMIQIYTPCIMTVIL

SEQ ID NO: 33918 - protein, 185 aa, Homo sapiens
  Payload ID: 6687
  Gene Symbol: GABRA6
  Gene Name: gamma-aminobutyric acid (GABA) A receptor, alpha 6
  ENSP ID: ENSP00000430212
SRCSGDSVPGTDGCSIHKRVFIEYTMDVFFRQTWTDERLKFGGPTEILSLNNLMVSKIWTPDTFFRNGKKSIAHNMTTPNKLFRIMQNGTILYTMRLTINADCPMRLVNFPMDGHACPLKFGSYAYPKSEIIYTWKKGPLYSVEVPEESSSLLQYDLIGQTVSSETIKSNTGEYVIMTVYFHLQR

SEQ ID NO: 33919 - protein, 443 aa, Homo sapiens
  Payload ID: 6687
  Gene Symbol: GABRA6
  Gene Name: gamma-aminobutyric acid (GABA) A receptor, alpha 6
  ENSP ID: ENSP00000430527
MASSLPWLCIILWLENALGKLEVEGNFYSENVSRILDNLLEGYDNRLRPGFGGAVTEVKTDIYVTSFGPVSDVEMTWTDERLKFGGPTEILSLNNLMVSKIWTPDTFFRNGKKSIAHNMTTPNKLFRIMQNGTILYTMRLTINADCPMRLVNFPMDGHACPLKFGSYAYPKSEIIYTWKKGPLYSVEVPEESSSLLQYDLIGQTVSSETIKSNTGEYVIMTVYFHLQRKMGYFMIQIYTPCIMTVILSQVSFWINKESVPARTVFGITTVLTMTTLSISARHSLPKVSYATAMDWFIAVCFAFVFSALIEFAAVNYFTNLQTQKAKRKAQFAAPPTVTISKATEPLEAEIVLHPDSKYHLKKRITSLSLPIVSSSEANKVLTRAPILQSTPVTPPPLSPAFGGTSKIDQYSRILFPVAFAGFNLVYWVVYLSKDTMEVSSSVE

SEQ ID NO: 33920 - protein, 474 aa, Homo sapiens
  Payload ID: 6688
  Gene Symbol: GABRB1
  Gene Name: gamma-aminobutyric acid (GABA) A receptor, beta 1
  Uniprot ID: P18505
  ENSP ID: ENSP00000295454
MWTVQNRESLGLLSFPVMITMVCCAHSTNEPSNMSYVKETVDRLLKGYDIRLRPDFGGPPVDVGMRIDVASIDMVSEVNMDYTLTMYFQQSWKDKRLSYSGIPLNLTLDNRVADQLWVPDTYFLNDKKSFVHGVTVKNRMIRLHPDGTVLYGLRITTTAACMMDLRRYPLDEQNCTLEIESYGYTTDDIEFYWNGGEGAVTGVNKIELPQFSIVDYKMVSKKVEFTTGAYPRLSLSFRLKRNIGYFILQTYMPSTLITILSWVSFWINYDASAARVALGITTVLTMTTISTHLRETLPKIPYVKAIDIYLMGCFVFVFLALLEYAFVNYIFFGKGPQKKGASKQDQSANEKNKLEMNKVQVDAHGNILLSTLEIRNETSGSEVLTSVSDPKATMYSYDSASIQYRKPLSSREAYGRALDRHGVPSKGRIRRRASQLKVKIPDLTDVNSIDKWSRMFFPITFSLFNVVYWLYYVH

SEQ ID NO: 33921 - protein, 117 aa, Homo sapiens
  Payload ID: 6688
  Gene Symbol: GABRB1
  Gene Name: gamma-aminobutyric acid (GABA) A receptor, beta 1
  ENSP ID: ENSP00000426753
MSYVKETVDRLLKGYDIRLRPDFGGPPVDVGMRIDVASIDMVSEVNMDYTLTMYFQQSWKDKRLSYSGIPLNLTLDNRVADQLWVPDTYFLNDKKSFVHGVTVKNRMIRLHPDGTVL

SEQ ID NO: 33922 - protein, 87 aa, Homo sapiens
  Payload ID: 6688
  Gene Symbol: GABRB1
  Gene Name: gamma-aminobutyric acid (GABA) A receptor, beta 1
  Uniprot ID: P18505
  ENSP ID: ENSP00000426766
MWTVQNRESLGLLSFPVMITMVCCAHSTNEPSNMSYVKETVDRLLKGYDIRLRPDFGGLYTHHVFPAVLERQKAFLFWNPTEPHPRQ

SEQ ID NO: 33923 - protein, 474 aa, Homo sapiens
  Payload ID: 6689
  Gene Symbol: GABRB2
  Gene Name: gamma-aminobutyric acid (GABA) A receptor, beta 2
  Uniprot ID: P47870
  ENSP ID: ENSP00000274546
MWRVRKRGYFGIWSFPLIIAAVCAQSVNDPSNMSLVKETVDRLLKGYDIRLRPDFGGPPVAVGMNIDIASIDMVSEVNMDYTLTMYFQQAWRDKRLSYNVIPLNLTLDNRVADQLWVPDTYFLNDKKSFVHGVTVKNRMIRLHPDGTVLYGLRITTTAACMMDLRRYPLDEQNCTLEIESYGYTTDDIEFYWRGDDNAVTGVTKIELPQFSIVDYKLITKKVVFSTGSYPRLSLSFKLKRNIGYFILQTYMPSILITILSWVSFWINYDASAARVALGITTVLTMTTINTHLRETLPKIPYVKAIDMYLMGCFVFVFMALLEYALVNYIFFGRGPQRQKKAAEKAASANNEKMRLDVNKMDPHENILLSTLEIKNEMATSEAVMGLGDPRSTMLAYDASSIQYRKAGLPRHSFGRNALERHVAQKKSRLRRRASQLKITIPDLTDVNAIDRWSRIFFPVVFSFFNIVYWLYYVN

SEQ ID NO: 33924 - protein, 512 aa, Homo sapiens
  Payload ID: 6689
  Gene Symbol: GABRB2
  Gene Name: gamma-aminobutyric acid (GABA) A receptor, beta 2
  Uniprot ID: P47870
  ENSP ID: ENSP00000274547
MWRVRKRGYFGIWSFPLIIAAVCAQSVNDPSNMSLVKETVDRLLKGYDIRLRPDFGGPPVAVGMNIDIASIDMVSEVNMDYTLTMYFQQAWRDKRLSYNVIPLNLTLDNRVADQLWVPDTYFLNDKKSFVHGVTVKNRMIRLHPDGTVLYGLRITTTAACMMDLRRYPLDEQNCTLEIESYGYTTDDIEFYWRGDDNAVTGVTKIELPQFSIVDYKLITKKVVFSTGSYPRLSLSFKLKRNIGYFILQTYMPSILITILSWVSFWINYDASAARVALGITTVLTMTTINTHLRETLPKIPYVKAIDMYLMGCFVFVFMALLEYALVNYIFFGRGPQRQKKAAEKAASANNEKMRLDVNKIFYKDIKQNGTQYRSLWDPTGNLSPTRRTTNYDFSLYTMDPHENILLSTLEIKNEMATSEAVMGLGDPRSTMLAYDASSIQYRKAGLPRHSFGRNALERHVAQKKSRLRRRASQLKITIPDLTDVNAIDRWSRIFFPVVFSFFNIVYWLYYVN

SEQ ID NO: 33925 - protein, 512 aa, Homo sapiens; identical to SEQ ID NO: 33924
  Payload ID: 6689
  Gene Symbol: GABRB2
  Gene Name: gamma-aminobutyric acid (GABA) A receptor, beta 2
  Uniprot ID: P47870
  ENSP ID: ENSP00000377531

SEQ ID NO: 33926 - protein, 474 aa, Homo sapiens; identical to SEQ ID NO: 33923
  Payload ID: 6689
  Gene Symbol: GABRB2
  Gene Name: gamma-aminobutyric acid (GABA) A receptor, beta 2
  Uniprot ID: P47870
  ENSP ID: ENSP00000429320

SEQ ID NO: 33927 - protein, 314 aa, Homo sapiens
  Payload ID: 6689
  Gene Symbol: GABRB2
  Gene Name: gamma-aminobutyric acid (GABA) A receptor, beta 2
  ENSP ID: ENSP00000429750
MMDLRRYPLDEQNCTLEIESYGYTTDDIEFYWRGDDNAVTGVTKIELPQFSIVDYKLITKKVVFSTGSYPRLSLSFKLKRNIGYFILQTYMPSILITILSWVSFWINYDASAARVALGITTVLTMTTINTHLRETLPKIPYVKAIDMYLMGCFVFVFMALLEYALVNYIFFGRGPQRQKKAAEKAASANNEKMRLDVNKMDPHENILLSTLEIKNEMATSEAVMGLGDPRSTMLAYDASSIQYRKAGLPRHSFGRNALERHVAQKKSRLRRRASQLKITIPDLTDVNAIDRWSRIFFPVVFSFFNIVYWLYYVN

SEQ ID NO: 33928 - protein, 411 aa, Homo sapiens
  Payload ID: 6689
  Gene Symbol: GABRB2
  Gene Name: gamma-aminobutyric acid (GABA) A receptor, beta 2
  ENSP ID: ENSP00000430532
MNIDIASIDMVSEVNMDYTLTMYFQQAWRDKRLSYNVIPLNLTLDNRVADQLWVPDTYFLNDKKSFVHGVTVKNRMIRLHPDGTVLYGLRITTTAACMMDLRRYPLDEQNCTLEIESYGYTTDDIEFYWRGDDNAVTGVTKIELPQFSIVDYKLITKKVVFSTGSYPRLSLSFKLKRNIGYFILQTYMPSILITILSWVSFWINYDASAARVALGITTVLTMTTINTHLRETLPKIPYVKAIDMYLMGCFVFVFMALLEYALVNYIFFGRGPQRQKKAAEKAASANNEKMRLDVNKMDPHENILLSTLEIKNEMATSEAVMGLGDPRSTMLAYDASSIQYRKAGLPRHSFGRNALERHVAQKKSRLRRRASQLKITIPDLTDVNAIDRWSRIFFPVVFSFFNIVYWLYYVN

SEQ ID NO: 33929 - protein, 313 aa, Homo sapiens
  Payload ID: 6689
  Gene Symbol: GABRB2
  Gene Name: gamma-aminobutyric acid (GABA) A receptor, beta 2
  Uniprot ID: P47870
  ENSP ID: ENSP00000480066
MNIDIASIDMVSEVNMDYTLTMYFQQAWRDKRLSYNVIPLNLTLDNRVADQLWVPDTYFLNDKKSFVHGVTVKNRMIRLHPDGTVLYGLRITTTAACMMDLRRYPLDEQNCTLEIESYGYTTDDIEFYWRGDDNAVTGVTKIELPQFSIVDYKLITKKVVFSTGSYPRLSLSFKLKRNIGYFILQTYMPSILITILSWVSFWINYDASAARVALGITTVLTMTTINTHLRETLPKIPYVKAIDMYLMGCFVFVFMALLEYALVNYIFFGRGPQRQKKAAEKAASANNEKMRLDVNKVNSEGKPSLLLKLMEEC

SEQ ID NO: 33930 - protein, 473 aa, Homo sapiens
  Payload ID: 6690
  Gene Symbol: GABRB3
  Gene Name: gamma-aminobutyric acid (GABA) A receptor, beta 3
  Uniprot ID: P28472
  ENSP ID: ENSP00000299267
MCSGLLELLLPIWLSWTLGTRGSEPRSVNDPGNMSFVKETVDKLLKGYDIRLRPDFGGPPVCVGMNIDIASIDMVSEVNMDYTLTMYFQQYWRDKRLAYSGIPLNLTLDNRVADQLWVPDTYFLNDKKSFVHGVTVKNRMIRLHPDGTVLYGLRITTTAACMMDLRRYPLDEQNCTLEIESYGYTTDDIEFYWRGGDKAVTGVERIELPQFSIVEHRLVSRNVVFATGAYPRLSLSFRLKRNIGYFILQTYMPSILITILSWVSFWINYDASAARVALGITTVLTMTTINTHLRETLPKIPYVKAIDMYLMGCFVFVFLALLEYAFVNYIFFGRGPQRQKKLAEKTAKAKNDRSKSESNRVDAHGNILLTSLEVHNEMNEVSGGIGDTRNSAISFDNSGIQYRKQSMPREGHGRFLGDRSLPHKKTHLRRRSSQLKIKIPDLTDVNAIDRWSRIVFPFTFSLFNLVYWLYYVN

SEQ ID NO: 33931 - protein, 473 aa, Homo sapiens [sequence omitted]

SEQ ID NO: 33932 - protein, 402 aa, Homo sapiens
  Payload ID: 6690
  Gene Symbol: GABRB3
  Gene Name: gamma-aminobutyric acid (GABA) A receptor, beta 3
  Uniprot ID: P28472
  ENSP ID: ENSP00000383049
MWATYQTEEDYTLTMYFQQYWRDKRLAYSGIPLNLTLDNRVADQLWVPDTYFLNDKKSFVHGVTVKNRMIRLHPDGTVLYGLRITTTAACMMDLRRYPLDEQNCTLEIESYGYTTDDIEFYWRGGDKAVTGVERIELPQFSIVEHRLVSRNVVFATGAYPRLSLSFRLKRNIGYFILQTYMPSILITILSWVSFWINYDASAARVALGITTVLTMTTINTHLRETLPKIPYVKAIDMYLMGCFVFVFLALLEYAFVNYIFFGRGPQRQKKLAEKTAKAKNDRSKSESNRVDAHGNILLTSLEVHNEMNEVSGGIGDTRNSAISFDNSGIQYRKQSMPREGHGRFLGDRSLPHKKTHLRRRSSQLKIKIPDLTDVNAIDRWSRIVFPFTFSLFNLVYWLYYVN

SEQ ID NO: 33933 - protein, 388 aa, Homo sapiens
  Payload ID: 6690
  Gene Symbol: GABRB3
  Gene Name: gamma-aminobutyric acid (GABA) A receptor, beta 3
  Uniprot ID: P28472
  ENSP ID: ENSP00000439169
MYFQQYWRDKRLAYSGIPLNLTLDNRVADQLWVPDTYFLNDKKSFVHGVTVKNRMIRLHPDGTVLYGLRITTTAACMMDLRRYPLDEQNCTLEIESYGYTTDDIEFYWRGGDKAVTGVERIELPQFSIVEHRLVSRNVVFATGAYPRLSLSFRLKRNIGYFILQTYMPSILITILSWVSFWINYDASAARVALGITTVLTMTTINTHLRETLPKIPYVKAIDMYLMGCFVFVFLALLEYAFVNYIFFGRGPQRQKKLAEKTAKAKNDRSKSESNRVDAHGNILLTSLEVHNEMNEVSGGIGDTRNSAISFDNSGIQYRKQSMPREGHGRFLGDRSLPHKKTHLRRRSSQLKIKIPDLTDVNAIDRWSRIVFPFTFSLFNLVYWLYYVN

SEQ ID NO: 33934 - protein, 529 aa, Homo sapiens
  Payload ID: 6690
  Gene Symbol: GABRB3
  Gene Name: gamma-aminobutyric acid (GABA) A receptor, beta 3
  ENSP ID: ENSP00000442408
MQQLRRLWVLAAQPFCHLPERCRLFFEIGGISLAMPQCLLWICLAVWEARGDLPFIAENDAVLTVNWNAVKEHRTFYAIYETSVNDPGNMSFVKETVDKLLKGYDIRLRPDFGGPPVCVGMNIDIASIDMVSEVNMDYTLTMYFQQYWRDKRLAYSGIPLNLTLDNRVADQLWVPDTYFLNDKKSFVHGVTVKNRMIRLHPDGTVLYGLRITTTAACMMDLRRYPLDEQNCTLEIESYGYTTDDIEFYWRGGDKAVTGVERIELPQFSIVEHRLVSRNVVFATGAYPRLSLSFRLKRNIGYFILQTYMPSILITILSWVSFWINYDASAARVALGITTVLTMTTINTHLRETLPKIPYVKAIDMYLMGCFVFVFLALLEYAFVNYIFFGRGPQRQKKLAEKTAKAKNDRSKSESNRVDAHGNILLTSLEVHNEMNEVSGGIGDTRNSAISFDNSGIQYRKQSMPREGHGRFLGDRSLPHKKTHLRRRSSQLKIKIPDLTDVNAIDRWSRIVFPFTFSLFNLVYWLYYVN

SEQ ID NO: 33935 - protein, 105 aa, Homo sapiens
  Payload ID: 6690
  Gene Symbol: GABRB3
  Gene Name: gamma-aminobutyric acid (GABA) A receptor, beta 3
  ENSP ID: ENSP00000451077
MWGLAGGRLFGIFSAPVLVAVVCCAQSVNDPGNMSFVKETVDKLLKGYDIRLRPDFGGPPVCVGMNIDIASIDMVSEVNMNHHDSSMHDGPQEIPPGRAELHSGN

SEQ ID NO: 33936 - protein, 87 aa, Homo sapiens
  Payload ID: 6690
  Gene Symbol: GABRB3
  Gene Name: gamma-aminobutyric acid (GABA) A receptor, beta 3
  ENSP ID: ENSP00000452041
MWGLAGGRLFGIFSAPVLVAVVCCAQSVNDPGNMSFVKETVDKLLKGYDIRLRPDFGGPPVCVGMNIDIASIDMVSEVNMAMQELHS

SEQ ID NO: 33937 - protein, 44 aa, Homo sapiens
  Payload ID: 6690
  Gene Symbol: GABRB3
  Gene Name: gamma-aminobutyric acid (GABA) A receptor, beta 3
  ENSP ID: ENSP00000452159
  MOD_RES (1)..(1): Any amino acid
XLNDKKSFVHGVTVKNRMIRLHPDGTVLYGLRYYGPGLEEVWHS

SEQ ID NO: 33938 - protein, 388 aa, Homo sapiens; identical to SEQ ID NO: 33933
  Payload ID: 6690
  Gene Symbol: GABRB3
  Gene Name: gamma-aminobutyric acid (GABA) A receptor, beta 3
  Uniprot ID: P28472
  ENSP ID: ENSP00000481004

SEQ ID NO: 33939 - protein, 388 aa, Homo sapiens; identical to SEQ ID NO: 33933
  Payload ID: 6690
  Gene Symbol: GABRB3
  Gene Name: gamma-aminobutyric acid (GABA) A receptor, beta 3
  Uniprot ID: P28472
  ENSP ID: ENSP00000486819

SEQ ID NO: 33940 - protein, 452 aa, Homo sapiens [sequence omitted]

SEQ ID NO: 33941 - protein, 506 aa, Homo sapiens
  Payload ID: 6692
  Gene Symbol: GABRE
  Gene Name: gamma-aminobutyric acid (GABA) A receptor, epsilon
  Uniprot ID: P78334
  ENSP ID: ENSP00000359353
MLSKVLPVLLGILLILQSRVEGPQTESKNEASSRDVVYGPQPQPLENQLLSEETKSTETETGSRVGKLPEASRILNTILSNYDHKLRPGIGEKPTVVTVEISVNSLGPLSILDMEYTIDIIFSQTWYDERLCYNDTFESLVLNGNVVSQLWIPDTFFRNSKRTHEHEITMPNQMVRIYKDGKVLYTIRMTIDAGCSLHMLRFPMDSHSCPLSFSSFSYPENEMIYKWENFKLEINEKNSWKLFQFDFTGVSNKTEIITTPVGDFMVMTIFFNVSRRFGYVAFQNYVPSSVTTMLSWVSFWIKTESAPARTSLGITSVLTMTTLGTFSRKNFPRVSYITALDFYIAICFVFCFCALLEFAVLNFLIYNQTKAHASPKLRHPRINSRAHARTRARSRACARQHQEAFVCQIVTTEGSDGEERPSCSAQQPPSPGSPEGPRSLCSKLACCEWCKRFKKYFCMVPDCEGSTWQQGRLCIHVYRLDNYSRVVFPVTFFFFNVLYWLVCLNL

SEQ ID NO: 33942 - protein, 43 aa, Homo sapiens
  Payload ID: 6692
  Gene Symbol: GABRE
  Gene Name: gamma-aminobutyric acid (GABA) A receptor, epsilon
  ENSP ID: ENSP00000389384
MLSKVLPVLLGILLILQSRTCIQRSAQIISVQLMSCQNMTTAV

SEQ ID NO: 33943 - protein, 43 aa, Homo sapiens; identical to SEQ ID NO: 33942
  Payload ID: 6692
  Gene Symbol: GABRE
  Gene Name: gamma-aminobutyric acid (GABA) A receptor, epsilon
  ENSP ID: ENSP00000397335

SEQ ID NO: 33944 - protein, 465 aa, Homo sapiens
  Payload ID: 6693
  Gene Symbol: GABRG1
  Gene Name: gamma-aminobutyric acid (GABA) A receptor, gamma 1
  Uniprot ID: Q8N1C3
  ENSP ID: ENSP00000295452
MGPLKAFLFSPFLLRSQSRGVRLVFLLLTLHLGNCVDKADDEDDEDLTVNKTWVLAPKIHEGDITQILNSLLQGYDNKLRPDIGVRPTVIETDVYVNSIGPVDPINMEYTIDIIFAQTWFDSRLKFNSTMKVLMLNSNMVGKIWIPDTFFRNSRKSDAHWITTPNRLLRIWNDGRVLYTLRLTINAECYLQLHNFPMDEHSCPLEFSSYGYPKNEIEYKWKKPSVEVADPKYWRLYQFAFVGLRNSTEITHTISGDYVIMTIFFDLSRRMGYFTIQTYIPCILTVVLSWVSFWINKDAVPARTSLGITTVLTMTTLSTIARKSLPKVSYVTAMDLFVSVCFIFVFAALMEYGTLHYFTSNQKGKTATKDRKLKNKASMTPGLHPGSTLIPMNNISVPQEDDYGYQCLEGKDCASFFCCFEDCRTGSWREGRIHIRIAKIDSYSRIFFPTAFALFNLVYWVGYLYL

SEQ ID NO: 33945 - protein, 475 aa, Homo sapiens
  Payload ID: 6694
  Gene Symbol: GABRG2
  Gene Name: gamma-aminobutyric acid (GABA) A receptor, gamma 2
  Uniprot ID: P18507
  ENSP ID: ENSP00000349000
MSSPNIWSTGSSVYSTPVFSQKMTVWILLLLSLYPGFTSQKSDDDYEDYASNKTWVLTPKVPEGDVTVILNNLLEGYDNKLRPDIGVKPTLIHTDMYVNSIGPVNAINMEYTIDIFFAQTWYDRRLKFNSTIKVLRLNSNMVGKIWIPDTFFRNSKKADAHWITTPNRMLRIWNDGRVLYTLRLTIDAECQLQLHNFPMDEHSCPLEFSSYGYPREEIVYQWKRSSVEVGDTRSWRLYQFSFVGLRNTTEVVKTTSGDYVVMSVYFDLSRRMGYFTIQTYIPCTLIVVLSWVSFWINKDAVPARTSLGITTVLTMTTLSTIARKSLPKVSYVTAMDLFVSVCFIFVFSALVEYGTLHYFVSNRKPSKDKDKKKKNPLLRMFSFKAPTIDIRPRSATIQMNNATHLQERDEEYGYECLDGKDCASFFCCFEDCRTGAWRHGRIHIRIAKMDSYARIFFPTAFCLFNLVYWVSYLYL

SEQ ID NO: 33946 - protein, 467 aa, Homo sapiens
  Payload ID: 6694
  Gene Symbol: GABRG2
  Gene Name: gamma-aminobutyric acid (GABA) A receptor, gamma 2
  Uniprot ID: P18507
  ENSP ID: ENSP00000354651
MSSPNIWSTGSSVYSTPVFSQKMTVWILLLLSLYPGFTSQKSDDDYEDYASNKTWVLTPKVPEGDVTVILNNLLEGYDNKLRPDIGVKPTLIHTDMYVNSIGPVNAINMEYTIDIFFAQTWYDRRLKFNSTIKVLRLNSNMVGKIWIPDTFFRNSKKADAHWITTPNRMLRIWNDGRVLYTLRLTIDAECQLQLHNFPMDEHSCPLEFSSYGYPREEIVYQWKRSSVEVGDTRSWRLYQFSFVGLRNTTEVVKTTSGDYVVMSVYFDLSRRMGYFTIQTYIPCTLIVVLSWVSFWINKDAVPARTSLGITTVLTMTTLSTIARKSLPKVSYVTAMDLFVSVCFIFVFSALVEYGTLHYFVSNRKPSKDKDKKKKNPAPTIDIRPRSATIQMNNATHLQERDEEYGYECLDGKDCASFFCCFEDCRTGAWRHGRIHIRIAKMDSYARIFFPTAFCLFNLVYWVSYLYL

SEQ ID NO: 33947 - protein, 515 aa, Homo sapiens
  Payload ID: 6694
  Gene Symbol: GABRG2
  Gene Name: gamma-aminobutyric acid (GABA) A receptor, gamma 2
  Uniprot ID: P18507
  ENSP ID: ENSP00000410732
MSSPNIWSTGSSVYSTPVFSQKMTVWILLLLSLYPGFTSQKSDDDYEDYASNKTWVLTPKVPEGDVTVILNNLLEGYDNKLRPDIGVKPTLIHTDMYVNSIGPVNAINMEYTIDIFFAQTWYDRRLKFNSTIKVLRLNSNMVGKIWIPDTFFRNSKKADAHWITTPNRMLRIWNDGRVLYTLRLTIDAECQLQLHNFPMDEHSCPLEFSSWSRSIAQAGMCSGVISAHYSLRFWGSTDPPTLASRVAGISDGYPREEIVYQWKRSSVEVGDTRSWRLYQFSFVGLRNTTEVVKTTSGDYVVMSVYFDLSRRMGYFTIQTYIPCTLIVVLSWVSFWINKDAVPARTSLGITTVLTMTTLSTIARKSLPKVSYVTAMDLFVSVCFIFVFSALVEYGTLHYFVSNRKPSKDKDKKKKNPLLRMFSFKAPTIDIRPRSATIQMNNATHLQERDEEYGYECLDGKDCASFFCCFEDCRTGAWRHGRIHIRIAKMDSYARIFFPTAFCLFNLVYWVSYLYL

SEQ ID NO: 33948 - protein, 51 aa, Homo sapiens
  Payload ID: 6694
  Gene Symbol: GABRG2
  Gene Name: gamma-aminobutyric acid (GABA) A receptor, gamma 2
  ENSP ID: ENSP00000430124
MSSPNIWSTGSSVYSTPVFSQKMTVWILLLLSLYPGRKLSSYPHKLRFENE

SEQ ID NO: 33949 - protein, 222 aa, Homo sapiens
  Payload ID: 6694
  Gene Symbol: GABRG2
  Gene Name: gamma-aminobutyric acid (GABA) A receptor, gamma 2
  ENSP ID: ENSP00000430182
MYVNSIGPVNAINMEYTIDIFFAQTWYDRRLKFNSTIKVLRLNSNMVGKIWIPDTFFRNSKKADAHWITTPNRMLRIWNDGRVLYTLRLTIDAECQLQLHNFPMDEHSCPLEFSSYGYPREEIVYQWKRSSVEVGDTRSWRLYQFSFVGLRNTTEVVKTTSGDYVVMSVYFDLSRRMGYFTIQTYIPCTLIVVLSWVSFWINKDAVPARTSLGITTVLTMTT

SEQ ID NO: 33950 - protein, 111 aa, Homo sapiens
  Payload ID: 6694
  Gene Symbol: GABRG2
  Gene Name: gamma-aminobutyric acid (GABA) A receptor, gamma 2
  ENSP ID: ENSP00000430732
MSSPNIWSTGSSVYSTPVFSQKMTVWILLLLSLYPGFTSQKSDDDYEDYASNKTWVLTPKVPEGDVTVILNNLLEGYDNKLRPDIGVKPTLIHTDMYVNSIGPVNAINMHH

SEQ ID NO: 33951 - protein, 288 aa, Homo sapiens
  Payload ID: 6695
  Gene Symbol: GABRG3
  Gene Name: gamma-aminobutyric acid (GABA) A receptor, gamma 3
  ENSP ID: ENSP00000331912
MDEHSCPLIFSSYGYPKEEMIYRWRKNSVEAADQKSWRLYQFDFMGLRNTTEIVTTSAGDYVVMTIYFELSRRMGYFTIQTYIPCILTVVLSWVSFWIKKDATPARTALGITTVLTMTTLSTIARKSLPRVSYVTAMDLFVTVCFLFVFAALMEYATLNYYSSCRKPTTTKKTTSLLHPDSSRWIPERISLQAPSNYSLLDMRPPPTAMITLNNSVYWQEFEDTCVYECLDGKDCQSFFCCYEECKSGSWRKGRIHIDILELDSYSRVFFPTSFLLFNLVYWVGYLYL

SEQ ID NO: 33952 - protein, 169 aa, Homo sapiens
  Payload ID: 6695
  Gene Symbol: GABRG3
  Gene Name: gamma-aminobutyric acid (GABA) A receptor, gamma 3
  ENSP ID: ENSP00000390708
  MOD_RES (1)..(1): Any amino acid
XDYVVMTIYFELSRRMGYFTIQTYIPCILTVVLSWVSFWIKKDATPARTALGITTVLTMTTLSTIARKSLPRVSYVTAMDLFVTVCFLFVFAALMEYATLNYYSSCRKPTTTKKTTSLLHPDSSRWIPERISLQAPSKPSCCPACGLQGLPFRSLVSHPRISRAFCLPV

SEQ ID NO: 33953 - protein, 38 aa, Homo sapiens
  Payload ID: 6695
  Gene Symbol: GABRG3
  Gene Name: gamma-aminobutyric acid (GABA) A receptor, gamma 3
  ENSP ID: ENSP00000450976
  MOD_RES (1)..(1): Any amino acid
XAECQLQLHNFPMDEHSCPLIFSSSTILAFRLSLHAYR

SEQ ID NO: 33954 - protein, 258 aa, Homo sapiens
  Payload ID: 6695
  Gene Symbol: GABRG3
  Gene Name: gamma-aminobutyric acid (GABA) A receptor, gamma 3
  ENSP ID: ENSP00000451862
EAGVRGTEEDGCWVCNLESVSQSQTWQENKLSEYQIDIFFAQTWTDSRLRFNSTMKILTLNSNMVGLIWIPDTIFRNSKTAEAHWITTPNQLLRIWNDGKILYTLRLTINAECQLQLHNFPMDEHSCPLIFSSYGYPKEEMIYRWRKNSVEAADQKSWRLYQFDFMGLRNTTEIVTTSAGDYVVMTIYFELSRRMGYFTIQTYIPCILTVVLSWVSFWIKKDATPARTALGITTVLTMTTLSTIARKSLPRVSYVTAM

SEQ ID NO: 33955 - protein, 253 aa, Homo sapiens
  Payload ID: 6695
  Gene Symbol: GABRG3
  Gene Name: gamma-aminobutyric acid (GABA) A receptor, gamma 3
  Uniprot ID: Q99928
  ENSP ID: ENSP00000452244
MAPKLLLLLCLFSGLHARSRKVEEDEYEDSSSNQKWVLAPKSQDTDVTLILNKLLREYDKKLRPDIGIKPTVIDVDIYVNSIGPVSSINMEYQIDIFFAQTWTDSRLRFNSTMKILTLNSNMVGLIWIPDTIFRNSKTAEAHWITTPNQLLRIWNDGKILYTLRLTINAECQLQLHNFPMDEHSCPLIFSSYGYPKEEMIYRWRKNSVEAADQKSWRLYQFDFMGLRNTTEIVTTSAGRNLLKEAQLSKAREA

SEQ ID NO: 33956 - protein, 467 aa, Homo sapiens
  Payload ID: 6695
  Gene Symbol: GABRG3
  Gene Name: gamma-aminobutyric acid (GABA) A receptor, gamma 3
  Uniprot ID: Q99928
  ENSP ID: ENSP00000479113
MAPKLLLLLCLFSGLHARSRKVEEDEYEDSSSNQKWVLAPKSQDTDVTLILNKLLREYDKKLRPDIGIKPTVIDVDIYVNSIGPVSSINMEYQIDIFFAQTWTDSRLRFNSTMKILTLNSNMVGLIWIPDTIFRNSKTAEAHWITTPNQLLRIWNDGKILYTLRLTINAECQLQLHNFPMDEHSCPLIFSSYGYPKEEMIYRWRKNSVEAADQKSWRLYQFDFMGLRNTTEIVTTSAGDYVVMTIYFELSRRMGYFTIQTYIPCILTVVLSWVSFWIKKDATPARTALGITTVLTMTTLSTIARKSLPRVSYVTAMDLFVTVCFLFVFAALMEYATLNYYSSCRKPTTTKKTTSLLHPDSSRWIPERISLQAPSNYSLLDMRPPPTAMITLNNSVYWQEFEDTCVYECLDGKDCQSFFCCYEECKSGSWRKGRIHIDILELDSYSRVFFPTSFLLFNLVYWVGYLYL

SEQ ID NO: 33957 - protein, 440 aa, Homo sapiens
  Payload ID: 6696
  Gene Symbol: GABRP
  Gene Name: gamma-aminobutyric acid (GABA) A receptor, pi
  Uniprot ID: O00591
  ENSP ID: ENSP00000265294
MNYSLHLAFVCLSLFTERMCIQGSQFNVEVGRSDKLSLPGFENLTAGYNKFLRPNFGGEPVQIALTLDIASISSISESNMDYTATIYLRQRWMDQRLVFEGNKSFTLDARLVEFLWVPDTYIVESKKSFLHEVTVGNRLIRLFSNGTVLYALRITTTVACNMDLSKYPMDTQTCKLQLESWGYDGNDVEFTWLRGNDSVRGLEHLRLAQYTIERYFTLVTRSQQETGNYTRLVLQFELRRNVLYFILETYVPSTFLVVLSWVSFWISLDSVPARTCIGVTTVLSMTTLMIGSRTSLPNTNCFIKAIDVYLGICFSFVFGALLEYAVAHYSSLQQMAAKDRGTTKEVEEVSITNIINSSISSFKRKISFASIEISSDNVDYSDLTMKTSDKFKFVFREKMGRIVDYFTIQNPSNVDHYSKLLFPLIFMLANVFYWAYYMYF

SEQ ID NO: 33958 - protein, 92 aa, Homo sapiens
  Payload ID: 6696
  Gene Symbol: GABRP
  Gene Name: gamma-aminobutyric acid (GABA) A receptor, pi
  ENSP ID: ENSP00000428103
MNYSLHLAFVCLSLFTERMCIQGSQFNVEVGRSDKLSLPGFENLTAGYNKFLRPNFGGEPVQIALTLDIASISSISESNMDYTATIYLRQRW

SEQ ID NO: 33959 - protein, 171 aa, Homo sapiens
  Payload ID: 6696
  Gene Symbol: GABRP
  Gene Name: gamma-aminobutyric acid (GABA) A receptor, pi
  ENSP ID: ENSP00000428804
MNYSLHLAFVCLSLFTERMCIQGSQFNVEVGRSDKLSLPGFENLTAGYNKFLRPNFGGEPVQIALTLDIASISSISESNMDYTATIYLRQRWMDQRLVFEGNKSFTLDARLVEFLWVPDTYIVESKKSFLHEVTVGNRLIRLFSNGTVLYALRITTTVACNMDLSKYPMDT

SEQ ID NO: 33960 - protein, 59 aa, Homo sapiens
  Payload ID: 6696
  Gene Symbol: GABRP
  Gene Name: gamma-aminobutyric acid (GABA) A receptor, pi
  ENSP ID: ENSP00000429668
MNYSLHLAFVCLSLFTERMCIQGSQFNVEVGRSDKLSLPGFENLTAGYNKFLRPNFGGE

SEQ ID NO: 33961 - protein, 52 aa, Homo sapiens
  Payload ID: 6696
  Gene Symbol: GABRP
  Gene Name: gamma-aminobutyric acid (GABA) A receptor, pi
  ENSP ID: ENSP00000429815
MNYSLHLAFVCLSLFTERMCIQGSQFNVEVGRSDKLSLPGFENLTAGYNKFL

SEQ ID NO: 33962 - protein, 440 aa, Homo sapiens; identical to SEQ ID NO: 33957
  Payload ID: 6696
  Gene Symbol: GABRP
  Gene Name: gamma-aminobutyric acid (GABA) A receptor, pi
  Uniprot ID: O00591
  ENSP ID: ENSP00000430100

SEQ ID NO: 33963 - protein, 189 aa, Homo sapiens
  Payload ID: 6696
  Gene Symbol: GABRP
  Gene Name: gamma-aminobutyric acid (GABA) A receptor, pi
  ENSP ID: ENSP00000430188
MNYSLHLAFVCLSLFTERMCIQGSQFNVEVGRSDKLSLPGFENLTAGYNKFLRPNFGGEPVQIALTLDIASISSISESNMDYTATIYLRQRWMDQRLVFEGNKSFTLDARLVEFLWVPDTYIVESKKSFLHEVTVGNRLIRLFSNGTVLYALRITTTVACNMDLSKYPMDTQTCKLQLESWGYDGNDVE

SEQ ID NO: 33964 - protein, 289 aa, Homo sapiens
  Payload ID: 6696
  Gene Symbol: GABRP
  Gene Name: gamma-aminobutyric acid (GABA) A receptor, pi
  ENSP ID: ENSP00000430727
MNYSLHLAFVCLSLFTERMCIQGSQFNVEVGRSDKLSLPGFENLTAGYNKFLRPNFGGEPVQIALTLDIASISSISESNMDYTATIYLRQRWMDQRLVFEGNKSFTLDARLVEFLWVPDTYIVESKKSFLHEVTVGNRLIRLFSNGTVLYALRITTTVACNMDLSKYPMDTQTCKLQLESWGYDGNDVEFTWLRGNDSVRGLEHLRLAQYTIERYFTLVTRSQQETGNYTRLVLQFELRRNVLYFILETYVPSTFLVVLSWVSFWISLDSVPARTCIGDNKGSRRSQYY

SEQ ID NO: 33965 - protein, 349 aa, Homo sapiens
  Payload ID: 6696
  Gene Symbol: GABRP
  Gene Name: gamma-aminobutyric acid (GABA) A receptor, pi
  ENSP ID: ENSP00000430772
MNYSLHLAFVCLSLFTERMCIQGSQFNVEVGRSDKLSLPGFENLTAGYNKFLRPNFGGEPVQIALTLDIASISSISESNMDYTATIYLRQRWMDQRLVFEGNKSFTLDARLVEFLWVPDTYIVESKKSFLHEVTVGNRLIRLFSNGTVLYALRITTTVACNMDLSKYPMDTQTCKLQLESWGYDGNDVEFTWLRGNDSVRGLEHLRLAQYTIERYFTLVTRSQQETGNYTRLVLQFELRRNVLYFILETYVPSTFLVVLSWVSFWISLDSVPARTCIGVTTVLSMTTLMIGSRTSLPNTNCFIKAIDVYLGICFSFVFGALLEYAVAHYSSLQQMAAKDRQKICYLYAA

SEQ ID NO: 33966 - protein, 392 aa, Homo sapiens
  Payload ID: 6697
  Gene Symbol: GABRR1
  Gene Name: gamma-aminobutyric acid (GABA) A receptor, rho 1
  Uniprot ID: P24046
  ENSP ID: ENSP00000358463
MRPGFGGPAIPVGVDVQVESLDSISEVDMDFTMTLYLRHYWKDERLSFPSTNNLSMTFDGRLVKKIWVPDMFFVHSKRSFIHDTTTDNVMLRVQPDGKVLYSLRVTVTAMCNMDFSRFPLDTQTCSLEIESYAYTEDDLMLYWKKGNDSLKTDERISLSQFLIQEFHTTTKLAFYSSTGWYNRLYINFTLRRHIFFFLLQTYFPATLMVMLSWVSFWIDRRAVPARVPLGITTVLTMSTIITGVNASMPRVSYIKAVDIYLWVSFVFVFLSVLEYAAVNYLTTVQERKEQKLREKLPCTSGLPPPRTAMLDGNYSDGEVNDLDNYMPENGEKPDRMMVQLTLASERSSPQRKSQRSSYVSMRIDTHAIDKYSRIIFPAAYILFNLIYWSIFS

SEQ ID NO: 33967 - protein, 462 aa, Homo sapiens
  Payload ID: 6697
  Gene Symbol: GABRR1
  Gene Name: gamma-aminobutyric acid (GABA) A receptor, rho 1
  Uniprot ID: P24046
  ENSP ID: ENSP00000394687
MLAVPNMRFGIFLLWWGWVLATESRMHWPGREVHEMSKKGSPILRRSPDITKSPLTKSEQLLRIDDHDFSMRPGFGGPAIPVGVDVQVESLDSISEVDMDFTMTLYLRHYWKDERLSFPSTNNLSMTFDGRLVKKIWVPDMFFVHSKRSFIHDTTTDNVMLRVQPDGKVLYSLRVTVTAMCNMDFSRFPLDTQTCSLEIESYAYTEDDLMLYWKKGNDSLKTDERISLSQFLIQEFHTTTKLAFYSSTGWYNRLYINFTLRRHIFFFLLQTYFPATLMVMLSWVSFWIDRRAVPARVPLGITTVLTMSTIITGVNASMPRVSYIKAVDIYLWVSFVFVFLSVLEYAAVNYLTTVQERKEQKLREKLPCTSGLPPPRTAMLDGNYSDGEVNDLDNYMPENGEKPDRMMVQLTLASERSSPQRKSQRSSYVSMRIDTHAIDKYSRIIFPAAYILFNLIYWSIFS

SEQ ID NO: 33968 - protein, 45 aa, Homo sapiens
  Payload ID: 6697
  Gene Symbol: GABRR1
  Gene Name: gamma-aminobutyric acid (GABA) A receptor, rho 1
  ENSP ID: ENSP00000410130
MLAVPNMRFGIFLLWWGWVLATESRMHWPGREVHEMSKKGRIEAS

SEQ ID NO: 33969 - protein, 479 aa, Homo sapiens
  Payload ID: 6697
  Gene Symbol: GABRR1
  Gene Name: gamma-aminobutyric acid (GABA) A receptor, rho 1
  Uniprot ID: P24046
  ENSP ID: ENSP00000412673
MLAVPNMRFGIFLLWWGWVLATESRMHWPGREVHEMSKKGRPQRQRREVHEDAHKQVSPILRRSPDITKSPLTKSEQLLRIDDHDFSMRPGFGGPAIPVGVDVQVESLDSISEVDMDFTMTLYLRHYWKDERLSFPSTNNLSMTFDGRLVKKIWVPDMFFVHSKRSFIHDTTTDNVMLRVQPDGKVLYSLRVTVTAMCNMDFSRFPLDTQTCSLEIESYAYTEDDLMLYWKKGNDSLKTDERISLSQFLIQEFHTTTKLAFYSSTGWYNRLYINFTLRRHIFFFLLQTYFPATLMVMLSWVSFWIDRRAVPARVPLGITTVLTMSTIITGVNASMPRVSYIKAVDIYLWVSFVFVFLSVLEYAAVNYLTTVQERKEQKLREKLPCTSGLPPPRTAMLDGNYSDGEVNDLDNYMPENGEKPDRMMVQLTLASERSSPQRKSQRSSYVSMRIDTHAIDKYSRIIFPAAYILFNLIYWSIFS

SEQ ID NO: 33970 - protein, 392 aa, Homo sapiens; identical to SEQ ID NO: 33966
  Payload ID: 6697
  Gene Symbol: GABRR1
  Gene Name: gamma-aminobutyric acid (GABA) A receptor, rho 1
  Uniprot ID: P24046
  ENSP ID: ENSP00000478846

SEQ ID NO: 33971 - protein, 392 aa, Homo sapiens; identical to SEQ ID NO: 33966
  Payload ID: 6697
  Gene Symbol: GABRR1
  Gene Name: gamma-aminobutyric acid (GABA) A receptor, rho 1
  Uniprot ID: P24046
  ENSP ID: ENSP00000481986

SEQ ID NO: 33972 - protein, 465 aa, Homo sapiens
  Payload ID: 6698
  Gene Symbol: GABRR2
  Gene Name: gamma-aminobutyric acid (GABA) A receptor, rho 2
  Uniprot ID: P28476
  ENSP ID: ENSP00000386029
MPYFTRLILFLFCLMVLVESRKPKRKRWTGQVEMPKPSHLYKKNLDVTKIRKGKPQQLLRVDEHDFSMRPAFGGPAIPVGVDVQVESLDSISEVDMDFTMTLYLRHYWKDERLAFSSASNKSMTFDGRLVKKIWVPDVFFVHSKRSFTHDTTTDNIMLRVFPDGHVLYSMRITVTAMCNMDFSHFPLDSQTCSLELESYAYTDEDLMLYWKNGDESLKTDEKISLSQFLIQKFHTTSRLAFYSSTGWYNRLYINFTLRRHIFFFLLQTYFPATLMVMLSWVSFWIDRRAVPARVSLGITTVLTMTTIITGVNASMPRVSYVKAVDIYLWVSFVFVFLSVLEYAAVNYLTTVQERKERKLREKFPCMCGMLHSKTMMLDGSYSESEANSLAGYPRSHILTEEERQDKIVVHLGLSGEANAARKKGLLKGQTGFRIFQNTHAIDKYSRLIFPASYIFFNLIYWSVFS

SEQ ID NO: 33973 - protein, 467 aa, Homo sapiens
  Payload ID: 6699
  Gene Symbol: GABRR3
  Gene Name: gamma-aminobutyric acid (GABA) A receptor, rho 3 (gene/pseudogene)
  Uniprot ID: A8MPY1
  ENSP ID: ENSP00000420790
MVLAFQLVSFTYIWIILKPNVCAASNIKMTHQRCSSSMKQTCKQETRMKKDDSTKARPQKYEQLLHIEDNDFAMRPGFGGSPVPVGIDVHVESIDSISETNMDFTMTFYLRHYWKDERLSFPSTANKSMTFDHRLTRKIWVPDIFFVHSKRSFIHDTTMENIMLRVHPDGNVLLSLRITVSAMCFMDFSRFPLDTQNCSLELESYAYNEDDLMLYWKHGNKSLNTEEHMSLSQFFIEDFSASSGLAFYSSTGWYNRLFINFVLRRHVFFFVLQTYFPAILMVMLSWVSFWIDRRAVPARVSLGITTVLTMSTIITAVSASMPQVSYLKAVDVYLWVSSLFVFLSVIEYAAVNYLTTVEERKQFKKTGKISRMYNIDAVQAMAFDGCYHDSEIDMDQTSLSLNSEDFMRRKSICSPSTDSSRIKRRKSLGGHVGRIILENNHVIDTYSRILFPIVYILFNLFYWGVYV

SEQ ID NO: 33974 - protein, 467 aa, Homo sapiens; identical to SEQ ID NO: 33973
  Payload ID: 6699
  Gene Symbol: GABRR3
  Gene Name: gamma-aminobutyric acid (GABA) A receptor, rho 3 (gene/pseudogene)
  Uniprot ID: A8MPY1
  ENSP ID: ENSP00000481321

SEQ ID NO: 33975 - protein, 632 aa, Homo sapiens [sequence omitted]

SEQ ID NO: 33976 - protein, 844 aa, Homo sapiens
  Payload ID: 6701
  Gene Symbol: GABBR1
  Gene Name: gamma-aminobutyric acid (GABA) B receptor, 1
  Uniprot ID: Q9UBS5
  ENSP ID: ENSP00000348248
MGPGAPFARVGWPLPLLVVMAAGVAPVWASHSPHLPRPHSRVPPHPSSERRAVYIGALFPMSGGWPGGQACQPAVEMALEDVNSRRDILPDYELKLIHHDSKCDPGQATKYLYELLYNDPIKIILMPGCSSVSTLVAEAARMWNLIVLSYGSSSPALSNRQRFPTFFRTHPSATLHNPTRVKLFEKWGWKKIATIQQTTEVFTSTLDDLEERVKEAGIEITFRQSFFSDPAVPVKNLKRQDARIIVGLFYETEARKVFCEVYKERLFGKKYVWFLIGWYADNWFKIYDPSINCTVDEMTEAVEGHITTEIVMLNPANTRSISNMTSQEFVEKLTKRLKRHPEETGGFQEAPLAYDAIWALALALNKTSGGGGRSGVRLEDFNYNNQTITDQIYRAMNSSSFEGVSGHVVFDASGSRMAWTLIEQLQGGSYKKIGYYDSTKDDLSWSKTDKWIGGSPPADQTLVIKTFRFLSQKLFISVSVLSSLGIVLAVVCLSFNIYNSHVRYIQNSQPNLNNLTAVGCSLALAAVFPLGLDGYHIGRNQFPFVCQARLWLLGLGFSLGYGSMFTKIWWVHTVFTKKEEKKEWRKTLEPWKLYATVGLLVGMDVLTLAIWQIVDPLHRTIETFAKEEPKEDIDVSILPQLEHCSSRKMNTWLGIFYGYKGLLLLLGIFLAYETKSVSTEKINDHRAVGMAIYNVAVLCLITAPVTMILSSQQDAAFAFASLAIVFSSYITLVVLFVPKMRRLITRGEWQSEAQDTMKTGSSTNNNEEEKSRLLEKENRELEKIIAEKEERVSELRHQLQSRQQLRSRRHPPTPPEPSGGLPRGPPEPPDRLSCDGSRVHLLYK

SEQ ID NO: 33977 - protein, 578 aa, Homo sapiens
  Payload ID: 6701
  Gene Symbol: GABBR1
  Gene Name: gamma-aminobutyric acid (GABA) B receptor, 1
  Uniprot ID: Q9UBS5
  ENSP ID: ENSP00000366176
MLLLLLLAPLFLRPPGAGGAQTPNATSEGCQIIHPPWEGGIRYRGLTRDQVKAINFLPVDYEIEYVCRGEREVVGPKVRKCLANGSWTDMDTPSRCVRICSKSYLTLENGKVFLTGGDLPALDGARVDFRCDPDFHLVGSSRSICSQGQWSTPKPHCQVNRTPHSERRAVYIGALFPMSGGWPGGQACQPAVEMALEDVNSRRDILPDYELKLIHHDSKCDPGQATKYLYELLYNDPIKIILMPGCSSVSTLVAEAARMWNLIVLSYGSSSPALSNRQRFPTFFRTHPSATLHNPTRVKLFEKWGWKKIATIQQTTEVFTSTLDDLEERVKEAGIEITFRQSFFSDPAVPVKNLKRQDARIIVGLFYETEARKVFCEVYKERLFGKKYVWFLIGWYADNWFKIYDPSINCTVDEMTEAVEGHITTEIVMLNPANTRSISNMTSQEFVEKLTKRLKRHPEETGGFQEAPLAYDAIWALALALNKTSGGGGRSGVRLEDFNYNNQTITDQIYRAMNSSSFEGVSGHVVFDASGSRMAWTLIEQLQGGSYKKIGYYDSTKDDLSWSKTDKWIVISRTHSPT

SEQ ID NO: 33978 - protein, 844 aa, Homo sapiens; identical to SEQ ID NO: 33976
  Payload ID: 6701
  Gene Symbol: GABBR1
  Gene Name: gamma-aminobutyric acid (GABA) B receptor, 1
  Uniprot ID: Q9UBS5
  ENSP ID: ENSP00000366211

SEQ ID NO: 33979 - protein, 899 aa, Homo sapiens
  Payload ID: 6701
  Gene Symbol: GABBR1
  Gene Name: gamma-aminobutyric acid (GABA) B receptor, 1
  Uniprot ID: Q9UBS5
  ENSP ID: ENSP00000366215
MLLLLLLAPLFLRPPGAGGAQTPNATSEGCQIIHPPWEGGIRYRGLTRDQVKAINFLPVDYEIEYVCRGEREVVGPKVRKCLANGSWTDMDTPSRCVNRTPHSERRAVYIGALFPMSGGWPGGQACQPAVEMALEDVNSRRDILPDYELKLIHHDSKCDPGQATKYLYELLYNDPIKIILMPGCSSVSTLVAEAARMWNLIVLSYGSSSPALSNRQRFPTFFRTHPSATLHNPTRVKLFEKWGWKKIATIQQTTEVFTSTLDDLEERVKEAGIEITFRQSFFSDPAVPVKNLKRQDARIIVGLFYETEARKVFCEVYKERLFGKKYVWFLIGWYADNWFKIYDPSINCTVDEMTEAVEGHITTEIVMLNPANTRSISNMTSQEFVEKLTKRLKRHPEETGGFQEAPLAYDAIWALALALNKTSGGGGRSGVRLEDFNYNNQTITDQIYRAMNSSSFEGVSGHVVFDASGSRMAWTLIEQLQGGSYKKIGYYDSTKDDLSWSKTDKWIGGSPPADQTLVIKTFRFLSQKLFISVSVLSSLGIVLAVVCLSFNIYNSHVRYIQNSQPNLNNLTAVGCSLALAAVFPLGLDGYHIGRNQFPFVCQARLWLLGLGFSLGYGSMFTKIWWVHTVFTKKEEKKEWRKTLEPWKLYATVGLLVGMDVLTLAIWQIVDPLHRTIETFAKEEPKEDIDVSILPQLEHCSSRKMNTWLGIFYGYKGLLLLLGIFLAYETKSVSTEKINDHRAVGMAIYNVAVLCLITAPVTMILSSQQDAAFAFASLAIVFSSYITLVVLFVPKMRRLITRGEWQSEAQDTMKTGSSTNNNEEEKSRLLEKENRELEKIIAEKEERVSELRHQLQSRQQLRSRRHPPTPPEPSGGLPRGPPEPPDRLSCDGSRVHLLYK

SEQ ID NO: 33980 - protein, 961 aa, Homo sapiens
  Payload ID: 6701
  Gene Symbol: GABBR1
  Gene Name: gamma-aminobutyric acid (GABA) B receptor, 1
  Uniprot ID: Q9UBS5
  ENSP ID: ENSP00000366233
MLLLLLLAPLFLRPPGAGGAQTPNATSEGCQIIHPPWEGGIRYRGLTRDQVKAINFLPVDYEIEYVCRGEREVVGPKVRKCLANGSWTDMDTPSRCVRICSKSYLTLENGKVFLTGGDLPALDGARVDFRCDPDFHLVGSSRSICSQGQWSTPKPHCQVNRTPHSERRAVYIGALFPMSGGWPGGQACQPAVEMALEDVNSRRDILPDYELKLIHHDSKCDPGQATKYLYELLYNDPIKIILMPGCSSVSTLVAEAARMWNLIVLSYGSSSPALSNRQRFPTFFRTHPSATLHNPTRVKLFEKWGWKKIATIQQTTEVFTSTLDDLEERVKEAGIEITFRQSFFSDPAVPVKNLKRQDARIIVGLFYETEARKVFCEVYKERLFGKKYVWFLIGWYADNWFKIYDPSINCTVDEMTEAVEGHITTEIVMLNPANTRSISNMTSQEFVEKLTKRLKRHPEETGGFQEAPLAYDAIWALALALNKTSGGGGRSGVRLEDFNYNNQTITDQIYRAMNSSSFEGVSGHVVFDASGSRMAWTLIEQLQGGSYKKIGYYDSTKDDLSWSKTDKWIGGSPPADQTLVIKTFRFLSQKLFISVSVLSSLGIVLAVVCLSFNIYNSHVRYIQNSQPNLNNLTAVGCSLALAAVFPLGLDGYHIGRNQFPFVCQARLWLLGLGFSLGYGSMFTKIWWVHTVFTKKEEKKEWRKTLEPWKLYATVGLLVGMDVLTLAIWQIVDPLHRTIETFAKEEPKEDIDVSILPQLEHCSSRKMNTWLGIFYGYKGLLLLLGIFLAYETKSVSTEKINDHRAVGMAIYNVAVLCLITAPVTMILSSQQDAAFAFASLAIVFSSYITLVVLFVPKMRRLITRGEWQSEAQDTMKTGSSTNNNEEEKSRLLEKENRELEKIIAEKEERVSELRHQLQSRQQLRSRRHPPTPPEPSGGLPRGPPEPPDRLSCDGSRVHLLYK

SEQ ID NO: 33981 - protein, 844 aa, Homo sapiens; identical to SEQ ID NO: 33976
  Payload ID: 6701
  Gene Symbol: GABBR1
  Gene Name: gamma-aminobutyric acid (GABA) B receptor, 1
  Uniprot ID: Q9UBS5
  ENSP ID: ENSP00000373029

SEQ ID NO: 33982 - protein, 899 aa, Homo sapiens; identical to SEQ ID NO: 33979
  Payload ID: 6701
  Gene Symbol: GABBR1
  Gene Name: gamma-aminobutyric acid (GABA) B receptor, 1
  Uniprot ID: Q9UBS5
  ENSP ID: ENSP00000373033

SEQ ID NO: 33983 - protein, 961 aa, Homo sapiens; identical to SEQ ID NO: 33980
  Payload ID: 6701
  Gene Symbol: GABBR1
  Gene Name: gamma-aminobutyric acid (GABA) B receptor, 1
  Uniprot ID: Q9UBS5
  ENSP ID: ENSP00000373034

SEQ ID NO: 33984 - protein, 844 aa, Homo sapiens; identical to SEQ ID NO: 33976
  Payload ID: 6701
  Gene Symbol: GABBR1
  Gene Name: gamma-aminobutyric acid (GABA) B receptor, 1
  Uniprot ID: Q9UBS5
  ENSP ID: ENSP00000373035

SEQ ID NO: 33985 - protein, 844 aa, Homo sapiens; identical to SEQ ID NO: 33976
  Payload ID: 6701
  Gene Symbol: GABBR1
  Gene Name: gamma-aminobutyric acid (GABA) B receptor, 1
  Uniprot ID: Q9UBS5
  ENSP ID: ENSP00000373132

SEQ ID NO: 33986 - protein, 899 aa, Homo sapiens; identical to SEQ ID NO: 33979
  Payload ID: 6701
  Gene Symbol: GABBR1
  Gene Name: gamma-aminobutyric acid (GABA) B receptor, 1
  Uniprot ID: Q9UBS5
  ENSP ID: ENSP00000373133

SEQ ID NO: 33987 - protein, 961 aa, Homo sapiens; identical to SEQ ID NO: 33980
  Payload ID: 6701
  Gene Symbol: GABBR1
  Gene Name: gamma-aminobutyric acid (GABA) B receptor, 1
  Uniprot ID: Q9UBS5
  ENSP ID: ENSP00000373134

SEQ ID NO: 33988 - protein, 844 aa, Homo sapiens; identical to SEQ ID NO: 33976
  Payload ID: 6701
  Gene Symbol: GABBR1
  Gene Name: gamma-aminobutyric acid (GABA) B receptor, 1
  Uniprot ID: Q9UBS5
  ENSP ID: ENSP00000373135

SEQ ID NO: 33989 - protein, 961 aa, Homo sapiens; identical to SEQ ID NO: 33980
  Payload ID: 6701
  Gene Symbol: GABBR1
  Gene Name: gamma-aminobutyric acid (GABA) B receptor, 1
  Uniprot ID: Q9UBS5
  ENSP ID: ENSP00000388035

SEQ ID NO: 33990 - protein, 844 aa, Homo sapiens; identical to SEQ ID NO: 33976
  Payload ID: 6701
  Gene Symbol: GABBR1
  Gene Name: gamma-aminobutyric acid (GABA) B receptor, 1
  Uniprot ID: Q9UBS5
  ENSP ID: ENSP00000391572

SEQ ID NO: 33991 - protein, 844 aa, Homo sapiens; identical to SEQ ID NO: 33976
  Payload ID: 6701
  Gene Symbol: GABBR1
  Gene Name: gamma-aminobutyric acid (GABA) B receptor, 1
  Uniprot ID: Q9UBS5
  ENSP ID: ENSP00000394528

SEQ ID NO: 33992 - protein, 899 aa, Homo sapiens; identical to SEQ ID NO: 33979
  Payload ID: 6701
  Gene Symbol: GABBR1
  Gene Name: gamma-aminobutyric acid (GABA) B receptor, 1
  Uniprot ID: Q9UBS5
  ENSP ID: ENSP00000399318

SEQ ID NO: 33993 - protein, 899 aa, Homo sapiens; identical to SEQ ID NO: 33979
  Payload ID: 6701
  Gene Symbol: GABBR1
  Gene Name: gamma-aminobutyric acid (GABA) B receptor, 1
  Uniprot ID: Q9UBS5
  ENSP ID: ENSP00000399861

SEQ ID NO: 33994 - protein, 844 aa, Homo sapiens; identical to SEQ ID NO: 33976
  Payload ID: 6701
  Gene Symbol: GABBR1
  Gene Name: gamma-aminobutyric acid (GABA) B receptor, 1
  Uniprot ID: Q9UBS5
  ENSP ID: ENSP00000405709

SEQ ID NO: 33995 - protein, 961 aa, Homo sapiens; identical to SEQ ID NO: 33980
  Payload ID: 6701
  Gene Symbol: GABBR1
  Gene Name: gamma-aminobutyric acid (GABA) B receptor, 1
  Uniprot ID: Q9UBS5
  ENSP ID: ENSP00000406066

SEQ ID NO: 33996 - protein, 844 aa, Homo sapiens; identical to SEQ ID NO: 33976
  Payload ID: 6701
  Gene Symbol: GABBR1
  Gene Name: gamma-aminobutyric acid (GABA) B receptor, 1
  Uniprot ID: Q9UBS5
  ENSP ID: ENSP00000406285

SEQ ID NO: 33997 - protein, 844 aa, Homo sapiens; identical to SEQ ID NO: 33976
  Payload ID: 6701
  Gene Symbol: GABBR1
  Gene Name: gamma-aminobutyric acid (GABA) B receptor, 1
  Uniprot ID: Q9UBS5
  ENSP ID: ENSP00000406499

SEQ ID NO: 33998 - protein, 844 aa, Homo sapiens; identical to SEQ ID NO: 33976
  Payload ID: 6701
  Gene Symbol: GABBR1
  Gene Name: gamma-aminobutyric acid (GABA) B receptor, 1
  Uniprot ID: Q9UBS5
  ENSP ID: ENSP00000408938

SEQ ID NO: 33999 - protein, 844 aa, Homo sapiens; identical to SEQ ID NO: 33976
  Payload ID: 6701
  Gene Symbol: GABBR1
  Gene Name: gamma-aminobutyric acid (GABA) B receptor, 1
  Uniprot ID: Q9UBS5
  ENSP ID: ENSP00000411263

SEQ ID NO: 34000 - protein, 961 aa, Homo sapiens; identical to SEQ ID NO: 33980
  Payload ID: 6701
  Gene Symbol: GABBR1
  Gene Name: gamma-aminobutyric acid (GABA) B receptor, 1
  Uniprot ID: Q9UBS5
  ENSP ID: ENSP00000411286

SEQ ID NO: 34001 - protein, 899 aa, Homo sapiens
  Payload ID: 6701
  Gene Symbol: GABBR1
  Gene Name: gamma-aminobutyric acid (GABA) B receptor, 1
  ENSP ID: ENSP00000412044
MLLLLLLAPLFLRPPGAGGVQTPNATSEGCQIIHPPWEGGIRYRGLTRDQVKAINFLPVDYEIEYVCRGEREVVGPKVRKCLANGSWTDMDTPSRCVNRTPHSERRAVYIGALFPMSGGWPGGQACQPAVEMALEDVNSRRDILPDYELKLIHHDSKCDPGQATKYLYELLYNDPIKIILMPGCSSVSTLVAEAARMWNLIVLSYGSSSPALSNRQRFPTFFRTHPSATLHNPTRVKLFEKWGWKKIATIQQTTEVFTSTLDDLEERVKEAGIEITFRQSFFSDPAVPVKNLKRQDARIIVGLFYETEARKVFCEVYKERLFGKKYVWFLIGWYADNWFKIYDPSINCTVDEMTEAVEGHITTEIVMLNPANTRSISNMTSQEFVEKLTKRLKRHPEETGGFQEAPLAYDAIWALALALNKTSGGGGRSGVRLEDFNYNNQTITDQIYRAMNSSSFEGVSGHVVFDASGSRMAWTLIEQLQGGSYKKIGYYDSTKDDLSWSKTDKWIGGSPPADQTLVIKTFRFLSQKLFISVSVLSSLGIVLAVVCLSFNIYNSHVRYIQNSQPNLNNLTAVGCSLALAAVFPLGLDGYHIGRNQFPFVCQARLWLLGLGFSLGYGSMFTKIWWVHTVFTKKEEKKEWRKTLEPWKLYATVGLLVGMDVLTLAIWQIVDPLHRTIETFAKEEPKEDIDVSILPQLEHCSSRKMNTWLGIFYGYKGLLLLLGIFLAYETKSVSTEKINDHRAVGMAIYNVAVLCLITAPVTMILSSQQDAAFAFASLAIVFSSYITLVVLFVPKMRRLITRGEWQSEAQDTMKTGSSTNNNEEEKSRLLEKENRELEKIIAEKEERVSELRHQLQSRQQLRSRRHPPTPPEPSGGLPRGPPEPPDRLSCDGSRVHLLYK

SEQ ID NO: 34002 - protein, 899 aa, Homo sapiens; identical to SEQ ID NO: 33979
  Payload ID: 6701
  Gene Symbol: GABBR1
  Gene Name: gamma-aminobutyric acid (GABA) B receptor, 1
  Uniprot ID: Q9UBS5
  ENSP ID: ENSP00000412167

SEQ ID NO: 34003 - protein, 961 aa, Homo sapiens
  Payload ID: 6701
  Gene Symbol: GABBR1
  Gene Name: gamma-aminobutyric acid (GABA) B receptor, 1
  ENSP ID: ENSP00000416731
MLLLLLLAPLFLRPPGAGGVQTPNATSEGCQIIHPPWEGGIRYRGLTRDQVKAINFLPVDYEIEYVCRGEREVVGPKVRKCLANGSWTDMDTPSRCVRICSKSYLTLENGKVFLTGGDLPALDGARVDFRCDPDFHLVGSSRSICSQGQWSTPKPHCQVNRTPHSERRAVYIGALFPMSGGWPGGQACQPAVEMALEDVNSRRDILPDYELKLIHHDSKCDPGQATKYLYELLYNDPIKIILMPGCSSVSTLVAEAARMWNLIVLSYGSSSPALSNRQRFPTFFRTHPSATLHNPTRVKLFEKWGWKKIATIQQTTEVFTSTLDDLEERVKEAGIEITFRQSFFSDPAVPVKNLKRQDARIIVGLFYETEARKVFCEVYKERLFGKKYVWFLIGWYADNWFKIYDPSINCTVDEMTEAVEGHITTEIVMLNPANTRSISNMTSQEFVEKLTKRLKRHPEETGGFQEAPLAYDAIWALALALNKTSGGGGRSGVRLEDFNYNNQTITDQIYRAMNSSSFEGVSGHVVFDASGSRMAWTLIEQLQGGSYKKIGYYDSTKDDLSWSKTDKWIGGSPPADQTLVIKTFRFLSQKLFISVSVLSSLGIVLAVVCLSFNIYNSHVRYIQNSQPNLNNLTAVGCSLALAAVFPLGLDGYHIGRNQFPFVCQARLWLLGLGFSLGYGSMFTKIWWVHTVFTKKEEKKEWRKTLEPWKLYATVGLLVGMDVLTLAIWQIVDPLHRTIETFAKEEPKEDIDVSILPQLEHCSSRKMNTWLGIFYGYKGLLLLLGIFLAYETKSVSTEKINDHRAVGMAIYNVAVLCLITAPVTMILSSQQDAAFAFASLAIVFSSYITLVVLFVPKMRRLITRGEWQSEAQDTMKTGSSTNNNEEEKSRLLEKENRELEKIIAEKEERVSELRHQLQSRQQLRSRRHPPTPPEPSGGLPRGPPEPPDRLSCDGSRVHLLYK

SEQ ID NO: 34004 - protein, 844 aa, Homo sapiens; identical to SEQ ID NO: 33976
  Payload ID: 6701
  Gene Symbol: GABBR1
  Gene Name: gamma-aminobutyric acid (GABA) B receptor, 1
  Uniprot ID: Q9UBS5
  ENSP ID: ENSP00000416903

SEQ ID NO: 34005 - protein, 133 aa, Homo sapiens
  Payload ID: 6701
  Gene Symbol: GABBR1
  Gene Name: gamma-aminobutyric acid (GABA) B receptor, 1
  ENSP ID: ENSP00000417332
MPGAWMLLLLLLAPLFLRPPGAGGAQTPNATSEGCQIIHPPWEGGIRYRGLTRDQVKAINFLPVDYEIEYVCRGEREVVGPKVRKCLANGSWTDMDTPSRCVRICSKSYLTLENGKVFLTGGDLPALDGARVD

SEQ ID NO: 34006 - protein, 137 aa, Homo sapiens
  Payload ID: 6701
  Gene Symbol: GABBR1
  Gene Name: gamma-aminobutyric acid (GABA) B receptor, 1
  ENSP ID: ENSP00000417478
MLLLLLLAPLFLRPPGAGGAQTPNATSEGCQIIHPPWEGGIRYRGLTRDQVKAINFLPVDYEIEYVCRGEREVVGPKVRKCLANGSWTDMDTPSRCVRICSKSYLTLENGKVFLTGGDLPALDGARVDFRCDPDFHL

SEQ ID NO: 34007 - protein, 97 aa, Homo sapiens
  Payload ID: 6701
  Gene Symbol: GABBR1
  Gene Name: gamma-aminobutyric acid (GABA) B receptor, 1
  ENSP ID: ENSP00000417663
MLLLLLLAPLFLRPPGAGGAQTPNATSEGCQIIHPPWEGGIRYRGLTRDQVKAINFLPVDYEIEYVCRGEREVVGPKVRKCLANGSWTDMDTPSRCV

SEQ ID NO: 34008 - protein, 578 aa, Homo sapiens; identical to SEQ ID NO: 33977
  Payload ID: 6701
  Gene Symbol: GABBR1
  Gene Name: gamma-aminobutyric acid (GABA) B receptor, 1
  Uniprot ID: Q9UBS5
  ENSP ID: ENSP00000419061

SEQ ID NO: 34009 - protein, 131 aa, Homo sapiens
  Payload ID: 6701
  Gene Symbol: GABBR1
  Gene Name: gamma-aminobutyric acid (GABA) B receptor, 1
  ENSP ID: ENSP00000419356
MLLLLLLAPLFLRPPGAGGAQTPNATSEGCQIIHPPWEGGIRYRGLTRDQVKAINFLPVDYEIEYVCRGEREVVGPKVRKCLANGSWTDMDTPSRCGTLPSETQASALPGLQHGQVWEGAGDQAREAGRQW

SEQ ID NO: 34010 - protein, 156 aa, Homo sapiens
  Payload ID: 6701
  Gene Symbol: GABBR1
  Gene Name: gamma-aminobutyric acid (GABA) B receptor, 1
  ENSP ID: ENSP00000419755
MLLLLLLAPLFLRPPGAGGAQTPNATSEGCQIIHPPWEGGIRYRGLTRDQVKAINFLPVDYEIEYVCRGEREVVGPKVRKCLANGSWTDMDTPSRCVRICSKSYLTLENGKVFLTGGDLPALDGARVDFRCDPDFHLVGSSRSICSQGQWSTPKPH

SEQ ID NO: 34011 - protein, 193 aa, Homo sapiens
  Payload ID: 6701
  Gene Symbol: GABBR1
  Gene Name: gamma-aminobutyric acid (GABA) B receptor, 1
  ENSP ID: ENSP00000420602
MLLLLLLAPLFLRPPGAGGAQTPNATSEGCQIIHPPWEGGIRYRGLTRDQVKAINFLPVDYEIEYVCRGEREVVGPKVRKCLANGSWTDMDTPSRCVRICSKSYLTLENGKVFLTGGDLPALDGARVDFRCDPDFHLVGSSRSICSQGQWSTPKPHCQGTLPSETQASALPGLQHGQVWEGAGDQAREAGRQW

SEQ ID NO: 34012 - protein, 578 aa, Homo sapiens; identical to SEQ ID NO: 33977
  Payload ID: 6701
  Gene Symbol: GABBR1
  Gene Name: gamma-aminobutyric acid (GABA) B receptor, 1
  Uniprot ID: Q9UBS5
  ENSP ID: ENSP00000446983

SEQ ID NO: 34013 - protein, 578 aa, Homo sapiens; identical to SEQ ID NO: 33977
  Payload ID: 6701
  Gene Symbol: GABBR1
  Gene Name: gamma-aminobutyric acid (GABA) B receptor, 1
  Uniprot ID: Q9UBS5
  ENSP ID: ENSP00000448531

SEQ ID NO: 34014 - protein, 578 aa, Homo sapiens; identical to SEQ ID NO: 33977
  Payload ID: 6701
  Gene Symbol: GABBR1
  Gene Name: gamma-aminobutyric acid (GABA) B receptor, 1
  Uniprot ID: Q9UBS5
  ENSP ID: ENSP00000448654

SEQ ID NO: 34015 - protein, 578 aa, Homo sapiens
  Payload ID: 6701
  Gene Symbol: GABBR1
  Gene Name: gamma-aminobutyric acid (GABA) B receptor, 1
  ENSP ID: ENSP00000448763
MLLLLLLAPLFLRPPGAGGVQTPNATSEGCQIIHPPWEGGIRYRGLTRDQVKAINFLPVDYEIEYVCRGEREVVGPKVRKCLANGSWTDMDTPSRCVRICSKSYLTLENGKVFLTGGDLPALDGARVDFRCDPDFHLVGSSRSICSQGQWSTPKPHCQVNRTPHSERRAVYIGALFPMSGGWPGGQACQPAVEMALEDVNSRRDILPDYELKLIHHDSKCDPGQATKYLYELLYNDPIKIILMPGCSSVSTLVAEAARMWNLIVLSYGSSSPALSNRQRFPTFFRTHPSATLHNPTRVKLFEKWGWKKIATIQQTTEVFTSTLDDLEERVKEAGIEITFRQSFFSDPAVPVKNLKRQDARIIVGLFYETEARKVFCEVYKERLFGKKYVWFLIGWYADNWFKIYDPSINCTVDEMTEAVEGHITTEIVMLNPANTRSISNMTSQEFVEKLTKRLKRHPEETGGFQEAPLAYDAIWALALALNKTSGGGGRSGVRLEDFNYNNQTITDQIYRAMNSSSFEGVSGHVVFDASGSRMAWTLIEQLQGGSYKKIGYYDSTKDDLSWSKTDKWIVISRTHSPT

SEQ ID NO: 34016 - protein, 961 aa, Homo sapiens; identical to SEQ ID NO: 33980
  Payload ID: 6701
  Gene Symbol: GABBR1
  Gene Name: gamma-aminobutyric acid (GABA) B receptor, 1
  Uniprot ID: Q9UBS5
  ENSP ID: ENSP00000448999

SEQ ID NO: 34017 - protein, 578 aa, Homo sapiens; identical to SEQ ID NO: 33977
  Payload ID: 6701
  Gene Symbol: GABBR1
  Gene Name: gamma-aminobutyric acid (GABA) B receptor, 1
  Uniprot ID: Q9UBS5
  ENSP ID: ENSP00000449342

SEQ ID NO: 34018 - protein, 578 aa, Homo sapiens; identical to SEQ ID NO: 33977
  Payload ID: 6701
  Gene Symbol: GABBR1
  Gene Name: gamma-aminobutyric acid (GABA) B receptor, 1
  Uniprot ID: Q9UBS5
  ENSP ID: ENSP00000449449

SEQ ID NO: 34019 - protein, 941 aa, Homo sapiens
  Payload ID: 6702
  Gene Symbol: GABBR2
  Gene Name: gamma-aminobutyric acid (GABA) B receptor, 2
  Uniprot ID: O75899
  ENSP ID: ENSP00000259455
MASPRSSGQPGPPPPPPPPPARLLLLLLLPLLLPLAPGAWGWARGAPRPPPSSPPLSIMGLMPLTKEVAKGSIGRGVLPAVELAIEQIRNESLLRPYFLDLRLYDTECDNAKGLKAFYDAIKYGPNHLMVFGGVCPSVTSIIAESLQGWNLVQLSFAATTPVLADKKKYPYFFRTVPSDNAVNPAILKLLKHYQWKRVGTLTQDVQRFSEVRNDLTGVLYGEDIEISDTESFSNDPCTSVKKLKGNDVRIILGQFDQNMAAKVFCCAYEENMYGSKYQWIIPGWYEPSWWEQVHTEANSSRCLRKNLLAAMEGYIGVDFEPLSSKQIKTISGKTPQQYEREYNNKRSGVGPSKFHGYAYDGIWVIAKTLQRAMETLHASSRHQRIQDFNYTDHTLGRIILNAMNETNFFGVTGQVVFRNGERMGTIKFTQFQDSREVKVGEYNAVADTLEIINDTIRFQGSEPPKDKTIILEQLRKISLPLYSILSALTILGMIMASAFLFFNIKNRNQKLIKMSSPYMNNLIILGGMLSYASIFLFGLDGSFVSEKTFETLCTVRTWILTVGYTTAFGAMFAKTWRVHAIFKNVKMKKKIIKDQKLLVIVGGMLLIDLCILICWQAVDPLRRTVEKYSMEPDPAGRDISIRPLLEHCENTHMTIWLGIVYAYKGLLMLFGCFLAWETRNVSIPALNDSKYIGMSVYNVGIMCIIGAAVSFLTRDQPNVQFCIVALVIIFCSTITLCLVFVPKLITLRTNPDAATQNRRFQFTQNQKKEDSKTSTSVTSVNQASTSRLEGLQSENHRLRMKITELDKDLEEVTMQLQDTPEKTTYIKQNHYQELNDILNLGNFTESTDGGKAILKNHLDQNPQLQWNTTEPSRTCKDPIEDINSPEHIQRRLSLQLPILHHAYLPSIGGVDASCVSPCVSPTASPRHRHVPPSFRVMVSGL

SEQ ID NO: 34020 - protein, 183 aa, Homo sapiens
  Payload ID: 6702
  Gene Symbol: GABBR2
  Gene Name: gamma-aminobutyric acid (GABA) B receptor, 2
  ENSP ID: ENSP00000489352
VRTWILTVGYTTAFGAMFAKTWRVHAIFKNVKMKKKIIKDQKLLVIVGGMLLIDLCILICWQAVDPLRRTVEKYSMELFGCFLAWETRNVSIPALNDSKYIGMSVYNVGIMCIIGAAVSFLTRDQPNVQFCIVALVIIFCSTITLCLVFVPKLITLRTNPDAATQNRRFQFTQNQKKEDSKTS

SEQ ID NO: 34021 - protein, 758 aa, Homo sapiens
  Payload ID: 6703
  Gene Symbol: GGCX
  Gene Name: gamma-glutamyl carboxylase
  Uniprot ID: P38435
  ENSP ID: ENSP00000233838
MAVSAGSARTSPSSDKVQKDKAELISGPRQDSRIGKLLGFEWTDLSSWRRLVTLLNRPTDPASLAVFRFLFGFLMVLDIPQERGLSSLDRKYLDGLDVCRFPLLDALRPLPLDWMYLVYTIMFLGALGMMLGLCYRISCVLFLLPYWYVFLLDKTSWNNHSYLYGLLAFQLTFMDANHYWSVDGLLNAHRRNAHVPLWNYAVLRGQIFIVYFIAGVKKLDADWVEGYSMEYLSRHWLFSPFKLLLSEELTSLLVVHWGGLLLDLSAGFLLFFDVSRSIGLFFVSYFHCMNSQLFSIGMFSYVMLASSPLFCSPEWPRKLVSYCPRRLQQLLPLKAAPQPSVSCVYKRSRGKSGQKPGLRHQLGAAFTLLYLLEQLFLPYSHFLTQGYNNWTNGLYGYSWDMMVHSRSHQHVKITYRDGRTGELGYLNPGVFTQSRRWKDHADMLKQYATCLSRLLPKYNVTEPQIYFDIWVSINDRFQQRIFDPRVDIVQAAWSPFQRTSWVQPLLMDLSPWRAKLQEIKSSLDNHTEVVFIADFPGLHLENFVSEDLGNTSIQLLQGEVTVELVAEQKNQTLREGEKMQLPAGEYHKVYTTSPSPSCYMYVYVNTTELALEQDLAYLQELKEKVENGSETGPLPPELQPLLEGEVKGGPEPTPLVQTFLRRQQRLQEIERRRNTPFHERFFRFLLRKLYVFRRSFLMTCISLRNLILGRPSLEQLAQEVTYANLRPFEAVGELNPSNTDSSHSNPPESNPDPVHSEF

SEQ ID NO: 34022 - protein, 123 aa, Homo sapiens
  Payload ID: 6703
  Gene Symbol: GGCX
  Gene Name: gamma-glutamyl carboxylase
  ENSP ID: ENSP00000389426
MAVSAGSARTSPSSDKVQKDKAELISGPRQDSRIGKLLGFEWTDLSSWRRLVTLLNRPTDPASLAVFRFLFGFLMVLDIPQERGLSSLDRKYLDGLDVCRFPLLDALRPLPLDWMETGPVVIS

SEQ ID NO: 34023 - protein, 73 aa, Homo sapiens
  Payload ID: 6703
  Gene Symbol: GGCX
  Gene Name: gamma-glutamyl carboxylase
  ENSP ID: ENSP00000390748
MAVSAGSARTSPSSGFLMVLDIPQERGLSSLDRKYLDGLDVCRFPLLDALRPLPLDWMYLVYTIMFLGKLGLW

SEQ ID NO: 34024 - protein, 66 aa, Homo sapiens
  Payload ID: 6703
  Gene Symbol: GGCX
  Gene Name: gamma-glutamyl carboxylase
  ENSP ID: ENSP00000400384
MAVSAGSARTSPSSGFLMVLDIPQERGLSSLDRKYLDGLDVCRFPLLDALRPLPLDWMETGPVVIS

SEQ ID NO: 34025 - protein, 701 aa, Homo sapiens
  Payload ID: 6703
  Gene Symbol: GGCX
  Gene Name: gamma-glutamyl carboxylase
  Uniprot ID: P38435
  ENSP ID: ENSP00000408045
MAVSAGSARTSPSSGFLMVLDIPQERGLSSLDRKYLDGLDVCRFPLLDALRPLPLDWMYLVYTIMFLGALGMMLGLCYRISCVLFLLPYWYVFLLDKTSWNNHSYLYGLLAFQLTFMDANHYWSVDGLLNAHRRNAHVPLWNYAVLRGQIFIVYFIAGVKKLDADWVEGYSMEYLSRHWLFSPFKLLLSEELTSLLVVHWGGLLLDLSAGFLLFFDVSRSIGLFFVSYFHCMNSQLFSIGMFSYVMLASSPLFCSPEWPRKLVSYCPRRLQQLLPLKAAPQPSVSCVYKRSRGKSGQKPGLRHQLGAAFTLLYLLEQLFLPYSHFLTQGYNNWTNGLYGYSWDMMVHSRSHQHVKITYRDGRTGELGYLNPGVFTQSRRWKDHADMLKQYATCLSRLLPKYNVTEPQIYFDIWVSINDRFQQRIFDPRVDIVQAAWSPFQRTSWVQPLLMDLSPWRAKLQEIKSSLDNHTEVVFIADFPGLHLENFVSEDLGNTSIQLLQGEVTVELVAEQKNQTLREGEKMQLPAGEYHKVYTTSPSPSCYMYVYVNTTELALEQDLAYLQELKEKVENGSETGPLPPELQPLLEGEVKGGPEPTPLVQTFLRRQQRLQEIERRRNTPFHERFFRFLLRKLYVFRRSFLMTCISLRNLILGRPSLEQLAQEVTYANLRPFEAVGELNPSNTDSSHSNPPESNPDPVHSEF

SEQ ID NO: 34026 - protein, 318 aa, Homo sapiens
  Payload ID: 6704
  Gene Symbol: GGH
  Gene Name: gamma-glutamyl hydrolase (conjugase, folylpolygammaglutamyl hydrolase)
  Uniprot ID: Q92820
  ENSP ID: ENSP00000260118
MASPGCLLCVLGLLLCGAASLELSRPHGDTAKKPIIGILMQKCRNKVMKNYGRYYIAASYVKYLESAGARVVPVRLDLTEKDYEILFKSINGILFPGGSVDLRRSDYAKVAKIFYNLSIQSFDDGDYFPVWGTCLGFEELSLLISGECLLTATDTVDVAMPLNFTGGQLHSRMFQNFPTELLLSLAVEPLTANFHKWSLSVKNFTMNEKLKKFFNVLTTNTDGKIEFISTMEGYKYPVYGVQWHPEKAPYEWKNLDGISHAPNAVKTAFYLAEFFVNEARKNNHHFKSESEEEKALIYQFSPIYTGNISSFQQCYIFD

SEQ ID NO: 34027 - protein, 153 aa, Homo sapiens
  Payload ID: 6705
  Gene Symbol: GGACT
  Gene Name: gamma-glutamylamine cyclotransferase
  Uniprot ID: Q9BVM4
  ENSP ID: ENSP00000365426
MALVFVYGTLKRGQPNHRVLRDGAHGSAAFRARGRTLEPYPLVIAGEHNIPWLLHLPGSGRLVEGEVYAVDERMLRFLDDFESCPALYQRTVLRVQLLEDRAPGAEEPPAPTAVQCFVYSRATFPPEWAQLPHHDSYDSEGPHGLRYNPRENR

SEQ ID NO: 34028 - protein, 153 aa, Homo sapiens; identical to SEQ ID NO: 34027
  Payload ID: 6705
  Gene Symbol: GGACT
  Gene Name: gamma-glutamylamine cyclotransferase
  Uniprot ID: Q9BVM4
  ENSP ID: ENSP00000410449

SEQ ID NO: 34029 - protein, 26 aa, Homo sapiens
  Payload ID: 6705
  Gene Symbol: GGACT
  Gene Name: gamma-glutamylamine cyclotransferase
  ENSP ID: ENSP00000471322
MALVFVYGTLKRGQPNHRVLRDGAHG

SEQ ID NO: 34030 - protein, 32 aa, Homo sapiens
  Payload ID: 6705
  Gene Symbol: GGACT
  Gene Name: gamma-glutamylamine cyclotransferase
  ENSP ID: ENSP00000471342
MALVFVYGTLKRGQPNHRVLRDGAHGSAAFRA

SEQ ID NO: 34031 - protein, 26 aa, Homo sapiens
  Payload ID: 6705
  Gene Symbol: GGACT
  Gene Name: gamma-glutamylamine cyclotransferase
  ENSP ID: ENSP00000471716
MALVFVYGTLKRGQPNHRVLRDGAHG

SEQ ID NO: 34032 - protein, 32 aa, Homo sapiens; identical to SEQ ID NO: 34030
  Payload ID: 6705
  Gene Symbol: GGACT
  Gene Name: gamma-glutamylamine cyclotransferase
  ENSP ID: ENSP00000472246

SEQ ID NO: 34033 - protein, 114 aa, Homo sapiens
  Payload ID: 6706
  Gene Symbol: GGCT
  Gene Name: gamma-glutamylcyclotransferase
  Uniprot ID: O75223
  ENSP ID: ENSP00000005374
MANSGCKDVTGPDEESFLYFAYGSNLLTERIHLRNPSAAFFCVARLQDFKLDFGNSQGKTSQTWHGGIATIFQSPGDEVWGVVWKMNKSNLNSLDELFAWVQKKMVCRWSIKRS

SEQ ID NO: 34034 - protein, 188 aa, Homo sapiens
  Payload ID: 6706
  Gene Symbol: GGCT
  Gene Name: gamma-glutamylcyclotransferase
  Uniprot ID: O75223
  ENSP ID: ENSP00000275428
MANSGCKDVTGPDEESFLYFAYGSNLLTERIHLRNPSAAFFCVARLQDFKLDFGNSQGKTSQTWHGGIATIFQSPGDEVWGVVWKMNKSNLNSLDEQEGVKSGMYVVIEVKVATQEGKEITCRSYLMTNYESAPPSPQYKKIICMGAKENGLPLEYQEKLKAIEPNDYTGKVSEEIEDIIKKGETQTL

SEQ ID NO: 34035 - protein, 94 aa, Homo sapiens
  Payload ID: 6706
  Gene Symbol: GGCT
  Gene Name: gamma-glutamylcyclotransferase
  Uniprot ID: O75223
  ENSP ID: ENSP00000386610
MANSGCKDVTGPDEESFLYFAYGSNLLTERIHLRNPSAAFFCVARLQIICMGAKENGLPLEYQEKLKAIEPNDYTGKVSEEIEDIIKKGETQTL

SEQ ID NO: 34036 - protein, 166 aa, Homo sapiens
  Payload ID: 6706
  Gene Symbol: GGCT
  Gene Name: gamma-glutamylcyclotransferase
  ENSP ID: ENSP00000386686
MANSGCKDVTGPDEESFLYFAYGSNLLTERIHLRNPSAAFFCVARLQDFKLDFGNSQGKTSQTWHGGIATIFQSPGDEVWGVVWKMNKSNLNSLDEQEGVKSGMYVVIEVKVATQEGKEITCRSYLMTNYESAPPSPQYKKVEKETSHCLSESGKSPLQAQDKNVG

SEQ ID NO: 34037 - protein, 166 aa, Homo sapiens
  Payload ID: 6706
  Gene Symbol: GGCT
  Gene Name: gamma-glutamylcyclotransferase
  Uniprot ID: O75223
  ENSP ID: ENSP00000387235
MANSGCKDVTGPDEESFLYFAYGSNLLTERIHLRNPSAAFFCVARLQDFKLDFGNSQGKTSQTWHGGIATIFQSPGDEVWGVVWKMNKSNLNSLDEWRKKRHTAFQNQGNHPCKHKTRMWDRDPKIPVQNLSLALCWQAQSGHGTCNRLFAWVQKKMVCRWSIKRS

SEQ ID NO: 34038 - protein, 51 aa, Homo sapiens
  Payload ID: 6706
  Gene Symbol: GGCT
  Gene Name: gamma-glutamylcyclotransferase
  ENSP ID: ENSP00000387809
MANSGCKDVTGPDEESFLYFAYGSNLLTERIHLRNPSAAFFCVARLQARRG

SEQ ID NO: 34039 - protein, 119 aa, Homo sapiens
  Payload ID: 6706
  Gene Symbol: GGCT
  Gene Name: gamma-glutamylcyclotransferase
  ENSP ID: ENSP00000390094
  MOD_RES (1)..(1): Any amino acid
XFKLDFGNSQGKTSQTWHGGIATIFQSPGDEVWGVVWKMNKSNLNSLDEQEGVKSGMYVVIEVKVATQEGKEITCRSYLMTNYESAPPSPQYKKVEKETSHCLSESGKSPLQAQDKNVG

SEQ ID NO: 34040 - protein, 51 aa, Homo sapiens; identical to SEQ ID NO: 34038
  Payload ID: 6706
  Gene Symbol: GGCT
  Gene Name: gamma-glutamylcyclotransferase
  ENSP ID: ENSP00000408015

SEQ ID NO: 34041 - protein, 569 aa, Homo sapiens
  Payload ID: 6707
  Gene Symbol: GGT1
  Gene Name: gamma-glutamyltransferase 1
  Uniprot ID: P19440
  ENSP ID: ENSP00000248923
MKKKLVVLGLLAVVLVLVIVGLCLWLPSASKEPDNHVYTRAAVAADAKQCSKIGRDALRDGGSAVDAAIAALLCVGLMNAHSMGIGGGLFLTIYNSTTRKAEVINAREVAPRLAFATMFNSSEQSQKGGLSVAVPGEIRGYELAHQRHGRLPWARLFQPSIQLARQGFPVGKGLAAALENKRTVIEQQPVLCEVFCRDRKVLREGERLTLPQLADTYETLAIEGAQAFYNGSLTAQIVKDIQAAGGIVTAEDLNNYRAELIEHPLNISLGDVVLYMPSAPLSGPVLALILNILKGYNFSRESVESPEQKGLTYHRIVEAFRFAYAKRTLLGDPKFVDVTEVVRNMTSEFFAAQLRAQISDDTTHPISYYKPEFYTPDDGGTAHLSVVAEDGSAVSATSTINLYFGSKVRSPVSGILFNNEMDDFSSPSITNEFGVPPSPANFIQPGKQPLSSMCPTIMVGQDGQVRMVVGAAGGTQITTATALAIIYNLWFGYDVKRAVEEPRLHNQLLPNVTTVERNIDQAVTAALETRHHHTQIASTFIAVVQAIVRTAGGWAAASDSRKGGEPAGY

SEQ ID NO: 34042 - protein, 569 aa, Homo sapiens; identical to SEQ ID NO: 34041
  Payload ID: 6707
  Gene Symbol: GGT1
  Gene Name: gamma-glutamyltransferase 1
  Uniprot ID: P19440
  ENSP ID: ENSP00000383231

SEQ ID NO: 34043 - protein, 569 aa, Homo sapiens; identical to SEQ ID NO: 34041
  Payload ID: 6707
  Gene Symbol: GGT1
  Gene Name: gamma-glutamyltransferase 1
  Uniprot ID: P19440
  ENSP ID: ENSP00000383232

SEQ ID NO: 34044 - protein, 225 aa, Homo sapiens
  Payload ID: 6707
  Gene Symbol: GGT1
  Gene Name: gamma-glutamyltransferase 1
  Uniprot ID: P19440
  ENSP ID: ENSP00000384381
MTSEFFAAQLRAQISDDTTHPISYYKPEFYTPDDGGTAHLSVVAEDGSAVSATSTINLYFGSKVRSPVSGILFNNEMDDFSSPSITNEFGVPPSPANFIQPGKQPLSSMCPTIMVGQDGQVRMVVGAAGGTQITTATALAIIYNLWFGYDVKRAVEEPRLHNQLLPNVTTVERNIDQAVTAALETRHHHTQIASTFIAVVQAIVRTAGGWAAASDSRKGGEPAGY

SEQ ID NO: 34045 - protein, 225 aa, Homo sapiens; identical to SEQ ID NO: 34044
  Payload ID: 6707
  Gene Symbol: GGT1
  Gene Name: gamma-glutamyltransferase 1
  Uniprot ID: P19440
  ENSP ID: ENSP00000384820

SEQ ID NO: 34046 - protein, 218 aa, Homo sapiens
  Payload ID: 6707
  Gene Symbol: GGT1
  Gene Name: gamma-glutamyltransferase 1
  ENSP ID: ENSP00000385001
MTSEFFAAQLRAQISDDTTHPISYYKPEFYTPDDGGTAHLSVVAEDGSAVSATSTINLYFGSKVRSPVSGILFNNEMDDFSSPSITNEFGVPPSPANFIQPGKQPLSSMCPTIMVGQDGQPPSHADHTPMPQAIIYNLWFGYDVKRAVEEPRLHNQLLPNVTTVERNIDQAVTAALETRHHHTQIASTFIAVVQAIVRTAGGWAAASDSRKGGEPAGY

SEQ ID NO: 34047 - protein, 252 aa, Homo sapiens
  Payload ID: 6707
  Gene Symbol: GGT1
  Gene Name: gamma-glutamyltransferase 1
  ENSP ID: ENSP00000385016
MTSEFFAAQLRAQISDDTTHPISYYKPEFYTPDDGGTAHLSVVAEDGSAVSATSTINLYFGSKVRSPVSGILFNNEMDDFSSPSITNEFGVPPSPANFIQPGKQPLSSMCPTIMVGQDGQVRMVVGAAGGTQITTATALVCVTPFLPGRAHPAQPPSHADHTPMPQAIIYNLWFGYDVKRAVEEPRLHNQLLPNVTTVERNIDQAVTAALETRHHHTQIASTFIAVVQAIVRTAGGWAAASDSRKGGEPAGY

SEQ ID NO: 34048 - protein, 225 aa, Homo sapiens; identical to SEQ ID NO: 34044
  Payload ID: 6707
  Gene Symbol: GGT1
  Gene Name: gamma-glutamyltransferase 1
  Uniprot ID: P19440
  ENSP ID: ENSP00000385445

SEQ ID NO: 34049 - protein, 366 aa, Homo sapiens
  Payload ID: 6707
  Gene Symbol: GGT1
  Gene Name: gamma-glutamyltransferase 1
  Uniprot ID: P19440
  ENSP ID: ENSP00000387499
MKKKLVVLGLLAVVLVLVIVGLCLWLPSASKEPDNHVYTRAAVAADAKQCSKIGRDALRDGGSAVDAAIAALLCVGLMNAHSMGIGGGLFLTIYNSTTRKAEVINAREVAPRLAFATMFNSSEQSQKGGLSVAVPGEIRGYELAHQRHGRLPWARLFQPSIQLARQGFPVGKGLAAALENKRTVIEQQPVLCEVFCRDRKVLREGERLTLPQLADTYETLAIEGAQAFYNGSLTAQIVKDIQAAGGIVTAEDLNNYRAELIEHPLNISLGDVVLYMPSAPLSGPVLALILNILKGYNFSRESVESPEQKGLTYHRIVEAFRFAYAKRTLLGDPKFVDVTEASSGVSAGGPQHDLRVLRCPAPGPDL

SEQ ID NO: 34050 - protein, 116 aa, Homo sapiens
  Payload ID: 6707
  Gene Symbol: GGT1
  Gene Name: gamma-glutamyltransferase 1
  ENSP ID: ENSP00000387796
MKKKLVVLGLLAVVLVLVIVGLCLWLPSASKEPDNHVYTRAAVAADAKQCSKIGRDALRDGGSAVDAAIAALLCVGLMNAHSMGIGGGLFLTIYNSTTRKAEVINAREVAPRLAFA

SEQ ID NO: 34051 - protein, 120 aa, Homo sapiens
  Payload ID: 6707
  Gene Symbol: GGT1
  Gene Name: gamma-glutamyltransferase 1
  ENSP ID: ENSP00000389935
MKKKLVVLGLLAVVLVLVIVGLCLWLPSASKEPDNHVYTRAAVAADAKQCSKIGRDALRDGGSAVDAAIAALLCVGLMNAHSMGIGGGLFLTIYNSTTRKAEVINAREVAPRLAFATMFN

SEQ ID NO: 34052 - protein, 67 aa, Homo sapiens
  Payload ID: 6707
  Gene Symbol: GGT1
  Gene Name: gamma-glutamyltransferase 1
  ENSP ID: ENSP00000393135
MKKKLVVLGLLAVVLVLVIVGLCLWLPSASKEPDNHVYTRAAVAADAKQCSKIGRDALRDGGSAVDA

SEQ ID NO: 34053 - protein, 463 aa, Homo sapiens
  Payload ID: 6707
  Gene Symbol: GGT1
  Gene Name: gamma-glutamyltransferase 1
  ENSP ID: ENSP00000393537
MKKKLVVLGLLAVVLVLVIVGLCLWLPSASKEPDNHVYTRAAVAADAKQCSKIGRDALRDGGSAVDAAIAALLCVGLMNAHSMGIGGGLFLTIYNSTTRKAEVINAREVAPRLAFATMFNSSEQSQKGGLSVAVPGEIRGYELAHQRHGRLPWARLFQPSIQLARQGFPVGKGLAAALENKRTVIEQQPVLCEVFCRDRKVLREGERLTLPQLADTYETLAIEGAQAFYNGSLTAQIVKDIQAAGGIVTAEDLNNYRAELIEHPLNISLGDVVLYMPSAPLSGPVLALILNILKGYNFSRESVESPEQKGLTYHRIVEAFRFAYAKRTLLGDPKFVDVTEVVRNMTSEFFAAQLRAQISDDTTHPISYYKPEFYTPDDGGTAHLSVVAEDGSAVSATSTINLYFGSKVRSPVSGILFNNEMDDFSSPSITNEFGVPPSPANFIQPGKQPLSSMCPTIMVGQDG

SEQ ID NO: 34054 - protein, 174 aa, Homo sapiens
  Payload ID: 6707
  Gene Symbol: GGT1
  Gene Name: gamma-glutamyltransferase 1
  ENSP ID: ENSP00000395271
MKKKLVVLGLLAVVLVLVIVGLCLWLPSASKEPDNHVYTRAAVAADAKQCSKIGRDALRDGGSAVDAAIAALLCVGLMNAHSMGIGGGLFLTIYNSTTRKAEVINAREVAPRLAFATMFNSSEQSQKGGLSVAVPGEIRGYELAHQRHGRLPWARLFQPSIQLARQGFPVGKGL

SEQ ID NO: 34055 - protein, 111 aa, Homo sapiens
  Payload ID: 6707
  Gene Symbol: GGT1
  Gene Name: gamma-glutamyltransferase 1
  ENSP ID: ENSP00000398589
MKKKLVVLGLLAVVLVLVIVGLCLWLPSASKEPDNHVYTRAAVAADAKQCSKIGRDALRDGGSAVDAAIAALLCVGLMNAHSMGIGGGLFLTIYNSTTRKAEVINAREVAP

SEQ ID NO: 34056 - protein, 126 aa, Homo sapiens
  Payload ID: 6707
  Gene Symbol: GGT1
  Gene Name: gamma-glutamyltransferase 1
  ENSP ID: ENSP00000400621
MKKKLVVLGLLAVVLVLVIVGLCLWLPSASKEPDNHVYTRAAVAADAKQCSKIGRDALRDGGSAVDAAIAALLCVGLMNAHSMGIGGGLFLTIYNSTTRKAEVINAREVAPRLAFATMFNSSEQSQ

SEQ ID NO: 34057 - protein, 37 aa, Homo sapiens
  Payload ID: 6707
  Gene Symbol: GGT1
  Gene Name: gamma-glutamyltransferase 1
  ENSP ID: ENSP00000403826
MKKKLVVLGLLAVVLVLVIVGLCLWLPSASKEPDNHV

SEQ ID NO: 34058 - protein, 80 aa, Homo sapiens
  Payload ID: 6707
  Gene Symbol: GGT1
  Gene Name: gamma-glutamyltransferase 1
  ENSP ID: ENSP00000408151
MKKKLVVLGLLAVVLVLVIVGLCLWLPSASKEPDNHVYTRAAVAADAKQCSKIGRDALRDGGSAVDAAIAALLCVGLMNA

SEQ ID NO: 34059 - protein, 97 aa, Homo sapiens
  Payload ID: 6707
  Gene Symbol: GGT1
  Gene Name: gamma-glutamyltransferase 1
  ENSP ID: ENSP00000415024
MKKKLVVLGLLAVVLVLVIVGLCLWLPSASKEPDNHVYTRAAVAADAKQCSKIGRDALRDGGSAVDAAIAALLCVGLMNAHSMGIGGGLFLTIYNST

SEQ ID NO: 34060 - protein, 126 aa, Homo sapiens; identical to SEQ ID NO: 34056
  Payload ID: 6707
  Gene Symbol: GGT1
  Gene Name: gamma-glutamyltransferase 1
  ENSP ID: ENSP00000415068

SEQ ID NO: 34061 - protein, 30 aa, Homo sapiens
  Payload ID: 6707
  Gene Symbol: GGT1
  Gene Name: gamma-glutamyltransferase 1
  ENSP ID: ENSP00000415129
MKKKLVVLGLLAVVLVLVIVGLCLWLPSAS

SEQ ID NO: 34062 - protein, 127 aa, Homo sapiens
  Payload ID: 6707
  Gene Symbol: GGT1
  Gene Name: gamma-glutamyltransferase 1
  ENSP ID: ENSP00000415553
MKKKLVVLGLLAVVLVLVIVGLCLWLPSASKEPDNHVYTRAAVAADAKQCSKIGRDALRDGGSAVDAAIAALLCVGLMNAHSMGIGGGLFLTIYNSTTRKAEVINAREVAPRLAFATMFNSSEQSQK

SEQ ID NO: 34063 - protein, 108 aa, Homo sapiens
  Payload ID: 6707
  Gene Symbol: GGT1
  Gene Name: gamma-glutamyltransferase 1
  ENSP ID: ENSP00000417044
MKKKLVVLGLLAVVLVLVIVGLCLWLPSASKEPDNHVYTRAAVAADAKQCSKIGRDALRDGGSAVDAAIAALLCVGLMNAHSMGIGGGLFLTIYNSTTRKAEVINARE

SEQ ID NO: 34064 - protein, 559 aa, Homo sapiens
  Payload ID: 6708
  Gene Symbol: GGT2
  Gene Name: gamma-glutamyltransferase 2
  ENSP ID: ENSP00000385601
MKKKLVVLGLLAVVLVLVIVGLCLWLPSASKEPDNHVYTRAAMAADAKQCLEIGRDTLRDGGSAVDAAIAALLCVGLMNAHSMGIGVGLFLTIYNSTTRKAEVINAREVAPRLAFASMFNSSEQSQKGGLSVAVPGEIRGYELAHQRHGRLPWARLFQPSIQLARQGFPVGKGLAAVLENKRTVIEQQPVLWYVFCRDRKVLREGERLTLPRLADTYEMLAIEGAQAFYNGSLMAQIVKDIQAAGGIVTAEDLNNYRAELIEHPLNISLGDAVLYMPSARLSGPVLALILNILKGYNFSRESVETPEQKGLTYHRIVEAFRFAYAKRTLLGDPKFVDVTEVVRNMTSEFFAAQLRSQISDHTTHPISYYKPEFYTPDDGGTAHLSVVAEDGSAVSATSTINLYGILFNNEWTTSALPAFTNEFGAPPSPANFIQPGKQPLLSMCLTIMVGQDGQVRMVVGAAGGTQITTDTALAIIYNLWFGYDVKRAVEEPRLHNKLLPNVTTVERNIDQAVTAALETRHHHTQIASTFIAVVQAIVRTAGGWAAASDSRKGGEPAGY

SEQ ID NO: 34065 - protein, 569 aa, Homo sapiens
  Payload ID: 6708
  Gene Symbol: GGT2
  Gene Name: gamma-glutamyltransferase 2
  Uniprot ID: P36268
  ENSP ID: ENSP00000385721
MKKKLVVLGLLAVVLVLVIVGLCLWLPSASKEPDNHVYTRAAMAADAKQCLEIGRDTLRDGGSAVDAAIAALLCVGLMNAHSMGIGVGLFLTIYNSTTRKAEVINAREVAPRLAFASMFNSSEQSQKGGLSVAVPGEIRGYELAHQRHGRLPWARLFQPSIQLARQGFPVGKGLAAVLENKRTVIEQQPVLWYVFCRDRKVLREGERLTLPRLADTYEMLAIEGAQAFYNGSLMAQIVKDIQAAGGIVTAEDLNNYRAELIEHPLNISLGDAVLYMPSARLSGPVLALILNILKGYNFSRESVETPEQKGLTYHRIVEAFRFAYAKRTLLGDPKFVDVTEVVRNMTSEFFAAQLRSQISDHTTHPISYYKPEFYTPDDGGTAHLSVVAEDGSAVSATSTINLYFGSKVCSPVSGILFNNEWTTSALPAFTNEFGAPPSPANFIQPGKQPLLSMCLTIMVGQDGQVRMVVGAAGGTQITTDTALAIIYNLWFGYDVKRAVEEPRLHNKLLPNVTTVERNIDQAVTAALETRHHHTQIASTFIAVVQAIVRTAGGWAAASDSRKGGEPAGY

SEQ ID NO: 34066 - protein, 569 aa, Homo sapiens; identical to SEQ ID NO: 34065
  Payload ID: 6708
  Gene Symbol: GGT2
  Gene Name: gamma-glutamyltransferase 2
  Uniprot ID: P36268
  ENSP ID: ENSP00000402035

SEQ ID NO: 34067 - protein, 554 aa, Homo sapiens
  Payload ID: 6709
  Gene Symbol: GGT5
  Gene Name: gamma-glutamyltransferase 5
  Uniprot ID: P36269
  ENSP ID: ENSP00000263112
MARGYGATVSLVLLGLGLALAVIVLAVVLSRHQAPCGPQAFAHAAVAADSKVCSDIGRAILQQQGSPVDATIAALVCTSVVNPQSMGLGGGVIFTIYNVTTGAQWIGVPGELRGYAEAHRRHGRLPWAQLFQPTIALLRGGHVVAPVLSRFLHNSILRPSLQASTLRQLFFNGTEPLRPQDPLPWPALATTLETVATEGVEVFYTGRLGQMLVEDIAKEGSQLTLQDLAKFQPEVVDALEVPLGDYTLYSPPPPAGGAILSFILNVLRGFNFSTESMARPEGRVNVYHHLVETLKFAKGQRWRLGDPRSHPKLQNASRDLLGETLAQLIRQQIDGRGDHQLSHYSLAEAWGHGTGTSHVSVLGEDGSAVAATSTINTPFGAMVYSPRTGIILNNELLDLCERCPRGSGTTPSPVSGDRVGGAPGRCWPPVPGERSPSSMVPSILINKAQGSKLVIGGAGGELIISAVAQAIMSKLWLGFDLRAAIAAPILHVNSKGCVEYEPNFSQEVQRGLQDRGQNQTQRPFFLNVVQAVSQEGACVYAVSDLRKSGEAAGY

SEQ ID NO: 34068 - protein, 586 aa, Homo sapiens
  Payload ID: 6709
  Gene Symbol: GGT5
  Gene Name: gamma-glutamyltransferase 5
  Uniprot ID: P36269
  ENSP ID: ENSP00000330080
MARGYGATVSLVLLGLGLALAVIVLAVVLSRHQAPCGPQAFAHAAVAADSKVCSDIGRAILQQQGSPVDATIAALVCTSVVNPQSMGLGGGVIFTIYNVTTGKVEVINARETVPASHAPSLLDQCAQALPLGTGAQWIGVPGELRGYAEAHRRHGRLPWAQLFQPTIALLRGGHVVAPVLSRFLHNSILRPSLQASTLRQLFFNGTEPLRPQDPLPWPALATTLETVATEGVEVFYTGRLGQMLVEDIAKEGSQLTLQDLAKFQPEVVDALEVPLGDYTLYSPPPPAGGAILSFILNVLRGFNFSTESMARPEGRVNVYHHLVETLKFAKGQRWRLGDPRSHPKLQNASRDLLGETLAQLIRQQIDGRGDHQLSHYSLAEAWGHGTGTSHVSVLGEDGSAVAATSTINTPFGAMVYSPRTGIILNNELLDLCERCPRGSGTTPSPVSGDRVGGAPGRCWPPVPGERSPSSMVPSILINKAQGSKLVIGGAGGELIISAVAQAIMSKLWLGFDLRAAIAAPILHVNSKGCVEYEPNFSQEVQRGLQDRGQNQTQRPFFLNVVQAVSQEGACVYAVSDLRKSGEAAGY

SEQ ID NO: 34069 - protein, 587 aa, Homo sapiens
  Payload ID: 6709
  Gene Symbol: GGT5
  Gene Name: gamma-glutamyltransferase 5
  Uniprot ID: P36269
  ENSP ID: ENSP00000381340
MARGYGATVSLVLLGLGLALAVIVLAVVLSRHQAPCGPQAFAHAAVAADSKVCSDIGRAILQQQGSPVDATIAALVCTSVVNPQSMGLGGGVIFTIYNVTTGKVEVINARETVPASHAPSLLDQCAQALPLGTGAQWIGVPGELRGYAEAHRRHGRLPWAQLFQPTIALLRGGHVVAPVLSRFLHNSILRPSLQASTLRQLFFNGTEPLRPQDPLPWPALATTLETVATEGVEVFYTGRLGQMLVEDIAKEGSQLTLQDLAKFQPEVVDALEVPLGDYTLYSPPPPAGGAILSFILNVLRGFNFSTESMARPEGRVNVYHHLVETLKFAKGQRWRLGDPRSHPKLQNASRDLLGETLAQLIRQQIDGRGDHQLSHYSLAEAWGHGTGTSHVSVLGEDGSAVAATSTINTPFGAMVYSPRTGIILNNELLDLCERCPRGSGTTPSPAVSGDRVGGAPGRCWPPVPGERSPSSMVPSILINKAQGSKLVIGGAGGELIISAVAQAIMSKLWLGFDLRAAIAAPILHVNSKGCVEYEPNFSQEVQRGLQDRGQNQTQRPFFLNVVQAVSQEGACVYAVSDLRKSGEAAGY

SEQ ID NO: 34070 - protein, 220 aa, Homo sapiens
  Payload ID: 6709
  Gene Symbol: GGT5
  Gene Name: gamma-glutamyltransferase 5
  ENSP ID: ENSP00000402917
  MOD_RES (1)..(1): Any amino acid
XSAVAATSTINTPFGAMVYSPRTGIILNNELLDLCERCPRGSGTTPSPVSGDRVGGAPGRCWPPVPGERSPSSMVPSILINKAQGSKLVIGGAGGELIISAVAQAIMSKLWLGFDLRAAIAAPILHVNSKGCVEYEPNFSQKQDLAALPRLVSNSWPQVILLPQPPKLLALQEVQRGLQDRGQNQTQRPFFLNVVQAVSQEGACVYAVSDLRKSGEAAGY

SEQ ID NO: 34071 - protein, 73 aa, Homo sapiens
  Payload ID: 6709
  Gene Symbol: GGT5
  Gene Name: gamma-glutamyltransferase 5
  ENSP ID: ENSP00000412964
MARGYGATVSLVLLGLGLALAVIVLAVVLSRHQAPCGPQAFAHAAVAADSKVCSDIGRGPVDRGARGAPWLCR

SEQ ID NO: 34072 - protein, 461 aa, Homo sapiens
  Payload ID: 6710
  Gene Symbol: GGT6
  Gene Name: gamma-glutamyltransferase 6
  Uniprot ID: Q6P531
  ENSP ID: ENSP00000301395
MERAEEPVVYQKLLPWEPSLESEEEVEEEETSEALVLNPRRHQDSSRNKAGGLPGTWARVVAALLLLAVGCSLAVRQLQNQGRSTGSLGSVAPPPGGHSHGPGVYHHGAIISPAGAMFWGLFHDSSSGNSTALTSGPAQTLAPGLGLPAALPTLHLLHARFGRLPWPRLLVGPTTLAQEGFLVDTPLARALVARGTEGLCPLLCHADGTPLGAGARATNPQLAAVLRSAALAPTSDLAGDALLSLLAGDLGVEVPSAVPRPTLEPAEQLPVPQGILFTTPSPSAGPELLALLEAALRSGAPIPDPCPPFLQTAVSPESSALAAVDSSGSVLLLTSSLNCSFGSAHLSPSTGVLLSNLVAKSTTSAWACPLILRGSLDDTEADVLGLVASGTPDVARAMTHTLLRHLAARPPTQAQHQHQGQQEPTEHPSTCGQGTLLQVAAHTEHAHVSSVPHACCPFQGF

SEQ ID NO: 34073 - protein, 499 aa, Homo sapiens
  Payload ID: 6710
  Gene Symbol: GGT6
  Gene Name: gamma-glutamyltransferase 6
  ENSP ID: ENSP00000370962
MERAEEPVVYQKLLPWEPSLESEEEVEEEETSEALVLNPRRHQDSSRNKAGGLPGTWARVVAALLLLAVGCSLAVRQLQNQGRSTGSLGSVAPPPGGHSHGPGVYHHGAIISPAATCSHLGRELLVAGGNVVDAGVGAALCLAVVHPHATGLGAMFWGLFHDSSSGNSTALTSGPAQTLAPGLGLPAALPTLHLLHARFGRLPWPRLLVGPTTLAQEGFLVDTPLARALVARGTEGLCPLLCHADGTPLGAGARATNPQLAAVLRSAALAPTSDLAGDALLSLLAGDLGVEVPSAVPRPTLEPAEQLPVPQGILFTTPSPSAGPELLALLEAALRSGAPIPDPCPPFLQTAVSPESSALAAVDSSGSVLLLTSSLNCSFGSAHLSPSTGVLLSNLVAKSTTSAWACPLILRGSLDDTEADVLGLVASGTPDVARAMTHTLLRHLAARPPTQAQHQHQGQQEPTEHPSTCGQGTLLQVAAHTEHAHVSSVPHACCPFQGF

SEQ ID NO: 34074 - protein, 493 aa, Homo sapiens
  Payload ID: 6710
  Gene Symbol: GGT6
  Gene Name: gamma-glutamyltransferase 6
  Uniprot ID: Q6P531
  ENSP ID: ENSP00000458307
MERAEEPVVYQKLLPWEPSLESEEEVEEEETSEALVLNPRRHQDSSRNKAGGLPGTWARVVAALLLLAVGCSLAVRQLQNQGRSTGSLGSVAPPPGGHSHGPGVYHHGAIISPAGRELLVAGGNVVDAGVGAALCLAVVHPHATGLGAMFWGLFHDSSSGNSTALTSGPAQTLAPGLGLPAALPTLHLLHARFGRLPWPRLLVGPTTLAQEGFLVDTPLARALVARGTEGLCPLLCHADGTPLGAGARATNPQLAAVLRSAALAPTSDLAGDALLSLLAGDLGVEVPSAVPRPTLEPAEQLPVPQGILFTTPSPSAGPELLALLEAALRSGAPIPDPCPPFLQTAVSPESSALAAVDSSGSVLLLTSSLNCSFGSAHLSPSTGVLLSNLVAKSTTSAWACPLILRGSLDDTEADVLGLVASGTPDVARAMTHTLLRHLAARPPTQAQHQHQGQQEPTEHPSTCGQGTLLQVAAHTEHAHVSSVPHACCPFQGF

SEQ ID NO: 34075 - protein, 180 aa, Homo sapiens
  Payload ID: 6710
  Gene Symbol: GGT6
  Gene Name: gamma-glutamyltransferase 6
  ENSP ID: ENSP00000459662
MERAEEPVVYQKLLPWEPSLESEEEVEEEETSEALVLNPRRHQDSSRNKAGGLPGTWARVVAALLLLAVGCSLAVRQLQNQGRSTGSLGSVAPPPGGHSHGPGVYHHGAIISPAGRELLVAGGNVVDAGVGAALCLAVVHPHATGLDCCEPREQCPGRRGQQRLCAPSHLLAQLLLWLCT

SEQ ID NO: 34076 - protein, 345 aa, Homo sapiens
  Payload ID: 6710
  Gene Symbol: GGT6
  Gene Name: gamma-glutamyltransferase 6
  ENSP ID: ENSP00000461230
MFWGLFHDSSSGNSTALTSGPAQTLAPGLGLPAALPTLHLLHARFGRLPWPRLLVGPTTLAQEGFLVDTPLARALVARGTEGLCPLLCHADGTPLGAGARATNPQLAAVLRSAALAPTSDLAGDALLSLLAGDLGVEVPSAVPRPTLEPAEQLPVPQGILFTTPSPSAGPELLALLEAALRSGAPIPDPCPPFLQTAVSPESSALAAVDSSGSVLLLTSSLNCSFGSAHLSPSTGVLLSNLVAKSTTSAWACPLILRGSLDDTEADVLGLVASGTPDVARAMTHTLLRHLAARPPTQAQHQHQGQQEPTEHPSTCGQGTLLQVAAHTEHAHVSSVPHACCPFQGF

SEQ ID NO: 34077 - protein, 662 aa, Homo sapiens
  Payload ID: 6711
  Gene Symbol: GGT7
  Gene Name: gamma-glutamyltransferase 7
  Uniprot ID: Q9UJ14
  ENSP ID: ENSP00000338964
MAAENEASQESALGAYSPVDYMSITSFPRLPEDEPAPAAPLRGRKDEDAFLGDPDTDPDSFLKSARLQRLPSSSSEMGSQDGSPLRETRKDPFSAAAAECSCRQDGLTVIVTACLTFATGVTVALVMQIYFGDPQIFQQGAVVTDAARCTSLGIEVLSKQGSSVDAAVAAALCLGIVAPHSSGLGGGGVMLVHDIRRNESHLIDFRESAPGALREETLQRSWETKPGLLVGVPGMVKGLHEAHQLYGRLPWSQVLAFAAAVAQDGFNVTHDLARALAEQLPPNMSERFRETFLPSGRPPLPGSLLHRPDLAEVLDVLGTSGPAAFYAGGNLTLEMVAEAQHAGGVITEEDFSNYSALVEKPVCGVYRGHLVLSPPPPHTGPALISALNILEGFNLTSLVSREQALHWVAETLKIALALASRLGDPVYDSTITESMDDMLSKVEAAYLRGHINDSQAAPAPLLPVYELDGAPTAAQVLIMGPDDFIVAMVSSLNQPFGSGLITPSGILLNSQMLDFSWPNRTANHSAPSLENSVQPGKRPLSFLLPTVVRPAEGLCGTYLALGANGAARGLSGLTQVLLNVLTLNRNLSDSLARGRLHPDLQSNLLQVDSEFTEEEIEFLEARGHHVEKVDVLSWVHGSRRTNNFIIAVKDPRSPDAAGATIL

SEQ ID NO: 34078 - protein, 202 aa, Homo sapiens
  Payload ID: 6711
  Gene Symbol: GGT7
  Gene Name: gamma-glutamyltransferase 7
  ENSP ID: ENSP00000394993
MAAENEASQESALGAYSPVDYMSITSFPRLPEDEPAPAAPLRGRKDEDAFLGDPDTAGHRCPACPGVHAKMRKDPDSFLKSARLQRLPSSSSEMGSQDGSPLRETRKDPFSAAAAECSCRQDGLTVIVTACLTFATGVTVALVMQIYFGDPQIFQQGAVVTDAARCTSLGIEVLSKQGSSVDAAVAAALCLGIVAPHSSGLG

SEQ ID NO: 34079 - protein, 88 aa, Homo sapiens
  Payload ID: 6711
  Gene Symbol: GGT7
  Gene Name: gamma-glutamyltransferase 7
  ENSP ID: ENSP00000486190
  MOD_RES (1)..(1): Any amino acid
XSLNQPFGSGLITPSGILLNSQMLDFSWPNRTANHSAPSLENSVQPGKRPLSFLLPTVVRPAEGLCGTYLALGANGAARGLSGLTQGC

SEQ ID NO: 34080 - protein, 151 aa, Homo sapiens
  Payload ID: 6711
  Gene Symbol: GGT7
  Gene Name: gamma-glutamyltransferase 7
  ENSP ID: ENSP00000486589
  MOD_RES (1)..(1): Any amino acid
XPLLPVYELDGAPTAAQVLIMGPDDFIVAMVSSLNQPFGSGLITPSGILLNSQMLDFSWPNRTANHSAPSLENSVQPGKRPLSFLLPTVVRPAEGLCGTYLALGANGAARGLSGLTQHLNRQPALFRVGFERKGLLFSRTPQNGSMNVLRT

SEQ ID NO: 34081 - protein, 225 aa, Homo sapiens
  Payload ID: 6712
  Gene Symbol: GGTLC1
  Gene Name: gamma-glutamyltransferase light chain 1
  Uniprot ID: Q9BX51
  ENSP ID: ENSP00000278765
MTSEFFSAQLRAQISDDTTHPISYYKPEFYMPDDGGTAHLSVVAEDGSAVSATSTINLYFGSKVRSPVSGILLNNEMDDFSSTSITNEFGVPPSPANFIQPGKQPLSSMCPTIMVGQDGQVRMVVGAAGGTQITMATALAIIYNLWFGYDVKWAVEEPRLHNQLLPNVTTVERNIDQEVTAALETRHHHTQITSTFIAVVQAIVRMAGGWAAASDSRKGGEPAGY

SEQ ID NO: 34082 - protein, 225 aa, Homo sapiens; identical to SEQ ID NO: 34081
  Payload ID: 6712
  Gene Symbol: GGTLC1
  Gene Name: gamma-glutamyltransferase light chain 1
  Uniprot ID: Q9BX51
  ENSP ID: ENSP00000286890

SEQ ID NO: 34083 - protein, 225 aa, Homo sapiens; identical to SEQ ID NO: 34081
  Payload ID: 6712
  Gene Symbol: GGTLC1
  Gene Name: gamma-glutamyltransferase light chain 1
  Uniprot ID: Q9BX51
  ENSP ID: ENSP00000337587

SEQ ID NO: 34084 - protein, 225 aa, Homo sapiens
  Payload ID: 6713
  Gene Symbol: GGTLC2
  Gene Name: gamma-glutamyltransferase light chain 2
  ENSP ID: ENSP00000415676
MTSEFFAAQLRAQISDDTTHPISYYKPEFYTPVDGGTAHLSVVAEDGSAVSATSTINLYFGSKVRSPVSEILFNDEMDDFSSPNITNEFGVPPSPANFIQPGKQPLSSMCPTIMVGQDGQVRMVVGAAGGTQITTATALAIIYNLWFGYDVKRAVEEPRLHNQLLPNVTTVERNIDQAVTAALETRHHHTQIASTFIAVVQAIVRTAGGWAAASDSRKGGEPAGY

SEQ ID NO: 34085 - protein, 218 aa, Homo sapiens
  Payload ID: 6713
  Gene Symbol: GGTLC2
  Gene Name: gamma-glutamyltransferase light chain 2
  Uniprot ID: Q14390
  ENSP ID: ENSP00000419751
MTSEFFAAQLRAQISDDTTHPISYYKPEFYTPVDGGTAHLSVVAEDGSAVSATSTINLYFGSKVRSPVSEILFNDEMDDFSSPNITNEFGVPPSPANFIQPGKQPLSSMCPTIMVGQDGQPPSHADHTPMPQAIIYNLWFGYDVKRAVEEPRLHNQLLPNVTTVERNIDQAVTAALETRHHHTQIASTFIAVVQAIVRTAGGWAAASDSRKGGEPAGY

SEQ ID NO: 34086 - protein, 225 aa, Homo sapiens; identical to SEQ ID NO: 34084
  Payload ID: 6713
  Gene Symbol: GGTLC2
  Gene Name: gamma-glutamyltransferase light chain 2
  ENSP ID: ENSP00000478615

SEQ ID NO: 34087 - protein, 225 aa, Homo sapiens; identical to SEQ ID NO: 34084
  Payload ID: 6713
  Gene Symbol: GGTLC2
  Gene Name: gamma-glutamyltransferase light chain 2
  ENSP ID: ENSP00000483019

SEQ ID NO: 34088 - protein, 225 aa, Homo sapiens
  Payload ID: 6714
  Gene Symbol: GGTLC3
  Gene Name: gamma-glutamyltransferase light chain 3
  Uniprot ID: B5MD39
  ENSP ID: ENSP00000477856
MTSEFFAAQLRSQISDHTTHPISYYKPEFYTPDDGGTAHLSVVAEDGSAVSATSTINLYFGSKVCSPVSGILFNNEWTTSALPAFTNEFGAPPSPANFIQPGKQPLLSMCPTIMVGQDGQVRMVVGAAGGTQITTDTALAIIYNLWFGYDVKRAVEEPRLHNKLLPNVTTVERNIDQAVTAALETRHHHTQIASTFIAVVQAIVRTAGGWAAASDSRKGGEPAGY

SEQ ID NO: 34089 - protein, 854 aa, Homo sapiens
  Payload ID: 6715
  Gene Symbol: GSAP
  Gene Name: gamma-secretase activating protein
  Uniprot ID: A4D1B5
  ENSP ID: ENSP00000257626
MALRLVADFDLGKDVLPWLRAQRAVSEASGAGSGGADVLENDYESLHVLNVERNGNIIYTYKDDKGNVVFGLYDCQTRQNELLYTFEKDLQVFSCSVNSERTLLAASLVQSTKEGKRNELQPGSKCLTLLVEIHPVNNVKVLKAVDSYIWVQFLYPHIESHPLPENHLLLISEEKYIEQFRIHVAQEDGNRVVIKNSGHLPRDRIAEDFVWAQWDMSEQRLYYIDLKKSRSILKCIQFYADESYNLMFEVPLDISLSNSGFKLVNFGCDYHQYRDKFSKHLTLCVFTNHTGSLCVCYSPKCASWGQITYSVFYIHKGHSKTFTTSLENVGSHMTKGITFLNLDYYVAVYLPGHFFHLLNVQHPDLICHNLFLTGNNEMIDMLPHCPLQSLSGSLVLDCCSGKLYRALLSQSSLLQLLQNTCLDCEKMAALHCALYCGQGAQFLEAQIIQWISENVSACHSFDLIQEFIIASSYWSVYSETSNMDKLLPHSSVLTWNTEIPGITLVTEDIALPLMKVLSFKGYWEKLNSNLEYVKYAKPHFHYNNSVVRREWHNLISEEKTGKRRSAAYVRNILDNAVKVISNLEARNLGPRLTPLLQEEDSHQRLLMGLMVSELKDHFLRHLQGVEKKKIEQMVLDYISKLLDLICHIVETNWRKHNLHSWVLHFNSRGSAAEFAVFHIMTRILEATNSLFLPLPPGFHTLHTILGVQCLPLHNLLHCIDSGVLLLTETAVIRLMKDLDNTEKNEKLKFSIIVRLPPLIGQKICRLWDHPMSSNIISRNHVTRLLQNYKKQPRNSMINKSSFSVEFLPLNYFIEILTDIESSNQALYPFEGHDNVDAEFVEEAALKHTAMLLGL

SEQ ID NO: 34090 - protein, 188 aa, Homo sapiens
  Payload ID: 6715
  Gene Symbol: GSAP
  Gene Name: gamma-secretase activating protein
  ENSP ID: ENSP00000396230
VLSFKGYWEKLNSNLEYVKYAKPHFHYNNSVVRREWHNLISEEKTGKRRSAAYVRNILDNAVKVISNLEARNLGPRLTPLLQEEDSHQRLLMGLLDLICHIVETNWRKHNLHSWVLHFNSRGSAAEFAVFHIMTRILEATNSLFLPLPPGFHTLHTILGVQCLPLHNLLHCIDSGVLLLTETAVIRLM

SEQ ID NO: 34091 - protein, 58 aa, Homo sapiens
  Payload ID: 6715
  Gene Symbol: GSAP
  Gene Name: gamma-secretase activating protein
  ENSP ID: ENSP00000402748
MLKEMEILFIPIRMIREMSSLDYMIVKPDKMSFYIPLRKTCKFSVALSTVKGLCLLQV

SEQ ID NO: 34092 - protein, 175 aa, Homo sapiens
  Payload ID: 6715
  Gene Symbol: GSAP
  Gene Name: gamma-secretase activating protein
  ENSP ID: ENSP00000415402
MTRILEATNSLFLPLPPGFHTLHTILGVQCLPLHNLLHCIDSGVLLLTETAVIRLMKDLDNTEKNEKLKFSIIVRLPPLIGQKICRLWDHPMSSNIISRNHVTRLLQNYKKQPRNSMINKSSFSVEFLPLNYFIEILTDIESSNQALYPFEGHDNVDAEFVEEAALKHTAMLLGL

SEQ ID NO: 34093 - protein, 358 aa, Homo sapiens
  Payload ID: 6716
  Gene Symbol: GDAP1
  Gene Name: ganglioside induced differentiation associated protein 1
  Uniprot ID: Q8TB36
  ENSP ID: ENSP00000220822
MAERQEEQRGSPPLRAEGKADAEVKLILYHWTHSFSSQKVRLVIAEKALKCEEHDVSLPLSEHNEPWFMRLNSTGEVPVLIHGENIICEATQIIDYLEQTFLDERTPRLMPDKESMYYPRVQHYRELLDSLPMDAYTHGCILHPELTVDSMIPAYATTRIRSQIGNTESELKKLAEENPDLQEAYIAKQKRLKSKLLDHDNVKYLKKILDELEKVLDQVETELQRRNEETPEEGQQPWLCGESFTLADVSLAVTLHRLKFLGFARRNWGNGKRPNLETYYERVLKRKTFNKVLGHVNNILISAVLPTAFRVAKKRAPKVLGTTLVVGLLAGVGYFAFMLFRKRLGSMILAFRPRPNYF

SEQ ID NO: 34094 - protein, 290 aa, Homo sapiens
  Payload ID: 6716
  Gene Symbol: GDAP1
  Gene Name: ganglioside induced differentiation associated protein 1
  Uniprot ID: Q8TB36
  ENSP ID: ENSP00000417006
MRLNSTGEVPVLIHGENIICEATQIIDYLEQTFLDERTPRLMPDKESMYYPRVQHYRELLDSLPMDAYTHGCILHPELTVDSMIPAYATTRIRSQIGNTESELKKLAEENPDLQEAYIAKQKRLKSKLLDHDNVKYLKKILDELEKVLDQVETELQRRNEETPEEGQQPWLCGESFTLADVSLAVTLHRLKFLGFARRNWGNGKRPNLETYYERVLKRKTFNKVLGHVNNILISAVLPTAFRVAKKRAPKVLGTTLVVGLLAGVGYFAFMLFRKRLGSMILAFRPRPNYF

SEQ ID NO: 34095 - protein, 60 aa, Homo sapiens
  Payload ID: 6716
  Gene Symbol: GDAP1
  Gene Name: ganglioside induced differentiation associated protein 1
  ENSP ID: ENSP00000430136
MAERQEEQRGSPPLRAEGKADAEVKLILYHWTHSFSSQKVRLVIAEKALKCEEHDKEHPG

SEQ ID NO: 34096 - protein, 367 aa, Homo sapiens
  Payload ID: 6717
  Gene Symbol: GDAP1L1
  Gene Name: ganglioside induced differentiation associated protein 1-like 1
  Uniprot ID: Q96MZ0
  ENSP ID: ENSP00000341782
MATPNNLTPTNCSWWPISALESDAAKPAEAPDAPEAASPAHWPRESLVLYHWTQSFSSQKVRLVIAEKGLVCEERDVSLPQSEHKEPWFMRLNLGEEVPVIIHRDNIISDYDQIIDYVERTFTGEHVVALMPEVGSLQHARVLQYRELLDALPMDAYTHGCILHPELTTDSMIPKYATAEIRRHLANATTDLMKLDHEEEPQLSEPYLSKQKKLMAKILEHDDVSYLKKILGELAMVLDQIEAELEKRKLENEGQKCELWLCGCAFTLADVLLGATLHRLKFLGLSKKYWEDGSRPNLQSFFERVQRRFAFRKVLGDIHTTLLSAVIPNAFRLVKRKPPSFFGASFLMGSLGGMGYFAYWYLKKKYI

SEQ ID NO: 34097 - protein, 147 aa, Homo sapiens
  Payload ID: 6717
  Gene Symbol: GDAP1L1
  Gene Name: ganglioside induced differentiation associated protein 1-like 1
  Uniprot ID: Q96MZ0
  ENSP ID: ENSP00000362043
MATPNNLTPTNCSWWPISALESDAAKPAEAPDAPEAASPAHWPRESLVLYHWTQSFSSQKVRLVIAEKGLVCEERDVSLPQSEHKEPWFMRLNLGEEVPVIIHRDNIISDYDQIIDYVERTFTGGPRLAASLELRGANPRGQLGRAQ

SEQ ID NO: 34098 - protein, 123 aa, Homo sapiens
  Payload ID: 6717
  Gene Symbol: GDAP1L1
  Gene Name: ganglioside induced differentiation associated protein 1-like 1
  ENSP ID: ENSP00000391714
LEHDDVSYLKKILGELAMVLDQIEAELEKRKLENEGQKCELWLCGCAFTLADVLLGATLHRLKFLGLSKKYWEDGSRPNLQSFFERVQRRFAFRKVSRWNCGDWLGSEGTLPQDKADIKTQLL

SEQ ID NO: 34099 - protein, 288 aa, Homo sapiens
  Payload ID: 6717
  Gene Symbol: GDAP1L1
  Gene Name: ganglioside induced differentiation associated protein 1-like 1
  ENSP ID: ENSP00000392881
MATPNNLTPTNCSWWPISALESDAAKPAEAPDAPEAASPAHWPRESLVLYHWTQSFSSQKVRLVIAEKGLVCEERDVSLPQSEHKEPWFMRLNLGEEVPVIIHRDNIISDYDQIIDYVERTFTGGHLANATTDLMKLDHEEEPQLSEPYLSKQKKLMAKILEHDDVSYLKKILGELAMVLDQIEAELEKRKLENEGQKCELWLCGCAFTLADVLLGATLHRLKFLGLSKKYWEDGSRPNLQSFFERVQRRFAFRKVLGDIHTTLLSAVIPNAFRLVKRKPPSFFGASF

SEQ ID NO: 34100 - protein, 251 aa, Homo sapiens
  Payload ID: 6717
  Gene Symbol: GDAP1L1
  Gene Name: ganglioside induced differentiation associated protein 1-like 1
  ENSP ID: ENSP00000404128
  MOD_RES (1)..(1): Any amino acid
XSFSSQKVRLVIAEKGLVCEERDVSLPQSEHKEPWFMRLNLGEEVPVIIHRDNIISDYDQIIDYVERTFTGEHVVALMPEVGSLQHARVLQYRELLDALPMDAYTHGCILHPELTTDSMIPKYATAEIRRHLANATTDLMKLDHEEEPQLSEPYLSKQKKLMAKILEHDDVSYLKKILGELAMVLDQIEAELEKRKLENEGGCQPWGRWGLQPTQPTLPLPSLSLFFPQKSQRTSQVVKRMGYGVRLRFKS

SEQ ID NO: 34101 - protein, 386 aa, Homo sapiens
  Payload ID: 6717
  Gene Symbol: GDAP1L1
  Gene Name: ganglioside induced differentiation associated protein 1-like 1
  Uniprot ID: Q96MZ0
  ENSP ID: ENSP00000440498
MATPNNLTPTNCSWWPISALESDAAKPAEAPDAPEAASPAHWPRESLVLYHWTQSFSSQKVRLVIAEKGLVCEERDVSLPQSEHKEPWFMRLNLGEEVPVIIHRDNIISDYDQIIDYVERTFTGGGRGRCPSGFPAQPLAVPTEHVVALMPEVGSLQHARVLQYRELLDALPMDAYTHGCILHPELTTDSMIPKYATAEIRRHLANATTDLMKLDHEEEPQLSEPYLSKQKKLMAKILEHDDVSYLKKILGELAMVLDQIEAELEKRKLENEGQKCELWLCGCAFTLADVLLGATLHRLKFLGLSKKYWEDGSRPNLQSFFERVQRRFAFRKVLGDIHTTLLSAVIPNAFRLVKRKPPSFFGASFLMGSLGGMGYFAYWYLKKKYI

SEQ ID NO: 34102 - protein, 278 aa, Homo sapiens
  Payload ID: 6717
  Gene Symbol: GDAP1L1
  Gene Name: ganglioside induced differentiation associated protein 1-like 1
  ENSP ID: ENSP00000478701
MRLNLGEEVPVIIHRDNIISDYDQIIDYVERTFTGEHVVALMPEVGSLQHARVLQYRELLDALPMDAYTHGCILHPELTTDSMIPKYATAEIRRHLANATTDLMKLDHEEEPQLSEPYLSKQKKLMAKILEHDDVSYLKKILGELAMVLDQIEAELEKRKLENEGQKCELWLCGCAFTLADVLLGATLHRLKFLGLSKKYWEDGSRPNLQSFFERVQRRFAFRKVLGDIHTTLLSAVIPNAFRLVKRKPPSFFGASFLMGSLGGMGYFAYWYLKKKYI

SEQ ID NO: 34103 - protein, 296 aa, Homo sapiens
  Payload ID: 6717
  Gene Symbol: GDAP1L1
  Gene Name: ganglioside induced differentiation associated protein 1-like 1
  ENSP ID: ENSP00000480502
MATPNNLTPTNCSWWPISALESDAAKPAEAPDAPEAASPAHWPRESLVLYHWTQSFSSQKVRLVIAEKGLVCEERDVSLPQSEHKEPWFMRLNLGEEVPVIIHRDNIISDYDQIIDYVERTFTGEHVVALMPEVGSLQHARVLQYRELLDALPMDAYTHGCILHPELTTDSMIPKYATAEIRRQKCELWLCGCAFTLADVLLGATLHRLKFLGLSKKYWEDGSRPNLQSFFERVQRRFAFRKVLGDIHTTLLSAVIPNAFRLVKRKPPSFFGASFLMGSLGGMGYFAYWYLKKKYI

SEQ ID NO: 34104 - protein, 364 aa, Homo sapiens
  Payload ID: 6717
  Gene Symbol: GDAP1L1
  Gene Name: ganglioside induced differentiation associated protein 1-like 1
  ENSP ID: ENSP00000483113
MATPNNLTPTNCSWWPISALESDGQASGGPRRSRGGQPAHWPRESLVLYHWTQSFSSQKVRLVIAEKGLVCEERDVSLPQSEHKEPWFMRLNLGEEVPVIIHRDNIISDYDQIIDYVERTFTGEHVVALMPEVGSLARTGAAVPELLDALPMDAYTHGCILHPELTTDSMIPKYATAEIRRHLANATTDLMKLDHEEEPQLSEPYLSKQKKLMAKILEHDDVSYLKKILGELAMVLDQIEGAGEEEAGERGAEMRAVALWLCLHLADVLLGATLHRLKFLGLSKKYWEDGSRPNLQSFFERVQRRFAFRKVLGDIHTTLLSAVIPNAFRLVKRKPPSFFGASFLMGSLGGMGYFAYWYLKKKYI

SEQ ID NO: 34105 - protein, 496 aa, Homo sapiens
  Payload ID: 6718
  Gene Symbol: GDAP2
  Gene Name: ganglioside induced differentiation associated protein 2
  Uniprot ID: Q9NXN4
  ENSP ID: ENSP00000358450
MDPLGAPSQFVDVDTLPSWGDSCQDELNSSDTTAEIFQEDTVRSPFLYNKDVNGKVVLWKGDVALLNCTAIVNTSNESLTDKNPVSESIFMLAGPDLKEDLQKLKGCRTGEAKLTKGFNLAARFIIHTVGPKYKSRYRTAAESSLYSCYRNVLQLAKEQSMSSVGFCVINSAKRGYPLEDATHIALRTVRRFLEIHGETIEKVVFAVSDLEEGTYQKLLPLYFPRSLKEENRSLPYLPADIGNAEGEPVVPERQIRISEKPGAPEDNQEEEDEGLGVDLSFIGSHAFARMEGDIDKQRKLILQGQLSEAALQKQHQRNYNRWLCQARSEDLSDIASLKALYQTGVDNCGRTVMVVVGRNIPVTLIDMDKALLYFIHVMDHIAVKEYVLVYFHTLTSEYNHLDSDFLKKLYDVVDVKYKRNLKAVYFVHPTFRSKVSTWFFTTFSVSGLKDKIHHVDSLHQLFSAISPEQIDFPPFVLEYDARVRSTRSSPSPGMVY

SEQ ID NO: 34106 - protein, 497 aa, Homo sapiens
  Payload ID: 6718
  Gene Symbol: GDAP2
  Gene Name: ganglioside induced differentiation associated protein 2
  Uniprot ID: Q9NXN4
  ENSP ID: ENSP00000358451
MDPLGAPSQFVDVDTLPSWGDSCQDELNSSDTTAEIFQEDTVRSPFLYNKDVNGKVVLWKGDVALLNCTAIVNTSNESLTDKNPVSESIFMLAGPDLKEDLQKLKGCRTGEAKLTKGFNLAARFIIHTVGPKYKSRYRTAAESSLYSCYRNVLQLAKEQSMSSVGFCVINSAKRGYPLEDATHIALRTVRRFLEIHGETIEKVVFAVSDLEEGTYQKLLPLYFPRSLKEENRSLPYLPADIGNAEGEPVVPERQIRISEKPGAPEDNQEEEDEGLGVDLSFIGSHAFARMEGDIDKQRKLILQGQLSEAALQKQHQRNYNRWLCQARSEDLSDIASLKALYQTGVDNCGRTVMVVVGRNIPVTLIDMDKALLYFIHVMDHIAVKEYVLVYFHTLTSEYNHLDSDFLKKLYDVVDVKYKRNLKAVYFVHPTFRSKVSTWFFTTFSVSGLKDKIHHVDSLHQLFSAISPEQIDFPPFVLEYDARENGPYYTSYPPSPDL

SEQ ID NO: 34107 - protein, 382 aa, Homo sapiens
  Payload ID: 6719
  Gene Symbol: GJA1
  Gene Name: gap junction protein, alpha 1, 43kDa
  Uniprot ID: P17302
  ENSP ID: ENSP00000282561
MGDWSALGKLLDKVQAYSTAGGKVWLSVLFIFRILLLGTAVESAWGDEQSAFRCNTQQPGCENVCYDKSFPISHVRFWVLQIIFVSVPTLLYLAHVFYVMRKEEKLNKKEEELKVAQTDGVNVDMHLKQIEIKKFKYGIEEHGKVKMRGGLLRTYIISILFKSIFEVAFLLIQWYIYGFSLSAVYTCKRDPCPHQVDCFLSRPTEKTIFIIFMLVVSLVSLALNIIELFYVFFKGVKDRVKGKSDPYHATSGALSPAKDCGSQKYAYFNGCSSPTAPLSPMSPPGYKLVTGDRNNSSCRNYNKQASEQNWANYSAEQNRMGQAGSTISNSHAQPFDFPDDNQNSKKLAAGHELQPLAIVDQRPSSRASSRASSRPRPDDLEI

SEQ ID NO: 34108 - protein, 543 aa, Homo sapiens
  Payload ID: 6720
  Gene Symbol: GJA10
  Gene Name: gap junction protein, alpha 10, 62kDa
  Uniprot ID: Q969M2
  ENSP ID: ENSP00000358358
MGDWNLLGGILEEVHSHSTIVGKIWLTILFIFRMLVLRVAAEDVWDDEQSAFACNTRQPGCNNICYDDAFPISLIRFWVLQIIFVSSPSLVYMGHALYRLRAFEKDRQRKKSHLRAQMENPDLDLEEQQRIDRELRRLEEQKRIHKVPLKGCLLRTYVLHILTRSVLEVGFMIGQYILYGFQMHPLYKCTQPPCPNAVDCFVSRPTEKTIFMLFMHSIAAISLLLNILEIFHLGIRKIMRTLYKKSSSEGIEDETGPPFHLKKYSVAQQCMICSSLPERISPLQANNQQQVIRVNVPKSKTMWQIPQPRQLEVDPSNGKKDWSEKDQHSGQLHVHSPCPWAGSAGNQHLGQQSDHSSFGLQNTMSQSWLGTTTAPRNCPSFAVGTWEQSQDPEPSGEPLTDLHSHCRDSEGSMRESGVWIDRSRPGSRKASFLSRLLSEKRHLHSDSGSSGSRNSSCLDFPHWENSPSPLPSVTGHRTSMVRQAALPIMELSQELFHSGCFLFPFFLPGVCMYVCVDREADGGGDYLWRDKIIHSIHSVKFNS

SEQ ID NO: 34109 - protein, 435 aa, Homo sapiens
  Payload ID: 6721
  Gene Symbol: GJA3
  Gene Name: gap junction protein, alpha 3, 46kDa
  Uniprot ID: Q9Y6H8
  ENSP ID: ENSP00000241125
MGDWSFLGRLLENAQEHSTVIGKVWLTVLFIFRILVLGAAAEDVWGDEQSDFTCNTQQPGCENVCYDRAFPISHIRFWALQIIFVSTPTLIYLGHVLHIVRMEEKKKEREEEEQLKRESPSPKEPPQDNPSSRDDRGRVRMAGALLRTYVFNIIFKTLFEVGFIAGQYFLYGFELKPLYRCDRWPCPNTVDCFISRPTEKTIFIIFMLAVACASLLLNMLEIYHLGWKKLKQGVTSRLGPDASEAPLGTADPPPLPPSSRPPAVAIGFPPYYAHTAAPLGQARAVGYPGAPPPAADFKLLALTEARGKGQSAKLYNGHHHLLMTEQNWANQAAERQPPALKAYPAASTPAAPSPVGSSSPPLAHEAEAGAAPLLLDGSGSSLEGSALAGTPEEEEQAVTTAAQMHQPPLPLGDPGRASKASRASSGRARPEDLAI

SEQ ID NO: 34110 - protein, 333 aa, Homo sapiens
  Payload ID: 6722
  Gene Symbol: GJA4
  Gene Name: gap junction protein, alpha 4, 37kDa
  Uniprot ID: P35212
  ENSP ID: ENSP00000343676
MGDWGFLEKLLDQVQEHSTVVGKIWLTVLFIFRILILGLAGESVWGDEQSDFECNTAQPGCTNVCYDQAFPISHIRYWVLQFLFVSTPTLVYLGHVIYLSRREERLRQKEGELRALPAKDPQVERALAAVERQMAKISVAEDGRLRIRGALMGTYVASVLCKSVLEAGFLYGQWRLYGWTMEPVFVCQRAPCPYLVDCFVSRPTEKTIFIIFMLVVGLISLVLNLLELVHLLCRCLSRGMRARQGQDAPPTQGTSSDPYTDQVFFYLPVGQGPSSPPCPTYNGLSSSEQNWANLTTEERLASSRPPLFLDPPPQNGQKPPSRPSSSASKKQYV

SEQ ID NO: 34111 - protein, 292 aa, Homo sapiens
  Payload ID: 6722
  Gene Symbol: GJA4
  Gene Name: gap junction protein, alpha 4, 37kDa
  ENSP ID: ENSP00000409186
MGDWGFLEKLLDQVQEHSTVVGKIWLTVLFIFRILILGLAGESVWGDEQSDFECNTAQPGCTNVCYDQAFPISHIRYWVLQFLFVSTPTLVYLGHVIYLSRREERLRQKEGELRALPAKDPQVERALAAVERQMAKISVAEDGRLRIRGALMGTYVASVLCKSVLEAGFLYGQWRLYGWTMEPVFVCQRAPCPYLVDCFVSRPTEKTIFIIFMLVVGLISLVLNLLELVHLLCRCLSRGMRARQGQDAPPTQGTSSDPYTDQVFFYLPVGQGPSSPPCPTYNGLSSSEQNWA

SEQ ID NO: 34112 - protein, 251 aa, Homo sapiens
  Payload ID: 6723
  Gene Symbol: GJA5
  Gene Name: gap junction protein, alpha 5, 40kDa
  ENSP ID: ENSP00000407645
MGDWSFLGNFLEEVHKHSTVVGKVWLTVLFIFRMLVLGTAAESSWGDEQADFRCDTIQPGCQNVCYDQAFPISHIRYWVLQIIFVSTPSLVYMGHAMHTVRMQEKRKLREAERAKEVRGSGSYEYPVAEKAELSCWEEGNGRIALQGTLLNTYVCSILIRTTMEVGFIVGQYFIYGIFLTTLHVCRRSPCPHPVNCYVSRPTEKNVFIVFMLAVAALSLLLSLAELYHLGWKKIRQRFVKPRQHMAKCQLS

SEQ ID NO: 34113 - protein, 358 aa, Homo sapiens
  Payload ID: 6723
  Gene Symbol: GJA5
  Gene Name: gap junction protein, alpha 5, 40kDa
  Uniprot ID: P36382
  ENSP ID: ENSP00000463851
MGDWSFLGNFLEEVHKHSTVVGKVWLTVLFIFRMLVLGTAAESSWGDEQADFRCDTIQPGCQNVCYDQAFPISHIRYWVLQIIFVSTPSLVYMGHAMHTVRMQEKRKLREAERAKEVRGSGSYEYPVAEKAELSCWEEGNGRIALQGTLLNTYVCSILIRTTMEVGFIVGQYFIYGIFLTTLHVCRRSPCPHPVNCYVSRPTEKNVFIVFMLAVAALSLLLSLAELYHLGWKKIRQRFVKPRQHMAKCQLSGPSVGIVQSCTPPPDFNQCLENGPGGKFFNPFSNNMASQQNTDNLVTEQVRGQEQTPGEGFIQVRYGQKPEVPNGVSPGHRLPHGYHSDKRRLSKASSKARSDDLSV

SEQ ID NO: 34114 - protein, 358 aa, Homo sapiens; identical to SEQ ID NO: 34113
  Payload ID: 6723
  Gene Symbol: GJA5
  Gene Name: gap junction protein, alpha 5, 40kDa
  Uniprot ID: P36382
  ENSP ID: ENSP00000484552

SEQ ID NO: 34115 - protein, 433 aa, Homo sapiens
  Payload ID: 6724
  Gene Symbol: GJA8
  Gene Name: gap junction protein, alpha 8, 50kDa
  Uniprot ID: P48165
  ENSP ID: ENSP00000358238
MGDWSFLGNILEEVNEHSTVIGRVWLTVLFIFRILILGTAAEFVWGDEQSDFVCNTQQPGCENVCYDEAFPISHIRLWVLQIIFVSTPSLMYVGHAVHYVRMEEKRKSREAEELGQQAGTNGGPDQGSVKKSSGSKGTKKFRLEGTLLRTYICHIIFKTLFEVGFIVGHYFLYGFRILPLYRCSRWPCPNVVDCFVSRPTEKTIFILFMLSVASVSLFLNVMELGHLGLKGIRSALKRPVEQPLGEIPEKSLHSIAVSSIQKAKGYQLLEEEKIVSHYFPLTEVGMVETSPLPAKPFNQFEEKISTGPLGDLSRGYQETLPSYAQVGAQEVEGEGPPAEEGAEPEVGEKKEEAERLTTEEQEKVAVPEGEKVETPGVDKEGEKEEPQSEKVSKQGLPAEKTPSLCPELTTDDARPLSRLSKASSRARSDDLTV

SEQ ID NO: 34116 - protein, 515 aa, Homo sapiens
  Payload ID: 6725
  Gene Symbol: GJA9
  Gene Name: gap junction protein, alpha 9, 59kDa
  Uniprot ID: P57773
  ENSP ID: ENSP00000350415
MGDWNLLGDTLEEVHIHSTMIGKIWLTILFIFRMLVLGVAAEDVWNDEQSGFICNTEQPGCRNVCYDQAFPISLIRYWVLQVIFVSSPSLVYMGHALYRLRVLEEERQRMKAQLRVELEEVEFEMPRDRRRLEQELCQLEKRKLNKAPLRGTLLCTYVIHIFTRSVVEVGFMIGQYLLYGFHLEPLFKCHGHPCPNIIDCFVSRPTEKTIFLLFMQSIATISLFLNILEIFHLGFKKIKRGLWGKYKLKKEHNEFHANKAKQNVAKYQSTSANSLKRLPSAPDYNLLVEKQTHTAVYPSLNSSSVFQPNPDNHSVNDEKCILDEQETVLSNEISTLSTSCSHFQHISSNNNKDTHKIFGKELNGNQLMEKRETEGKDSKRNYYSRGHRSIPGVAIDGENNMRQSPQTVFSLPANCDWKPRWLRATWGSSTEHENRGSPPKGNLKGQFRKGTVRTLPPSQGDSQSLDIPNTADSLGGLSFEPGLVRTCNNPVCPPNHVVSLTNNLIGRRVPTDLQI

SEQ ID NO: 34117 - protein, 515 aa, Homo sapiens; identical to SEQ ID NO: 34116
  Payload ID: 6725
  Gene Symbol: GJA9
  Gene Name: gap junction protein, alpha 9, 59kDa
  Uniprot ID: P57773
  ENSP ID: ENSP00000354020

SEQ ID NO: 34118 - protein, 283 aa, Homo sapiens
  Payload ID: 6726
  Gene Symbol: GJB1
  Gene Name: gap junction protein, beta 1, 32kDa
  Uniprot ID: P08034
  ENSP ID: ENSP00000354900
MNWTGLYTLLSGVNRHSTAIGRVWLSVIFIFRIMVLVVAAESVWGDEKSSFICNTLQPGCNSVCYDQFFPISHVRLWSLQLILVSTPALLVAMHVAHQQHIEKKMLRLEGHGDPLHLEEVKRHKVHISGTLWWTYVISVVFRLLFEAVFMYVFYLLYPGYAMVRLVKCDVYPCPNTVDCFVSRPTEKTVFTVFMLAASGICIILNVAEVVYLIIRACARRAQRRSNPPSRKGSGFGHRLSPEYKQNEINKLLSEQDGSLKDILRRSPGTGAGLAEKSDRCSAC

SEQ ID NO: 34119 - protein, 283 aa, Homo sapiens; identical to SEQ ID NO: 34118
  Payload ID: 6726
  Gene Symbol: GJB1
  Gene Name: gap junction protein, beta 1, 32kDa
  Uniprot ID: P08034
  ENSP ID: ENSP00000363134

SEQ ID NO: 34120 - protein, 283 aa, Homo sapiens; identical to SEQ ID NO: 34118
  Payload ID: 6726
  Gene Symbol: GJB1
  Gene Name: gap junction protein, beta 1, 32kDa
  Uniprot ID: P08034
  ENSP ID: ENSP00000363141

SEQ ID NO: 34121 - protein, 84 aa, Homo sapiens
  Payload ID: 6726
  Gene Symbol: GJB1
  Gene Name: gap junction protein, beta 1, 32kDa
  ENSP ID: ENSP00000407223
MNWTGLYTLLSGVNRHSTAIGRVWLSVIFIFRIMVLVVAAESVWGDEKSSFICNTLQPGCNSVCYDQFFPISHVRLWSLQLILV

SEQ ID NO: 34122 - protein, 226 aa, Homo sapiens
  Payload ID: 6727
  Gene Symbol: GJB2
  Gene Name: gap junction protein, beta 2, 26kDa
  Uniprot ID: P29033
  ENSP ID: ENSP00000372295
MDWGTLQTILGGVNKHSTSIGKIWLTVLFIFRIMILVVAAKEVWGDEQADFVCNTLQPGCKNVCYDHYFPISHIRLWALQLIFVSTPALLVAMHVAYRRHEKKRKFIKGEIKSEFKDIEEIKTQKVRIEGSLWWTYTSSIFFRVIFEAAFMYVFYVMYDGFSMQRLVKCNAWPCPNTVDCFVSRPTEKTVFTVFMIAVSGICILLNVTELCYLLIRYCSGKSKKPV

SEQ ID NO: 34123 - protein, 226 aa, Homo sapiens; identical to SEQ ID NO: 34122
  Payload ID: 6727
  Gene Symbol: GJB2
  Gene Name: gap junction protein, beta 2, 26kDa
  Uniprot ID: P29033
  ENSP ID: ENSP00000372299

SEQ ID NO: 34124 - protein, 270 aa, Homo sapiens
  Payload ID: 6728
  Gene Symbol: GJB3
  Gene Name: gap junction protein, beta 3, 31kDa
  Uniprot ID: O75712
  ENSP ID: ENSP00000362460
MDWKTLQALLSGVNKYSTAFGRIWLSVVFVFRVLVYVVAAERVWGDEQKDFDCNTKQPGCTNVCYDNYFPISNIRLWALQLIFVTCPSLLVILHVAYREERERRHRQKHGDQCAKLYDNAGKKHGGLWWTYLFSLIFKLIIEFLFLYLLHTLWHGFNMPRLVQCANVAPCPNIVDCYIARPTEKKIFTYFMVGASAVCIVLTICELCYLICHRVLRGLHKDKPRGGCSPSSSASRASTCRCHHKLVEAGEVDPDPGNNKLQASAPNLTPI

SEQ ID NO: 34125 - protein, 270 aa, Homo sapiens; identical to SEQ ID NO: 34124
  Payload ID: 6728
  Gene Symbol: GJB3
  Gene Name: gap junction protein, beta 3, 31kDa
  Uniprot ID: O75712
  ENSP ID: ENSP00000362464

SEQ ID NO: 34126 - protein, 266 aa, Homo sapiens
  Payload ID: 6729
  Gene Symbol: GJB4
  Gene Name: gap junction protein, beta 4, 30.3kDa
  Uniprot ID: Q9NTQ9
  ENSP ID: ENSP00000345868
MNWAFLQGLLSGVNKYSTVLSRIWLSVVFIFRVLVYVVAAEEVWDDEQKDFVCNTKQPGCPNVCYDEFFPVSHVRLWALQLILVTCPSLLVVMHVAYREERERKHHLKHGPNAPSLYDNLSKKRGGLWWTYLLSLIFKAAVDAGFLYIFHRLYKDYDMPRVVACSVEPCPHTVDCYISRPTEKKVFTYFMVTTAAICILLNLSEVFYLVGKRCMEIFGPRHRRPRCRECLPDTCPPYVLSQGGHPEDGNSVLMKAGSAPVDAGGYP

SEQ ID NO: 34127 - protein, 273 aa, Homo sapiens
  Payload ID: 6730
  Gene Symbol: GJB5
  Gene Name: gap junction protein, beta 5, 31.1kDa
  Uniprot ID: O95377
  ENSP ID: ENSP00000340811
MNWSIFEGLLSGVNKYSTAFGRIWLSLVFIFRVLVYLVTAERVWSDDHKDFDCNTRQPGCSNVCFDEFFPVSHVRLWALQLILVTCPSLLVVMHVAYREVQEKRHREAHGENSGRLYLNPGKKRGGLWWTYVCSLVFKASVDIAFLYVFHSFYPKYILPPVVKCHADPCPNIVDCFISKPSEKNIFTLFMVATAAICILLNLVELIYLVSKRCHECLAARKAQAMCTGHHPHGTTSSCKQDDLLSGDLIFLGSDSHPPLLPDRPRDHVKKTIL

SEQ ID NO: 34128 - protein, 261 aa, Homo sapiens
  Payload ID: 6731
  Gene Symbol: GJB6
  Gene Name: gap junction protein, beta 6, 30kDa
  Uniprot ID: O95452
  ENSP ID: ENSP00000241124
MDWGTLHTFIGGVNKHSTSIGKVWITVIFIFRVMILVVAAQEVWGDEQEDFVCNTLQPGCKNVCYDHFFPVSHIRLWALQLIFVSTPALLVAMHVAYYRHETTRKFRRGEKRNDFKDIEDIKKQKVRIEGSLWWTYTSSIFFRIIFEAAFMYVFYFLYNGYHLPWVLKCGIDPCPNLVDCFISRPTEKTVFTIFMISASVICMLLNVAELCYLLLKVCFRRSKRAQTQKNHPNHALKESKQNEMNELISDSGQNAITGFPS

SEQ ID NO: 34129 - protein, 261 aa, Homo sapiens; identical to SEQ ID NO: 34128
  Payload ID: 6731
  Gene Symbol: GJB6
  Gene Name: gap junction protein, beta 6, 30kDa
  Uniprot ID: O95452
  ENSP ID: ENSP00000348521

SEQ ID NO: 34130 - protein, 261 aa, Homo sapiens; identical to SEQ ID NO: 34128
  Payload ID: 6731
  Gene Symbol: GJB6
  Gene Name: gap junction protein, beta 6, 30kDa
  Uniprot ID: O95452
  ENSP ID: ENSP00000382938

SEQ ID NO: 34131 - protein, 261 aa, Homo sapiens; identical to SEQ ID NO: 34128
  Payload ID: 6731
  Gene Symbol: GJB6
  Gene Name: gap junction protein, beta 6, 30kDa
  Uniprot ID: O95452
  ENSP ID: ENSP00000382939

SEQ ID NO: 34132 - protein, 223 aa, Homo sapiens
  Payload ID: 6732
  Gene Symbol: GJB7
  Gene Name: gap junction protein, beta 7, 25kDa
  Uniprot ID: Q6PEY0
  ENSP ID: ENSP00000296882
MSWMFLRDLLSGVNKYSTGTGWIWLAVVFVFRLLVYMVAAEHVWKDEQKEFECNSRQPGCKNVCFDDFFPISQVRLWALQLIMVSTPSLLVVLHVAYHEGREKRHRKKLYVSPGTMDGGLWYAYLISLIVKTGFEIGFLVLFYKLYDGFSVPYLIKCDLKPCPNTVDCFISKPTEKTIFILFLVITSCLCIVLNFIELSFLVLKCFIKCCLQKYLKKPQVLSV

SEQ ID NO: 34133 - protein, 162 aa, Homo sapiens
  Payload ID: 6732
  Gene Symbol: GJB7
  Gene Name: gap junction protein, beta 7, 25kDa
  ENSP ID: ENSP00000358589
MSWMFLRDLLSGVNKYSTGTGWIWLAVVFVFRLLVYMVAAEHVWKDEQKEFECNSRQPGCKNVCFDDFFPISQVRLWALQLIMVSTPSLLVVLHVAYHEGREKRHRKKLYVSPGTMDGGLWYAYLISLIVKTGFEIGFLVLFYKLYDGFSVPYLIKCDLKPC

SEQ ID NO: 34134 - protein, 223 aa, Homo sapiens; identical to SEQ ID NO: 34132
  Payload ID: 6732
  Gene Symbol: GJB7
  Gene Name: gap junction protein, beta 7, 25kDa
  Uniprot ID: Q6PEY0
  ENSP ID: ENSP00000435355

SEQ ID NO: 34135 - protein, 321 aa, Homo sapiens
  Payload ID: 6733
  Gene Symbol: GJD2
  Gene Name: gap junction protein, delta 2, 36kDa
  Uniprot ID: Q9UKL4
  ENSP ID: ENSP00000290374
MGEWTILERLLEAAVQQHSTMIGRILLTVVVIFRILIVAIVGETVYDDEQTMFVCNTLQPGCNQACYDRAFPISHIRYWVFQIIMVCTPSLCFITYSVHQSAKQRERRYSTVFLALDRDPPESIGGPGGTGGGGSGGGKREDKKLQNAIVNGVLQNTENTSKETEPDCLEVKELTPHPSGLRTASKSKLRRQEGISRFYIIQVVFRNALEIGFLVGQYFLYGFSVPGLYECNRYPCIKEVECYVSRPTEKTVFLVFMFAVSGICVVLNLAELNHLGWRKIKLAVRGAQAKRKSIYEIRNKDLPRVSVPNFGRTQSSDSAYV

SEQ ID NO: 34136 - protein, 294 aa, Homo sapiens
  Payload ID: 6734
  Gene Symbol: GJD3
  Gene Name: gap junction protein, delta 3, 31.9kDa
  Uniprot ID: Q8N144
  ENSP ID: ENSP00000463752
MGEWAFLGSLLDAVQLQSPLVGRLWLVVMLIFRILVLATVGGAVFEDEQEEFVCNTLQPGCRQTCYDRAFPVSHYRFWLFHILLLSAPPVLFVVYSMHRAGKEAGGAEAAAQCAPGLPEAQCAPCALRARRARRCYLLSVALRLLAELTFLGGQALLYGFRVAPHFACAGPPCPHTVDCFVSRPTEKTVFVLFYFAVGLLSALLSVAELGHLLWKGRPRAGERDNRCNRAHEEAQKLLPPPPPPPPPPALPSRRPGPEPCAPPAYAHPAPASLRECGSGRGKASPATGRRDLAI

SEQ ID NO: 34137 - protein, 370 aa, Homo sapiens
  Payload ID: 6735
  Gene Symbol: GJD4
  Gene Name: gap junction protein, delta 4, 40.1kDa
  Uniprot ID: Q96KN9
  ENSP ID: ENSP00000315070
MEGVDLLGFLIITLNCNVTMVGKLWFVLTMLLRMLVIVLAGRPVYQDEQERFVCNTLQPGCANVCYDVFSPVSHLRFWLIQGVCVLLPSAVFSVYVLHRGATLAALGPRRCPDPREPASGQRRCPRPFGERGGLQVPDFSAGYIIHLLLRTLLEAAFGALHYFLFGFLAPKKFPCTRPPCTGVVDCYVSRPTEKSLLMLFLWAVSALSFLLGLADLVCSLRRRMRRRPGPPTSPSIRKQSGASGHAEGRRTDEEGGREEEGAPAPPGARAGGEGAGSPRRTSRVSGHTKIPDEDESEVTSSASEKLGRQPRGRPHREAAQDPRGSGSEEQPSAAPSRLAAPPSCSSLQPPDPPASSSGAPHLRARKSEWV

SEQ ID NO: 34138 - protein, 205 aa, Homo sapiens
  Payload ID: 6736
  Gene Symbol: GJE1
  Gene Name: gap junction protein, epsilon 1, 23kDa
  Uniprot ID: A6NN92
  ENSP ID: ENSP00000455469
MSLNYIKNFYEGCVKPPTVIGQFHTLFFGSIRIFFLGVLGFAVYGNEALHFICDPDKREVNLFCYNQFRPITPQVSFSALQLVIVLVPGALFHLYAACKSINQECILQKPIYTIIYILSVLLRISLAAIAFWLQIYLFGFQVKSLYLCDARSLGENMIIRCMVPEHFEKTIFLIAINTFTTITILLFVAEIFEIIFRRLYFPFRQ

SEQ ID NO: 34139 - protein, 396 aa, Homo sapiens
  Payload ID: 6737
  Gene Symbol: GJC1
  Gene Name: gap junction protein, gamma 1, 45kDa
  Uniprot ID: P36383
  ENSP ID: ENSP00000333193
MSWSFLTRLLEEIHNHSTFVGKIWLTVLIVFRIVLTAVGGESIYYDEQSKFVCNTEQPGCENVCYDAFAPLSHVRFWVFQIILVATPSVMYLGYAIHKIAKMEHGEADKKAARSKPYAMRWKQHRALEETEEDNEEDPMMYPEMELESDKENKEQSQPKPKHDGRRRIREDGLMKIYVLQLLARTVFEVGFLIGQYFLYGFQVHPFYVCSRLPCPHKIDCFISRPTEKTIFLLIMYGVTGLCLLLNIWEMLHLGFGTIRDSLNSKRRELEDPGAYNYPFTWNTPSAPPGYNIAVKPDQIQYTELSNAKIAYKQNKANTAQEQQYGSHEENLPADLEALQREIRMAQERLDLAVQAYSHQNNPHGPREKKAKVGSKAGSNKSTASSKSGDGKTSVWI

SEQ ID NO: 34140 - protein, 396 aa, Homo sapiens; identical to SEQ ID NO: 34139
  Payload ID: 6737
  Gene Symbol: GJC1
  Gene Name: gap junction protein, gamma 1, 45kDa
  Uniprot ID: P36383
  ENSP ID: ENSP00000411528

SEQ ID NO: 34141 - protein, 396 aa, Homo sapiens; identical to SEQ ID NO: 34139
  Payload ID: 6737
  Gene Symbol: GJC1
  Gene Name: gap junction protein, gamma 1, 45kDa
  Uniprot ID: P36383
  ENSP ID: ENSP00000466339

SEQ ID NO: 34142 - protein, 103 aa, Homo sapiens
  Payload ID: 6737
  Gene Symbol: GJC1
  Gene Name: gap junction protein, gamma 1, 45kDa
  ENSP ID: ENSP00000466392
MSWSFLTRLLEEIHNHSTFVGKIWLTVLIVFRIVLTAVGGESIYYDEQSKFVCNTEQPGCENVCYDAFAPLSHVRFWVFQIILVATPSVMYLGYAIHKIAKME

SEQ ID NO: 34143 - protein, 70 aa, Homo sapiens
  Payload ID: 6737
  Gene Symbol: GJC1
  Gene Name: gap junction protein, gamma 1, 45kDa
  ENSP ID: ENSP00000467090
MSWSFLTRLLEEIHNHSTFVGKIWLTVLIVFRIVLTAVGGESIYYDEQSKFVCNTEQPGCENVCYDAFAP

SEQ ID NO: 34144 - protein, 396 aa, Homo sapiens; identical to SEQ ID NO: 34139
  Payload ID: 6737
  Gene Symbol: GJC1
  Gene Name: gap junction protein, gamma 1, 45kDa
  Uniprot ID: P36383
  ENSP ID: ENSP00000467201

SEQ ID NO: 34145 - protein, 72 aa, Homo sapiens
  Payload ID: 6737
  Gene Symbol: GJC1
  Gene Name: gap junction protein, gamma 1, 45kDa
  ENSP ID: ENSP00000467626
MSWSFLTRLLEEIHNHSTFVGKIWLTVLIVFRIVLTAVGGESIYYDEQSKFVCNTEQPGCENVCYDAFAPLS

SEQ ID NO: 34146 - protein, 113 aa, Homo sapiens
  Payload ID: 6737
  Gene Symbol: GJC1
  Gene Name: gap junction protein, gamma 1, 45kDa
  ENSP ID: ENSP00000468258
  MOD_RES (1)..(1): Any amino acid
XSAPPGYNIAVKPDQIQYTELSNAKIAYKQNKANTAQEQQYGSHEENLPADLEALQREIRMAQERLDLAVQAYSHQNNPHGPREKKAKVGSKAGSNKSTASSKSGDGKTSVWI

SEQ ID NO: 34147 - protein, 260 aa, Homo sapiens
  Payload ID: 6737
  Gene Symbol: GJC1
  Gene Name: gap junction protein, gamma 1, 45kDa
  ENSP ID: ENSP00000468716
DPMMYPEMELESDKENKEQSQPKPKHDGRRRIREDGLMKIYVLQLLARTVFEVGFLIGQYFLYGFQVHPFYVCSRLPCPHKIDCFISRPTEKTIFLLIMYGVTGLCLLLNIWEMLHLGFGTIRDSLNSKRRELEDPGAYNYPFTWNTPSAPPGYNIAVKPDQIQYTELSNAKIAYKQNKANTAQEQQYGSHEENLPADLEALQREIRMAQERLDLAVQAYSHQNNPHGPREKKAKVGSKAGSNKSTASSKSGDGKTSVWI

SEQ ID NO: 34148 - protein, 439 aa, Homo sapiens
  Payload ID: 6738
  Gene Symbol: GJC2
  Gene Name: gap junction protein, gamma 2, 47kDa
  Uniprot ID: Q5T442
  ENSP ID: ENSP00000355675
MTNMSWSFLTRLLEEIHNHSTFVGKVWLTVLVVFRIVLTAVGGEAIYSDEQAKFTCNTRQPGCDNVCYDAFAPLSHVRFWVFQIVVISTPSVMYLGYAVHRLARASEQERRRALRRRPGPRRAPRAHLPPPHAGWPEPADLGEEEPMLGLGEEEEEEETGAAEGAGEEAEEAGAEEACTKAVGADGKAAGTPGPTGQHDGRRRIQREGLMRVYVAQLVARAAFEVAFLVGQYLLYGFEVRPFFPCSRQPCPHVVDCFVSRPTEKTVFLLVMYVVSCLCLLLNLCEMAHLGLGSAQDAVRGRRGPPASAPAPAPRPPPCAFPAAAAGLACPPDYSLVVRAAERARAHDQNLANLALQALRDGAAAGDRDRDSSPCVGLPAASRGPPRAGAPASRTGSATSAGTVGEQGRPGTHERPGAKPRAGSEKGSASSRDGKTTVWI

SEQ ID NO: 34149 - protein, 279 aa, Homo sapiens
  Payload ID: 6739
  Gene Symbol: GJC3
  Gene Name: gap junction protein, gamma 3, 30.2kDa
  Uniprot ID: Q8NFK1
  ENSP ID: ENSP00000325775
MCGRFLRRLLAEESRRSTPVGRLLLPVLLGFRLVLLAASGPGVYGDEQSEFVCHTQQPGCKAACFDAFHPLSPLRFWVFQVILVAVPSALYMGFTLYHVIWHWELSGKGKEEETLIQGREGNTDVPGAGSLRLLWAYVAQLGARLVLEGAALGLQYHLYGFQMPSSFACRREPCLGSITCNLSRPSEKTIFLKTMFGVSGFCLLFTFLELVLLGLGRWWRTWKHKSSSSKYFLTSESTRRHKKATDSLPVVETKEQFQEAVPGRSLAQEKQRPVGPRDA

SEQ ID NO: 34150 - protein, 217 aa, Homo sapiens
  Payload ID: 6740
  Gene Symbol: GAR1
  Gene Name: GAR1 homolog, ribonucleoprotein
  Uniprot ID: Q9NY12
  ENSP ID: ENSP00000226796
MSFRGGGRGGFNRGGGGGGFNRGGSSNHFRGGGGGGGGGNFRGGGRGGFGRGGGRGGFNKGQDQGPPERVVLLGEFLHPCEDDIVCKCTTDENKVPYFNAPVYLENKEQIGKVDEIFGQLRDFYFSVKLSENMKASSFKKLQKFYIDPYKLLPLQRFLPRPPGEKGPPRGGGRGGRGGGRGGGGRGGGRGGGFRGGRGGGGGGFRGGRGGGFRGRGH

SEQ ID NO: 34151 - protein, 217 aa, Homo sapiens; identical to SEQ ID NO: 34150
  Payload ID: 6740
  Gene Symbol: GAR1
  Gene Name: GAR1 homolog, ribonucleoprotein
  Uniprot ID: Q9NY12
  ENSP ID: ENSP00000378127

SEQ ID NO: 34152 - protein, 445 aa, Homo sapiens
  Payload ID: 6741
  Gene Symbol: GSDMA
  Gene Name: gasdermin A
  Uniprot ID: Q96QA5
  ENSP ID: ENSP00000301659
MTMFENVTRALARQLNPRGDLTPLDSLIDFKRFHPFCLVLRKRKSTLFWGARYVRTDYTLLDVLEPGSSPSDPTDTGNFGFKNMLDTRVEGDVDVPKTVKVKGTAGLSQNSTLEVQTLSVAPKALETVQERKLAADHPFLKEMQDQGENLYVVMEVVETVQEVTLERAGKAEACFSLPFFAPLGLQGSINHKEAVTIPKGCVLAFRVRQLMVKGKDEWDIPHICNDNMQTFPPGEKSGEEKVILIQASDVGDVHEGFRTLKEEVQRETQQVEKLSRVGQSSLLSSLSKLLGKKKELQDLELALEGALDKGHEVTLEALPKDVLLSKEAVGAILYFVGALTELSEAQQKLLVKSMEKKILPVQLKLVESTMEQNFLLDKEGVFPLQPELLSSLGDEELTLTEALVGLSGLEVQRSGPQYMWDPDTLPRLCALYAGLSLLQQLTKAS

SEQ ID NO: 34153 - protein, 158 aa, Homo sapiens
  Payload ID: 6741
  Gene Symbol: GSDMA
  Gene Name: gasdermin A
  ENSP ID: ENSP00000461985
MTMFENVTRALARQLNPRGDLTPLDSLIDFKRFHPFCLVLRKRKSTLFWGARYVRTDYTLLDVLEPGSSPSDPTDTGNFGFKNMLDTRVEGDVDVPKTVKVKGTAGLSQNSTLEVQTLSVAPKALETVQERKLAADHPFLKEMQDQGENLYVVMEVVE

SEQ ID NO: 34154 - protein, 403 aa, Homo sapiens
  Payload ID: 6742
  Gene Symbol: GSDMB
  Gene Name: gasdermin B
  Uniprot ID: Q8TAX9
  ENSP ID: ENSP00000312584
MFSVFEEITRIVVKEMDAGGDMIAVRSLVDADRFRCFHLVGEKRTFFGCRHYTTGLTLMDILDTDGDKWLDELDSGLQGQKAEFQILDNVDSTGELIVRLPKEITISGSFQGFHHQKIKISENRISQQYLATLENRKLKRELPFSFRSINTRENLYLVTETLETVKEETLKSDRQYKFWSQISQGHLSYKHKGQREVTIPPNRVLSYRVKQLVFPNKETMKKDGASSCLGKSLGSEDSRNMKEKLEDMESVLKDLTEEKRKDVLNSLAKCLGKEDIRQDLEQRVSEVLISGELHMEDPDKPLLSSLFNAAGVLVEARAKAILDFLDALLELSEEQQFVAEALEKGTLPLLKDQVKSVMEQNWDELASSPPDMDYDPEARILCALYVVVSILLELAEGPTSVSS

SEQ ID NO: 34155 - protein, 416 aa, Homo sapiens
  Payload ID: 6742
  Gene Symbol: GSDMB
  Gene Name: gasdermin B
  Uniprot ID: Q8TAX9
  ENSP ID: ENSP00000353465
MFSVFEEITRIVVKEMDAGGDMIAVRSLVDADRFRCFHLVGEKRTFFGCRHYTTGLTLMDILDTDGDKWLDELDSGLQGQKAEFQILDNVDSTGELIVRLPKEITISGSFQGFHHQKIKISENRISQQYLATLENRKLKRELPFSFRSINTRENLYLVTETLETVKEETLKSDRQYKFWSQISQGHLSYKHKGQREVTIPPNRVLSYRVKQLVFPNKETMNIHFRGKTKSFPEEKDGASSCLGKSLGSEDSRNMKEKLEDMESVLKDLTEEKRKDVLNSLAKCLGKEDIRQDLEQRVSEVLISGELHMEDPDKPLLSSLFNAAGVLVEARAKAILDFLDALLELSEEQQFVAEALEKGTLPLLKDQVKSVMEQNWDELASSPPDMDYDPEARILCALYVVVSILLELAEGPTSVSS

SEQ ID NO: 34156 - protein, 394 aa, Homo sapiens
  Payload ID: 6742
  Gene Symbol: GSDMB
  Gene Name: gasdermin B
  Uniprot ID: Q8TAX9
  ENSP ID: ENSP00000377729
MFSVFEEITRIVVKEMDAGGDMIAVRSLVDADRFRCFHLVGEKRTFFGCRHYTTGLTLMDILDTDGDKWLDELDSGLQGQKAEFQILDNVDSTGELIVRLPKEITISGSFQGFHHQKIKISENRISQQYLATLENRKLKRELPFSFRSINTRENLYLVTETLETVKEETLKSDRQYKFWSQISQGHLSYKHKGQREVTIPPNRVLSYRVKQLVFPNKETMRKSLGSEDSRNMKEKLEDMESVLKDLTEEKRKDVLNSLAKCLGKEDIRQDLEQRVSEVLISGELHMEDPDKPLLSSLFNAAGVLVEARAKAILDFLDALLELSEEQQFVAEALEKGTLPLLKDQVKSVMEQNWDELASSPPDMDYDPEARILCALYVVVSILLELAEGPTSVSS

SEQ ID NO: 34157 - protein, 403 aa, Homo sapiens; identical to SEQ ID NO: 34154
  Payload ID: 6742
  Gene Symbol: GSDMB
  Gene Name: gasdermin B
  Uniprot ID: Q8TAX9
  ENSP ID: ENSP00000377733

SEQ ID NO: 34158 - protein, 416 aa, Homo sapiens; identical to SEQ ID NO: 34155
  Payload ID: 6742
  Gene Symbol: GSDMB
  Gene Name: gasdermin B
  Uniprot ID: Q8TAX9
  ENSP ID: ENSP00000415049

SEQ ID NO: 34159 - protein, 183 aa, Homo sapiens
  Payload ID: 6742
  Gene Symbol: GSDMB
  Gene Name: gasdermin B
  ENSP ID: ENSP00000428217
MFSVFEEITRIVVKEMDAGGDMIAVRSLVDADRFRCFHLVGEKRTFFGCRHYTTGLTLMDILDTDGDKWLDELDSGLQGQKAEFQILDNVDSTGELIVRLPKEITISGSFQGFHHQKIKISENRISQQYLATLENREGWCFILFRKVFGFGGFQKHEGEVGGHGECPQGPDRGEEKRCAKLPR

SEQ ID NO: 34160 - protein, 203 aa, Homo sapiens
  Payload ID: 6742
  Gene Symbol: GSDMB
  Gene Name: gasdermin B
  ENSP ID: ENSP00000428712
MFSVFEEITRIVVKEMDAGGDMIAVRSLVDADRFRCFHLVGEKRTFFGCRHYTTGLTLMDILDTDGDKWLDELDSGLQGQKAEFQILDNVDSTGELIVRLPKEITISGSFQGFHHQKIKISENRISQQYLATLENRKLKRELPFSFRSINTRENLYLVTETLETVKEETLKSDRQYKFWSQISQGHLSYKHKESLWVRRIPET

SEQ ID NO: 34161 - protein, 200 aa, Homo sapiens
  Payload ID: 6742
  Gene Symbol: GSDMB
  Gene Name: gasdermin B
  ENSP ID: ENSP00000429265
MFSVFEEITRIVVKEMDAGGDMIAVRSLVDADRFRCFHLVGEKRTFFGCRHYTTGLTLMDILDTDGDKWLDELDSGLQGQKAEFQILDNVDSTGELIVRLPKEITISGSFQGFHHQKIKISENRISQQYLATLENRKLKRELPFSFRSINTRENLYLVTETLETVKEETLKSDRQYKFWSQISQGHLSYKHKRRMVLHPV

SEQ ID NO: 34162 - protein, 407 aa, Homo sapiens
  Payload ID: 6742
  Gene Symbol: GSDMB
  Gene Name: gasdermin B
  Uniprot ID: Q8TAX9
  ENSP ID: ENSP00000430157
MFSVFEEITRIVVKEMDAGGDMIAVRSLVDADRFRCFHLVGEKRTFFGCRHYTTGLTLMDILDTDGDKWLDELDSGLQGQKAEFQILDNVDSTGELIVRLPKEITISGSFQGFHHQKIKISENRISQQYLATLENRKLKRELPFSFRSINTRENLYLVTETLETVKEETLKSDRQYKFWSQISQGHLSYKHKGQREVTIPPNRVLSYRVKQLVFPNKETMNIHFRGKTKSFPEGKSLGSEDSRNMKEKLEDMESVLKDLTEEKRKDVLNSLAKCLGKEDIRQDLEQRVSEVLISGELHMEDPDKPLLSSLFNAAGVLVEARAKAILDFLDALLELSEEQQFVAEALEKGTLPLLKDQVKSVMEQNWDELASSPPDMDYDPEARILCALYVVVSILLELAEGPTSVSS

SEQ ID NO: 34163 - protein, 74 aa, Homo sapiens
  Payload ID: 6742
  Gene Symbol: GSDMB
  Gene Name: gasdermin B
  ENSP ID: ENSP00000463519
  MOD_RES (1)..(1): Any amino acid
XATLENRKLKRELPFSFRSINTRENLYLVTETLETVKEETLKSDRQYKFWSQISQGHLSYKHKESLWVRRIPET

SEQ ID NO: 34164 - protein, 508 aa, Homo sapiens
  Payload ID: 6743
  Gene Symbol: GSDMC
  Gene Name: gasdermin C
  Uniprot ID: Q9BYG8
  ENSP ID: ENSP00000276708
MPSMLERISKNLVKEIGSKDLTPVKYLLSATKLRQFVILRKKKDSRSSFWEQSDYVPVEFSLNDILEPSSSVLETVVTGPFHFSDIMIQKHKADMGVNVGIEVSVSGEASVDHGCSLEFQIVTIPSPNLEDFQKRKLLDPEPSFLKECRRRGDNLYVVTEAVELINNTVLYDSSSVNILGKIALWITYGKGQGQGESLRVKKKALTLQKGMVMAYKRKQLVIKEKAILISDDDEQRTFQDEYEISEMVGYCAARSEGLLPSFHTISPTLFNASSNDMKLKPELFLTQQFLSGHLPKYEQVHILPVGRIEEPFWQNFKHLQEEVFQKIKTLAQLSKDVQDVMFYSILAMLRDRGALQDLMNMLELDSSGHLDGPGGAILKKLQQDSNHAWFNPKDPILYLLEAIMVLSDFQHDLLACSMEKRILLQQQELVRSILEPNFRYPWSIPFTLKPELLAPLQSEGLAITYGLLEECGLRMELDNPRSTWDVEAKMPLSALYGTLSLLQQLAEA

SEQ ID NO: 34165 - protein, 508 aa, Homo sapiens; identical to SEQ ID NO: 34164
  Payload ID: 6743
  Gene Symbol: GSDMC
  Gene Name: gasdermin C
  Uniprot ID: Q9BYG8
  ENSP ID: ENSP00000482343

SEQ ID NO: 34166 - protein, 484 aa, Homo sapiens
  Payload ID: 6744
  Gene Symbol: GSDMD
  Gene Name: gasdermin D
  Uniprot ID: P57764
  ENSP ID: ENSP00000262580
MGSAFERVVRRVVQELDHGGEFIPVTSLQSSTGFQPYCLVVRKPSSSWFWKPRYKCVNLSIKDILEPDAAEPDVQRGRSFHFYDAMDGQIQGSVELAAPGQAKIAGGAAVSDSSSTSMNVYSLSVDPNTWQTLLHERHLRQPEHKVLQQLRSRGDNVYVVTEVLQTQKEVEVTRTHKREGSGRFSLPGATCLQGEGQGHLSQKKTVTIPSGSTLAFRVAQLVIDSDLDVLLFPDKKQRTFQPPATGHKRSTSEGAWPQLPSGLSMMRCLHNFLTDGVPAEGAFTEDFQGLRAEVETISKELELLDRELCQLLLEGLEGVLRDQLALRALEEALEQGQSLGPVEPLDGPAGAVLECLVLSSGMLVPELAIPVVYLLGALTMLSETQHKLLAEALESQTLLGPLELVGSLLEQSAPWQERSTMSLPPGLLGNSWGEGAPAWVLLDECGLELGEDTPHVCWEPQAQGRMCALYASLALLSGLSQEPH

SEQ ID NO: 34167 - protein, 48 aa, Homo sapiens
  Payload ID: 6744
  Gene Symbol: GSDMD
  Gene Name: gasdermin D
  ENSP ID: ENSP00000432351
MGSAFERVVRRVVQELDHGGEFIPVTSLQSSTGFQPYCLVVRKPSSSW

SEQ ID NO: 34168 - protein, 484 aa, Homo sapiens; identical to SEQ ID NO: 34166
  Payload ID: 6744
  Gene Symbol: GSDMD
  Gene Name: gasdermin D
  Uniprot ID: P57764
  ENSP ID: ENSP00000433209

SEQ ID NO: 34169 - protein, 231 aa, Homo sapiens
  Payload ID: 6744
  Gene Symbol: GSDMD
  Gene Name: gasdermin D
  ENSP ID: ENSP00000433263
  MOD_RES (1)..(1): Any amino acid
XRELCQLLLEGLEGVLRDQLALRALEEALEQGQSLGPVEPLDGPAGAVLECLVLSSGMLVPELAIPVVYLLGALTMLSETQHKLLAEALESQTLLGPLELPLGAECPVAGAQHHVPAPRAPGEQLGRRSTGLGLAGRVWPRAGGGHSPRVLGAAGPGPHVCTLRLPGTAIRTEPGAPLACARAWPGSSPAGQSVCPPAASPRKARSPVAMWPVYHGAQELGKHNKGGIRRK

SEQ ID NO: 34170 - protein, 532 aa, Homo sapiens
  Payload ID: 6744
  Gene Symbol: GSDMD
  Gene Name: gasdermin D
  ENSP ID: ENSP00000433958
MISAHCNLHLPGSSDSLASASQLLLAGRLPGRADAPDAPPSGRRRSRSMGSAFERVVRRVVQELDHGGEFIPVTSLQSSTGFQPYCLVVRKPSSSWFWKPRYKCVNLSIKDILEPDAAEPDVQRGRSFHFYDAMDGQIQGSVELAAPGQAKIAGGAAVSDSSSTSMNVYSLSVDPNTWQTLLHERHLRQPEHKVLQQLRSRGDNVYVVTEVLQTQKEVEVTRTHKREGSGRFSLPGATCLQGEGQGHLSQKKTVTIPSGSTLAFRVAQLVIDSDLDVLLFPDKKQRTFQPPATGHKRSTSEGAWPQLPSGLSMMRCLHNFLTDGVPAEGAFTEDFQGLRAEVETISKELELLDRELCQLLLEGLEGVLRDQLALRALEEALEQGQSLGPVEPLDGPAGAVLECLVLSSGMLVPELAIPVVYLLGALTMLSETQHKLLAEALESQTLLGPLELVGSLLEQSAPWQERSTMSLPPGLLGNSWGEGAPAWVLLDECGLELGEDTPHVCWEPQAQGRMCALYASLALLSGLSQEPH

SEQ ID NO: 34171 - protein, 164 aa, Homo sapiens
  Payload ID: 6744
  Gene Symbol: GSDMD
  Gene Name: gasdermin D
  ENSP ID: ENSP00000434386
MGSAFERVVRRVVQELDHGGEFIPVTSLQSSTGFQPYCLVVRKPSSSWFWKPRYKCVNLSIKDILEPDAAEPDVQRGRSFHFYDAMDGQIQGSVELAAPGQAKIAGGAAVSDSSSTSMNVYSLSVDPNTWQTLLHERHLRQPEHKVLQQLRSRGDNVYVVTEVL

SEQ ID NO: 34172 - protein, 114 aa, Homo sapiens
  Payload ID: 6744
  Gene Symbol: GSDMD
  Gene Name: gasdermin D
  ENSP ID: ENSP00000434452
MGSAFERVVRRVVQELDHGGEFIPVTSLQSSTGFQPYCLVVRKPSSSWFWKPRYKCVNLSIKDILEPDAAEPDVQRGRSFHFYDAMDGQIQGSVELAAPGQAKIAGGAAVSDSS

SEQ ID NO: 34173 - protein, 277 aa, Homo sapiens
  Payload ID: 6744
  Gene Symbol: GSDMD
  Gene Name: gasdermin D
  ENSP ID: ENSP00000436684
MELQAQRRPWRTQLGSMGSAFERVVRRVVQELDHGGEFIPVTSLQSSTGFQPYCLVVRKPSSSWFWKPRYKCVNLSIKDILEPDAAEPDVQRGRSFHFYDAMDGQIQGSVELAAPGQAKIAGGAAVSDSSSTSMNVYSLSVDPNTWQTLLHERHLRQPEHKVLQQLRSRGDNVYVVTEVLQTQKEVEVTRTHKREGSGRFSLPGATCLQGEGQGHLSQKKTVTIPSGSTLAFRVAQLVIDSDLDVLLFPDKKQRTFQPPATGHKRSTSEGAWPQLPS

SEQ ID NO: 34174 - protein, 153 aa, Homo sapiens
  Payload ID: 6744
  Gene Symbol: GSDMD
  Gene Name: gasdermin D
  ENSP ID: ENSP00000437065
MGSAFERVVRRVVQELDHGGEFIPVTSLQSSTGFQPYCLVVRKPSSSWFWKPRYKCVNLSIKDILEPDAAEPDVQRGRSFHFYDAMDGQIQGSVELAAPGQAKIAGGAAVSDSSSTSMNVYSLSVDPNTWQTLLHERHLRQPEHKVLQQLRSR

SEQ ID NO: 34175 - protein, 484 aa, Homo sapiens; identical to SEQ ID NO: 34166
  Payload ID: 6744
  Gene Symbol: GSDMD
  Gene Name: gasdermin D
  Uniprot ID: P57764
  ENSP ID: ENSP00000482096

SEQ ID NO: 34176 - protein, 532 aa, Homo sapiens; identical to SEQ ID NO: 34170
  Payload ID: 6744
  Gene Symbol: GSDMD
  Gene Name: gasdermin D
  ENSP ID: ENSP00000486410

SEQ ID NO: 34177 - protein, 231 aa, Homo sapiens; identical to SEQ ID NO: 34169
  Payload ID: 6744
  Gene Symbol: GSDMD
  Gene Name: gasdermin D
  ENSP ID: ENSP00000487774
  MOD_RES (1)..(1): Any amino acid

SEQ ID NO: 34178 - protein, 164 aa, Homo sapiens; identical to SEQ ID NO: 34171
  Payload ID: 6744
  Gene Symbol: GSDMD
  Gene Name: gasdermin D
  ENSP ID: ENSP00000487934

SEQ ID NO: 34179 - protein, 484 aa, Homo sapiens; identical to SEQ ID NO: 34166
  Payload ID: 6744
  Gene Symbol: GSDMD
  Gene Name: gasdermin D
  Uniprot ID: P57764
  ENSP ID: ENSP00000488012

SEQ ID NO: 34180 - protein, 277 aa, Homo sapiens; identical to SEQ ID NO: 34173
  Payload ID: 6744
  Gene Symbol: GSDMD
  Gene Name: gasdermin D
  ENSP ID: ENSP00000488049

SEQ ID NO: 34181 - protein, 114 aa, Homo sapiens; identical to SEQ ID NO: 34172
  Payload ID: 6744
  Gene Symbol: GSDMD
  Gene Name: gasdermin D
  ENSP ID: ENSP00000488317

SEQ ID NO: 34182 - protein, 153 aa, Homo sapiens; identical to SEQ ID NO: 34174
  Payload ID: 6744
  Gene Symbol: GSDMD
  Gene Name: gasdermin D
  ENSP ID: ENSP00000488419

SEQ ID NO: 34183 - protein, 48 aa, Homo sapiens; identical to SEQ ID NO: 34167
  Payload ID: 6744
  Gene Symbol: GSDMD
  Gene Name: gasdermin D
  ENSP ID: ENSP00000488563

SEQ ID NO: 34184 - protein, 153 aa, Homo sapiens
  Payload ID: 6745
  Gene Symbol: GIP
  Gene Name: gastric inhibitory polypeptide
  Uniprot ID: P09681
  ENSP ID: ENSP00000350005
MVATKTFALLLLSLFLAVGLGEKKEGHFSALPSLPVGSHAKVSSPQPRGPRYAEGTFISDYSIAMDKIHQQDFVNWLLAQKGKKNDWKHNITQREARALELASQANRKEEEAVEPQSSPAKNPSDEDLLRDLLIQELLACLLDQTNLCRLRSR

SEQ ID NO: 34185 - protein, 419 aa, Homo sapiens
  Payload ID: 6746
  Gene Symbol: GIPR
  Gene Name: gastric inhibitory polypeptide receptor
  Uniprot ID: P48546
  ENSP ID: ENSP00000263281
MTTSPILQLLLRLSLCGLLLQRAETGSKGQTAGELYQRWERYRRECQETLAAAEPPSGLACNGSFDMYVCWDYAAPNATARASCPWYLPWHHHVAAGFVLRQCGSDGQWGLWRDHTQCENPEKNEAFLDQRLILERLQVMYTVGYSLSLATLLLALLILSLFRRLHCTRNYIHINLFTSFMLRAAAILSRDRLLPRPGPYLGDQALALWNQALAACRTAQIVTQYCVGANYTWLLVEGVYLHSLLVLVGGSEEGHFRYYLLLGWGAPALFVIPWVIVRYLYENTQCWERNEVKAIWWIIRTPILMTILINFLIFIRILGILLSKLRTRQMRCRDYRLRLARSTLTLVPLLGVHEVVFAPVTEEQARGALRFAKLGFEIFLSSFQGFLVSVLYCFINKEVGRDPAAAPALWRQRGVRRRL

SEQ ID NO: 34186 - protein, 430 aa, Homo sapiens
  Payload ID: 6746
  Gene Symbol: GIPR
  Gene Name: gastric inhibitory polypeptide receptor
  Uniprot ID: P48546
  ENSP ID: ENSP00000305321
MTTSPILQLLLRLSLCGLLLQRAETGSKGQTAGELYQRWERYRRECQETLAAAEPPSVAAGFVLRQCGSDGQWGLWRDHTQCENPEKNEAFLDQRLILERLQVMYTVGYSLSLATLLLALLILSLFRRLHCTRNYIHINLFTSFMLRAAAILSRDRLLPRPGPYLGDQALALWNQALAACRTAQIVTQYCVGANYTWLLVEGVYLHSLLVLVGGSEEGHFRYYLLLGWGAPALFVIPWVIVRYLYENTQCWERNEVKAIWWIIRTPILMTILINFLIFIRILGILLSKLRTRQMRCRDYRLRLARSTLTLVPLLGVHEVVFAPVTEEQARGALRFAKLGFEIFLSSFQGFLVSVLYCFINKEVQSEIRRGWHHCRLRRSLGEEQRQLPERAFRALPSGSGPGEVPTSRGLSSGTLPGPGNEASRELESYC

SEQ ID NO: 34187 - protein, 17 aa, Homo sapiens
  Payload ID: 6746
  Gene Symbol: GIPR
  Gene Name: gastric inhibitory polypeptide receptor
  ENSP ID: ENSP00000465385
MYVCWDYAAPNATARAS

SEQ ID NO: 34188 - protein, 265 aa, Homo sapiens
  Payload ID: 6746
  Gene Symbol: GIPR
  Gene Name: gastric inhibitory polypeptide receptor
  ENSP ID: ENSP00000467342
MTTSPILQLLLRLSLCGLLLQRAETGSKGQTAGELYQRWERYRRECQETLAAAEPPSGLACNGSFDMYVCWDYAAPNATARASCPWYLPWHHHVAAGFVLRQCGSDGQWGLWRDHTQCENPEKNEAFLDQRLILERLQVMYTVGYSLSLATLLLALLILSLFRRLHCTRNYIHINLFTSFMLRAAAILSRDRLLPRPGPYLGDQALALWNQALAACRTAQIVTQYCVGANYTWLLVEGVYLHSLLVLVGGSEEGHFRYYLLLGWD

SEQ ID NO: 34189 - protein, 466 aa, Homo sapiens
  Payload ID: 6746
  Gene Symbol: GIPR
  Gene Name: gastric inhibitory polypeptide receptor
  Uniprot ID: P48546
  ENSP ID: ENSP00000467494
MTTSPILQLLLRLSLCGLLLQRAETGSKGQTAGELYQRWERYRRECQETLAAAEPPSGLACNGSFDMYVCWDYAAPNATARASCPWYLPWHHHVAAGFVLRQCGSDGQWGLWRDHTQCENPEKNEAFLDQRLILERLQVMYTVGYSLSLATLLLALLILSLFRRLHCTRNYIHINLFTSFMLRAAAILSRDRLLPRPGPYLGDQALALWNQALAACRTAQIVTQYCVGANYTWLLVEGVYLHSLLVLVGGSEEGHFRYYLLLGWGAPALFVIPWVIVRYLYENTQCWERNEVKAIWWIIRTPILMTILINFLIFIRILGILLSKLRTRQMRCRDYRLRLARSTLTLVPLLGVHEVVFAPVTEEQARGALRFAKLGFEIFLSSFQGFLVSVLYCFINKEVQSEIRRGWHHCRLRRSLGEEQRQLPERAFRALPSGSGPGEVPTSRGLSSGTLPGPGNEASRELESYC

SEQ ID NO: 34190 - protein, 417 aa, Homo sapiens
  Payload ID: 6747
  Gene Symbol: GIF
  Gene Name: gastric intrinsic factor (vitamin B synthesis)
  Uniprot ID: P27352
  ENSP ID: ENSP00000257248
MAWFALYLLSLLWATAGTSTQTQSSCSVPSAQEPLVNGIQVLMENSVTSSAYPNPSILIAMNLAGAYNLKAQKLLTYQLMSSDNNDLTIGQLGLTIMALTSSCRDPGDKVSILQRQMENWAPSSPNAEASAFYGPSLAILALCQKNSEATLPIAVRFAKTLLANSSPFNVDTGAMATLALTCMYNKIPVGSEEGYRSLFGQVLKDIVEKISMKIKDNGIIGDIYSTGLAMQALSVTPEPSKKEWNCKKTTDMILNEIKQGKFHNPMSIAQILPSLKGKTYLDVPQVTCSPDHEVQPTLPSNPGPGPTSASNITVIYTINNQLRGVELLFNETINVSVKSGSVLLVVLEEAQRKNPMFKFETTMTSWGLVVSSINNIAENVNHKTYWQFLSGVTPLNEGVADYIPFNHEHITANFTQY

SEQ ID NO: 34191 - protein, 48 aa, Homo sapiens
  Payload ID: 6747
  Gene Symbol: GIF
  Gene Name: gastric intrinsic factor (vitamin B synthesis)
  ENSP ID: ENSP00000433196
MAWFALYLLSLLWATAGTSTQTQSSCCEYDVFPRRSGKQLPWGRGCDL

SEQ ID NO: 34192 - protein, 101 aa, Homo sapiens
  Payload ID: 6748
  Gene Symbol: GAST
  Gene Name: gastrin
  Uniprot ID: P01350
  ENSP ID: ENSP00000331358
MQRLCVYVLIFALALAAFSEASWKPRSQQPDAPLGTGANRDLELPWLEQQGPASHHRRQLGPQGPPHLVADPSKKQGPWLEEEEEAYGWMDFGRRSAEDEN

SEQ ID NO: 34193 - protein, 148 aa, Homo sapiens
  Payload ID: 6749
  Gene Symbol: GRP
  Gene Name: gastrin-releasing peptide
  Uniprot ID: P07492
  ENSP ID: ENSP00000256857
MRGRELPLVLLALVLCLAPRGRAVPLPAGGGTVLTKMYPRGNHWAVGHLMGKKSTGESSSVSERGSLKQQLREYIRWEEAARNLLGLIEAKENRNHQPPQPKALGNQQPSWDSEDSSNFKDVGSKGKVGRLSAPGSQREGRNPQLNQQ

SEQ ID NO: 34194 - protein, 141 aa, Homo sapiens
  Payload ID: 6749
  Gene Symbol: GRP
  Gene Name: gastrin-releasing peptide
  Uniprot ID: P07492
  ENSP ID: ENSP00000389696
MRGRELPLVLLALVLCLAPRGRAVPLPAGGGTVLTKMYPRGNHWAVGHLMGKKSTGESSSVSERGSLKQQLREYIRWEEAARNLLGLIEAKENRNHQPPQPKALGNQQPSWDSEDSSNFKDVGSKGKGSQREGRNPQLNQQ

SEQ ID NO: 34195 - protein, 96 aa, Homo sapiens
  Payload ID: 6749
  Gene Symbol: GRP
  Gene Name: gastrin-releasing peptide
  ENSP ID: ENSP00000397814
  MOD_RES (1)..(1): Any amino acid
XHLMGKKSTGESSSVSERGSLKQQLREYIRWEEAARNLLGLIEAKENRNHQPPQPKALGNQQPSWDSEDSSNFKDVGSKGKDSLLQVLNVKEGTPS

SEQ ID NO: 34196 - protein, 35 aa, Homo sapiens
  Payload ID: 6749
  Gene Symbol: GRP
  Gene Name: gastrin-releasing peptide
  ENSP ID: ENSP00000431579
  MOD_RES (1)..(1): Any amino acid
XISSLRGIQRIAATSKILSAPGSQREGRNPQLNQQ

SEQ ID NO: 34197 - protein, 138 aa, Homo sapiens
  Payload ID: 6749
  Gene Symbol: GRP
  Gene Name: gastrin-releasing peptide
  Uniprot ID: P07492
  ENSP ID: ENSP00000434101
MRGRELPLVLLALVLCLAPRGRAVPLPAGGGTVLTKMYPRGNHWAVGHLMGKKSTGESSSVSERGSLKQQLREYIRWEEAARNLLGLIEAKENRNHQPPQPKALGNQQPSWDSEDSSNFKDLVDSLLQVLNVKEGTPS

SEQ ID NO: 34198 - protein, 384 aa, Homo sapiens
  Payload ID: 6750
  Gene Symbol: GRPR
  Gene Name: gastrin-releasing peptide receptor
  Uniprot ID: P30550
  ENSP ID: ENSP00000369643
MALNDCFLLNLEVDHFMHCNISSHSADLPVNDDWSHPGILYVIPAVYGVIILIGLIGNITLIKIFCTVKSMRNVPNLFISSLALGDLLLLITCAPVDASRYLADRWLFGRIGCKLIPFIQLTSVGVSVFTLTALSADRYKAIVRPMDIQASHALMKICLKAAFIWIISMLLAIPEAVFSDLHPFHEESTNQTFISCAPYPHSNELHPKIHSMASFLVFYVIPLSIISVYYYFIAKNLIQSAYNLPVEGNIHVKKQIESRKRLAKTVLVFVGLFAFCWLPNHVIYLYRSYHYSEVDTSMLHFVTSICARLLAFTNSCVNPFALYLLSKSFRKQFNTQLLCCQPGLIIRSHSTGRSTTCMTSLKSTNPSVATFSLINGNICHERYV

SEQ ID NO: 34199 - protein, 199 aa, Homo sapiens
  Payload ID: 6751
  Gene Symbol: GKN1
  Gene Name: gastrokine 1
  Uniprot ID: Q9NS71
  ENSP ID: ENSP00000367172
MLAYSSVHCFREDKMKFTIVFAGLLGVFLAPALANYNINVNDDNNNAGSGQQSVSVNNEHNVANVDNNNGWDSWNSIWDYGNGFAATRLFQKKTCIVHKMNKEVMPSIQSLDALVKEKKLQGKGPGGPPPKGLMYSVNPNKVDDLSKFGKNIANMCRGIPTYMAEEMQEASLFFYSGTCYTTSVLWIVDISFCGDTVEN

SEQ ID NO: 34200 - protein, 184 aa, Homo sapiens
  Payload ID: 6752
  Gene Symbol: GKN2
  Gene Name: gastrokine 2
  Uniprot ID: Q86XP6
  ENSP ID: ENSP00000329292
MKILVAFLVVLTIFGIQSHGYEVFNIISPSNNGGNVQETVTIDNEKNTAIINIHAGSCSSTTIFDYKHGYIASRVLSRRACFILKMDHQNIPPLNNLQWYIYEKQALDNMFSSKYTWVKYNPLESLIKDVDWFLLGSPIEKLCKHIPLYKGEVVENTHNVGAGGCAKAGLLGILGISICADIHV

SEQ ID NO: 34201 - protein, 161 aa, Homo sapiens
  Payload ID: 6752
  Gene Symbol: GKN2
  Gene Name: gastrokine 2
  ENSP ID: ENSP00000428538
MKILVAFLVVLTIFGIQSHGYEVFNIISPSNNGGNVQETVTIDNEKNTAIINIHAGSCSSTTIFDYKHGYIASRVLSRRACFILKMDHQNIPPLNNLQWYIYEKQALDNMFSSKYTWVKYNPLESLIKDVDWFLLGSPIEKLCKHIPLYKGEVVENTREYQ

SEQ ID NO: 34202 - protein, 363 aa, Homo sapiens
  Payload ID: 6753
  Gene Symbol: GBX1
  Gene Name: gastrulation brain homeobox 1
  Uniprot ID: Q14549
  ENSP ID: ENSP00000297537
MQRAGGGSAPGGNGGGGGGGPGTAFSIDSLIGPPPPRSGHLLYTGYPMFMPYRPLVLPQALAPAPLPAGLPPLAPLASFAGRLTNTFCAGLGQAVPSMVALTTALPSFAEPPDAFYGPQELAAAAAAAAATAARNNPEPGGRRPEGGLEADELLPAREKVAEPPPPPPPHFSETFPSLPAEGKVYSSDEEKLEASAGDPAGSEQEEEGSGGDSEDDGFLDSSAGGPGALLGPKPKLKGSLGTGAEEGAPVTAGVTAPGGKSRRRRTAFTSEQLLELEKEFHCKKYLSLTERSQIAHALKLSEVQVKIWFQNRRAKWKRIKAGNVSSRSGEPVRNPKIVVPIPVHVNRFAVRSQHQQMEQGARP

SEQ ID NO: 34203 - protein, 348 aa, Homo sapiens
  Payload ID: 6754
  Gene Symbol: GBX2
  Gene Name: gastrulation brain homeobox 2
  Uniprot ID: P52951
  ENSP ID: ENSP00000302251
MSAAFPPSLMMMQRPLGSSTAFSIDSLIGSPPQPSPGHFVYTGYPMFMPYRPVVLPPPPPPPPALPQAALQPALPPAHPHHQIPSLPTGFCSSLAQGMALTSTLMATLPGGFSASPQHQEAAAARKFAPQPLPGGGNFDKAEALQADAEDGKGFLAKEGSLLAFSAAETVQASLVGAVRGQGKDESKVEDDPKGKEESFSLESDVDYSSDDNLTGQAAHKEEDPGHALEETPPSSGAAGSTTSTGKNRRRRTAFTSEQLLELEKEFHCKKYLSLTERSQIAHALKLSEVQVKIWFQNRRAKWKRVKAGNANSKTGEPSRNPKIVVPIPVHVSRFAIRSQHQQLEQARP

SEQ ID NO: 34204 - protein, 222 aa, Homo sapiens
  Payload ID: 6754
  Gene Symbol: GBX2
  Gene Name: gastrulation brain homeobox 2
  ENSP ID: ENSP00000448747
MSAAFPPSLMMMQRPLGSSTAFSIDSLIGSPPQPSPGHFVYTGYPMFMPYRPVVLPPPPPPPPALPQAALQPALPPAHPHHQIPSLPTGFCSSLAQGMALTSTLMATLPGGFSASPQHQEAAAARKFAPQPLPGGGNFDKAEALQADAEDGKGFLAKEGSLLAFSAAETVQASLGRLCRSAVTWGSGRGCPRARERRVKGGRRPEGQGGELLAGERCGLQLG

SEQ ID NO: 34205 - protein, 334 aa, Homo sapiens
  Payload ID: 6755
  Gene Symbol: GATA1
  Gene Name: GATA binding protein 1 (globin transcription factor 1)
  ENSP ID: ENSP00000365853
MEFPGLGSLGTSEPLPQFVDPALVSSTPESGVFFPSGPEGLDAAASSTAPSTATAAAAALAYYRDAEAYRHSPVFQVYPLLNCMEGIPGGSPYAGWAYGKTGLYPASTVCPTREDSPPQAVEDLDGKGSTSFLETLKTERLSPDLLTLGPALPSSLPVPNSAYGGPDFSSTFFSPTGSPLNSAAYSSPKLRGTLPLPPCEARECVNCGATATPLWRRDRTGHYLCNACGLYHKMNGQNRPLIRPKKRLIVSKRAGTQCTNCQTTTTTLWRRNASGDPVCNACGLYYKLHQHYCGGSAQLMRAQSMASRGGVVSFSSCSQNSGQPKSLGPRHPLA

SEQ ID NO: 34206 - protein, 413 aa, Homo sapiens
  Payload ID: 6755
  Gene Symbol: GATA1
  Gene Name: GATA binding protein 1 (globin transcription factor 1)
  Uniprot ID: P15976
  ENSP ID: ENSP00000365858
MEFPGLGSLGTSEPLPQFVDPALVSSTPESGVFFPSGPEGLDAAASSTAPSTATAAAAALAYYRDAEAYRHSPVFQVYPLLNCMEGIPGGSPYAGWAYGKTGLYPASTVCPTREDSPPQAVEDLDGKGSTSFLETLKTERLSPDLLTLGPALPSSLPVPNSAYGGPDFSSTFFSPTGSPLNSAAYSSPKLRGTLPLPPCEARECVNCGATATPLWRRDRTGHYLCNACGLYHKMNGQNRPLIRPKKRLIVSKRAGTQCTNCQTTTTTLWRRNASGDPVCNACGLYYKLHQVNRPLTMRKDGIQTRNRKASGKGKKKRGSSLGGTGAAEGPAGGFMVVAGGSGSGNCGEVASGLTLGPPGTAHLYQGLGPVVLSGPVSHLMPFPGPLLGSPTGSFPTGPMPPTTSTTVVAPLSS

SEQ ID NO: 34207 - protein, 480 aa, Homo sapiens
  Payload ID: 6756
  Gene Symbol: GATA2
  Gene Name: GATA binding protein 2
  Uniprot ID: P23769
  ENSP ID: ENSP00000345681
MEVAPEQPRWMAHPAVLNAQHPDSHHPGLAHNYMEPAQLLPPDEVDVFFNHLDSQGNPYYANPAHARARVSYSPAHARLTGGQMCRPHLLHSPGLPWLDGGKAALSAAAAHHHNPWTVSPFSKTPLHPSAAGGPGGPLSVYPGAGGGSGGGSGSSVASLTPTAAHSGSHLFGFPPTPPKEVSPDPSTTGAASPASSSAGGSAARGEDKDGVKYQVSLTESMKMESGSPLRPGLATMGTQPATHHPIPTYPSYVPAAAHDYSSGLFHPGGFLGGPASSFTPKQRSKARSCSEGRECVNCGATATPLWRRDGTGHYLCNACGLYHKMNGQNRPLIKPKRRLSAARRAGTCCANCQTTTTTLWRRNANGDPVCNACGLYYKLHNVNRPLTMKKEGIQTRNRKMSNKSKKSKKGAECFEELSKCMQEKSSPFSAAALAGHMAPVGHLPPFSHSGHILPTPTPIHPSSSLSFGHPHPSSMVTAMG

SEQ ID NO: 34208 - protein, 466 aa, Homo sapiens
  Payload ID: 6756
  Gene Symbol: GATA2
  Gene Name: GATA binding protein 2
  Uniprot ID: P23769
  ENSP ID: ENSP00000400259
MEVAPEQPRWMAHPAVLNAQHPDSHHPGLAHNYMEPAQLLPPDEVDVFFNHLDSQGNPYYANPAHARARVSYSPAHARLTGGQMCRPHLLHSPGLPWLDGGKAALSAAAAHHHNPWTVSPFSKTPLHPSAAGGPGGPLSVYPGAGGGSGGGSGSSVASLTPTAAHSGSHLFGFPPTPPKEVSPDPSTTGAASPASSSAGGSAARGEDKDGVKYQVSLTESMKMESGSPLRPGLATMGTQPATHHPIPTYPSYVPAAAHDYSSGLFHPGGFLGGPASSFTPKQRSKARSCSEGRECVNCGATATPLWRRDGTGHYLCNACGLYHKMNGQNRPLIKPKRRLTTTTTLWRRNANGDPVCNACGLYYKLHNVNRPLTMKKEGIQTRNRKMSNKSKKSKKGAECFEELSKCMQEKSSPFSAAALAGHMAPVGHLPPFSHSGHILPTPTPIHPSSSLSFGHPHPSSMVTAMG

SEQ ID NO: 34209 - protein, 480 aa, Homo sapiens; identical to SEQ ID NO: 34207
  Payload ID: 6756
  Gene Symbol: GATA2
  Gene Name: GATA binding protein 2
  Uniprot ID: P23769
  ENSP ID: ENSP00000417074

SEQ ID NO: 34210 - protein, 150 aa, Homo sapiens
  Payload ID: 6756
  Gene Symbol: GATA2
  Gene Name: GATA binding protein 2
  ENSP ID: ENSP00000418132
MEVAPEQPRWMAHPAVLNAQHPDSHHPGLAHNYMEPAQLLPPDEVDVFFNHLDSQGNPYYANPAHARARVSYSPAHARLTGGQMCRPHLLHSPGLPWLDGGKAALSAAAAHHHNPWTVSPFSKTPLHPSAAGGPGGPLSVYPGAGGGSGG

SEQ ID NO: 34211 - protein, 8 aa, Homo sapiens
  Payload ID: 6756
  Gene Symbol: GATA2
  Gene Name: GATA binding protein 2
  ENSP ID: ENSP00000419532
MEVAPEQP

SEQ ID NO: 34212 - protein, 443 aa, Homo sapiens
  Payload ID: 6757
  Gene Symbol: GATA3
  Gene Name: GATA binding protein 3
  Uniprot ID: P23771
  ENSP ID: ENSP00000341619
MEVTADQPRWVSHHHPAVLNGQHPDTHHPGLSHSYMDAAQYPLPEEVDVLFNIDGQGNHVPPYYGNSVRATVQRYPPTHHGSQVCRPPLLHGSLPWLDGGKALGSHHTASPWNLSPFSKTSIHHGSPGPLSVYPPASSSSLSGGHASPHLFTFPPTPPKDVSPDPSLSTPGSAGSARQDEKECLKYQVPLPDSMKLESSHSRGSMTALGGASSSTHHPITTYPPYVPEYSSGLFPPSSLLGGSPTGFGCKSRPKARSSTGRECVNCGATSTPLWRRDGTGHYLCNACGLYHKMNGQNRPLIKPKRRLSAARRAGTSCANCQTTTTTLWRRNANGDPVCNACGLYYKLHNINRPLTMKKEGIQTRNRKMSSKSKKCKKVHDSLEDFPKNSSFNPAALSRHMSSLSHISPFSHSSHMLTTPTPMHPPSSLSFGPHHPSSMVTAMG

SEQ ID NO: 34213 - protein, 444 aa, Homo sapiens
  Payload ID: 6757
  Gene Symbol: GATA3
  Gene Name: GATA binding protein 3
  Uniprot ID: P23771
  ENSP ID: ENSP00000368632
MEVTADQPRWVSHHHPAVLNGQHPDTHHPGLSHSYMDAAQYPLPEEVDVLFNIDGQGNHVPPYYGNSVRATVQRYPPTHHGSQVCRPPLLHGSLPWLDGGKALGSHHTASPWNLSPFSKTSIHHGSPGPLSVYPPASSSSLSGGHASPHLFTFPPTPPKDVSPDPSLSTPGSAGSARQDEKECLKYQVPLPDSMKLESSHSRGSMTALGGASSSTHHPITTYPPYVPEYSSGLFPPSSLLGGSPTGFGCKSRPKARSSTEGRECVNCGATSTPLWRRDGTGHYLCNACGLYHKMNGQNRPLIKPKRRLSAARRAGTSCANCQTTTTTLWRRNANGDPVCNACGLYYKLHNINRPLTMKKEGIQTRNRKMSSKSKKCKKVHDSLEDFPKNSSFNPAALSRHMSSLSHISPFSHSSHMLTTPTPMHPPSSLSFGPHHPSSMVTAMG

SEQ ID NO: 34214 - protein, 442 aa, Homo sapiens
  Payload ID: 6758
  Gene Symbol: GATA4
  Gene Name: GATA binding protein 4
  Uniprot ID: P43694
  ENSP ID: ENSP00000334458
MYQSLAMAANHGPPPGAYEAGGPGAFMHGAGAASSPVYVPTPRVPSSVLGLSYLQGGGAGSASGGASGGSSGGAASGAGPGTQQGSPGWSQAGADGAAYTPPPVSPRFSFPGTTGSLAAAAAAAAAREAAAYSSGGGAAGAGLAGREQYGRAGFAGSYSSPYPAYMADVGASWAAAAAASAGPFDSPVLHSLPGRANPAARHPNLDMFDDFSEGRECVNCGAMSTPLWRRDGTGHYLCNACGLYHKMNGINRPLIKPQRRLSASRRVGLSCANCQTTTTTLWRRNAEGEPVCNACGLYMKLHGVPRPLAMRKEGIQTRKRKPKNLNKSKTPAAPSGSESLPPASGASSNSSNATTSSSEEMRPIKTEPGLSSHYGHSSSVSQTFSVSAMSGHGPSIHPVLSALKLSPQGYASPVSQSPQTSSKQDSWNSLVLADSHGDIITA

SEQ ID NO: 34215 - protein, 116 aa, Homo sapiens
  Payload ID: 6758
  Gene Symbol: GATA4
  Gene Name: GATA binding protein 4
  ENSP ID: ENSP00000432278
MYQSLAMAANHGPPPGAYEAGGPGAFMHGAGAASSPVYVPTPRVPSSVLGLSYLQGGGAGSASGGASGGSSGGAASGAGPGTQQGSPGWSQAGADGAAYTPPPVSPRFSFPGTTGS

SEQ ID NO: 34216 - protein, 236 aa, Homo sapiens
  Payload ID: 6758
  Gene Symbol: GATA4
  Gene Name: GATA binding protein 4
  ENSP ID: ENSP00000435043
MFDDFSEGRECVNCGAMSTPLWRRDGTGHYLCNACGLYHKMNGINRPLIKPQRRLSASRRVGLSCANCQTTTTTLWRRNAEGEPVCNACGLYMKLHGVPRPLAMRKEGIQTRKRKPKNLNKSKTPAAPSGSESLPPASGASSNSSNATTSSSEEMRPIKTEPGLSSHYGHSSSVSQTFSVSAMSGHGPSIHPVLSALKLSPQGYASPVSQSPQTSSKQDSWNSLVLADSHGDIITA

SEQ ID NO: 34217 - protein, 175 aa, Homo sapiens
  Payload ID: 6758
  Gene Symbol: GATA4
  Gene Name: GATA binding protein 4
  ENSP ID: ENSP00000435347
MFDDFSEGRECVNCGAMSTPLWRRDGTGHYLCNACGLYHKMNGINRPLIKPQRRLSASRRVGLSCANCQTTTTTLWRRNAEGEPVCNACGLYMKLHGVPRPLAMRKEGIQTRKRKPKNLNKSKTPAAPSGSESLPPASGASSNSSNATTSSSEEMRPIKTEPGLSSHYGHSSSVS

SEQ ID NO: 34218 - protein, 443 aa, Homo sapiens
  Payload ID: 6758
  Gene Symbol: GATA4
  Gene Name: GATA binding protein 4
  Uniprot ID: P43694
  ENSP ID: ENSP00000435712
MYQSLAMAANHGPPPGAYEAGGPGAFMHGAGAASSPVYVPTPRVPSSVLGLSYLQGGGAGSASGGASGGSSGGAASGAGPGTQQGSPGWSQAGADGAAYTPPPVSPRFSFPGTTGSLAAAAAAAAAREAAAYSSGGGAAGAGLAGREQYGRAGFAGSYSSPYPAYMADVGASWAAAAAASAGPFDSPVLHSLPGRANPAARHPNLVDMFDDFSEGRECVNCGAMSTPLWRRDGTGHYLCNACGLYHKMNGINRPLIKPQRRLSASRRVGLSCANCQTTTTTLWRRNAEGEPVCNACGLYMKLHGVPRPLAMRKEGIQTRKRKPKNLNKSKTPAAPSGSESLPPASGASSNSSNATTSSSEEMRPIKTEPGLSSHYGHSSSVSQTFSVSAMSGHGPSIHPVLSALKLSPQGYASPVSQSPQTSSKQDSWNSLVLADSHGDIITA

SEQ ID NO: 34219 - protein, 23 aa, Homo sapiens
  Payload ID: 6758
  Gene Symbol: GATA4
  Gene Name: GATA binding protein 4
  ENSP ID: ENSP00000473598
MYQSLAMAANHGPPPGAYEAGGP

SEQ ID NO: 34220 - protein, 16 aa, Homo sapiens
  Payload ID: 6758
  Gene Symbol: GATA4
  Gene Name: GATA binding protein 4
  ENSP ID: ENSP00000473671
MYQSLAMAANHGPPPG

SEQ ID NO: 34221 - protein, 441 aa, Homo sapiens
  Payload ID: 6758
  Gene Symbol: GATA4
  Gene Name: GATA binding protein 4
  ENSP ID: ENSP00000482268
MYQSLPWPPTTGRPPVPTRRAAPAPSCTARAPRPRQSTCPHRGALLRAGPVLPPGRRRGLCVRRASGGSSGGAASGAGPGTQQGSPGWSQAGADGAAYTPPPVSPRFSFPGTTGSLAAAAAAAAAREAAAYSSGGGAAGAGLAGREQYGRAGFAGSYSSPYPAYMADVGASWAAAAAASAGPFDSPVLHSLPGRANPAARHPNLDMFDDFSEGRECVNCGAMSTPLWRRDGTGHYLCNACGLYHKMNGINRPLIKPQRRLSASRRVGLSCANCQTTTTTLWRRNAEGEPVCNACGLYMKLHGVPRPLAMRKEGIQTRKRKPKNLNKSKTPAAPSGSESLPPASGASSNSSNATTSSSEEMRPIKTEPGLSSHYGHSSSVSQTFSVSAMSGHGPSIHPVLSALKLSPQGYASPVSQSPQTSSKQDSWNSLVLADSHGDIITA

SEQ ID NO: 34222 - protein, 397 aa, Homo sapiens
  Payload ID: 6759
  Gene Symbol: GATA5
  Gene Name: GATA binding protein 5
  Uniprot ID: Q9BWX5
  ENSP ID: ENSP00000252997
MYQSLALAASPRQAAYADSGSFLHAPGAGSPMFVPPARVPSMLSYLSGCEPSPQPPELAARPGWAQTATADSSAFGPGSPHPPAAHPPGATAFPFAHSPSGPGSGGSAGGRDGSAYQGALLPREQFAAPLGRPVGTSYSATYPAYVSPDVAQSWTAGPFDGSVLHGLPGRRPTFVSDFLEEFPGEGRECVNCGALSTPLWRRDGTGHYLCNACGLYHKMNGVNRPLVRPQKRLSSSRRAGLCCTNCHTTNTTLWRRNSEGEPVCNACGLYMKLHGVPRPLAMKKESIQTRKRKPKTIAKARGSSGSTRNASASPSAVASTDSSAATSKAKPSLASPVCPGPSMAPQASGQEDDSLAPGHLEFKFEPEDFAFPSTAPSPQAGLRGALRQEAWCALALA

SEQ ID NO: 34223 - protein, 595 aa, Homo sapiens
  Payload ID: 6760
  Gene Symbol: GATA6
  Gene Name: GATA binding protein 6
  Uniprot ID: Q92908
  ENSP ID: ENSP00000269216
MALTDGGWCLPKRFGAAGADASDSRAFPAREPSTPPSPISSSSSSCSRGGERGPGGASNCGTPQLDTEAAAGPPARSLLLSSYASHPFGAPHGPSAPGVAGPGGNLSSWEDLLLFTDLDQAATASKLLWSSRGAKLSPFAPEQPEEMYQTLAALSSQGPAAYDGAPGGFVHSAAAAAAAAAAASSPVYVPTTRVGSMLPGLPYHLQGSGSGPANHAGGAGAHPGWPQASADSPPYGSGGGAAGGGAAGPGGAGSAAAHVSARFPYSPSPPMANGAAREPGGYAAAGSGGAGGVSGGGSSLAAMGGREPQYSSLSAARPLNGTYHHHHHHHHHHPSPYSPYVGAPLTPAWPAGPFETPVLHSLQSRAGAPLPVPRGPSADLLEDLSESRECVNCGSIQTPLWRRDGTGHYLCNACGLYSKMNGLSRPLIKPQKRVPSSRRLGLSCANCHTTTTTLWRRNAEGEPVCNACGLYMKLHGVPRPLAMKKEGIQTRKRKPKNINKSKTCSGNSNNSIPMTPTSTSSNSDDCSKNTSPTTQPTASGAGAPVMTGAGESTNPENSELKYSGQDGLYIGVSLASPAEVTSSVRPDSWCALALA

SEQ ID NO: 34224 - protein, 595 aa, Homo sapiens; identical to SEQ ID NO: 34223
  Payload ID: 6760
  Gene Symbol: GATA6
  Gene Name: GATA binding protein 6
  Uniprot ID: Q92908
  ENSP ID: ENSP00000462313

SEQ ID NO: 34225 - protein, 269 aa, Homo sapiens
  Payload ID: 6761
  Gene Symbol: GATAD1
  Gene Name: GATA zinc finger domain containing 1
  Uniprot ID: Q8WUU5
  ENSP ID: ENSP00000287957
MPLGLKPTCSVCKTTSSSMWKKGAQGEILCHHCTGRGGAGSGGAGSGAAGGTGGSGGGGFGAATFASTSATPPQSNGGGGGKQSKQEIHRRSARLRNTKYKSAPAAEKKVSTKGKGRRHIFKLKNPIKAPESVSTIITAESIFYKGVYYQIGDVVSVIDEQDGKPYYAQIRGFIQDQYCEKSAALTWLIPTLSSPRDQFDPASYIIGPEEDLPRKMEYLEFVCHAPSEYFKSRSSPFPTVPTRPEKGYIWTHVGPTPAITIKESVANHL

SEQ ID NO: 34226 - protein, 633 aa, Homo sapiens
  Payload ID: 6762
  Gene Symbol: GATAD2A
  Gene Name: GATA zinc finger domain containing 2A
  Uniprot ID: Q86YP4
  ENSP ID: ENSP00000351552
MTEEACRTRSQKRALERDPTEDDVESKKIKMERGLLASDLNTDGDMRVTPEPGAGPTQGLLRATEATAMAMGRGEGLVGDGPVDMRTSHSDMKSERRPPSPDVIVLSDNEQPSSPRVNGLTTVALKETSTEALMKSSPEERERMIKQLKEELRLEEAKLVLLKKLRQSQIQKEATAQKPTGSVGSTVTTPPPLVRGTQNIPAGKPSLQTSSARMPGSVIPPPLVRGGQQASSKLGPQASSQVVMPPLVRGAQQIHSIRQHSSTGPPPLLLAPRASVPSVQIQGQRIIQQGLIRVANVPNTSLLVNIPQPTPASLKGTTATSAQANSTPTSVASVVTSAESPASRQAAAKLALRKQLEKTLLEIPPPKPPAPEMNFLPSAANNEFIYLVGLEEVVQNLLETQGRMSAATVLSREPYMCAQCKTDFTCRWREEKSGAIMCENCMTTNQKKALKVEHTSRLKAAFVKALQQEQEIEQRLLQQGTAPAQAKAEPTAAPHPVLKQVIKPRRKLAFRSGEARDWSNGAVLQASSQLSRGSATTPRGVLHTFSPSPKLQNSASATALVSRTGRHSERTVSAGKGSATSNWKKTPLSTGGTLAFVSPSLAVHKSSSAVDRQREYLLDMIPPRSIPQSATWK

SEQ ID NO: 34227 - protein, 633 aa, Homo sapiens; identical to SEQ ID NO: 34226
  Payload ID: 6762
  Gene Symbol: GATAD2A
  Gene Name: GATA zinc finger domain containing 2A
  Uniprot ID: Q86YP4
  ENSP ID: ENSP00000353463

SEQ ID NO: 34228 - protein, 634 aa, Homo sapiens
  Payload ID: 6762
  Gene Symbol: GATAD2A
  Gene Name: GATA zinc finger domain containing 2A
  Uniprot ID: Q86YP4
  ENSP ID: ENSP00000384899
MTEEACRTRSQKRALERDPTEDDVESKKIKMERGLLASDLNTDGDMRVTPEPGAGPTQGLLRATEATAMAMGRGEGLVGDGPVDMRTSHSDMKSERRPPSPDVIVLSDNEQPSSPRVNGLTTVALKETSTEALMKSSPEERERMIKQLKEELRLEEAKLVLLKKLRQSQIQKEATAQKPTGSVGSTVTTPPPLVRGTQNIPAGKPSLQTSSARMPGSVIPPPLVRGGQQASSKLGPQASSQVVMPPLVRGAQQIHSIRQHSSTGPPPLLLAPRASVPSVQIQGQRIIQQGLIRVANVPNTSLLVNIPQPTPASLKGTTATSAQANSTPTSVASVVTSAESPASRQAAAKLALRKQLEKTLLEIPPPKPPAPEMNFLPSAANNEFIYLVGLEEVVQNLLETQAGRMSAATVLSREPYMCAQCKTDFTCRWREEKSGAIMCENCMTTNQKKALKVEHTSRLKAAFVKALQQEQEIEQRLLQQGTAPAQAKAEPTAAPHPVLKQVIKPRRKLAFRSGEARDWSNGAVLQASSQLSRGSATTPRGVLHTFSPSPKLQNSASATALVSRTGRHSERTVSAGKGSATSNWKKTPLSTGGTLAFVSPSLAVHKSSSAVDRQREYLLDMIPPRSIPQSATWK

SEQ ID NO: 34229 - protein, 139 aa, Homo sapiens
  Payload ID: 6762
  Gene Symbol: GATAD2A
  Gene Name: GATA zinc finger domain containing 2A
  ENSP ID: ENSP00000390495
MTEEACRTRSQKRALERDPTEDDVESKKIKMERGLLASDLNTDGDMRVTPEPGAGPTQGLLRATEATAMAMGRGEGLVGDGPVDMRTSHSDMKSERRPPSPDVIVLSDNEQPSSPRVNGLTTVALKETSTEALMKSSPE

SEQ ID NO: 34230 - protein, 177 aa, Homo sapiens
  Payload ID: 6762
  Gene Symbol: GATAD2A
  Gene Name: GATA zinc finger domain containing 2A
  ENSP ID: ENSP00000403703
MTEEACRTRSQKRALERDPTEDDVESKKIKMERGLLASDLNTDGDMRVTPEPGAGPTQGLLRATEATAMAMGRGEGLVGDGPVDMRTSHSDMKSERRPPSPDVIVLSDNEQPSSPRVNGLTTVALKETSTEALMKSSPEERERMIKQLKEELRLEEAKLVLLKKLRQSQIQKEATAQ

SEQ ID NO: 34231 - protein, 165 aa, Homo sapiens
  Payload ID: 6762
  Gene Symbol: GATAD2A
  Gene Name: GATA zinc finger domain containing 2A
  ENSP ID: ENSP00000404212
MTEEACRTRSQKRALERDPTEDDVESKKIKMERGLLASDLNTDGDMRVTPEPGAGPTQGLLRATEATAMAMGRGEGLVGDGPVDMRTSHSDMKSERRPPSPDVIVLSDNEQPSSPRVNGLTTVALKETSTEALMKSSPEERERMIKQLKEELRLEEAKLVLLKKL

SEQ ID NO: 34232 - protein, 93 aa, Homo sapiens
  Payload ID: 6762
  Gene Symbol: GATAD2A
  Gene Name: GATA zinc finger domain containing 2A
  ENSP ID: ENSP00000407293
MTEEACRTRSQKRALERDPTEDDVESKKIKMERGLLASDLNTDGDMRVTPEPGAGPTQGLLRATEATAMAMGRGEGLVGDGPVDMRTSHSDMK

SEQ ID NO: 34233 - protein, 99 aa, Homo sapiens
  Payload ID: 6762
  Gene Symbol: GATAD2A
  Gene Name: GATA zinc finger domain containing 2A
  ENSP ID: ENSP00000411869
MTEEACRTRSQKRALERDPTEDDVESKKIKMERGLLASDLNTDGDMRVTPEPGAGPTQGLLRATEATAMAMGRGEGLVGDGPVDMRTSHRKAVLKNEKG

SEQ ID NO: 34234 - protein, 126 aa, Homo sapiens
  Payload ID: 6762
  Gene Symbol: GATAD2A
  Gene Name: GATA zinc finger domain containing 2A
  ENSP ID: ENSP00000414252
MTEEACRTRSQKRALERDPTEDDVESKKIKMERGLLASDLNTDGDMRVTPEPGAGPTQGLLRATEATAMAMGRGEGLVGDGPVDMRTSHSDMKSERRPPSPDVIVLSDNEQPSSPRVNGLTTVALK

SEQ ID NO: 34235 - protein, 95 aa, Homo sapiens
  Payload ID: 6762
  Gene Symbol: GATAD2A
  Gene Name: GATA zinc finger domain containing 2A
  ENSP ID: ENSP00000476500
MTEEACRTRSQKRALERDPTEDDVESKKIKMERGLLASDLNTDGDMRVTPEPGAGPTQGLLRATEATAMAMGRGEGLVGDGPVDMRTSHSPPQHH

SEQ ID NO: 34236 - protein, 77 aa, Homo sapiens
  Payload ID: 6762
  Gene Symbol: GATAD2A
  Gene Name: GATA zinc finger domain containing 2A
  ENSP ID: ENSP00000477171
MTEEACRTRSQKRALERDPTEDDVESKKIKMERGLLASDLNTDGDMRVTPEPGAGPTQGLLRATEATAMAMGRGEGL

SEQ ID NO: 34237 - protein, 593 aa, Homo sapiens
  Payload ID: 6763
  Gene Symbol: GATAD2B
  Gene Name: GATA zinc finger domain containing 2B
  Uniprot ID: Q8WXI9
  ENSP ID: ENSP00000357644
MDRMTEDALRLNLLKRSLDPADERDDVLAKRLKMEGHEAMERLKMLALLKRKDLANLEVPHELPTKQDGSGVKGYEEKLNGNLRPHGDNRTAGRPGKENINDEPVDMSARRSEPERGRLTPSPDIIVLSDNEASSPRSSSRMEERLKAANLEMFKGKGIEERQQLIKQLRDELRLEEARLVLLKKLRQSQLQKENVVQKTPVVQNAASIVQPSPAHVGQQGLSKLPSRPGAQGVEPQNLRTLQGHSVIRSATNTTLPHMLMSQRVIAPNPAQLQGQRGPPKPGLVRTTTPNMNPAINYQPQSSSSVPCQRTTSSAIYMNLASHIQPGTVNRVSSPLPSPSAMTDAANSQAAAKLALRKQLEKTLLEIPPPKPPAPLLHFLPSAANSEFIYMVGLEEVVQSVIDSQGKSCASLLRVEPFVCAQCRTDFTPHWKQEKNGKILCEQCMTSNQKKALKAEHTNRLKNAFVKALQQEQEIEQRLQQQAALSPTTAPAVSSVSKQETIMRHHTLRQAPQPQSSLQRGIPTSARSMLSNFAQAPQLSVPGGLLGMPGVNIAYLNTGIGGHKGPSLADRQREYLLDMIPPRSISQSISGQK

SEQ ID NO: 34238 - protein, 593 aa, Homo sapiens; identical to SEQ ID NO: 34237
  Payload ID: 6763
  Gene Symbol: GATAD2B
  Gene Name: GATA zinc finger domain containing 2B
  Uniprot ID: Q8WXI9
  ENSP ID: ENSP00000458280

SEQ ID NO: 34239 - protein, 593 aa, Homo sapiens; identical to SEQ ID NO: 34237
  Payload ID: 6763
  Gene Symbol: GATAD2B
  Gene Name: GATA zinc finger domain containing 2B
  ENSP ID: ENSP00000489184

SEQ ID NO: 34240 - protein, 263 aa, Homo sapiens
  Payload ID: 6763
  Gene Symbol: GATAD2B
  Gene Name: GATA zinc finger domain containing 2B
  ENSP ID: ENSP00000489309
  MOD_RES (1)..(1): Any amino acid
XRSATNTTLPHMLMSQRVIAPNPAQLQGQRGPPKPGLVRTTTPNMNPAINYQPSSSSVPCQRTTSSAIYMNLASHIQPGTVNRVSSPLPSPSAMTDAANSQAAAKLALRKQLEKTLLEIPPPKPPAPLLHFLPSAANSEFIYMVGLEEVVQSVIDSQGKSCASLLRVEPFVCAQCRTDFTPHWKQEKNGKILCEQCMTSNQKKALKAEHTNRLKNAFVKALQQEQEIEQRLQQQAALSPTTAPAVSSVSKQETIMRHHTLRQA

SEQ ID NO: 34241 - protein, 187 aa, Homo sapiens
  Payload ID: 6763
  Gene Symbol: GATAD2B
  Gene Name: GATA zinc finger domain containing 2B
  ENSP ID: ENSP00000489313
MDRMTEDALRLNLLKRSLDPADERDDVLAKRLKMEGHEAMERLKMLALLKRKDLANLEVPHELPTKQDGSGVKGYEEKLNGNLRPHGDNRTAGRPGKENINDEPVDMSARRSEPERGRLTPSPDIIVLSDNEASSPRSSSRMEERLKAANLEMFKGKGIEERQQLIKQLRDELRLEEARLVLLKKLR

SEQ ID NO: 34242 - protein, 149 aa, Homo sapiens
  Payload ID: 6763
  Gene Symbol: GATAD2B
  Gene Name: GATA zinc finger domain containing 2B
  ENSP ID: ENSP00000489566
MDRMTEDALRLNLLKRSLDPADERDDVLAKRLKMEGHEAMERLKMLALLKRKDLANLEVPHELPTKQDGSGVKGYEEKLNGNLRPHGDNRTAGRPGKENINDEPVDMSARRSEPERGRLTPSPDIIVLSDNEASSPRSSSRMEERLKAA

SEQ ID NO: 34243 - protein, 577 aa, Homo sapiens
  Payload ID: 6763
  Gene Symbol: GATAD2B
  Gene Name: GATA zinc finger domain containing 2B
  ENSP ID: ENSP00000489595
MDRMTEDALRLNLLKRSLDPADERDDVLAKRLKMEGHEAMERLKMLALLKRKDLANLEVPHELPTKQDGSGVKGYEEKLNGNLRPHGDNRTAGRPGKENINDEPVDMSARRSEPERGRLTPSPDIIVLSDNEASSPRSSSRMEERLKAANLEMFKGKGIEERQQLIKQLRDELRLEEARLVLLKKLRQSQLQKENVVQKTPVVQNAASIVQPSPAHVGQQGLSKLPSRPGAQGVEPQNLRTLQGHSVIRSATNTTLPHMLMSQRVIAPNPAQLQGQRGPPKPGLQSSSSVPCQRTTSSAIYMNLASHIQPGTVNRVSSPLPSPSAMTDAANSQAAAKLALRKQLEKTLLEIPPPKPPAPLLHFLPSAANSEFIYMVGLEEVVQSVIDSQGKSCASLLRVEPFVCAQCRTDFTPHWKQEKNGKILCEQCMTSNQKKALKAEHTNRLKNAFVKALQQEQEIEQRLQQQAALSPTTAPAVSSVSKQETIMRHHTLRQAPQPQSSLQRGIPTSARSMLSNFAQAPQLSVPGGLLGMPGVNIAYLNTGIGGHKGPSLADRQREYLLDMIPPRSISQSISGQK

SEQ ID NO: 34244 - protein, 329 aa, Homo sapiens
  Payload ID: 6764
  Gene Symbol: GATSL2
  Gene Name: GATS protein-like 2
  Uniprot ID: A6NHX0
  ENSP ID: ENSP00000484732
MELHILEHRLQVASVAKESIPLFTYGLIKLAFLSSKTRCKFFSLTETPEDYTIIVDEEGFLELPSSEHLSVADATWLALNVVSGGGSFSSSQPIGVTKIAKSVIAPLADQNISVFMLSTYQTDFILVRERDLPFVTHTLSSEFTILRVVNGETVAAENLGITNGFVKPKLVQRPVIHPLSSPSNRFCVTSLDPDTLPAVATLLMDVMFYSNGVKDPMATGDDCGHIRFFSFSLIEGYISLVMDVQTQQRFPSNLLFTSASGELWKMVRIGGQPLGFDECGIVAQISEPLAAADIPAYYISTFKFDHALVPEENINGVISALKVSQAEKH

SEQ ID NO: 34245 - protein, 329 aa, Homo sapiens
  Payload ID: 6765
  Gene Symbol: GATSL3
  Gene Name: GATS protein-like 3
  Uniprot ID: Q8WTX7
  ENSP ID: ENSP00000384183
MELHILEHRVRVLSVARPGLWLYTHPLIKLLFLPRRSRCKFFSLTETPEDYTLMVDEEGFKELPPSEFLQVAEATWLVLNVSSHSGAAVQAAGVTKIARSVIAPLAEHHVSVLMLSTYQTDFILVREQDLSVVIHTLAQEFDIYREVGGEPVPVTRDDSSNGFPRTQHGPSPTVHPIQSPQNRFCVLTLDPETLPAIATTLIDVLFYSHSTPKEAASSSPEPSSITFFAFSLIEGYISIVMDAETQKKFPSDLLLTSSSGELWRMVRIGGQPLGFDECGIVAQIAGPLAAADISAYYISTFNFDHALVPEDGIGSVIEVLQRRQEGLAS

SEQ ID NO: 34246 - protein, 291 aa, Homo sapiens
  Payload ID: 6765
  Gene Symbol: GATSL3
  Gene Name: GATS protein-like 3
  ENSP ID: ENSP00000385868
MELHILEHRVRVLSVARPGLWLYTHPLIKLLFLPRRSRCKFFSLTETPEDYTLMVDEEGFKELPPSEFLQVAEATWLVLNVSSHSGAAVQAAGVTKIARSVIAPLAEHHVSVLMLSTYQTDFILVREQDLSVVIHTLAQEFDIYREVGGEPVPVTRDDSSNGFPRTQHGPSPTVHPIQSPQNRFCVLTLDPETLPAIATTLIDVLFYSHRFPSDLLLTSSSGELWRMVRIGGQPLGFDECGIVAQIAGPLAAADISAYYISTFNFDHALVPEDGIGSVIEVLQRRQEGLAS

SEQ ID NO: 34247 - protein, 42 aa, Homo sapiens
  Payload ID: 6765
  Gene Symbol: GATSL3
  Gene Name: GATS protein-like 3
  ENSP ID: ENSP00000390869
MELHILEHRVRVLSVARPGLWLYTHPLIKLLFLPRRSRAAPI

SEQ ID NO: 34248 - protein, 62 aa, Homo sapiens
  Payload ID: 6765
  Gene Symbol: GATSL3
  Gene Name: GATS protein-like 3
  ENSP ID: ENSP00000407871
  MOD_RES (1)..(1): Any amino acid
XELHILEHRVRVLSVARPGLWLYTHPLIKLLFLPRRSRCAPGFGSADRGWGLCSRSGPGSED

SEQ ID NO: 34249 - protein, 62 aa, Homo sapiens
  Payload ID: 6765
  Gene Symbol: GATSL3
  Gene Name: GATS protein-like 3
  ENSP ID: ENSP00000408419
MELHILEHRVRVLSVARPGLWLYTHPLIKLLFLPRRSRCAPGFGSADRGWGLCSRSGPGSED

SEQ ID NO: 34250 - protein, 42 aa, Homo sapiens; identical to SEQ ID NO: 34247
  Payload ID: 6765
  Gene Symbol: GATSL3
  Gene Name: GATS protein-like 3
  ENSP ID: ENSP00000411842

SEQ ID NO: 34251 - protein, 74 aa, Homo sapiens
  Payload ID: 6765
  Gene Symbol: GATSL3
  Gene Name: GATS protein-like 3
  ENSP ID: ENSP00000416041
MELHILEHRVRVLSVARPGLWLYTHPLIKLLFLPRRSRCKFFSLTETPEDYTLMVDEEGFKDEETETQITHPRS

SEQ ID NO: 34252 - protein, 163 aa, Homo sapiens
  Payload ID: 6766
  Gene Symbol: GATS
  Gene Name: GATS, stromal antigen 3 opposite strand
  Uniprot ID: Q8NAP1
  ENSP ID: ENSP00000389760
MSCRGRGAGGRWNSTSWSTGCKLPASPRRVSRCSPTGLIKLAFLFSKTRCKFFSLTETPEDYTIIVDEEGFLELPSSEHLSVADATWLALNVVSGGGSFSSSQPIGMTKIAKSVIAPLADQNISVFMLSTYQTDFILVLKRDLPFVTHTLSSEFTILWSVARL

SEQ ID NO: 34253 - protein, 185 aa, Homo sapiens
  Payload ID: 6766
  Gene Symbol: GATS
  Gene Name: GATS, stromal antigen 3 opposite strand
  ENSP ID: ENSP00000479181
MSCRGRGAGGRWNSTSWSTGCKLPASPRRVSRCSPTGLIKLAFLFSKTRCKFFSLTETPEDYTIIVDEEGFLELPSSEHLSVADATWLALNVVSGGGSFSSSQPIGMTKIAKSVIAPLADQNISVFMLSTYQTDFILSRCRSSTHCPARATGSVSPAWTPTRCLLLPHSSWMSCPTSMGPWCTLL

SEQ ID NO: 34254 - protein, 163 aa, Homo sapiens; identical to SEQ ID NO: 34252
  Payload ID: 6766
  Gene Symbol: GATS
  Gene Name: GATS, stromal antigen 3 opposite strand
  Uniprot ID: Q8NAP1
  ENSP ID: ENSP00000479420

SEQ ID NO: 34255 - protein, 163 aa, Homo sapiens; identical to SEQ ID NO: 34252
  Payload ID: 6766
  Gene Symbol: GATS
  Gene Name: GATS, stromal antigen 3 opposite strand
  Uniprot ID: Q8NAP1
  ENSP ID: ENSP00000479781

SEQ ID NO: 34256 - protein, 163 aa, Homo sapiens; identical to SEQ ID NO: 34252
  Payload ID: 6766
  Gene Symbol: GATS
  Gene Name: GATS, stromal antigen 3 opposite strand
  Uniprot ID: Q8NAP1
  ENSP ID: ENSP00000481377

SEQ ID NO: 34257 - protein, 163 aa, Homo sapiens; identical to SEQ ID NO: 34252
  Payload ID: 6766
  Gene Symbol: GATS
  Gene Name: GATS, stromal antigen 3 opposite strand
  Uniprot ID: Q8NAP1
  ENSP ID: ENSP00000482429

SEQ ID NO: 34258 - protein, 2671 aa, Homo sapiens
  Payload ID: 6767
  Gene Symbol: GCN1
  Gene Name: GCN1 eIF2 alpha kinase activator homolog
  Uniprot ID: Q92616
  ENSP ID: ENSP00000300648
MAADTQVSETLKRFAGKVTTASVKERREILSELGKCVAGKDLPEGAVKGLCKLFCLTLHRYRDAASRRALQAAIQQLAEAQPEATAKNLLHSLQSSGIGSKAGVPSKSSGSAALLALTWTCLLVRIVFPSRAKRQGDIWNKLVEVQCLLLLEVLGGSHKHAVDGAVKKLTKLWKENPGLVEQYLSAILSLEPNQNYAGMLGLLVQFCTSHKEMDVVSQHKSALLDFYMKNILMSKVKPPKYLLDSCAPLLRYLSHSEFKDLILPTIQKSLLRSPENVIETISSLLASVTLDLSQYAMDIVKGLAGHLKSNSPRLMDEAVLALRNLARQCSDSSAMESLTKHLFAILGGSEGKLTVVAQKMSVLSGIGSVSHHVVSGPSSQVLNGIVAELFIPFLQQEVHEGTLVHAVSVLALWCNRFTMEVPKKLTEWFKKAFSLKTSTSAVRHAYLQCMLASYRGDTLLQALDLLPLLIQTVEKAASQSTQVPTITEGVAAALLLLKLSVADSQAEAKLSSFWQLIVDEKKQVFTSEKFLVMASEDALCTVLHLTERLFLDHPHRLTGNKVQQYHRALVAVLLSRTWHVRRQAQQTVRKLLSSLGGFKLAHGLLEELKTVLSSHKVLPLEALVTDAGEVTEAGKAYVPPRVLQEALCVISGVPGLKGDVTDTEQLAQEMLIISHHPSLVAVQSGLWPALLARMKIDPEAFITRHLDQIIPRMTTQSPLNQSSMNAMGSLSVLSPDRVLPQLISTITASVQNPALRLVTREEFAIMQTPAGELYDKSIIQSAQQDSIKKANMKRENKAYSFKEQIIELELKEEIKKKKGIKEEVQLTSKQKEMLQAQLDREAQVRRRLQELDGELEAALGLLDIILAKNPSGLTQYIPVLVDSFLPLLKSPLAAPRIKNPFLSLAACVMPSRLKALGTLVSHVTLRLLKPECVLDKSWCQEELSVAVKRAVMLLHTHTITSRVGKGEPGAAPLSAPAFSLVFPFLKMVLTEMPHHSEEEEEWMAQILQILTVQAQLRASPNTPPGRVDENGPELLPRVAMLRLLTWVIGTGSPRLQVLASDTLTTLCASSSGDDGCAFAEQEEVDVLLCALQSPCASVRETVLRGLMELHMVLPAPDTDEKNGLNLLRRLWVVKFDKEEEIRKLAERLWSMMGLDLQPDLCSLLIDDVIYHEAAVRQAGAEALSQAVARYQRQAAEVMGRLMEIYQEKLYRPPPVLDALGRVISESPPDQWEARCGLALALNKLSQYLDSSQVKPLFQFFVPDALNDRHPDVRKCMLDAALATLNTHGKENVNSLLPVFEEFLKNAPNDASYDAVRQSVVVLMGSLAKHLDKSDPKVKPIVAKLIAALSTPSQQVQESVASCLPPLVPAIKEDAGGMIQRLMQQLLESDKYAERKGAAYGLAGLVKGLGILSLKQQEMMAALTDAIQDKKNFRRREGALFAFEMLCTMLGKLFEPYVVHVLPHLLLCFGDGNQYVREAADDCAKAVMSNLSAHGVKLVLPSLLAALEEESWRTKAGSVELLGAMAYCAPKQLSSCLPNIVPKLTEVLTDSHVKVQKAGQQALRQIGSVIRNPEILAIAPVLLDALTDPSRKTQKCLQTLLDTKFVHFIDAPSLALIMPIVQRAFQDRSTDTRKMAAQIIGNMYSLTDQKDLAPYLPSVTPGLKASLLDPVPEVRTVSAKALGAMVKGMGESCFEDLLPWLMETLTYEQSSVDRSGAAQGLAEVMAGLGVEKLEKLMPEIVATASKVDIAPHVRDGYIMMFNYLPITFGDKFTPYVGPIIPCILKALADENEFVRDTALRAGQRVISMYAETAIALLLPQLEQGLFDDLWRIRFSSVQLLGDLLFHISGVTGKMTTETASEDDNFGTAQSNKAIITALGVERRNRVLAGLYMGRSDTQLVVRQASLHVWKIVVSNTPRTLREILPTLFGLLLGFLASTCADKRTIAARTLGDLVRKLGEKILPEIIPILEEGLRSQKSDERQGVCIGLSEIMKSTSRDAVLYFSESLVPTARKALCDPLEEVREAAAKTFEQLHSTIGHQALEDILPFLLKQLDDEEVSEFALDGLKQVMAIKSRVVLPYLVPKLTTPPVNTRVLAFLSSVAGDALTRHLGVILPAVMLALKEKLGTPDEQLEMANCQAVILSVEDDTGHRIIIEDLLEATRSPEVGMRQAAAIILNIYCSRSKADYTSHLRSLVSGLIRLFNDSSPVVLEESWDALNAITKKLDAGNQLALIEELHKEIRLIGNESKGEHVPGFCLPKKGVTSILPVLREGVLTGSPEQKEEAAKALGLVIRLTSADALRPSVVSITGPLIRILGDRFSWNVKAALLETLSLLLAKVGIALKPFLPQLQTTFTKALQDSNRGVRLKAADALGKLISIHIKVDPLFTELLNGIRAMEDPGVRDTMLQALRFVIQGAGAKVDAVIRKNIVSLLLSMLGHDEDNTRISSAGCLGELCAFLTEEELSAVLQQCLLADVSGIDWMVRHGRSLALSVAVNVAPGRLCAGRYSSDVQEMILSSATADRIPIAVSGVRGMGFLMRHHIETGGGQLPAKLSSLFVKCLQNPSSDIRLVAEKMIWWANKDPLPPLDPQAIKPILKALLDNTKDKNTVVRAYSDQAIVNLLKMRQGEEVFQSLSKILDVASLEVLNEVNRRSLKKLASQADSTEQVDDTILT

SEQ ID NO: 34259 - protein, 480 aa, Homo sapiens
  Payload ID: 6768
  Gene Symbol: GPBP1
  Gene Name: GC-rich promoter binding protein 1
  Uniprot ID: Q86WP2
  ENSP ID: ENSP00000264779
MAQHDFAPAWLNFPTPPSSTKVLTSSLKSSLNFEKHSENFAWTENRYDVNRRRHNSSDGFDSAIGRPNGGNFGRKEKNGWRTHGRNGTENINHRGGYHGGSSRSRSSIFHAGKSQGLHENNIPDNETGRKEDKRERKQFEAEDFPSLNPEYEREPNHNKSLAAGVWEYPPNPKSRAPRMLVIKKGNTKDLQLSGFPVVGNLPSQPVKNGTGPSVYKGLVPKPAAPPTKPTQWKSQTKENKVGTSFPHESTFGVGNFNAFKSTAKNFSPSTNSVKECNRSNSSSPVDKLNQQPRLTKLTRMRTDKKSEFLKALKRDRVEEEHEDESRAGSEKDDDSFNLHNSNSTHQERDINRNFDENEIPQENGNASVISQQIIRSSTFPQTDVLSSSLEAEHRLLKEMGWQEDSENDETCAPLTEDEMREFQVISEQLQKNGLRKNGILKNGLICDFKFGPWKNSTFKPTTENDDTETSSSDTSDDDDV

SEQ ID NO: 34260 - protein, 493 aa, Homo sapiens
  Payload ID: 6768
  Gene Symbol: GPBP1
  Gene Name: GC-rich promoter binding protein 1
  ENSP ID: ENSP00000401596
MAQHDFAPAWLNFPTPPSSTKSSLNFEKHSENFAWTENRYDVNRRRHNSSDGFDSAIGRPNGGNFGRKEKNGWRTHGRNGTENINHRGGYHGGSSRSRSSIFHAGKSQGLHENNIPDNETGRKEDKRERKQFEAEDFPSLNPEYEREPNHNKSLAAGVWGLHAQTHTYPTKKISQAPLLEYPPNPKSRAPRMLVIKKGNTKDLQLSGFPVVGNLPSQPVKNGTGPSVYKGLVPKPAAPPTKPTQWKSQTKENKVGTSFPHESTFGVGNFNAFKSTAKNFSPSTNSVKECNRSNSSSPVDKLNQQPRLTKLTRMRTDKKSEFLKALKRDRVEEEHEDESRAGSEKDDDSFNLHNSNSTHQERDINRNFDENEIPQENGNASVISQQIIRSSTFPQTDVLSSSLEAEHRLLKEMGWQEDSENDETCAPLTEDEMREFQVISEQLQKNGLRKNGILKNGLICDFKFGPWKNSTFKPTTENDDTETSSSDTSDDDDV

SEQ ID NO: 34261 - protein, 473 aa, Homo sapiens
  Payload ID: 6768
  Gene Symbol: GPBP1
  Gene Name: GC-rich promoter binding protein 1
  Uniprot ID: Q86WP2
  ENSP ID: ENSP00000421202
MAQHDFAPAWLNFPTPPSSTKSSLNFEKHSENFAWTENRYDVNRRRHNSSDGFDSAIGRPNGGNFGRKEKNGWRTHGRNGTENINHRGGYHGGSSRSRSSIFHAGKSQGLHENNIPDNETGRKEDKRERKQFEAEDFPSLNPEYEREPNHNKSLAAGVWEYPPNPKSRAPRMLVIKKGNTKDLQLSGFPVVGNLPSQPVKNGTGPSVYKGLVPKPAAPPTKPTQWKSQTKENKVGTSFPHESTFGVGNFNAFKSTAKNFSPSTNSVKECNRSNSSSPVDKLNQQPRLTKLTRMRTDKKSEFLKALKRDRVEEEHEDESRAGSEKDDDSFNLHNSNSTHQERDINRNFDENEIPQENGNASVISQQIIRSSTFPQTDVLSSSLEAEHRLLKEMGWQEDSENDETCAPLTEDEMREFQVISEQLQKNGLRKNGILKNGLICDFKFGPWKNSTFKPTTENDDTETSSSDTSDDDDV

SEQ ID NO: 34262 - protein, 302 aa, Homo sapiens
  Payload ID: 6768
  Gene Symbol: GPBP1
  Gene Name: GC-rich promoter binding protein 1
  Uniprot ID: Q86WP2
  ENSP ID: ENSP00000421709
MLVIKKGNTKDLQLSGFPVVGNLPSQPVKNGTGPSVYKGLVPKPAAPPTKPTQWKSQTKENKVGTSFPHESTFGVGNFNAFKSTAKNFSPSTNSVKECNRSNSSSPVDKLNQQPRLTKLTRMRTDKKSEFLKALKRDRVEEEHEDESRAGSEKDDDSFNLHNSNSTHQERDINRNFDENEIPQENGNASVISQQIIRSSTFPQTDVLSSSLEAEHRLLKEMGWQEDSENDETCAPLTEDEMREFQVISEQLQKNGLRKNGILKNGLICDFKFGPWKNSTFKPTTENDDTETSSSDTSDDDDV

SEQ ID NO: 34263 - protein, 465 aa, Homo sapiens
  Payload ID: 6768
  Gene Symbol: GPBP1
  Gene Name: GC-rich promoter binding protein 1
  Uniprot ID: Q86WP2
  ENSP ID: ENSP00000422337
MAQHDFAPAWLNFPTPPSSTKVLTSSLKSSLNFEKHSENFAWTENRYDVNRRRHNSSDGFDSAIGRPNGGNFGRKEKNGWRTHGRNGTENINHRGGYHGGSSRSRSSIFHAGKSQGLHENNIPDNETGRKEDKRERKQFEAEDFPSLNPEYEREPNHNKSLAAGVWEYPPNPKSRAPRMLVIKKGNTKDLQLSGFPVVGNLPSQPVKNGTGPSVYKGLVPKPAAPPTKPTQWKSQTKENKVGTSFPHESTFGVGNFNAFKSTAKNFSPSTNSVKEQPRLTKLTRMRTDKKSEFLKALKRDRVEEEHEDESRAGSEKDDDSFNLHNSNSTHQERDINRNFDENEIPQENGNASVISQQIIRSSTFPQTDVLSSSLEAEHRLLKEMGWQEDSENDETCAPLTEDEMREFQVISEQLQKNGLRKNGILKNGLICDFKFGPWKNSTFKPTTENDDTETSSSDTSDDDDV

SEQ ID NO: 34264 - protein, 474 aa, Homo sapiens
  Payload ID: 6769
  Gene Symbol: GPBP1L1
  Gene Name: GC-rich promoter binding protein 1-like 1
  Uniprot ID: Q9HC44
  ENSP ID: ENSP00000290795
MAQHDFVPAWLNFSTPQSAKSPTATFEKHGEHLPRGEGRFGVSRRRHNSSDGFFNNGPLRTAGDSWHQPSLFRHDSVDSGVSKGAYAGITGNPSGWHSSSRGHDGMSQRSGGGTGNHRHWNGSFHSRKGCAFQEKPPMEIREEKKEDKVEKLQFEEEDFPSLNPEAGKQHQPCRPIGTPSGVWENPPSAKQPSKMLVIKKVSKEDPAAAFSAAFTSPGSHHANGNKLSSVVPSVYKNLVPKPVPPPSKPNAWKANRMEHKSGSLSSSRESAFTSPISVTKPVVLASGAALSSPKESPSSTTPPIEISSSRLTKLTRRTTDRKSEFLKTLKDDRNGDFSENRDCDKLEDLEDNSTPEPKENGEEGCHQNGLALPVVEEGEVLSHSLEAEHRLLKAMGWQEYPENDENCLPLTEDELKEFHMKTEQLRRNGFGKNGFLQSRSSSLFSPWRSTCKAEFEDSDTETSSSETSDDDAWK

SEQ ID NO: 34265 - protein, 474 aa, Homo sapiens; identical to SEQ ID NO: 34264
  Payload ID: 6769
  Gene Symbol: GPBP1L1
  Gene Name: GC-rich promoter binding protein 1-like 1
  Uniprot ID: Q9HC44
  ENSP ID: ENSP00000347224

SEQ ID NO: 34266 - protein, 781 aa, Homo sapiens
  Payload ID: 6770
  Gene Symbol: GCFC2
  Gene Name: GC-rich sequence DNA-binding factor 2
  Uniprot ID: P16383
  ENSP ID: ENSP00000318690
MAHRPKRTFRQRAADSSDSDGAEESPAEPGAPRELPVPGSAEEEPPSGGGRAQVAGLPHRVRGPRGRGRVWASSRRATKAAPRADEGSESRTLDVSTDEEDKIHHSSESKDDQGLSSDSSSSLGEKELSSTVKIPDAAFIQAARRKRELARAQDDYISLDVQHTSSISGMKRESEDDPESEPDDHEKRIPFTLRPQTLRQRMAEESISRNEETSEESQEDEKQDTWEQQQMRKAVKIIEERDIDLSCGNGSSKVKKFDTSISFPPVNLEIIKKQLNTRLTLLQETHRSHLREYEKYVQDVKSSKSTIQNLESSSNQALNCKFYKSMKIYVENLIDCLNEKIINIQEIESSMHALLLKQAMTFMKRRQDELKHESTYLQQLSRKDETSTSGNFSVDEKTQWILEEIESRRTKRRQARVLSGNCNHQEGTSSDDELPSAEMIDFQKSQGDILQKQKKVFEEVQDDFCNIQNILLKFQQWREKFPDSYYEAFISLCIPKLLNPLIRVQLIDWNPLKLESTGLKEMPWFKSVEEFMDSSVEDSKKESSSDKKVLSAIINKTIIPRLTDFVEFLWDPLSTSQTTSLITHCRVILEEHSTCENEVSKSRQDLLKSIVSRMKKAVEDDVFIPLYPKSAVENKTSPHSKFQERQFWSGLKLFRNILLWNGLLTDDTLQELGLGKLLNRYLIIALLNATPGPDVVKKCNQVAACLPEKWFENSAMRTSIPQLENFIQFLLQSAHKLSRSEFRDEVEEIILILVKIKALNQAESFIGEHHLDHLKSLIKED

SEQ ID NO: 34267 - protein, 743 aa, Homo sapiens
  Payload ID: 6770
  Gene Symbol: GCFC2
  Gene Name: GC-rich sequence DNA-binding factor 2
  Uniprot ID: P16383
  ENSP ID: ENSP00000386552
MAHRPKRTFRQRAADSSDSDGAEESPAEPGAPRELPVPGSAEEEPPSGGGRAQVAGLPHRVRGPRGRGRVWASSRRATKAAPRADEGSESRTLDVSTDEEDKIHHSSESKDDQGLSSDSSSSLGEKELSSTVKIPDAAFIQAARRKRELARAQDDYISLDVQHTSSISVSRNEETSEESQEDEKQDTWEQQQMRKAVKIIEERDIDLSCGNGSSKVKKFDTSISFPPVNLEIIKKQLNTRLTLLQETHRSHLREYEKYVQDVKSSKSTIQNLESSSNQALNCKFYKSMKIYVENLIDCLNEKIINIQEIESSMHALLLKQAMTFMKRRQDELKHESTYLQQLSRKDETSTSGNFSVDEKTQWILEEIESRRTKRRQARVLSGNCNHQEGTSSDDELPSAEMIDFQKSQGDILQKQKKVFEEVQDDFCNIQNILLKFQQWREKFPDSYYEAFISLCIPKLLNPLIRVQLIDWNPLKLESTGLKEMPWFKSVEEFMDSSVEDSKKESSSDKKVLSAIINKTIIPRLTDFVEFLWDPLSTSQTTSLITHCRVILEEHSTCENEVSKSRQDLLKSIVSRMKKAVEDDVFIPLYPKSAVENKTSPHSKFQERQFWSGLKLFRNILLWNGLLTDDTLQELGLGKLLNRYLIIALLNATPGPDVVKKCNQVAACLPEKWFENSAMRTSIPQLENFIQFLLQSAHKLSRSEFRDEVEEIILILVKIKALNQAESFIGEHHLDHLKSLIKED

SEQ ID NO: 34268 - protein, 199 aa, Homo sapiens
  Payload ID: 6770
  Gene Symbol: GCFC2
  Gene Name: GC-rich sequence DNA-binding factor 2
  ENSP ID: ENSP00000409340
KVVQIKKSCLQSSTKQLFPDLQDLLKSIVSRMKKAVEDDVFIPLYPKSAVENKTSPHSKFQERQFWSGLKLFRNILLWNGLLTDDTLQELGLGKLLNRYLIIALLNATPGPDVVKKCNQVAACLPEKWFENSAMRTSIPQLENFIQFLLQSAHKLSRSEFRDEVEEIILILVKIKALNQAESFIGEHHLDHLKSLIKED

SEQ ID NO: 34269 - protein, 185 aa, Homo sapiens
  Payload ID: 6770
  Gene Symbol: GCFC2
  Gene Name: GC-rich sequence DNA-binding factor 2
  ENSP ID: ENSP00000415831
MAHRPKRTFRQRAADSSDSDGAEESPAEPGAPRELPVPGSAEEEPPSGGGRAQVAGLPHRVRGPRGRGRVWASSRRATKAAPRADEGSESRTLDVSTDEEDKIHHSSESKDDQGLSSDSSSSLGEKELSSTVSRNEETSEESQEDEKQDTWEQQQMRKAVKIIEERDIDLSCGNGSSKVKKFDTS

SEQ ID NO: 34270 - protein, 254 aa, Homo sapiens
  Payload ID: 6770
  Gene Symbol: GCFC2
  Gene Name: GC-rich sequence DNA-binding factor 2
  Uniprot ID: P16383
  ENSP ID: ENSP00000437767
MAHRPKRTFRQRAADSSDSDGAEESPAEPGAPRELPVPGSAEEEPPSGGGRAQVAGLPHRVRGPRGRGRVWASSRRATKAAPRADEGSESRTLDVSTDEEDKIHHSSESKDDQGLSSDSSSSLGEKELSSTVKIPDAAFIQAARRKRELARAQDDYISLDVQHTSSISGMKRESEDDPESEPDDHEKRIPFTLRPQTLRQRMAEESISRNEETSEESQEDEKQDTWEQQQMRKAVKIIEINITTGNSPLTPEGV

SEQ ID NO: 34271 - protein, 35 aa, Homo sapiens
  Payload ID: 6770
  Gene Symbol: GCFC2
  Gene Name: GC-rich sequence DNA-binding factor 2
  ENSP ID: ENSP00000474136
ADEGSGVQGDAGKRGGDGTGREGAAGSLDPSLGVL

SEQ ID NO: 34272 - protein, 215 aa, Homo sapiens
  Payload ID: 6770
  Gene Symbol: GCFC2
  Gene Name: GC-rich sequence DNA-binding factor 2
  Uniprot ID: P16383
  ENSP ID: ENSP00000474481
MAHRPKRTFRQRAADSSDSDGAEESPAEPGAPRELPVPGSAEEEPPSGGGRAQVAGLPHRVRGPRGRGRVWASSRRATKAAPRADEGSESRTLDVSTDEEDKIHHSSESKDDQGLSSDSSSSLGEKELSSTVKIPDAAFIQAARRKRELARAQDDYISLDVQHTSSISGMKRESEDDPESEPDDHEKRIPFTLRPQTLRQRMAEESSMDLPIYED

SEQ ID NO: 34273 - protein, 27 aa, Homo sapiens
  Payload ID: 6770
  Gene Symbol: GCFC2
  Gene Name: GC-rich sequence DNA-binding factor 2
  ENSP ID: ENSP00000475108
  MOD_RES (1)..(1): Any amino acid
XLLNRYLIIALLNATPGPDVVKKCNQG

SEQ ID NO: 34274 - protein, 43 aa, Homo sapiens
  Payload ID: 6770
  Gene Symbol: GCFC2
  Gene Name: GC-rich sequence DNA-binding factor 2
  ENSP ID: ENSP00000475130
  MOD_RES (1)..(1): Any amino acid
XSEFRDEVEEIILILVKIKALNQAESFIGEHHLDHLKSLIKED

SEQ ID NO: 34275 - protein, 465 aa, Homo sapiens
  Payload ID: 6771
  Gene Symbol: GFRA1
  Gene Name: GDNF family receptor alpha 1
  Uniprot ID: P56159
  ENSP ID: ENSP00000347591
MFLATLYFALPLLDLLLSAEVSGGDRLDCVKASDQCLKEQSCSTKYRTLRQCVAGKETNFSLASGLEAKDECRSAMEALKQKSLYNCRCKRGMKKEKNCLRIYWSMYQSLQGNDLLEDSPYEPVNSRLSDIFRVVPFISDVFQQVEHIPKGNNCLDAAKACNLDDICKKYRSAYITPCTTSVSNDVCNRRKCHKALRQFFDKVPAKHSYGMLFCSCRDIACTERRRQTIVPVCSYEEREKPNCLNLQDSCKTNYICRSRLADFFTNCQPESRSVSSCLKENYADCLLAYSGLIGTVMTPNYIDSSSLSVAPWCDCSNSGNDLEECLKFLNFFKDNTCLKNAIQAFGNGSDVTVWQPAFPVQTTTATTTTALRVKNKPLGPAGSENEIPTHVLPPCANLQAQKLKSNVSGNTHLCISNGNYEKEGLGASSHITTKSMAAPPSCGLSPLLVLVVTALSTLLSLTETS

SEQ ID NO: 34276 - protein, 465 aa, Homo sapiens; identical to SEQ ID NO: 34275
  Payload ID: 6771
  Gene Symbol: GFRA1
  Gene Name: GDNF family receptor alpha 1
  Uniprot ID: P56159
  ENSP ID: ENSP00000358237

SEQ ID NO: 34277 - protein, 460 aa, Homo sapiens
  Payload ID: 6771
  Gene Symbol: GFRA1
  Gene Name: GDNF family receptor alpha 1
  Uniprot ID: P56159
  ENSP ID: ENSP00000358239
MFLATLYFALPLLDLLLSAEVSGGDRLDCVKASDQCLKEQSCSTKYRTLRQCVAGKETNFSLASGLEAKDECRSAMEALKQKSLYNCRCKRGMKKEKNCLRIYWSMYQSLQGNDLLEDSPYEPVNSRLSDIFRVVPFISVEHIPKGNNCLDAAKACNLDDICKKYRSAYITPCTTSVSNDVCNRRKCHKALRQFFDKVPAKHSYGMLFCSCRDIACTERRRQTIVPVCSYEEREKPNCLNLQDSCKTNYICRSRLADFFTNCQPESRSVSSCLKENYADCLLAYSGLIGTVMTPNYIDSSSLSVAPWCDCSNSGNDLEECLKFLNFFKDNTCLKNAIQAFGNGSDVTVWQPAFPVQTTTATTTTALRVKNKPLGPAGSENEIPTHVLPPCANLQAQKLKSNVSGNTHLCISNGNYEKEGLGASSHITTKSMAAPPSCGLSPLLVLVVTALSTLLSLTETS

SEQ ID NO: 34278 - protein, 460 aa, Homo sapiens; identical to SEQ ID NO: 34277
  Payload ID: 6771
  Gene Symbol: GFRA1
  Gene Name: GDNF family receptor alpha 1
  Uniprot ID: P56159
  ENSP ID: ENSP00000393725

SEQ ID NO: 34279 - protein, 62 aa, Homo sapiens
  Payload ID: 6772
  Gene Symbol: GFRA2
  Gene Name: GDNF family receptor alpha 2
  ENSP ID: ENSP00000306654
MILANVFCLFFFLGPGPLLRRNGVQREKTCSYIQGRMMPEFSLGYEEGCPTESPWCALAKWV

SEQ ID NO: 34280 - protein, 464 aa, Homo sapiens
  Payload ID: 6772
  Gene Symbol: GFRA2
  Gene Name: GDNF family receptor alpha 2
  Uniprot ID: O00451
  ENSP ID: ENSP00000428518
MILANVFCLFFFLDETLRSLASPSSLQGPELHGWRPPVDCVRANELCAAESNCSSRYRTLRQCLAGRDRNTMLANKECQAALEVLQESPLYDCRCKRGMKKELQCLQIYWSIHLGLTEGEEFYEASPYEPVTSRLSDIFRLASIFSGTGADPVVSAKSNHCLDAAKACNLNDNCKKLRSSYISICNREISPTERCNRRKCHKALRQFFDRVPSEYTYRMLFCSCQDQACAERRRQTILPSCSYEDKEKPNCLDLRGVCRTDHLCRSRLADFHANCRASYQTVTSCPADNYQACLGSYAGMIGFDMTPNYVDSSPTGIVVSPWCSCRGSGNMEEECEKFLRDFTENPCLRNAIQAFGNGTDVNVSPKGPSFQATQAPRVEKTPSLPDDLSDSTSLGTSVITTCTSVQEQGLKANNSKELSMCFTELTTNIIPGSNKVIKPNSGPSRARPSAALTVLSVLMLKLAL

SEQ ID NO: 34281 - protein, 264 aa, Homo sapiens
  Payload ID: 6772
  Gene Symbol: GFRA2
  Gene Name: GDNF family receptor alpha 2
  ENSP ID: ENSP00000428721
MILANVFCLFFFLDETLRSLASPSSLQGPELHGWRPPVDCVRANELCAAESNCSSRYRTLRQCLAGRDRNTMLANKECQAALEVLQESPLYDCRCKRGMKKELQCLQIYWSIHLGLTEGEEFYEASPYEPVTSRLSDIFRLASIFSGTGADPVVSAKSNHCLDAAKACNLNDNCKKLRSSYISICNREISPTERCNRRKCHKALRQFFDRVPSEYTYRMLFCSCQDQACAERRRQTILPSCSYEDKEKPNCLDLRGVCRTDHLC

SEQ ID NO: 34282 - protein, 331 aa, Homo sapiens
  Payload ID: 6772
  Gene Symbol: GFRA2
  Gene Name: GDNF family receptor alpha 2
  Uniprot ID: O00451
  ENSP ID: ENSP00000429206
MILANVFCLFFFLGTGADPVVSAKSNHCLDAAKACNLNDNCKKLRSSYISICNREISPTERCNRRKCHKALRQFFDRVPSEYTYRMLFCSCQDQACAERRRQTILPSCSYEDKEKPNCLDLRGVCRTDHLCRSRLADFHANCRASYQTVTSCPADNYQACLGSYAGMIGFDMTPNYVDSSPTGIVVSPWCSCRGSGNMEEECEKFLRDFTENPCLRNAIQAFGNGTDVNVSPKGPSFQATQAPRVEKTPSLPDDLSDSTSLGTSVITTCTSVQEQGLKANNSKELSMCFTELTTNIIPGSNKVIKPNSGPSRARPSAALTVLSVLMLKLAL

SEQ ID NO: 34283 - protein, 464 aa, Homo sapiens; identical to SEQ ID NO: 34280
  Payload ID: 6772
  Gene Symbol: GFRA2
  Gene Name: GDNF family receptor alpha 2
  Uniprot ID: O00451
  ENSP ID: ENSP00000429445

SEQ ID NO: 34284 - protein, 359 aa, Homo sapiens
  Payload ID: 6772
  Gene Symbol: GFRA2
  Gene Name: GDNF family receptor alpha 2
  Uniprot ID: O00451
  ENSP ID: ENSP00000429979
MILANVFCLFFFLGEEFYEASPYEPVTSRLSDIFRLASIFSGTGADPVVSAKSNHCLDAAKACNLNDNCKKLRSSYISICNREISPTERCNRRKCHKALRQFFDRVPSEYTYRMLFCSCQDQACAERRRQTILPSCSYEDKEKPNCLDLRGVCRTDHLCRSRLADFHANCRASYQTVTSCPADNYQACLGSYAGMIGFDMTPNYVDSSPTGIVVSPWCSCRGSGNMEEECEKFLRDFTENPCLRNAIQAFGNGTDVNVSPKGPSFQATQAPRVEKTPSLPDDLSDSTSLGTSVITTCTSVQEQGLKANNSKELSMCFTELTTNIIPGSNKVIKPNSGPSRARPSAALTVLSVLMLKLAL

SEQ ID NO: 34285 - protein, 74 aa, Homo sapiens
  Payload ID: 6772
  Gene Symbol: GFRA2
  Gene Name: GDNF family receptor alpha 2
  ENSP ID: ENSP00000430622
MLANKECQAALEVLQESPLYDCRCKRGMKKELQCLQIYWSIHLGLTEGEEFYEASPYEPVTSRLSDIFRLASIF

SEQ ID NO: 34286 - protein, 400 aa, Homo sapiens
  Payload ID: 6773
  Gene Symbol: GFRA3
  Gene Name: GDNF family receptor alpha 3
  Uniprot ID: O60609
  ENSP ID: ENSP00000274721
MVRPLNPRPLPPVVLMLLLLLPPSPLPLAAGDPLPTESRLMNSCLQARRKCQADPTCSAAYHHLDSCTSSISTPLPSEEPSVPADCLEAAQQLRNSSLIGCMCHRRMKNQVACLDIYWTVHRARSLGNYELDVSPYEDTVTSKPWKMNLSKLNMLKPDSDLCLKFAMLCTLNDKCDRLRKAYGEACSGPHCQRHVCLRQLLTFFEKAAEPHAQGLLLCPCAPNDRGCGERRRNTIAPNCALPPVAPNCLELRRLCFSDPLCRSRLVDFQTHCHPMDILGTCATEQSRCLRAYLGLIGTAMTPNFVSNVNTSVALSCTCRGSGNLQEECEMLEGFFSHNPCLTEAIAAKMRFHSQLFSQDWPHPTFAVMAHQNENPAVRPQPWVPSLFSCTLPLILLLSLW

SEQ ID NO: 34287 - protein, 369 aa, Homo sapiens
  Payload ID: 6773
  Gene Symbol: GFRA3
  Gene Name: GDNF family receptor alpha 3
  Uniprot ID: O60609
  ENSP ID: ENSP00000367613
MVRPLNPRPLPPVVLMLLLLLPPSPLPLAAGDPLPTESRLMNSCLQARRKCQADPTCSAAYHHLDSCTSSISTPLPSEEPSVPADCLEAAQQLRNSSLIGCMCHRRMKNQVACLDIYWTVHRARSLDSDLCLKFAMLCTLNDKCDRLRKAYGEACSGPHCQRHVCLRQLLTFFEKAAEPHAQGLLLCPCAPNDRGCGERRRNTIAPNCALPPVAPNCLELRRLCFSDPLCRSRLVDFQTHCHPMDILGTCATEQSRCLRAYLGLIGTAMTPNFVSNVNTSVALSCTCRGSGNLQEECEMLEGFFSHNPCLTEAIAAKMRFHSQLFSQDWPHPTFAVMAHQNENPAVRPQPWVPSLFSCTLPLILLLSLW

SEQ ID NO: 34288 - protein, 269 aa, Homo sapiens
  Payload ID: 6774
  Gene Symbol: GFRA4
  Gene Name: GDNF family receptor alpha 4
  Uniprot ID: Q9GZZ7
  ENSP ID: ENSP00000290417
MVRCLGPALLLLLLLGSASSVGGNRCVDAAEACTADARCQRLRSEYVAQCLGRAAQGGCPRARCRRALRRFFARGPPALTHALLFCPCAGPACAERRRQTFVPSCAFSGPGPAPPSCLEPLNFCERSRVCRPRLLAFQVSCTPAPSAPDGCLLDQGARCLRAYAGLVGTAVTPNYVDNVSARVAPWCDCGASGNRREDCEAFRGLFTRNRCLDGAIQAFASGWPPVLLDQLNPQGDPEHSLLQVSSTGRALERRSLLSILPVLALPALL

SEQ ID NO: 34289 - protein, 299 aa, Homo sapiens
  Payload ID: 6774
  Gene Symbol: GFRA4
  Gene Name: GDNF family receptor alpha 4
  Uniprot ID: Q9GZZ7
  ENSP ID: ENSP00000313423
MVRCLGPALLLLLLLGSASSVGGNRCVDAAEACTADARCQRLRSEYVAQCLGRAAQGGCPRARCRRALRRFFARGPPALTHALLFCPCAGPACAERRRQTFVPSCAFSGPGPAPPSCLEPLNFCERSRVCRCARAAAGPWRGWGRGLSPAHRPPAAQASPPGLSGLVHPSAQRPRRLPAGPGRPLPARLRGPRGVPAGTAVTPNYVDNVSARVAPWCDCGASGNRREDCEAFRGLFTRNRCLDGAIQAFASGWPPVLLDQLNPQGDPEHSLLQVSSTGRALERRSLLSILPVLALPALL

SEQ ID NO: 34290 - protein, 182 aa, Homo sapiens
  Payload ID: 6774
  Gene Symbol: GFRA4
  Gene Name: GDNF family receptor alpha 4
  Uniprot ID: Q9GZZ7
  ENSP ID: ENSP00000435801
MVRCLGPALLLLLLLGSASSVGGNRCVDAAEACTADARCQRLRSEYVAQCLGRAAQGGCPRARCRRALRRFFARGPPALTHALLFCPCAGPACAERRRQTFVPSCAFSGPGPAPPSCLEPLNFCERSRVCRPRLLAFQVSCTPAPSAPDGCLLDQGARCLRAYAGLVGSPQAPPSPLTTWTT

SEQ ID NO: 34291 - protein, 394 aa, Homo sapiens
  Payload ID: 6775
  Gene Symbol: GFRAL
  Gene Name: GDNF family receptor alpha like
  Uniprot ID: Q6UXV0
  ENSP ID: ENSP00000343636
MIVFIFLAMGLSLENEYTSQTNNCTYLREQCLRDANGCKHAWRVMEDACNDSDPGDPCKMRNSSYCNLSIQYLVESNFQFKECLCTDDFYCTVNKLLGKKCINKSDNVKEDKFKWNLTTRSHHGFKGMWSCLEVAEACVGDVVCNAQLASYLKACSANGNPCDLKQCQAAIRFFYQNIPFNIAQMLAFCDCAQSDIPCQQSKEALHSKTCAVNMVPPPTCLSVIRSCQNDELCRRHYRTFQSKCWQRVTRKCHEDENCISTLSKQDLTCSGSDDCKAAYIDILGTVLQVQCTCRTITQSEESLCKIFQHMLHRKSCFNYPTLSNVKGMALYTRKHANKITLTGFHSPFNGEVIYAAMCMTVTCGILLLVMVKLRTSRISSKARDPSSIQIPGEL

SEQ ID NO: 34292 - protein, 711 aa, Homo sapiens
  Payload ID: 6776
  Gene Symbol: GZF1
  Gene Name: GDNF-inducible zinc finger protein 1
  Uniprot ID: Q9H116
  ENSP ID: ENSP00000338290
MESGAVLLESKSSPFNLLHEMHELRLLGHLCDVTVSVEYQGVRKDFMAHKAVLAATSKFFKEVFLNEKSVDGTRTNVYLNEVQVADFASFLEFVYTAKVQVEEDRVQRMLEVAEKLKCLDLSETCFQLKKQMLESVLLELQNFSESQEVEVSSGSQVSAAPAPRASVATDGPHPSGLTDSLDYPGERASNGMSSDLPPKKSKDKLDKKKEVVKPPYPKIRRASGRLAGRKVFVEIPKKKYTRRLREQQKTAEGDVGDYRCPQDQSPDRVGTEMEQVSKNEGCQAGAELEELSKKAGPEEEEEEEEEDEEGEKKKSNFKCSICEKAFLYEKSFLKHSKHRHGVATEVVYRCDTCGQTFANRCNLKSHQRHVHSSERHFPCELCGKKFKRKKDVKRHVLQVHEGGGERHRCGQCGKGLSSKTALRLHERTHTGDRPYGCTECGARFSQPSALKTHMRIHTGEKPFVCDECGARFTQNHMLIYHKRCHTGERPFMCETCGKSFASKEYLKHHNRIHTGSKPFKCEVCFRTFAQRNSLYQHIKVHTGERPYCCDQCGKQFTQLNALQRHRRIHTGERPFMCNACGRTFTDKSTLRRHTSIHDKNTPWKSFLVIVDGSPKNDDGHKTEQPDEEYVSSKLSDKLLSFAENGHFHNLAAVQDTVPTMQENSSADTACKADDSVVSQDTLLATTISELSELTPQTDSMPTQLHSLSNME

SEQ ID NO: 34293 - protein, 711 aa, Homo sapiens; identical to SEQ ID NO: 34292
  Payload ID: 6776
  Gene Symbol: GZF1
  Gene Name: GDNF-inducible zinc finger protein 1
  Uniprot ID: Q9H116
  ENSP ID: ENSP00000366250

SEQ ID NO: 34294 - protein, 48 aa, Homo sapiens
  Payload ID: 6776
  Gene Symbol: GZF1
  Gene Name: GDNF-inducible zinc finger protein 1
  ENSP ID: ENSP00000410009
MESGAVLLESKSSPFNLLHEMHELRLLGHLCDVTVSVEYQGVRKDFMA

SEQ ID NO: 34295 - protein, 447 aa, Homo sapiens [sequence omitted]

SEQ ID NO: 34296 - protein, 40 aa, Homo sapiens
  Payload ID: 6777
  Gene Symbol: GDI1
  Gene Name: GDP dissociation inhibitor 1
  ENSP ID: ENSP00000394752
MDEEYDVIVLGTGLTERRQVGVQRMVSPSPRNASCRASCL

SEQ ID NO: 34297 - protein, 46 aa, Homo sapiens
  Payload ID: 6777
  Gene Symbol: GDI1
  Gene Name: GDP dissociation inhibitor 1
  ENSP ID: ENSP00000396215
MDEEYDVIVLGTGLTMPLGVLVLEGHPVSAGCPASLKASVISLSAL

SEQ ID NO: 34298 - protein, 147 aa, Homo sapiens
  Payload ID: 6777
  Gene Symbol: GDI1
  Gene Name: GDP dissociation inhibitor 1
  ENSP ID: ENSP00000416195
MDEEYDVIVLGTGLTECILSGIMSVNGKKVLHMDRNPYYGGESSSITPLEELYKRFQLLEGPPESMGRGRDWNVDLIPKFLMANGQLVKMLLYTEVTRYLDFKVVEGSFVYKGGKIYKVPSTETEALASRPPLNPRDIAKCLSQEGP

SEQ ID NO: 34299 - protein, 147 aa, Homo sapiens; identical to SEQ ID NO: 34298
  Payload ID: 6777
  Gene Symbol: GDI1
  Gene Name: GDP dissociation inhibitor 1
  ENSP ID: ENSP00000486715

SEQ ID NO: 34300 - protein, 148 aa, Homo sapiens
  Payload ID: 6778
  Gene Symbol: GDI2
  Gene Name: GDP dissociation inhibitor 2
  ENSP ID: ENSP00000369470
MSLGKRKPSNFYLANFLGKECILSGIMSVNGKKVLHMDRNPYYGGESASITPLEDLYKRFKIPGSPPESMGRGRDWNVDLIPKFLMANGQLVKMLLYTEVTRYLDFKVTEGSFVYKGGKIYKVPSTEAEALASSLMGLFEKRRFRKFL

SEQ ID NO: 34301 - protein, 400 aa, Homo sapiens
  Payload ID: 6778
  Gene Symbol: GDI2
  Gene Name: GDP dissociation inhibitor 2
  Uniprot ID: P50395
  ENSP ID: ENSP00000369528
MNEEYDVIVLGTGLTECILSGIMSVNGKKVLHMDRNPYYGGESASITPLEDLYKRFKIPGSPPESMGRGRDWNVDLIPKFLMANGLMGLFEKRRFRKFLVYVANFDEKDPRTFEGIDPKKTTMRDVYKKFDLGQDVIDFTGHALALYRTDDYLDQPCYETINRIKLYSESLARYGKSPYLYPLYGLGELPQGFARLSAIYGGTYMLNKPIEEIIVQNGKVIGVKSEGEIARCKQLICDPSYVKDRVEKVGQVIRVICILSHPIKNTNDANSCQIIIPQNQVNRKSDIYVCMISFAHNVAAQGKYIAIVSTTVETKEPEKEIRPALELLEPIEQKFVSISDLLVPKDLGTESQIFISRTYDATTHFETTCDDIKNIYKRMTGSEFDFEEMKRKKNDIYGED

SEQ ID NO: 34302 - protein, 445 aa, Homo sapiens
  Payload ID: 6778
  Gene Symbol: GDI2
  Gene Name: GDP dissociation inhibitor 2
  Uniprot ID: P50395
  ENSP ID: ENSP00000369538
MNEEYDVIVLGTGLTECILSGIMSVNGKKVLHMDRNPYYGGESASITPLEDLYKRFKIPGSPPESMGRGRDWNVDLIPKFLMANGQLVKMLLYTEVTRYLDFKVTEGSFVYKGGKIYKVPSTEAEALASSLMGLFEKRRFRKFLVYVANFDEKDPRTFEGIDPKKTTMRDVYKKFDLGQDVIDFTGHALALYRTDDYLDQPCYETINRIKLYSESLARYGKSPYLYPLYGLGELPQGFARLSAIYGGTYMLNKPIEEIIVQNGKVIGVKSEGEIARCKQLICDPSYVKDRVEKVGQVIRVICILSHPIKNTNDANSCQIIIPQNQVNRKSDIYVCMISFAHNVAAQGKYIAIVSTTVETKEPEKEIRPALELLEPIEQKFVSISDLLVPKDLGTESQIFISRTYDATTHFETTCDDIKNIYKRMTGSEFDFEEMKRKKNDIYGED

SEQ ID NO: 34303 - protein, 203 aa, Homo sapiens
  Payload ID: 6778
  Gene Symbol: GDI2
  Gene Name: GDP dissociation inhibitor 2
  ENSP ID: ENSP00000387565
KKFDLGQDVIDFTGHALALYRTDDYLDQPCYETINRIKLYSESLARYGKSPYLYPLYGLGELPQGFARLSAIYGGTYMLNKPIEEIIVQNGKVIGVKSEGEIARCKQLICDPSYVKDRVEKVGQVIRVICILSHPIKNTNDANSCQIIIPQNQVNRKSDLLASVTSWYQKTWEQKARSLFPAHMMPPLILRQRVMTLKTSIRG

SEQ ID NO: 34304 - protein, 155 aa, Homo sapiens
  Payload ID: 6778
  Gene Symbol: GDI2
  Gene Name: GDP dissociation inhibitor 2
  ENSP ID: ENSP00000394177
MNEEYDVIVLGTGLTLYKRFKIPGSPPESMGRGRDWNVDLIPKFLMANGQLVKMLLYTEVTRYLDFKVTEGSFVYKGGKIYKVPSTEAEALASSLMGLFEKRRFRKFLVYVANFDEKDPRTFEGIDPKKTTMRDVYKKFDLGQDVIDFTGHALAL

SEQ ID NO: 34305 - protein, 263 aa, Homo sapiens
  Payload ID: 6778
  Gene Symbol: GDI2
  Gene Name: GDP dissociation inhibitor 2
  ENSP ID: ENSP00000401733
MNEEYDVIVLGTGLTECILSGIMSVNGKKVLHMDRNPYYGGESASITPLEDLYKRFKIPGSPPESMGRGRDWNVDLIPKFLMANEVTRYLDFKVTEGSFVYKGGKIYKVPSTEAEALASSLMGLFEKRRFRKFLVYVANFDEKDPRTFEGIDPKKTTMRDVYKKFDLGQDVIDFTGHALALYRTDDYLDQPCYETINRIKLYSESLARYGKSPYLYPLYGLGELPQGFARLSAIYGGTYMLNKPIEEIIVQNGKVIGVKSEGE

SEQ ID NO: 34306 - protein, 130 aa, Homo sapiens
  Payload ID: 6778
  Gene Symbol: GDI2
  Gene Name: GDP dissociation inhibitor 2
  ENSP ID: ENSP00000476707
MSVNGKKVLHMDRNPYYGGESASITPLEDLYKRFKIPGSPPESMGRGRDWNVDLIPKFLMANGQLVKMLLYTEVTRYLDFKVTEGSFVYKGGKIYKVPSTEAEALASSLMGLFEKRRFRKFLVYVANFDE

SEQ ID NO: 34307 - protein, 125 aa, Homo sapiens
  Payload ID: 6778
  Gene Symbol: GDI2
  Gene Name: GDP dissociation inhibitor 2
  ENSP ID: ENSP00000476832
MSLGKRKPSNFYLANFLGKECILSGIMSVNGKKVLHMDRNPYYGGESASITPLEDLYKRFKIPGSPPESMGRGRDWNVDLIPKFLMANGQLVKMLLYTEVTRYLDFKVTEGSFVYKGGKIYKVPS

SEQ ID NO: 34308 - protein, 385 aa, Homo sapiens
  Payload ID: 6779
  Gene Symbol: GDPGP1
  Gene Name: GDP-D-glucose phosphorylase 1
  Uniprot ID: Q6ZNW5
  ENSP ID: ENSP00000368405
MALPHDSNETSYLLPPNNEDWGRQTIPDFVYGQKDLMAEGIQWPRNAPGIPDALPQSPFDAALCSAWKQRVELGLFRYRLRELQTQILPGAVGFVAQLNVERGVQRRPPQTIKSVRQAFDPVQFNFNKIRPGEVLFRLHREPDLPGTLLQEDILVVINVSPLEWGHVLLVPEPARQLPQRLLPGALRAGIEAVLLSLHPGFRVGFNSLGGLASVNHLHLHGYYLAHRLPVEQAPSEPLDPGGHLHLLQDLPAPGFLFYTRGPGPDLESLISRVCRATDYLTDHEIAHNLFVTRGAPPGKTSPSSALTGVRVILWARKSSFGIKDGEAFNVALCELAGHLPVKTSQDFSSLTEAAAVALIQDCRLPPSQAEDVQAALVALMSQEEQ

SEQ ID NO: 34309 - protein, 385 aa, Homo sapiens; identical to SEQ ID NO: 34308
  Payload ID: 6779
  Gene Symbol: GDPGP1
  Gene Name: GDP-D-glucose phosphorylase 1
  Uniprot ID: Q6ZNW5
  ENSP ID: ENSP00000452793

SEQ ID NO: 34310 - protein, 49 aa, Homo sapiens
  Payload ID: 6779
  Gene Symbol: GDPGP1
  Gene Name: GDP-D-glucose phosphorylase 1
  ENSP ID: ENSP00000453037
MALPHDSNETSYLLPPNNEDWGRQTIPDFVYGQKDLMAEGIQWPRNAPG

SEQ ID NO: 34311 - protein, 214 aa, Homo sapiens
  Payload ID: 6779
  Gene Symbol: GDPGP1
  Gene Name: GDP-D-glucose phosphorylase 1
  ENSP ID: ENSP00000453822
MALPHDSNETSYLLPPNNEDWGRQTIPDFVYGQKDLMAEGIQWPRNAPGIPDALPQSPFDAALCSAWKQRVELGLFRYRLRELQTQILPGAVGFVAQLNVERGVQRRPPQTIKSVRQAFDPVQFNFNKIRPGEVLFRLHREPDLPGTLLQEDILVVINVSPLEWGHVLLVPEPARQLPQRLLPGALRAGIEAVLLSLHPGFRVGFNSLGGLASV

SEQ ID NO: 34312 - protein, 10 aa, Homo sapiens
  Payload ID: 6779
  Gene Symbol: GDPGP1
  Gene Name: GDP-D-glucose phosphorylase 1
  ENSP ID: ENSP00000454128
MALPHDSNET

SEQ ID NO: 34313 - protein, 372 aa, Homo sapiens
  Payload ID: 6780
  Gene Symbol: GMDS
  Gene Name: GDP-mannose 4,6-dehydratase
  Uniprot ID: O60547
  ENSP ID: ENSP00000370194
MAHAPARCPSARGSGDGEMGKPRNVALITGITGQDGSYLAEFLLEKGYEVHGIVRRSSSFNTGRIEHLYKNPQAHIEGNMKLHYGDLTDSTCLVKIINEVKPTEIYNLGAQSHVKISFDLAEYTADVDGVGTLRLLDAVKTCGLINSVKFYQASTSELYGKVQEIPQKETTPFYPRSPYGAAKLYAYWIVVNFREAYNLFAVNGILFNHESPRRGANFVTRKISRSVAKIYLGQLECFSLGNLDAKRDWGHAKDYVEAMWLMLQNDEPEDFVIATGEVHSVREFVEKSFLHIGKTIVWEGKNENEVGRCKETGKVHVTVDLKYYRPTEVDFLQGDCTKAKQKLNWKPRVAFDELVREMVHADVELMRTNPNA

SEQ ID NO: 34314 - protein, 342 aa, Homo sapiens
  Payload ID: 6780
  Gene Symbol: GMDS
  Gene Name: GDP-mannose 4,6-dehydratase
  Uniprot ID: O60547
  ENSP ID: ENSP00000436726
MCKMDGSYLAEFLLEKGYEVHGIVRRSSSFNTGRIEHLYKNPQAHIEGNMKLHYGDLTDSTCLVKIINEVKPTEIYNLGAQSHVKISFDLAEYTADVDGVGTLRLLDAVKTCGLINSVKFYQASTSELYGKVQEIPQKETTPFYPRSPYGAAKLYAYWIVVNFREAYNLFAVNGILFNHESPRRGANFVTRKISRSVAKIYLGQLECFSLGNLDAKRDWGHAKDYVEAMWLMLQNDEPEDFVIATGEVHSVREFVEKSFLHIGKTIVWEGKNENEVGRCKETGKVHVTVDLKYYRPTEVDFLQGDCTKAKQKLNWKPRVAFDELVREMVHADVELMRTNPNA

SEQ ID NO: 34315 - protein, 420 aa, Homo sapiens
  Payload ID: 6781
  Gene Symbol: GMPPA
  Gene Name: GDP-mannose pyrophosphorylase A
  Uniprot ID: Q96IJ6
  ENSP ID: ENSP00000315925
MLKAVILIGGPQKGTRFRPLSFEVPKPLFPVAGVPMIQHHIEACAQVPGMQEILLIGFYQPDEPLTQFLEAAQQEFNLPVRYLQEFAPLGTGGGLYHFRDQILAGSPEAFFVLNADVCSDFPLSAMLEAHRRQRHPFLLLGTTANRTQSLNYGCIVENPQTHEVLHYVEKPSTFISDIINCGIYLFSPEALKPLRDVFQRNQQDGQLEDSPGLWPGAGTIRLEQDVFSALAGQGQIYVHLTDGIWSQIKSAGSALYASRLYLSRYQDTHPERLAKHTPGGPWIRGNVYIHPTAKVAPSAVLGPNVSIGKGVTVGEGVRLRESIVLHGATLQEHTCVLHSIVGWGSTVGRWARVEGTPSDPNPNDPRARMDSESLFKDGKLLPAITILGCRVRIPAEVLILNSIVLPHKELSRSFTNQIIL

SEQ ID NO: 34316 - protein, 420 aa, Homo sapiens; identical to SEQ ID NO: 34315
  Payload ID: 6781
  Gene Symbol: GMPPA
  Gene Name: GDP-mannose pyrophosphorylase A
  Uniprot ID: Q96IJ6
  ENSP ID: ENSP00000340760

SEQ ID NO: 34317 - protein, 420 aa, Homo sapiens; identical to SEQ ID NO: 34315
  Payload ID: 6781
  Gene Symbol: GMPPA
  Gene Name: GDP-mannose pyrophosphorylase A
  Uniprot ID: Q96IJ6
  ENSP ID: ENSP00000350949

SEQ ID NO: 34318 - protein, 420 aa, Homo sapiens; identical to SEQ ID NO: 34315
  Payload ID: 6781
  Gene Symbol: GMPPA
  Gene Name: GDP-mannose pyrophosphorylase A
  Uniprot ID: Q96IJ6
  ENSP ID: ENSP00000363016

SEQ ID NO: 34319 - protein, 473 aa, Homo sapiens
  Payload ID: 6781
  Gene Symbol: GMPPA
  Gene Name: GDP-mannose pyrophosphorylase A
  Uniprot ID: Q96IJ6
  ENSP ID: ENSP00000363027
MLKAVILIGGPQKGTRFRPLSFEVPKPLFPVAGVPMIQHHIEACAQVPGMQEILLIGFYQPDEPLTQFLEAAQQEFNLPVRYLQEFAPLGTGGGLYHFRDQILAGSPEAFFVLNADVCSDFPLSAMLEAHRRQRHPFLLLGTTANRTQSLNYGCIVENPQTHEVLHYVEKPSTFISDIINCGIYLFSPEALKPLRDVFQRNQQDGQLEDSPGLWPGAGTIRLEQDVFSALAGQGQIYVHLTDGIWSQIKSAGSALYASRLYLSRYQDTHPERLAKHTPGGPWIRGTQPAPIPNLWLPPQPSEPGFLTSSPELKPQSLPLPDQIRFGIFAPRASLLLLGNVYIHPTAKVAPSAVLGPNVSIGKGVTVGEGVRLRESIVLHGATLQEHTCVLHSIVGWGSTVGRWARVEGTPSDPNPNDPRARMDSESLFKDGKLLPAITILGCRVRIPAEVLILNSIVLPHKELSRSFTNQIIL

SEQ ID NO: 34320 - protein, 179 aa, Homo sapiens
  Payload ID: 6781
  Gene Symbol: GMPPA
  Gene Name: GDP-mannose pyrophosphorylase A
  ENSP ID: ENSP00000392465
MLKAVILIGGPQKGTRFRPLSFEVPKPLFPVAGVPMIQHHIEACAQVPGMQEILLIGFYQPDEPLTQFLEAAQQEFNLPVRYLQEFAPLGTGGGLYHFRDQILAGSPEAFFVLNADVCSDFPLSAMLEAHRRQRHPFLLLGTTANRTQSLNYGCIVENPQTHEVLHYVEKPSTFISDII

SEQ ID NO: 34321 - protein, 290 aa, Homo sapiens
  Payload ID: 6781
  Gene Symbol: GMPPA
  Gene Name: GDP-mannose pyrophosphorylase A
  ENSP ID: ENSP00000396750
MLKAVILIGGPQKGTRFRPLSFEVPKPLFPVAGVPMIQHHIEACAQVPGMQEILLIGFYQPDEPLTQFLEAAQQEFNLPVRYLQEFAPLGTGGGLYHFRDQILAGSPEAFFVLNADVCSDFPLSAMLEAHRRQRHPFLLLGTTANRTQSLNYGCIVENPQTHEVLHYVEKPSTFISDIINCGIYLFSPEALKPLRDVFQRNQQDGQLEDSPGLWPGAGTIRLEQDVFSALAGQGQIYVHLTDGIWSQIKSAGSALYASRLYLSRYQDTHPERLAKHTPGGPWIRGPLFCF

SEQ ID NO: 34322 - protein, 249 aa, Homo sapiens
  Payload ID: 6781
  Gene Symbol: GMPPA
  Gene Name: GDP-mannose pyrophosphorylase A
  ENSP ID: ENSP00000411060
MIQHHIEACAQVPGMQEILLIGFYQPDEPLTQFLEAAQQEFNLPVRYLQEFAPLGTGGGLYHFRDQILAGSPEAFFVLNADVCSDFPLSAMLEAHRRQRHPFLLLGTTANRTQSLNYGCIVENPQTHEVLHYVEKPSTFISDIINCGIYLFSPEALKPLRDVFQRNQQDGQLEDSPGLWPGAGTIRLEQDVFSALAGQGQIYVHLTDGIWSQIKSAGSALYASRLYLSRYQDTHPERLAKHTPGGPWIR

SEQ ID NO: 34323 - protein, 399 aa, Homo sapiens
  Payload ID: 6781
  Gene Symbol: GMPPA
  Gene Name: GDP-mannose pyrophosphorylase A
  ENSP ID: ENSP00000478700
MLKAVILIGGPQKGTRFRPLSFEVPKPLFPVAGVPMIQHHIEACAQVPGMQEILLIGFYQPDEPLTQFLEAAQQEFNLPVRYLQEFAPLGTGGGLYHFRDQILAGSPEAFFVLNADVCSDFPLSAMLEAHRRQRHPFLLLGTTANRTQSLNYGCIVENPQTHEVLHYVEKPSTFISDIINCGIYLFSPEALKPLRDVFQRNQQDGQLEDSPGLWPGAGTIRLEQDVFSALAGQGQIYVHLTDGIWSQIKSAGSALYASRLYLSRYQDTHPERLAKHTPGGPWIRGNVYIHPTAKVAPSAVLGPNVSIGKGVTVGEGVRLRESIVLHGATLQEHTCVLHSIVGWGSTVGRWARVEVPPVTLTPTIPEPAWTVRASSRTGSCCLLSPSWAAESGSLPRCSS

SEQ ID NO: 34324 - protein, 114 aa, Homo sapiens
  Payload ID: 6781
  Gene Symbol: GMPPA
  Gene Name: GDP-mannose pyrophosphorylase A
  ENSP ID: ENSP00000489451
  MOD_RES (1)..(1): Any amino acid
XIHPTAKVAPSAVLGPNVSIGKGVTVGEGVRLRESIVLHGATLQEHTCVLHSIVGWGSTVGRWARVEGTPSDPNPNDPRARMDSESLFKDGKLLPAITILGMASWGPGLGEPLS

SEQ ID NO: 34325 - protein, 387 aa, Homo sapiens
  Payload ID: 6782
  Gene Symbol: GMPPB
  Gene Name: GDP-mannose pyrophosphorylase B
  Uniprot ID: Q9Y5P6
  ENSP ID: ENSP00000309092
MKALILVGGYGTRLRPLTLSTPKPLVDFCNKPILLHQVEALAAAGVDHVILAVSYMSQVLEKEMKAQEQRLGIRISMSHEEEPLGTAGPLALARDLLSETADPFFVLNSDVICDFPFQAMVQFHRHHGQEGSILVTKVEEPSKYGVVVCEADTGRIHRFVEKPQVFVSNKINAGMYILSPAVLQRIQLQPTSIEKEVFPIMAKEGQLYAMELQGFWMDIGQPKDFLTGMCLFLQSLRQKQPERLCSGPGIVGNVLVDPSARIGQNCSIGPNVSLGPGVVVEDGVCIRRCTVLRDARIRSHSWLESCIVGWRCRVGQWVSLWAGLGGERGGECACLPDKAYPLLEVRMENVTVLGEDVIVNDELYLNGASVLPHKSIGESVPEPRIIM

SEQ ID NO: 34326 - protein, 360 aa, Homo sapiens
  Payload ID: 6782
  Gene Symbol: GMPPB
  Gene Name: GDP-mannose pyrophosphorylase B
  Uniprot ID: Q9Y5P6
  ENSP ID: ENSP00000311130
MKALILVGGYGTRLRPLTLSTPKPLVDFCNKPILLHQVEALAAAGVDHVILAVSYMSQVLEKEMKAQEQRLGIRISMSHEEEPLGTAGPLALARDLLSETADPFFVLNSDVICDFPFQAMVQFHRHHGQEGSILVTKVEEPSKYGVVVCEADTGRIHRFVEKPQVFVSNKINAGMYILSPAVLQRIQLQPTSIEKEVFPIMAKEGQLYAMELQGFWMDIGQPKDFLTGMCLFLQSLRQKQPERLCSGPGIVGNVLVDPSARIGQNCSIGPNVSLGPGVVVEDGVCIRRCTVLRDARIRSHSWLESCIVGWRCRVGQWVRMENVTVLGEDVIVNDELYLNGASVLPHKSIGESVPEPRIIM

SEQ ID NO: 34327 - protein, 360 aa, Homo sapiens; identical to SEQ ID NO: 34326
  Payload ID: 6782
  Gene Symbol: GMPPB
  Gene Name: GDP-mannose pyrophosphorylase B
  Uniprot ID: Q9Y5P6
  ENSP ID: ENSP00000418565

SEQ ID NO: 34328 - protein, 731 aa, Homo sapiens
  Payload ID: 6783
  Gene Symbol: GSN
  Gene Name: gelsolin
  Uniprot ID: P06396
  ENSP ID: ENSP00000340888
MVVEHPEFLKAGKEPGLQIWRVEKFDLVPVPTNLYGDFFTGDAYVILKTVQLRNGNLQYDLHYWLGNECSQDESGAAAIFTVQLDDYLNGRAVQHREVQGFESATFLGYFKSGLKYKKGGVASGFKHVVPNEVVVQRLFQVKGRRVVRATEVPVSWESFNNGDCFILDLGNNIHQWCGSNSNRYERLKATQVSKGIRDNERSGRARVHVSEEGTEPEAMLQVLGPKPALPAGTEDTAKEDAANRKLAKLYKVSNGAGTMSVSLVADENPFAQGALKSEDCFILDHGKDGKIFVWKGKQANTEERKAALKTASDFITKMDYPKQTQVSVLPEGGETPLFKQFFKNWRDPDQTDGLGLSYLSSHIANVERVPFDAATLHTSTAMAAQHGMDDDGTGQKQIWRIEGSNKVPVDPATYGQFYGGDSYIILYNYRHGGRQGQIIYNWQGAQSTQDEVAASAILTAQLDEELGGTPVQSRVVQGKEPAHLMSLFGGKPMIIYKGGTSREGGQTAPASTRLFQVRANSAGATRAVEVLPKAGALNSNDAFVLKTPSAAYLWVGTGASEAEKTGAQELLRVLRAQPVQVAEGSEPDGFWEALGGKAAYRTSPRLKDKKMDAHPPRLFACSNKIGRFVIEEVPGELMQEDLATDDVMLLDTWDQVFVWVGKDSQEEEKTEALTSAKRYIETDPANRDRRTPITVVKQGFEPPSFVGWFLGWDDDYWSVDPLDRAMAELAA

SEQ ID NO: 34329 - protein, 67 aa, Homo sapiens
  Payload ID: 6783
  Gene Symbol: GSN
  Gene Name: gelsolin
  ENSP ID: ENSP00000362912
  MOD_RES (1)..(1): Any amino acid
XKGGTSREGGQTAPASTRLFQVRANSAGATRAVEVISRSWNTEGIGLPETSQLNDQISRHRNGGRGW

SEQ ID NO: 34330 - protein, 731 aa, Homo sapiens; identical to SEQ ID NO: 34328
  Payload ID: 6783
  Gene Symbol: GSN
  Gene Name: gelsolin
  Uniprot ID: P06396
  ENSP ID: ENSP00000362914

SEQ ID NO: 34331 - protein, 782 aa, Homo sapiens
  Payload ID: 6783
  Gene Symbol: GSN
  Gene Name: gelsolin
  Uniprot ID: P06396
  ENSP ID: ENSP00000362924
MAPHRPAPALLCALSLALCALSLPVRAATASRGASQAGAPQGRVPEARPNSMVVEHPEFLKAGKEPGLQIWRVEKFDLVPVPTNLYGDFFTGDAYVILKTVQLRNGNLQYDLHYWLGNECSQDESGAAAIFTVQLDDYLNGRAVQHREVQGFESATFLGYFKSGLKYKKGGVASGFKHVVPNEVVVQRLFQVKGRRVVRATEVPVSWESFNNGDCFILDLGNNIHQWCGSNSNRYERLKATQVSKGIRDNERSGRARVHVSEEGTEPEAMLQVLGPKPALPAGTEDTAKEDAANRKLAKLYKVSNGAGTMSVSLVADENPFAQGALKSEDCFILDHGKDGKIFVWKGKQANTEERKAALKTASDFITKMDYPKQTQVSVLPEGGETPLFKQFFKNWRDPDQTDGLGLSYLSSHIANVERVPFDAATLHTSTAMAAQHGMDDDGTGQKQIWRIEGSNKVPVDPATYGQFYGGDSYIILYNYRHGGRQGQIIYNWQGAQSTQDEVAASAILTAQLDEELGGTPVQSRVVQGKEPAHLMSLFGGKPMIIYKGGTSREGGQTAPASTRLFQVRANSAGATRAVEVLPKAGALNSNDAFVLKTPSAAYLWVGTGASEAEKTGAQELLRVLRAQPVQVAEGSEPDGFWEALGGKAAYRTSPRLKDKKMDAHPPRLFACSNKIGRFVIEEVPGELMQEDLATDDVMLLDTWDQVFVWVGKDSQEEEKTEALTSAKRYIETDPANRDRRTPITVVKQGFEPPSFVGWFLGWDDDYWSVDPLDRAMAELAA

SEQ ID NO: 34332 - protein, 731 aa, Homo sapiens; identical to SEQ ID NO: 34328
  Payload ID: 6783
  Gene Symbol: GSN
  Gene Name: gelsolin
  Uniprot ID: P06396
  ENSP ID: ENSP00000362929

SEQ ID NO: 34333 - protein, 748 aa, Homo sapiens
  Payload ID: 6783
  Gene Symbol: GSN
  Gene Name: gelsolin
  ENSP ID: ENSP00000377882
MAEEEALRGNSDPWPNSMVVEHPEFLKAGKEPGLQIWRVEKFDLVPVPTNLYGDFFTGDAYVILKTVQLRNGNLQYDLHYWLGNECSQDESGAAAIFTVQLDDYLNGRAVQHREVQGFESATFLGYFKSGLKYKKGGVASGFKHVVPNEVVVQRLFQVKGRRVVRATEVPVSWESFNNGDCFILDLGNNIHQWCGSNSNRYERLKATQVSKGIRDNERSGRARVHVSEEGTEPEAMLQVLGPKPALPAGTEDTAKEDAANRKLAKLYKVSNGAGTMSVSLVADENPFAQGALKSEDCFILDHGKDGKIFVWKGKQANTEERKAALKTASDFITKMDYPKQTQVSVLPEGGETPLFKQFFKNWRDPDQTDGLGLSYLSSHIANVERVPFDAATLHTSTAMAAQHGMDDDGTGQKQIWRIEGSNKVPVDPATYGQFYGGDSYIILYNYRHGGRQGQIIYNWQGAQSTQDEVAASAILTAQLDEELGGTPVQSRVVQGKEPAHLMSLFGGKPMIIYKGGTSREGGQTAPASTRLFQVRANSAGATRAVEVLPKAGALNSNDAFVLKTPSAAYLWVGTGASEAEKTGAQELLRVLRAQPVQVAEGSEPDGFWEALGGKAAYRTSPRLKDKKMDAHPPRLFACSNKIGRFVIEEVPGELMQEDLATDDVMLLDTWDQVFVWVGKDSQEEEKTEALTSAKRYIETDPANRDRRTPITVVKQGFEPPSFVGWFLGWDDDYWSVDPLDRAMAELAA

SEQ ID NO: 34334 - protein, 260 aa, Homo sapiens
  Payload ID: 6783
  Gene Symbol: GSN
  Gene Name: gelsolin
  ENSP ID: ENSP00000404226
MVVEHPEFLKAGKEPGLQIWRVEKFDLVPVPTNLYGDFFTGDAYVILKTVQLRNGNLQYDLHYWLGNECSQDESGAAAIFTVQLDDYLNGRAVQHREVQGFESATFLGYFKSGLKYKKGGVASGFKHVVPNEVVVQRLFQVKGRRVVRATEVPVSWESFNNGDCFILDLGNNIHQWCGSNSNRYERLKATQVSKGIRDNERSGRARVHVSEEGTEPEAMLQVLGPKPALPAGTEDTAKEDAANRKLAKLYKVSNGAGTMS

SEQ ID NO: 34335 - protein, 767 aa, Homo sapiens
  Payload ID: 6783
  Gene Symbol: GSN
  Gene Name: gelsolin
  ENSP ID: ENSP00000409358
MNTGLTRLLWPSWLPDGDMSHPQPELFLFPKAQPNSMVVEHPEFLKAGKEPGLQIWRVEKFDLVPVPTNLYGDFFTGDAYVILKTVQLRNGNLQYDLHYWLGNECSQDESGAAAIFTVQLDDYLNGRAVQHREVQGFESATFLGYFKSGLKYKKGGVASGFKHVVPNEVVVQRLFQVKGRRVVRATEVPVSWESFNNGDCFILDLGNNIHQWCGSNSNRYERLKATQVSKGIRDNERSGRARVHVSEEGTEPEAMLQVLGPKPALPAGTEDTAKEDAANRKLAKLYKVSNGAGTMSVSLVADENPFAQGALKSEDCFILDHGKDGKIFVWKGKQANTEERKAALKTASDFITKMDYPKQTQVSVLPEGGETPLFKQFFKNWRDPDQTDGLGLSYLSSHIANVERVPFDAATLHTSTAMAAQHGMDDDGTGQKQIWRIEGSNKVPVDPATYGQFYGGDSYIILYNYRHGGRQGQIIYNWQGAQSTQDEVAASAILTAQLDEELGGTPVQSRVVQGKEPAHLMSLFGGKPMIIYKGGTSREGGQTAPASTRLFQVRANSAGATRAVEVLPKAGALNSNDAFVLKTPSAAYLWVGTGASEAEKTGAQELLRVLRAQPVQVAEGSEPDGFWEALGGKAAYRTSPRLKDKKMDAHPPRLFACSNKIGRFVIEEVPGELMQEDLATDDVMLLDTWDQVFVWVGKDSQEEEKTEALTSAKRYIETDPANRDRRTPITVVKQGFEPPSFVGWFLGWDDDYWSVDPLDRAMAELAA

SEQ ID NO: 34336 - protein, 228 aa, Homo sapiens
  Payload ID: 6783
  Gene Symbol: GSN
  Gene Name: gelsolin
  ENSP ID: ENSP00000410657
MEKLFCCFPNSMVVEHPEFLKAGKEPGLQIWRVEKFDLVPVPTNLYGDFFTGDAYVILKTVQLRNGNLQYDLHYWLGNECSQDESGAAAIFTVQLDDYLNGRAVQHREVQGFESATFLGYFKSGLKYKKGGVASGFKHVVPNEVVVQRLFQVKGRRVVRATEVPVSWESFNNGDCFILDLGNNIHQWCGSNSNRYERLKATQVSKGIRDNERSGRARVHVSEEGTEPE

SEQ ID NO: 34337 - protein, 742 aa, Homo sapiens
  Payload ID: 6783
  Gene Symbol: GSN
  Gene Name: gelsolin
  Uniprot ID: P06396
  ENSP ID: ENSP00000411293
MEKLFCCFPNSMVVEHPEFLKAGKEPGLQIWRVEKFDLVPVPTNLYGDFFTGDAYVILKTVQLRNGNLQYDLHYWLGNECSQDESGAAAIFTVQLDDYLNGRAVQHREVQGFESATFLGYFKSGLKYKKGGVASGFKHVVPNEVVVQRLFQVKGRRVVRATEVPVSWESFNNGDCFILDLGNNIHQWCGSNSNRYERLKATQVSKGIRDNERSGRARVHVSEEGTEPEAMLQVLGPKPALPAGTEDTAKEDAANRKLAKLYKVSNGAGTMSVSLVADENPFAQGALKSEDCFILDHGKDGKIFVWKGKQANTEERKAALKTASDFITKMDYPKQTQVSVLPEGGETPLFKQFFKNWRDPDQTDGLGLSYLSSHIANVERVPFDAATLHTSTAMAAQHGMDDDGTGQKQIWRIEGSNKVPVDPATYGQFYGGDSYIILYNYRHGGRQGQIIYNWQGAQSTQDEVAASAILTAQLDEELGGTPVQSRVVQGKEPAHLMSLFGGKPMIIYKGGTSREGGQTAPASTRLFQVRANSAGATRAVEVLPKAGALNSNDAFVLKTPSAAYLWVGTGASEAEKTGAQELLRVLRAQPVQVAEGSEPDGFWEALGGKAAYRTSPRLKDKKMDAHPPRLFACSNKIGRFVIEEVPGELMQEDLATDDVMLLDTWDQVFVWVGKDSQEEEKTEALTSAKRYIETDPANRDRRTPITVVKQGFEPPSFVGWFLGWDDDYWSVDPLDRAMAELAA

SEQ ID NO: 34338 - protein, 731 aa, Homo sapiens; identical to SEQ ID NO: 34328
  Payload ID: 6783
  Gene Symbol: GSN
  Gene Name: gelsolin
  Uniprot ID: P06396
  ENSP ID: ENSP00000416586

SEQ ID NO: 34339 - protein, 739 aa, Homo sapiens
  Payload ID: 6783
  Gene Symbol: GSN
  Gene Name: gelsolin
  Uniprot ID: P06396
  ENSP ID: ENSP00000445823
MPLCTPNSMVVEHPEFLKAGKEPGLQIWRVEKFDLVPVPTNLYGDFFTGDAYVILKTVQLRNGNLQYDLHYWLGNECSQDESGAAAIFTVQLDDYLNGRAVQHREVQGFESATFLGYFKSGLKYKKGGVASGFKHVVPNEVVVQRLFQVKGRRVVRATEVPVSWESFNNGDCFILDLGNNIHQWCGSNSNRYERLKATQVSKGIRDNERSGRARVHVSEEGTEPEAMLQVLGPKPALPAGTEDTAKEDAANRKLAKLYKVSNGAGTMSVSLVADENPFAQGALKSEDCFILDHGKDGKIFVWKGKQANTEERKAALKTASDFITKMDYPKQTQVSVLPEGGETPLFKQFFKNWRDPDQTDGLGLSYLSSHIANVERVPFDAATLHTSTAMAAQHGMDDDGTGQKQIWRIEGSNKVPVDPATYGQFYGGDSYIILYNYRHGGRQGQIIYNWQGAQSTQDEVAASAILTAQLDEELGGTPVQSRVVQGKEPAHLMSLFGGKPMIIYKGGTSREGGQTAPASTRLFQVRANSAGATRAVEVLPKAGALNSNDAFVLKTPSAAYLWVGTGASEAEKTGAQELLRVLRAQPVQVAEGSEPDGFWEALGGKAAYRTSPRLKDKKMDAHPPRLFACSNKIGRFVIEEVPGELMQEDLATDDVMLLDTWDQVFVWVGKDSQEEEKTEALTSAKRYIETDPANRDRRTPITVVKQGFEPPSFVGWFLGWDDDYWSVDPLDRAMAELAA

SEQ ID NO: 34340 - protein, 232 aa, Homo sapiens
  Payload ID: 6783
  Gene Symbol: GSN
  Gene Name: gelsolin
  ENSP ID: ENSP00000489067
MEKLFCCFPNSMVVEHPEFLKAGKEPGLQIWRVEKFDLVPVPTNLYGDFFTGDAYVILKTVQLRNGNLQYDLHYWLGNECSQDESGAAAIFTVQLDDYLNGRAVQHREVQGFESATFLGYFKSGLKYKKGGVASGFKHVVPNEVVVQRLFQVKGRRVVRATEVPVSWESFNNGDCFILDLGNNIHQWCGSNSNRYERLKATQVSKGIRDNERSGRARVHVSEEGTEPEAMLQ

SEQ ID NO: 34341 - protein, 265 aa, Homo sapiens
  Payload ID: 6784
  Gene Symbol: GEMIN2
  Gene Name: gem (nuclear organelle) associated protein 2
  Uniprot ID: O14893
  ENSP ID: ENSP00000250379
MRRAELAGLKTMAWVPAESAVEELMPRLLPVEPCDLTEGFDPSVPPRTPQEYLRRVQIEAAQCPDVVVAQIDPKKLKRKQSVNISLSGCQPAPEGYSPTLQWQQQQVAQFSTVRQNVNKHRSHWKSQQLDSNVTMPKSEDEEGWKKFCLGEKLCADGAVGPATNESPGIDYVQATVTSVLEYLSNWFGERDFTPELGRWLYALLACLEKPLLPEAHSLIRQLARRCSEVRLLVDSKDDERVPALNLLICLVSRYFDQRDLADEPS

SEQ ID NO: 34342 - protein, 280 aa, Homo sapiens
  Payload ID: 6784
  Gene Symbol: GEMIN2
  Gene Name: gem (nuclear organelle) associated protein 2
  Uniprot ID: O14893
  ENSP ID: ENSP00000308533
MRRAELAGLKTMAWVPAESAVEELMPRLLPVEPCDLTEGFDPSVPPRTPQEYLRRVQIEAAQCPDVVVAQIDPKKLKRKQSVNISLSGCQPAPEGYSPTLQWQQQQVAQFSTVRQNVNKHRSHWKSQQLDSNVTMPKSEDEEGWKKFCLGEKLCADGAVGPATNESPGIDYVQIGFPPLLSIVSRMNQATVTSVLEYLSNWFGERDFTPELGRWLYALLACLEKPLLPEAHSLIRQLARRCSEVRLLVDSKDDERVPALNLLICLVSRYFDQRDLADEPS

SEQ ID NO: 34343 - protein, 250 aa, Homo sapiens
  Payload ID: 6784
  Gene Symbol: GEMIN2
  Gene Name: gem (nuclear organelle) associated protein 2
  Uniprot ID: O14893
  ENSP ID: ENSP00000379548
MRRAELAGLKTMAWVPAESAVEELMPRLLPVEPCDLTEGFDPSVPPRTPQEYLRRVQIEAAQCPDVVVAQIDPKKLKRKQSVNISLSGCQPAPEGYSPTLQWQQQQVAQFSTVRQNVNKHRSHWKSQQLDSNVTMPKSEDEEGWKKFCLGEKLCADGAVGPATNESPGIDYVQIGFPPLLSIVSRMNQATVTSVLEYLSNWFGERDFTPELGRWLYALLACLEKPLLPEAHSLIRQLARRCSEVRLLVVF

SEQ ID NO: 34344 - protein, 44 aa, Homo sapiens
  Payload ID: 6784
  Gene Symbol: GEMIN2
  Gene Name: gem (nuclear organelle) associated protein 2
  Uniprot ID: O14893
  ENSP ID: ENSP00000416827
MRRAELAGLKTMAWVPAESAVEELMPRLLPDRSSSMSRCCGSSN

SEQ ID NO: 34345 - protein, 45 aa, Homo sapiens
  Payload ID: 6784
  Gene Symbol: GEMIN2
  Gene Name: gem (nuclear organelle) associated protein 2
  ENSP ID: ENSP00000431500
  MOD_RES (1)..(1): Any amino acid
XLAGLKTMAWVPAESAVEELMPRLLPVEPCDLTEGSKQLNVQMLW

SEQ ID NO: 34346 - protein, 197 aa, Homo sapiens
  Payload ID: 6784
  Gene Symbol: GEMIN2
  Gene Name: gem (nuclear organelle) associated protein 2
  ENSP ID: ENSP00000434048
  MOD_RES (1)..(1): Any amino acid
XKTMAWVPAESAVEELMPRLLPVEPCDLTEGFDPSVPPRTPQEYLRIEAAQCPDVVVAQIDPKKLKRKQSVNISLSGCQPAPEGYSPTLQWQQQQVAQFSTVRQNVNKHRSHWKSQQLDSNVTMPKSEDEEGWKKFCLGEKLCADGAVGPATNESPGIDYVQIGFPPLLSIVSRMNQATVTSVLEYLSNWFGERDFT

SEQ ID NO: 34347 - protein, 220 aa, Homo sapiens
  Payload ID: 6784
  Gene Symbol: GEMIN2
  Gene Name: gem (nuclear organelle) associated protein 2
  ENSP ID: ENSP00000436065
  MOD_RES (1)..(1): Any amino acid
XAGLKTMAWVPAESAVEELMPRLLPVEPCDLTEGFDPSVPPRTPQEYLRRVQIEAAQCPDVVVAQIDPKKLKRKQSVNISLSGCQPAPEGYSPTLQWQQQQVAQFSTVRQNVNKHRSHWKSQQLDSNVTMPKSEDEEGWKKFCLGEKLCADGAVGPATNESPGIDYVQIGFPPLLSIVSRMNQGRWLYALLACLEKPLLPEAHSLIRQLARRCSEVRLLV

SEQ ID NO: 34348 - protein, 149 aa, Homo sapiens
  Payload ID: 6784
  Gene Symbol: GEMIN2
  Gene Name: gem (nuclear organelle) associated protein 2
  ENSP ID: ENSP00000436854
MRRAELAGLKTMAWVPAESAVEELMPRLLPVEPCDLTEGFDPSVPPRTPQEYLRRVQIEAAQCPDVVVAQIDPKKLKRKQSVNISLSGCQPAPEGYSPTLQWQQQQVAQFSTVRQNVNKHRSHWKSQQLDSNVTMRWGFAMLARLVLNS

SEQ ID NO: 34349 - protein, 22 aa, Homo sapiens
  Payload ID: 6784
  Gene Symbol: GEMIN2
  Gene Name: gem (nuclear organelle) associated protein 2
  ENSP ID: ENSP00000474979
DSKDDERVPALNLLICLVSRYS

SEQ ID NO: 34350 - protein, 1058 aa, Homo sapiens
  Payload ID: 6785
  Gene Symbol: GEMIN4
  Gene Name: gem (nuclear organelle) associated protein 4
  Uniprot ID: P57678
  ENSP ID: ENSP00000321706
MDLGPLNICEEMTILHGGFLLAEQLFHPKALAELTKSDWERVGRPIVEALREISSAAAHSQPFAWKKKALIIIWAKVLQPHPVTPSDTETRWQEDLFFSVGNMIPTINHTILFELLKSLEASGLFIQLLMALPTTICHAELERFLEHVTVDTSAEDVAFFLDVWWEVMKHKGHPQDPLLSQFSAMAHKYLPALDEFPHPPKRLRSDPDACPTMPLLAMLLRGLTQIQSRILGPGRKCCALANLADMLTVFALTEDDPQEVSATVYLDKLATVISVWNSDTQNPYHQQALAEKVKEAERDVSLTSLAKLPSETIFVGCEFLHHLLREWGEELQAVLRSSQGTSYDSYRLCDSLTSFSQNATLYLNRTSLSKEDRQVVSELAECVRDFLRKTSTVLKNRALEDITASIAMAVIQQKMDRHMEVCYIFASEKKWAFSDEWVACLGSNRALFRQPDLVLRLLETVIDVSTADRAIPESQIRQVIHLILECYADLSLPGKNKVLAGILRSWGRKGLSEKLLAYVEGFQEDLNTTFNQLTQSASEQGLAKAVASVARLVIVHPEVTVKKMCSLAVVNLGTHKFLAQILTAFPALRFVEEQGPNSSATFMVSCLKETVWMKFSTPKEEKQFLELLNCLMSPVKPQGIPVAALLEPDEVLKEFVLPFLRLDVEEVDLSLRIFIQTLEANACREEYWLQTCSPFPLLFSLCQLLDRFSKYWQLPKEKRCLSLDRKDLAIHILELLCEIVSANAETFSPDVWIKSLSWLHRKLEQLDWTVGLRLKSFFEGHFKCEVPATLFEICKLSEDEWTSQAHPGYGAGTGLLAWMECCCVSSGISERMLSLLVVDVGNPEEVRLFSKGFLVALVQVMPWCSPQEWQRLHQLTRRLLEKQLLHVPYSLEYIQFVPLLNLKPFAQELQLSVLFLRTFQFLCSHSCRDWLPLEGWNHVVKLLCGSLTRLLDSVRAIQAAGPWVQGPEQDLTQEALFVYTQVFCHALHIMAMLHPEVCEPLYVLALETLTCYETLSKTNPSVSSLLQRAHEQRFLKSIAEGIGPEERRQTLLQKMSSF

SEQ ID NO: 34351 - protein, 184 aa, Homo sapiens
  Payload ID: 6785
  Gene Symbol: GEMIN4
  Gene Name: gem (nuclear organelle) associated protein 4
  ENSP ID: ENSP00000392460
MDLGPLNICEEMTILHGGFLLAEQLFHPKALAELTKSDWERVGRPIVEALREISSAAAHSQPFAWKKKALIIIWAKVLQPHPVTPSDTETRWQEDLFFSVGNMIPTINHTILFELLKSLEASGLFIQLLMALPTTICHAELERFLEHVTVDTSAEDVAFFLDVWWERTTPRRCLQPCIWTNWPR

SEQ ID NO: 34352 - protein, 70 aa, Homo sapiens
  Payload ID: 6785
  Gene Symbol: GEMIN4
  Gene Name: gem (nuclear organelle) associated protein 4
  ENSP ID: ENSP00000458896
MFEACSQGPLNICEEMTILHGGFLLAEQLFHPKALAELTKSDWERVGRPIVEALREISSAAAHSQPFAWK

SEQ ID NO: 34353 - protein, 1047 aa, Homo sapiens
  Payload ID: 6785
  Gene Symbol: GEMIN4
  Gene Name: gem (nuclear organelle) associated protein 4
  ENSP ID: ENSP00000459565
MTILHGGFLLAEQLFHPKALAELTKSDWERVGRPIVEALREISSAAAHSQPFAWKKKALIIIWAKVLQPHPVTPSDTETRWQEDLFFSVGNMIPTINHTILFELLKSLEASGLFIQLLMALPTTICHAELERFLEHVTVDTSAEDVAFFLDVWWEVMKHKGHPQDPLLSQFSAMAHKYLPALDEFPHPPKRLRSDPDACPTMPLLAMLLRGLTQIQSRILGPGRKCCALANLADMLTVFALTEDDPQEVSATVYLDKLATVISVWNSDTQNPYHQQALAEKVKEAERDVSLTSLAKLPSETIFVGCEFLHHLLREWGEELQAVLRSSQGTSYDSYRLCDSLTSFSQNATLYLNRTSLSKEDRQVVSELAECVRDFLRKTSTVLKNRALEDITASIAMAVIQQKMDRHMEVCYIFASEKKWAFSDEWVACLGSNRALFRQPDLVLRLLETVIDVSTADRAIPESQIRQVIHLILECYADLSLPGKNKVLAGILRSWGRKGLSEKLLAYVEGFQEDLNTTFNQLTQSASEQGLAKAVASVARLVIVHPEVTVKKMCSLAVVNLGTHKFLAQILTAFPALRFVEEQGPNSSATFMVSCLKETVWMKFSTPKEEKQFLELLNCLMSPVKPQGIPVAALLEPDEVLKEFVLPFLRLDVEEVDLSLRIFIQTLEANACREEYWLQTCSPFPLLFSLCQLLDRFSKYWQLPKEKRCLSLDRKDLAIHILELLCEIVSANAETFSPDVWIKSLSWLHRKLEQLDWTVGLRLKSFFEGHFKCEVPATLFEICKLSEDEWTSQAHPGYGAGTGLLAWMECCCVSSGISERMLSLLVVDVGNPEEVRLFSKGFLVALVQVMPWCSPQEWQRLHQLTRRLLEKQLLHVPYSLEYIQFVPLLNLKPFAQELQLSVLFLRTFQFLCSHSCRDWLPLEGWNHVVKLLCGSLTRLLDSVRAIQAAGPWVQGPEQDLTQEALFVYTQVFCHALHIMAMLHPEVCEPLYVLALETLTCYETLSKTNPSVSSLLQRAHEQRFLKSIAEGIGPEERRQTLLQKMSSF

SEQ ID NO: 34354 - protein, 296 aa, Homo sapiens
  Payload ID: 6785
  Gene Symbol: GEMIN4
  Gene Name: gem (nuclear organelle) associated protein 4
  ENSP ID: ENSP00000460286
MFEACSQGPLNICEEMTILHGGFLLAEQLFHPKALAELTKSDWERVGRPIVEALREISSAAAHSQPFAWKKKALIIIWAKVLQPHPVTPSDTETRWQEDLFFSVGNMIPTINHTILFELLKSLEASGLFIQLLMALPTTICHAELERFLEHVTVDTSAEDVAFFLDVWWEVMKHKGHPQDPLLSQFSAMAHKYLPALDEFPHPPKRLRSDPDACPTMPLLAMLLRGLTQIQSRILGPGRKCCALANLADMLTVFALTEDDPQEVSATVYLDKLATVISVWNSDTQNPYHQQALAEK

SEQ ID NO: 34355 - protein, 271 aa, Homo sapiens
  Payload ID: 6785
  Gene Symbol: GEMIN4
  Gene Name: gem (nuclear organelle) associated protein 4
  ENSP ID: ENSP00000461103
MFEACSQGPLNICEEMTILHGGFLLAEQLFHPKALAELTKSDWERVGRPIVEALREISSAAAHSQPFAWKKKALIIIWAKVLQPHPVTPSDTETRWQEDLFFSVGNMIPTINHTILFELLKSLEASGLFIQLLMALPTTICHAELERFLEHVTVDTSAEDVAFFLDVWWEVMKHKGHPQDPLLSQFSAMAHKYLPALDEFPHPPKRLRSDPDACPTMPLLAMLLRGLTQIQSRILGPGRKCCALANLADMLTVFALTEDDPQEVSATVYLD

SEQ ID NO: 34356 - protein, 189 aa, Homo sapiens
  Payload ID: 6785
  Gene Symbol: GEMIN4
  Gene Name: gem (nuclear organelle) associated protein 4
  ENSP ID: ENSP00000461368
MTILHGGFLLAEQLFHPKALAELTKSDWERVGRPIVEALREISSAAAHSQPFAWKKKALIIIWAKVLQPHPVTPSDTETRWQEDLFFSVGNMIPTINHTILFELLKSLEASGLFIQLLMALPTTICHAELERFLEHVTVDTSAEDVAFFLDVWWEVMKHKGHPQDPLLSQFSAMAHKYLPALDEFPHPP

SEQ ID NO: 34357 - protein, 1508 aa, Homo sapiens
  Payload ID: 6786
  Gene Symbol: GEMIN5
  Gene Name: gem (nuclear organelle) associated protein 5
  Uniprot ID: Q8TEQ6
  ENSP ID: ENSP00000285873
MGQEPRTLPPSPNWYCARCSDAVPGGLFGFAARTSVFLVRVGPGAGESPGTPPFRVIGELVGHTERVSGFTFSHHPGQYNLCATSSDDGTVKIWDVETKTVVTEHALHQHTISTLHWSPRVKDLIVSGDEKGVVFCYWFNRNDSQHLFIEPRTIFCLTCSPHHEDLVAIGYKDGIVVIIDISKKGEVIHRLRGHDDEIHSIAWCPLPGEDCLSINQEETSEEAEITNGNAVAQAPVTKGCYLATGSKDQTIRIWSCSRGRGVMILKLPFLKRRGGGIDPTVKERLWLTLHWPSNQPTQLVSSCFGGELLQWDLTQSWRRKYTLFSASSEGQNHSRIVFNLCPLQTEDDKQLLLSTSMDRDVKCWDIATLECSWTLPSLGGFAYSLAFSSVDIGSLAIGVGDGMIRVWNTLSIKNNYDVKNFWQGVKSKVTALCWHPTKEGCLAFGTDDGKVGLYDTYSNKPPQISSTYHKKTVYTLAWGPPVPPMSLGGEGDRPSLALYSCGGEGIVLQHNPWKLSGEAFDINKLIRDTNSIKYKLPVHTEISWKADGKIMALGNEDGSIEIFQIPNLKLICTIQQHHKLVNTISWHHEHGSQPELSYLMASGSNNAVIYVHNLKTVIESSPESPVTITEPYRTLSGHTAKITSVAWSPHHDGRLVSASYDGTAQVWDALREEPLCNFRGHRGRLLCVAWSPLDPDCIYSGADDFCVHKWLTSMQDHSRPPQGKKSIELEKKRLSQPKAKPKKKKKPTLRTPVKLESIDGNEEESMKENSGPVENGVSDQEGEEQAREPELPCGLAPAVSREPVICTPVSSGFEKSKVTINNKVILLKKEPPKEKPETLIKKRKARSLLPLSTSLDHRSKEELHQDCLVLATAKHSRELNEDVSADVEERFHLGLFTDRATLYRMIDIEGKGHLENGHPELFHQLMLWKGDLKGVLQTAAERGELTDNLVAMAPAAGYHVWLWAVEAFAKQLCFQDQYVKAASHLLSIHKVYEAVELLKSNHFYREAIAIAKARLRPEDPVLKDLYLSWGTVLERDGHYAVAAKCYLGATCAYDAAKVLAKKGDAASLRTAAELAAIVGEDELSASLALRCAQELLLANNWVGAQEALQLHESLQGQRLVFCLLELLSRHLEEKQLSEGKSSSSYHTWNTGTEGPFVERVTAVWKSIFSLDTPEQYQEAFQKLQNIKYPSATNNTPAKQLLLHICHDLTLAVLSQQMASWDEAVQALLRAVVRSYDSGSFTIMQEVYSAFLPDGCDHLRDKLGDHQSPATPAFKSLEAFFLYGRLYEFWWSLSRPCPNSSVWVRAGHRTLSVEPSQQLDTASTEETDPETSQPEPNRPSELDLRLTEEGERMLSTFKELFSEKHASLQNSQRTVAEVQETLAEMIRQHQKSQLCKSTANGPDKNEPEVEAEQPLCSSQSQCKEEKNEPLSLPELTKRLTEANQRMAKFPESIKAWPFPDVLECCLVLLLIRSHFPGCLAQEMQQQAQELLQKYGNTKTYRRHCQTFCM

SEQ ID NO: 34358 - protein, 167 aa, Homo sapiens
  Payload ID: 6787
  Gene Symbol: GEMIN6
  Gene Name: gem (nuclear organelle) associated protein 6
  Uniprot ID: Q8WXD5
  ENSP ID: ENSP00000281950
MSEWMKKGPLEWQDYIYKEVRVTASEKNEYKGWVLTTDPVSANIVLVNFLEDGSMSVTGIMGHAVQTVETMNEGDHRVREKLMHLFTSGDCKAYSPEDLEERKNSLKKWLEKNHIPITEQGDAPRTLCVAGVLTIDPPYGPENCSSSNEIILSRVQDLIEGHLTASQ

SEQ ID NO: 34359 - protein, 111 aa, Homo sapiens
  Payload ID: 6787
  Gene Symbol: GEMIN6
  Gene Name: gem (nuclear organelle) associated protein 6
  ENSP ID: ENSP00000386613
MSEWMKKGPLEWQDYIYKEVRVTASEKNEYKGWVLTTDPVSAKVLLSPRLECSGEISALCNLHLAGSSDSPALASRVAGTTGICHHVWLIFVFFVETGLRHVAQYCPCELP

SEQ ID NO: 34360 - protein, 69 aa, Homo sapiens
  Payload ID: 6787
  Gene Symbol: GEMIN6
  Gene Name: gem (nuclear organelle) associated protein 6
  ENSP ID: ENSP00000387191
MSEWMKKGPLEWQDYIYKEVRVTASEKNEYKGWVLTTDPVSAKVLLSPRLECSGEISALCNLHLAVLSL

SEQ ID NO: 34361 - protein, 131 aa, Homo sapiens
  Payload ID: 6788
  Gene Symbol: GEMIN7
  Gene Name: gem (nuclear organelle) associated protein 7
  Uniprot ID: Q9H840
  ENSP ID: ENSP00000270257
MQTPVNIPVPVLRLPRGPDGFSRGFAPDGRRAPLRPEVPEIQECPIAQESLESQEQRARAALRERYLRSLLAMVGHQVSFTLHEGVRVAAHFGATDLDVANFYVSQLQTPIGVQAEALLRCSDIISYTFKP

SEQ ID NO: 34362 - protein, 131 aa, Homo sapiens; identical to SEQ ID NO: 34361
  Payload ID: 6788
  Gene Symbol: GEMIN7
  Gene Name: gem (nuclear organelle) associated protein 7
  Uniprot ID: Q9H840
  ENSP ID: ENSP00000375813

SEQ ID NO: 34363 - protein, 131 aa, Homo sapiens; identical to SEQ ID NO: 34361
  Payload ID: 6788
  Gene Symbol: GEMIN7
  Gene Name: gem (nuclear organelle) associated protein 7
  Uniprot ID: Q9H840
  ENSP ID: ENSP00000465704

SEQ ID NO: 34364 - protein, 131 aa, Homo sapiens; identical to SEQ ID NO: 34361
  Payload ID: 6788
  Gene Symbol: GEMIN7
  Gene Name: gem (nuclear organelle) associated protein 7
  Uniprot ID: Q9H840
  ENSP ID: ENSP00000466342

SEQ ID NO: 34365 - protein, 177 aa, Homo sapiens
  Payload ID: 6789
  Gene Symbol: GEMIN8
  Gene Name: gem (nuclear organelle) associated protein 8
  ENSP ID: ENSP00000369894
MAAVKASTSKATRPWYSHPVYARYWQHYHQAMAWMQSHHNAYRKAVESCFNLPWYLPSALLPQSSYDNEAAYPQSFYDHHVAWQDYPCSSSHFRRSGQHPRYSSRIQASTKEDQALSKEEEMETESDAEVECDLSNMEITEELRQYFAETERHREERRRQQQLDAERLDSYVNADHD

SEQ ID NO: 34366 - protein, 242 aa, Homo sapiens
  Payload ID: 6789
  Gene Symbol: GEMIN8
  Gene Name: gem (nuclear organelle) associated protein 8
  Uniprot ID: Q9NWZ8
  ENSP ID: ENSP00000369895
MAAVKASTSKATRPWYSHPVYARYWQHYHQAMAWMQSHHNAYRKAVESCFNLPWYLPSALLPQSSYDNEAAYPQSFYDHHVAWQDYPCSSSHFRRSGQHPRYSSRIQASTKEDQALSKEEEMETESDAEVECDLSNMEITEELRQYFAETERHREERRRQQQLDAERLDSYVNADHDLYCNTRRSVEAPTERPGERRQAEMKRLYGDSAAKIQAMEAAVQLSFDKHCDRKQPKYWPVIPLKF

SEQ ID NO: 34367 - protein, 242 aa, Homo sapiens; identical to SEQ ID NO: 34366
  Payload ID: 6789
  Gene Symbol: GEMIN8
  Gene Name: gem (nuclear organelle) associated protein 8
  Uniprot ID: Q9NWZ8
  ENSP ID: ENSP00000381398

SEQ ID NO: 34368 - protein, 970 aa, Homo sapiens
  Payload ID: 6790
  Gene Symbol: GMIP
  Gene Name: GEM interacting protein
  Uniprot ID: Q9P107
  ENSP ID: ENSP00000203556
MDAAEPGLPPGPEGRKRYSDIFRSLDNLEISLGNVTLEMLAGDPLLSEDPEPDKTPTATVTNEASCWSGPSPEGPVPLTGEELDLRLIRTKGGVDAALEYAKTWSRYAKELLAWTEKRASYELEFAKSTMKIAEAGKVSIQQQSHMPLQYIYTLFLEHDLSLGTLAMETVAQQKRDYYQPLAAKRTEIEKWRKEFKEQWMKEQKRMNEAVQALRRAQLQYVQRSEDLRARSQGSPEDSAPQASPGPSKQQERRRRSREEAQAKAQEAEALYQACVREANARQQDLEIAKQRIVSHVRKLVFQGDEVLRRVTLSLFGLRGAQAERGPRAFAALAECCAPFEPGQRYQEFVRALRPEAPPPPPPAFSFQEFLPSLNSSPLDIRKKLSGPLPPRLDENSAEPGPWEDPGTGWRWQGTPGPTPGSDVDSVGGGSESRSLDSPTSSPGAGTRQLVKASSTGTESSDDFEERDPDLGDGLENGLGSPFGKWTLSSAAQTHQLRRLRGPAKCRECEAFMVSGTECEECFLTCHKRCLETLLILCGHRRLPARTPLFGVDFLQLPRDFPEEVPFVVTKCTAEIEHRALDVQGIYRVSGSRVRVERLCQAFENGRALVELSGNSPHDVSSVLKRFLQELTEPVIPFHLYDAFISLAKTLHADPGDDPGTPSPSPEVIRSLKTLLVQLPDSNYNTLRHLVAHLFRVAARFMENKMSANNLGIVFGPTLLRPPDGPRAASAIPVTCLLDSGHQAQLVEFLIVHYEQIFGMDELPQATEPPPQDSSPAPGPLTTSSQPPPPHLDPDSQPPVLASDPGPDPQHHSTLEQHPTATPTEIPTPQSDQREDVAEDTKDGGGEVSSQGPEDSLLGTQSRGHFSRQPVKYPRGGVRPVTHQLSSLALVASKLCEETPITSVPRGSLRGRGPSPAAASPEGSPLRRTPLPKHFEITQETARLLSKLDSEAVPRATCCPDVQPEEAEDHL

SEQ ID NO: 34369 - protein, 303 aa, Homo sapiens
  Payload ID: 6790
  Gene Symbol: GMIP
  Gene Name: GEM interacting protein
  ENSP ID: ENSP00000465108
  MOD_RES (1)..(1): Any amino acid
XRSREEAQAKAQEAEALYQACVREANARQQDLEIAKQRIVSHVRKLVFQGDEVLRRVTLSLFGLRGAQAERGPRAFAALAECCAPFEPGQRYQEFVRALRPEAPPPPPPAFSFQEFLPSLNSSPLDIRKKLSGPLPPRLDENSAEPGPWEDPGTGWRWQGPTPGSDVDSVGGGSESRSLDSPTSSPGAGTRQLVKASSTGTESSDDFEERDPDLGDGLENGLGSPFGKWTLSSAAQTHQLRRLRGPAKCRECEAFMVSGTECEECFLTCHKRCLETLLILCGHRRLPARTPLFGVDFLQLPRD

SEQ ID NO: 34370 - protein, 36 aa, Homo sapiens
  Payload ID: 6790
  Gene Symbol: GMIP
  Gene Name: GEM interacting protein
  ENSP ID: ENSP00000466045
MDAAEPGLPPGPEGRKRYSDIFRSLDNLEISLGNDP

SEQ ID NO: 34371 - protein, 944 aa, Homo sapiens
  Payload ID: 6790
  Gene Symbol: GMIP
  Gene Name: GEM interacting protein
  Uniprot ID: Q9P107
  ENSP ID: ENSP00000467054
MDAAEPGLPPGPEGRKRYSDIFRSLDNLEISLGNVTLEMLAGDPLLSEDPEPDKTPTATVTNEASCWSGPSPEGPVPLTGEELDLRLIRTKGGVDAALEYAKTWSRYAKELLAWTEKRASYELEFAKSTMKIAEAGKVSIQQQSHMPLQYIYTLFLEHDLSLGTLAMETVAQQKRDYYQPLAAKRTEIEKWRKEFKEQWMKEQKRMNEAVQALRRAQLQYVQRSEDLRARSQGSPEDSAPQASPGPSKQQERRRRSREEAQAKAQEAEALYQACVREANARQQDLEIAKQRIVSHVRKLVFQGDEVLRRVTLSLFGLRGAQAERGPRAFAALAECCAPFEPGQRYQEFVRALRPEAPPPPPPAFSFQEFLPSLNSSPLDIRKKLSGPLPPRLDENSAEPGPWEDPGTGWRWQGTPGPTPGSDVDSVGGGSESRSLDSPTSSPDLGDGLENGLGSPFGKWTLSSAAQTHQLRRLRGPAKCRECEAFMVSGTECEECFLTCHKRCLETLLILCGHRRLPARTPLFGVDFLQLPRDFPEEVPFVVTKCTAEIEHRALDVQGIYRVSGSRVRVERLCQAFENGRALVELSGNSPHDVSSVLKRFLQELTEPVIPFHLYDAFISLAKTLHADPGDDPGTPSPSPEVIRSLKTLLVQLPDSNYNTLRHLVAHLFRVAARFMENKMSANNLGIVFGPTLLRPPDGPRAASAIPVTCLLDSGHQAQLVEFLIVHYEQIFGMDELPQATEPPPQDSSPAPGPLTTSSQPPPPHLDPDSQPPVLASDPGPDPQHHSTLEQHPTATPTEIPTPQSDQREDVAEDTKDGGGEVSSQGPEDSLLGTQSRGHFSRQPVKYPRGGVRPVTHQLSSLALVASKLCEETPITSVPRGSLRGRGPSPAAASPEGSPLRRTPLPKHFEITQETARLLSKLDSEAVPRATCCPDVQPEEAEDHL

SEQ ID NO: 34372 - protein, 94 aa, Homo sapiens
  Payload ID: 6790
  Gene Symbol: GMIP
  Gene Name: GEM interacting protein
  ENSP ID: ENSP00000467946
MLAGDPLLSEDPEPDKTPTATVTNEASCWSGPSPEGPVPLTGEELDLRLIRTKGGVDAALEYAKTWSRYAKELLAWTEKRASYELEFAKSTMKI

SEQ ID NO: 34373 - protein, 36 aa, Homo sapiens; identical to SEQ ID NO: 34370
  Payload ID: 6790
  Gene Symbol: GMIP
  Gene Name: GEM interacting protein
  ENSP ID: ENSP00000468662

SEQ ID NO: 34374 - protein, 63 aa, Homo sapiens
  Payload ID: 6791
  Gene Symbol: GMNC
  Gene Name: geminin coiled-coil domain containing
  ENSP ID: ENSP00000396337
MNTILPCQDQYFVGGQSYNCPYSTTTSESSVDVSTETWVSFWAAGLLDNRELQQAPQAQVSTI

SEQ ID NO: 34375 - protein, 334 aa, Homo sapiens
  Payload ID: 6791
  Gene Symbol: GMNC
  Gene Name: geminin coiled-coil domain containing
  Uniprot ID: A6NCL1
  ENSP ID: ENSP00000406164
MNTILPCQDQYFVGGQSYNCPYSTTTSESSVDVSTETWVSFWAAGLLDNRELQQAPQAQESFSDSNFPLPDLCSWEEAQLSSQLYRNKQLQDTLVQKEEELARLHEENNHLRQYLNSALVKCLEEKAKKLLSSDEFSKAYGKFRKGKRKSKEQRYSPAEIPHPKNAKRNLSSEFANCEEQAGPPVDPWVLQTLGLKDLDTIDDTSSANYSALASHPRRVASTFSQFPDDAVDYKNIPREDMPIDYRGDRTTPLHSTATHGEDFHILSQLSNPPVGLKTLPYYTAHVSPNKTEMAFSTSLSPHCNVKTHSFHQGQAFVRRDEEGGWKFTWVPKQS

SEQ ID NO: 34376 - protein, 209 aa, Homo sapiens
  Payload ID: 6792
  Gene Symbol: GMNN
  Gene Name: geminin, DNA replication inhibitor
  Uniprot ID: O75496
  ENSP ID: ENSP00000230056
MNPSMKQKQEEIKENIKNSSVPRRTLKMIQPSASGSLVGRENELSAGLSKRKHRNDHLTSTTSSPGVIVPESSENKNLGGVTQESFDLMIKENPSSQYWKEVAEKRRKALYEALKENEKLHKEIEQKDNEIARLKKENKELAEVAEHVQYMAELIERLNGEPLDNFESLDNQEFDSEEETVEDSLVEDSEIGTCAEGTVSSSTDAKPCI

SEQ ID NO: 34377 - protein, 209 aa, Homo sapiens; identical to SEQ ID NO: 34376
  Payload ID: 6792
  Gene Symbol: GMNN
  Gene Name: geminin, DNA replication inhibitor
  Uniprot ID: O75496
  ENSP ID: ENSP00000348902

SEQ ID NO: 34378 - protein, 179 aa, Homo sapiens
  Payload ID: 6792
  Gene Symbol: GMNN
  Gene Name: geminin, DNA replication inhibitor
  ENSP ID: ENSP00000367293
MNPSMKQKQEEIKENIKNSSVPRRTLKMIQPSASGSLVGRENELSAGLSKRKHRNDHLTSTTSSPGVIVPESSENKNLGGVTQESFDLMIKENPSSQYWKEVAEKRRKALYEALKENEKLHKEIEQKDNEIARLKKENKELAEVAEHVQYMAELIERLNGEPLDNFESLDNQEFDSEEE

SEQ ID NO: 34379 - protein, 102 aa, Homo sapiens
  Payload ID: 6792
  Gene Symbol: GMNN
  Gene Name: geminin, DNA replication inhibitor
  ENSP ID: ENSP00000367298
MNPSMKQKQEEIKENIKNSSVPRRTLKMIQPSASGSLVGRENELSAGLSKRKHRNDHLTSTTSSPGVIVPESSENKNLGGVTQESFDLMIKENPSSQYWKEV

SEQ ID NO: 34380 - protein, 65 aa, Homo sapiens
  Payload ID: 6792
  Gene Symbol: GMNN
  Gene Name: geminin, DNA replication inhibitor
  ENSP ID: ENSP00000419584
MNPSMKQKQEEIKENIKNSSVPRRTLKMIQPSASGSLVGRENELSAGLSKRKHRNDHLTSTTSSP

SEQ ID NO: 34381 - protein, 209 aa, Homo sapiens; identical to SEQ ID NO: 34376
  Payload ID: 6792
  Gene Symbol: GMNN
  Gene Name: geminin, DNA replication inhibitor
  Uniprot ID: O75496
  ENSP ID: ENSP00000477506

SEQ ID NO: 34382 - protein, 908 aa, Homo sapiens
  Payload ID: 6793
  Gene Symbol: GEN1
  Gene Name: GEN1 Holliday junction 5' flap endonuclease
  Uniprot ID: Q17RS7
  ENSP ID: ENSP00000318977
MGVNDLWQILEPVKQHIPLRNLGGKTIAVDLSLWVCEAQTVKKMMGSVMKPHLRNLFFRISYLTQMDVKLVFVMEGEPPKLKADVISKRNQSRYGSSGKSWSQKTGRSHFKSVLRECLHMLECLGIPWVQAAGEAEAMCAYLNAGGHVDGCLTNDGDTFLYGAQTVYRNFTMNTKDPHVDCYTMSSIKSKLGLDRDALVGLAILLGCDYLPKGVPGVGKEQALKLIQILKGQSLLQRFNRWNETSCNSSPQLLVTKKLAHCSVCSHPGSPKDHERNGCRLCKSDKYCEPHDYEYCCPCEWHRTEHDRQLSEVENNIKKKACCCEGFPFHEVIQEFLLNKDKLVKVIRYQRPDLLLFQRFTLEKMEWPNHYACEKLLVLLTHYDMIERKLGSRNSNQLQPIRIVKTRIRNGVHCFEIEWEKPEHYAMEDKQHGEFALLTIEEESLFEAAYPEIVAVYQKQKLEIKGKKQKRIKPKENNLPEPDEVMSFQSHMTLKPTCEIFHKQNSKLNSGISPDPTLPQESISASLNSLLLPKNTPCLNAQEQFMSSLRPLAIQQIKAVSKSLISESSQPNTSSHNISVIADLHLSTIDWEGTSFSNSPAIQRNTFSHDLKSEVESELSAIPDGFENIPEQLSCESERYTANIKKVLDEDSDGISPEEHLLSGITDLCLQDLPLKERIFTKLSYPQDNLQPDVNLKTLSILSVKESCIANSGSDCTSHLSKDLPGIPLQNESRDSKILKGDQLLQEDYKVNTSVPYSVSNTVVKTCNVRPPNTALDHSRKVDMQTTRKILMKKSVCLDRHSSDEQSAPVFGKAKYTTQRMKHSSQKHNSSHFKESGHNKLSSPKIHIKETEQCVRSYETAENEESCFPDSTKSSLSSLQCHKKENNSGTCLDSPLPLRQRLKLRFQST

SEQ ID NO: 34383 - protein, 908 aa, Homo sapiens; identical to SEQ ID NO: 34382
  Payload ID: 6793
  Gene Symbol: GEN1
  Gene Name: GEN1 Holliday junction 5' flap endonuclease
  Uniprot ID: Q17RS7
  ENSP ID: ENSP00000370653

SEQ ID NO: 34384 - protein, 93 aa, Homo sapiens
  Payload ID: 6793
  Gene Symbol: GEN1
  Gene Name: GEN1 Holliday junction 5' flap endonuclease
  ENSP ID: ENSP00000433180
MGVNDLWQILEPVKQHIPLRNLGGKTIAVDLSLWVCEAQTVKKMMGSVMKPHLRNLFFRISYLTQMDVKLVFVMEGEPPKLKADVISKRNQSR

SEQ ID NO: 34385 - protein, 126 aa, Homo sapiens
  Payload ID: 6793
  Gene Symbol: GEN1
  Gene Name: GEN1 Holliday junction 5' flap endonuclease
  ENSP ID: ENSP00000435143
MGVNDLWQILEPVKQHIPLRNLGGKTIAVDLSLWVCEAQTVKKMMGSVMKPHLRNLFFRISYLTQMDVKLVFVMEGEPPKLKADVISKRNQSRYGSSGKSWSQKTGRSHFKSVLRECLHMLECLGI

SEQ ID NO: 34386 - protein, 129 aa, Homo sapiens
  Payload ID: 6793
  Gene Symbol: GEN1
  Gene Name: GEN1 Holliday junction 5' flap endonuclease
  ENSP ID: ENSP00000481385
HERNGCRLCKSDKYCEPHDYEYCCPCEWHRTEHDRQLSEVENNIKKKACCCEGFPFHEVIQEFLLNKDKLVKVIRYQRPDLLLFQRFTLEKMEWPNHYACEKLLVLLTHYDMIERKLGSRNSNQLQPIR

SEQ ID NO: 34387 - protein, 59 aa, Homo sapiens
  Payload ID: 6794
  Gene Symbol: GTF2A1
  Gene Name: general transcription factor IIA, 1, 19/37kDa
  ENSP ID: ENSP00000298173
MANSANTNTVPKLYRSVIEDVINDVRDIFLDDGVDEQVLMELKTILNKTVAAQKMFILW

SEQ ID NO: 34388 - protein, 337 aa, Homo sapiens
  Payload ID: 6794
  Gene Symbol: GTF2A1
  Gene Name: general transcription factor IIA, 1, 19/37kDa
  Uniprot ID: P52655
  ENSP ID: ENSP00000409492
MELKTLWENKLMQSRAVDGFHSEEQQLLLQVQQQHQPQQQQHHHHHHHQQAQPQQTVPQQAQTQQVLIPASQQATAPQVIVPDSKLIQHMNASNMSAAATAATLALPAGVTPVQQILTNSGQLLQVVRAANGAQYIFQPQQSVVLQQQVIPQMQPGGVQAPVIQQVLAPLPGGISPQTGVIIQPQQILFTGNKTQVIPTTVAAPTPAQAQITATGQQQPQAQPAQTQAPLVLQVDGTGDTSSEEDEDEEEDYDDDEEEDKEKDGAEDGQVEEEPLNSEDDVSDEEGQELFDTENVVVCQYDKIHRSKNKWKFHLKDGIMNLNGRDYIFSKAIGDAEW

SEQ ID NO: 34389 - protein, 376 aa, Homo sapiens
  Payload ID: 6794
  Gene Symbol: GTF2A1
  Gene Name: general transcription factor IIA, 1, 19/37kDa
  Uniprot ID: P52655
  ENSP ID: ENSP00000452454
MANSANTNTVPKLYRSVIEDVINDVRDIFLDDGVDEQVLMELKTLWENKLMQSRAVDGFHSEEQQLLLQVQQQHQPQQQQHHHHHHHQQAQPQQTVPQQAQTQQVLIPASQQATAPQVIVPDSKLIQHMNASNMSAAATAATLALPAGVTPVQQILTNSGQLLQVVRAANGAQYIFQPQQSVVLQQQVIPQMQPGGVQAPVIQQVLAPLPGGISPQTGVIIQPQQILFTGNKTQVIPTTVAAPTPAQAQITATGQQQPQAQPAQTQAPLVLQVDGTGDTSSEEDEDEEEDYDDDEEEDKEKDGAEDGQVEEEPLNSEDDVSDEEGQELFDTENVVVCQYDKIHRSKNKWKFHLKDGIMNLNGRDYIFSKAIGDAEW

SEQ ID NO: 34390 - protein, 478 aa, Homo sapiens
  Payload ID: 6795
  Gene Symbol: GTF2A1L
  Gene Name: general transcription factor IIA, 1-like
  Uniprot ID: Q9UNN4
  ENSP ID: ENSP00000384597
MACLNPVPKLYRSVIEDVIEGVRNLFAEEGIEEQVLKDLKQLWETKVLQSKATEDFFRNSIQSPLFTLQLPHSLHQTLQSSTASLVIPAGRTLPSFTTAELGTSNSSANFTFPGYPIHVPAGVTLQTVSGHLYKVNVPIMVTETSGRAGILQHPIQQVFQQLGQPSVIQTSVPQLNPWSLQATTEKSQRIETVLQQPAILPSGPVDRKHLENATSDILVSPGNEHKIVPEALLCHQESSHYISLPGVVFSPQVSQTNSNVESVLSGSASMAQNLHDESLSTSPHGALHQHVTDIQLHILKNRMYGCDSVKQPRNIEEPSNIPVSEKDSNSQVDLSIRVTDDDIGEIIQVDGSGDTSSNEEIGSTRDADENEFLGNIDGGDLKVPEEEADSISNEDSATNSSDNEDPQVNIVEEDPLNSGDDVSEQDVPDLFDTDNVIVCQYDKIHRSKNKWKFYLKDGVMCFGGRDYVFAKAIGDAEW

SEQ ID NO: 34391 - protein, 444 aa, Homo sapiens
  Payload ID: 6795
  Gene Symbol: GTF2A1L
  Gene Name: general transcription factor IIA, 1-like
  Uniprot ID: Q9UNN4
  ENSP ID: ENSP00000387896
MACLNPVLWETKVLQSKATEDFFRNSIQSPLFTLQLPHSLHQTLQSSTASLVIPAGRTLPSFTTAELGTSNSSANFTFPGYPIHVPAGVTLQTVSGHLYKVNVPIMVTETSGRAGILQHPIQQVFQQLGQPSVIQTSVPQLNPWSLQATTEKSQRIETVLQQPAILPSGPVDRKHLENATSDILVSPGNEHKIVPEALLCHQESSHYISLPGVVFSPQVSQTNSNVESVLSGSASMAQNLHDESLSTSPHGALHQHVTDIQLHILKNRMYGCDSVKQPRNIEEPSNIPVSEKDSNSQVDLSIRVTDDDIGEIIQVDGSGDTSSNEEIGSTRDADENEFLGNIDGGDLKVPEEEADSISNEDSATNSSDNEDPQVNIVEEDPLNSGDDVSEQDVPDLFDTDNVIVCQYDKIHRSKNKWKFYLKDGVMCFGGRDYVFAKAIGDAEW

SEQ ID NO: 34392 - protein, 55 aa, Homo sapiens
  Payload ID: 6795
  Gene Symbol: GTF2A1L
  Gene Name: general transcription factor IIA, 1-like
  ENSP ID: ENSP00000394793
MACLNPVLWETKVLQSKATEDFFRNSIQSPLFTLQLPHSLHQTLQSSTGWIPLHH

SEQ ID NO: 34393 - protein, 335 aa, Homo sapiens
  Payload ID: 6795
  Gene Symbol: GTF2A1L
  Gene Name: general transcription factor IIA, 1-like
  ENSP ID: ENSP00000396702
MACLNPVPKLYRSVIEDVIEGVRNLFAEEGIEEQVLKDLKQLWETKVLQSKATEDFFRNSIQSPLFTLQLPHSLHQTLQSSTGWIPLVNEYSSLVIPAGRTLPSFTTAELGTSNSSANFTFPGYPIHVPAGVTLQTVSGHLYKVNVPIMVTETSGRAGILQHPIQQVFQQLGQPSVIQTSVPQLNPWSLQATTEKSQRIETVLQQPAILPSGPVDRKHLENATSDILVSPGNEHKIVPEALLCHQESSHYISLPGVVFSPQVSQTNSNVESVLSGSASMAQNLHDESLSTSPHGALHQHVTDIQLHILKNRMYGCDSVKQPRNIEEPSNIPVSEK

SEQ ID NO: 34394 - protein, 164 aa, Homo sapiens
  Payload ID: 6795
  Gene Symbol: GTF2A1L
  Gene Name: general transcription factor IIA, 1-like
  ENSP ID: ENSP00000412645
MACLNPVLWETKVLQSKATEDFFRNSIQSPLFTLQLPHSLHQTLQSSTASLVIPAGRTLPSFTTAELGTSNSSANFTFPGYPIHVPAGVTLQTVSGHLYKVNVPIMVTETSGRAGILQHPIQQVFQQLGQPSVIQTSVPQLNPWSLQATTEKSQRIETVLQQPA

SEQ ID NO: 34395 - protein, 102 aa, Homo sapiens
  Payload ID: 6795
  Gene Symbol: GTF2A1L
  Gene Name: general transcription factor IIA, 1-like
  ENSP ID: ENSP00000421474
SGDTSSNEEIGSTRDADENEFLGNIDGGDLKVPEEEADSISNEDSATNSSDNEDPQVNIVEEDPLNSGDDVSEQDVPDLFDTDNVIVCQYDKAFPRRTSFNT

SEQ ID NO: 34396 - protein, 109 aa, Homo sapiens
  Payload ID: 6796
  Gene Symbol: GTF2A2
  Gene Name: general transcription factor IIA, 2, 12kDa
  Uniprot ID: P52657
  ENSP ID: ENSP00000379372
MAYQLYRNTTLGNSLQESLDELIQSQQITPQLALQVLLQFDKAINAALAQRVRNRVNFRGSLNTYRFCDNVWTFVLNDVEFREVTELIKVDKVKIVACDGKNTGSNTTE

SEQ ID NO: 34397 - protein, 109 aa, Homo sapiens; identical to SEQ ID NO: 34396
  Payload ID: 6796
  Gene Symbol: GTF2A2
  Gene Name: general transcription factor IIA, 2, 12kDa
  Uniprot ID: P52657
  ENSP ID: ENSP00000379373

SEQ ID NO: 34398 - protein, 109 aa, Homo sapiens; identical to SEQ ID NO: 34396
  Payload ID: 6796
  Gene Symbol: GTF2A2
  Gene Name: general transcription factor IIA, 2, 12kDa
  Uniprot ID: P52657
  ENSP ID: ENSP00000379375

SEQ ID NO: 34399 - protein, 68 aa, Homo sapiens
  Payload ID: 6796
  Gene Symbol: GTF2A2
  Gene Name: general transcription factor IIA, 2, 12kDa
  ENSP ID: ENSP00000379376
MAYQLYRNTTLGNSLQESLDELIQSQQITPQLALQVLLQFDKAINAALAQRVRNRVNFRILAPILQNE

SEQ ID NO: 34400 - protein, 74 aa, Homo sapiens
  Payload ID: 6796
  Gene Symbol: GTF2A2
  Gene Name: general transcription factor IIA, 2, 12kDa
  ENSP ID: ENSP00000418574
MAYQLYRNTTLGNSLQESLDELIQGSLNTYRFCDNVWTFVLNDVEFREVTELIKVDKVKIVACDGKNTGSNTTE

SEQ ID NO: 34401 - protein, 72 aa, Homo sapiens
  Payload ID: 6796
  Gene Symbol: GTF2A2
  Gene Name: general transcription factor IIA, 2, 12kDa
  ENSP ID: ENSP00000452648
MAYQLYRNTTLGNSLQESLDELIQITPQLALQVLLQFDKAINAALAQRVRNRVNFRGSLNTYRFCDNVWTFV

SEQ ID NO: 34402 - protein, 316 aa, Homo sapiens
  Payload ID: 6797
  Gene Symbol: GTF2B
  Gene Name: general transcription factor IIB
  Uniprot ID: Q00403
  ENSP ID: ENSP00000359531
MASTSRLDALPRVTCPNHPDAILVEDYRAGDMICPECGLVVGDRVIDVGSEWRTFSNDKATKDPSRVGDSQNPLLSDGDLSTMIGKGTGAASFDEFGNSKYQNRRTMSSSDRAMMNAFKEITTMADRINLPRNIVDRTNNLFKQVYEQKSLKGRANDAIASACLYIACRQEGVPRTFKEICAVSRISKKEIGRCFKLILKALETSVDLITTGDFMSRFCSNLCLPKQVQMAATHIARKAVELDLVPGRSPISVAAAAIYMASQASAEKRTQKEIGDIAGVADVTIRQSYRLIYPRAPDLFPTDFKFDTPVDKLPQL

SEQ ID NO: 34403 - protein, 231 aa, Homo sapiens
  Payload ID: 6797
  Gene Symbol: GTF2B
  Gene Name: general transcription factor IIB
  ENSP ID: ENSP00000402345
MASTSRLDALPRVTCPNHPDAILVEDYRAGDMICPECDRVIDVGSEWRTFSNDKATKDPSRVGDSQNPLLSDGDLSTMIGKGTGAASFDEFGNSKYQNRRTMSSSDRAMMNAFKEITTMADRINLPRNIVDRTNNLFKQVYEQKSLKGRANDAIASACLYIACRQEGVPRTFKEICAVSRISKKEIGRCFKLILKALETSVDLITTGDFMSRFCSNLCLPKQVQMAATHIA

SEQ ID NO: 34404 - protein, 224 aa, Homo sapiens
  Payload ID: 6797
  Gene Symbol: GTF2B
  Gene Name: general transcription factor IIB
  ENSP ID: ENSP00000415741
ASTSRLDALPRVTCPNHPDAILVEDYRAGDMICPECGLVVGDRVIDVGSEWRTFSNDKATKDPSRVGDSQNPLLSDGDLSTMIGKGTGAASFDEFGNSKYQNRRTMSSSDRAMMNAFKEITTMADRINLPRNIVDRTNNLFKQVYEQKSLKGRANDAIASACLYIACRQEGVPRTFKEICAVSRISKKEIGRCFKLILKALETSVDLITTGDFMSRNWRYCWCC

SEQ ID NO: 34405 - protein, 439 aa, Homo sapiens
  Payload ID: 6798
  Gene Symbol: GTF2E1
  Gene Name: general transcription factor IIE, polypeptide 1, alpha 56kDa
  Uniprot ID: P29083
  ENSP ID: ENSP00000283875
MADPDVLTEVPAALKRLAKYVIRGFYGIEHALALDILIRNSCVKEEDMLELLKFDRKQLRSVLNNLKGDKFIKCRMRVETAADGKTTRHNYYFINYRTLVNVVKYKLDHMRRRIETDERDSTNRASFKCPVCSSTFTDLEANQLFDPMTGTFRCTFCHTEVEEDESAMPKKDARTLLARFNEQIEPIYALLRETEDVNLAYEILEPEPTEIPALKQSKDHAATTAGAASLAGGHHREAWATKGPSYEDLYTQNVVINMDDQEDLHRASLEGKSAKERPIWLRESTVQGAYGSEDMKEGGIDMDAFQEREEGHAGPDDNEEVMRALLIHEKKTSSAMAGSVGAAAPVTAANGSDSESETSESDDDSPPRPAAVAVHKREEDEEEDDEFEEVADDPIVMVAGRPFSYSEVSQRPELVAQMTPEEKEAYIAMGQRMFEDLFE

SEQ ID NO: 34406 - protein, 122 aa, Homo sapiens
  Payload ID: 6798
  Gene Symbol: GTF2E1
  Gene Name: general transcription factor IIE, polypeptide 1, alpha 56kDa
  ENSP ID: ENSP00000417077
MADPDVLTEVPAALKRLAKYVIRGFYGIEHALALDILIRNSCVKEEDMLELLKFDRKQLRSVLNNLKGDKFIKCRMRVETAADGKTTRHNYYFINYRTLVNVVKYKLDHMRRRIETDERDST

SEQ ID NO: 34407 - protein, 49 aa, Homo sapiens
  Payload ID: 6798
  Gene Symbol: GTF2E1
  Gene Name: general transcription factor IIE, polypeptide 1, alpha 56kDa
  ENSP ID: ENSP00000417342
MADPDVLTEVPAALKRLAKYVIRGFYGIEHALALDILIRNSCVKEEDML

SEQ ID NO: 34408 - protein, 129 aa, Homo sapiens
  Payload ID: 6798
  Gene Symbol: GTF2E1
  Gene Name: general transcription factor IIE, polypeptide 1, alpha 56kDa
  ENSP ID: ENSP00000418808
MPKKDARTLLARFNEQIEPIYALLRETEDVNLAYEILEPEPTEIPALKQSKDHAATTAGAASLAGGHHREAWATKGPSYEDLYTQNVVINMDDQEDLHRASLEGKSAKERPIWLRESTVQGAYGSEDMK

SEQ ID NO: 34409 - protein, 291 aa, Homo sapiens
  Payload ID: 6799
  Gene Symbol: GTF2E2
  Gene Name: general transcription factor IIE, polypeptide 2, beta 34kDa
  Uniprot ID: P29084
  ENSP ID: ENSP00000348168
MDPSLLRERELFKKRALSTPVVEKRSASSESSSSSSKKKKTKVEHGGSSGSKQNSDHSNGSFNLKALSGSSGYKFGVLAKIVNYMKTRHQRGDTHPLTLDEILDETQHLDIGLKQKQWLMTEALVNNPKIEVIDGKYAFKPKYNVRDKKALLRLLDQHDQRGLGGILLEDIEEALPNSQKAVKALGDQILFVNRPDKKKILFFNDKSCQFSVDEEFQKLWRSVTVDSMDEEKIEEYLKRQGISSMQESGPKKVAPIQRRKKPASQKKRRFKTHNEHLAGVLKDYSDITSSK

SEQ ID NO: 34410 - protein, 73 aa, Homo sapiens
  Payload ID: 6799
  Gene Symbol: GTF2E2
  Gene Name: general transcription factor IIE, polypeptide 2, beta 34kDa
  ENSP ID: ENSP00000428981
MDPSLLRERELFKKRALSTPVVEKRSASSESSSSSSKKKKTKVEHGGSSGSKQNSVFPVVYTVAWDVLNTLGE

SEQ ID NO: 34411 - protein, 126 aa, Homo sapiens
  Payload ID: 6799
  Gene Symbol: GTF2E2
  Gene Name: general transcription factor IIE, polypeptide 2, beta 34kDa
  ENSP ID: ENSP00000429312
MDPSLLRERELFKKRALSTPVVEKRSASSESSSSSSKKKKTKVEHGGSSGSKQNSDHSNGSFNLKALSGSSGYKFGVLAKIVNYMKTRHQRGDTHPLTLDEILDETQHLDIGLKQKQWLMTEALVN

SEQ ID NO: 34412 - protein, 198 aa, Homo sapiens
  Payload ID: 6799
  Gene Symbol: GTF2E2
  Gene Name: general transcription factor IIE, polypeptide 2, beta 34kDa
  ENSP ID: ENSP00000429921
MDPSLLRERELFKKRALSTPVVEKRSASSESSSSSSKKKKTKVEHGGSSGSKQNSDHSNGSFNLKALSGSSGYKFGVLAKIVNYMKTRHQRGDTHPLTLDEILDETQHLDIGLKQKQWLMTEALVNNPKIEVIDGKYAFKPKYNVRDKKALLRLLDQHDQRGLGGILLEDIEEALPNSQKAVKALGDQILFVNRPDKK

SEQ ID NO: 34413 - protein, 517 aa, Homo sapiens
  Payload ID: 6800
  Gene Symbol: GTF2F1
  Gene Name: general transcription factor IIF, polypeptide 1, 74kDa
  Uniprot ID: P35269
  ENSP ID: ENSP00000377969
MAALGPSSQNVTEYVVRVPKNTTKKYNIMAFNAADKVNFATWNQARLERDLSNKKIYQEEEMPESGAGSEFNRKLREEARRKKYGIVLKEFRPEDQPWLLRVNGKSGRKFKGIKKGGVTENTSYYIFTQCPDGAFEAFPVHNWYNFTPLARHRTLTAEEAEEEWERRNKVLNHFSIMQQRRLKDQDQDEDEEEKEKRGRRKASELRIHDLEDDLEMSSDASDASGEEGGRVPKAKKKAPLAKGGRKKKKKKGSDDEAFEDSDDGDFEGQEVDYMSDGSSSSQEEPESKAKAPQQEEGPKGVDEQSDSSEESEEEKPPEEDKEEEEEKKAPTPQEKKRRKDSSEESDSSEESDIDSEASSALFMAKKKTPPKRERKPSGGSSRGNSRPGTPSAEGGSTSSTLRAAASKLEQGKRVSEMPAAKRLRLDTGPQSLSGKSTPQPPSGKTTPNSGDVQVTEDAVRRYLTRKPMTTKDLLKKFQTKKTGLSSEQTVNVLAQILKRLNPERKMINDKMHFSLKE

SEQ ID NO: 34414 - protein, 433 aa, Homo sapiens
  Payload ID: 6800
  Gene Symbol: GTF2F1
  Gene Name: general transcription factor IIF, polypeptide 1, 74kDa
  ENSP ID: ENSP00000469091
IMAFNAADKVNFATWNQARLERDLSNKKIYQEEEMPESGAGSEFNRKLREEARRKKYGIVLKEFRPEDQPWLLRVNGKSGRKRNKVLNHFSIMQQRRLKDQDQDEDEEEKEKRGRRKASELRIHDLEDDLEMSSDASDASGEEGGRVPKAKKKAPLAKGGRKKKKKKGSDDEAFEDSDDGDFEGQEVDYMSDGSSSSQEEPESKAKAPQQEEGPKGVDEQSDSSEESEEEKPPEEDKEEEEEKKAPTPQEKKRRKDSSEESDSSEESDIDSEASSALFMAKKKTPPKRERKPSGGSSRGNSRPGTPSAEGGSTSSTLRAAASKLEQGKRVSEMPAAKRLRLDTGPQSLSGKSTPQPPSGKTTPNSGDVQVTEDAVRRYLTRKPMTTKDLLKKFQTKKTGLSSEQTVNVLAQILKRLNPERKMINDKMHFSLKE

SEQ ID NO: 34415 - protein, 381 aa, Homo sapiens
  Payload ID: 6800
  Gene Symbol: GTF2F1
  Gene Name: general transcription factor IIF, polypeptide 1, 74kDa
  ENSP ID: ENSP00000471403
MSLNTSFEFLRNTPCLSSLLPKAEFTIISTSWVPPNLRPSICSSSAWGQERMGLASLADWESLESSVSSVARQNRLNEAGNTTKKYNIMAFNAADKVNFATWNQARLERDLSNKKIYQEEEMPESGAGSEFNRKLREEARRKKYGIVLKEFRPEDQPWLLRVNGKSGRKFKGIKKGGVTENTSYYIFTQCPDGAFEAFPVHNWYNFTPLARHRTLTAEEAEEEWERRNKVLNHFSIMQQRRLKDQDQDEDEEEKEKRGRRKASELRIHDLEDDLEMSSDASDASGEEGGRVPKAKKKAPLAKGGRKKKKKKGSDDEAFEDSDDGDFEGQEVDYMSDGSSSSQEEPESKAKAPQQEEGPKGVDEQSDSSEESEEEKPPEEDK

SEQ ID NO: 34416 - protein, 127 aa, Homo sapiens
  Payload ID: 6800
  Gene Symbol: GTF2F1
  Gene Name: general transcription factor IIF, polypeptide 1, 74kDa
  ENSP ID: ENSP00000471542
MAALGPSSQNVTEYVVRVPKNTTKKYNIMAFNAADKVNFATWNQARLERDLSNKKIYQEEEMPESGAGSEFNRKLREEARRKKYGIVLKEFRPEDQPWLLRVNGKSGRKFKGIKKGGVTENTSYYIF

SEQ ID NO: 34417 - protein, 249 aa, Homo sapiens
  Payload ID: 6801
  Gene Symbol: GTF2F2
  Gene Name: general transcription factor IIF, polypeptide 2, 30kDa
  Uniprot ID: P13984
  ENSP ID: ENSP00000340823
MAERGELDLTGAKQNTGVWLVKVPKYLSQQWAKASGRGEVGKLRIAKTQGRTEVSFTLNEDLANIHDIGGKPASVSAPREHPFVLQSVGGQTLTVFTESSSDKLSLEGIVVQRAECRPAASENYMRLKRLQIEESSKPVRLSQQLDKVVTTNYKPVANHQYNIEYERKKKEDGKRARADKQHVLDMLFSAFEKHQYYNLKDLVDITKQPVVYLKEILKEIGVQNVKGIHKNTWELKPEYRHYQGEEKSD

SEQ ID NO: 34418 - protein, 548 aa, Homo sapiens
  Payload ID: 6802
  Gene Symbol: GTF2H1
  Gene Name: general transcription factor IIH, polypeptide 1, 62kDa
  Uniprot ID: P32780
  ENSP ID: ENSP00000265963
MATSSEEVLLIVKKVRQKKQDGALYLMAERIAWAPEGKDRFTISHMYADIKCQKISPEGKAKIQLQLVLHAGDTTNFHFSNESTAVKERDAVKDLLQQLLPKFKRKANKELEEKNRMLQEDPVLFQLYKDLVVSQVISAEEFWANRLNVNATDSSSTSNHKQDVGISAAFLADVRPQTDGCNGLRYNLTSDIIESIFRTYPAVKMKYAENVPHNMTEKEFWTRFFQSHYFHRDRLNTGSKDLFAECAKIDEKGLKTMVSLGVKNPLLDLTALEDKPLDEGYGISSVPSASNSKSIKENSNAAIIKRFNHHSAMVLAAGLRKQEAQNEQTSEPSNMDGNSGDADCFQPAVKRAKLQESIEYEDLGKNNSVKTIALNLKKSDRYYHGPTPIQSLQYATSQDIINSFQSIRQEMEAYTPKLTQVLSSSAASSTITALSPGGALMQGGTQQAINQMVPNDIQSELKHLYVAVGELLRHFWSCFPVNTPFLEEKVVKMKSNLERFQVTKLCPFQEKIRRQYLSTNLVSHIEEMLQTAYNKLHTWQSRRLMKKT

SEQ ID NO: 34419 - protein, 548 aa, Homo sapiens; identical to SEQ ID NO: 34418
  Payload ID: 6802
  Gene Symbol: GTF2H1
  Gene Name: general transcription factor IIH, polypeptide 1, 62kDa
  Uniprot ID: P32780
  ENSP ID: ENSP00000393638

SEQ ID NO: 34420 - protein, 95 aa, Homo sapiens
  Payload ID: 6802
  Gene Symbol: GTF2H1
  Gene Name: general transcription factor IIH, polypeptide 1, 62kDa
  ENSP ID: ENSP00000431481
MATSSEEVLLIVKKVRQKKQDGALYLMAERIAWAPEGKDRFTISHMYADIKCQKISPEGKAKIQLQLVLHAGDTTNFHFSNESTAVKERDAVKDL

SEQ ID NO: 34421 - protein, 236 aa, Homo sapiens
  Payload ID: 6802
  Gene Symbol: GTF2H1
  Gene Name: general transcription factor IIH, polypeptide 1, 62kDa
  ENSP ID: ENSP00000433133
MVLAAGLRKQEAQNEQTSEPSNMDGNSGDADCFQPAVKRAKLQESIEYEDLGKNNSVKTIALNLKKSDRYYHGPTPIQSLQYATSQDIINSFQSIRQEMEAYTPKLTQVLSSSAASSTITALSPGGALMQGGTQQAINQMVPNDIQSELKHLYVAVGELLRHFWSCFPVNTPFLEEKVVKMKSNLERFQVTKLCPFQEKIRRQYLSTNLVSHIEEMLQTAYNKLHTWQSRRLMKKT

SEQ ID NO: 34422 - protein, 432 aa, Homo sapiens
  Payload ID: 6802
  Gene Symbol: GTF2H1
  Gene Name: general transcription factor IIH, polypeptide 1, 62kDa
  Uniprot ID: P32780
  ENSP ID: ENSP00000435375
MLQEDPVLFQLYKDLVVSQVISAEEFWANRLNVNATDSSSTSNHKQDVGISAAFLADVRPQTDGCNGLRYNLTSDIIESIFRTYPAVKMKYAENVPHNMTEKEFWTRFFQSHYFHRDRLNTGSKDLFAECAKIDEKGLKTMVSLGVKNPLLDLTALEDKPLDEGYGISSVPSASNSKSIKENSNAAIIKRFNHHSAMVLAAGLRKQEAQNEQTSEPSNMDGNSGDADCFQPAVKRAKLQESIEYEDLGKNNSVKTIALNLKKSDRYYHGPTPIQSLQYATSQDIINSFQSIRQEMEAYTPKLTQVLSSSAASSTITALSPGGALMQGGTQQAINQMVPNDIQSELKHLYVAVGELLRHFWSCFPVNTPFLEEKVVKMKSNLERFQVTKLCPFQEKIRRQYLSTNLVSHIEEMLQTAYNKLHTWQSRRLMKKT

SEQ ID NO: 34423 - protein, 181 aa, Homo sapiens
  Payload ID: 6802
  Gene Symbol: GTF2H1
  Gene Name: general transcription factor IIH, polypeptide 1, 62kDa
  ENSP ID: ENSP00000436575
MKYAENVPHNMTEKEFWTRFFQSHYFHRDRLNTGSKDLFAECAKIDEKGLKTMVSLGVKNPLLDLTALEDKPLDEGYGISSVPSASNSKSIKENSNAAIIKRFNHHSAMVLAAGLRKQEAQNEQTSEPSNMDGNSGDADCFQPAVKRVWAKKYEPFGAQVSPNTLCDCKYCIRLFPVTQFF

SEQ ID NO: 34424 - protein, 138 aa, Homo sapiens
  Payload ID: 6802
  Gene Symbol: GTF2H1
  Gene Name: general transcription factor IIH, polypeptide 1, 62kDa
  ENSP ID: ENSP00000439774
MEAYTPKLTQVLSSSAASSTITALSPGGALMQGGTQQAINQMVPNDIQSELKHLYVAVGELLRHFWSCFPVNTPFLEEKVVKMKSNLERFQVTKLCPFQEKIRRQYLSTNLVSHIEEMLQTAYNKLHTWQSRRLMKKT

SEQ ID NO: 34425 - protein, 395 aa, Homo sapiens
  Payload ID: 6803
  Gene Symbol: GTF2H2
  Gene Name: general transcription factor IIH, polypeptide 2, 44kDa
  Uniprot ID: Q13888
  ENSP ID: ENSP00000274400
MDEEPERTKRWEGGYERTWEILKEDESGSLKATIEDILFKAKRKRVFEHHGQVRLGMMRHLYVVVDGSRTMEDQDLKPNRLTCTLKLLEYFVEEYFDQNPISQIGIIVTKSKRAEKLTELSGNPRKHITSLKKAVDMTCHGEPSLYNSLSIAMQTLKHMPGHTSREVLIIFSSLTTCDPSNIYDLIKTLKAAKIRVSVIGLSAEVRVCTVLARETGGTYHVILDESHYKELLTHHVSPPPASSSSECSLIRMGFPQHTIASLSDQDAKPSFSMAHLDGNTEPGLTLGGYFCPQCRAKYCELPVECKICGLTLVSAPHLARSYHHLFPLDAFQEIPLEEYNGERFCYGCQGELKDQHVYVCAVCQNVFCVDCDVFVHDSLHCCPGCIHKIPAPSGV

SEQ ID NO: 34426 - protein, 395 aa, Homo sapiens; identical to SEQ ID NO: 34425
  Payload ID: 6803
  Gene Symbol: GTF2H2
  Gene Name: general transcription factor IIH, polypeptide 2, 44kDa
  Uniprot ID: Q13888
  ENSP ID: ENSP00000328901

SEQ ID NO: 34427 - protein, 51 aa, Homo sapiens
  Payload ID: 6803
  Gene Symbol: GTF2H2
  Gene Name: general transcription factor IIH, polypeptide 2, 44kDa
  ENSP ID: ENSP00000394164
MDEEPERTKRWEGGYERTWEILKEDESGSLKATIEDILFKAKRKRCATFMW

SEQ ID NO: 34428 - protein, 51 aa, Homo sapiens; identical to SEQ ID NO: 34427
  Payload ID: 6803
  Gene Symbol: GTF2H2
  Gene Name: general transcription factor IIH, polypeptide 2, 44kDa
  ENSP ID: ENSP00000428718

SEQ ID NO: 34429 - protein, 123 aa, Homo sapiens
  Payload ID: 6803
  Gene Symbol: GTF2H2
  Gene Name: general transcription factor IIH, polypeptide 2, 44kDa
  ENSP ID: ENSP00000429057
MDEEPERTKRWEGGYERTWEILKEDESGSLKATIEDILFKAKRKRVFEHHGQVRLGMMRHLYVVVDGSRTMEDQDLKPNRLTCTLKLLEYFVEEYFDQNPISQIGIIVTKSKRAEKLTELSGV

SEQ ID NO: 34430 - protein, 152 aa, Homo sapiens
  Payload ID: 6803
  Gene Symbol: GTF2H2
  Gene Name: general transcription factor IIH, polypeptide 2, 44kDa
  ENSP ID: ENSP00000473333
  MOD_RES (1)..(1): Any amino acid
XEILKEDESGSLKATIEDILFKAKRKRVFEHHGQVRLGMMRHLYVVVDGSRTMEDQDLKPNRLTCTLKLLEYFVEEYFDQNPISQIGIIVTKSKRAEKLTELSGNPRKHITSLKKAVDMTCHGEPSLYNSLSIAMQTLKRGFTVLARMVSIS

SEQ ID NO: 34431 - protein, 23 aa, Homo sapiens
  Payload ID: 6803
  Gene Symbol: GTF2H2
  Gene Name: general transcription factor IIH, polypeptide 2, 44kDa
  ENSP ID: ENSP00000473362
MDEEPERTKRWEGGYERTWEILK

SEQ ID NO: 34432 - protein, 395 aa, Homo sapiens; identical to SEQ ID NO: 34425
  Payload ID: 6803
  Gene Symbol: GTF2H2
  Gene Name: general transcription factor IIH, polypeptide 2, 44kDa
  Uniprot ID: Q13888
  ENSP ID: ENSP00000477954

SEQ ID NO: 34433 - protein, 395 aa, Homo sapiens; identical to SEQ ID NO: 34425
  Payload ID: 6803
  Gene Symbol: GTF2H2
  Gene Name: general transcription factor IIH, polypeptide 2, 44kDa
  Uniprot ID: Q13888
  ENSP ID: ENSP00000479262

SEQ ID NO: 34434 - protein, 4 aa, Homo sapiens
  Payload ID: 6803
  Gene Symbol: GTF2H2
  Gene Name: general transcription factor IIH, polypeptide 2, 44kDa
  ENSP ID: ENSP00000479821
MDEE

SEQ ID NO: 34435 - protein, 51 aa, Homo sapiens; identical to SEQ ID NO: 34427
  Payload ID: 6803
  Gene Symbol: GTF2H2
  Gene Name: general transcription factor IIH, polypeptide 2, 44kDa
  ENSP ID: ENSP00000480417

SEQ ID NO: 34436 - protein, 395 aa, Homo sapiens; identical to SEQ ID NO: 34425
  Payload ID: 6803
  Gene Symbol: GTF2H2
  Gene Name: general transcription factor IIH, polypeptide 2, 44kDa
  Uniprot ID: Q13888
  ENSP ID: ENSP00000480548

SEQ ID NO: 34437 - protein, 3 aa, Homo sapiens
  Payload ID: 6803
  Gene Symbol: GTF2H2
  Gene Name: general transcription factor IIH, polypeptide 2, 44kDa
  ENSP ID: ENSP00000480983
MDE

SEQ ID NO: 34438 - protein, 123 aa, Homo sapiens; identical to SEQ ID NO: 34429
  Payload ID: 6803
  Gene Symbol: GTF2H2
  Gene Name: general transcription factor IIH, polypeptide 2, 44kDa
  ENSP ID: ENSP00000483350

SEQ ID NO: 34439 - protein, 23 aa, Homo sapiens
  Payload ID: 6803
  Gene Symbol: GTF2H2
  Gene Name: general transcription factor IIH, polypeptide 2, 44kDa
  ENSP ID: ENSP00000485816
MDEEPERTKRWEGGYERTWEILK

SEQ ID NO: 34440 - protein, 395 aa, Homo sapiens; identical to SEQ ID NO: 34425
  Payload ID: 6803
  Gene Symbol: GTF2H2
  Gene Name: general transcription factor IIH, polypeptide 2, 44kDa
  Uniprot ID: Q13888
  ENSP ID: ENSP00000486014

SEQ ID NO: 34441 - protein, 123 aa, Homo sapiens; identical to SEQ ID NO: 34429
  Payload ID: 6803
  Gene Symbol: GTF2H2
  Gene Name: general transcription factor IIH, polypeptide 2, 44kDa
  ENSP ID: ENSP00000487055

SEQ ID NO: 34442 - protein, 152 aa, Homo sapiens; identical to SEQ ID NO: 34430
  Payload ID: 6803
  Gene Symbol: GTF2H2
  Gene Name: general transcription factor IIH, polypeptide 2, 44kDa
  ENSP ID: ENSP00000487533
  MOD_RES (1)..(1): Any amino acid

SEQ ID NO: 34443 - protein, 267 aa, Homo sapiens
  Payload ID: 6804
  Gene Symbol: GTF2H3
  Gene Name: general transcription factor IIH, polypeptide 3, 34kDa
  Uniprot ID: Q13889
  ENSP ID: ENSP00000228955
MVLGNSHLFMNRSNKLAVIASHIQESRFLYPGKNGRLGDFFGDPGNPPEFNPSGSKDGKYELLTSANEVIVEEIKDLMTKSDIKGQHTETLLAGSLAKALCYIHRMNKEVKDNQEMKSRILVIKAAEDSALQYMNFMNVIFAAQKQNILIDACVLDSDSGLLQQACDITGGLYLKVPQMPSLLQYLLWVFLPDQDQRSQLILPPPVHVDYRAACFCHRNLIEIGYVCSVCLSIFCNFSPICTTCETAFKISLPPVLKAKKKKLKVSA

SEQ ID NO: 34444 - protein, 194 aa, Homo sapiens
  Payload ID: 6804
  Gene Symbol: GTF2H3
  Gene Name: general transcription factor IIH, polypeptide 3, 34kDa
  ENSP ID: ENSP00000438435
KDGKYELLTSANEVIVEEIKDLMTKSDIKGQHTETLLAGSLAKALCYIHRMNKEVKDNQEMKSRILVIKAAEDSALQYMNFMNVIFAAQKQACDITGGLYLKVPQMPSLLQYLLWVFLPDQDQRSQLILPPPVHVDYRAACFCHRNLIEIGYVCSVCLSIFCNFSPICTTCETAFKISLPPVLKAKKKKLKVSA

SEQ ID NO: 34445 - protein, 67 aa, Homo sapiens
  Payload ID: 6804
  Gene Symbol: GTF2H3
  Gene Name: general transcription factor IIH, polypeptide 3, 34kDa
  ENSP ID: ENSP00000439121
MVSDEDELNLLVIVVDANPIWWGKQALKESQFTLSKCIDAVMVLGNSHLFMNRSNKLAVIASHIQER

SEQ ID NO: 34446 - protein, 200 aa, Homo sapiens
  Payload ID: 6804
  Gene Symbol: GTF2H3
  Gene Name: general transcription factor IIH, polypeptide 3, 34kDa
  ENSP ID: ENSP00000440482
MVLGNSHLFMNRSNKLAVIASHIQESRFLYPGKNGRLGDFFGDPGNPPEFNPSGSKDGKYELLTSANEVIVEEIKDLMTKSDIKGQHTETLLAGSLAKALCYIHRMNKEVKDNQEMKSRILVIKAAEDSALQYMNFMNVIFAAQKQNILIDACVLDSDSGLLQQAQGIAHENLIPLETLVGVSSRSRSEISVNPPTPSSC

SEQ ID NO: 34447 - protein, 258 aa, Homo sapiens
  Payload ID: 6804
  Gene Symbol: GTF2H3
  Gene Name: general transcription factor IIH, polypeptide 3, 34kDa
  ENSP ID: ENSP00000441894
MVSDEDELNLLVIVVDANPIWWGKQALKESQFTLSKCIDAVMVLGNSHLFMNRSNKLAVIASHIQESRFLYPGKNGRLGDFFGDPGNPPEFNPSGSKDGKYELLTSANEVIVEEIKDLMTKSDIKGQHTETLLAGSLAKALCYIHRMNKEVKDNQEMKSRILACDITGGLYLKVPQMPSLLQYLLWVFLPDQDQRSQLILPPPVHVDYRAACFCHRNLIEIGYVCSVCLSIFCNFSPICTTCETAFKISLPPVLKAKK

SEQ ID NO: 34448 - protein, 148 aa, Homo sapiens
  Payload ID: 6804
  Gene Symbol: GTF2H3
  Gene Name: general transcription factor IIH, polypeptide 3, 34kDa
  ENSP ID: ENSP00000442977
MVLGNSHLFMNRSNKLAVIASHIQESRFLYPGKNGRLGDFFGDPGNPPEFNPSGSKDGKYELLTSANEVIVEEIKDLMTKSDIKGQHTETLLAGSLAKALCYIHRMNKEVKDNQEMKSRILAQGIAHENLIPLETLVGVSSRSRSEIS

SEQ ID NO: 34449 - protein, 308 aa, Homo sapiens
  Payload ID: 6804
  Gene Symbol: GTF2H3
  Gene Name: general transcription factor IIH, polypeptide 3, 34kDa
  Uniprot ID: Q13889
  ENSP ID: ENSP00000445162
MVSDEDELNLLVIVVDANPIWWGKQALKESQFTLSKCIDAVMVLGNSHLFMNRSNKLAVIASHIQESRFLYPGKNGRLGDFFGDPGNPPEFNPSGSKDGKYELLTSANEVIVEEIKDLMTKSDIKGQHTETLLAGSLAKALCYIHRMNKEVKDNQEMKSRILVIKAAEDSALQYMNFMNVIFAAQKQNILIDACVLDSDSGLLQQACDITGGLYLKVPQMPSLLQYLLWVFLPDQDQRSQLILPPPVHVDYRAACFCHRNLIEIGYVCSVCLSIFCNFSPICTTCETAFKISLPPVLKAKKKKLKVSA

SEQ ID NO: 34450 - protein, 210 aa, Homo sapiens
  Payload ID: 6804
  Gene Symbol: GTF2H3
  Gene Name: general transcription factor IIH, polypeptide 3, 34kDa
  ENSP ID: ENSP00000446097
MVSDEDELNLLVIVVDANPIWWGKQALKESQHHHLMPQPPEYLGLQFTLSKCIDAVMVLGNSHLFMNRSNKLAVIASHIQESRFLYPGKNGRLGDFFGDPGNPPEFNPSGSKDGKYELLTSANEVIVEEIKDLMTKSDIKGQHTETLLAGSLAKALCYIHRMNKEVKDNQEMKSRILVIKAAEDSALQYMNFMNVIFAAQKQNILIDACV

SEQ ID NO: 34451 - protein, 177 aa, Homo sapiens
  Payload ID: 6804
  Gene Symbol: GTF2H3
  Gene Name: general transcription factor IIH, polypeptide 3, 34kDa
  ENSP ID: ENSP00000446429
MVSDVDANPIWWGKQALKESQFTLSKCIDAVMVLGNSHLFMNRSNKLAVIASHIQESRFLYPGKNGRLGDFFGDPGNPPEFNPSGSKDGKYELLTSANEVIVEEIKDLMTKSDIKGQHTETLLAGSLAKALCYIHRMNKEVKDNQEMKSRILVIKAAEDSALQYMNFMNVIFAAQKQ

SEQ ID NO: 34452 - protein, 162 aa, Homo sapiens
  Payload ID: 6804
  Gene Symbol: GTF2H3
  Gene Name: general transcription factor IIH, polypeptide 3, 34kDa
  ENSP ID: ENSP00000481711
MNKEVKDNQEMKSRILVIKAAEDSALQYMNFMNVIFAAQKQNILIDACVLDSDSGLLQQACDITGGLYLKVPQMPSLLQYLLWVFLPDQDQRSQLILPPPVHVDYRAACFCHRNLIEIGYVCSVCLSIFCNFSPICTTCETAFKISLPPVLKAKKKKLKVSA

SEQ ID NO: 34453 - protein, 462 aa, Homo sapiens
  Payload ID: 6805
  Gene Symbol: GTF2H4
  Gene Name: general transcription factor IIH, polypeptide 4, 52kDa
  Uniprot ID: Q92759
  ENSP ID: ENSP00000259895
MESTPSRGLNRVHLQCRNLQEFLGGLSPGVLDRLYGHPATCLAVFRELPSLAKNWVMRMLFLEQPLPQAAVALWVKKEFSKAQEESTGLLSGLRIWHTQLLPGGLQGLILNPIFRQNLRIALLGGGKAWSDDTSQLGPDKHARDVPSLDKYAEERWEVVLHFMVGSPSAAVSQDLAQLLSQAGLMKSTEPGEPPCITSAGFQFLLLDTPAQLWYFMLQYLQTAQSRGMDLVEILSFLFQLSFSTLGKDYSVEGMSDSLLNFLQHLREFGLVFQRKRKSRRYYPTRLAINLSSGVSGAGGTVHQPGFIVVETNYRLYAYTESELQIALIALFSEMLYRFPNMVVAQVTRESVQQAIASGITAQQIIHFLRTRAHPVMLKQTPVLPPTITDQIRLWELERDRLRFTEGVLYNQFLSQVDFELLLAHARELGVLVFENSAKRLMVVTPAGHSDVKRFWKRQKHSS

SEQ ID NO: 34454 - protein, 462 aa, Homo sapiens; identical to SEQ ID NO: 34453
  Payload ID: 6805
  Gene Symbol: GTF2H4
  Gene Name: general transcription factor IIH, polypeptide 4, 52kDa
  Uniprot ID: Q92759
  ENSP ID: ENSP00000365493

SEQ ID NO: 34455 - protein, 462 aa, Homo sapiens; identical to SEQ ID NO: 34453
  Payload ID: 6805
  Gene Symbol: GTF2H4
  Gene Name: general transcription factor IIH, polypeptide 4, 52kDa
  Uniprot ID: Q92759
  ENSP ID: ENSP00000365504

SEQ ID NO: 34456 - protein, 462 aa, Homo sapiens; identical to SEQ ID NO: 34453
  Payload ID: 6805
  Gene Symbol: GTF2H4
  Gene Name: general transcription factor IIH, polypeptide 4, 52kDa
  Uniprot ID: Q92759
  ENSP ID: ENSP00000383300

SEQ ID NO: 34457 - protein, 462 aa, Homo sapiens; identical to SEQ ID NO: 34453
  Payload ID: 6805
  Gene Symbol: GTF2H4
  Gene Name: general transcription factor IIH, polypeptide 4, 52kDa
  Uniprot ID: Q92759
  ENSP ID: ENSP00000387980

SEQ ID NO: 34458 - protein, 462 aa, Homo sapiens; identical to SEQ ID NO: 34453
  Payload ID: 6805
  Gene Symbol: GTF2H4
  Gene Name: general transcription factor IIH, polypeptide 4, 52kDa
  Uniprot ID: Q92759
  ENSP ID: ENSP00000388227

SEQ ID NO: 34459 - protein, 138 aa, Homo sapiens
  Payload ID: 6805
  Gene Symbol: GTF2H4
  Gene Name: general transcription factor IIH, polypeptide 4, 52kDa
  ENSP ID: ENSP00000389851
MESTPSRGLNRVHLQCRNLQEFLGGLSPGVLDRLYGHPATCLAVFRELPSLAKNWVMRMLFLEQPLPQAAVALWVKKEFSKAQEESTGLLSGLRIWHTQLLPGGLQGLILNPIFRQNLRIALLGGTGITGVSHCAWPG

SEQ ID NO: 34460 - protein, 138 aa, Homo sapiens; identical to SEQ ID NO: 34459
  Payload ID: 6805
  Gene Symbol: GTF2H4
  Gene Name: general transcription factor IIH, polypeptide 4, 52kDa
  ENSP ID: ENSP00000394961

SEQ ID NO: 34461 - protein, 462 aa, Homo sapiens; identical to SEQ ID NO: 34453
  Payload ID: 6805
  Gene Symbol: GTF2H4
  Gene Name: general transcription factor IIH, polypeptide 4, 52kDa
  Uniprot ID: Q92759
  ENSP ID: ENSP00000395497

SEQ ID NO: 34462 - protein, 462 aa, Homo sapiens; identical to SEQ ID NO: 34453
  Payload ID: 6805
  Gene Symbol: GTF2H4
  Gene Name: general transcription factor IIH, polypeptide 4, 52kDa
  Uniprot ID: Q92759
  ENSP ID: ENSP00000396251

SEQ ID NO: 34463 - protein, 138 aa, Homo sapiens; identical to SEQ ID NO: 34459
  Payload ID: 6805
  Gene Symbol: GTF2H4
  Gene Name: general transcription factor IIH, polypeptide 4, 52kDa
  ENSP ID: ENSP00000397410

SEQ ID NO: 34464 - protein, 138 aa, Homo sapiens; identical to SEQ ID NO: 34459
  Payload ID: 6805
  Gene Symbol: GTF2H4
  Gene Name: general transcription factor IIH, polypeptide 4, 52kDa
  ENSP ID: ENSP00000398484

SEQ ID NO: 34465 - protein, 462 aa, Homo sapiens; identical to SEQ ID NO: 34453
  Payload ID: 6805
  Gene Symbol: GTF2H4
  Gene Name: general transcription factor IIH, polypeptide 4, 52kDa
  Uniprot ID: Q92759
  ENSP ID: ENSP00000399554

SEQ ID NO: 34466 - protein, 462 aa, Homo sapiens; identical to SEQ ID NO: 34453
  Payload ID: 6805
  Gene Symbol: GTF2H4
  Gene Name: general transcription factor IIH, polypeptide 4, 52kDa
  Uniprot ID: Q92759
  ENSP ID: ENSP00000401105

SEQ ID NO: 34467 - protein, 462 aa, Homo sapiens; identical to SEQ ID NO: 34453
  Payload ID: 6805
  Gene Symbol: GTF2H4
  Gene Name: general transcription factor IIH, polypeptide 4, 52kDa
  Uniprot ID: Q92759
  ENSP ID: ENSP00000403156

SEQ ID NO: 34468 - protein, 462 aa, Homo sapiens; identical to SEQ ID NO: 34453
  Payload ID: 6805
  Gene Symbol: GTF2H4
  Gene Name: general transcription factor IIH, polypeptide 4, 52kDa
  Uniprot ID: Q92759
  ENSP ID: ENSP00000409483

SEQ ID NO: 34469 - protein, 138 aa, Homo sapiens; identical to SEQ ID NO: 34459
  Payload ID: 6805
  Gene Symbol: GTF2H4
  Gene Name: general transcription factor IIH, polypeptide 4, 52kDa
  ENSP ID: ENSP00000411553

SEQ ID NO: 34470 - protein, 71 aa, Homo sapiens
  Payload ID: 6806
  Gene Symbol: GTF2H5
  Gene Name: general transcription factor IIH, polypeptide 5
  Uniprot ID: Q6ZYL4
  ENSP ID: ENSP00000476100
MVNVLKGVLIECDPAMKQFLLYLDESNALGKKFIIQDIDDTHVFVIAELVNVLQERVGELMDQNAFSLTQK

SEQ ID NO: 34471 - protein, 274 aa, Homo sapiens
  Payload ID: 6807
  Gene Symbol: GTF2I
  Gene Name: general transcription factor IIi
  Uniprot ID: P78347
  ENSP ID: ENSP00000404240
MAQVAMSTLPVEDEESSESRMVVTFLMSALESMCKELAKSKAEVACIAVYETDVFVVGTERGRAFVNTRKDFQKDFVKYCVEEEEKAAEMHKMKSTTQANRMSVDAVEIETLRKTVEDYFCFCYGKALGKSTVVPVPYEKMLRDQSAVVVQGLPEGVAFKHPENYDLATLKWILENKAGISFIIKRPFLEPKKHVGGRVMVTDADRSILSPGGSCGPIKVKTEPTEDSGISLEMAAVTVKEESEDPDYYQYNIQGSHHSSEGNEGTEMEVPAEG

SEQ ID NO: 34472 - protein, 106 aa, Homo sapiens
  Payload ID: 6807
  Gene Symbol: GTF2I
  Gene Name: general transcription factor IIi
  ENSP ID: ENSP00000405022
MAQVAMSTLPVEDEESSESRMVVTFLMSALESMCKELAKSKAEVACIAVYETDVFVVGTERGRAFVNTRKDFQKDFVKYCVEEEEKAAEMHKMKSTTQANRMSVDA

SEQ ID NO: 34473 - protein, 998 aa, Homo sapiens
  Payload ID: 6807
  Gene Symbol: GTF2I
  Gene Name: general transcription factor IIi
  Uniprot ID: P78347
  ENSP ID: ENSP00000460070
MAQVAMSTLPVEDEESSESRMVVTFLMSALESMCKELAKSKAEVACIAVYETDVFVVGTERGRAFVNTRKDFQKDFVKYCVEEEEKAAEMHKMKSTTQANRMSVDAVEIETLRKTVEDYFCFCYGKALGKSTVVPVPYEKMLRDQSAVVVQGLPEGVAFKHPENYDLATLKWILENKAGISFIIKRPFLEPKKHVGGRVMVTDADRSILSPGGSCGPIKVKTEPTEDSGISLEMAAVTVKEESEDPDYYQYNIQAGPSETDDVDEKQPLSKPLQGSHHSSEGNEGTEMEVPAEDSTQHVPSETSEDPEVEVTIEDDDYSPPSKRPKANELPQPPVPEPANAGKRKVREFNFEKWNARITDLRKQVEELFERKYAQAIKAKGPVTIPYPLFQSHVEDLYVEGLPEGIPFRRPSTYGIPRLERILLAKERIRFVIKKHELLNSTREDLQLDKPASGVKEEWYARITKLRKMVDQLFCKKFAEALGSTEAKAVPYQKFEAHPNDLYVEGLPENIPFRSPSWYGIPRLEKIIQVGNRIKFVIKRPELLTHSTTEVTQPRTNTPVKEDWNVRITKLRKQVEEIFNLKFAQALGLTEAVKVPYPVFESNPEFLYVEGLPEGIPFRSPTWFGIPRLERIVRGSNKIKFVVKKPELVISYLPPGMASKINTKALQSPKRPRSPGSNSKVPEIEVTVEGPNNNNPQTSAVRTPTQTNGSNVPFKPRGREFSFEAWNAKITDLKQKVENLFNEKCGEALGLKQAVKVPFALFESFPEDFYVEGLPEGVPFRRPSTFGIPRLEKILRNKAKIKFIIKKPEMFETAIKESTSSKSPPRKINSSPNVNTTASGVEDLNIIQVTIPDDDNERLSKVEKARQLREQVNDLFSRKFGEAIGMGFPVKVPYRKITINPGCVVVDGMPPGVSFKAPSYLEISSMRRILDSAEFIKFTVIRPFPGLVINNQLVDQSESEGPVIQESAEPSQLEVPATEEIKETDGSSQIKQEPDPTW

SEQ ID NO: 34474 - protein, 957 aa, Homo sapiens
  Payload ID: 6807
  Gene Symbol: GTF2I
  Gene Name: general transcription factor IIi
  Uniprot ID: P78347
  ENSP ID: ENSP00000477837
MAQVAMSTLPVEDEESSESRMVVTFLMSALESMCKELAKSKAEVACIAVYETDVFVVGTERGRAFVNTRKDFQKDFVKYCVEEEEKAAEMHKMKSTTQANRMSVDAVEIETLRKTVEDYFCFCYGKALGKSTVVPVPYEKMLRDQSAVVVQGLPEGVAFKHPENYDLATLKWILENKAGISFIIKRPFLEPKKHVGGRVMVTDADRSILSPGGSCGPIKVKTEPTEDSGISLEMAAVTVKEESEDPDYYQYNIQGSHHSSEGNEGTEMEVPAEDDDYSPPSKRPKANELPQPPVPEPANAGKRKVREFNFEKWNARITDLRKQVEELFERKYAQAIKAKGPVTIPYPLFQSHVEDLYVEGLPEGIPFRRPSTYGIPRLERILLAKERIRFVIKKHELLNSTREDLQLDKPASGVKEEWYARITKLRKMVDQLFCKKFAEALGSTEAKAVPYQKFEAHPNDLYVEGLPENIPFRSPSWYGIPRLEKIIQVGNRIKFVIKRPELLTHSTTEVTQPRTNTPVKEDWNVRITKLRKQVEEIFNLKFAQALGLTEAVKVPYPVFESNPEFLYVEGLPEGIPFRSPTWFGIPRLERIVRGSNKIKFVVKKPELVISYLPPGMASKINTKALQSPKRPRSPGSNSKVPEIEVTVEGPNNNNPQTSAVRTPTQTNGSNVPFKPRGREFSFEAWNAKITDLKQKVENLFNEKCGEALGLKQAVKVPFALFESFPEDFYVEGLPEGVPFRRPSTFGIPRLEKILRNKAKIKFIIKKPEMFETAIKESTSSKSPPRKINSSPNVNTTASGVEDLNIIQVTIPDDDNERLSKVEKARQLREQVNDLFSRKFGEAIGMGFPVKVPYRKITINPGCVVVDGMPPGVSFKAPSYLEISSMRRILDSAEFIKFTVIRPFPGLVINNQLVDQSESEGPVIQESAEPSQLEVPATEEIKETDGSSQIKQEPDPTW

SEQ ID NO: 34475 - protein, 977 aa, Homo sapiens
  Payload ID: 6807
  Gene Symbol: GTF2I
  Gene Name: general transcription factor IIi
  Uniprot ID: P78347
  ENSP ID: ENSP00000482476
MAQVAMSTLPVEDEESSESRMVVTFLMSALESMCKELAKSKAEVACIAVYETDVFVVGTERGRAFVNTRKDFQKDFVKYCVEEEEKAAEMHKMKSTTQANRMSVDAVEIETLRKTVEDYFCFCYGKALGKSTVVPVPYEKMLRDQSAVVVQGLPEGVAFKHPENYDLATLKWILENKAGISFIIKRPFLEPKKHVGGRVMVTDADRSILSPGGSCGPIKVKTEPTEDSGISLEMAAVTVKEESEDPDYYQYNIQAGPSETDDVDEKQPLSKPLQGSHHSSEGNEGTEMEVPAEDDDYSPPSKRPKANELPQPPVPEPANAGKRKVREFNFEKWNARITDLRKQVEELFERKYAQAIKAKGPVTIPYPLFQSHVEDLYVEGLPEGIPFRRPSTYGIPRLERILLAKERIRFVIKKHELLNSTREDLQLDKPASGVKEEWYARITKLRKMVDQLFCKKFAEALGSTEAKAVPYQKFEAHPNDLYVEGLPENIPFRSPSWYGIPRLEKIIQVGNRIKFVIKRPELLTHSTTEVTQPRTNTPVKEDWNVRITKLRKQVEEIFNLKFAQALGLTEAVKVPYPVFESNPEFLYVEGLPEGIPFRSPTWFGIPRLERIVRGSNKIKFVVKKPELVISYLPPGMASKINTKALQSPKRPRSPGSNSKVPEIEVTVEGPNNNNPQTSAVRTPTQTNGSNVPFKPRGREFSFEAWNAKITDLKQKVENLFNEKCGEALGLKQAVKVPFALFESFPEDFYVEGLPEGVPFRRPSTFGIPRLEKILRNKAKIKFIIKKPEMFETAIKESTSSKSPPRKINSSPNVNTTASGVEDLNIIQVTIPDDDNERLSKVEKARQLREQVNDLFSRKFGEAIGMGFPVKVPYRKITINPGCVVVDGMPPGVSFKAPSYLEISSMRRILDSAEFIKFTVIRPFPGLVINNQLVDQSESEGPVIQESAEPSQLEVPATEEIKETDGSSQIKQEPDPTW

SEQ ID NO: 34476 - protein, 978 aa, Homo sapiens
  Payload ID: 6807
  Gene Symbol: GTF2I
  Gene Name: general transcription factor IIi
  Uniprot ID: P78347
  ENSP ID: ENSP00000484526
MAQVAMSTLPVEDEESSESRMVVTFLMSALESMCKELAKSKAEVACIAVYETDVFVVGTERGRAFVNTRKDFQKDFVKYCVEEEEKAAEMHKMKSTTQANRMSVDAVEIETLRKTVEDYFCFCYGKALGKSTVVPVPYEKMLRDQSAVVVQGLPEGVAFKHPENYDLATLKWILENKAGISFIIKRPFLEPKKHVGGRVMVTDADRSILSPGGSCGPIKVKTEPTEDSGISLEMAAVTVKEESEDPDYYQYNIQGSHHSSEGNEGTEMEVPAEDSTQHVPSETSEDPEVEVTIEDDDYSPPSKRPKANELPQPPVPEPANAGKRKVREFNFEKWNARITDLRKQVEELFERKYAQAIKAKGPVTIPYPLFQSHVEDLYVEGLPEGIPFRRPSTYGIPRLERILLAKERIRFVIKKHELLNSTREDLQLDKPASGVKEEWYARITKLRKMVDQLFCKKFAEALGSTEAKAVPYQKFEAHPNDLYVEGLPENIPFRSPSWYGIPRLEKIIQVGNRIKFVIKRPELLTHSTTEVTQPRTNTPVKEDWNVRITKLRKQVEEIFNLKFAQALGLTEAVKVPYPVFESNPEFLYVEGLPEGIPFRSPTWFGIPRLERIVRGSNKIKFVVKKPELVISYLPPGMASKINTKALQSPKRPRSPGSNSKVPEIEVTVEGPNNNNPQTSAVRTPTQTNGSNVPFKPRGREFSFEAWNAKITDLKQKVENLFNEKCGEALGLKQAVKVPFALFESFPEDFYVEGLPEGVPFRRPSTFGIPRLEKILRNKAKIKFIIKKPEMFETAIKESTSSKSPPRKINSSPNVNTTASGVEDLNIIQVTIPDDDNERLSKVEKARQLREQVNDLFSRKFGEAIGMGFPVKVPYRKITINPGCVVVDGMPPGVSFKAPSYLEISSMRRILDSAEFIKFTVIRPFPGLVINNQLVDQSESEGPVIQESAEPSQLEVPATEEIKETDGSSQIKQEPDPTW

SEQ ID NO: 34477 - protein, 365 aa, Homo sapiens
  Payload ID: 6808
  Gene Symbol: GTF3A
  Gene Name: general transcription factor IIIA
  Uniprot ID: Q92664
  ENSP ID: ENSP00000370532
LDPPAVVAESVSSLTIADAFIAAGESSAPTPPRPALPRRFICSFPDCSANYSKAWKLDAHLCKHTGERPFVCDYEGCGKAFIRDYHLSRHILTHTGEKPFVCAANGCDQKFNTKSNLKKHFERKHENQQKQYICSFEDCKKTFKKHQQLKIHQCQHTNEPLFKCTQEGCGKHFASPSKLKRHAKAHEGYVCQKGCSFVAKTWTELLKHVRETHKEEILCEVCRKTFKRKDYLKQHMKTHAPERDVCRCPREGCGRTYTTVFNLQSHILSFHEESRPFVCEHAGCGKTFAMKQSLTRHAVVHDPDKKKMKLKVKKSREKRSLASHLSGYIPPKRKQGQGLSLCQNGESPNCVEDKMLSTVAVLTLG

SEQ ID NO: 34478 - protein, 104 aa, Homo sapiens
  Payload ID: 6808
  Gene Symbol: GTF3A
  Gene Name: general transcription factor IIIA
  ENSP ID: ENSP00000387806
LDPPAVVAESVSSLTIADAFIAAGESSAPTPPRPALPRRFICSFPDCSANYSKAWKLDAHLCKHTGEVRGARLPTLGLGMARGPGVATAVVARAAGPAVQRVQL

SEQ ID NO: 34479 - protein, 188 aa, Homo sapiens
  Payload ID: 6808
  Gene Symbol: GTF3A
  Gene Name: general transcription factor IIIA
  ENSP ID: ENSP00000389655
LDPPAVVAESVSSLTIADAFIAAGESSAPTPPRPALPRRFICSFPDCSANYSKAWKLDAHLCKHTGERPFVCDYEGCGKAFIRDYHLSRHILTHTGEKPFVCAANGCDQKFNTKSNLKKHFERKHENQQKQYICSFEDCKKTFKKHQQLKIHQCQHTNEPLFKLCMSKRMFLCGKNMDGTSETCERNP

SEQ ID NO: 34480 - protein, 422 aa, Homo sapiens
  Payload ID: 6808
  Gene Symbol: GTF3A
  Gene Name: general transcription factor IIIA
  ENSP ID: ENSP00000393050
MRSSGADAGRCLVTARAPGSVPASREGSAGSRGPGARFPARVSARGSAPGPGLGGAGALDPPAVVAESVSSLTIADAFIAAGESSAPTPPRPALPRRFICSFPDCSANYSKAWKLDAHLCKHTGERPFVCDYEGCGKAFIRDYHLSRHILTHTGEKPFVCAANGCDQKFNTKSNLKKHFERKHENQQKQYICSFEDCKKTFKKHQQLKIHQCQHTNEPLFKCTQEGCGKHFASPSKLKRHAKAHEGYVCQKGCSFVAKTWTELLKHVRETHKEEILCEVCRKTFKRKDYLKQHMKTHAPERDVCRCPREGCGRTYTTVFNLQSHILSFHEESRPFVCEHAGCGKTFAMKQSLTRHAVVHDPDKKKMKLKVKKSREKRSLASSQWIYPPKRKQGQGLSLCQNGESPNCVEDKMLSTVAVLTLG

SEQ ID NO: 34481 - protein, 134 aa, Homo sapiens
  Payload ID: 6808
  Gene Symbol: GTF3A
  Gene Name: general transcription factor IIIA
  ENSP ID: ENSP00000409175
LDPPAVVAESVSSLTIADAFIAAGESSAPTPPRPALPRRFICSFPDCSANYSKAWKLDAHLCKHTGERPFVCDYEGCGKAFIRDYHLSRHILTHTGEKPFVCAANGCDQKFNTKSNLKKHFERKHENQQKQYIF

SEQ ID NO: 34482 - protein, 2109 aa, Homo sapiens
  Payload ID: 6809
  Gene Symbol: GTF3C1
  Gene Name: general transcription factor IIIC, polypeptide 1, alpha 220kDa
  Uniprot ID: Q12789
  ENSP ID: ENSP00000348510
MDALESLLDEVALEGLDGLCLPALWSRLETRVPPFPLPLEPCTQEFLWRALATHPGISFYEEPRERPDLQLQDRYEEIDLETGILESRRDPVALEDVYPIHMILENKDGIQGSCRYFKERKNITNDIRTKSLQPRCTMVEAFDRWGKKLIIVASQAMRYRALIGQEGDPDLKLPDFSYCILERLGRSRWQGELQRDLHTTAFKVDAGKLHYHRKILNKNGLITMQSHVIRLPTGAQQHSILLLLNRFHVDRRSKYDILMEKLSVMLSTRTNHIETLGKLREELGLCERTFKRLYQYMLNAGLAKVVSLRLQEIHPECGPCKTKKGTDVMVRCLKLLKEFKRNDHDDDEDEEVISKTVPPVDIVFERDMLTQTYDLIERRGTKGISQAEIRVAMNVGKLEARMLCRLLQRFKVVKGFMEDEGRQRTTKYISCVFAEESDLSRQYQREKARSELLTTVSLASMQEESLLPEGEDTFLSESDSEEERSSSKRRGRGSQKDTRASANLRPKTQPHHSTPTKGGWKVVNLHPLKKQPPSFPGAAEERACQSLASRDSLLDTSSVSEPNVSFVSHCADSNSGDIAVIEEVRMENPKESSSSLKTGRHSSGQDKPHETYRLLKRRNLIIEAVTNLRLIESLFTIQKMIMDQEKQEGVSTKCCKKSIVRLVRNLSEEGLLRLYRTTVIQDGIKKKVDLVVHPSMDQNDPLVRSAIEQVRFRISNSSTANRVKTSQPPVPQGEAEEDSQGKEGPSGSGDSQLSASSRSESGRMKKSDNKMGITPLRNYHPIVVPGLGRSLGFLPKMPRLRVVHMFLWYLIYGHPASNTVEKPSFISERRTIKQESGRAGVRPSSSGSAWEACSEAPSKGSQDGVTWEAEVELATETVYVDDASWMRYIPPIPVHRDFGFGWALVSDILLCLPLSIFIQIVQVSYKVDNLEEFLNDPLKKHTLIRFLPRPIRQQLLYKRRYIFSVVENLQRLCYMGLLQFGPTEKFQDKDQVFIFLKKNAVIVDTTICDPHYNLARSSRPFERRLYVLNSMQDVENYWFDLQCVCLNTPLGVVRCPRVRKNSSTDQGSDEEGSLQKEQESAMDKHNLERKCAMLEYTTGSREVVDEGLIPGDGLGAAGLDSSFYGHLKRNWIWTSYIINQAKKENTAAENGLTVRLQTFLSKRPMPLSARGNSRLNIWGEARVGSELCAGWEEQFEVDREPSLDRNRRVRGGKSQKRKRLKKDPGKKIKRKKKGEFPGEKSKRLRYHDEADQSALQRMTRLRVTWSMQEDGLLVLCRIASNVLNTKVKGPFVTWQVVRDILHATFEESLDKTSHSVGRRARYIVKNPQAYLNYKVCLAEVYQDKALVGDFMNRRGDYDDPKVCANEFKEFVEKLKEKFSSALRNSNLEIPDTLQELFARYRVLAIGDEKDQTRKEDELNSVDDIHFLVLQNLIQSTLALSDSQMKSYQSFQTFRLYREYKDHVLVKAFMECQKRSLVNRRRVNHTLGPKKNRALPFVPMSYQLSQTYYRIFTWRFPSTICTESFQFLDRMRAAGKLDQPDRFSFKDQDNNEPTNDMVAFSLDGPGGNCVAVLTLFSLGLISVDVRIPEQIIVVDSSMVENEVIKSLGKDGSLEDDEDEEDDLDEGVGGKRRSMEVKPAQASHTNYLLMRGYYSPGIVSTRNLNPNDSIVVNSCQMKFQLRCTPVPARLRPAAAPLEELTMGTSCLPDTFTKLINPQENTCSLEEFVLQLELSGYSPEDLTAALEILEAIIATGCFGIDKEELRRRFSALEKAGGGRTRTFADCIQALLEQHQVLEVGGNTARLVAMGSAWPWLLHSVRLKDREDADIQREDPQARPLEGSSSEDSPPEGQAPPSHSPRGTKRRASWASENGETDAEGTQMTPAKRPALQDSNLAPSLGPGAEDGAEAQAPSPPPALEDTAAAGAAQEDQEGVGEFSSPGQEQLSGQAQPPEGSEDPRGFTESFGAANISQAARERDCESVCFIGRPWRVVDGHLNLPVCKGMMEAMLYHIMTRPGIPESSLLRHYQGVLQPVAVLELLQGLESLGCIRKRWLRKPRPVSLFSTPVVEEVEVPSSLDESPMAFYEPTLDCTLRLGRVFPHEVNWNKWIHL

SEQ ID NO: 34483 - protein, 2084 aa, Homo sapiens
  Payload ID: 6809
  Gene Symbol: GTF3C1
  Gene Name: general transcription factor IIIC, polypeptide 1, alpha 220kDa
  Uniprot ID: Q12789
  ENSP ID: ENSP00000455417
MDALESLLDEVALEGLDGLCLPALWSRLETRVPPFPLPLEPCTQEFLWRALATHPGISFYEEPRERPDLQLQDRYEEIDLETGILESRRDPVALEDVYPIHMILENKDGIQGSCRYFKERKNITNDIRTKSLQPRCTMVEAFDRWGKKLIIVASQAMRYRALIGQEGDPDLKLPDFSYCILERLGRSRWQGELQRDLHTTAFKVDAGKLHYHRKILNKNGLITMQSHVIRLPTGAQQHSILLLLNRFHVDRRSKYDILMEKLSVMLSTRTNHIETLGKLREELGLCERTFKRLYQYMLNAGLAKVVSLRLQEIHPECGPCKTKKGTDVMVRCLKLLKEFKRNDHDDDEDEEVISKTVPPVDIVFERDMLTQTYDLIERRGTKGISQAEIRVAMNVGKLEARMLCRLLQRFKVVKGFMEDEGRQRTTKYISCVFAEESDLSRQYQREKARSELLTTVSLASMQEESLLPEGEDTFLSESDSEEERSSSKRRGRGSQKDTRASANLRPKTQPHHSTPTKGGWKVVNLHPLKKQPPSFPGAAEERACQSLASRDSLLDTSSVSEPNVSFVSHCADSNSGDIAVIEEVRMENPKESSSSLKTGRHSSGQDKPHETYRLLKRRNLIIEAVTNLRLIESLFTIQKMIMDQEKQEGVSTKCCKKSIVRLVRNLSEEGLLRLYRTTVIQDGIKKKVDLVVHPSMDQNDPLVRSAIEQVRFRISNSSTANRVKTSQPPVPQGEAEEDSQGKEGPSGSGDSQLSASSRSESGRMKKSDNKMGITPLRNYHPIVVPGLGRSLGFLPKMPRLRVVHMFLWYLIYGHPASNTVEKPSFISERRTIKQESGRAGVRPSSSGSAWEACSEAPSKGSQDGVTWEAEVELATETVYVDDASWMRYIPPIPVHRDFGFGWALVSDILLCLPLSIFIQIVQVSYKVDNLEEFLNDPLKKHTLIRFLPRPIRQQLLYKRRYIFSVVENLQRLCYMGLLQFGPTEKFQDKDQVFIFLKKNAVIVDTTICDPHYNLARSSRPFERRLYVLNSMQDVENYWFDLQCVCLNTPLGVVRCPRVRKNSSTDQGSDEEGSLQKEQESAMDKHNLERKCAMLEYTTGSREVVDEGLIPGDGLGAAGLDSSFYGHLKRNWIWTSYIINQAKKENTAAENGLTVRLQTFLSKRPMPLSARGNSRLNIWGEARVGSELCAGWEEQFEVDREPSLDRNRRVRGGKSQKRKRLKKDPGKKIKRKKKGEFPGEKSKRLRYHDEADQSALQRMTRLRVTWSMQEDGLLVLCRIASNVLNTKVKGPFVTWQVVRDILHATFEESLDKTSHSVGRRARYIVKNPQAYLNYKVCLAEVYQDKALVGDFMNRRGDYDDPKVCANEFKEFVEKLKEKFSSALRNSNLEIPDTLQELFARYRVLAIGDEKDQTRKEDELNSVDDIHFLVLQNLIQSTLALSDSQMKSYQSFQTFRLYREYKDHVLVKAFMECQKRSLVNRRRVNHTLGPKKNRALPFVPMSYQLSQTYYRIFTWRFPSTICTESFQFLDRMRAAGKLDQPDRFSFKDQDNNEPTNDMVAFSLDGPGGNCVAVLTLFSLGLISVDVRIPEQIIVVDSSMVENEVIKSLGKDGSLEDDEDEEDDLDEGVGGKRRSMEVKPAQASHTNYLLMRGYYSPGIVSTRNLNPNDSIVVNSCQMKFQLRCTPVPARLRPAAAPLEELTMGTSCLPDTFTKLINPQENTCSLEEFVLQLELSGYSPEDLTAALEILEAIIATGCFGIDKEELRRRFSALEKAGGGRTRTFADCIQALLEQHQVLEVGGNTARLVAMGSAWPWLLHSVRLKDREDADIQREDPQARPLEGSSSEDSPPEGQAPPSHSPRGTKRRASWASENGETDAEGTQMTPAKRPALQDSNLAPSLGPGAEDGAEAQAPSPPPALEDTAAAGAAQEDQEGVGFTESFGAANISQAARERDCESVCFIGRPWRVVDGHLNLPVCKGMMEAMLYHIMTRPGIPESSLLRHYQGVLQPVAVLELLQGLESLGCIRKRWLRKPRPVSLFSTPVVEEVEVPSSLDESPMAFYEPTLDCTLRLGRVFPHEVNWNKWIHL

SEQ ID NO: 34484 - protein, 180 aa, Homo sapiens
  Payload ID: 6809
  Gene Symbol: GTF3C1
  Gene Name: general transcription factor IIIC, polypeptide 1, alpha 220kDa
  ENSP ID: ENSP00000456187
  MOD_RES (1)..(1): Any amino acid
XKGEFPGEKSKRLRYHDEADQSALQRMTRLRVTWSMQEDGLLVLCRIASNVLNTKVKGPFVTWQVVRDILHATFEESLDKTSHSVGRRARYIVKNPQAYLNYKVCLAEVYQDKALVGDFMNRRGDYDDPKCVWQDLCQVRPVDKERLPFPPRRPQVCANEFKEFVEKLKEKFSSALRNSN

SEQ ID NO: 34485 - protein, 214 aa, Homo sapiens
  Payload ID: 6809
  Gene Symbol: GTF3C1
  Gene Name: general transcription factor IIIC, polypeptide 1, alpha 220kDa
  ENSP ID: ENSP00000457449
  MOD_RES (1)..(1): Any amino acid
XRNLIIEAVTNLRLIESLFTIQKMIMDQEKQEDQEGVGEFSSPGQEQLSGQAQPPEGSEDPRGFTESFGAANISQAARERDCESVCFIGRPWRVVDGHLNLPVCKGMMEAMLYHIMTRPGIPESSLLRHYQGVLQPVAVLELLQGLESLGCIRKRWLRKPRPVSLFSTPVVEEVEVPSSLDESPMAFYEPTLDCTLRLGRVFPHEVNWNKWIHL

SEQ ID NO: 34486 - protein, 139 aa, Homo sapiens
  Payload ID: 6809
  Gene Symbol: GTF3C1
  Gene Name: general transcription factor IIIC, polypeptide 1, alpha 220kDa
  ENSP ID: ENSP00000457476
AGLDSSFYGHLKRNWIWTSYIINQAKKENTAAENGLTVRLQTFLSKRPMPLSARGNSRLNIWGEARVGSELCAGWEEQFEVDREPSLDRNRRVRGGKSQKRKRLKKDPGKKIKRKKKGYVKKAKGCATMMKPTRVPCSG

SEQ ID NO: 34487 - protein, 84 aa, Homo sapiens
  Payload ID: 6809
  Gene Symbol: GTF3C1
  Gene Name: general transcription factor IIIC, polypeptide 1, alpha 220kDa
  ENSP ID: ENSP00000459231
FLVLQNLIQSTLALSDSQMKSYQSFQTFRLYREYKDHVLVKAFMECQKRSLVNRRRVNHTLGPKKNRALPFVPMSYQLSQTYYR

SEQ ID NO: 34488 - protein, 911 aa, Homo sapiens
  Payload ID: 6810
  Gene Symbol: GTF3C2
  Gene Name: general transcription factor IIIC, polypeptide 2, beta 110kDa
  Uniprot ID: Q8WUA4
  ENSP ID: ENSP00000264720
MDTCGVGYVALGEAGPVGNMTVVDSPGQEVLNQLDVKTSSEMTSAEASVEMSLPTPLPGFEDSPDQRRLPPEQESLSRLEQPDLSSEMSKVSKPRASKPGRKRGGRTRKGPKRPQQPNPPSAPLVPGLLDQSNPLSTPMPKKRGRKSKAELLLLKLSKDLDRPESQSPKRPPEDFETPSGERPRRRAAQVALLYLQELAEELSTALPAPVSCPEGPKVSSPTKPKKIRQPAACPGGEEVDGAPRDEDFFLQVEAEDVEESEGPSESSSEPEPVVPRSTPRGSTSGKQKPHCRGMAPNGLPNHIMAPVWKCLHLTKDFREQKHSYWEFAEWIPLAWKWHLLSELEAAPYLPQEEKSPLFSVQREGLPEDGTLYRINRFSSITAHPERWDVSFFTGGPLWALDWCPVPEGAGASQYVALFSSPDMNETHPLSQLHSGPGLLQLWGLGTLQQESCPGNRAHFVYGIACDNGCIWDLKFCPSGAWELPGTPRKAPLLPRLGLLALACSDGKVLLFSLPHPEALLAQQPPDAVKPAIYKVQCVATLQVGSMQATDPSECGQCLSLAWMPTRPHQHLAAGYYNGMVVFWNLPTNSPLQRIRLSDGSLKLYPFQCFLAHDQAVRTLQWCKANSHFLVSAGSDRKIKFWDLRRPYEPINSIKRFLSTELAWLLPYNGVTVAQDNCYASYGLCGIHYIDAGYLGFKAYFTAPRKGTVWSLSGSDWLGTIAAGDISGELIAAILPDMALNPINVKRPVERRFPIYKADLIPYQDSPEGPDHSSASSGVPNPPKARTYTETVNHHYLLFQDTDLGSFHDLLRREPMLRMQEGEGHSQLCLDRLQLEAIHKVRFSPNLDSYGWLVSGGQSGLVRIHFVRGLASPLGHRMQLESRAHFNAMFQPSSPTRRPGFSPTSHRLLPTP

SEQ ID NO: 34489 - protein, 911 aa, Homo sapiens; identical to SEQ ID NO: 34488
  Payload ID: 6810
  Gene Symbol: GTF3C2
  Gene Name: general transcription factor IIIC, polypeptide 2, beta 110kDa
  Uniprot ID: Q8WUA4
  ENSP ID: ENSP00000352536

SEQ ID NO: 34490 - protein, 134 aa, Homo sapiens
  Payload ID: 6810
  Gene Symbol: GTF3C2
  Gene Name: general transcription factor IIIC, polypeptide 2, beta 110kDa
  ENSP ID: ENSP00000389518
MDTCGVGYVALGEAGPVGNMTVVDSPGQEVLNQLDVKTSSEMTSAEASVEMSLPTPLPGFEDSPDQRRLPPEQESLSRLEQPDLSSEMSKVSKPRASKPGRKRGGRTRKGPKRPQQPNPPSAPLVPGLLDQSNP

SEQ ID NO: 34491 - protein, 420 aa, Homo sapiens
  Payload ID: 6810
  Gene Symbol: GTF3C2
  Gene Name: general transcription factor IIIC, polypeptide 2, beta 110kDa
  ENSP ID: ENSP00000393429
  MOD_RES (1)..(1): Any amino acid
XFAVLQLYSFSTFPFISPFFPLLCSQDFPPLAATDAVKPAIYKVQCVATLQVGSMQATDPSECGQCLSLAWMPTRPHQHLAAGYYNGMVVFWNLPTNSPLQRIRLSDGSLKLYPFQCFLAHDQAVRTLQWCKANSHFLVSAGSDRKIKFWDLRRPYEPINSIKRFLSTELAWLLPYNGVTVAQDNCYASYGLCGIHYIDAGYLGFKAYFTAPRKGTVWSLSGSDWLGTIAAGDISGELIAAILPDMALNPINVKRPVERRFPIYKADLIPYQDSPEGPDHSSASSGVPNPPKARTYTETVNHHYLLFQDTDLGSFHDLLRREPMLRMQEGEGHSQLCLDRLQLEAIHKVRFSPNLDSYGWLVSGGQSGLVRIHFVRGLASPLGHRMQLESRAHFNAMFQPSSPTRRPGFSPTSHRLLPTP

SEQ ID NO: 34492 - protein, 79 aa, Homo sapiens
  Payload ID: 6810
  Gene Symbol: GTF3C2
  Gene Name: general transcription factor IIIC, polypeptide 2, beta 110kDa
  ENSP ID: ENSP00000399339
  MOD_RES (1)..(1): Any amino acid
XYTETVNHHYLLFQDTDLGSFHDLLRREPMLRMQEGEGHSQLCLDRLQLEAIHKTAWLLSNQPSPSAHSLALAHTRSLE

SEQ ID NO: 34493 - protein, 74 aa, Homo sapiens
  Payload ID: 6810
  Gene Symbol: GTF3C2
  Gene Name: general transcription factor IIIC, polypeptide 2, beta 110kDa
  ENSP ID: ENSP00000408174
MDTCGVGYVALGEAGPVGNMTVVDSPGQEVLNQLDVKTSSEMTSAEASVEMSLPTPLPGFEDSPDQRRLPPEQE

SEQ ID NO: 34494 - protein, 142 aa, Homo sapiens
  Payload ID: 6810
  Gene Symbol: GTF3C2
  Gene Name: general transcription factor IIIC, polypeptide 2, beta 110kDa
  ENSP ID: ENSP00000409043
  MOD_RES (1)..(1): Any amino acid
XVWSLSGSDWLGTIAAGDISGELIAAILPDMALNPINVKRPVERRFPIYKADLIPYQDSPEGPDHSSASSGVPNPPKARTYTETVNHHYLLFQDTDLGSFHDLLRREPMLRMQEGEGHSQLCLDRLQLEAIHKGNHHVCPRG

SEQ ID NO: 34495 - protein, 181 aa, Homo sapiens
  Payload ID: 6810
  Gene Symbol: GTF3C2
  Gene Name: general transcription factor IIIC, polypeptide 2, beta 110kDa
  ENSP ID: ENSP00000414422
  MOD_RES (1)..(1): Any amino acid
XSLKLYPFQCFLAHDQAVRTLQWCKANSHFLVSAGSDRKIKFWDLRRPYEPINSIKRFLSTELAWLLPYNGVTVAQDNCYASYGLCGIHYIDAGYLGFKAYFTAPRKGTVWSLSGSDWLGTIAAGDISGELIAAILPDMALNPINVKRPVERRFVRIRTSNSSCWILTHMPSQILLYIKQI

SEQ ID NO: 34496 - protein, 584 aa, Homo sapiens
  Payload ID: 6810
  Gene Symbol: GTF3C2
  Gene Name: general transcription factor IIIC, polypeptide 2, beta 110kDa
  ENSP ID: ENSP00000482584
MDTCGVGYVALGEAGPVGNMTVVDSPGQEVLNQLDVKTSSEMTSAEASVEMSLPTPLPGFEDSPDQRRLPPEQESLSRLEQPDLSSEMSKVSKPRASKPGRKRGGRTRKGPKRPQQPNPPSAPLVPGLLDQSNPLSTPMPKKRGRKSKAELLLLKLSKDLDRPESQSPKRPPEDFETPSGERPRRRAAQVALLYLQELAEELSTALPAPVSCPEGPKVSSPTKPKKIRQPAACPGGEEVDGAPRDEDFFLQVEAEDVEESEGPSESSSEPEPVVPRSTPRGSTSGKQKPHCRGMAPNGLPNHIMAPVWKCLHLTKDFREQKHSYWEFAEWIPLAWKWHLLSELEAAPYLPQEEKSPLFSVQREGLPEDGTLYRINRFSSITAHPERWDVSFFTGGPLWALDWCPVPEGAGASQYVALFSSPDMNETHPLSQLHSGPGLLQLWGLGTLQQESCPGNRAHFVYGIACDNGCIWDLKFCPSGAWELPGTPRKAPLLPRLGLLALACSDGKVLLFSLPHPEALLAQQPPDAVKPAIYKVQCVATLQVGSMQATDPSECGQCLSLAWMPTRPHQHLAAGYYNGKNQNKT

SEQ ID NO: 34497 - protein, 886 aa, Homo sapiens
  Payload ID: 6811
  Gene Symbol: GTF3C3
  Gene Name: general transcription factor IIIC, polypeptide 3, 102kDa
  Uniprot ID: Q9Y5Q9
  ENSP ID: ENSP00000263956
MSGFSPELIDYLEGKISFEEFERRREERKTREKKSLQEKGKLSAEENPDDSEVPSSSGINSTKSQDKDVNEGETSDGVRKSVHKVFASMLGENEDDEEEEEEEEEEEEEEETPEQPTAGDVFVLEMVLNRETKKMMKEKRPRSKLPRALRGLMGEANIRFARGEREEAILMCMEIIRQAPLAYEPFSTLAMIYEDQGDMEKSLQFELIAAHLNPSDTEEWVRLAEMSLEQDNIKQAIFCYTKALKYEPTNVRYLWERSSLYEQMGDHKMAMDGYRRILNLLSPSDGERFMQLARDMAKSYYEANDVTSAINIIDEAFSKHQGLVSMEDVNIAAELYISNKQYDKALEIITDFSGIVLEKKTSEEGTSEENKAPENVTCTIPDGVPIDITVKLMVCLVHLNILEPLNPLLTTLVEQNPEDMGDLYLDVAEAFLDVGEYNSALPLLSALVCSERYNLAVVWLRHAECLKALGYMERAAESYGKVVDLAPLHLDARISLSTLQQQLGQPEKALEALEPMYDPDTLAQDANAAQQELKLLLHRSTLLFSQGKMYGYVDTLLTMLAMLLKVAMNRAQVCLISSSKSGERHLYLIKVSRDKISDSNDQESANCDAKAIFAVLTSVLTKDDWWNLLLKAIYSLCDLSRFQEAELLVDSSLEYYSFYDDRQKRKELEYFGLSAAILDKNFRKAYNYIRIMVMENVNKPQLWNIFNQVTMHSQDVRHHRFCLRLMLKNPENHALCVLNGHNAFVSGSFKHALGQYVQAFRTHPDEPLYSFCIGLTFIHMASQKYVLRRHALIVQGFSFLNRYLSLRGPCQESFYNLGRGLHQLGLIHLAIHYYQKALELPPLVVEGIELDQLDLRRDIAYNLSLIYQSSGNTGMAQTLLYTYCSI

SEQ ID NO: 34498 - protein, 413 aa, Homo sapiens
  Payload ID: 6811
  Gene Symbol: GTF3C3
  Gene Name: general transcription factor IIIC, polypeptide 3, 102kDa
  Uniprot ID: Q9Y5Q9
  ENSP ID: ENSP00000386465
MSGFSPELIDYLEGKISFEEFERRREERKTREKKSLQEKGKLSAEENPDDSEVPSSSGINSTKSQDKDVNEGETSDGVRKSVHKVFASMLGENEDDEEEEEEEEEEEEEEETPEQPTAGDVFVLEMVLNRETKKMMKEKRPRSKLPRALRGLMGEANIRFARGEREEAILMCMEIIRQAPLAYEPFSTLAMIYEDQGDMEKSLQFELIAAHLNPSDTEEWVRLAEMSLEQDNIKQAIFCYTKALKYEPTNVRYLWERSSLYEQMGDHKMAMDGYRRILNLLSPSDGERFMQLARDMAKSYYEANDVTSAINIIDEAFSKHQGLVSMEDVNIAAELYISNKQYDKALEIITDFSGIVLEKKTSEEGTSEENKAPENVTCTIPDGVPIDITVKLMVCLVHLNILEPLNVCNKICT

SEQ ID NO: 34499 - protein, 6 aa, Homo sapiens
  Payload ID: 6811
  Gene Symbol: GTF3C3
  Gene Name: general transcription factor IIIC, polypeptide 3, 102kDa
  ENSP ID: ENSP00000389992
KKVRRC

SEQ ID NO: 34500 - protein, 109 aa, Homo sapiens
  Payload ID: 6811
  Gene Symbol: GTF3C3
  Gene Name: general transcription factor IIIC, polypeptide 3, 102kDa
  ENSP ID: ENSP00000391724
  MOD_RES (1)..(1): Any amino acid
XANAAQQELKLLLHRSTLLFSQGKMYGYVDTLLTMLAMLLKMVLSSCRKTSSGLPLILHYAIFAVLTSVLTKDDWWNLLLKAIYSLCDLSRFQEAELLVDSSLEYYSFY

SEQ ID NO: 34501 - protein, 148 aa, Homo sapiens
  Payload ID: 6811
  Gene Symbol: GTF3C3
  Gene Name: general transcription factor IIIC, polypeptide 3, 102kDa
  ENSP ID: ENSP00000394065
SYGKVVDLAPLHLDARISLSTLQQQLGQPEKALEALEPMYDPDTLAQDANAAQQELKLLLHRSTLLFSQGKMYGYVDTLLTMLAMLLKVAMNRAQVCLISSSKSGERHLYLIKVSRDKISDSNDQESANCDAKGNNFICIMLYKIWLN

SEQ ID NO: 34502 - protein, 161 aa, Homo sapiens
  Payload ID: 6811
  Gene Symbol: GTF3C3
  Gene Name: general transcription factor IIIC, polypeptide 3, 102kDa
  ENSP ID: ENSP00000398385
AFSKHQGLVSMEDVNIAAELYISNKQYDKALEIITDFSGIVLEKKTSEEGTSEENKAPENVTCTIPDGVPIDITVKLMVCLVHLNILEPLNPLLTTLVEQNPEDMGDLYLDVAEAFLDVGEYNSALPLLSALVCSERYNLAVVWLRHAGNTFLWEEEVLII

SEQ ID NO: 34503 - protein, 38 aa, Homo sapiens
  Payload ID: 6811
  Gene Symbol: GTF3C3
  Gene Name: general transcription factor IIIC, polypeptide 3, 102kDa
  ENSP ID: ENSP00000406685
MSGFSPELIDYLEGKISFEEFERRREERKTREKKVRRC

SEQ ID NO: 34504 - protein, 44 aa, Homo sapiens
  Payload ID: 6811
  Gene Symbol: GTF3C3
  Gene Name: general transcription factor IIIC, polypeptide 3, 102kDa
  ENSP ID: ENSP00000438797
  MOD_RES (1)..(1): Any amino acid
XTDPVNMSGFSPELIDYLEGKISFEEFERRREERKTREKKVRRC

SEQ ID NO: 34505 - protein, 822 aa, Homo sapiens
  Payload ID: 6812
  Gene Symbol: GTF3C4
  Gene Name: general transcription factor IIIC, polypeptide 4, 90kDa
  Uniprot ID: Q9UKN8
  ENSP ID: ENSP00000361219
MNTADQARVGPADDGPAPSGEEEGEGGGEAGGKEPAADAAPGPSAAFRLMVTRREPAVKLQYAVSGLEPLAWSEDHRVSVSTARSIAVLELICDVHNPGQDLVIHRTSVPAPLNSCLLKVGSKTEVAECKEKFAASKDPTVSQTFMLDRVFNPEGKALPPMRGFKYTSWSPMGCDANGRCLLAALTMDNRLTIQANLNRLQWVQLVDLTEIYGERLYETSYRLSKNEAPEGNLGDFAEFQRRHSMQTPVRMEWSGICTTQQVKHNNECRDVGSVLLAVLFENGNIAVWQFQLPFVGKESISSCNTIESGITSPSVLFWWEYEHNNRKMSGLIVGSAFGPIKILPVNLKAVKGYFTLRQPVILWKEMDQLPVHSIKCVPLYHPYQKCSCSLVVAARGSYVFWCLLLISKAGLNVHNSHVTGLHSLPIVSMTADKQNGTVYTCSSDGKVRQLIPIFTDVALKFEHQLIKLSDVFGSVRTHGIAVSPCGAYLAIITTEGMINGLHPVNKNYQVQFVTLKTFEEAAAQLLESSVQNLFKQVDLIDLVRWKILKDKHIPQFLQEALEKKIESSGVTYFWRFKLFLLRILYQSMQKTPSEALWKPTHEDSKILLVDSPGMGNADDEQQEEGTSSKQVVKQGLQERSKEGDVEEPTDDSLPTTGDAGGREPMEEKLLEIQGKIEAVEMHLTREHMKRVLGEVYLHTWITENTSIPTRGLCNFLMSDEEYDDRTARVLIGHISKKMNKQTFPEHCSLCKEILPFTDRKQAVCSNGHIWLRCFLTYQSCQSLIYRRCLLHDSIARHPAPEDPDWIKRLLQSPCPFCDSPVF

SEQ ID NO: 34506 - protein, 149 aa, Homo sapiens
  Payload ID: 6812
  Gene Symbol: GTF3C4
  Gene Name: general transcription factor IIIC, polypeptide 4, 90kDa
  ENSP ID: ENSP00000431378
MNTADQARVGPADDGPAPSGEEEGEGGGEAGGKEPAADAAPGPSAAFRLMVTRREPAVKLQYAVSGLEPLAWSEDHRVSVSTARSIAVLELICDVHNPGQDLVIHRTSVPAPLNSCLLKVGSKTEVAECKEKFAASKDPTAFTHCQLSP

SEQ ID NO: 34507 - protein, 457 aa, Homo sapiens
  Payload ID: 6813
  Gene Symbol: GTF3C5
  Gene Name: general transcription factor IIIC, polypeptide 5, 63kDa
  ENSP ID: ENSP00000339530
MAAEAADLGLGAAVPVELRRERRMVCVEYPGVVRDVAKMLPTLGGEEGVSRIYADPTKRLELYFRPKDPYCHPVCANRFSTSSLLLRIRKRTRRQKGVLGTEAHSEVTFDMEILGIISTIYKFQGMSDFQYLAVHTEAGGKHTSMYDKVLMLRPEKEAFFHQELPLYIPPPIFSRLDAPVDYFYRPETQHREGYNNPPISGENLIGLSRARRPHNAIFVNFEDEEVPKHLWIRFGYDPRKNPDAKIYQVLDFRIRCGMKHGYAPSDLPVKAKRSTYNYSLPITVKKTSSQLVTMHDLKQGLGPSGTSGARKPASSKYKLKVSLQTLRDSVYIFREGALPPYRQMFYQLCDLNVEELQKIIHRNDGAENSCTERDGWCLPKTSDELRDTMSLMIRQTIRSKRPALFSSSAKADGGKEQLTYESGEDEEDEEEEEEEEEDFKPSDGSENEMETEILDYV

SEQ ID NO: 34508 - protein, 519 aa, Homo sapiens
  Payload ID: 6813
  Gene Symbol: GTF3C5
  Gene Name: general transcription factor IIIC, polypeptide 5, 63kDa
  Uniprot ID: Q9Y5Q8
  ENSP ID: ENSP00000361169
MAAEAADLGLGAAVPVELRRERRMVCVEYPGVVRDVAKMLPTLGGEEGVSRIYADPTKRLELYFRPKDPYCHPVCANRFSTSSLLLRIRKRTRRQKGVLGTEAHSEVTFDMEILGIISTIYKFQGMSDFQYLAVHTEAGGKHTSMYDKVLMLRPEKEAFFHQELPLYIPPPIFSRLDAPVDYFYRPETQHREGYNNPPISGENLIGLSRARRPHNAIFVNFEDEEVPKQPLEAAAQTWRRVCTNPVDRKVEEELRKLFDIRPIWSRNAVKANISVHPDKLKVLLPFIAYYMITGPWRSLWIRFGYDPRKNPDAKIYQVLDFRIRCGMKHGYAPSDLPVKAKRSTYNYSLPITVKKTSSQLVTMHDLKQGLGPSGTSGARKPASSKYKLKDSVYIFREGALPPYRQMFYQLCDLNVEELQKIIHRNDGAENSCTERDGWCLPKTSDELRDTMSLMIRQTIRSKRPALFSSSAKADGGKEQLTYESGEDEEDEEEEEEEEEDFKPSDGSENEMETEILDYV

SEQ ID NO: 34509 - protein, 345 aa, Homo sapiens
  Payload ID: 6813
  Gene Symbol: GTF3C5
  Gene Name: general transcription factor IIIC, polypeptide 5, 63kDa
  ENSP ID: ENSP00000361171
MWLRCCRLWAARKASPGEGYNNPPISGENLIGLSRARRPHNAIFVNFEDEEVPKQPLEAAAQTWRRVCTNPVDRKVEEELRKLFDIRPIWSRNAVKANISVHPDKLKVLLPFIAYYMITGPWRSLWIRFGYDPRKNPDAKIYQVLDFRIRCGMKHGYAPSDLPVKAKRSTYNYSLPITVKKTSSQLVTMHDLKQGLGPSGTSGARKPASSKYKLKDSVYIFREGALPPYRQMFYQLCDLNVEELQKIIHRNDGAENSCTERDGWCLPKTSDELRDTMSLMIRQTIRSKRPALFSSSAKADGGKEQLTYESGEDEEDEEEEEEEEEDFKPSDGSENEMETEILDYV

SEQ ID NO: 34510 - protein, 526 aa, Homo sapiens
  Payload ID: 6813
  Gene Symbol: GTF3C5
  Gene Name: general transcription factor IIIC, polypeptide 5, 63kDa
  Uniprot ID: Q9Y5Q8
  ENSP ID: ENSP00000361180
MAAEAADLGLGAAVPVELRRERRMVCVEYPGVVRDVAKMLPTLGGEEGVSRIYADPTKRLELYFRPKDPYCHPVCANRFSTSSLLLRIRKRTRRQKGVLGTEAHSEVTFDMEILGIISTIYKFQGMSDFQYLAVHTEAGGKHTSMYDKVLMLRPEKEAFFHQELPLYIPPPIFSRLDAPVDYFYRPETQHREGYNNPPISGENLIGLSRARRPHNAIFVNFEDEEVPKQPLEAAAQTWRRVCTNPVDRKVEEELRKLFDIRPIWSRNAVKANISVHPDKLKVLLPFIAYYMITGPWRSLWIRFGYDPRKNPDAKIYQVLDFRIRCGMKHGYAPSDLPVKAKRSTYNYSLPITVKKTSSQLVTMHDLKQGLGPSGTSGARKPASSKYKLKVSLQTLRDSVYIFREGALPPYRQMFYQLCDLNVEELQKIIHRNDGAENSCTERDGWCLPKTSDELRDTMSLMIRQTIRSKRPALFSSSAKADGGKEQLTYESGEDEEDEEEEEEEEEDFKPSDGSENEMETEILDYV

SEQ ID NO: 34511 - protein, 244 aa, Homo sapiens
  Payload ID: 6813
  Gene Symbol: GTF3C5
  Gene Name: general transcription factor IIIC, polypeptide 5, 63kDa
  ENSP ID: ENSP00000389498
MTRAIYADPTKRLELYFRPKDPYCHPVCANRFSTSSLLLRIRKRTRRQKGVLGTEAHSEVTFDMEILGIISTIYKFQGMSDFQYLAVHTEAGGKHTSMYDKVLMLRPEKEAFFHQELPLYIPPPIFSRLDAPVDYFYRPETQHREGYNNPPISGENLIGLSRARRPHNAIFVNFEDEEVPKQPLEAAAQTWRRVCTNPVDRKVEEELRKLFDIRPIWSRNAVKANISVHPDKLKVLLPFIAYYM

SEQ ID NO: 34512 - protein, 224 aa, Homo sapiens
  Payload ID: 6813
  Gene Symbol: GTF3C5
  Gene Name: general transcription factor IIIC, polypeptide 5, 63kDa
  ENSP ID: ENSP00000393207
MSDFQYLAVHTEAGGKHTSMYDKVLMLRPEKEAFFHQELPLYIPPPIFSRLDAPVDYFYRPETQHREGYNNPPISGENLIGLSRARRPHNAIFVNFEDEEVPKQPLEAAAQTWRRVCTNPVDRKVEEELRKLFDIRPIWSRNAVKANISVHPDKLKVLLPFIAYYMITGPWRSLWIRFGYDPRKNPDAKIYQVLDFRIRCGMKHGYAPSDLPVKAKRSTYNYSL

SEQ ID NO: 34513 - protein, 90 aa, Homo sapiens
  Payload ID: 6813
  Gene Symbol: GTF3C5
  Gene Name: general transcription factor IIIC, polypeptide 5, 63kDa
  ENSP ID: ENSP00000397961
  MOD_RES (1)..(1): Any amino acid
XIRCGMKHGYAPSDLPVKAKRSTYNYSLPITVKKTSSQLVTMHDLKQGLGPSGTSGARKPASSKYKLKVGAPGGQEWRGGLPSWGRAPCG

SEQ ID NO: 34514 - protein, 213 aa, Homo sapiens
  Payload ID: 6814
  Gene Symbol: GTF3C6
  Gene Name: general transcription factor IIIC, polypeptide 6, alpha 35kDa
  Uniprot ID: Q969F1
  ENSP ID: ENSP00000357863
MAAAADERSPEDGEDEEEEEQLVLVELSGIIDSDFLSKCENKCKVLGIDTERPILQVDSCVFAGEYEDTLGTCVIFEENVEHADTEGNNKTVLKYKCHTMKKLSMTRTLLTEKKEGEENIGGVEWLQIKDNDFSYRPNMICNFLHENEDEEVVASAPDKSLELEEEEIQMNDSSNLSCEQEKPMHLEIEDSGPLIDIPSETEGSVFMETQMLP

SEQ ID NO: 34515 - protein, 736 aa, Homo sapiens
  Payload ID: 6815
  Gene Symbol: GPHN
  Gene Name: gephyrin
  Uniprot ID: Q9NQX3
  ENSP ID: ENSP00000312771
MATEGMILTNHDHQIRVGVLTVSDSCFRNLAEDRSGINLKDLVQDPSLLGGTISAYKIVPDEIEEIKETLIDWCDEKELNLILTTGGTGFAPRDVTPEATKEVIEREAPGMALAMLMGSLNVTPLGMLSRPVCGIRGKTLIINLPGSKKGSQECFQFILPALPHAIDLLRDAIVKVKEVHDELEDLPSPPPPLSPPPTTSPHKQTEDKGVQCEEEEEEKKDSGVASTEDSSSSHITAAAIAAKIPDSIISRGVQVLPRDTASLSTTPSESPRAQATSRLSTASCPTPKVQSRCSSKENILRASHSAVDITKVARRHRMSPFPLTSMDKAFITVLEMTPVLGTEIINYRDGMGRVLAQDVYAKDNLPPFPASVKDGYAVRAADGPGDRFIIGESQAGEQPTQTVMPGQVMRVTTGAPIPCGADAVVQVEDTELIRESDDGTEELEVRILVQARPGQDIRPIGHDIKRGECVLAKGTHMGPSEIGLLATVGVTEVEVNKFPVVAVMSTGNELLNPEDDLLPGKIRDSNRSTLLATIQEHGYPTINLGIVGDNPDDLLNALNEGISRADVIITSGGVSMGEKDYLKQVLDIDLHAQIHFGRVFMKPGLPTTFATLDIDGVRKIIFALPGNPVSAVVTCNLFVVPALRKMQGILDPRPTIIKARLSCDVKLDPRPEYHRCILTWHHQEPLPWAQSTGNQMSSRLMSMRSANGLLMLPPKTEQYVELHKGEVVDVMVIGRL

SEQ ID NO: 34516 - protein, 769 aa, Homo sapiens
  Payload ID: 6815
  Gene Symbol: GPHN
  Gene Name: gephyrin
  Uniprot ID: Q9NQX3
  ENSP ID: ENSP00000417901
MATEGMILTNHDHQIRVGVLTVSDSCFRNLAEDRSGINLKDLVQDPSLLGGTISAYKIVPDEIEEIKETLIDWCDEKELNLILTTGGTGFAPRDVTPEATKEVIEREAPGMALAMLMGSLNVTPLGMLSRPVCGIRGKTLIINLPGSKKGSQECFQFILPALPHAIDLLRDAIVKVKEVHDELEDLPSPPPPLSPPPTTSPHKQTEDKGVQCEEEEEEKKDSGVASTEDSSSSHITAAAIAAKKHPFYTSPAVVMAHGEQPIPGLINYSHHSTDERIPDSIISRGVQVLPRDTASLSTTPSESPRAQATSRLSTASCPTPKVQSRCSSKENILRASHSAVDITKVARRHRMSPFPLTSMDKAFITVLEMTPVLGTEIINYRDGMGRVLAQDVYAKDNLPPFPASVKDGYAVRAADGPGDRFIIGESQAGEQPTQTVMPGQVMRVTTGAPIPCGADAVVQVEDTELIRESDDGTEELEVRILVQARPGQDIRPIGHDIKRGECVLAKGTHMGPSEIGLLATVGVTEVEVNKFPVVAVMSTGNELLNPEDDLLPGKIRDSNRSTLLATIQEHGYPTINLGIVGDNPDDLLNALNEGISRADVIITSGGVSMGEKDYLKQVLDIDLHAQIHFGRVFMKPGLPTTFATLDIDGVRKIIFALPGNPVSAVVTCNLFVVPALRKMQGILDPRPTIIKARLSCDVKLDPRPEYHRCILTWHHQEPLPWAQSTGNQMSSRLMSMRSANGLLMLPPKTEQYVELHKGEVVDVMVIGRL

SEQ ID NO: 34517 - protein, 782 aa, Homo sapiens
  Payload ID: 6815
  Gene Symbol: GPHN
  Gene Name: gephyrin
  ENSP ID: ENSP00000438404
MATEGMILTNHDHQIRVGVLTVSDSCFRNLAEDRSGINLKDLVQDPSLLGGTISAYKIVPDEIEEIKETLIDWCDEKELNLILTTGGTGFAPRDVTPEKFPTFPFCGLQKGATKEVIEREAPGMALAMLMGSLNVTPLGMLSRPVCGIRGKTLIINLPGSKKGSQECFQFILPALPHAIDLLRDAIVKVKEVHDELEDLPSPPPPLSPPPTTSPHKQTEDKGVQCEEEEEEKKDSGVASTEDSSSSHITAAAIAAKIPDSIISRGVQVLPRDTASLSTTPSESPRAQATSRLSTASCPTPKQIRRPDESKGVASRVGSLKARLPSCSSTYSVSEVQSRCSSKENILRASHSAVDITKVARRHRMSPFPLTSMDKAFITVLEMTPVLGTEIINYRDGMGRVLAQDVYAKDNLPPFPASVKDGYAVRAADGPGDRFIIGESQAGEQPTQTVMPGQVMRVTTGAPIPCGADAVVQVEDTELIRESDDGTEELEVRILVQARPGQDIRPIGHDIKRGECVLAKGTHMGPSEIGLLATVGVTEVEVNKFPVVAVMSTGNELLNPEDDLLPGKIRDSNRSTLLATIQEHGYPTINLGIVGDNPDDLLNALNEGISRADVIITSGGVSMGEKDYLKQVLDIDLHAQIHFGRVFMKPGLPTTFATLDIDGVRKIIFALPGNPVSAVVTCNLFVVPALRKMQGILDPRPTIIKARLSCDVKLDPRPEYHRCILTWHHQEPLPWAQSTGNQMSSRLMSMRSANGLLMLPPKTEQYVELHKGEVVDVMVIGRL

SEQ ID NO: 34518 - protein, 60 aa, Homo sapiens
  Payload ID: 6815
  Gene Symbol: GPHN
  Gene Name: gephyrin
  ENSP ID: ENSP00000450442
  MOD_RES (1)..(1): Any amino acid
XLLMLPPKTEHAKRRLTGWRLCLASRTIPCRASREVSRPNSLTAQYSWAVTGHLLFEETN

SEQ ID NO: 34519 - protein, 280 aa, Homo sapiens
  Payload ID: 6815
  Gene Symbol: GPHN
  Gene Name: gephyrin
  ENSP ID: ENSP00000450706
ETLIDWCDEKELNLILTTGGTGFAPRDVTPEATKEVIEREAPGMALAMLMGSLNVTPLGMLSRPVCGIRGKTLIINLPGSKKGSQECFQFILPALPHAIDLLRDAIVKVKEVHDELEDLPSPPPPLSPPPTTSPHKQTEDKGVQCEEEEEEKKDSGVASTEDSSSSHITAAAIAAKIPDSIISRGVQVLPRDTASLSTTPSESPRAQATSRLSTASCPTPKQIRRPDESKGVASRVGSLKVQSRCSSKENILRASHSAVDITKVARRHRMSPFPLTSMDK

SEQ ID NO: 34520 - protein, 50 aa, Homo sapiens
  Payload ID: 6815
  Gene Symbol: GPHN
  Gene Name: gephyrin
  ENSP ID: ENSP00000451056
MATEGMILTNHDHQIRVGVLTVSDSCFRNLAEDRSGINLKDLVQDPSLKP

SEQ ID NO: 34521 - protein, 39 aa, Homo sapiens
  Payload ID: 6815
  Gene Symbol: GPHN
  Gene Name: gephyrin
  ENSP ID: ENSP00000451725
MATEGMILTNHDHQIRVGVLTVGMEFHRVSQDGLDLLTL

SEQ ID NO: 34522 - protein, 49 aa, Homo sapiens
  Payload ID: 6815
  Gene Symbol: GPHN
  Gene Name: gephyrin
  ENSP ID: ENSP00000451790
MATEGMILTNHDHQIRVGVLTVSDSCFRNLAEDRSGINLKDLVQDPSLG

SEQ ID NO: 34523 - protein, 49 aa, Homo sapiens; identical to SEQ ID NO: 34522
  Payload ID: 6815
  Gene Symbol: GPHN
  Gene Name: gephyrin
  ENSP ID: ENSP00000451935

SEQ ID NO: 34524 - protein, 201 aa, Homo sapiens
  Payload ID: 6815
  Gene Symbol: GPHN
  Gene Name: gephyrin
  ENSP ID: ENSP00000452009
HMGPSEIGLLATVGVTEVEVNKFPVVAVMSTGNELLNPEDDLLPGKIRDSNRSTLLATIQEHGYPTINLGIVGDNPDDLLNALNEGISRADVIITSGGVSMGEKDYLKQVLDIDLHAQIHFGRVFMKPGLPTTFATLDIDGVRKIIFALPGNPVSAVVTCNLFVVPALRKMQGILDPRPTIIKARVMLSNDQKPKWKPGNS

SEQ ID NO: 34525 - protein, 380 aa, Homo sapiens
  Payload ID: 6815
  Gene Symbol: GPHN
  Gene Name: gephyrin
  ENSP ID: ENSP00000452220
MATEGMILTNHDHQIRVGVLTVSDSCFRNLAEDRSGINLKDLVQDPSLLGGTISAYKIVPDEIEEIKKFPTFPFCGLQKGATKEVIEREAPGMALAMLMGSLNVTPLGMLSRPVCGIRGKTLIINLPGSKKGSQECFQFILPALPHAIDLLRDAIVKVKEVHDELEDLPSPPPPLSPPPTTSPHKQTEDKGVQCEEEEEEKKDSGVASTEDSSSSHITAAAIAAKKHPFYTSPAVVMAHGEQPIPGLINYSHHSTDERIPDSIISRGVQVLPRDTASLSTTPSESPRAQATSRLSTASCPTPKVQSRCSSKENILRASHSAVDITKVARRHRMSPFPLTSMDKAFITVLEMTPVLGTEIINYRGTIIFDHCPFFSSFFSK

SEQ ID NO: 34526 - protein, 300 aa, Homo sapiens [sequence omitted]

SEQ ID NO: 34527 - protein, 300 aa, Homo sapiens [sequence omitted]

SEQ ID NO: 34528 - protein, 246 aa, Homo sapiens
  Payload ID: 6816
  Gene Symbol: GGPS1
  Gene Name: geranylgeranyl diphosphate synthase 1
  Uniprot ID: O95749
  ENSP ID: ENSP00000375728
MLHNASLLIDDIEDNSKLRRGFPVAHSIYGIPSVINSANYVYFLGLEKVLTLDHPDAVKLFTRQLLELHQGQGLDIYWRDNYTCPTEEEYKAMVLQKTGGLFGLAVGLMQLFSDYKEDLKPLLNTLGLFFQIRDDYANLHSKEYSENKSFCEDLTEGKFSFPTIHAIWSRPESTQVQNILRQRTENIDIKKYCVHYLEDVGSFEYTRNTLKELEAKAYKQIDARGGNPELVALVKHLSKMFKEENE

SEQ ID NO: 34529 - protein, 242 aa, Homo sapiens
  Payload ID: 6816
  Gene Symbol: GGPS1
  Gene Name: geranylgeranyl diphosphate synthase 1
  ENSP ID: ENSP00000417772
MEKTQETVQRILLEPYKYLLQLPGKQVRTKLSQAFNHWLKVPEDKLQIIIEVTEMLHNASLLIDDIEDNSKLRRGFPVAHSIYGIPSVINSANYVYFLGLEKVLTLDHPDAVKLFTRQLLELHQGQGLDIYWRDNYTCPTEEEYKAMVLQKTGGLFGLAVGLMQLFSDYKEDLKPLLNTLGLFFQIRDDYANLHSKEYSENKSFCEDLTEGKFSFPTIHAIWSRPESTQVQNILRQRTENID

SEQ ID NO: 34530 - protein, 230 aa, Homo sapiens
  Payload ID: 6816
  Gene Symbol: GGPS1
  Gene Name: geranylgeranyl diphosphate synthase 1
  ENSP ID: ENSP00000417865
MEKTQETVQRILLEPYKYLLQLPGKQVRTKLSQAFNHWLKVPEDKLQIIIEVTEMLHNASLLIDDIEDNSKLRRGFPVAHSIYGIPSVINSANYVYFLGLEKVLTLDHPDAVKLFTRQLLELHQGQGLDIYWRDNYTCPTEEEYKAMVLQKTGGLFGLAVGLMQLFSDYKEDLKPLLNTLGLFFQIRDDYANLHSKEYSENKSFCEDLTEGKFSFPTIHAIWSRPESTQV

SEQ ID NO: 34531 - protein, 300 aa, Homo sapiens [sequence omitted]

SEQ ID NO: 34532 - protein, 326 aa, Homo sapiens
  Payload ID: 6817
  Gene Symbol: GSG1
  Gene Name: germ cell associated 1
  Uniprot ID: Q2KHT4
  ENSP ID: ENSP00000336816
MAKMELSKAFSGQRTLLSAILSMLSLSFSTTSLLSNYWFVGTQKVPKPLCEKGLAAKCFDMPVSLDGDTNTSTQEVVQYNWETGDDRFSFRSFRSGMWLSCEETVEEPGERCRSFIELTPPAKREILWLSLGTQITYIGLQFISFLLLLTDLLLTGNPACGLKLSAFAAVSSVLSGLLGMVAHMMYSQVFQATVNLGPEDWRPHVWNYGWAFYMAWLSFTCCMASAVTTFNTYTRMVLEFKCKHSKSFKENPNCLPHHHQCFPRRLSSAAPTVGPLTSYHQYHNQPIHSVSEGVDFYSELRNKGFQRGASQELKEAVRSSVEEEQC

SEQ ID NO: 34533 - protein, 321 aa, Homo sapiens
  Payload ID: 6817
  Gene Symbol: GSG1
  Gene Name: germ cell associated 1
  ENSP ID: ENSP00000336857
MSDPSQLTQNVCLTQEMELSKAFSGQRTLLSAILSMLSLSFSTTSLLSNYWFVGTQKVPKPLCEKGLAAKCFDMPVSLDGDTNTSTQEVVQYNWETGDDRFSFRSFRSGMWLSCEETVEEPALLHPQSWKQFRALRSSGTAAAKGERCRSFIELTPPAKRGEKGLLEFATLQGPCHPTLRFGGKRLMEKASLPSPPLGLCGKNPMVIPGNADHLHRTSIHQLPPATNRLATHWEPCLWAQTERLCCCFLCPVRSPGDGGPHDVFTSLPSDCQLGSRRLETTCLELWLGLLHGLALLHLLHGVGCHHLQHVHQDGAGVQVQA

SEQ ID NO: 34534 - protein, 285 aa, Homo sapiens
  Payload ID: 6817
  Gene Symbol: GSG1
  Gene Name: germ cell associated 1
  Uniprot ID: Q2KHT4
  ENSP ID: ENSP00000379596
MAKMELSKAFSGQRTLLSAILSMLSLSFSTTSLLSNYWFVGTQKVPKPLCEKGLAAKCFDMPVSLDGDTNTSTQEVVQYNWETGDDRFSFRSFRSGMWLSCEETVEEPGERCRSFIELTPPAKRGEKGLLEFATLQGPCHPTLRFGGKRLMEKASLPSPPLGLCGKNPMVIPGNADHLHRTSIHQLPPATNRLATHWEPCLWAQTERLCCCFLCPVRSPGDGGPHDVFTSLPSDCQLGSRRLETTCLELWLGLLHGLALLHLLHGVGCHHLQHVHQDGAGVQVQA

SEQ ID NO: 34535 - protein, 275 aa, Homo sapiens
  Payload ID: 6817
  Gene Symbol: GSG1
  Gene Name: germ cell associated 1
  Uniprot ID: Q2KHT4
  ENSP ID: ENSP00000398384
MAKMELSKAFSGQRTLLSAILSMLSLSFSTTSLLSNYWFVGTQKVPKPLCEKGLAAKCFDMPVSLDGDTNTSTQEVVQYNWETGDDRFSFRSFRSGMWLSCEETVEEPGERCRSFIELTPPAKRGLLGMVAHMMYSQVFQATVNLGPEDWRPHVWNYGWAFYMAWLSFTCCMASAVTTFNTYTRMVLEFKCKHSKSFKENPNCLPHHHQCFPRRLSSAAPTVGPLTSYHQYHNQPIHSVSEGVDFYSELRNKGFQRGASQELKEAVRSSVEEEQC

SEQ ID NO: 34536 - protein, 339 aa, Homo sapiens
  Payload ID: 6817
  Gene Symbol: GSG1
  Gene Name: germ cell associated 1
  Uniprot ID: Q2KHT4
  ENSP ID: ENSP00000405032
MSDPSQLTQNVCLTQEMELSKAFSGQRTLLSAILSMLSLSFSTTSLLSNYWFVGTQKVPKPLCEKGLAAKCFDMPVSLDGDTNTSTQEVVQYNWETGDDRFSFRSFRSGMWLSCEETVEEPGERCRSFIELTPPAKREILWLSLGTQITYIGLQFISFLLLLTDLLLTGNPACGLKLSAFAAVSSVLSGLLGMVAHMMYSQVFQATVNLGPEDWRPHVWNYGWAFYMAWLSFTCCMASAVTTFNTYTRMVLEFKCKHSKSFKENPNCLPHHHQCFPRRLSSAAPTVGPLTSYHQYHNQPIHSVSEGVDFYSELRNKGFQRGASQELKEAVRSSVEEEQC

SEQ ID NO: 34537 - protein, 220 aa, Homo sapiens
  Payload ID: 6817
  Gene Symbol: GSG1
  Gene Name: germ cell associated 1
  ENSP ID: ENSP00000439676
MSDPSQLTQNVCLTQEMELSKAFSGQRTLLSAILSMLSLSFSTTSLLSNYWFVGTQKVPKPLCEKGLAAKCFDMPVSLDGDTNTSTQEVVQYNWETGDDRFSFRSFRSGMWLSCEETVEEPAKSEMEEELKKCVYLHLYLLLCHLALLHPQSWKQFRALRSSGTAAAKGERCRSFIELTPPAKREILWLSLGTQITYIGLQFISFLLLLTDLLLTGNPAC

SEQ ID NO: 34538 - protein, 211 aa, Homo sapiens
  Payload ID: 6817
  Gene Symbol: GSG1
  Gene Name: germ cell associated 1
  ENSP ID: ENSP00000440684
MAKMELSKAFSGQRTLLSAILSMLSLSFSTTSLLSNYWFVGTQKVPKPLCEKGLAAKCFDMPVSLDGDTNTSTQEVVQYNWETGDDRFSFRSFRSGMWLSCEETVEEPAKSEMEEELKKCVYLHLYLLLCHLALLHPQSWKQFRALRSSGTAAAKGERCRSFIELTPPAKRGEKGLLEFATLQGPCHPTLRFGGKRLMEKASLPSPPLGLC

SEQ ID NO: 34539 - protein, 298 aa, Homo sapiens
  Payload ID: 6817
  Gene Symbol: GSG1
  Gene Name: germ cell associated 1
  Uniprot ID: Q2KHT4
  ENSP ID: ENSP00000441718
MAKMELSKAFSGQRTLLSAILSMLSLSFSTTSLLSNYWFVGTQKVPKPLCEKGLAAKCFDMPVSLDGDTNTSTQEVVQYNWETGDDRFSFRSFRSGMWLSCEETVEEPALLHPQSWKQFRALRSSGTAAAKGERCRSFIELTPPAKRGLLGMVAHMMYSQVFQATVNLGPEDWRPHVWNYGWAFYMAWLSFTCCMASAVTTFNTYTRMVLEFKCKHSKSFKENPNCLPHHHQCFPRRLSSAAPTVGPLTSYHQYHNQPIHSVSEGVDFYSELRNKGFQRGASQELKEAVRSSVEEEQC

SEQ ID NO: 34540 - protein, 236 aa, Homo sapiens
  Payload ID: 6817
  Gene Symbol: GSG1
  Gene Name: germ cell associated 1
  ENSP ID: ENSP00000445884
MSDPSQLTQNVCLTQEMELSKAFSGQRTLLSAILSMLSLSFSTTSLLSNYWFVGTQKVPKPLCEKGLAAKCFDMPVSLDGDTNTSTQEVVQYNWETGDDRFSFRSFRSGMWLSCEETVEEPGERCRSFIELTPPAKRGEKGLLEFATLQGPCHPTLRFGGKRLMEKASLPSPPLGLCGKNPMVIPGNADHLHRTSIHQLPPATNRLATHWEPCLWAQTERLCCCFLCPVRSPGDGG

SEQ ID NO: 34541 - protein, 798 aa, Homo sapiens
  Payload ID: 6818
  Gene Symbol: GSG2
  Gene Name: germ cell associated 2 (haspin)
  Uniprot ID: Q8TF76
  ENSP ID: ENSP00000325290
MAASLPGPGSRLFRTYGAADGRRQRRPGREAAQWFPPQDRRRFFNSSGSSDASIGDPSQSDDPDDPDDPDFPGSPVRRRRRRPGGRVPKDRPSLTVTPKRWKLRARPSLTVTPRRLGLRARPPQKCSTPCGPLRLPPFPSRDSGRLSPDLSVCGQPRDGDELGISASLFSSLASPCPGSPTPRDSVISIGTSACLVAASAVPSGLHLPEVSLDRASLPCSQEEATGGAKDTRMVHQTRASLRSVLFGLMNSGTPEDSEFRADGKNMRESCCKRKLVVGNGPEGPGLSSTGKRRATGQDSCQERGLQEAVRREHQEASVPKGRIVPRGIDRLERTRSSRKSKHQEATETSLLHSHRFKKGQKLGKDSFPTQDLTPLQNVCFWTKTRASFSFHKKKIVTDVSEVCSIYTTATSLSGSLLSECSNRPVMNRTSGAPSSWHSSSMYLLSPLNTLSISNKKASDAEKVYGECSQKGPVPFSHCLPTEKLQRCEKIGEGVFGEVFQTIADHTPVAIKIIAIEGPDLVNGSHQKTFEEILPEIIISKELSLLSGEVCNRTEGFIGLNSVHCVQGSYPPLLLKAWDHYNSTKGSANDRPDFFKDDQLFIVLEFEFGGIDLEQMRTKLSSLATAKSILHQLTASLAVAEASLRFEHRDLHWGNVLLKKTSLKKLHYTLNGKSSTIPSCGLQVSIIDYTLSRLERDGIVVFCDVSMDEDLFTGDGDYQFDIYRLMKKENNNRWGEYHPYSNVLWLHYLTDKMLKQMTFKTKCNTPAMKQIKRKIQEFHRTMLNFSSATDLLCQHSLFK

SEQ ID NO: 34542 - protein, 515 aa, Homo sapiens
  Payload ID: 6819
  Gene Symbol: GMCL1
  Gene Name: germ cell-less, spermatogenesis associated 1
  Uniprot ID: Q96IK5
  ENSP ID: ENSP00000282570
MGSLSSRVLRQPRPALAQQAQGARAGGSARRPDTGDDAAGHGFCYCAGSHKRKRSSGSFCYCHPDSETDEDEEEGDEQQRLLNTPRRKKLKSTSKYIYQTLFLNGENSDIKICALGEEWSLHKIYLCQSGYFSSMFSGSWKESSMNIIELEIPDQNIDVEALQVAFGSLYRDDVLIKPSRVVAILAAACLLQLDGLIQQCGETMKETVNVKTVCGYYTSAGTYGLDSVKKKCLEWLLNNLMTHQNVELFKELSINVMKQLIGSSNLFVMQVEMDIYTALKKWMFLQLVPSWNGSLKQLLTETDVWFSKQRKDFEGMAFLETEQGKPFVSVFRHLRLQYIISDLASARIIEQDAVVPSEWLSSVYKQQWFAMLRAEQDSEVGPQEINKEELEGNSMRCGRKLAKDGEYCWRWTGFNFGFDLLVTYTNRYIIFKRNTLNQPCSGSVSLQPRRSIAFRLRLASFDSSGKLICSRTTGYQILTLEKDQEQVVMNLDSRLLIFPLYICCNFLYISPEKKN

SEQ ID NO: 34543 - protein, 178 aa, Homo sapiens
  Payload ID: 6820
  Gene Symbol: GCSAM
  Gene Name: germinal center-associated, signaling and motility
  Uniprot ID: Q8N6F7
  ENSP ID: ENSP00000309487
MGNSLLRENRRQQNTQEMPWNVRMQSPKQRTSRCWDHHIAEGCFCLPWKKILIFEKRQDSQNENERMSSTPIQDNVDQTYSEELCYTLINHRVLCTRPSGNSAEEYYENVPCKAERPRESLGGTETEYSLLHMPSTDPRHARSPEDEYELLMPHRISSHFLQQPRPLMAPSETQFSHL

SEQ ID NO: 34544 - protein, 47 aa, Homo sapiens
  Payload ID: 6820
  Gene Symbol: GCSAM
  Gene Name: germinal center-associated, signaling and motility
  ENSP ID: ENSP00000417322
MGNSLLRENRRQQNTQEMPWNVRMQSPKQRTSRKTKAFYHERCVQVI

SEQ ID NO: 34545 - protein, 47 aa, Homo sapiens; identical to SEQ ID NO: 34544
  Payload ID: 6820
  Gene Symbol: GCSAM
  Gene Name: germinal center-associated, signaling and motility
  ENSP ID: ENSP00000418558

SEQ ID NO: 34546 - protein, 111 aa, Homo sapiens
  Payload ID: 6820
  Gene Symbol: GCSAM
  Gene Name: germinal center-associated, signaling and motility
  ENSP ID: ENSP00000418849
MPWNVRMQSPKQRTSRCWDHHIAEGCFCLPWKKILIFEKRQDSQNENERMSSTPIQDNVDQTYSEELCYTLINHRVLCTRPSGNSAEEYYENVPCKAERPRESLGGTETEY

SEQ ID NO: 34547 - protein, 180 aa, Homo sapiens
  Payload ID: 6820
  Gene Symbol: GCSAM
  Gene Name: germinal center-associated, signaling and motility
  Uniprot ID: Q8N6F7
  ENSP ID: ENSP00000419485
MGNSLLRENSFRRQQNTQEMPWNVRMQSPKQRTSRCWDHHIAEGCFCLPWKKILIFEKRQDSQNENERMSSTPIQDNVDQTYSEELCYTLINHRVLCTRPSGNSAEEYYENVPCKAERPRESLGGTETEYSLLHMPSTDPRHARSPEDEYELLMPHRISSHFLQQPRPLMAPSETQFSHL

SEQ ID NO: 34548 - protein, 126 aa, Homo sapiens
  Payload ID: 6820
  Gene Symbol: GCSAM
  Gene Name: germinal center-associated, signaling and motility
  ENSP ID: ENSP00000419913
MPWNVRMQSPKQRTSRCWDHHIAEGCFCLPWKKILIFEKRQDSQNENERMSSTPIQDNVDQTYSEELCYTLINHRVLCTRPSGNSAEEYYENVPCKAERPRESLGGTETEYSLLHMPSTDPRHARS

SEQ ID NO: 34549 - protein, 163 aa, Homo sapiens
  Payload ID: 6820
  Gene Symbol: GCSAM
  Gene Name: germinal center-associated, signaling and motility
  Uniprot ID: Q8N6F7
  ENSP ID: ENSP00000420603
MGNSLLRENRRQQNTQEMPWNVRMQSPKQRTSRKKILIFEKRQDSQNENERMSSTPIQDNVDQTYSEELCYTLINHRVLCTRPSGNSAEEYYENVPCKAERPRESLGGTETEYSLLHMPSTDPRHARSPEDEYELLMPHRISSHFLQQPRPLMAPSETQFSHL

SEQ ID NO: 34550 - protein, 135 aa, Homo sapiens
  Payload ID: 6821
  Gene Symbol: GCSAML
  Gene Name: germinal center-associated, signaling and motility-like
  Uniprot ID: Q5JQS6
  ENSP ID: ENSP00000355444
MGNYLLRKLSCLGENQKKPKKGNPDEERKRQEMTTFERKLQDQDKKSQEVSSTSNQENENGSGSEEVCYTVINHIPHQRSSLSSNDDGYENIDSLTRKVRQFRERSETEYALLRTSVSRPCSCTHEHDYEVVFPH

SEQ ID NO: 34551 - protein, 115 aa, Homo sapiens
  Payload ID: 6821
  Gene Symbol: GCSAML
  Gene Name: germinal center-associated, signaling and motility-like
  Uniprot ID: Q5JQS6
  ENSP ID: ENSP00000355445
MGNYLLRKLRQEMTTFERKLQDQDKKSQEVSSTSNQENENGSGSEEVCYTVINHIPHQRSSLSSNDDGYENIDSLTRKVRQFRERSETEYALLRTSVSRPCSCTHEHDYEVVFPH

SEQ ID NO: 34552 - protein, 115 aa, Homo sapiens; identical to SEQ ID NO: 34551
  Payload ID: 6821
  Gene Symbol: GCSAML
  Gene Name: germinal center-associated, signaling and motility-like
  Uniprot ID: Q5JQS6
  ENSP ID: ENSP00000355447

SEQ ID NO: 34553 - protein, 103 aa, Homo sapiens
  Payload ID: 6821
  Gene Symbol: GCSAML
  Gene Name: germinal center-associated, signaling and motility-like
  ENSP ID: ENSP00000432118
MTTFERKLQDQDKKSQEVSSTSNQENENGSGSEEVCYTVINHIPHQRSSLSSNDDGYENIDSLTRKVRQFRERSETEYALLRTSVSRPCSCTHEHDYEVVFPH

SEQ ID NO: 34554 - protein, 74 aa, Homo sapiens
  Payload ID: 6821
  Gene Symbol: GCSAML
  Gene Name: germinal center-associated, signaling and motility-like
  ENSP ID: ENSP00000434084
MTTFERKLQDQDKKSQEVSSTSNQENENGSGSEEVCYTVINHIPHQRSSLSSNDDGYENIDSLTRKVRQFRERS

SEQ ID NO: 34555 - protein, 103 aa, Homo sapiens; identical to SEQ ID NO: 34553
  Payload ID: 6821
  Gene Symbol: GCSAML
  Gene Name: germinal center-associated, signaling and motility-like
  ENSP ID: ENSP00000434526

SEQ ID NO: 34556 - protein, 103 aa, Homo sapiens; identical to SEQ ID NO: 34553
  Payload ID: 6821
  Gene Symbol: GCSAML
  Gene Name: germinal center-associated, signaling and motility-like
  ENSP ID: ENSP00000435110

SEQ ID NO: 34557 - protein, 80 aa, Homo sapiens
  Payload ID: 6821
  Gene Symbol: GCSAML
  Gene Name: germinal center-associated, signaling and motility-like
  ENSP ID: ENSP00000436079
MGNYLLRKLSCLGENQKKPKKGNPDEERKRQEMTTFERKLQDQDKKSQEVSSTSNQENENGSGSEEVCYTVINHIPHQRS

SEQ ID NO: 34558 - protein, 135 aa, Homo sapiens; identical to SEQ ID NO: 34550
  Payload ID: 6821
  Gene Symbol: GCSAML
  Gene Name: germinal center-associated, signaling and motility-like
  Uniprot ID: Q5JQS6
  ENSP ID: ENSP00000446460

SEQ ID NO: 34559 - protein, 103 aa, Homo sapiens; identical to SEQ ID NO: 34553
  Payload ID: 6821
  Gene Symbol: GCSAML
  Gene Name: germinal center-associated, signaling and motility-like
  ENSP ID: ENSP00000485175

SEQ ID NO: 34560 - protein, 530 aa, Homo sapiens
  Payload ID: 6822
  Gene Symbol: GHDC
  Gene Name: GH3 domain containing
  Uniprot ID: Q8N2G8
  ENSP ID: ENSP00000301671
MLLWPLLLLLLLLPTLALLRQQRSQDARLSWLAGLQHRVAWGALVWAATWQRRRLEQSTLHVHQSQQQALRWCLQGAQRPHCSLRRSTDISTFRNHLPLTKASQTQQEDSGEQPLPPTSNQDLGEASLQATLLGLAALNKAYPEVLAQGRTARVTLTSPWPRPLPWPGNTLGQVGTPGTKDPRALLLDALRSPGLRALEAGTAVELLDVFLGLETDGEELAGAIAAGNPGAPLRERAAELREALEQGPRGLALRLWPKLQVVVTLDAGGQAEAVAALGALWCQGLAFFSPAYAASGGVLGLNLQPEQPHGLYLLPPGAPFIELLPVKEGTQEEAASTLLLAEAQQGKEYELVLTDRASLTRCRLGDVVRVVGAYNQCPVVRFICRLDQTLSVRGEDIGEDLFSEALGRAVGQWAGAKLLDHGCVESSILDSSAGSAPHYEVFVALRGLRNLSEENRDKLDHCLQEASPRYKSLRFWGSVGPARVHLVGQGAFRALRAALAACPSSPFPPAMPRVLRHRHLAQCLQERVVS

SEQ ID NO: 34561 - protein, 474 aa, Homo sapiens
  Payload ID: 6822
  Gene Symbol: GHDC
  Gene Name: GH3 domain containing
  Uniprot ID: Q8N2G8
  ENSP ID: ENSP00000399952
MLLWPLLLLLLLLPTLALLRQQRSQDARLSWLAGLQHRVAWGALVWAATWQRRRLEQSTLHVHQSQQQALRWCLQGAQRPHCSLRRSTDISTFRNHLPLTKASQTQQEDSGEQPLPPTSNQDLGEASLQATLLGLAALNKAYPEVLAQGRTARVTLTSPWPRPLPWPGNTLGQVGTPGTKDPRALLLDALRSPGLRALEAGTAVELLDVFLGLETDGEELAGAIAAGNPGAPLRERAAELREALEQGPRGLALRLWPKLQVVVTLDAGGQAEAVAALGALWCQGLAFFSPAYAASGGVLGLNLQPEQPHGLYLLPPGAPFIELLPVKEGTQEEAASTLLLAEAQQGKEYELVLTDRASLTRCRLGDVVRVVGAYNQCPVVRFICRLDQTLSVRGEDIGEDLFSEALGRAVGQWAGAKLLDHGCVESSILEWGRTDRAEDTRLGSCPFTGSMCAHGVYSQIPLRALLPTTRCLWR

SEQ ID NO: 34562 - protein, 474 aa, Homo sapiens; identical to SEQ ID NO: 34561
  Payload ID: 6822
  Gene Symbol: GHDC
  Gene Name: GH3 domain containing
  Uniprot ID: Q8N2G8
  ENSP ID: ENSP00000410945

SEQ ID NO: 34563 - protein, 112 aa, Homo sapiens
  Payload ID: 6822
  Gene Symbol: GHDC
  Gene Name: GH3 domain containing
  ENSP ID: ENSP00000465315
MLLWPLLLLLLLLPTLALLRQQRSQDARLSWLAGLQHRVAWGALVWAATWQRRRLEQSTLHVHQSQQQALRWCLQGAQRPHCSLRRSTGSHQSCLKLLGNWLPEAFLLSLGL

SEQ ID NO: 34564 - protein, 146 aa, Homo sapiens
  Payload ID: 6822
  Gene Symbol: GHDC
  Gene Name: GH3 domain containing
  ENSP ID: ENSP00000465924
MLLWPLLLLLLLLPTLALLRQQRSQDARLSWLAGLQHRVAWGALVWAATWQRRRLEQSTLHVHQSQQQALRWCLQGAQRPHCSLRRSTDISTFRNHLPLTKASQTQQEDSGEQPLPPTSNQDLGEASLQATLLGLAALNKAYPEVL

SEQ ID NO: 34565 - protein, 530 aa, Homo sapiens; identical to SEQ ID NO: 34560
  Payload ID: 6822
  Gene Symbol: GHDC
  Gene Name: GH3 domain containing
  Uniprot ID: Q8N2G8
  ENSP ID: ENSP00000467585

SEQ ID NO: 34566 - protein, 130 aa, Homo sapiens
  Payload ID: 6822
  Gene Symbol: GHDC
  Gene Name: GH3 domain containing
  ENSP ID: ENSP00000467660
MLLWPLLLLLLLLPTLALLRQQRSQDARLSWLAGLQHRVAWGALVWAATWQRRRLEQSTLHVHQSQQQALRWCLQGAQRPHCSLRRSTDISTFRNHLPLTKASQTQQEDSGEQPLPPTSNQDLGEASLQA

SEQ ID NO: 34567 - protein, 479 aa, Homo sapiens
  Payload ID: 6822
  Gene Symbol: GHDC
  Gene Name: GH3 domain containing
  ENSP ID: ENSP00000468790
MLLWPLLLLLLLLPTLALLRQQRSQDARLSWLAGLQHRVAWGALVWAATWQRRRLEQSTLHVHQSQQQALRWCLQGAQRPHCSLRRSTDISTFRNHLPLTKASQTQQEDSGEQPLPPTSNQDLGEASLQATLLGLAALNKAYPEVLAQGRTARVTLTSPWPRPLPWPGNTLGQVGTPGTKDPRALLLDALRSPGLRALEAGTAVELLDVFLGLETDGEELAGAIAAGNPGAPLRERAAELREALEQGPRGLALRLWPKLQVVVTLDAGGQAEAVAALGALWCQGLAFFSPAYAASGGVLGLNLQPEQPHGLYLLPPGAPFIELLPVKEGTQEEAASTLLLAEAQQGKEYELVLTDRASLTRCRLGDVVRVVGAYNQCPVVRFICRLDQTLSVRGEDIGEDLFSEALGRAVGQWAGAKLLDHGCVESSILDSSAGSAPHYEVFVALRGLRNLSEENRDKILASGSALGKREWTPAQPFPH

SEQ ID NO: 34568 - protein, 116 aa, Homo sapiens
  Payload ID: 6823
  Gene Symbol: GHRL
  Gene Name: ghrelin/obestatin prepropeptide
  Uniprot ID: Q9UBU3
  ENSP ID: ENSP00000287656
MPSPGTVCSLLLLGMLWLDLAMAGSSFLSPEHQRVQRKESKKPPAKLQPRALAGWLRPEDGGQAEGAEDELEVRFNAPFDVGIKLSGVQYQQHSQALGKFLQDILWEEAKEAPADK

SEQ ID NO: 34569 - protein, 117 aa, Homo sapiens
  Payload ID: 6823
  Gene Symbol: GHRL
  Gene Name: ghrelin/obestatin prepropeptide
  Uniprot ID: Q9UBU3
  ENSP ID: ENSP00000335074
MPSPGTVCSLLLLGMLWLDLAMAGSSFLSPEHQRVQQRKESKKPPAKLQPRALAGWLRPEDGGQAEGAEDELEVRFNAPFDVGIKLSGVQYQQHSQALGKFLQDILWEEAKEAPADK

SEQ ID NO: 34570 - protein, 104 aa, Homo sapiens
  Payload ID: 6823
  Gene Symbol: GHRL
  Gene Name: ghrelin/obestatin prepropeptide
  Uniprot ID: Q9UBU3
  ENSP ID: ENSP00000388145
MFTCWWSYLRSTLAAVPGEASRVQRKESKKPPAKLQPRALAGWLRPEDGGQAEGAEDELEVRFNAPFDVGIKLSGVQYQQHSQALGKFLQDILWEEAKEAPADK

SEQ ID NO: 34571 - protein, 117 aa, Homo sapiens; identical to SEQ ID NO: 34569
  Payload ID: 6823
  Gene Symbol: GHRL
  Gene Name: ghrelin/obestatin prepropeptide
  Uniprot ID: Q9UBU3
  ENSP ID: ENSP00000391406

SEQ ID NO: 34572 - protein, 40 aa, Homo sapiens
  Payload ID: 6823
  Gene Symbol: GHRL
  Gene Name: ghrelin/obestatin prepropeptide
  ENSP ID: ENSP00000394923
MFTCWWSYLRSTLAAVPGEASRVQRPQPTSDRPQALLTSL

SEQ ID NO: 34573 - protein, 116 aa, Homo sapiens; identical to SEQ ID NO: 34568
  Payload ID: 6823
  Gene Symbol: GHRL
  Gene Name: ghrelin/obestatin prepropeptide
  Uniprot ID: Q9UBU3
  ENSP ID: ENSP00000399922

SEQ ID NO: 34574 - protein, 66 aa, Homo sapiens
  Payload ID: 6823
  Gene Symbol: GHRL
  Gene Name: ghrelin/obestatin prepropeptide
  Uniprot ID: Q9UBU3
  ENSP ID: ENSP00000403725
MFTCWWSYLRSTLAAVPGEASRVQFNAPFDVGIKLSGVQYQQHSQALGKFLQDILWEEAKEAPADK

SEQ ID NO: 34575 - protein, 33 aa, Homo sapiens
  Payload ID: 6823
  Gene Symbol: GHRL
  Gene Name: ghrelin/obestatin prepropeptide
  ENSP ID: ENSP00000405031
MPSPGTVCSLLLLGMLWLDLAMAGSSFLSPEHQ

SEQ ID NO: 34576 - protein, 91 aa, Homo sapiens
  Payload ID: 6823
  Gene Symbol: GHRL
  Gene Name: ghrelin/obestatin prepropeptide
  Uniprot ID: Q9UBU3
  ENSP ID: ENSP00000405464
MPSPGTVCSLLLLGMLWLDLAMAGSSFLSPEHQRVQQRKESKKPPAKLQPRALAGWLRPEDGGQAEGAEDELEVRRPQPTSDRPQALLTSL

SEQ ID NO: 34577 - protein, 117 aa, Homo sapiens; identical to SEQ ID NO: 34569
  Payload ID: 6823
  Gene Symbol: GHRL
  Gene Name: ghrelin/obestatin prepropeptide
  Uniprot ID: Q9UBU3
  ENSP ID: ENSP00000414819

SEQ ID NO: 34578 - protein, 105 aa, Homo sapiens
  Payload ID: 6823
  Gene Symbol: GHRL
  Gene Name: ghrelin/obestatin prepropeptide
  Uniprot ID: Q9UBU3
  ENSP ID: ENSP00000416768
MFTCWWSYLRSTLAAVPGEASRVQQRKESKKPPAKLQPRALAGWLRPEDGGQAEGAEDELEVRFNAPFDVGIKLSGVQYQQHSQALGKFLQDILWEEAKEAPADK

SEQ ID NO: 34579 - protein, 300 aa, Homo sapiens
  Payload ID: 6824
  Gene Symbol: GID4
  Gene Name: GID complex subunit 4 homolog
  Uniprot ID: Q8IVV7
  ENSP ID: ENSP00000268719
MCARGQVGRGTQLRTGRPCSQVPGSRWRPERLLRRQRAGGRPSRPHPARARPGLSLPATLLGSRAAAAVPLPLPPALAPGDPAMPVRTECPPPAGASAASAASLIPPPPINTQQPGVATSLLYSGSKFRGHQKSKGNSYDVEVVLQHVDTGNSYLCGYLKIKGLTEEYPTLTTFFEGEIISKKHPFLTRKWDADEDVDRKHWGKFLAFYQYAKSFNSDDFDYEELKNGDYVFMRWKEQFLVPDHTIKDISGASFAGFYYICFQKSAASIEGYYYHRSSEWYQSLNLTHVPEHSAPIYEFR

SEQ ID NO: 34580 - protein, 309 aa, Homo sapiens
  Payload ID: 6824
  Gene Symbol: GID4
  Gene Name: GID complex subunit 4 homolog
  ENSP ID: ENSP00000365523
MCARGQVGRGTQLRTGRPCSQVPGSRWRPERLLRRQRAGGRPSRPHPARARPGLSLPATLLGSRAAAAVPLPLPPALAPGDPAMPVRTECPPPAGASAASAASLIPPPPINTQQPGVATSLLYSGSKFRGHQKSKGNSYDVEVVLQHVDTGNSYLCGYLKIKGLTEEYPTLTTFFEGEIISKKHPFLTRKWDADEDVDRKHWNIGRYLDLQTLLDWTETFWVREELRRPPLVLACEVWLSQGAEPMECFLLQQFVAAFVVLSISPNFHHSWRTPRFPRGTPGALYCTWVCLRFTMSNTLHLGCHFFIIN

SEQ ID NO: 34581 - protein, 111 aa, Homo sapiens
  Payload ID: 6824
  Gene Symbol: GID4
  Gene Name: GID complex subunit 4 homolog
  ENSP ID: ENSP00000466085
TLTTFFEGEIISKKHPFLTRKWDADEDVDRKHWGKFLAFYQYAKSFNSDDFDYEELKNGDYVFMRWKEQFLVPDHTIKDISGASFAGFYYICFQKSAASIEGYYYHRSSEW

SEQ ID NO: 34582 - protein, 146 aa, Homo sapiens
  Payload ID: 6824
  Gene Symbol: GID4
  Gene Name: GID complex subunit 4 homolog
  ENSP ID: ENSP00000466908
FFEGEIISKKHPFLTRKWDADEDVDRKHWNIGRYLDLQTLLDWTETFWGKFLAFYQYAKSFNSDDFDYEELKNGDYVFMRWKEQFLVPDHTIKDISGASFAGFYYICFQKSAASIEGYYYHRSSEWYQSLNLTHVPEHSAPIYEFR

SEQ ID NO: 34583 - protein, 228 aa, Homo sapiens
  Payload ID: 6825
  Gene Symbol: GID8
  Gene Name: GID complex subunit 8
  Uniprot ID: Q9NWU2
  ENSP ID: ENSP00000266069
MSYAEKPDEITKDEWMEKLNNLHVQRADMNRLIMNYLVTEGFKEAAEKFRMESGIEPSVDLETLDERIKIREMILKGQIQEAIALINSLHPELLDTNRYLYFHLQQQHLIELIRQRETEAALEFAQTQLAEQGEESRECLTEMERTLALLAFDSPEESPFGDLLHTMQRQKVWSEVNQAVLDYENRESTPKLAKLLKLLLWAQNELDQKKVKYPKMTDLSKGVIEEPK

SEQ ID NO: 34584 - protein, 597 aa, Homo sapiens
  Payload ID: 6826
  Gene Symbol: GAN
  Gene Name: gigaxonin
  Uniprot ID: Q9H2C0
  ENSP ID: ENSP00000476795
MAEGSAVSDPQHAARLLRALSSFREESRFCDAHLVLDGEEIPVQKNILAAASPYIRTKLNYNPPKDDGSTYKIELEGISVMVMREILDYIFSGQIRLNEDTIQDVVQAADLLLLTDLKTLCCEFLEGCIAAENCIGIRDFALHYCLHHVHYLATEYLETHFRDVSSTEEFLELSPQKLKEVISLEKLNVGNERYVFEAVIRWIAHDTEIRKVHMKDVMSALWVSGLDSSYLREQMLNEPLVREIVKECSNIPLSQPQQGEAMLANFKPRGYSECIVTVGGEERVSRKPTAAMRCMCPLYDPNRQLWIELAPLSMPRINHGVLSAEGFLFVFGGQDENKQTLSSGEKYDPDANTWTALPPMNEARHNFGIVEIDGMLYILGGEDGEKELISMECYDIYSKTWTKQPDLTMVRKIGCYAAMKKKIYAMGGGSYGKLFESVECYDPRTQQWTAICPLKERRFGAVACGVAMELYVFGGVRSREDAQGSEMVTCKSEFYHDEFKRWIYLNDQNLCIPASSSFVYGAVPIGASIYVIGDLDTGTNYDYVREFKRSTGTWHHTKPLLPSDLRRTGCAALRIANCKLFRLQLQQGLFRIRVHSP

SEQ ID NO: 34585 - protein, 511 aa, Homo sapiens
  Payload ID: 6827
  Gene Symbol: GIMAP1-GIMAP5
  Gene Name: GIMAP1-GIMAP5 readthrough
  ENSP ID: ENSP00000477920
MGGRKMATDEENVYGLEENAQSRQESTRRLILVGRTGAGKSATGNSILGQRRFFSRLGATSVTRACTTGSRRWDKCHVEVVDTPDIFSSQVSKTDPGCEERGHCYLLSAPGPHALLLVTQLGRFTAQDQQAVRQLSHGAFSPSTWLLLNCVCSTSLSPVNSIPAHRRRAGLSLLPLHLPERGPAARASVTATLEDRAQQPFLERMGGFQRGKYGTMAEGRSEDNLSATPPALRIILVGKTGCGKSATGNSILGQPVFESKLRAQSVTRTCQVKTGTWNGRKVLVVDTPSIFESQADTQELYKNIGDCYLLSAPGPHVLLLVIQLGRFTAQDTVAIRKVKEVFGTGAMRHVVILFTHKEDLGGQALDDYVANTDNCSLKDLVRECERRYCAFNNWGSVEEQRQQQAELLAVIERLGREREGSFHSNDLFLDAQLLQRTGAGACQEDYRQYQAKVEWQVEKHKQELRENESNWAYKALLRVKHLMLLHYEIFVFLLLCSILFFIIFLFIFHYI

SEQ ID NO: 34586 - protein, 196 aa, Homo sapiens
  Payload ID: 6828
  Gene Symbol: GINS1
  Gene Name: GINS complex subunit 1 (Psf1 homolog)
  Uniprot ID: Q14691
  ENSP ID: ENSP00000262460
MFCEKAMELIRELHRAPEGQLPAFNEDGLRQVLEEMKALYEQNQSDVNEAKSGGRSDLIPTIKFRHCSLLRNRRCTVAYLYDRLLRIRALRWEYGSVLPNALRFHMAAEEMEWFNNYKRSLATYMRSLGGDEGLDITQDMKPPKSLYIEVRCLKDYGEFEVDDGTSVLLKKNSQHFLPRWKCEQLIRQGVLEHILS

SEQ ID NO: 34587 - protein, 185 aa, Homo sapiens
  Payload ID: 6829
  Gene Symbol: GINS2
  Gene Name: GINS complex subunit 2 (Psf2 homolog)
  Uniprot ID: Q9Y248
  ENSP ID: ENSP00000253462
MDAAEVEFLAEKELVTIIPNFSLDKIYLIGGDLGPFNPGLPVEVPLWLAINLKQRQKCRLLPPEWMDVEKLEKMRDHERKEETFTPMPSPYYMELTKLLLNHASDNIPKADEIRTLVKDMWDTRIAKLRVSADSFVRQQEAHAKLDNLTLMEINTSGTFLTQALNHMYKLRTNLQPLESTQSQDF

SEQ ID NO: 34588 - protein, 51 aa, Homo sapiens
  Payload ID: 6829
  Gene Symbol: GINS2
  Gene Name: GINS complex subunit 2 (Psf2 homolog)
  ENSP ID: ENSP00000469346
MDVEKLEKMRDHERKEETFTPMPSPYYMELTKLLLNHASDNIPKADEIRTL

SEQ ID NO: 34589 - protein, 69 aa, Homo sapiens
  Payload ID: 6829
  Gene Symbol: GINS2
  Gene Name: GINS complex subunit 2 (Psf2 homolog)
  ENSP ID: ENSP00000470984
MDVEKLEKMRDHERKEETFTPMPSPYYMELTKLLLNHASDNIPKADEIRTLVKDMWDTRIAKLRVSADS

SEQ ID NO: 34590 - protein, 216 aa, Homo sapiens
  Payload ID: 6830
  Gene Symbol: GINS3
  Gene Name: GINS complex subunit 3 (Psf3 homolog)
  Uniprot ID: Q9BRX5
  ENSP ID: ENSP00000318196
MSEAYFRVESGALGPEENFLSLDDILMSHEKLPVRTETAMPRLGAFFLERSAGAETDNAVPQGSKLELPLWLAKGLFDNKRRILSVELPKIYQEGWRTVFSADPNVVDLHKMGPHFYGFGSQLLHFDSPENADISQSLLQTFIGRFRRIMDSSQNAYNEDTSALVARLDEMERGLFQTGQKGLNDFQCWEKGQASQITASNLVQNYKKRKFTDMED

SEQ ID NO: 34591 - protein, 138 aa, Homo sapiens
  Payload ID: 6830
  Gene Symbol: GINS3
  Gene Name: GINS complex subunit 3 (Psf3 homolog)
  Uniprot ID: Q9BRX5
  ENSP ID: ENSP00000327449
MSEAYFRVESGALGPEENFLSLDDILMSHEKLPVRTETAMPRLGAFFLERSAGAETDNAVPQTFIGRFRRIMDSSQNAYNEDTSALVARLDEMERGLFQTGQKGLNDFQCWEKGQASQITASNLVQNYKKRKFTDMED

SEQ ID NO: 34592 - protein, 255 aa, Homo sapiens
  Payload ID: 6830
  Gene Symbol: GINS3
  Gene Name: GINS complex subunit 3 (Psf3 homolog)
  Uniprot ID: Q9BRX5
  ENSP ID: ENSP00000401018
MSEAYFRVESGALGPEENFLSLDDILMSHEKLPVRTETAMPRLGAFFLERSAGAETDNAVPQGFALLPRLECSGVIWLTAALTSQAPEILPPQPPMWLVLQGSKLELPLWLAKGLFDNKRRILSVELPKIYQEGWRTVFSADPNVVDLHKMGPHFYGFGSQLLHFDSPENADISQSLLQTFIGRFRRIMDSSQNAYNEDTSALVARLDEMERGLFQTGQKGLNDFQCWEKGQASQITASNLVQNYKKRKFTDMED

SEQ ID NO: 34593 - protein, 223 aa, Homo sapiens
  Payload ID: 6831
  Gene Symbol: GINS4
  Gene Name: GINS complex subunit 4 (Sld5 homolog)
  Uniprot ID: Q9BRT9
  ENSP ID: ENSP00000276533
MTEEVDFLGQDSDGGSEEVVLTPAELIERLEQAWMNEKFAPELLESKPEIVECVMEQLEHMEENLRRAKREDLKVSIHQMEMERIRYVLSSYLRCRLMKIEKFFPHVLEKEKTRPEGEPSSLSPEELAFAREFMANTESYLKNVALKHMPPNLQKVDLFRAVPKPDLDSYVFLRVRERQENILVEPDTDEQRDYVIDLEKGSQHLIRYKTIAPLVASGAVQLI

SEQ ID NO: 34594 - protein, 223 aa, Homo sapiens; identical to SEQ ID NO: 34593
  Payload ID: 6831
  Gene Symbol: GINS4
  Gene Name: GINS complex subunit 4 (Sld5 homolog)
  Uniprot ID: Q9BRT9
  ENSP ID: ENSP00000428754

SEQ ID NO: 34595 - protein, 192 aa, Homo sapiens
  Payload ID: 6831
  Gene Symbol: GINS4
  Gene Name: GINS complex subunit 4 (Sld5 homolog)
  ENSP ID: ENSP00000428901
MTEEVDFLGQDSDGGSEEVVLTPAELIERLEQAWMNEKFAPELLESKPEIVECVMEQLEHMEENLRRAKREDLKVSIHQMEMERIRYVLSSYLRCRLMKIEKFFPHVLEKEKTRPEGEPSSLSPEELAFAREFMANTESYLKNVALKHMPPNLQKVDLFRAVPKPDLDSYVFLRVRERQENILVEPDTDEQR

SEQ ID NO: 34596 - protein, 100 aa, Homo sapiens
  Payload ID: 6831
  Gene Symbol: GINS4
  Gene Name: GINS complex subunit 4 (Sld5 homolog)
  Uniprot ID: Q9BRT9
  ENSP ID: ENSP00000429581
MTEEVDFLGQDSDGGSEEVVLTPAELIERLEQAWMNEKFAPELLESKPEIVECVMEQLEHMEENLRRAKREDLKVSIHQMEMERIRYVLSSYLRCRLMKV

SEQ ID NO: 34597 - protein, 104 aa, Homo sapiens
  Payload ID: 6831
  Gene Symbol: GINS4
  Gene Name: GINS complex subunit 4 (Sld5 homolog)
  ENSP ID: ENSP00000429894
MTEEVDFLGQDSDGGSEEVVLTPAELIERLEQAWMNEKFAPELLESKPEIVECVMEQLEHMEENLRRAKREDLKVSIHQMEMERIRYVLSSYLRCRLMKFPNQI

SEQ ID NO: 34598 - protein, 333 aa, Homo sapiens
  Payload ID: 6832
  Gene Symbol: GIPC1
  Gene Name: GIPC PDZ domain containing family, member 1
  Uniprot ID: O14908
  ENSP ID: ENSP00000340698
MPLGLGRRKKAPPLVENEEAEPGRGGLGVGEPGPLGGGGSGGPQMGLPPPPPALRPRLVFHTQLAHGSPTGRIEGFTNVKELYGKIAEAFRLPTAEVMFCTLNTHKVDMDKLLGGQIGLEDFIFAHVKGQRKEVEVFKSEDALGLTITDNGAGYAFIKRIKEGSVIDHIHLISVGDMIEAINGQSLLGCRHYEVARLLKELPRGRTFTLKLTEPRKAFDMISQRSAGGRPGSGPQLGTGRGTLRLRSRGPATVEDLPSAFEEKAIEKVDDLLESYMGIRDTELAATMVELGKDKRNPDELAEALDERLGDFAFPDEFVFDVWGAIGDAKVGRY

SEQ ID NO: 34599 - protein, 236 aa, Homo sapiens
  Payload ID: 6832
  Gene Symbol: GIPC1
  Gene Name: GIPC PDZ domain containing family, member 1
  Uniprot ID: O14908
  ENSP ID: ENSP00000376748
MFCTLNTHKVDMDKLLGGQIGLEDFIFAHVKGQRKEVEVFKSEDALGLTITDNGAGYAFIKRIKEGSVIDHIHLISVGDMIEAINGQSLLGCRHYEVARLLKELPRGRTFTLKLTEPRKAFDMISQRSAGGRPGSGPQLGTGRGTLRLRSRGPATVEDLPSAFEEKAIEKVDDLLESYMGIRDTELAATMVELGKDKRNPDELAEALDERLGDFAFPDEFVFDVWGAIGDAKVGRY

SEQ ID NO: 34600 - protein, 333 aa, Homo sapiens; identical to SEQ ID NO: 34598
  Payload ID: 6832
  Gene Symbol: GIPC1
  Gene Name: GIPC PDZ domain containing family, member 1
  Uniprot ID: O14908
  ENSP ID: ENSP00000376753

SEQ ID NO: 34601 - protein, 121 aa, Homo sapiens
  Payload ID: 6832
  Gene Symbol: GIPC1
  Gene Name: GIPC PDZ domain containing family, member 1
  ENSP ID: ENSP00000464879
MFCTLNTHKVDMDKLLGGQIGLEDFIFAHVKGQRKEVEVFKSEDALGLTITDNGAGYAFIKRIKEGSVIDHIHLISVGDMIEAINGQSLLGCRHYEVARLLKELPRGRTFTLKLTEPRKAF

SEQ ID NO: 34602 - protein, 62 aa, Homo sapiens
  Payload ID: 6832
  Gene Symbol: GIPC1
  Gene Name: GIPC PDZ domain containing family, member 1
  ENSP ID: ENSP00000465003
MFCTLNTHKVDMDKLLGGQIGLEDFIFAHVKGQRKEVEVFKSEDALGLTITDNGAGYAFIKT

SEQ ID NO: 34603 - protein, 40 aa, Homo sapiens
  Payload ID: 6832
  Gene Symbol: GIPC1
  Gene Name: GIPC PDZ domain containing family, member 1
  ENSP ID: ENSP00000466105
MPLGLGRRKKAPPLVENEEAEPGRGGLGVGEPGPLGGGGS

SEQ ID NO: 34604 - protein, 128 aa, Homo sapiens
  Payload ID: 6832
  Gene Symbol: GIPC1
  Gene Name: GIPC PDZ domain containing family, member 1
  ENSP ID: ENSP00000466312
KRRRTQAAGDSGWDMISQRSAGGRPGSGPQLGTGRGTLRLRSRGPATVEDLPSAFEEKAIEKVDDLLESYMGIRDTELAATMVELGKDKRNPDELAEALDERLGDFAFPDEFVFDVWGAIGDAKVGRY

SEQ ID NO: 34605 - protein, 40 aa, Homo sapiens; identical to SEQ ID NO: 34603
  Payload ID: 6832
  Gene Symbol: GIPC1
  Gene Name: GIPC PDZ domain containing family, member 1
  ENSP ID: ENSP00000466624

SEQ ID NO: 34606 - protein, 333 aa, Homo sapiens; identical to SEQ ID NO: 34598
  Payload ID: 6832
  Gene Symbol: GIPC1
  Gene Name: GIPC PDZ domain containing family, member 1
  Uniprot ID: O14908
  ENSP ID: ENSP00000466747

SEQ ID NO: 34607 - protein, 236 aa, Homo sapiens; identical to SEQ ID NO: 34599
  Payload ID: 6832
  Gene Symbol: GIPC1
  Gene Name: GIPC PDZ domain containing family, member 1
  Uniprot ID: O14908
  ENSP ID: ENSP00000467077

SEQ ID NO: 34608 - protein, 159 aa, Homo sapiens
  Payload ID: 6832
  Gene Symbol: GIPC1
  Gene Name: GIPC PDZ domain containing family, member 1
  ENSP ID: ENSP00000468787
MFCTLNTHKVDMDKLLGGQIGLEDFIFAHVKGQRKEVEVFKSEDALGLTITDNGAGYAFIKRIKEGSVIDHIHLISVGDMIEAINGQSLLGCRHYEVARLLKELPRGRTFTLKLTEPRKAFDMISQRSAGGRPGSGPQLGTGRGTLRLRSRGPATVEDL

SEQ ID NO: 34609 - protein, 315 aa, Homo sapiens
  Payload ID: 6833
  Gene Symbol: GIPC2
  Gene Name: GIPC PDZ domain containing family, member 2
  Uniprot ID: Q8TF65
  ENSP ID: ENSP00000359795
MPLKLRGKKKAKSKETAGLVEGEPTGAGGGSLSASRAPARRLVFHAQLAHGSATGRVEGFSSIQELYAQIAGAFEISPSEILYCTLNTPKIDMERLLGGQLGLEDFIFAHVKGIEKEVNVYKSEDSLGLTITDNGVGYAFIKRIKDGGVIDSVKTICVGDHIESINGENIVGWRHYDVAKKLKELKKEELFTMKLIEPKKAFEIELRSKAGKSSGEKIGCGRATLRLRSKGPATVEEMPSETKAKAIEKIDDVLELYMGIRDIDLATTMFEAGKDKVNPDEFAVALDETLGDFAFPDEFVFDVWGVIGDAKRRGL

SEQ ID NO: 34610 - protein, 312 aa, Homo sapiens
  Payload ID: 6834
  Gene Symbol: GIPC3
  Gene Name: GIPC PDZ domain containing family, member 3
  Uniprot ID: Q8TF64
  ENSP ID: ENSP00000319254
MEGAAAREARGTETPRASAPPPAPSEPPAAPRARPRLVFRTQLAHGSPTGKIEGFTNVRELYAKIAEAFGIAPTEILFCTLNSHKVDMQKLLGGQIGLEDFIFAHVRGETKEVEVTKTEDALGLTITDNGAGYAFIKRIKEGSIINRIEAVCVGDSIEAINDHSIVGCRHYEVAKMLRELPKSQPFTLRLVQPKRAFDMIGQRSRSSKCPVEAKVTSGRETLRLRSGGAATVEEAPSEFEEEASRKVDDLLESYMGIRDPELASTMVETSKKTASAQEFARCLDSVLGEFAFPDEFVVEVWAAIGEAREACG

SEQ ID NO: 34611 - protein, 698 aa, Homo sapiens
  Payload ID: 6835
  Gene Symbol: GLE1
  Gene Name: GLE1 RNA export mediator
  Uniprot ID: Q53GS7
  ENSP ID: ENSP00000308622
MPSEGRCWETLKALRSSDKGRLCYYRDWLLRREDVLEECMSLPKLSSYSGWVVEHVLPHMQENQPLSETSPSSTSASALDQPSFVPKSPDASSAFSPASPATPNGTKGKDESQHTESMVLQSSRGIKVEGCVRMYELVHRMKGTEGLRLWQEEQERKVQALSEMASEQLKRFDEWKELKQHKEFQDLREVMEKSSREALGHQEKLKAEHRHRAKILNLKLREAEQQRVKQAEQERLRKEEGQIRLRALYALQEEMLQLSQQLDASEQHKALLKVDLAAFQTRGNQLCSLISGIIRASSESSYPTAESQAEAERALREMRDLLMNLGQEITRACEDKRRQDEEEAQVKLQEAQMQQGPEAHKEPPAPSQGPGGKQNEDLQVKVQDITMQWYQQLQDASMQCVLTFEGLTNSKDSQAKKIKMDLQKAATIPVSQISTIAGSKLKEIFDKIHSLLSGKPVQSGGRSVSVTLNPQGLDFVQYKLAEKFVKQGEEEVASHHEAAFPIAVVASGIWELHPRVGDLILAHLHKKCPYSVPFYPTFKEGMALEDYQRMLGYQVKDSKVEQQDNFLKRMSGMIRLYAAIIQLRWPYGNRQEIHPHGLNHGWRWLAQILNMEPLSDVTATLLFDFLEVCGNALMKQYQVQFWKMLILIKEDYFPRIEAITSSGQMGSFIRLKQFLEKCLQHKDIPVPKGFLTSSFWRS

SEQ ID NO: 34612 - protein, 659 aa, Homo sapiens
  Payload ID: 6835
  Gene Symbol: GLE1
  Gene Name: GLE1 RNA export mediator
  Uniprot ID: Q53GS7
  ENSP ID: ENSP00000361856
MPSEGRCWETLKALRSSDKGRLCYYRDWLLRREDVLEECMSLPKLSSYSGWVVEHVLPHMQENQPLSETSPSSTSASALDQPSFVPKSPDASSAFSPASPATPNGTKGKDESQHTESMVLQSSRGIKVEGCVRMYELVHRMKGTEGLRLWQEEQERKVQALSEMASEQLKRFDEWKELKQHKEFQDLREVMEKSSREALGHQEKLKAEHRHRAKILNLKLREAEQQRVKQAEQERLRKEEGQIRLRALYALQEEMLQLSQQLDASEQHKALLKVDLAAFQTRGNQLCSLISGIIRASSESSYPTAESQAEAERALREMRDLLMNLGQEITRACEDKRRQDEEEAQVKLQEAQMQQGPEAHKEPPAPSQGPGGKQNEDLQVKVQDITMQWYQQLQDASMQCVLTFEGLTNSKDSQAKKIKMDLQKAATIPVSQISTIAGSKLKEIFDKIHSLLSGKPVQSGGRSVSVTLNPQGLDFVQYKLAEKFVKQGEEEVASHHEAAFPIAVVASGIWELHPRVGDLILAHLHKKCPYSVPFYPTFKEGMALEDYQRMLGYQVKDSKVEQQDNFLKRMSGMIRLYAAIIQLRWPYGNRQEIHPHGLNHGWRWLAQILNMEPLSDVTATLLFDFLEVCGNALMKQYQVQFWKMLILIKEDYFPRYQAC

SEQ ID NO: 34613 - protein, 1106 aa, Homo sapiens
  Payload ID: 6836
  Gene Symbol: GLI1
  Gene Name: GLI family zinc finger 1
  Uniprot ID: P08151
  ENSP ID: ENSP00000228682
MFNSMTPPPISSYGEPCCLRPLPSQGAPSVGTEGLSGPPFCHQANLMSGPHSYGPARETNSCTEGPLFSSPRSAVKLTKKRALSISPLSDASLDLQTVIRTSPSSLVAFINSRCTSPGGSYGHLSIGTMSPSLGFPAQMNHQKGPSPSFGVQPCGPHDSARGGMIPHPQSRGPFPTCQLKSELDMLVGKCREEPLEGDMSSPNSTGIQDPLLGMLDGREDLEREEKREPESVYETDCRWDGCSQEFDSQEQLVHHINSEHIHGERKEFVCHWGGCSRELRPFKAQYMLVVHMRRHTGEKPHKCTFEGCRKSYSRLENLKTHLRSHTGEKPYMCEHEGCSKAFSNASDRAKHQNRTHSNEKPYVCKLPGCTKRYTDPSSLRKHVKTVHGPDAHVTKRHRGDGPLPRAPSISTVEPKREREGGPIREESRLTVPEGAMKPQPSPGAQSSCSSDHSPAGSAANTDSGVEMTGNAGGSTEDLSSLDEGPCIAGTGLSTLRRLENLRLDQLHQLRPIGTRGLKLPSLSHTGTTVSRRVGPPVSLERRSSSSSSISSAYTVSRRSSLASPFPPGSPPENGASSLPGLMPAQHYLLRARYASARGGGTSPTAASSLDRIGGLPMPPWRSRAEYPGYNPNAGVTRRASDPAQAADRPAPARVQRFKSLGCVHTPPTVAGGGQNFDPYLPTSVYSPQPPSITENAAMDARGLQEEPEVGTSMVGSGLNPYMDFPPTDTLGYGGPEGAAAEPYGARGPGSLPLGPGPPTNYGPNPCPQQASYPDPTQETWGEFPSHSGLYPGPKALGGTYSQCPRLEHYGQVQVKPEQGCPVGSDSTGLAPCLNAHPSEGPPHPQPLFSHYPQPSPPQYLQSGPYTQPPPDYLPSEPRPCLDFDSPTHSTGQLKAQLVCNYVQSQQELLWEGGGREDAPAQEPSYQSPKFLGGSQVSPSRAKAPVNTYGPGFGPNLPNHKSGSYPTPSPCHENFVVGANRASHRAAAPPRLLPPLPTCYGPLKVGGTNPSCGHPEVGRLGGGPALYPPPEGQVCNPLDSLDLDNTQLDFVAILDEPQGLSPPPSHDQRGSSGHTPPPSGPPNMAVGNMSVLLRSLPGETEFLNSSA

SEQ ID NO: 34614 - protein, 1065 aa, Homo sapiens
  Payload ID: 6836
  Gene Symbol: GLI1
  Gene Name: GLI family zinc finger 1
  Uniprot ID: P08151
  ENSP ID: ENSP00000434408
MFNSMTPPPISSYGEPCCLRPLPSQGAPSVGTEVKLTKKRALSISPLSDASLDLQTVIRTSPSSLVAFINSRCTSPGGSYGHLSIGTMSPSLGFPAQMNHQKGPSPSFGVQPCGPHDSARGGMIPHPQSRGPFPTCQLKSELDMLVGKCREEPLEGDMSSPNSTGIQDPLLGMLDGREDLEREEKREPESVYETDCRWDGCSQEFDSQEQLVHHINSEHIHGERKEFVCHWGGCSRELRPFKAQYMLVVHMRRHTGEKPHKCTFEGCRKSYSRLENLKTHLRSHTGEKPYMCEHEGCSKAFSNASDRAKHQNRTHSNEKPYVCKLPGCTKRYTDPSSLRKHVKTVHGPDAHVTKRHRGDGPLPRAPSISTVEPKREREGGPIREESRLTVPEGAMKPQPSPGAQSSCSSDHSPAGSAANTDSGVEMTGNAGGSTEDLSSLDEGPCIAGTGLSTLRRLENLRLDQLHQLRPIGTRGLKLPSLSHTGTTVSRRVGPPVSLERRSSSSSSISSAYTVSRRSSLASPFPPGSPPENGASSLPGLMPAQHYLLRARYASARGGGTSPTAASSLDRIGGLPMPPWRSRAEYPGYNPNAGVTRRASDPAQAADRPAPARVQRFKSLGCVHTPPTVAGGGQNFDPYLPTSVYSPQPPSITENAAMDARGLQEEPEVGTSMVGSGLNPYMDFPPTDTLGYGGPEGAAAEPYGARGPGSLPLGPGPPTNYGPNPCPQQASYPDPTQETWGEFPSHSGLYPGPKALGGTYSQCPRLEHYGQVQVKPEQGCPVGSDSTGLAPCLNAHPSEGPPHPQPLFSHYPQPSPPQYLQSGPYTQPPPDYLPSEPRPCLDFDSPTHSTGQLKAQLVCNYVQSQQELLWEGGGREDAPAQEPSYQSPKFLGGSQVSPSRAKAPVNTYGPGFGPNLPNHKSGSYPTPSPCHENFVVGANRASHRAAAPPRLLPPLPTCYGPLKVGGTNPSCGHPEVGRLGGGPALYPPPEGQVCNPLDSLDLDNTQLDFVAILDEPQGLSPPPSHDQRGSSGHTPPPSGPPNMAVGNMSVLLRSLPGETEFLNSSA

SEQ ID NO: 34615 - protein, 129 aa, Homo sapiens
  Payload ID: 6836
  Gene Symbol: GLI1
  Gene Name: GLI family zinc finger 1
  ENSP ID: ENSP00000434421
MFNSMTPPPISSYGEPCCLRPLPSQGAPSVGTEGLSGPPFCHQANLMSGPHSYGPARETNSCTEGPLFSSPRSAVKLTKKRALSISPLSDASLDLQTVIRTSPSSLVAFINSRCTSPGGSYGHLSIGTM

SEQ ID NO: 34616 - protein, 175 aa, Homo sapiens
  Payload ID: 6836
  Gene Symbol: GLI1
  Gene Name: GLI family zinc finger 1
  ENSP ID: ENSP00000436671
MSPSLGFPAQMNHQKGPSPSFGVQPCGPHDSARGGMIPHPQSRGPFPTCQLKSELDMLVGKCREEPLEGDMSSPNSTGIQDPLLGMLDGREDLEREEKREPESVYETDCRWDGCSQEFDSQEQLVHHINSEHIHGERKEFVCHWGGCSRELRPFKAQYMLVVHMRRHTGEKPHKC

SEQ ID NO: 34617 - protein, 978 aa, Homo sapiens
  Payload ID: 6836
  Gene Symbol: GLI1
  Gene Name: GLI family zinc finger 1
  Uniprot ID: P08151
  ENSP ID: ENSP00000437607
MSPSLGFPAQMNHQKGPSPSFGVQPCGPHDSARGGMIPHPQSRGPFPTCQLKSELDMLVGKCREEPLEGDMSSPNSTGIQDPLLGMLDGREDLEREEKREPESVYETDCRWDGCSQEFDSQEQLVHHINSEHIHGERKEFVCHWGGCSRELRPFKAQYMLVVHMRRHTGEKPHKCTFEGCRKSYSRLENLKTHLRSHTGEKPYMCEHEGCSKAFSNASDRAKHQNRTHSNEKPYVCKLPGCTKRYTDPSSLRKHVKTVHGPDAHVTKRHRGDGPLPRAPSISTVEPKREREGGPIREESRLTVPEGAMKPQPSPGAQSSCSSDHSPAGSAANTDSGVEMTGNAGGSTEDLSSLDEGPCIAGTGLSTLRRLENLRLDQLHQLRPIGTRGLKLPSLSHTGTTVSRRVGPPVSLERRSSSSSSISSAYTVSRRSSLASPFPPGSPPENGASSLPGLMPAQHYLLRARYASARGGGTSPTAASSLDRIGGLPMPPWRSRAEYPGYNPNAGVTRRASDPAQAADRPAPARVQRFKSLGCVHTPPTVAGGGQNFDPYLPTSVYSPQPPSITENAAMDARGLQEEPEVGTSMVGSGLNPYMDFPPTDTLGYGGPEGAAAEPYGARGPGSLPLGPGPPTNYGPNPCPQQASYPDPTQETWGEFPSHSGLYPGPKALGGTYSQCPRLEHYGQVQVKPEQGCPVGSDSTGLAPCLNAHPSEGPPHPQPLFSHYPQPSPPQYLQSGPYTQPPPDYLPSEPRPCLDFDSPTHSTGQLKAQLVCNYVQSQQELLWEGGGREDAPAQEPSYQSPKFLGGSQVSPSRAKAPVNTYGPGFGPNLPNHKSGSYPTPSPCHENFVVGANRASHRAAAPPRLLPPLPTCYGPLKVGGTNPSCGHPEVGRLGGGPALYPPPEGQVCNPLDSLDLDNTQLDFVAILDEPQGLSPPPSHDQRGSSGHTPPPSGPPNMAVGNMSVLLRSLPGETEFLNSSA

SEQ ID NO: 34618 - protein, 1065 aa, Homo sapiens; identical to SEQ ID NO: 34614
  Payload ID: 6836
  Gene Symbol: GLI1
  Gene Name: GLI family zinc finger 1
  Uniprot ID: P08151
  ENSP ID: ENSP00000441006

SEQ ID NO: 34619 - protein, 522 aa, Homo sapiens
  Payload ID: 6837
  Gene Symbol: GLI2
  Gene Name: GLI family zinc finger 2
  ENSP ID: ENSP00000312694
MALTSINATPTQLSSSSNCLSDTNQNKQSSESAVSSTVNPVAIHKRSKVKTEPEGLRPASPLALTQGQVLDTAHVGVPFPSPEQLADLKEDLDRDDCKQEAEVVIYETNCHWEDCTKEYDTQEQLVHHINNEHIHGEKKEFVCRWQACTREQKPFKAQYMLVVHMRRHTGEKPHKCTFEGCSKAYSRLENLKTHLRSHTGEKPYVCEHEGCNKAFSNASDRAKHQNRTHSNEKPYICKIPGCTKRYTDPSSLRKHVKTVHGPDAHVTKKQRNDVHLRTPLLKENGDSEAGTEPGGPESTEASSTSQAVEDCLHVRAIKTESSGLCQSSPGAQSSCSSEPSPLGSAPNNDSGVEMPGTGPGSLGDLTALDDTPPGADTSALAAPSAGGLQLRKHMTTMHRFEQLKKEKLKSLKDSCSWAGPTPHTRTPSCLPPGKWLHPGKLQWQWGRRARGAAAEPAAVGAVRERGDHAEPAAGAPRQLHQHGQLGLHREPPLLRHLPLLLQPPLQRGLAPGRRPPAQRELR

SEQ ID NO: 34620 - protein, 67 aa, Homo sapiens
  Payload ID: 6837
  Gene Symbol: GLI2
  Gene Name: GLI family zinc finger 2
  ENSP ID: ENSP00000344473
METSASATASEKQEAKSGILEAAGFPDPGKKASPLVVAAAAAAAVAAQGAQPSPSPTPSTPWPTSRF

SEQ ID NO: 34621 - protein, 1586 aa, Homo sapiens
  Payload ID: 6837
  Gene Symbol: GLI2
  Gene Name: GLI family zinc finger 2
  Uniprot ID: P10070
  ENSP ID: ENSP00000354586
METSASATASEKQEAKSGILEAAGFPDPGKKASPLVVAAAAAAAVAAQGVPQHLLPPFHAPLPIDMRHQEGRYHYEPHSVHGVHGPPALSGSPVISDISLIRLSPHPAGPGESPFNAPHPYVNPHMEHYLRSVHSSPTLSMISAARGLSPADVAQEHLKERGLFGLPAPGTTPSDYYHQMTLVAGHPAPYGDLLMQSGGAASAPHLHDYLNPVDVSRFSSPRVTPRLSRKRALSISPLSDASLDLQRMIRTSPNSLVAYINNSRSSSAASGSYGHLSAGALSPAFTFPHPINPVAYQQILSQQRGLGSAFGHTPPLIQPSPTFLAQQPMALTSINATPTQLSSSSNCLSDTNQNKQSSESAVSSTVNPVAIHKRSKVKTEPEGLRPASPLALTQGQVSGHGSCGCALPLSQEQLADLKEDLDRDDCKQEAEVVIYETNCHWEDCTKEYDTQEQLVHHINNEHIHGEKKEFVCRWQACTREQKPFKAQYMLVVHMRRHTGEKPHKCTFEGCSKAYSRLENLKTHLRSHTGEKPYVCEHEGCNKAFSNASDRAKHQNRTHSNEKPYICKIPGCTKRYTDPSSLRKHVKTVHGPDAHVTKKQRNDVHLRTPLLKENGDSEAGTEPGGPESTEASSTSQAVEDCLHVRAIKTESSGLCQSSPGAQSSCSSEPSPLGSAPNNDSGVEMPGTGPGSLGDLTALDDTPPGADTSALAAPSAGGLQLRKHMTTMHRFEQLKKEKLKSLKDSCSWAGPTPHTRNTKLPPLPGSGSILENFSGSGGGGPAGLLPNPRLSELSASEVTMLSQLQERRDSSTSTVSSAYTVSRRSSGISPYFSSRRSSEASPLGAGRPHNASSADSYDPISTDASRRSSEASQCSGGSGLLNLTPAQQYSLRAKYAAATGGPPPTPLPGLERMSLRTRLALLDAPERTLPAGCPRPLGPRRGSDGPTYGHGHAGAAPAFPHEAPGGGARRASDPVRRPDALSLPRVQRFHSTHNVNPGPLPPCADRRGLRLQSHPSTDGGLARGAYSPRPPSISENVAMEAVAAGVDGAGPEADLGLPEDDLVLPDDVVQYIKAHASGALDEGTGQVYPTESTGFSDNPRLPSPGLHGQRRMVAADSNVGPSAPMLGGCQLGFGAPSSLNKNNMPVQWNEVSSGTVDALASQVKPPPFPQGNLAVVQQKPAFGQYPGYSPQGLQASPGGLDSTQPHLQPRSGAPSQGIPRVNYMQQLRQPVAGSQCPGMTTTMSPHACYGQVHPQLSPSTISGALNQFPQSCSNMPAKPGHLGHPQQTEVAPDPTTMGNRHRELGVPDSALAGVPPPHPVQSYPQQSHHLAASMSQEGYHQVPSLLPARQPGFMEPQTGPMGVATAGFGLVQPRPPLEPSPTGRHRGVRAVQQQLAYARATGHAMAAMPSSQETAEAVPKGAMGNMGSVPPQPPPQDAGGAPDHSMLYYYGQIHMYEQDGGLENLGSCQVMRSQPPQPQACQDSIQPQPLPSPGVNQVSSTVDSQLLEAPQIDFDAIMDDGDHSSLFSGALSPSLLHSLSQNSSRLTTPRNSLTLPSIPAGISNMAVGDMSSMLTSLAEESKFLNMMT

SEQ ID NO: 34622 - protein, 1586 aa, Homo sapiens; identical to SEQ ID NO: 34621
  Payload ID: 6837
  Gene Symbol: GLI2
  Gene Name: GLI family zinc finger 2
  Uniprot ID: P10070
  ENSP ID: ENSP00000390436

SEQ ID NO: 34623 - protein, 67 aa, Homo sapiens; identical to SEQ ID NO: 34620
  Payload ID: 6837
  Gene Symbol: GLI2
  Gene Name: GLI family zinc finger 2
  ENSP ID: ENSP00000397488

SEQ ID NO: 34624 - protein, 82 aa, Homo sapiens
  Payload ID: 6837
  Gene Symbol: GLI2
  Gene Name: GLI family zinc finger 2
  ENSP ID: ENSP00000398992
METSASATASEKQEAKSGILEAAGFPDPGKKASPLVVAAAAAAAVAAQGVPQHLLPPFHAPLPIDMRHQEGRYHYEPHSVHG

SEQ ID NO: 34625 - protein, 67 aa, Homo sapiens; identical to SEQ ID NO: 34620
  Payload ID: 6837
  Gene Symbol: GLI2
  Gene Name: GLI family zinc finger 2
  ENSP ID: ENSP00000400593

SEQ ID NO: 34626 - protein, 56 aa, Homo sapiens
  Payload ID: 6837
  Gene Symbol: GLI2
  Gene Name: GLI family zinc finger 2
  ENSP ID: ENSP00000402383
ASEKQEAKSGILEAAGFPDPGKKASPLVVAAAAAAAVAAQGGPLPSAAALSSLTSP

SEQ ID NO: 34627 - protein, 67 aa, Homo sapiens; identical to SEQ ID NO: 34620
  Payload ID: 6837
  Gene Symbol: GLI2
  Gene Name: GLI family zinc finger 2
  ENSP ID: ENSP00000403715

SEQ ID NO: 34628 - protein, 67 aa, Homo sapiens; identical to SEQ ID NO: 34620
  Payload ID: 6837
  Gene Symbol: GLI2
  Gene Name: GLI family zinc finger 2
  ENSP ID: ENSP00000415773

SEQ ID NO: 34629 - protein, 176 aa, Homo sapiens
  Payload ID: 6837
  Gene Symbol: GLI2
  Gene Name: GLI family zinc finger 2
  ENSP ID: ENSP00000441454
ASEKQEAKSGILEAAGFPDPGKKASPLVVAAAAAAAVAAQGVPQHLLPPFHAPLPIDMRHQEGRYHYEPHSVHGVHGVPFLQPAGDAPPEPQAGAVHLPTLRRQPGPAADDPHLTQLASGLHQQLPKQLGGQRFLRASVSGCPQPSLHLPPPHQPRGLPADSEPAEGSGVSLWTHT

SEQ ID NO: 34630 - protein, 1580 aa, Homo sapiens
  Payload ID: 6838
  Gene Symbol: GLI3
  Gene Name: GLI family zinc finger 3
  Uniprot ID: P10071
  ENSP ID: ENSP00000379258
MEAQSHSSTTTEKKKVENSIVKCSTRTDVSEKAVASSTTSNEDESPGQTYHRERRNAITMQPQNVQGLSKVSEEPSTSSDERASLIKKEIHGSLPHVAEPSVPYRGTVFAMDPRNGYMEPHYHPPHLFPAFHPPVPIDARHHEGRYHYDPSPIPPLHMTSALSSSPTYPDLPFIRISPHRNPTAASESPFSPPHPYINPYMDYIRSLHSSPSLSMISATRGLSPTDAPHAGVSPAEYYHQMALLTGQRSPYADIIPSAATAGTGAIHMEYLHAMDSTRFSSPRLSARPSRKRTLSISPLSDHSFDLQTMIRTSPNSLVTILNNSRSSSSASGSYGHLSASAISPALSFTYSSAPVSLHMHQQILSRQQSLGSAFGHSPPLIHPAPTFPTQRPIPGIPTVLNPVQVSSGPSESSQNKPTSESAVSSTGDPMHNKRSKIKPDEDLPSPGARGQQEQPEGTTLVKEEGDKDESKQEPEVIYETNCHWEGCAREFDTQEQLVHHINNDHIHGEKKEFVCRWLDCSREQKPFKAQYMLVVHMRRHTGEKPHKCTFEGCTKAYSRLENLKTHLRSHTGEKPYVCEHEGCNKAFSNASDRAKHQNRTHSNEKPYVCKIPGCTKRYTDPSSLRKHVKTVHGPEAHVTKKQRGDIHPRPPPPRDSGSHSQSRSPGRPTQGALGEQQDLSNTTSKREECLQVKTVKAEKPMTSQPSPGGQSSCSSQQSPISNYSNSGLELPLTDGGSIGDLSAIDETPIMDSTISTATTALALQARRNPAGTKWMEHVKLERLKQVNGMFPRLNPILPPKAPAVSPLIGNGTQSNNTCSLGGPMTLLPGRSDLSGVDVTMLNMLNRRDSSASTISSAYLSSRRSSGISPCFSSRRSSEASQAEGRPQNVSVADSYDPISTDASRRSSEASQSDGLPSLLSLTPAQQYRLKAKYAAATGGPPPTPLPNMERMSLKTRLALLGDALEPGVALPPVHAPRRCSDGGAHGYGRRHLQPHDAPGHGVRRASDPVRTGSEGLALPRVPRFSSLSSCNPPAMATSAEKRSLVLQNYTRPEGGQSRNFHSSPCPPSITENVTLESLTMDADANLNDEDFLPDDVVQYLNSQNQAGYEQHFPSALPDDSKVPHGPGDFDAPGLPDSHAGQQFHALEQPCPEGSKTDLPIQWNEVSSGSADLSSSKLKCGPRPAVPQTRAFGFCNGMVVHPQNPLRSGPAGGYQTLGENSNPYGGPEHLMLHNSPGSGTSGNAFHEQPCKAPQYGNCLNRQPVAPGALDGACGAGIQASKLKSTPMQGSGGQLNFGLPVAPNESAGSMVNGMQNQDPVGQGYLAHQLLGDSMQHPGAGRPGQQMLGQISATSHINIYQGPESCLPGAHGMGSQPSSLAVVRGYQPCASFGGSRRQAMPRDSLALQSGQLSDTSQTCRVNGIKMEMKGQPHPLCSNLQNYSGQFYDQTVGFSQQDTKAGSFSISDASCLLQGTSAKNSELLSPGANQVTSTVDSLDSHDLEGVQIDFDAIIDDGDHSSLMSGALSPSIIQNLSHSSSRLTTPRASLPFPALSMSTTNMAIGDMSSLLTSLAEESKFLAVMQ

SEQ ID NO: 34631 - protein, 180 aa, Homo sapiens
  Payload ID: 6838
  Gene Symbol: GLI3
  Gene Name: GLI family zinc finger 3
  ENSP ID: ENSP00000406135
MEAQSHSSTTTEKKKVENSIVKCSTRTDVSEKAVASSTTSNEDESPGQTYHRERRNAITMQPQNVQGLSKVSEEPSTSSDERASLIKKEIHGSLPHVAEPSVPYRGTVFAMDPRNGYMEPHYHPPHLFPAFHPPVPIDARHHEGRYHYDPSPIPPLHMTSALSSSPTYPDLPFIRISPHR

SEQ ID NO: 34632 - protein, 96 aa, Homo sapiens
  Payload ID: 6838
  Gene Symbol: GLI3
  Gene Name: GLI family zinc finger 3
  ENSP ID: ENSP00000407963
MEAQSHSSTTTEKKKVENSIVKCSTRTDVSEKAVASSTTSNGNHLEAQARGWTRRIGCIRAVHPCCCTNDSATDPLGWATLKGGSSKECVQTHTFT

SEQ ID NO: 34633 - protein, 76 aa, Homo sapiens
  Payload ID: 6839
  Gene Symbol: GLI4
  Gene Name: GLI family zinc finger 4
  ENSP ID: ENSP00000344727
MAALGDIQESPSVPSPVSLSSPGTPGTQHHEPQLHLHGHQHGSPGSSPKVLSQPSDLDLQDVEEVEIGRDTFWPGE

SEQ ID NO: 34634 - protein, 376 aa, Homo sapiens
  Payload ID: 6839
  Gene Symbol: GLI4
  Gene Name: GLI family zinc finger 4
  Uniprot ID: P10075
  ENSP ID: ENSP00000345024
MAALGDIQESPSVPSPVSLSSPGTPGTQHHEPQLHLHGHQHGSPGSSPKVLSQPSDLDLQDVEEVEIGRDTFWPDSEPKPEQAPRSPGSQAPDEGAGGALRSLLRSLPRRARCSAGFGPESSAERPAGQPPGAVPCAQPRGAWRVTLVQQAAAGPEGAPERAAELGVNFGRSRQGSARGAKPHRCEACGKSFKYNSLLLKHQRIHTGEKPYACHECGKRFRGWSGFIQHHRIHTGEKPYECGQCGRAFSHSSHFTQHLRIHNGEKPYKCGECGQAFSQSSNLVRHQRLHTGEKPYACSQCGKAFIWSSVLIEHQRIHTGEKPYECSDCGKAFRGRSHFFRHLRTHTGEKPFACGACGKAFGQSSQLIQHQRVHYRE

SEQ ID NO: 34635 - protein, 111 aa, Homo sapiens
  Payload ID: 6839
  Gene Symbol: GLI4
  Gene Name: GLI family zinc finger 4
  ENSP ID: ENSP00000427881
MAALGDIQESPSVPSPVSLSSPGTPGTQHHEPQLHLHGHQHGSPGSSPKVLSQPSDLDLQDVEEVEIGRDTFWPDGLPSAWLELCPGPLHLPLEKLPGFPLGDVSDMAGFN

SEQ ID NO: 34636 - protein, 56 aa, Homo sapiens
  Payload ID: 6839
  Gene Symbol: GLI4
  Gene Name: GLI family zinc finger 4
  ENSP ID: ENSP00000429295
MAALGDIQESPSVPSPVSLSSPGTPGTQHHEPQLHLHGHQHALRCSPSRPTWISKT

SEQ ID NO: 34637 - protein, 86 aa, Homo sapiens
  Payload ID: 6839
  Gene Symbol: GLI4
  Gene Name: GLI family zinc finger 4
  ENSP ID: ENSP00000429514
TPGTQHHEPQLHLHGHQHGSPGSSPKVLSQPSDLDLQDVEEVEIGRDTFWPGPGAAPASGLNPARSGRRASRLGPSLAPSRGAPGA

SEQ ID NO: 34638 - protein, 165 aa, Homo sapiens
  Payload ID: 6839
  Gene Symbol: GLI4
  Gene Name: GLI family zinc finger 4
  ENSP ID: ENSP00000430292
MAALGDIQESPSVPSPVSLSSPGTPGTQHHEPQLHLHGHQHGSPGSSPKVLSQPSDLDLQDVEEVEIGRDTFWPVQLLMLPEAVTAAHSHLRQWPHVDSCRPQLDTVNQELLPPLHLPWAGASGSGHHCPPRSTSYPVSPPPPASPRWPPLSLVGAVSRSPAPPP

SEQ ID NO: 34639 - protein, 376 aa, Homo sapiens; identical to SEQ ID NO: 34634
  Payload ID: 6839
  Gene Symbol: GLI4
  Gene Name: GLI family zinc finger 4
  Uniprot ID: P10075
  ENSP ID: ENSP00000430987

SEQ ID NO: 34640 - protein, 266 aa, Homo sapiens
  Payload ID: 6840
  Gene Symbol: GLIPR1
  Gene Name: GLI pathogenesis-related 1
  Uniprot ID: P48060
  ENSP ID: ENSP00000266659
MRVTLATIAWMVSFVSNYSHTANILPDIENEDFIKDCVRIHNKFRSEVKPTASDMLYMTWDPALAQIAKAWASNCQFSHNTRLKPPHKLHPNFTSLGENIWTGSVPIFSVSSAITNWYDEIQDYDFKTRICKKVCGHYTQVVWADSYKVGCAVQFCPKVSGFDALSNGAHFICNYGPGGNYPTWPYKRGATCSACPNNDKCLDNLCVNRQRDQVKRYYSVVYPGWPIYPRNRYTSLFLIVNSVILILSVIITILVQHKYPNLVLLD

SEQ ID NO: 34641 - protein, 238 aa, Homo sapiens
  Payload ID: 6840
  Gene Symbol: GLIPR1
  Gene Name: GLI pathogenesis-related 1
  ENSP ID: ENSP00000391144
MRVTLATIAWMVSFVSNYSHTANILPDIENEDFIKDCVRIHNKFRSEVKPTASDMLYMTWDPALAQIAKAWASNCQFSHNTRLKPPHKLHPNFTSLGENIWTGSVPIFSVSSAITNWYDEIQDYDFKTRICKKVCGHYTQVSQERGRDPNPKRGFLNLARENPGLFGQIVTKLAAQFNFALKFLALTLFPMEHILYATTDQEGITQLGHIREEPPAVPAPIMTSVWTISVLTDSETKS

SEQ ID NO: 34642 - protein, 148 aa, Homo sapiens
  Payload ID: 6840
  Gene Symbol: GLIPR1
  Gene Name: GLI pathogenesis-related 1
  ENSP ID: ENSP00000440595
MRVTLATIAWMVSFVSNYSHTANILPDIENEDFIKDCVRIHNKFRSEVKPTASDMLYMTWDPALAQIAKAWASNCQFSHNTRLKPPHKLHPNFTSLGENIWTGSVPIFSVSSAITNWYDEIQDYDFKTRICKKVCGHYTQRELPNLAI

SEQ ID NO: 34643 - protein, 89 aa, Homo sapiens
  Payload ID: 6840
  Gene Symbol: GLIPR1
  Gene Name: GLI pathogenesis-related 1
  ENSP ID: ENSP00000448008
MTKSRTMTSRLGYAKKSVATTLRLFGQIVTKLAAQFNFALKFLALTLFPMEHILYATTDQEGITQLGHIREEPPAVPAPIMTSVWTISV

SEQ ID NO: 34644 - protein, 233 aa, Homo sapiens
  Payload ID: 6841
  Gene Symbol: GLIPR1L1
  Gene Name: GLI pathogenesis-related 1 like 1
  Uniprot ID: Q6UWM5
  ENSP ID: ENSP00000310770
MALKNKFSCLWILGLCLVATTSSKIPSITDPHFIDNCIEAHNEWRGKVNPPAADMKYMIWDKGLAKMAKAWANQCKFEHNDCLDKSYKCYAAFEYVGENIWLGGIKSFTPRHAITAWYNETQFYDFDSLSCSRVCGHYTQLVWANSFYVGCAVAMCPNLGGASTAIFVCNYGPAGNFANMPPYVRGESCSLCSKEEKCVKNLCKNPFLKPTGRAPQQTAFNPFSLGFLLLRIF

SEQ ID NO: 34645 - protein, 242 aa, Homo sapiens
  Payload ID: 6841
  Gene Symbol: GLIPR1L1
  Gene Name: GLI pathogenesis-related 1 like 1
  Uniprot ID: Q6UWM5
  ENSP ID: ENSP00000367967
MALKNKFSCLWILGLCLVATTSSKIPSITDPHFIDNCIEAHNEWRGKVNPPAADMKYMIWDKGLAKMAKAWANQCKFEHNDCLDKSYKCYAAFEYVGENIWLGGIKSFTPRHAITAWYNETQFYDFDSLSCSRVCGHYTQLVWANSFYVGCAVAMCPNLGGASTAIFVCNYGPAGNFANMPPYVRGESCSLCSKEEKCVKNLCRTPQLIIPNQNPFLKPTGRAPQQTAFNPFSLGFLLLRIF

SEQ ID NO: 34646 - protein, 39 aa, Homo sapiens
  Payload ID: 6841
  Gene Symbol: GLIPR1L1
  Gene Name: GLI pathogenesis-related 1 like 1
  ENSP ID: ENSP00000450311
  MOD_RES (1)..(1): Any amino acid
XLSPQSPKGQLAACSNKMSFLFRAEEGLHNLLYLTKIHF

SEQ ID NO: 34647 - protein, 57 aa, Homo sapiens
  Payload ID: 6841
  Gene Symbol: GLIPR1L1
  Gene Name: GLI pathogenesis-related 1 like 1
  ENSP ID: ENSP00000487263
MSLLKLILLRVPCRATACQKGLTTQTFPLSPQSPKGQLAACSNKMSFLFRAEEKIHF

SEQ ID NO: 34648 - protein, 253 aa, Homo sapiens
  Payload ID: 6842
  Gene Symbol: GLIPR1L2
  Gene Name: GLI pathogenesis-related 1 like 2
  Uniprot ID: Q4G1C9
  ENSP ID: ENSP00000317385
MEAARPFAREWRAQSLPLAVGGVLKLRLCELWLLLLGSSLNARFLPDEEDVDFINEYVNLHNELRGDVIPRGSNLRFMTWDVALSRTARAWGKKCLFTHNIYLQDVQMVHPKFYGIGENMWVGPENEFTASIAIRSWHAEKKMYNFENGSCSGDCSNYIQLVWDHSYKVGCAVTPCSKIGHIIHAAIFICNYAPGGTLTRRPYEPGIFCTRCGRRDKCTDFLCSKIKKINMKKMHNGLDKKNKRLNTSFLWSC

SEQ ID NO: 34649 - protein, 237 aa, Homo sapiens
  Payload ID: 6842
  Gene Symbol: GLIPR1L2
  Gene Name: GLI pathogenesis-related 1 like 2
  Uniprot ID: Q4G1C9
  ENSP ID: ENSP00000367963
MVHPKFYGIGENMWVGPENEFTASIAIRSWHAEKKMYNFENGSCSGDCSNYIQLVWDHSYKVGCAVTPCSKIGHIIHAAIFICNYAPGGTLTRRPYEPGIFCTRCGRRDKCTDFLCSNADRDQATYYRFWYPKWEMPRPVVCDPLCTFILLLRILCFILCVITVLIVQSQFPNILLEQQMIFTPEESEAGNEEEEKEEEKKEKEEMEMEIMEMEEEKEEREEEEEETQKEKMEEEEK

SEQ ID NO: 34650 - protein, 168 aa, Homo sapiens
  Payload ID: 6842
  Gene Symbol: GLIPR1L2
  Gene Name: GLI pathogenesis-related 1 like 2
  Uniprot ID: Q4G1C9
  ENSP ID: ENSP00000447980
MEAARPFAREWRAQSLPLAVGGVLKLRLCELWLLLLGSSLNARFLPDEEDVDFINEYVNLHNELRGDVIPRGSNLRFMTWDVALSRTARAWGKKCLFTHNIYLQDVQMVHPKFYGIGENMWVGPENEFTASIAIRSWHAEKKMYNFENGSCSGDCSNYIQRNTDEKTL

SEQ ID NO: 34651 - protein, 344 aa, Homo sapiens
  Payload ID: 6842
  Gene Symbol: GLIPR1L2
  Gene Name: GLI pathogenesis-related 1 like 2
  Uniprot ID: Q4G1C9
  ENSP ID: ENSP00000448248
MEAARPFAREWRAQSLPLAVGGVLKLRLCELWLLLLGSSLNARFLPDEEDVDFINEYVNLHNELRGDVIPRGSNLRFMTWDVALSRTARAWGKKCLFTHNIYLQDVQMVHPKFYGIGENMWVGPENEFTASIAIRSWHAEKKMYNFENGSCSGDCSNYIQLVWDHSYKVGCAVTPCSKIGHIIHAAIFICNYAPGGTLTRRPYEPGIFCTRCGRRDKCTDFLCSNADRDQATYYRFWYPKWEMPRPVVCDPLCTFILLLRILCFILCVITVLIVQSQFPNILLEQQMIFTPEESEAGNEEEEKEEEKKEKEEMEMEIMEMEEEKEEREEEEEETQKEKMEEEEK

SEQ ID NO: 34652 - protein, 128 aa, Homo sapiens
  Payload ID: 6843
  Gene Symbol: GLIPR2
  Gene Name: GLI pathogenesis-related 2
  ENSP ID: ENSP00000367195
MGKSASKQFHNEVLKAHNEYRQKHGVPPLKLCKNLNREAQQYSEALASTRILKHSPESSRGQCGENLAWASYDQTGHFTAMVWKNTKKMGVGKASASDGSSFVVARYFPAGNVVNEGFFEENVLPPKK

SEQ ID NO: 34653 - protein, 154 aa, Homo sapiens
  Payload ID: 6843
  Gene Symbol: GLIPR2
  Gene Name: GLI pathogenesis-related 2
  Uniprot ID: Q9H4G4
  ENSP ID: ENSP00000367196
MGKSASKQFHNEVLKAHNEYRQKHGVPPLKLCKNLNREAQQYSEALASTRILKHSPESSRGQCGENLAWASYDQTGKEVADRWYSEIKNYNFQQPGFTSGTGHFTAMVWKNTKKMGVGKASASDGSSFVVARYFPAGNVVNEGFFEENVLPPKK

SEQ ID NO: 34654 - protein, 62 aa, Homo sapiens
  Payload ID: 6843
  Gene Symbol: GLIPR2
  Gene Name: GLI pathogenesis-related 2
  ENSP ID: ENSP00000379857
MGKSASKQFHNEVLKAHNEYRQKHGVPPLKLCKNLNREAQQTLHGHGMEEHQEDGRGEGVRK

SEQ ID NO: 34655 - protein, 72 aa, Homo sapiens
  Payload ID: 6843
  Gene Symbol: GLIPR2
  Gene Name: GLI pathogenesis-related 2
  ENSP ID: ENSP00000478768
MVRNPALPDLAVSLVRRKPGHFTAMVWKNTKKMGVGKASASDGSSFVVARYFPAGNVVNEGFFEENVLPPKK

SEQ ID NO: 34656 - protein, 142 aa, Homo sapiens
  Payload ID: 6844
  Gene Symbol: GMFB
  Gene Name: glia maturation factor, beta
  Uniprot ID: P60983
  ENSP ID: ENSP00000350757
MSESLVVCDVAEDLVEKLRKFRFRKETNNAAIIMKIDKDKRLVVLDEELEGISPDELKDELPERQPRFIVYSYKYQHDDGRVSYPLCFIFSSPVGCKPEQQMMYAGSKNKLVQTAELTKVFEIRNTEDLTEEWLREKLGFFH

SEQ ID NO: 34657 - protein, 38 aa, Homo sapiens
  Payload ID: 6844
  Gene Symbol: GMFB
  Gene Name: glia maturation factor, beta
  ENSP ID: ENSP00000451473
MSESLVVCDVAEDLVEKLRKFRFRKETNNAAIIRHFTR

SEQ ID NO: 34658 - protein, 150 aa, Homo sapiens
  Payload ID: 6844
  Gene Symbol: GMFB
  Gene Name: glia maturation factor, beta
  ENSP ID: ENSP00000451920
MNKFVGLSNVDPKSESLVVCDVAEDLVEKLRKFRFRKETNNAAIIMKIDKDKRLVVLDEELEGISPDELKDELPERQPRTFIVYSYKYQHDDGRVSYPLCFIFSSPVGCKPEQQMMYAGSKNKLVQTAELTKVFEIRNTEDLTEEWLREK

SEQ ID NO: 34659 - protein, 38 aa, Homo sapiens; identical to SEQ ID NO: 34657
  Payload ID: 6844
  Gene Symbol: GMFB
  Gene Name: glia maturation factor, beta
  ENSP ID: ENSP00000452410

SEQ ID NO: 34660 - protein, 142 aa, Homo sapiens; identical to SEQ ID NO: 34656
  Payload ID: 6844
  Gene Symbol: GMFB
  Gene Name: glia maturation factor, beta
  Uniprot ID: P60983
  ENSP ID: ENSP00000479543

SEQ ID NO: 34661 - protein, 38 aa, Homo sapiens; identical to SEQ ID NO: 34657
  Payload ID: 6844
  Gene Symbol: GMFB
  Gene Name: glia maturation factor, beta
  ENSP ID: ENSP00000487065

SEQ ID NO: 34662 - protein, 109 aa, Homo sapiens
  Payload ID: 6845
  Gene Symbol: GMFG
  Gene Name: glia maturation factor, gamma
  ENSP ID: ENSP00000253054
MKVDKDRQMVVLEEEFQNISPEELKMELPERQPRFVVYSYKYVHDDGRVSYPLCFIFSSPVGCKPEQQMMYAGSKNRLVQTAELTKVFEIRTTDDLTEAWLQEKLSFFR

SEQ ID NO: 34663 - protein, 73 aa, Homo sapiens
  Payload ID: 6845
  Gene Symbol: GMFG
  Gene Name: glia maturation factor, gamma
  ENSP ID: ENSP00000468894
MSDSLVVCEVDPELTEKLRKFRFRKETDNAAIIMKVDKDRQMVVLEEEFQVFEIRTTDDLTEAWLQEKLSFFR

SEQ ID NO: 34664 - protein, 79 aa, Homo sapiens
  Payload ID: 6845
  Gene Symbol: GMFG
  Gene Name: glia maturation factor, gamma
  ENSP ID: ENSP00000469050
MSDSLVVCEVDPELTEKLRKFRFRKETDNAAIIMKVDKDRQMVVLEEEFQNISPEELKMELPERQPRLQAGTTDDVCRE

SEQ ID NO: 34665 - protein, 59 aa, Homo sapiens
  Payload ID: 6845
  Gene Symbol: GMFG
  Gene Name: glia maturation factor, gamma
  ENSP ID: ENSP00000469485
SDSLVVCEVDPELTEKLRKFRFRKETDNAAIIKHFPRGAQNGVAGETAQVRGLQLQVRA

SEQ ID NO: 34666 - protein, 11 aa, Homo sapiens
  Payload ID: 6845
  Gene Symbol: GMFG
  Gene Name: glia maturation factor, gamma
  ENSP ID: ENSP00000469755
MVRGLQLQVRA

SEQ ID NO: 34667 - protein, 93 aa, Homo sapiens
  Payload ID: 6845
  Gene Symbol: GMFG
  Gene Name: glia maturation factor, gamma
  ENSP ID: ENSP00000469813
MNISPEELKMELPERQPRFVVYSYKYVHDDGRVSYPLCFIFSSPVGCKPEQQMMYAGSKNRLVQTAELTKVFEIRTTDDLTEAWLQEKLSFFR

SEQ ID NO: 34668 - protein, 138 aa, Homo sapiens
  Payload ID: 6845
  Gene Symbol: GMFG
  Gene Name: glia maturation factor, gamma
  ENSP ID: ENSP00000469877
MSDSLVVCEVDPELTEKLRKFRFRKETDNAAIIMKVDKDRQMVVLEEEFQNISPEELKMELPERQPRFVVYSYKYVHDDGRVSYPLCFIFSSPVGCKPEQQMMYAGSKNRLVQTAELTKVQTGMGLQSVRERWCGSWV

SEQ ID NO: 34669 - protein, 109 aa, Homo sapiens; identical to SEQ ID NO: 34662
  Payload ID: 6845
  Gene Symbol: GMFG
  Gene Name: glia maturation factor, gamma
  ENSP ID: ENSP00000471139

SEQ ID NO: 34670 - protein, 101 aa, Homo sapiens
  Payload ID: 6845
  Gene Symbol: GMFG
  Gene Name: glia maturation factor, gamma
  ENSP ID: ENSP00000471786
MVVLEEEFQNISPEELKMELPERQPRFVVYSYKYVHDDGRVSYPLCFIFSSPVGCKPEQQMMYAGSKNRLVQTAELTKVFEIRTTDDLTEAWLQEKLSFFR

SEQ ID NO: 34671 - protein, 142 aa, Homo sapiens
  Payload ID: 6845
  Gene Symbol: GMFG
  Gene Name: glia maturation factor, gamma
  Uniprot ID: O60234
  ENSP ID: ENSP00000472249
MSDSLVVCEVDPELTEKLRKFRFRKETDNAAIIMKVDKDRQMVVLEEEFQNISPEELKMELPERQPRFVVYSYKYVHDDGRVSYPLCFIFSSPVGCKPEQQMMYAGSKNRLVQTAELTKVFEIRTTDDLTEAWLQEKLSFFR

SEQ ID NO: 34672 - protein, 60 aa, Homo sapiens
  Payload ID: 6845
  Gene Symbol: GMFG
  Gene Name: glia maturation factor, gamma
  ENSP ID: ENSP00000472707
MSDSLVVCEVDPELTEKLRKFRFRKETDNAAIIKHFPRGAQNGVAGETAQVRGLQLQVRA

SEQ ID NO: 34673 - protein, 211 aa, Homo sapiens
  Payload ID: 6846
  Gene Symbol: GDNF
  Gene Name: glial cell derived neurotrophic factor
  Uniprot ID: P39905
  ENSP ID: ENSP00000317145
MKLWDVVAVCLVLLHTASAFPLPAGKRPPEAPAEDRSLGRRRAPFALSSDSNMPEDYPDQFDDVMDFIQATIKRLKRSPDKQMAVLPRRERNRQAAAANPENSRGKGRRGQRGKNRGCVLTAIHLNVTDLGLGYETKEELIFRYCSGSCDAAETTYDKILKNLSRNRRLVSDKVGQACCRPIAFDDDLSFLDDNLVYHILRKHSAKRCGCI

SEQ ID NO: 34674 - protein, 185 aa, Homo sapiens
  Payload ID: 6846
  Gene Symbol: GDNF
  Gene Name: glial cell derived neurotrophic factor
  Uniprot ID: P39905
  ENSP ID: ENSP00000339703
MKLWDVVAVCLVLLHTASAFPLPAANMPEDYPDQFDDVMDFIQATIKRLKRSPDKQMAVLPRRERNRQAAAANPENSRGKGRRGQRGKNRGCVLTAIHLNVTDLGLGYETKEELIFRYCSGSCDAAETTYDKILKNLSRNRRLVSDKVGQACCRPIAFDDDLSFLDDNLVYHILRKHSAKRCGCI

SEQ ID NO: 34675 - protein, 202 aa, Homo sapiens
  Payload ID: 6846
  Gene Symbol: GDNF
  Gene Name: glial cell derived neurotrophic factor
  Uniprot ID: P39905
  ENSP ID: ENSP00000371248
MQSLPNSNGAAAGRDFKMKLWDVVAVCLVLLHTASAFPLPAANMPEDYPDQFDDVMDFIQATIKRLKRSPDKQMAVLPRRERNRQAAAANPENSRGKGRRGQRGKNRGCVLTAIHLNVTDLGLGYETKEELIFRYCSGSCDAAETTYDKILKNLSRNRRLVSDKVGQACCRPIAFDDDLSFLDDNLVYHILRKHSAKRCGCI

SEQ ID NO: 34676 - protein, 228 aa, Homo sapiens
  Payload ID: 6846
  Gene Symbol: GDNF
  Gene Name: glial cell derived neurotrophic factor
  Uniprot ID: P39905
  ENSP ID: ENSP00000409007
MQSLPNSNGAAAGRDFKMKLWDVVAVCLVLLHTASAFPLPAGKRPPEAPAEDRSLGRRRAPFALSSDSNMPEDYPDQFDDVMDFIQATIKRLKRSPDKQMAVLPRRERNRQAAAANPENSRGKGRRGQRGKNRGCVLTAIHLNVTDLGLGYETKEELIFRYCSGSCDAAETTYDKILKNLSRNRRLVSDKVGQACCRPIAFDDDLSFLDDNLVYHILRKHSAKRCGCI

SEQ ID NO: 34677 - protein, 61 aa, Homo sapiens
  Payload ID: 6846
  Gene Symbol: GDNF
  Gene Name: glial cell derived neurotrophic factor
  ENSP ID: ENSP00000423557
MKLWDVVAVCLVLLHTASAFPLPAANMPEDYPDQFDDVMDFIQATIKRLKRSPDKQMAVLP

SEQ ID NO: 34678 - protein, 61 aa, Homo sapiens; identical to SEQ ID NO: 34677
  Payload ID: 6846
  Gene Symbol: GDNF
  Gene Name: glial cell derived neurotrophic factor
  ENSP ID: ENSP00000424592

SEQ ID NO: 34679 - protein, 185 aa, Homo sapiens; identical to SEQ ID NO: 34674
  Payload ID: 6846
  Gene Symbol: GDNF
  Gene Name: glial cell derived neurotrophic factor
  Uniprot ID: P39905
  ENSP ID: ENSP00000425928

SEQ ID NO: 34680 - protein, 159 aa, Homo sapiens
  Payload ID: 6846
  Gene Symbol: GDNF
  Gene Name: glial cell derived neurotrophic factor
  Uniprot ID: P39905
  ENSP ID: ENSP00000478722
MPEDYPDQFDDVMDFIQATIKRLKRSPDKQMAVLPRRERNRQAAAANPENSRGKGRRGQRGKNRGCVLTAIHLNVTDLGLGYETKEELIFRYCSGSCDAAETTYDKILKNLSRNRRLVSDKVGQACCRPIAFDDDLSFLDDNLVYHILRKHSAKRCGCI

SEQ ID NO: 34681 - protein, 436 aa, Homo sapiens
  Payload ID: 6847
  Gene Symbol: GCM1
  Gene Name: glial cells missing homolog 1 (Drosophila)
  Uniprot ID: Q9NP62
  ENSP ID: ENSP00000259803
MEPDDFDSEDKEILSWDINDVKLPQNVKKTDWFQEWPDSYAKHIYSSEDKNAQRHLSSWAMRNTNNHNSRILKKSCLGVVVCGRDCLAEEGRKIYLRPAICDKARQKQQRKRCPNCDGPLKLIPCRGHGGFPVTNFWRHDGRFIFFQSKGEHDHPKPETKLEAEARRAMKKVNTAPSSVSLSLKGSTETRSLPGETQSQGSLPLTWSFQEGVQLPGSYSGHLIANTPQQNSLNDCFSFSKSYGLGGITDLTDQTSTVDPMKLYEKRKLSSSRTYSSGDLLPPSASGVYSDHGDLQAWSKNAALGRNHLADNCYSNYPFPLTSWPCSFSPSQNSSEPFYQQLPLEPPAAKTGCPPLWPNPAGNLYEEKVHVDFNSYVQSPAYHSPQEDPFLFTYASHPHQQYSLPSKSSKWDFEEEMTYLGLDHCNNDMLLNLCPLR

SEQ ID NO: 34682 - protein, 506 aa, Homo sapiens
  Payload ID: 6848
  Gene Symbol: GCM2
  Gene Name: glial cells missing homolog 2 (Drosophila)
  Uniprot ID: O75603
  ENSP ID: ENSP00000368805
MPAAAVQEAVGVCSYGMQLSWDINDPQMPQELALFDQFREWPDGYVRFIYSSDEKKAQRHLSGWAMRNTNNHNGHILKKSCLGVVVCTQACTLPDGSRLQLRPAICDKARLKQQKKACPNCHSALELIPCRGHSGYPVTNFWRLDGNAIFFQAKGVHDHPRPESKSETEARRSAIKRQMASFYQPQKKRIRESEAEENQDSSGHFSNIPPLENPEDFDIVTETSFPIPGQPCPSFPKSDVYKATCDLATFQGDKMPPFQKYSSPRIYLPRPPCSYELANPGYTNSSPYPTLYKDSTSIPNDTDWVHLNTLQCNVNSYSSYERSFDFTNKQHGWKPALGKPSLVERTNHGQFQAMATRPYYNPELPCRYLTTPPPGAPALQTVITTTTKVSYQAYQPPAMKYSDSVREVKSLSSCNYAPEDTGMSVYPEPWGPPVTVTRAASPSGPPPMKIAGDCRAIRPTVAIPHEPVSSRTDEAETWDVCLSGLGSAVSYSDRVGPFFTYNNEDF

SEQ ID NO: 34683 - protein, 432 aa, Homo sapiens
  Payload ID: 6849
  Gene Symbol: GFAP
  Gene Name: glial fibrillary acidic protein
  Uniprot ID: P14136
  ENSP ID: ENSP00000253408
MERRRITSAARRSYVSSGEMMVGGLAPGRRLGPGTRLSLARMPPPLPTRVDFSLAGALNAGFKETRASERAEMMELNDRFASYIEKVRFLEQQNKALAAELNQLRAKEPTKLADVYQAELRELRLRLDQLTANSARLEVERDNLAQDLATVRQKLQDETNLRLEAENNLAAYRQEADEATLARLDLERKIESLEEEIRFLRKIHEEEVRELQEQLARQQVHVELDVAKPDLTAALKEIRTQYEAMASSNMHEAEEWYRSKFADLTDAAARNAELLRQAKHEANDYRRQLQSLTCDLESLRGTNESLERQMREQEERHVREAASYQEALARLEEEGQSLKDEMARHLQEYQDLLNVKLALDIEIATYRKLLEGEENRITIPVQTFSNLQIRETSLDTKSVSEGHLKRNIVVKTVEMRDGEVIKESKQEHKDVM

SEQ ID NO: 34684 - protein, 179 aa, Homo sapiens
  Payload ID: 6849
  Gene Symbol: GFAP
  Gene Name: glial fibrillary acidic protein
  ENSP ID: ENSP00000366189
MERRRITSAARRSYVSSGEMMVGGLAPGRRLGPGTRLSLARMPPPLPTRVDFSLAGALNAGFKETRASERAEMMELNDRFASYIEKVRFLEQQNKALAAELNQLRAKEPTKLADVYQAELRELRLRLDQLTANSARLEVERDNLAQDLATVRQKKQMKPPWPVWIWRGRLSRWRRRSGS

SEQ ID NO: 34685 - protein, 431 aa, Homo sapiens
  Payload ID: 6849
  Gene Symbol: GFAP
  Gene Name: glial fibrillary acidic protein
  Uniprot ID: P14136
  ENSP ID: ENSP00000403962
MERRRITSAARRSYVSSGEMMVGGLAPGRRLGPGTRLSLARMPPPLPTRVDFSLAGALNAGFKETRASERAEMMELNDRFASYIEKVRFLEQQNKALAAELNQLRAKEPTKLADVYQAELRELRLRLDQLTANSARLEVERDNLAQDLATVRQKLQDETNLRLEAENNLAAYRQEADEATLARLDLERKIESLEEEIRFLRKIHEEEVRELQEQLARQQVHVELDVAKPDLTAALKEIRTQYEAMASSNMHEAEEWYRSKFADLTDAAARNAELLRQAKHEANDYRRQLQSLTCDLESLRGTNESLERQMREQEERHVREAASYQEALARLEEEGQSLKDEMARHLQEYQDLLNVKLALDIEIATYRKLLEGEENRITIPVQTFSNLQIRGGKSTKDGENHKVTRYLKSLTIRVIPIQAHQIVNGTPPARG

SEQ ID NO: 34686 - protein, 12 aa, Homo sapiens
  Payload ID: 6849
  Gene Symbol: GFAP
  Gene Name: glial fibrillary acidic protein
  ENSP ID: ENSP00000464795
MWSLTWPSQTSP

SEQ ID NO: 34687 - protein, 61 aa, Homo sapiens
  Payload ID: 6849
  Gene Symbol: GFAP
  Gene Name: glial fibrillary acidic protein
  ENSP ID: ENSP00000465208
MERRRITSAARRSYVSSGEMMVGGLAPGRRLGPGTRLSLARMPPPLPTRVDFSLAGALNAG

SEQ ID NO: 34688 - protein, 248 aa, Homo sapiens
  Payload ID: 6849
  Gene Symbol: GFAP
  Gene Name: glial fibrillary acidic protein
  ENSP ID: ENSP00000465320
MERRRITSAARRSYVSSGEMMVGGLAPGRRLGPGTRLSLARMPPPLPTRVDFSLAGALNAGFKETRASERAEMMELNDRFASYIEKVRFLEQQNKALAAELNQLRAKEPTKLADVYQAELRELRLRLDQLTANSARLEVERDNLAQDLATVRQKLQDETNLRLEAENNLAAYRQEADEATLARLDLERKIESLEEEIRFLRKIHEEEYQDLLNVKLALDIEIATYRKLLEGEENRITIPVQTFSNLQI

SEQ ID NO: 34689 - protein, 57 aa, Homo sapiens
  Payload ID: 6849
  Gene Symbol: GFAP
  Gene Name: glial fibrillary acidic protein
  ENSP ID: ENSP00000465565
MASSNMHEAEEWYRSKFADLTDAAARNAELLRQAKHEANDYRRQLQSLTCDLESLRG

SEQ ID NO: 34690 - protein, 191 aa, Homo sapiens
  Payload ID: 6849
  Gene Symbol: GFAP
  Gene Name: glial fibrillary acidic protein
  ENSP ID: ENSP00000465624
  MOD_RES (1)..(1): Any amino acid
XTEIATERGRDRDREAETERDTQREERNRDWQEVRELQEQLARQQVHVELDVAKPDLTAALKEIRTQYEAMASSNMHEAEEWYRSKFADLTDAAARNAELLRQAKHEANDYRRQLQSLTCDLESLRGTNESLERQMREQEERHVREAASYQEALARLEEEGQSLKDEMARHLQEYQDLLNVKLALDIEIAT

SEQ ID NO: 34691 - protein, 261 aa, Homo sapiens
  Payload ID: 6849
  Gene Symbol: GFAP
  Gene Name: glial fibrillary acidic protein
  ENSP ID: ENSP00000465629
MERRRITSAARRSYVSSGEMMVGGLAPGRRLGPGTRLSLARMPPPLPTRVDFSLAGALNAGFKETRASERAEMMELNDRFASYIEKVRFLEQQNKALAAELNQLRAKEPTKLADVYQAELRELRLRLDQLTANSARLEVERDNLAQDLATVRQKLQDETNLRLEAENNLAAYRQEVRELQEQLARQQVHVELDVAKPDLTAALKEIRTQYEAMASSNMHEAEEWYRSKFADLTDAAARNAELLRQAKHEANDYRRQLQSLT

SEQ ID NO: 34692 - protein, 189 aa, Homo sapiens
  Payload ID: 6849
  Gene Symbol: GFAP
  Gene Name: glial fibrillary acidic protein
  ENSP ID: ENSP00000466163
MERRRITSAARRSYVSSGEMMVGGLAPGRRLGPGTRLSLARMPPPLPTRVDFSLAGALNAGFKETRASERAEMMELNDRFASYIEKVRFLEQQNKALAAELNQLRAKEPTKLADVYQAELRELRLRLDQLTANSARLEVERDNLAQDLATVRQKNVSPHSRLQDETNLRLEAENNLAAYRQEADEATLA

SEQ ID NO: 34693 - protein, 58 aa, Homo sapiens
  Payload ID: 6849
  Gene Symbol: GFAP
  Gene Name: glial fibrillary acidic protein
  ENSP ID: ENSP00000466598
MERRRITSAARRSYVSSGEMMVGGLAPGHLKRNIVVKTVEMRDGEVIKESKQEHKDVM

SEQ ID NO: 34694 - protein, 8 aa, Homo sapiens
  Payload ID: 6849
  Gene Symbol: GFAP
  Gene Name: glial fibrillary acidic protein
  ENSP ID: ENSP00000467106
MERRRITS

SEQ ID NO: 34695 - protein, 64 aa, Homo sapiens
  Payload ID: 6849
  Gene Symbol: GFAP
  Gene Name: glial fibrillary acidic protein
  ENSP ID: ENSP00000467397
FSNLQIRGGKSTKDGENHKVTRYLKSLTIRVIPIQAHQIVNGTPPARETSLDTKSVSEGHLKRN

SEQ ID NO: 34696 - protein, 101 aa, Homo sapiens
  Payload ID: 6849
  Gene Symbol: GFAP
  Gene Name: glial fibrillary acidic protein
  ENSP ID: ENSP00000467530
IPVQTFSNLQIRETSLDTKSVSEGHLKRNIVVKTVEMRDGEVRRDLGPVRLWLAPGILKARPWRKAWGWHIEGSQQLPVAPQGILEESKETECNSVSSVPP

SEQ ID NO: 34697 - protein, 438 aa, Homo sapiens
  Payload ID: 6849
  Gene Symbol: GFAP
  Gene Name: glial fibrillary acidic protein
  Uniprot ID: P14136
  ENSP ID: ENSP00000468500
MERRRITSAARRSYVSSGEMMVGGLAPGRRLGPGTRLSLARMPPPLPTRVDFSLAGALNAGFKETRASERAEMMELNDRFASYIEKVRFLEQQNKALAAELNQLRAKEPTKLADVYQAELRELRLRLDQLTANSARLEVERDNLAQDLATVRQKLQDETNLRLEAENNLAAYRQEADEATLARLDLERKIESLEEEIRFLRKIHEEEVRELQEQLARQQVHVELDVAKPDLTAALKEIRTQYEAMASSNMHEAEEWYRSKFADLTDAAARNAELLRQAKHEANDYRRQLQSLTCDLESLRGTNESLERQMREQEERHVREAASYQEALARLEEEGQSLKDEMARHLQEYQDLLNVKLALDIEIATYRKLLEGEENRITIPVQTFSNLQIRGQYSRASWEGHWSPAPSSRACRLLQTGTEDQGKGIQLSLGAFVTLQRS

SEQ ID NO: 34698 - protein, 286 aa, Homo sapiens
  Payload ID: 6850
  Gene Symbol: GBAS
  Gene Name: glioblastoma amplified sequence
  Uniprot ID: O75323
  ENSP ID: ENSP00000313050
MAARVLRARGAAWAGGLLQRAAPCSLLPRLRTWTSSSNRSREDSWLKSLFVRKVDPRKDAHSNLLAKKETSNLYKLQFHNVKPECLEAYNKICQEVLPKIHEDKHYPCTLVGTWNTWYGEQDQAVHLWRYEGGYPALTEVMNKLRENKEFLEFRKARSDMLLSRKNQLLLEFSFWNEPVPRSGPNIYELRSYQLRPGTMIEWGNYWARAIRFRQDGNEAVGGFFSQIGQLYMVHHLWAYRDLQTREDIRNAAWHKHGWEELVYYTVPLIQEMESRIMIPLKTSPLQ

SEQ ID NO: 34699 - protein, 145 aa, Homo sapiens
  Payload ID: 6850
  Gene Symbol: GBAS
  Gene Name: glioblastoma amplified sequence
  ENSP ID: ENSP00000398498
MAARVLRARGAAWAGGLLQRAAPCSLLPRLRTWTSSSNRSREDSWLKSLFVRKVDPRKDAHSNLLAKKETSNLYKLQFHNVKPECLEAYNKICSSLFAEHKDLTPAWFLGVPIMGFCPTHPVLGTSTACLTISIQSRGVAKDSRR

SEQ ID NO: 34700 - protein, 80 aa, Homo sapiens
  Payload ID: 6850
  Gene Symbol: GBAS
  Gene Name: glioblastoma amplified sequence
  ENSP ID: ENSP00000401185
MNKLRENKEFLEFRKARSDMLLSRKNQLLLEFSFWNEPVPRSGPNIYELRSYQLRPGTMIEWGNYWARAIRFRQDGNEAV

SEQ ID NO: 34701 - protein, 65 aa, Homo sapiens
  Payload ID: 6850
  Gene Symbol: GBAS
  Gene Name: glioblastoma amplified sequence
  ENSP ID: ENSP00000406336
MNKLRENKEFLEFRKARSDMLLSRKNQLLLEFSFWNEPVPRSGPNIYELRSYQLRPGTMIEWGNY

SEQ ID NO: 34702 - protein, 247 aa, Homo sapiens
  Payload ID: 6850
  Gene Symbol: GBAS
  Gene Name: glioblastoma amplified sequence
  Uniprot ID: O75323
  ENSP ID: ENSP00000406855
MAARVLRARGAAWAGGLLQRAAPCSLLPRLRTWTSSSNRSREDSWLKSLFVRKVDPRKDAHSNLLAKKETSNLYKLQFKRCCQRFTKINTTLVLWWGLGTRGMASRTKLEFLEFRKARSDMLLSRKNQLLLEFSFWNEPVPRSGPNIYELRSYQLRPGTMIEWGNYWARAIRFRQDGNEAVGGFFSQIGQLYMVHHLWAYRDLQTREDIRNAAWHKHGWEELVYYTVPLIQEMESRIMIPLKTSPLQ

SEQ ID NO: 34703 - protein, 114 aa, Homo sapiens
  Payload ID: 6850
  Gene Symbol: GBAS
  Gene Name: glioblastoma amplified sequence
  ENSP ID: ENSP00000409266
  MOD_RES (1)..(1): Any amino acid
XQEVLPKIHEDKHYPCTLVGTWNTWYGEQDQAVHLWRYEGGYPALTEVMNKLRENKEFLEFRKARSDMLLSRKNQLLLEFSFWNEPVPRSGPNIYELRSYQLRPGTMIEWGNYW

SEQ ID NO: 34704 - protein, 1560 aa, Homo sapiens [sequence omitted]

SEQ ID NO: 34705 - protein, 126 aa, Homo sapiens
  Payload ID: 6851
  Gene Symbol: GLTSCR1
  Gene Name: glioma tumor suppressor candidate region gene 1
  ENSP ID: ENSP00000469738
MDDEDGRCLLDVICDPQALNDFLHGSEKLDSDDLLDNPGEAQSAFYEGPGLHVQEASGNHLNPEPNQPAPSVDLDFLEDDILGSPATGGGGGGSGGADQPCDILQQSLQEANITEQTLEAEAELDL

SEQ ID NO: 34706 - protein, 1508 aa, Homo sapiens
  Payload ID: 6851
  Gene Symbol: GLTSCR1
  Gene Name: glioma tumor suppressor candidate region gene 1
  ENSP ID: ENSP00000480219
MCKASGNHLNPEPNQPAPSVDLDFLEDDILGSPATGGGGGGSGGADQPCDILQQSLQEANITEQTLEAEAELDLGPFQLPTLQPADGGAGPTGAGGAAAVAAGPQALFPGSTDLLGLQGPPTVLTHQALVPPQDVVNKALSVQPFLQPVGLGNVTLQPIPGLQGLPNGSPGGATAATLGLAPIQVVGQPVMALNTPTSQLLAKQVPVSGYLASAAGPSEPVTLASAGVSPQGAGLVIQKNLSAAVATTLNGNSVFGGAGAASAPTGTPSGQPLAVAPGLGSSPLVPAPNVILHRTPTPIQPKPAGVLPPKLYQLTPKPFAPAGATLTIQGEPGALPQQPKAPQNLTFMAAGKAGQNVVLSGFPAPALQANVFKQPPATTTGAAPPQPPGALSKPMSVHLLNQGSSIVIPAQHMLPGQNQFLLPGAPAVQLPQQLSALPANVGGQILAAAAPHTGGQLIANPILTNQNLAGPLSLGPVLAPHSGAHSAHILSAAPIQVGQPALFQMPVSLAAGSLPTQSQPAPAGPAATTVLQGVTLPPSAVAMLNTPDGLVQPATPAAATGEAAPVLTVQPAPQAPPAVSTPLPLGLQQPQAQQPPQAPTPQAAAPPQATTPQPSPGLASSPEKIVLGQPPSATPTAILTQDSLQMFLPQERSQQPLSAEGPHLSVPASVIVSAPPPAQDPAPATPVAKGAGLGPQAPDSQASPAPAPQIPAAAPLKGPGPSSSPSLPHQAPLGDSPHLPSPHPTRPPSRPPSRPQSVSRPPSEPPLHPCPPPQAPPTLPGIFVIQNQLGVPPPASNPAPTAPGPPQPPLRPQSQPPEGPLPPAPHLPPSSTSSAVASSSETSSRLPAPTPSDFQLQFPPSQGPHKSPTPPPTLHLVPEPAAPPPPPPRTFQMVTTPFPALPQPKALLERFHQVPSGIILQNKAGGAPAAPQTSTSLGPLTSPAASVLVSGQAPSGTPTAPSHAPAPAPMAATGLPPLLPAENKAFASNLPTLNVAKAASSGPGKPSGLQYESKLSGLKKPPTLQPSKEACFLEHLHKHQGSVLHPDYKTAFPSFEDALHRLLPYHVYQGALPSPSDYHKVDEEFETVSTQLLKRTQAMLNKYRLLLLEESRRVSPSAEMVMIDRMFIQEEKTTLALDKQLAKEKPDEYVSSSRSLGLPIAASSEGHRLPGHGPLSSSAPGASTQPPPHLPTKLVIRHGGAGGSPSVTWARASSSLSSSSSSSSAASSLDADEDGPMPSRNRPPIKTYEARSRIGLKLKIKQEAGLSKVVHNTALDPVHQPPPPPATLKVAEPPPRPPPPPPPTGQMNGTVDHPPPAAPERKPLGTAPHCPRLPLRKTYRENVGGPGAPEGTPAGRARGGSPAPLPAKVDEATSGLIRELAAVEDELYQRMLKGPPPEPAASAAQGTGDPDWEAPGLPPAKRRKSESPDVDQASFSSDSPQDDTLTEHLQSAIDSILNLQQAPGRTPAPSYPHAASAGTPASPPPLHRPEAYPPSSHNGGLGARTLTR

SEQ ID NO: 34707 - protein, 478 aa, Homo sapiens
  Payload ID: 6852
  Gene Symbol: GLTSCR2
  Gene Name: glioma tumor suppressor candidate region gene 2
  Uniprot ID: Q9NZM5
  ENSP ID: ENSP00000246802
MAAGGSGVGGKRSSKSDADSGFLGLRPTSVDPALRRRRRGPRNKKRGWRRLAQEPLGLEVDQFLEDVRLQERTSGGLLSEAPNEKLFFVDTGSKEKGLTKKRTKVQKKSLLLKKPLRVDLILENTSKVPAPKDVLAHQVPNAKKLRRKEQLWEKLAKQGELPREVRRAQARLLNPSATRAKPGPQDTVERPFYDLWASDNPLDRPLVGQDEFFLEQTKKKGVKRPARLHTKPSQAPAVEVAPAGASYNPSFEDHQTLLSAAHEVELQRQKEAEKLERQLALPATEQAATQESTFQELCEGLLEESDGEGEPGQGEGPEAGDAEVCPTPARLATTEKKTEQQRRREKAVHRLRVQQAALRAARLRHQELFRLRGIKAQVALRLAELARRQRRRQARREAEADKPRRLGRLKYQAPDIDVQLSSELTDSLRTLKPEGNILRDRFKSFQRRNMIEPRERAKFKRKYKVKLVEKRAFREIQL

SEQ ID NO: 34708 - protein, 265 aa, Homo sapiens
  Payload ID: 6852
  Gene Symbol: GLTSCR2
  Gene Name: glioma tumor suppressor candidate region gene 2
  ENSP ID: ENSP00000468948
  MOD_RES (1)..(1): Any amino acid
XLTKKRTKVQKKSLLLKKPLRVDLILENTSKVPAPKDVLAHQVPNAKKLRRKEQLWEKLAKQGELPREVRRAQARLLNPSATRAKPGPQDTVERPFYDLWASDNPLDRPLVGQDEFFLEQTKKKGVKRPARLHTKPSQAPAVEVAPAGASYNPSFEDHQTLLSAAHEVELQRQKEAEKLERQLALPATEQAATQESTFQELCEGLLEESDAELGADRLAQDPEARGQHPSRPVQELPEEEYDRASRESQVQTQVQGEAGGEAGVP

SEQ ID NO: 34709 - protein, 149 aa, Homo sapiens
  Payload ID: 6852
  Gene Symbol: GLTSCR2
  Gene Name: glioma tumor suppressor candidate region gene 2
  ENSP ID: ENSP00000470190
  MOD_RES (1)..(1): Any amino acid
XATRAKPGPQDTVERPFYDLWASDNPLDRPLVGQDEFFLEQTKKKGVKRPARLHTKPSQAPAVEARREAEADKPRRLGRLKYQAPDIDVQLSSELTDSLRTLKPEGNILRDRFKSFQRRNMIEPRERAKFKRKYKVKLVEKRAFREIQL

SEQ ID NO: 34710 - protein, 200 aa, Homo sapiens
  Payload ID: 6852
  Gene Symbol: GLTSCR2
  Gene Name: glioma tumor suppressor candidate region gene 2
  ENSP ID: ENSP00000470263
LILENTSKVPAPKDVLAHQVPNAKKLRRKEQLWEKLAKQGELPREVRRAQARLLNPSATRAKPGPQDTVERPFYDLWASDNPLDRPLVGQDEFFLEQTKKKGVKRPARLHTKPSQARREAEADKPRRLGRLKYQAPDIDVQLSSELTDSLRTLKPEGNILRDRFKSFQRRNMIEPRERAKFKRKYKVKLVEKRAFREIQL

SEQ ID NO: 34711 - protein, 99 aa, Homo sapiens
  Payload ID: 6852
  Gene Symbol: GLTSCR2
  Gene Name: glioma tumor suppressor candidate region gene 2
  ENSP ID: ENSP00000470773
ARREAEADKPRRLGRLKYQAPDIDVQLSSELTDSLRTLKPEGNILRDRFKSFQRRNMIEPRERAKFKRKYKVKLVEKRAFREIHCHQMPETRPSIKNLF

SEQ ID NO: 34712 - protein, 551 aa, Homo sapiens
  Payload ID: 6853
  Gene Symbol: GLDN
  Gene Name: gliomedin
  Uniprot ID: Q6ZMI3
  ENSP ID: ENSP00000335196
MARGAEGGRGDAGWGLRGALAAVALLSALNAAGTVFALCQWRGLSSALRALEAQRGREQREDSALRSFLAELSRAPRGASAPPQDPASSARNKRSHSGEPAPHIRAESHDMLMMMTYSMVPIRVMVDLCNSTKGICLTGPSGPPGPPGAGGLPGHNGLDGQPGPQGPKGEKGANGKRGKMGIPGAAGNPGERGEKGDHGELGLQGNEGPPGQKGEKGDKGDVSNDVLLAGAKGDQGPPGPPGPPGPPGPPGPPGSRRAKGPRQPSMFNGQCPGETCAIPNDDTLVGKADEKASEHHSPQAESMITSIGNPVQVLKVTETFGTWIRESANKSDDRIWVTEHFSGIMVKEFKDQPSLLNGSYTFIHLPYYFHGCGHVVYNNSLYYHKGGSNTLVRFEFGQETSQTLKLENALYFDRKYLFANSKTYFNLAVDEKGLWIIYASSVDGSSILVAQLDERTFSVVQHVNTTYPKSKAGNAFIARGILYVTDTKDMRVTFAFDLLGGKQINANFDLRTSQSVLAMLAYNMRDQHLYSWEDGHLMLYPVQFLSTTLNQ

SEQ ID NO: 34713 - protein, 427 aa, Homo sapiens
  Payload ID: 6853
  Gene Symbol: GLDN
  Gene Name: gliomedin
  Uniprot ID: Q6ZMI3
  ENSP ID: ENSP00000379681
MVDLCNSTKGICLTGPSGPPGPPGAGGLPGHNGLDGQPGPQGPKGEKGANGKRGKMGIPGAAGNPGERGEKGDHGELGLQGNEGPPGQKGEKGDKGDVSNDVLLAGAKGDQGPPGPPGPPGPPGPPGPPGSRRAKGPRQPSMFNGQCPGETCAIPNDDTLVGKADEKASEHHSPQAESMITSIGNPVQVLKVTETFGTWIRESANKSDDRIWVTEHFSGIMVKEFKDQPSLLNGSYTFIHLPYYFHGCGHVVYNNSLYYHKGGSNTLVRFEFGQETSQTLKLENALYFDRKYLFANSKTYFNLAVDEKGLWIIYASSVDGSSILVAQLDERTFSVVQHVNTTYPKSKAGNAFIARGILYVTDTKDMRVTFAFDLLGGKQINANFDLRTSQSVLAMLAYNMRDQHLYSWEDGHLMLYPVQFLSTTLNQ

SEQ ID NO: 34714 - protein, 165 aa, Homo sapiens
  Payload ID: 6853
  Gene Symbol: GLDN
  Gene Name: gliomedin
  ENSP ID: ENSP00000453433
MTLSPLQIRVMVDLCNSTKGICLTGPSGPPGPPGAGGLPGHNGLDGQPGPQGPKGEKGANGKRGKMGIPGAAGNPGERGEKGDHGELGLQGNEGPPGQKGEKGDKGDVSNDVLLAGAKGDQGPPGPPGPPGPPGPPGPPGSRRAKGPRQPSMFNGQCPGETCAIP

SEQ ID NO: 34715 - protein, 427 aa, Homo sapiens; identical to SEQ ID NO: 34713
  Payload ID: 6853
  Gene Symbol: GLDN
  Gene Name: gliomedin
  Uniprot ID: Q6ZMI3
  ENSP ID: ENSP00000479249

SEQ ID NO: 34716 - protein, 151 aa, Homo sapiens
  Payload ID: 6853
  Gene Symbol: GLDN
  Gene Name: gliomedin
  ENSP ID: ENSP00000484633
  MOD_RES (1)..(1): Any amino acid
XCQWRGLSSALRALEAQRGREQREDSALRSFLAELSRAPRGASAPPQDPASSARNKRSHSGEPAPHIRAESHDMLMMMTYSMVPIRVMVDLCNSTKGICLTGPSGPPGPPGAGGLPGHNGLDGQPGPQGPKGEKGANGKRGKMGIFGNSSN

SEQ ID NO: 34717 - protein, 620 aa, Homo sapiens
  Payload ID: 6854
  Gene Symbol: GLIS1
  Gene Name: GLIS family zinc finger 1
  Uniprot ID: Q8NBF1
  ENSP ID: ENSP00000309653
MAEARTSLSAHCRGPLATGLHPDLDLPGRSLATPAPSCYLLGSEPSSGLGLQPETHLPEGSLKRCCVLGLPPTSPASSSPCASSDVTSIIRSSQTSLVTCVNGLRSPPLTGDLGGPSKRARPGPASTDSHEGSLQLEACRKASFLKQEPADEFSELFGPHQQGLPPPYPLSQLPPGPSLGGLGLGLAGRVVAGRQACRWVDCCAAYEQQEELVRHIEKSHIDQRKGEDFTCFWAGCVRRYKPFNARYKLLIHMRVHSGEKPNKCMFEGCSKAFSRLENLKIHLRSHTGEKPYLCQHPGCQKAFSNSSDRAKHQRTHLDTKPYACQIPGCSKRYTDPSSLRKHVKAHSAKEQQVRKKLHAGPDTEADVLTECLVLQQLHTSTQLAASDGKGGCGLGQELLPGVYPGSITPHNGLASGLLPPAHDVPSRHHPLDATTSSHHHLSPLPMAESTRDGLGPGLLSPIVSPLKGLGPPPLPPSSQSHSPGGQPFPTLPSKPSYPPFQSPPPPPLPSPQGYQGSFHSIQSCFPYGDCYRMAEPAAGGDGLVGETHGFNPLRPNGYHSLSTPLPATGYEALAEASCPTALPQQPSEDVVSSGPEDCGFFPNGAFDHCLGHIPSIYTDT

SEQ ID NO: 34718 - protein, 795 aa, Homo sapiens
  Payload ID: 6854
  Gene Symbol: GLIS1
  Gene Name: GLIS family zinc finger 1
  ENSP ID: ENSP00000486112
MHCEVAEAHSDKRPKEAPGAPGPDRGPASLGAHMAFRVTVSGGGCGDRGPRDLLARPPAPPPRAHDLLRPRSPRDYGPSKAAAAGKVNGSYGHRTPGSEKSLLDLDLAEGPGPTCCQGLFLPAGSPPPRAHPQACERLLHFPHPDRSPRPQATYVNGSLPTTQHIKQESLPDYQAMAEARTSLSAHCRGPLATGLHPDLDLPGRSLATPAPSCYLLGSEPSSGLGLQPETHLPEGSLKRCCVLGLPPTSPASSSPCASSDVTSIIRSSQTSLVTCVNGLRSPPLTGDLGGPSKRARPGPASTDSHEGSLQLEACRKASFLKQEPADEFSELFGPHQQGLPPPYPLSQLPPGPSLGGLGLGLAGRVVAGRQACRWVDCCAAYEQQEELVRHIEKSHIDQRKGEDFTCFWAGCVRRYKPFNARYKLLIHMRVHSGEKPNKCMFEGCSKAFSRLENLKIHLRSHTGEKPYLCQHPGCQKAFSNSSDRAKHQRTHLDTKPYACQIPGCSKRYTDPSSLRKHVKAHSAKEQQVRKKLHAGPDTEADVLTECLVLQQLHTSTQLAASDGKGGCGLGQELLPGVYPGSITPHNGLASGLLPPAHDVPSRHHPLDATTSSHHHLSPLPMAESTRDGLGPGLLSPIVSPLKGLGPPPLPPSSQSHSPGGQPFPTLPSKPSYPPFQSPPPPPLPSPQGYQGSFHSIQSCFPYGDCYRMAEPAAGGDGLVGETHGFNPLRPNGYHSLSTPLPATGYEALAEASCPTALPQQPSEDVVSSGPEDCGFFPNGAFDHCLGHIPSIYTDT

SEQ ID NO: 34719 - protein, 524 aa, Homo sapiens
  Payload ID: 6855
  Gene Symbol: GLIS2
  Gene Name: GLIS family zinc finger 2
  Uniprot ID: Q9BZE0
  ENSP ID: ENSP00000262366
MHSLDEPLDLKLSITKLRAAREKRERTLGVVRPRALHRELGLVDDSPTPGSPGSPPSGFLLNSKFPEKVEGRFSAAPLVDLSLSPPSGLDSPNGSSSLSPERQGNGDLPPVPSASDFQPLRYLDGVPSSFQFFLPLGSGGALHLPASSFLTPPKDKCLSPDLPLPKQLVCRWAKCNQLFELLQDLVDHVNDYHVKPEKDAGYCCHWEGCARHGRGFNARYKMLIHIRTHTNEKPHRCPTCSKSFSRLENLKIHNRSHTGEKPYVCPYEGCNKRYSNSSDRFKHTRTHYVDKPYYCKMPGCHKRYTDPSSLRKHIKAHGHFVSHEQQELLQLRPPPKPPLPAPDGGPYVSGAQIIIPNPAALFGGPGLPGLPLPLAPGPLDLSALACGNGGGSGGGGGMGPGLPGPVLPLNLAKNPLLPSPFGAGGLGLPVVSLLAGAAGGKAEGEKGRGSVPTRALGMEGHKTPLERTESSCSRPSPDGLPLLPGTVLDLSTGVNSAASSPEALAPGWVVIPPGSVLLKPAVVN

SEQ ID NO: 34720 - protein, 524 aa, Homo sapiens; identical to SEQ ID NO: 34719
  Payload ID: 6855
  Gene Symbol: GLIS2
  Gene Name: GLIS family zinc finger 2
  Uniprot ID: Q9BZE0
  ENSP ID: ENSP00000395547

SEQ ID NO: 34721 - protein, 524 aa, Homo sapiens; identical to SEQ ID NO: 34719
  Payload ID: 6855
  Gene Symbol: GLIS2
  Gene Name: GLIS family zinc finger 2
  Uniprot ID: Q9BZE0
  ENSP ID: ENSP00000484027

SEQ ID NO: 34722 - protein, 524 aa, Homo sapiens; identical to SEQ ID NO: 34719
  Payload ID: 6855
  Gene Symbol: GLIS2
  Gene Name: GLIS family zinc finger 2
  Uniprot ID: Q9BZE0
  ENSP ID: ENSP00000488242

SEQ ID NO: 34723 - protein, 775 aa, Homo sapiens
  Payload ID: 6856
  Gene Symbol: GLIS3
  Gene Name: GLIS family zinc finger 3
  Uniprot ID: Q8NEA6
  ENSP ID: ENSP00000325494
MMVQRLGLISPPASQVSTACNQISPSLQRAMNAANLNIPPSDTRSLISRESLASTTLSLTESQSASSMKQEWSQGYRALPSLSNHGSQNGLDLGDLLSLPPGTSMSSNSVSNSLPSYLFGTESSHSPYPSPRHSSTRSHSARSKKRALSLSPLSDGIGIDFNTIIRTSPTSLVAYINGSRASPANLSPQPEVYGHFLGVRGSCIPQPRPVPGSQKGVLVAPGGLALPAYGEDGALEHERMQQLEHGGLQPGLVNHMVVQHGLPGPDSQSAGLFKTERLEEFPGSTVDLPPAPPLPPLPPPPGPPPPYHAHAHLHHPELGPHAQQLALPQATLDDDGEMDGIGGKHCCRWIDCSALYDQQEELVRHIEKVHIDQRKGEDFTCFWAGCPRRYKPFNARYKLLIHMRVHSGEKPNKCTFEGCEKAFSRLENLKIHLRSHTGEKPYLCQHPGCQKAFSNSSDRAKHQRTHLDTKPYACQIPGCTKRYTDPSSLRKHVKAHSSKEQQARKKLRSSTELHPDLLTDCLTVQSLQPATSPRDAAAEGTVGRSPGPGPDLYSAPIFSSNYSSRSGTAAGAVPPPHPVSHPSPGHNVQGSPHNPSSQLPPLTAVDAGAERFAPSAPSPHHISPRRVPAPSSILQRTQPPYTQQPSGSHLKSYQPETNSSFQPNGIHVHGFYGQLQKFCPPHYPDSQRIVPPVSSCSVVPSFEDCLVPTSMGQASFDVFHRAFSTHSGITVYDLPSSSSSLFGESLRSGAEDATFLQISTVDRCPSQLSSVYTEG

SEQ ID NO: 34724 - protein, 930 aa, Homo sapiens
  Payload ID: 6856
  Gene Symbol: GLIS3
  Gene Name: GLIS family zinc finger 3
  Uniprot ID: Q8NEA6
  ENSP ID: ENSP00000371398
MNGRSCSMSLHRTSGTPQGPRMVSGHHIPAIRAHSGTPGPSPCGSTSSPTMASLANNLHLKMPSGGGMAPQNNVAESRIHLPALSPRRQMLTNGKPRFQVTQAGGMSGSHTLKPKQQEFGSPFPPNPGKGALGFGPQCKSIGKGSCNNLVVTSSPMMVQRLGLISPPASQVSTACNQISPSLQRAMNAANLNIPPSDTRSLISRESLASTTLSLTESQSASSMKQEWSQGYRALPSLSNHGSQNGLDLGDLLSLPPGTSMSSNSVSNSLPSYLFGTESSHSPYPSPRHSSTRSHSARSKKRALSLSPLSDGIGIDFNTIIRTSPTSLVAYINGSRASPANLSPQPEVYGHFLGVRGSCIPQPRPVPGSQKGVLVAPGGLALPAYGEDGALEHERMQQLEHGGLQPGLVNHMVVQHGLPGPDSQSAGLFKTERLEEFPGSTVDLPPAPPLPPLPPPPGPPPPYHAHAHLHHPELGPHAQQLALPQATLDDDGEMDGIGGKHCCRWIDCSALYDQQEELVRHIEKVHIDQRKGEDFTCFWAGCPRRYKPFNARYKLLIHMRVHSGEKPNKCTFEGCEKAFSRLENLKIHLRSHTGEKPYLCQHPGCQKAFSNSSDRAKHQRTHLDTKPYACQIPGCTKRYTDPSSLRKHVKAHSSKEQQARKKLRSSTELHPDLLTDCLTVQSLQPATSPRDAAAEGTVGRSPGPGPDLYSAPIFSSNYSSRSGTAAGAVPPPHPVSHPSPGHNVQGSPHNPSSQLPPLTAVDAGAERFAPSAPSPHHISPRRVPAPSSILQRTQPPYTQQPSGSHLKSYQPETNSSFQPNGIHVHGFYGQLQKFCPPHYPDSQRIVPPVSSCSVVPSFEDCLVPTSMGQASFDVFHRAFSTHSGITVYDLPSSSSSLFGESLRSGAEDATFLQISTVDRCPSQLSSVYTEG

SEQ ID NO: 34725 - protein, 244 aa, Homo sapiens
  Payload ID: 6856
  Gene Symbol: GLIS3
  Gene Name: GLIS family zinc finger 3
  ENSP ID: ENSP00000417794
MNGRSCSMSLHRTSGTPQGPRMVSGHHIPAIRAHSGTPGPSPCGSTSSPTMASLANNLHLKMPSGGGMAPQNNVAESRIHLPALSPRRQMLTNGKPRFQVTQAGGMSGSHTLKPKQQEFGSPFPPNPGKGALGFGPQCKSIGKGSCNNLVVTSSPMMVQRLGLISPPASQVSTACNQISPSLQRAMNAANLNIPPSDTRSLISRESLASTTLSLTESQSASSMKQEWSQGYRALPSLSNHGSQN

SEQ ID NO: 34726 - protein, 244 aa, Homo sapiens; identical to SEQ ID NO: 34725
  Payload ID: 6856
  Gene Symbol: GLIS3
  Gene Name: GLIS family zinc finger 3
  ENSP ID: ENSP00000417883

SEQ ID NO: 34727 - protein, 89 aa, Homo sapiens
  Payload ID: 6856
  Gene Symbol: GLIS3
  Gene Name: GLIS family zinc finger 3
  ENSP ID: ENSP00000418005
MMVQRLGLISPPASQVSTACNQISPSLQRAMNAANLNIPPSDTRSLISRESLASTTLSLTESQSASSMKQEWSQGYRALPSLSNHGSQN

SEQ ID NO: 34728 - protein, 89 aa, Homo sapiens; identical to SEQ ID NO: 34727
  Payload ID: 6856
  Gene Symbol: GLIS3
  Gene Name: GLIS family zinc finger 3
  ENSP ID: ENSP00000418671

SEQ ID NO: 34729 - protein, 89 aa, Homo sapiens; identical to SEQ ID NO: 34727
  Payload ID: 6856
  Gene Symbol: GLIS3
  Gene Name: GLIS family zinc finger 3
  ENSP ID: ENSP00000418995

SEQ ID NO: 34730 - protein, 142 aa, Homo sapiens
  Payload ID: 6856
  Gene Symbol: GLIS3
  Gene Name: GLIS family zinc finger 3
  ENSP ID: ENSP00000419914
MNGRSCSMSLHRTSGTPQGPRMVSGHHIPAIRAHSGTPGPSPCGSTSSPTMASLANNLHLKMPSGGGMAPQNNVAESRIHLPALSPRRQMLTNGKPRFQVTQAGGMSGSHTLKPKQQEFGSPFPPNPGKGPLFRVSLWRPRP

SEQ ID NO: 34731 - protein, 72 aa, Homo sapiens
  Payload ID: 6857
  Gene Symbol: GBGT1
  Gene Name: globoside alpha-1,3-N-acetylgalactosaminyltransferase 1
  ENSP ID: ENSP00000361106
MHRRRLALGLGFCLLAGTSLSVLWVYLENWLPVSYVPYYLPCPEILLEYRGVISAHCNLHLPGSSNCHASAT

SEQ ID NO: 34732 - protein, 160 aa, Homo sapiens
  Payload ID: 6857
  Gene Symbol: GBGT1
  Gene Name: globoside alpha-1,3-N-acetylgalactosaminyltransferase 1
  ENSP ID: ENSP00000361108
MHRRRLALGLGFCLLAGTSLSVLWVYLENWLPVSYVPYYLPCPEILPMMMALSCLCHQQHEAALQEGEATPARGMVTVPSAQAAGAQAHTAADTHTLVGAHRLRGNLQPRASAAHLPATEPDHWGHGVCRGEVHSFHPVLPGVSRGVLHAWVPGALLHLH

SEQ ID NO: 34733 - protein, 347 aa, Homo sapiens
  Payload ID: 6857
  Gene Symbol: GBGT1
  Gene Name: globoside alpha-1,3-N-acetylgalactosaminyltransferase 1
  Uniprot ID: Q8N5D6
  ENSP ID: ENSP00000361110
MHRRRLALGLGFCLLAGTSLSVLWVYLENWLPVSYVPYYLPCPEIFNMKLHYKREKPLQPVVWSQYPQPKLLEHRPTQLLTLTPWLAPIVSEGTFNPELLQHIYQPLNLTIGVTVFAVGKYTHFIQSFLESAEEFFMRGYRVHYYIFTDNPAAVPGVPLGPHRLLSSIPIQGHSHWEETSMRRMETISQHIAKRAHREVDYLFCLDVDMVFRNPWGPETLGDLVAAIHPSYYAVPRQQFPYERRRVSTAFVADSEGDFYYGGAVFGGQVARVYEFTRGCHMAILADKANGIMAAWREESHLNRHFISNKPSKVLSPEYLWDDRKPQPPSLKLIRFSTLDKDISCLRS

SEQ ID NO: 34734 - protein, 294 aa, Homo sapiens
  Payload ID: 6857
  Gene Symbol: GBGT1
  Gene Name: globoside alpha-1,3-N-acetylgalactosaminyltransferase 1
  Uniprot ID: Q8N5D6
  ENSP ID: ENSP00000361113
MHRRRLALGLGFCLLAGTSLSVLWVYLENWLPVSYVPYYLPCPEIFNMKLHYKREKPLQPVVWSQYPQPKLLEHRPTQLLTLTPWLAPIVSEGTFNPELLQHIYQPLNLTIGVTVFAVGNPSWSQPRSSSCVGTGCTTTSSLTTLQPFPGSRWVPTGFSAPSPSRVTPTGRRHPCAGWRPSASTLLRGLTGRWTTSSALMWTWCFGTRGALRPWETWWLPFTQATTPFPASSSPMSAGVFPLPLWQTAKGTSIMVGQSSGGRWPGYMSLLGAATWPSWRTRPMASWLPGGRKAT

SEQ ID NO: 34735 - protein, 330 aa, Homo sapiens
  Payload ID: 6857
  Gene Symbol: GBGT1
  Gene Name: globoside alpha-1,3-N-acetylgalactosaminyltransferase 1
  Uniprot ID: Q8N5D6
  ENSP ID: ENSP00000437663
MHRRRLALGLGFCLLAGTSLSVLWVYLENWLPVSYVPYYLPCPEILSQYPQPKLLEHRPTQLLTLTPWLAPIVSEGTFNPELLQHIYQPLNLTIGVTVFAVGKYTHFIQSFLESAEEFFMRGYRVHYYIFTDNPAAVPGVPLGPHRLLSSIPIQGHSHWEETSMRRMETISQHIAKRAHREVDYLFCLDVDMVFRNPWGPETLGDLVAAIHPSYYAVPRQQFPYERRRVSTAFVADSEGDFYYGGAVFGGQVARVYEFTRGCHMAILADKANGIMAAWREESHLNRHFISNKPSKVLSPEYLWDDRKPQPPSLKLIRFSTLDKDISCLRS

SEQ ID NO: 34736 - protein, 594 aa, Homo sapiens
  Payload ID: 6858
  Gene Symbol: GLMN
  Gene Name: glomulin, FKBP associated protein
  Uniprot ID: Q92990
  ENSP ID: ENSP00000359385
MAVEELQSIIKRCQILEEQDFKEEDFGLFQLAGQRCIEEGHTDQLLEIIQNEKNKVIIKNMGWNLVGPVVRCLLCKDKEDSKRKVYFLIFDLLVKLCNPKELLLGLLELIEEPSGKQISQSILLLLQPLQTVIQKLHNKAYSIGLALSTLWNQLSLLPVPYSKEQIQMDDYGLCQCCKALIEFTKPFVEEVIDNKENSLENEKLKDELLKFCFKSLKCPLLTAQFFEQSEEGGNDPFRYFASEIIGFLSAIGHPFPKMIFNHGRKKRTWNYLEFEEEENKQLADSMASLAYLVFVQGIHIDQLPMVLSPLYLLQFNMGHIEVFLQRTEESVISKGLELLENSLLRIEDNSLLYQYLEIKSFLTVPQGLVKVMTLCPIETLRKKSLAMLQLYINKLDSQGKYTLFRCLLNTSNHSGVEAFIIQNIKNQIDMSLKRTRNNKWFTGPQLISLLDLVLFLPEGAETDLLQNSDRIMASLNLLRYLVIKDNENDNQTGLWTELGNIENNFLKPLHIGLNMSKAHYEAEIKNSQEAQKSKDLCSITVSGEEIPNMPPEMQLKVLHSALFTFDLIESVLARVEELIEIKTKSTSEENIGIK

SEQ ID NO: 34737 - protein, 417 aa, Homo sapiens
  Payload ID: 6858
  Gene Symbol: GLMN
  Gene Name: glomulin, FKBP associated protein
  Uniprot ID: Q92990
  ENSP ID: ENSP00000436829
MAVEELQSIIKRCQILEEQDFKEEDFGLFQLAGQRCIEEGHTDQLLEIIQNEKNKVIIKNMGWNLVGPVVRCLLCKDKEDSKRKVYFLIFDLLVKLCNPKELLLGLLELIEEPSGKQISQSILLLLQPLQTVIQKLHNKAYSIGLALSTLWNQLSLLPVPYSKEQIQMDDYGLCQCCKALIEFTKPFVEEVIDNKENSLENEKLKDELLKFCFKSLKCPLLTAQFFEQSEEGGNDPFRYFASEIIGFLSAIGHPFPKMIFNHGRKKRTWNYLEFEEEENKQLADSMASLAYLVFVQGIHIDQLPMVLSPLYLLQFNMGHIEVFLQRTEESVISKGLELLENSLLRIEDNSLLYQYLEIKSFLTVPQGLVKVMTLCPIETLRKKSLAMLQLYINKLDSQGKYTLFREHVTTNGLQDHS

SEQ ID NO: 34738 - protein, 245 aa, Homo sapiens
  Payload ID: 6858
  Gene Symbol: GLMN
  Gene Name: glomulin, FKBP associated protein
  ENSP ID: ENSP00000468973
  MOD_RES (1)..(1): Any amino acid
XCFKSLKCPLLTAQFFEQSEEGGNDPFRYFASEIIGFLSAIGHPFPKMIFNHGRKKRTWNYLEFEEEENKQLADSMASLAYLVFVQGIHIDQLPMVLSPLYLLQFNMGHIEVFLQRTEESVISKGLELLENSLLRIEDNSLLYQYLEIKSFLTVPQGLVKVMTLCPIETLEVQVWMYYMHKMDSDEVWRTRNNKWFTGPQLISLLDLVLFLPEGAETDLLQNSDRIMASLNLLRYLVIKDNENDN

SEQ ID NO: 34739 - protein, 297 aa, Homo sapiens
  Payload ID: 6858
  Gene Symbol: GLMN
  Gene Name: glomulin, FKBP associated protein
  ENSP ID: ENSP00000469157
GFLSAIGHPFPKMIFNHGRKKRTWNYLEFEEEENKQLADSMASLAYLVFVQGIHIDQLPMVLSPLYLLQFNMGHIEVFLQRTEESVISKGLELLENSLLRIEDNSLLYQYLEIKSFLTVPQRKKSLAMLQLYINKLDSQGKYTLFRCLLNTSNHSGVEAFIIQNIKNQIDMSLKRTRNNKWFTGPQLISLLDLVLFLPEGAETDLLQNSDRIMASLNLLRYLVIKDNENDNQTGLWTELGNIENNFLKPLHIGLNMSKAHYEAEIKNSQEAQKSKDLCSITVSGEEIPNMPPEMQLK

SEQ ID NO: 34740 - protein, 1079 aa, Homo sapiens
  Payload ID: 6859
  Gene Symbol: GLTSCR1L
  Gene Name: GLTSCR1-like
  Uniprot ID: Q6AI39
  ENSP ID: ENSP00000313933
MDDDDDSCLLDLIGDPQALNYFLHGPSNKSSNDDLTNAGYSAANSNSIFANSSNADPKSSLKGVSNQLGEGPSDGLPLSSSLQFLEDELESSPLPDLTEDQPFDILQKSLQEANITEQTLAEEAYLDASIGSSQQFAQAQLHPSSSASFTQASNVSNYSGQTLQPIGVTHVPVGASFASNTVGVQHGFMQHVGISVPSQHLSNSSQISGSGQIQLIGSFGNHPSMMTINNLDGSQIILKGSGQQAPSNVSGGLLVHRQTPNGNSLFGNSSSSPVAQPVTVPFNSTNFQTSLPVHNIIIQRGLAPNSNKVPINIQPKPIQMGQQNTYNVNNLGIQQHHVQQGISFASASSPQGSVVGPHMSVNIVNQQNTRKPVTSQAVSSTGGSIVIHSPMGQPHAPQSQFLIPTSLSVSSNSVHHVQTINGQLLQTQPSQLISGQVASEHVMLNRNSSNMLRTNQPYTGPMLNNQNTAVHLVSGQTFAASGSPVIANHASPQLVGGQMPLQQASPTVLHLSPGQSSVSQGRPGFATMPSVTSMSGPSRFPAVSSASTAHPSLGSAVQSGSSGSNFTGDQLTQPNRTPVPVSVSHRLPVSSSKSTSTFSNTPGTGTQQQFFCQAQKKCLNQTSPISAPKTTDGLRQAQIPGLLSTTLPGQDSGSKVISASLGTAQPQQEKVVGSSPGHPAVQVESHSGGQKRPAAKQLTKGAFILQQLQRDQAHTVTPDKSHFRSLSDAVQRLLSYHVCQGSMPTEEDLRKVDNEFETVATQLLKRTQAMLNKYRCLLLEDAMRINPSAEMVMIDRMFNQEERASLSRDKRLALVDPEGFQADFCCSFKLDKAAHETQFGRSDQHGSKASSSLQPPAKAQGRDRAKTGVTEPMNHDQFHLVPNHIVVSAEGNISKKTECLGRALKFDKVGLVQYQSTSEEKASRREPLKASQCSPGPEGHRKTSSRSDHGTESKLSSILADSHLEMTCNNSFQDKSLRNSPKNEVLHTDIMKGSGEPQPDLQLTKSLETTFKNILELKKAGRQPQSDPTVSGSVELDFPNFSPMASQENCLEKFIPDHSEGVVETDSILEAAVNSILEC

SEQ ID NO: 34741 - protein, 1079 aa, Homo sapiens; identical to SEQ ID NO: 34740
  Payload ID: 6859
  Gene Symbol: GLTSCR1L
  Gene Name: GLTSCR1-like
  Uniprot ID: Q6AI39
  ENSP ID: ENSP00000377723

SEQ ID NO: 34742 - protein, 1079 aa, Homo sapiens; identical to SEQ ID NO: 34740
  Payload ID: 6859
  Gene Symbol: GLTSCR1L
  Gene Name: GLTSCR1-like
  Uniprot ID: Q6AI39
  ENSP ID: ENSP00000482211

SEQ ID NO: 34743 - protein, 180 aa, Homo sapiens
  Payload ID: 6860
  Gene Symbol: GCG
  Gene Name: glucagon
  Uniprot ID: P01275
  ENSP ID: ENSP00000364647
MKSIYFVAGLFVMLVQGSWQRSLQDTEEKSRSFSASQADPLSDPDQMNEDKRHSQGTFTSDYSKYLDSRRAQDFVQWLMNTKRNRNNIAKRHDEFERHAEGTFTSDVSSYLEGQAAKEFIAWLVKGRGRRDFPEEVAIVEELGRRHADGSFSDEMNTILDNLAARDFINWLIQTKITDRK

SEQ ID NO: 34744 - protein, 180 aa, Homo sapiens; identical to SEQ ID NO: 34743
  Payload ID: 6860
  Gene Symbol: GCG
  Gene Name: glucagon
  Uniprot ID: P01275
  ENSP ID: ENSP00000387662

SEQ ID NO: 34745 - protein, 477 aa, Homo sapiens
  Payload ID: 6861
  Gene Symbol: GCGR
  Gene Name: glucagon receptor
  Uniprot ID: P47871
  ENSP ID: ENSP00000383558
MPPCQPQRPLLLLLLLLACQPQVPSAQVMDFLFEKWKLYGDQCHHNLSLLPPPTELVCNRTFDKYSCWPDTPANTTANISCPWYLPWHHKVQHRFVFKRCGPDGQWVRGPRGQPWRDASQCQMDGEEIEVQKEVAKMYSSFQVMYTVGYSLSLGALLLALAILGGLSKLHCTRNAIHANLFASFVLKASSVLVIDGLLRTRYSQKIGDDLSVSTWLSDGAVAGCRVAAVFMQYGIVANYCWLLVEGLYLHNLLGLATLPERSFFSLYLGIGWGAPMLFVVPWAVVKCLFENVQCWTSNDNMGFWWILRFPVFLAILINFFIFVRIVQLLVAKLRARQMHHTDYKFRLAKSTLTLIPLLGVHEVVFAFVTDEHAQGTLRSAKLFFDLFLSSFQGLLVAVLYCFLNKEVQSELRRRWHRWRLGKVLWEERNTSNHRASSSPGHGPPSKELQFGRGGGSQDSSAETPLAGGLPRLAESPF

SEQ ID NO: 34746 - protein, 80 aa, Homo sapiens
  Payload ID: 6861
  Gene Symbol: GCGR
  Gene Name: glucagon receptor
  ENSP ID: ENSP00000458930
MPPCQPQRPLLLLLLLLACQPQVPSAQVMDFLFEKWKLYGDQCHHNLSLLPPPTELVCNRTFDKYSCWPDTPANTTANIS

SEQ ID NO: 34747 - protein, 523 aa, Homo sapiens
  Payload ID: 6861
  Gene Symbol: GCGR
  Gene Name: glucagon receptor
  ENSP ID: ENSP00000460976
MPPCQPQRPLLLLLLLLACQPQVPSAQVMDFLFEKWKLYGDQCHHNLSLLPPPTELVCNRTFDKYSCWPDTPANTTANISCPWYLPWHHKVQHRFVFKRCGPDGQWVRGPRGQPWRDASQCQMDGEEIEVQKEVAKMYSSFQVMYTVGYSLSLGALLLALAILGGLSKLHCTRNAIHANLFASFVLKASSVLVIDGLLRTRYSQKIGDDLSVSTWLSDGVSPPRRPQAGGWVGSQAGGHVAALTLHLYQAVAGCRVAAVFMQYGIVANYCWLLVEGLYLHNLLGLATLPERSFFSLYLGIGWGAPMLFVVPWAVVKCLFENVQCWTSNDNMGFWWILRFPVFLAILINFFIFVRIVQLLVAKLRARQMHHTDYKFRLAKSTLTLIPLLGVHEVVFAFVTDEHAQGTLRSAKLFFDLFLSSFQVPARPPAPPPGAQCATPDHPVSPGPAGGCPLLLPQQGGAVGAAAALAPLAPGQSAMGGAEHQQPQGLIFARPRPSQQGAAVWEGWWQPGFICGDPLGWWPP

SEQ ID NO: 34748 - protein, 463 aa, Homo sapiens
  Payload ID: 6862
  Gene Symbol: GLP1R
  Gene Name: glucagon-like peptide 1 receptor
  Uniprot ID: P43220
  ENSP ID: ENSP00000362353
MAGAPGPLRLALLLLGMVGRAGPRPQGATVSLWETVQKWREYRRQCQRSLTEDPPPATDLFCNRTFDEYACWPDGEPGSFVNVSCPWYLPWASSVPQGHVYRFCTAEGLWLQKDNSSLPWRDLSECEESKRGERSSPEEQLLFLYIIYTVGYALSFSALVIASAILLGFRHLHCTRNYIHLNLFASFILRALSVFIKDAALKWMYSTAAQQHQWDGLLSYQDSLSCRLVFLLMQYCVAANYYWLLVEGVYLYTLLAFSVLSEQWIFRLYVSIGWGVPLLFVVPWGIVKYLYEDEGCWTRNSNMNYWLIIRLPILFAIGVNFLIFVRVICIVVSKLKANLMCKTDIKCRLAKSTLTLIPLLGTHEVIFAFVMDEHARGTLRFIKLFTELSFTSFQGLMVAILYCFVNNEVQLEFRKSWERWRLEHLHIQRDSSMKPLKCPTSSLSSGATAGSSMYTATCQASCS

SEQ ID NO: 34749 - protein, 553 aa, Homo sapiens
  Payload ID: 6863
  Gene Symbol: GLP2R
  Gene Name: glucagon-like peptide 2 receptor
  Uniprot ID: O95838
  ENSP ID: ENSP00000262441
MKLGSSRAGPGRGSAGLLPGVHELPMGIPAPWGTSPLSFHRKCSLWAPGRPFLTLVLLVSIKQVTGSLLEETTRKWAQYKQACLRDLLKEPSGIFCNGTFDQYVCWPHSSPGNVSVPCPSYLPWWSEESSGRAYRHCLAQGTWQTIENATDIWQDDSECSENHSFKQNVDRYALLSTLQLMYTVGYSFSLISLFLALTLLLFLRKLHCTRNYIHMNLFASFILRTLAVLVKDVVFYNSYSKRPDNENGWMSYLSEMSTSCRSVQVLLHYFVGANYLWLLVEGLYLHTLLEPTVLPERRLWPRYLLLGWAFPVLFVVPWGFARAHLENTGCWTTNGNKKIWWIIRGPMMLCVTVNFFIFLKILKLLISKLKAHQMCFRDYKYRLAKSTLVLIPLLGVHEILFSFITDDQVEGFAKLIRLFIQLTLSSFHGFLVALQYGFANGEVKAELRKYWVRFLLARHSGCRACVLGKDFRFLGKCPKKLSEGDGAEKLRKLQPSLNSGRLLHLAMRGLGELGAQPQQDHARWPRGSSLSECSEGDVTMANTMEEILEESEI

SEQ ID NO: 34750 - protein, 118 aa, Homo sapiens
  Payload ID: 6863
  Gene Symbol: GLP2R
  Gene Name: glucagon-like peptide 2 receptor
  ENSP ID: ENSP00000303605
MYTVGYSFSLISLFLALTLLLFLRKLHCTRNYIHMNLFASFILRTLAVLVKDVVFYNSYSKRPDNENGWMSYLSEMSTSCRSVQVLLHYFVGANYLWLLVEGLYLHTLLEPTVLPERR

SEQ ID NO: 34751 - protein, 93 aa, Homo sapiens
  Payload ID: 6863
  Gene Symbol: GLP2R
  Gene Name: glucagon-like peptide 2 receptor
  ENSP ID: ENSP00000404471
MKLGSSRAGPGRGSAGLLPGVHELPMGIPAPWGTSPLSFHRKCSLWAPGRPFLTLVLLVSIKQVTGSLLEETTRKWAQYKQACLRDLLKEPSG

SEQ ID NO: 34752 - protein, 373 aa, Homo sapiens
  Payload ID: 6863
  Gene Symbol: GLP2R
  Gene Name: glucagon-like peptide 2 receptor
  ENSP ID: ENSP00000458242
MYTVGYSFSLISLFLALTLLLFLRKLHCTRNYIHMNLFASFILRTLAVLVKDVVFYNSYSKRPDNENGWMSYLSEMSTSCRSVQVLLHYFVGANYLWLLVEGLYLHTLLEPTVLPERRLWPRYLLLGWAFPVLFVVPWGFARAHLENTGCWTTNGNKKIWWIIRGPMMLCVTVNFFIFLKILKLLISKLKAHQMCFRDYKYRLAKSTLVLIPLLGVHEILFSFITDDQVEGFAKLIRLFIQLTLSSFHGFLVALQYGFANGEVKAELRKYWVRFLLARHSGCRACVLGKDFRFLGKCPKKLSEGDGAEKLRKLQPSLNSGRLLHLAMRGLGELGAQPQQDHARWPRGSSLSECSEGDVTMANTMEEILEESEI

SEQ ID NO: 34753 - protein, 702 aa, Homo sapiens
  Payload ID: 6864
  Gene Symbol: GBE1
  Gene Name: glucan (1,4-alpha-), branching enzyme 1
  Uniprot ID: Q04446
  ENSP ID: ENSP00000410833
MAAPMTPAARPEDYEAALNAALADVPELARLLEIDPYLKPYAVDFQRRYKQFSQILKNIGENEGGIDKFSRGYESFGVHRCADGGLYCKEWAPGAEGVFLTGDFNGWNPFSYPYKKLDYGKWELYIPPKQNKSVLVPHGSKLKVVITSKSGEILYRISPWAKYVVREGDNVNYDWIHWDPEHSYEFKHSRPKKPRSLRIYESHVGISSHEGKVASYKHFTCNVLPRIKGLGYNCIQLMAIMEHAYYASFGYQITSFFAASSRYGTPEELQELVDTAHSMGIIVLLDVVHSHASKNSADGLNMFDGTDSCYFHSGPRGTHDLWDSRLFAYSSWEILRFLLSNIRWWLEEYRFDGFRFDGVTSMLYHHHGVGQGFSGDYSEYFGLQVDEDALTYLMLANHLVHTLCPDSITIAEDVSGMPALCSPISQGGGGFDYRLAMAIPDKWIQLLKEFKDEDWNMGDIVYTLTNRRYLEKCIAYAESHDQALVGDKSLAFWLMDAEMYTNMSVLTPFTPVIDRGIQLHKMIRLITHGLGGEGYLNFMGNEFGHPEWLDFPRKGNNESYHYARRQFHLTDDDLLRYKFLNNFDRDMNRLEERYGWLAAPQAYVSEKHEGNKIIAFERAGLLFIFNFHPSKSYTDYRVGTALPGKFKIVLDSDAAEYGGHQRLDHSTDFFSEAFEHNGRPYSLLVYIPSRVALILQNVDLPN

SEQ ID NO: 34754 - protein, 661 aa, Homo sapiens
  Payload ID: 6864
  Gene Symbol: GBE1
  Gene Name: glucan (1,4-alpha-), branching enzyme 1
  ENSP ID: ENSP00000419638
MNLAKVRYKQFSQILKNIGENEGGIDKFSRGYESFGVHRCADGGLYCKEWAPGAEGVFLTGDFNGWNPFSYPYKKLDYGKWELYIPPKQNKSVLVPHGSKLKVVITSKSGEILYRISPWAKYVVREGDNVNYDWIHWDPEHSYEFKHSRPKKPRSLRIYESHVGISSHEGKVASYKHFTCNVLPRIKGLGYNCIQLMAIMEHAYYASFGYQITSFFAASSRYGTPEELQELVDTAHSMGIIVLLDVVHSHASKNSADGLNMFDGTDSCYFHSGPRGTHDLWDSRLFAYSSWEILRFLLSNIRWWLEEYRFDGFRFDGVTSMLYHHHGVGQGFSGDYSEYFGLQVDEDALTYLMLANHLVHTLCPDSITIAEDVSGMPALCSPISQGGGGFDYRLAMAIPDKWIQLLKEFKDEDWNMGDIVYTLTNRRYLEKCIAYAESHDQALVGDKSLAFWLMDAEMYTNMSVLTPFTPVIDRGIQLHKMIRLITHGLGGEGYLNFMGNEFGHPEWLDFPRKGNNESYHYARRQFHLTDDDLLRYKFLNNFDRDMNRLEERYGWLAAPQAYVSEKHEGNKIIAFERAGLLFIFNFHPSKSYTDYRVGTALPGKFKIVLDSDAAEYGGHQRLDHSTDFFSEAFEHNGRPYSLLVYIPSRVALILQNVDLPN

SEQ ID NO: 34755 - protein, 547 aa, Homo sapiens
  Payload ID: 6865
  Gene Symbol: GLCCI1
  Gene Name: glucocorticoid induced 1
  Uniprot ID: Q86VQ1
  ENSP ID: ENSP00000223145
MSTASSSSSSSSSQTPHPPSQRMRRSAAGSPPAVAAAGSGNGAGGGGGVGCAPAAGAGRLLQPIRATVPYQLLRGSQHSPTRPPVAAAAASLGSLPGPGAARGPSPSSPTPPAAAAPAEQAPRAKGRPRRSPESHRRSSSPERRSPGSPVCRADKAKSQQVRTSSTIRRTSSLDTITGPYLTGQWPRDPHVHYPSCMKDKATQTPSCWAEEGAEKRSHQRSASWGSADQLKEQIAKLRQQLQRSKQSSRHSKEKDRQSPLHGNHITISHTQATGSRSVPMPLSNISVPKSSVSRVPCNVEGISPELEKVFIKENNGKEEVSKPLDIPDGRRAPLPAHYRSSSTRSIDTQTPSVQERSSSCSSHSPCVSPFCPPESQDGSPCSTEDLLYDRDKDSGSSSPLPKYASSPKPNNSYMFKREPPEGCERVKVFEEMASRQPISAPLFSCPDKNKVNFIPTGSAFCPVKLLGPLLPASDLMLKNSPNSGQSSALATLTVEQLSSRVSFTSLSDDTSTAGSMEASVQQPSQQQQLLQELQGEDHISAQNYVII

SEQ ID NO: 34756 - protein, 191 aa, Homo sapiens
  Payload ID: 6865
  Gene Symbol: GLCCI1
  Gene Name: glucocorticoid induced 1
  ENSP ID: ENSP00000393942
  MOD_RES (1)..(1): Any amino acid
XSPLHGNHITISHTQATGSRSVPMPLSNISVPKSSVSRVPCNVEGISPELEKVFIKENNGKEEVSKPLDIPDGRRAPLPAHYRSSSTRSIDTQTPSVQERSSSCSSHSPCVSPFCPPESQDGSPCSTEDLLYDRDKDSGSSSPLPKYASSPKPNNSYMFKREPPEGCERVKVFEEMAQTPGVVSLSCFPSQ

SEQ ID NO: 34757 - protein, 193 aa, Homo sapiens
  Payload ID: 6865
  Gene Symbol: GLCCI1
  Gene Name: glucocorticoid induced 1
  ENSP ID: ENSP00000396171
AAAAPAEQAPRAKGRPRRSPESHRRSSSPERRSPGSPVCRADKAKSQQVRTSSTIRRTSSLDTITGPYLTGQWPRDPHVHYPSCMKDKATQTPSCWAEEGAEKRSHQRSASWGSADQLKEQIAKLRQQLQRSKQSSRHSKEKDRQSPLHGNHITISHTQATGSSRWTYQMVEELHFLLITGAVVLAALTLRLL

SEQ ID NO: 34758 - protein, 191 aa, Homo sapiens
  Payload ID: 6865
  Gene Symbol: GLCCI1
  Gene Name: glucocorticoid induced 1
  ENSP ID: ENSP00000406569
AAAAPAEQAPRAKGRPRRSPESHRRSSSPERRSPGSPVCRADKAKSQQVRTSSTIRRTSSLDTITGPYLTGQWPRDPHVHYPSCMKDKATQIAKLRQQLQRSKQSSRHSKEKDRQSPLHGNHITISHTQATGSRSVPMPLSNISVPKSSVSRVPCNVEGISPELEKVFIKENNGKEEVSKPLDIPDGRRAP

SEQ ID NO: 34759 - protein, 573 aa, Homo sapiens
  Payload ID: 6866
  Gene Symbol: GMEB1
  Gene Name: glucocorticoid modulatory element binding protein 1
  Uniprot ID: Q9Y692
  ENSP ID: ENSP00000294409
MANAEVSVPVGDVVVVPTEGNEGENPEDTKTQVILQLQPVQQGLFIDGHFYNRIYEAGSENNTAVVAVETHTIHKIEEGIDTGTIEANEDMEIAYPITCGESKAILLWKKFVCPGINVKCVKFNDQLISPKHFVHLAGKSTLKDWKRAIRLGGIMLRKMMDSGQIDFYQHDKVCSNTCRSTKFDLLISSARAPVPGQQTSVVQTPTSADGSITQIAISEESMEEAGLEWNSALTAAVTMATEEGVKKDSEEISEDTLMFWKGIADVGLMEEVVCNIQKEIEELLRGVQQRLIQAPFQVTDAAVLNNVAHTFGLMDTVKKVLDNRRNQVEQGEEQFLYTLTDLERQLEEQKKQGQDHRLKSQTVQNVVLMPVSTPKPPKRPRLQRPASTTVLSPSPPVQQPQFTVISPITITPVGQSFSMGNIPVATLSQGSSPVTVHTLPSGPQLFRYATVVSSAKSSSPDTVTIHPSSSLALLSSTAMQDGSTLGNMTTMVSPVELVAMESGLTSAIQAVESTSEDGQTIIEIDPAPDPEAEDTEGKAVILETELRTEEKVVAEMEEHQHQVHNVEIVVLED

SEQ ID NO: 34760 - protein, 563 aa, Homo sapiens
  Payload ID: 6866
  Gene Symbol: GMEB1
  Gene Name: glucocorticoid modulatory element binding protein 1
  Uniprot ID: Q9Y692
  ENSP ID: ENSP00000355186
MANAEVSVPVGDVVVVPTEGNEGENPEDTKTQVILQLQPVQQGIYEAGSENNTAVVAVETHTIHKIEEGIDTGTIEANEDMEIAYPITCGESKAILLWKKFVCPGINVKCVKFNDQLISPKHFVHLAGKSTLKDWKRAIRLGGIMLRKMMDSGQIDFYQHDKVCSNTCRSTKFDLLISSARAPVPGQQTSVVQTPTSADGSITQIAISEESMEEAGLEWNSALTAAVTMATEEGVKKDSEEISEDTLMFWKGIADVGLMEEVVCNIQKEIEELLRGVQQRLIQAPFQVTDAAVLNNVAHTFGLMDTVKKVLDNRRNQVEQGEEQFLYTLTDLERQLEEQKKQGQDHRLKSQTVQNVVLMPVSTPKPPKRPRLQRPASTTVLSPSPPVQQPQFTVISPITITPVGQSFSMGNIPVATLSQGSSPVTVHTLPSGPQLFRYATVVSSAKSSSPDTVTIHPSSSLALLSSTAMQDGSTLGNMTTMVSPVELVAMESGLTSAIQAVESTSEDGQTIIEIDPAPDPEAEDTEGKAVILETELRTEEKVVAEMEEHQHQVHNVEIVVLED

SEQ ID NO: 34761 - protein, 563 aa, Homo sapiens; identical to SEQ ID NO: 34760
  Payload ID: 6866
  Gene Symbol: GMEB1
  Gene Name: glucocorticoid modulatory element binding protein 1
  Uniprot ID: Q9Y692
  ENSP ID: ENSP00000362922

SEQ ID NO: 34762 - protein, 530 aa, Homo sapiens
  Payload ID: 6867
  Gene Symbol: GMEB2
  Gene Name: glucocorticoid modulatory element binding protein 2
  Uniprot ID: Q9UKD1
  ENSP ID: ENSP00000266068
MATPDVSVHMEEVVVVTTPDTAVDGSGVEGVKTVLVTTNLAPHGGDLTEDNMETENAAAAAAAAFTASSQLKEAVLVKMAEEGENLEAEIVYPITCGDSRANLIWRKFVCPGINVKCVQYDEHVISPKEFVHLAGKSTLKDWKRAIRMNGIMLRKIMDSGELDFYQHDKVCSNTCRSTKIDLSGARVSLSSPTSAEYIPLTPAAADVNGSPATITIETCEDPGDWTAAIGDDTFTFWRGLKDAGLLDEVIQEFHQELVETMRGLQQRVQDPPLQLRDAVLLNNIVQNFGMLDLVKKVLASHKCQMDRSREQYARDLAALEQQCDEHRRRAKELKHKSQHLSNVLMTLTPVSLPPPVKRPRLARATSGPAAMASQVLTQSAQLALGPGVPVPQLTSVPLGKVVSTLPSTVLGKGSLQAPPASSPASPLLGGYTVLASSGSTYPSTVEIHPDASSLTVLSTAAVQDGSTVFKVVSPLQLLTLPGLGPTLQNVAQASPGSSTIVTVPAGAAPGPEEHTATIEVAAMAEDHERK

SEQ ID NO: 34763 - protein, 479 aa, Homo sapiens
  Payload ID: 6867
  Gene Symbol: GMEB2
  Gene Name: glucocorticoid modulatory element binding protein 2
  ENSP ID: ENSP00000359086
METENAAAAAAAAFTASSQLKEAVLVKMAEEGENLEAEIVYPITCGDSRANLIWRKFVCPGINVKCVQYDEHVISPKEFVHLAGKSTLKDWKRAIRMNGIMLRKIMDSGELDFYQHDKVCSNTCRSTKIDLSGARVSLSSPTSAEYIPLTPAAADVNGSPATITIETCEDPGDWTAAIGDDTFTFWRGLKDAGLLDEVIQEFHQELVETMRGLQQRVQDPPLQLRDAVLLNNIVQNFGMLDLVKKVLASHKCQMDRSREQYARDLAALEQQCDEHRRRAKELKHKSQHLSNVLMTLTPVSLPPPVKRPRLARATSGPAAMASQVLTQSAQLALGPGVPVPQLTSVPLGKVVSTLPSTVLGKGSLQAPPASSPASPLLGGYTVLASSGSTYPSTVEIHPDASSLTVLSTAAVQDGSTVFKVVSPLQLLTLPGLGPTLQNVAQASPGSSTIVTVPAGAAPGPEEHTATIEVAAMAEDHERK

SEQ ID NO: 34764 - protein, 530 aa, Homo sapiens; identical to SEQ ID NO: 34762
  Payload ID: 6867
  Gene Symbol: GMEB2
  Gene Name: glucocorticoid modulatory element binding protein 2
  Uniprot ID: Q9UKD1
  ENSP ID: ENSP00000359094

SEQ ID NO: 34765 - protein, 466 aa, Homo sapiens
  Payload ID: 6868
  Gene Symbol: GCK
  Gene Name: glucokinase (hexokinase 4)
  Uniprot ID: P35557
  ENSP ID: ENSP00000223366
MAMDVTRSQAQTALTLVEQILAEFQLQEEDLKKVMRRMQKEMDRGLRLETHEEASVKMLPTYVRSTPEGSEVGDFLSLDLGGTNFRVMLVKVGEGEEGQWSVKTKHQMYSIPEDAMTGTAEMLFDYISECISDFLDKHQMKHKKLPLGFTFSFPVRHEDIDKGILLNWTKGFKASGAEGNNVVGLLRDAIKRRGDFEMDVVAMVNDTVATMISCYYEDHQCEVGMIVGTGCNACYMEEMQNVELVEGDEGRMCVNTEWGAFGDSGELDEFLLEYDRLVDESSANPGQQLYEKLIGGKYMGELVRLVLLRLVDENLLFHGEASEQLRTRGAFETRFVSQVESDTGDRKQIYNILSTLGLRPSTTDCDIVRRACESVSTRAAHMCSAGLAGVINRMRESRSEDVMRITVGVDGSVYKLHPSFKERFHASVRRLTPSCEITFIESEEGSGRGAALVSAVACKKACMLGQ

SEQ ID NO: 34766 - protein, 149 aa, Homo sapiens
  Payload ID: 6868
  Gene Symbol: GCK
  Gene Name: glucokinase (hexokinase 4)
  ENSP ID: ENSP00000338009
GGVRTGMPRAGMGASLRPGTGPHPDTGDRKQIYNILSTLGLRPSTTDCDIVRRACESVSTRAAHMCSAGLAGVINRMRESRSEDVMRITVGVDGSVYKLHPSFKERFHASVRRLTPSCEITFIESEEGSGRGAALVSAVACKKACMLGQ

SEQ ID NO: 34767 - protein, 464 aa, Homo sapiens
  Payload ID: 6868
  Gene Symbol: GCK
  Gene Name: glucokinase (hexokinase 4)
  Uniprot ID: P35557
  ENSP ID: ENSP00000379142
MPRPRSQLPQPNSQVEQILAEFQLQEEDLKKVMRRMQKEMDRGLRLETHEEASVKMLPTYVRSTPEGSEVGDFLSLDLGGTNFRVMLVKVGEGEEGQWSVKTKHQMYSIPEDAMTGTAEMLFDYISECISDFLDKHQMKHKKLPLGFTFSFPVRHEDIDKGILLNWTKGFKASGAEGNNVVGLLRDAIKRRGDFEMDVVAMVNDTVATMISCYYEDHQCEVGMIVGTGCNACYMEEMQNVELVEGDEGRMCVNTEWGAFGDSGELDEFLLEYDRLVDESSANPGQQLYEKLIGGKYMGELVRLVLLRLVDENLLFHGEASEQLRTRGAFETRFVSQVESDTGDRKQIYNILSTLGLRPSTTDCDIVRRACESVSTRAAHMCSAGLAGVINRMRESRSEDVMRITVGVDGSVYKLHPSFKERFHASVRRLTPSCEITFIESEEGSGRGAALVSAVACKKACMLGQ

SEQ ID NO: 34768 - protein, 465 aa, Homo sapiens [sequence omitted]

SEQ ID NO: 34769 - protein, 448 aa, Homo sapiens
  Payload ID: 6868
  Gene Symbol: GCK
  Gene Name: glucokinase (hexokinase 4)
  ENSP ID: ENSP00000402840
MLDDRARMEAAKKEKVEQILAEFQLQEEDLKKVMRRMQKEMDRGLRLETHEEASVKMLPTYVRSTPEGSEVGDFLSLDLGGTNFRVMLVKVGEGEEGQWSVKTKHQMYSIPEDAMTGTAEMMKHKKLPLGFTFSFPVRHEDIDKGILLNWTKGFKASGAEGNNVVGLLRDAIKRRGDFEMDVVAMVNDTVATMISCYYEDHQCEVGMIVGTGCNACYMEEMQNVELVEGDEGRMCVNTEWGAFGDSGELDEFLLEYDRLVDESSANPGQQLYEKLIGGKYMGELVRLVLLRLVDENLLFHGEASEQLRTRGAFETRFVSQVESDTGDRKQIYNILSTLGLRPSTTDCDIVRRACESVSTRAAHMCSAGLAGVINRMRESRSEDVMRITVGVDGSVYKLHPSFKERFHASVRRLTPSCEITFIESEEGSGRGAALVSAVACKKACMLGQ

SEQ ID NO: 34770 - protein, 464 aa, Homo sapiens; identical to SEQ ID NO: 34767
  Payload ID: 6868
  Gene Symbol: GCK
  Gene Name: glucokinase (hexokinase 4)
  Uniprot ID: P35557
  ENSP ID: ENSP00000482149

SEQ ID NO: 34771 - protein, 625 aa, Homo sapiens
  Payload ID: 6869
  Gene Symbol: GCKR
  Gene Name: glucokinase (hexokinase 4) regulator
  ENSP ID: ENSP00000264717
MPGTKRFQHVIETPEPGKWELSGYEAAVPITEKSNPLTQDLDKADAENIVRLLGQCDAEIFQEEGQALSTYQRLYSESILTTMVQVAGKVQEVLKEPDGGLVVLSGGGTSGRMAFLMSVSFNQLMKGLGQKPLYTYLIAGGDRSVVASREGTEDSALHGIEELKKVAAGKKRVIVIGISVGLSAPFVAGQMDCCMNNTAVFLPVLVGFNPVSMARNDPIEDWSSTFRQVAERMQKMQEKQKAFVLNPAIGPEGLSGSSRMKGGSATKILLETLLLAAHKTVDQGIAASQRCLLEILRTFERAHQVTYSQSPKIATLMKSVSTSLEKKGHVYLVGWQTLGIIAIMDGVECIHTFGADFRDVRGFLIGDHSDMFNQKAELTNQGPQFTFSQEDFLTSILPSLTEIDTVVFIFTLDDNLTEVQTIVEQVKEKTNHIQALAHSTVGQTLLIPLKKLFPSIISITWPLLFFEYEGNFIQKFQRELSTKWVLNTVSTGAHVLLGKILQNHMLDLRISNSKLFWRALAMLQRFSGQSKARCIESLLRAIHFPQPLSDDIRAAPISCHVQVAHEKEQVIPIALLSLLFRCSITEAQAHLAAAPSVCEAVRSALAGPGQKRTADPLEILEPDVQ

SEQ ID NO: 34772 - protein, 150 aa, Homo sapiens
  Payload ID: 6869
  Gene Symbol: GCKR
  Gene Name: glucokinase (hexokinase 4) regulator
  Uniprot ID: Q14397
  ENSP ID: ENSP00000398303
MPGTKRFQHVIETPEPGKWELSGYEAAVPITEKSNPLTQDLDKADAENIVRLLGQCDAEIFQEEGQALSTYQRLYSESILTTMVQVAGKVQEVLKEPDGGLVVLSGGGTSGRMAFLMSVSFNQLMKGLGQKPLYTYLIAGGDRWLPGRRE

SEQ ID NO: 34773 - protein, 227 aa, Homo sapiens
  Payload ID: 6869
  Gene Symbol: GCKR
  Gene Name: glucokinase (hexokinase 4) regulator
  ENSP ID: ENSP00000399463
PITEKSNPLTQDLDKADAENIVRLLGQCDAEIFQEEGQALSTYQRLYSESILTTMVQVAGKVQEVLKEPDGGLVVLSGGGTSGRMAFLMSVSFNQLMKGLGQKPLYTYLIAGGDRSVVASREGTEDSALHGIEELKKVAAGKKRVIVIGISVGLSAPFVAGQMDCCMNNTAVFLPVLVGFNPVSMARHPFPPPRILRSLTVFPSLRAPHYQITSLLFSMSVVTLISE

SEQ ID NO: 34774 - protein, 189 aa, Homo sapiens
  Payload ID: 6869
  Gene Symbol: GCKR
  Gene Name: glucokinase (hexokinase 4) regulator
  ENSP ID: ENSP00000416917
  MOD_RES (1)..(1): Any amino acid
XRAHQVTYSQSPKIATLMKSVSTSLEKKGHVYLVGWQTLGIIAIMDGVECIHTFGADFRDVRGFLIGDHSDMFNQKAELTNQGPQFTFSQEDFLTSILPSLTEIDTVVFIFTLDDNLTEVQTIVEQVKEKTNHIQALAHSTVGQTLLIPLKKLFPSIISITWPLLFFEYEGNFIQRSGFSTLPRLFANS

SEQ ID NO: 34775 - protein, 552 aa, Homo sapiens
  Payload ID: 6870
  Gene Symbol: GNS
  Gene Name: glucosamine (N-acetyl)-6-sulfatase
  Uniprot ID: P15586
  ENSP ID: ENSP00000258145
MRLLPLAPGRLRRGSPRHLPSCSPALLLLVLGGCLGVFGVAAGTRRPNVVLLLTDDQDEVLGGMTPLKKTKALIGEMGMTFSSAYVPSALCCPSRASILTGKYPHNHHVVNNTLEGNCSSKSWQKIQEPNTFPAILRSMCGYQTFFAGKYLNEYGAPDAGGLEHVPLGWSYWYALEKNSKYYNYTLSINGKARKHGENYSVDYLTDVLANVSLDFLDYKSNFEPFFMMIATPAPHSPWTAAPQYQKAFQNVFAPRNKNFNIHGTNKHWLIRQAKTPMTNSSIQFLDNAFRKRWQTLLSVDDLVEKLVKRLEFTGELNNTYIFYTSDNGYHTGQFSLPIDKRQLYEFDIKVPLLVRGPGIKPNQTSKMLVANIDLGPTILDIAGYDLNKTQMDGMSLLPILRGASNLTWRSDVLVEYQGEGRNVTDPTCPSLSPGVSQCFPDCVCEDAYNNTYACVRTMSALWNLQYCEFDDQEVFVEVYNLTADPDQITNIAKTIDPELLGKMNYRLMMLQSCSGPTCRTPGVFDPGYRFDPRLMFSNRGSVRTRRFSKHLL

SEQ ID NO: 34776 - protein, 496 aa, Homo sapiens
  Payload ID: 6870
  Gene Symbol: GNS
  Gene Name: glucosamine (N-acetyl)-6-sulfatase
  ENSP ID: ENSP00000413130
MDNYLLLQTPLKKTKALIGEMGMTFSSAYVPSALCCPSRASILTGKYPHNHHVVNNTLEGNCSSKSWQKIQEPNTFPAILRSMCGYQTFFAGKYLNEYGAPDAGGLEHVPLGWSYWYALEKNSKYYNYTLSINGKARKHGENYSVDYLTDVLANVSLDFLDYKSNFEPFFMMIATPAPHSPWTAAPQYQKAFQNVFAPRNKNFNIHGTNKHWLIRQAKTPMTNSSIQFLDNAFRKRWQTLLSVDDLVEKLVKRLEFTGELNNTYIFYTSDNGYHTGQFSLPIDKRQLYEFDIKVPLLVRGPGIKPNQTSKMLVANIDLGPTILDIAGYDLNKTQMDGMSLLPILRGASNLTWRSDVLVEYQGEGRNVTDPTCPSLSPGVSQCFPDCVCEDAYNNTYACVRTMSALWNLQYCEFDDQEVFVEVYNLTADPDQITNIAKTIDPELLGKMNYRLMMLQSCSGPTCRTPGVFDPGYRFDPRLMFSNRGSVRTRRFSKHLL

SEQ ID NO: 34777 - protein, 303 aa, Homo sapiens
  Payload ID: 6870
  Gene Symbol: GNS
  Gene Name: glucosamine (N-acetyl)-6-sulfatase
  ENSP ID: ENSP00000437782
  MOD_RES (1)..(1): Any amino acid
XYNYTLSINGKARKHGENYSVDYLTDVLANVSLDFLDYKSNFEPFFMMIATPAPHSPWTAAPQYQKAFQNVFAPRNKNFNIHGTNKHWLIRQAKTPMTNSSIQFLDNAFRKRWQTLLSVDDLVEKLVKRLEFTGELNNTYIFYTSDNGYHTGQFSLPIDKRQLYEFDIKVPLLVRGPGIKPNQTSKRGASNLTWRSDVLVEYQGEGRNVTDPTCPSLSPGVSQCFPDCVCEDAYNNTYACVRTMSALWNLQYCEFDDQEVFVEVYNLTADPDQITNIAKTIDPELLGKMNYRLMMLQSCSGPT

SEQ ID NO: 34778 - protein, 584 aa, Homo sapiens
  Payload ID: 6870
  Gene Symbol: GNS
  Gene Name: glucosamine (N-acetyl)-6-sulfatase
  ENSP ID: ENSP00000438497
MRLLPLAPGRLRRGSPRHLPSCSPALLLLVLGGCLGVFGVAAGTRRPNVVLLLTDDQDEVLGGMAFSEYSTTNCQTGLQGEELGQEHLRTYLEPSRTPLKKTKALIGEMGMTFSSAYVPSALCCPSRASILTGKYPHNHHVVNNTLEGNCSSKSWQKIQEPNTFPAILRSMCGYQTFFAGKYLNEYGAPDAGGLEHVPLGWSYWYALEKNSKYYNYTLSINGKARKHGENYSVDYLTDVLANVSLDFLDYKSNFEPFFMMIATPAPHSPWTAAPQYQKAFQNVFAPRNKNFNIHGTNKHWLIRQAKTPMTNSSIQFLDNAFRKRWQTLLSVDDLVEKLVKRLEFTGELNNTYIFYTSDNGYHTGQFSLPIDKRQLYEFDIKVPLLVRGPGIKPNQTSKMLVANIDLGPTILDIAGYDLNKTQMDGMSLLPILRGASNLTWRSDVLVEYQGEGRNVTDPTCPSLSPGVSQCFPDCVCEDAYNNTYACVRTMSALWNLQYCEFDDQEVFVEVYNLTADPDQITNIAKTIDPELLGKMNYRLMMLQSCSGPTCRTPGVFDPGYRFDPRLMFSNRGSVRTRRFSKHLL

SEQ ID NO: 34779 - protein, 532 aa, Homo sapiens
  Payload ID: 6870
  Gene Symbol: GNS
  Gene Name: glucosamine (N-acetyl)-6-sulfatase
  Uniprot ID: P15586
  ENSP ID: ENSP00000444819
MRLLPLAPGRLRRGSPRHLPSCSPALLLLVLGGCLGVFGVAAGTRRPNVVLLLTDDQDEVLGGMYVPSALCCPSRASILTGKYPHNHHVVNNTLEGNCSSKSWQKIQEPNTFPAILRSMCGYQTFFAGKYLNEYGAPDAGGLEHVPLGWSYWYALEKNSKYYNYTLSINGKARKHGENYSVDYLTDVLANVSLDFLDYKSNFEPFFMMIATPAPHSPWTAAPQYQKAFQNVFAPRNKNFNIHGTNKHWLIRQAKTPMTNSSIQFLDNAFRKRWQTLLSVDDLVEKLVKRLEFTGELNNTYIFYTSDNGYHTGQFSLPIDKRQLYEFDIKVPLLVRGPGIKPNQTSKMLVANIDLGPTILDIAGYDLNKTQMDGMSLLPILRGASNLTWRSDVLVEYQGEGRNVTDPTCPSLSPGVSQCFPDCVCEDAYNNTYACVRTMSALWNLQYCEFDDQEVFVEVYNLTADPDQITNIAKTIDPELLGKMNYRLMMLQSCSGPTCRTPGVFDPGYRFDPRLMFSNRGSVRTRRFSKHLL

SEQ ID NO: 34780 - protein, 247 aa, Homo sapiens
  Payload ID: 6870
  Gene Symbol: GNS
  Gene Name: glucosamine (N-acetyl)-6-sulfatase
  ENSP ID: ENSP00000445055
MGMTFSSAYVPSALCCPSRASILTGKYPHNHHVVNNTLEGNCSSKSWQKIQEPNTFPAILRSMCGYQTFFAGKYLNEYGAPDAGGLEHVPLGWSYWYALEKNSKYYNYTLSINGKARKHGENYSVDYLTDVLANVSLDFLDYKSNFEPFFMMIATPAPHSPWTAAPQYQKAFQNVFAPRNKNFNIHGTNKHWLIRQAKTPMTNSSIQFLDNAFRKRWQTLLSVDDLVEKLVKRLEFTGELNNTYIFY

SEQ ID NO: 34781 - protein, 722 aa, Homo sapiens
  Payload ID: 6871
  Gene Symbol: GNE
  Gene Name: glucosamine (UDP-N-acetyl)-2-epimerase/N-acetylmannosamine kinase
  Uniprot ID: Q9Y223
  ENSP ID: ENSP00000367134
MEKNGNNRKLRVCVATCNRADYSKLAPIMFGIKTEPEFFELDVVVLGSHLIDDYGNTYRMIEQDDFDINTRLHTIVRGEDEAAMVESVGLALVKLPDVLNRLKPDIMIVHGDRFDALALATSAALMNIRILHIEGGEVSGTIDDSIRHAITKLAHYHVCCTRSAEQHLISMCEDHDRILLAGCPSYDKLLSAKNKDYMSIIRMWLGDDVKSKDYIVALQHPVTTDIKHSIKMFELTLDALISFNKRTLVLFPNIDAGSKEMVRVMRKKGIEHHPNFRAVKHVPFDQFIQLVAHAGCMIGNSSCGVREVGAFGTPVINLGTRQIGRETGENVLHVRDADTQDKILQALHLQFGKQYPCSKIYGDGNAVPRILKFLKSIDLQEPLQKKFCFPPVKENISQDIDHILETLSALAVDLGGTNLRVAIVSMKGEIVKKYTQFNPKTYEERINLILQMCVEAAAEAVKLNCRILGVGISTGGRVNPREGIVLHSTKLIQEWNSVDLRTPLSDTLHLPVWVDNDGNCAALAERKFGQGKGLENFVTLITGTGIGGGIIHQHELIHGSSFCAAELGHLVVSLDGPDCSCGSHGCIEAYASGMALQREAKKLHDEDLLLVEGMSVPKDEAVGALHLIQAAKLGNAKAQSILRTAGTALGLGVVNILHTMNPSLVILSGVLASHYIHIVKDVIRQQALSSVQDVDVVVSDLVDPALLGAASMVLDYTTRRIY

SEQ ID NO: 34782 - protein, 753 aa, Homo sapiens
  Payload ID: 6871
  Gene Symbol: GNE
  Gene Name: glucosamine (UDP-N-acetyl)-2-epimerase/N-acetylmannosamine kinase
  Uniprot ID: Q9Y223
  ENSP ID: ENSP00000379839
METYGYLQRESCFQGPHELYFKNLSKRNKQIMEKNGNNRKLRVCVATCNRADYSKLAPIMFGIKTEPEFFELDVVVLGSHLIDDYGNTYRMIEQDDFDINTRLHTIVRGEDEAAMVESVGLALVKLPDVLNRLKPDIMIVHGDRFDALALATSAALMNIRILHIEGGEVSGTIDDSIRHAITKLAHYHVCCTRSAEQHLISMCEDHDRILLAGCPSYDKLLSAKNKDYMSIIRMWLGDDVKSKDYIVALQHPVTTDIKHSIKMFELTLDALISFNKRTLVLFPNIDAGSKEMVRVMRKKGIEHHPNFRAVKHVPFDQFIQLVAHAGCMIGNSSCGVREVGAFGTPVINLGTRQIGRETGENVLHVRDADTQDKILQALHLQFGKQYPCSKIYGDGNAVPRILKFLKSIDLQEPLQKKFCFPPVKENISQDIDHILETLSALAVDLGGTNLRVAIVSMKGEIVKKYTQFNPKTYEERINLILQMCVEAAAEAVKLNCRILGVGISTGGRVNPREGIVLHSTKLIQEWNSVDLRTPLSDTLHLPVWVDNDGNCAALAERKFGQGKGLENFVTLITGTGIGGGIIHQHELIHGSSFCAAELGHLVVSLDGPDCSCGSHGCIEAYASGMALQREAKKLHDEDLLLVEGMSVPKDEAVGALHLIQAAKLGNAKAQSILRTAGTALGLGVVNILHTMNPSLVILSGVLASHYIHIVKDVIRQQALSSVQDVDVVVSDLVDPALLGAASMVLDYTTRRIY

SEQ ID NO: 34783 - protein, 648 aa, Homo sapiens
  Payload ID: 6871
  Gene Symbol: GNE
  Gene Name: glucosamine (UDP-N-acetyl)-2-epimerase/N-acetylmannosamine kinase
  Uniprot ID: Q9Y223
  ENSP ID: ENSP00000414760
MEKNGNNRKLRVCVATCNRADYSKLAPIMFGIKTEPEFFELDVVVLGSHLIDDYGNTYRMIEQDDFDINTRLHTIVRGEDEAAMVESVGLALVKLPDVLNRLKPDIMIVHGDRFDALALATSAALMNIRILHIEGGEVSGTIDDSIRHAITKLAHYHVCCTRSAEQHLISMCEDHDRILLAGCPSYDKLLSAKNKDYMSIIRMWLGDDVKSKDYIVALQHPVTTDIKHSIKMFELTLDALISFNKRTLVLFPNIDAGSKEMVRVMRKKGIEHHPNFRAVKHVPFDQFIQLVAHAGCMIGNSSCGVREVGAFGTPVINLGTRQIGRETGENVLHVRDADTQDKILQALHLQFGKQYPCSKIYGDGNAVPRILKFLKSIDLQEPLQKKFCFPPVKENISQDIDHILETLSALAVDLGGTNLRVAIVSMKGEIVKKYTQFNPKTYEERINLILQMCVEAAAEAVKLNCRILGVGIGGGIIHQHELIHGSSFCAAELGHLVVSLDGPDCSCGSHGCIEAYASGMALQREAKKLHDEDLLLVEGMSVPKDEAVGALHLIQAAKLGNAKAQSILRTAGTALGLGVVNILHTMNPSLVILSGVLASHYIHIVKDVIRQQALSSVQDVDVVVSDLVDPALLGAASMVLDYTTRRIY

SEQ ID NO: 34784 - protein, 717 aa, Homo sapiens
  Payload ID: 6871
  Gene Symbol: GNE
  Gene Name: glucosamine (UDP-N-acetyl)-2-epimerase/N-acetylmannosamine kinase
  Uniprot ID: Q9Y223
  ENSP ID: ENSP00000437765
MPIGDCSVAAKPRKQLLCSLFQTTLGYRARASGWKPMVICRGSHAFKDLINTYRMIEQDDFDINTRLHTIVRGEDEAAMVESVGLALVKLPDVLNRLKPDIMIVHGDRFDALALATSAALMNIRILHIEGGEVSGTIDDSIRHAITKLAHYHVCCTRSAEQHLISMCEDHDRILLAGCPSYDKLLSAKNKDYMSIIRMWLGDDVKSKDYIVALQHPVTTDIKHSIKMFELTLDALISFNKRTLVLFPNIDAGSKEMVRVMRKKGIEHHPNFRAVKHVPFDQFIQLVAHAGCMIGNSSCGVREVGAFGTPVINLGTRQIGRETGENVLHVRDADTQDKILQALHLQFGKQYPCSKIYGDGNAVPRILKFLKSIDLQEPLQKKFCFPPVKENISQDIDHILETLSALAVDLGGTNLRVAIVSMKGEIVKKYTQFNPKTYEERINLILQMCVEAAAEAVKLNCRILGVGISTGGRVNPREGIVLHSTKLIQEWNSVDLRTPLSDTLHLPVWVDNDGNCAALAERKFGQGKGLENFVTLITGTGIGGGIIHQHELIHGSSFCAAELGHLVVSLDGPDCSCGSHGCIEAYASGMALQREAKKLHDEDLLLVEGMSVPKDEAVGALHLIQAAKLGNAKAQSILRTAGTALGLGVVNILHTMNPSLVILSGVLASHYIHIVKDVIRQQALSSVQDVDVVVSDLVDPALLGAASMVLDYTTRRIY

SEQ ID NO: 34785 - protein, 722 aa, Homo sapiens; identical to SEQ ID NO: 34781
  Payload ID: 6871
  Gene Symbol: GNE
  Gene Name: glucosamine (UDP-N-acetyl)-2-epimerase/N-acetylmannosamine kinase
  Uniprot ID: Q9Y223
  ENSP ID: ENSP00000439155

SEQ ID NO: 34786 - protein, 612 aa, Homo sapiens
  Payload ID: 6871
  Gene Symbol: GNE
  Gene Name: glucosamine (UDP-N-acetyl)-2-epimerase/N-acetylmannosamine kinase
  Uniprot ID: Q9Y223
  ENSP ID: ENSP00000445117
MIEQDDFDINTRLHTIVRGEDEAAMVESVGLALVKLPDVLNRLKPDIMIVHGDRFDALALATSAALMNIRILHIEGGEVSGTIDDSIRHAITKLAHYHVCCTRSAEQHLISMCEDHDRILLAGCPSYDKLLSAKNKDYMSIIRMWLGSKEMVRVMRKKGIEHHPNFRAVKHVPFDQFIQLVAHAGCMIGNSSCGVREVGAFGTPVINLGTRQIGRETGENVLHVRDADTQDKILQALHLQFGKQYPCSKIYGDGNAVPRILKFLKSIDLQEPLQKKFCFPPVKENISQDIDHILETLSALAVDLGGTNLRVAIVSMKGEIVKKYTQFNPKTYEERINLILQMCVEAAAEAVKLNCRILGVGISTGGRVNPREGIVLHSTKLIQEWNSVDLRTPLSDTLHLPVWVDNDGNCAALAERKFGQGKGLENFVTLITGTGIGGGIIHQHELIHGSSFCAAELGHLVVSLDGPDCSCGSHGCIEAYASGMALQREAKKLHDEDLLLVEGMSVPKDEAVGALHLIQAAKLGNAKAQSILRTAGTALGLGVVNILHTMNPSLVILSGVLASHYIHIVKDVIRQQALSSVQDVDVVVSDLVDPALLGAASMVLDYTTRRIY

SEQ ID NO: 34787 - protein, 289 aa, Homo sapiens
  Payload ID: 6872
  Gene Symbol: GNPDA1
  Gene Name: glucosamine-6-phosphate deaminase 1
  Uniprot ID: P46926
  ENSP ID: ENSP00000311876
MKLIILEHYSQASEWAAKYIRNRIIQFNPGPEKYFTLGLPTGSTPLGCYKKLIEYYKNGDLSFKYVKTFNMDEYVGLPRDHPESYHSFMWNNFFKHIDIHPENTHILDGNAVDLQAECDAFEEKIKAAGGIELFVGGIGPDGHIAFNEPGSSLVSRTRVKTLAMDTILANARFFDGELTKVPTMALTVGVGTVMDAREVMILITGAHKAFALYKAIEEGVNHMWTVSAFQQHPRTVFVCDEDATLELKVKTVKYFKGLMLVHNKLVDPLYSIKEKETEKSQSSKKPYSD

SEQ ID NO: 34788 - protein, 290 aa, Homo sapiens
  Payload ID: 6872
  Gene Symbol: GNPDA1
  Gene Name: glucosamine-6-phosphate deaminase 1
  ENSP ID: ENSP00000421524
MKLIILEHYSQASEWAAKYIRNRIIQFNPGPEKYFTLGLPTGAFLDGEGAVDKGGESRQQGPGSTPLGCYKKLIEYYKNGDLSFKYVKTFNMDEYVGLPRDHPESYHSFMWNNFFKHIDIHPENTHILDGNAVDLQAECDAFEEKIKAAGGIELFVGGIGPDGHIAFNEPGSSLVSRTRVKTLAMDTILANARFFDGELTKVPTMALTVGVGTVMDAREVMILITGAHKAFALYKAIEEGVNHMWTVSAFQQHPRTVFVCDEDATLELKVKTVKYFKGLMLVHNKLVDPL

SEQ ID NO: 34789 - protein, 138 aa, Homo sapiens
  Payload ID: 6872
  Gene Symbol: GNPDA1
  Gene Name: glucosamine-6-phosphate deaminase 1
  ENSP ID: ENSP00000422173
MKLIILEHYSQASEWAAKYIRNRIIQFNPGPEKYFTLGLPTGSTPLGCYKKLIEYYKNGDLSFKYVKTFNMDEYVGLPRDHPESYHSFMWNNFFKHIDIHPENTHILDGNAVDLQAECDAFEEKIKAAGGIELFVGGI

SEQ ID NO: 34790 - protein, 289 aa, Homo sapiens; identical to SEQ ID NO: 34787
  Payload ID: 6872
  Gene Symbol: GNPDA1
  Gene Name: glucosamine-6-phosphate deaminase 1
  Uniprot ID: P46926
  ENSP ID: ENSP00000423485

SEQ ID NO: 34791 - protein, 274 aa, Homo sapiens
  Payload ID: 6872
  Gene Symbol: GNPDA1
  Gene Name: glucosamine-6-phosphate deaminase 1
  ENSP ID: ENSP00000423494
MKLIILEHYSQASEWAAKYIRNRIIQFNPGPEKYFTLGLPTGSTPLGCYKKLIEYYKNGDLSFKYVKTFNMDEYVGLPRDHPESYHSFMWNNFFKHIDIHPENTHILDGNAVDLQAECDAFEEKIKAAGGIELFVGGIGPDGHIAFNEPGSSLVSRTRVKTLAMDTILANARFFDGELTKVPTMALTVGVGTVMDAREVMILITGAHKAFALYKAIEEGVNHMWTVSAFQQHPRTVFVCDEDATLELKVKTVKYFKAPPQVNRKGYIYSTNFGI

SEQ ID NO: 34792 - protein, 289 aa, Homo sapiens; identical to SEQ ID NO: 34787
  Payload ID: 6872
  Gene Symbol: GNPDA1
  Gene Name: glucosamine-6-phosphate deaminase 1
  Uniprot ID: P46926
  ENSP ID: ENSP00000423674

SEQ ID NO: 34793 - protein, 289 aa, Homo sapiens; identical to SEQ ID NO: 34787
  Payload ID: 6872
  Gene Symbol: GNPDA1
  Gene Name: glucosamine-6-phosphate deaminase 1
  Uniprot ID: P46926
  ENSP ID: ENSP00000424275

SEQ ID NO: 34794 - protein, 160 aa, Homo sapiens
  Payload ID: 6872
  Gene Symbol: GNPDA1
  Gene Name: glucosamine-6-phosphate deaminase 1
  ENSP ID: ENSP00000424537
MKLIILEHYSQASEWAAKYIRNRIIQFNPGPEKYFTLGLPTGSTPLGCYKKLIEYYKNGDLSFKYVKTFNMDEYVGLPRDHPESYHSFMWNNFFKHIDIHPENTHILDGNAVDLQAECDAFEEKIKAAGGIELFVGGIGPDGHIAFNEPGSSLVSRTRVK

SEQ ID NO: 34795 - protein, 237 aa, Homo sapiens
  Payload ID: 6872
  Gene Symbol: GNPDA1
  Gene Name: glucosamine-6-phosphate deaminase 1
  ENSP ID: ENSP00000424625
MKLIILEHYSQASEWAAKYIRNRIIQFNPGPEKYFTLGLPTGSTPLGCYKKLIEYYKNGDLSFKYVKTFNMDEYVGLPRDHPESYHSFMWNNFFKHIDIHPENTHILDGNAVDLQAECDAFEEKIKAAGGIELFVGGIGPDGHIAFNEPGSSLVSRTRVKTLAMDTILANARFFDGELTKAIEEGVNHMWTVSAFQQHPRTVFVCDEDATLELKVKTVKYFKGLMLVHNKLVDPLYS

SEQ ID NO: 34796 - protein, 29 aa, Homo sapiens
  Payload ID: 6872
  Gene Symbol: GNPDA1
  Gene Name: glucosamine-6-phosphate deaminase 1
  ENSP ID: ENSP00000426583
MKLIILEHYSQASEWAAKYIRNRIIQFNP

SEQ ID NO: 34797 - protein, 276 aa, Homo sapiens
  Payload ID: 6873
  Gene Symbol: GNPDA2
  Gene Name: glucosamine-6-phosphate deaminase 2
  Uniprot ID: Q8TDQ7
  ENSP ID: ENSP00000295448
MRLVILDNYDLASEWAAKYICNRIIQFKPGQDRYFTLGLPTGSTPLGCYKKLIEYHKNGHLSFKYVKTFNMDEYVGLPRNHPESYHSYMWNNFFKHIDIDPNNAHILDGNAADLQAECDAFENKIKEAGGIDLFVGGIGPDGHIAFNEPGSSLVSRTRLKTLAMDTILANAKYFDGDLSKVPTMALTVGVGTVMDAREVMILITGAHKAFALYKAIEEGVNHMWTVSAFQQHPRTIFVCDEDATLELRVKTVKYFKGLMHVHNKLVDPLFSMKDGN

SEQ ID NO: 34798 - protein, 259 aa, Homo sapiens
  Payload ID: 6873
  Gene Symbol: GNPDA2
  Gene Name: glucosamine-6-phosphate deaminase 2
  Uniprot ID: Q8TDQ7
  ENSP ID: ENSP00000424061
MRLVILDNYDLASEWAAKYICNRIIQFKPGQDRYFTLGLPTGSTPLGCYKKLIEYHKNGHLSFKYVKTFNMDEYVGLPRNHPESYHSYMWNNFFKHIDIDPNNAHILDGNAADLQAECDAFENKIKEAGGIDLFVGGIGPDGHIAFNEPGSSLVSRTRLKTLAMDTILANAKYFDGDLSKVPTMALTVGVGTVMDAREVMILITGAHKAFALYKAIEEGVNHMWTVSAFQQHPRTIFVCDEDATLELRVKTVKYFKGEH

SEQ ID NO: 34799 - protein, 242 aa, Homo sapiens
  Payload ID: 6873
  Gene Symbol: GNPDA2
  Gene Name: glucosamine-6-phosphate deaminase 2
  Uniprot ID: Q8TDQ7
  ENSP ID: ENSP00000425868
MRLVILDNYDLASEWAAKYICNRIIQFKPGQDRYFTLGLPTGLPRNHPESYHSYMWNNFFKHIDIDPNNAHILDGNAADLQAECDAFENKIKEAGGIDLFVGGIGPDGHIAFNEPGSSLVSRTRLKTLAMDTILANAKYFDGDLSKVPTMALTVGVGTVMDAREVMILITGAHKAFALYKAIEEGVNHMWTVSAFQQHPRTIFVCDEDATLELRVKTVKYFKGLMHVHNKLVDPLFSMKDGN

SEQ ID NO: 34800 - protein, 206 aa, Homo sapiens
  Payload ID: 6873
  Gene Symbol: GNPDA2
  Gene Name: glucosamine-6-phosphate deaminase 2
  Uniprot ID: Q8TDQ7
  ENSP ID: ENSP00000427423
MDEYVGLPRNHPESYHSYMWNNFFKHIDIDPNNAHILDGNAADLQAECDAFENKIKEAGGIDLFVGGIGPDGHIAFNEPGSSLVSRTRLKTLAMDTILANAKYFDGDLSKVPTMALTVGVGTVMDAREVMILITGAHKAFALYKAIEEGVNHMWTVSAFQQHPRTIFVCDEDATLELRVKTVKYFKGLMHVHNKLVDPLFSMKDGN

SEQ ID NO: 34801 - protein, 117 aa, Homo sapiens
  Payload ID: 6873
  Gene Symbol: GNPDA2
  Gene Name: glucosamine-6-phosphate deaminase 2
  ENSP ID: ENSP00000476853
  MOD_RES (1)..(1): Any amino acid
XGDLSKVPTMALTVGVGTVMDAREVMILITGAHKAFALYKAIEEGVNHMWTVSAFQQHPRTIFVCDEDATLELRVKTVKYFKEMALSYHKLIQENYLLNSVQGCASKARKKFATVWA

SEQ ID NO: 34802 - protein, 63 aa, Homo sapiens
  Payload ID: 6873
  Gene Symbol: GNPDA2
  Gene Name: glucosamine-6-phosphate deaminase 2
  ENSP ID: ENSP00000477137
AIEEGVNHMWTVSAFQQHPRTIFVCDEDATLELRVKTVKYFKEMALSYHKLIQENYLLNSVQG

SEQ ID NO: 34803 - protein, 184 aa, Homo sapiens
  Payload ID: 6874
  Gene Symbol: GNPNAT1
  Gene Name: glucosamine-phosphate N-acetyltransferase 1
  Uniprot ID: Q96EK6
  ENSP ID: ENSP00000216410
MKPDETPMFDPSLLKEVDWSQNTATFSPAISPTHPGEGLVLRPLCTADLNRGFFKVLGQLTETGVVSPEQFMKSFEHMKKSGDYYVTVVEDVTLGQIVATATLIIEHKFIHSCAKRGRVEDVVVSDECRGKQLGKLLLSTLTLLSKKLNCYKITLECLPQNVGFYKKFGYTVSEENYMCRRFLK

SEQ ID NO: 34804 - protein, 163 aa, Homo sapiens
  Payload ID: 6874
  Gene Symbol: GNPNAT1
  Gene Name: glucosamine-phosphate N-acetyltransferase 1
  ENSP ID: ENSP00000452032
MKPDETPMFDPSLLKEVDWSQNTATFSPAISPTHPGEGLVLRPLCTADLNRGFFKVLGQLTETGVVSPEQFMKSFEHMKKSGDYYVTVVEDVTLGQIVATATLIIEHKFIHSCAKRGRVEDVVVSDECRGKQLGKLLLSTLTLLSKKLNCYKITLECLPQNVG

SEQ ID NO: 34805 - protein, 113 aa, Homo sapiens
  Payload ID: 6874
  Gene Symbol: GNPNAT1
  Gene Name: glucosamine-phosphate N-acetyltransferase 1
  ENSP ID: ENSP00000452310
MKSFEHMKKSGDYYVTVVEDVTLGQIVATATLIIEHKFIHSCAKRGRVEDVVVSDECRGKQLGKLLLSTLTLLSKKLNCYKITLECLPQNVGFYKKFGYTVSEENYMCRRFLK

SEQ ID NO: 34806 - protein, 428 aa, Homo sapiens
  Payload ID: 6875
  Gene Symbol: GCNT1
  Gene Name: glucosaminyl (N-acetyl) transferase 1, core 2
  Uniprot ID: Q02742
  ENSP ID: ENSP00000365920
MLRTLLRRRLFSYPTKYYFMVLVLSLITFSVLRIHQKPEFVSVRHLELAGENPSSDINCTKVLQGDVNEIQKVKLEILTVKFKKRPRWTPDDYINMTSDCSSFIKRRKYIVEPLSKEEAEFPIAYSIVVHHKIEMLDRLLRAIYMPQNFYCIHVDTKSEDSYLAAVMGIASCFSNVFVASRLESVVYASWSRVQADLNCMKDLYAMSANWKYLINLCGMDFPIKTNLEIVRKLKLLMGENNLETERMPSHKEERWKKRYEVVNGKLTNTGTVKMLPPLETPLFSGSAYFVVSREYVGYVLQNEKIQKLMEWAQDTYSPDEYLWATIQRIPEVPGSLPASHKYDLSDMQAVARFVKWQYFEGDVSKGAPYPPCDGVHVRSVCIFGAGDLNWMLRKHHLFANKFDVDVDLFAIQCLDEHLRHKALETLKH

SEQ ID NO: 34807 - protein, 428 aa, Homo sapiens; identical to SEQ ID NO: 34806
  Payload ID: 6875
  Gene Symbol: GCNT1
  Gene Name: glucosaminyl (N-acetyl) transferase 1, core 2
  Uniprot ID: Q02742
  ENSP ID: ENSP00000390703

SEQ ID NO: 34808 - protein, 428 aa, Homo sapiens; identical to SEQ ID NO: 34806
  Payload ID: 6875
  Gene Symbol: GCNT1
  Gene Name: glucosaminyl (N-acetyl) transferase 1, core 2
  Uniprot ID: Q02742
  ENSP ID: ENSP00000415454

SEQ ID NO: 34809 - protein, 402 aa, Homo sapiens
  Payload ID: 6876
  Gene Symbol: GCNT2
  Gene Name: glucosaminyl (N-acetyl) transferase 2, I-branching enzyme (I blood group)
  Uniprot ID: Q8NFS9
  ENSP ID: ENSP00000265012
MNFWRYCFFAFTLLSVVIFVRFYSSQLSPPKSYEKLNSSSERYFRKTACNHALEKMPVFLWENILPSPLRSVPCKDYLTQNHYITSPLSEEEAAFPLAYVMVIHKDFDTFERLFRAIYMPQNVYCVHVDEKAPAEYKESVRQLLSCFQNAFIASKTESVVYAGISRLQADLNCLKDLVASEVPWKYVINTCGQDFPLKTNREIVQHLKGFKGKNITPGVLPPDHAIKRTKYVHQEHTDKGGFFVKNTNILKTSPPHQLTIYFGTAYVALTRDFVDFVLRDQRAIDLLQWSKDTYSPDEHFWVTLNRVSGVPGSMPNASWTGNLRAIKWSDMEDRHGGCHGHYVHGICIYGNGDLKWLVNSPSLFANKFELNTYPLTVECLELRHRERTLNQSETAIQPSWYF

SEQ ID NO: 34810 - protein, 400 aa, Homo sapiens
  Payload ID: 6876
  Gene Symbol: GCNT2
  Gene Name: glucosaminyl (N-acetyl) transferase 2, I-branching enzyme (I blood group)
  Uniprot ID: Q06430
  ENSP ID: ENSP00000314844
MPLSMRYLFIISVSSVIIFIVFSVFNFGGDPSFQRLNISDPLRLTQVCTSFINGKTRFLWKNKLMIHEKSSCKEYLTQSHYITAPLSKEEADFPLAYIMVIHHHFDTFARLFRAIYMPQNIYCVHVDEKATTEFKDAVEQLLSCFPNAFLASKMEPVVYGGISRLQADLNCIRDLSAFEVSWKYVINTCGQDFPLKTNKEIVQYLKGFKGKNITPGVLPPAHAIGRTKYVHQEHLGKELSYVIRTTALKPPPPHNLTIYFGSAYVALSREFANFVLHDPRAVDLLQWSKDTFSPDEHFWVTLNRIPGVPGSMPNASWTGNLRAIKWSDMEDRHGGCHGHYVHGICIYGNGDLKWLVNSPSLFANKFELNTYPLTVECLELRHRERTLNQSETAIQPSWYF

SEQ ID NO: 34811 - protein, 402 aa, Homo sapiens
  Payload ID: 6876
  Gene Symbol: GCNT2
  Gene Name: glucosaminyl (N-acetyl) transferase 2, I-branching enzyme (I blood group)
  Uniprot ID: Q8N0V5
  ENSP ID: ENSP00000368917
MMGSWKHCLFSASLISALIFVFVYNTELWENKRFLRAALSNASLLAEACHQIFEGKVFYPTENALKTTLDEATCYEYMVRSHYVTETLSEEEAGFPLAYTVTIHKDFGTFERLFRAIYMPQNVYCVHLDQKATDAFKGAVKQLLSCFPNAFLASKKESVVYGGISRLQADLNCLEDLVASEVPWKYVINTCGQDFPLKTNREIVQYLKGFKGKNITPGVLPPDHAVGRTKYVHQELLNHKNSYVIKTTKLKTPPPHDMVIYFGTAYVALTRDFANFVLQDQLALDLLSWSKDTYSPDEHFWVTLNRIPGVPGSMPNASWTGNLRAIKWSDMEDRHGGCHGHYVHGICIYGNGDLKWLVNSPSLFANKFELNTYPLTVECLELRHRERTLNQSETAIQPSWYF

SEQ ID NO: 34812 - protein, 116 aa, Homo sapiens
  Payload ID: 6876
  Gene Symbol: GCNT2
  Gene Name: glucosaminyl (N-acetyl) transferase 2, I-branching enzyme (I blood group)
  ENSP ID: ENSP00000386321
MEGKIFGSSFLCPTRCDQLLLPGVPGSMPNASWTGNLRAIKWSDMEDRHGGCHGHYVHGICIYGNGDLKWLVNSPSLFANKFELNTYPLTVECLELRHRERTLNQSETAIQPSWYF

SEQ ID NO: 34813 - protein, 402 aa, Homo sapiens; identical to SEQ ID NO: 34811
  Payload ID: 6876
  Gene Symbol: GCNT2
  Gene Name: glucosaminyl (N-acetyl) transferase 2, I-branching enzyme (I blood group)
  Uniprot ID: Q8N0V5
  ENSP ID: ENSP00000419411

SEQ ID NO: 34814 - protein, 438 aa, Homo sapiens
  Payload ID: 6877
  Gene Symbol: GCNT3
  Gene Name: glucosaminyl (N-acetyl) transferase 3, mucin type
  Uniprot ID: O95395
  ENSP ID: ENSP00000379377
MVQWKRLCQLHYLWALGCYMLLATVALKLSFRLKCDSDHLGLESRESQSQYCRNILYNFLKLPAKRSINCSGVTRGDQEAVLQAILNNLEVKKKREPFTDTHYLSLTRDCEHFKAERKFIQFPLSKEEVEFPIAYSMVIHEKIENFERLLRAVYAPQNIYCVHVDEKSPETFKEAVKAIISCFPNVFIASKLVRVVYASWSRVQADLNCMEDLLQSSVPWKYFLNTCGTDFPIKSNAEMVQALKMLNGRNSMESEVPPKHKETRWKYHFEVVRDTLHLTNKKKDPPPYNLTMFTGNAYIVASRDFVQHVLKNPKSQQLIEWVKDTYSPDEHLWATLQRARWMPGSVPNHPKYDISDMTSIARLVKWQGHEGDIDKGAPYAPCSGIHQRAICVYGAGDLNWMLQNHHLLANKFDPKVDDNALQCLEEYLRYKAIYGTEL

SEQ ID NO: 34815 - protein, 438 aa, Homo sapiens; identical to SEQ ID NO: 34814
  Payload ID: 6877
  Gene Symbol: GCNT3
  Gene Name: glucosaminyl (N-acetyl) transferase 3, mucin type
  Uniprot ID: O95395
  ENSP ID: ENSP00000452741

SEQ ID NO: 34816 - protein, 87 aa, Homo sapiens
  Payload ID: 6877
  Gene Symbol: GCNT3
  Gene Name: glucosaminyl (N-acetyl) transferase 3, mucin type
  ENSP ID: ENSP00000453453
MVQWKRLCQLHYLWALGCYMLLATVALKLSFRLKCDSDHLGLESRESQSQYCRNILYNFLKLPAKRSINCSGVTRGDQEAVLQAILN

SEQ ID NO: 34817 - protein, 153 aa, Homo sapiens
  Payload ID: 6877
  Gene Symbol: GCNT3
  Gene Name: glucosaminyl (N-acetyl) transferase 3, mucin type
  ENSP ID: ENSP00000453774
MVQWKRLCQLHYLWALGCYMLLATVALKLSFRLKCDSDHLGLESRESQSQYCRNILYNFLKLPAKRSINCSGVTRGDQEAVLQAILNNLEVKKKREPFTDTHYLSLTRDCEHFKAERKFIQFPLSKEEVEFPIAYSMVIHEKIENFERLLRAV

SEQ ID NO: 34818 - protein, 53 aa, Homo sapiens
  Payload ID: 6877
  Gene Symbol: GCNT3
  Gene Name: glucosaminyl (N-acetyl) transferase 3, mucin type
  ENSP ID: ENSP00000453928
MVQWKRLCQLHYLWALGCYMLLATVALKLSFRLKCDSDHLGLESRESQSQYCR

SEQ ID NO: 34819 - protein, 453 aa, Homo sapiens
  Payload ID: 6878
  Gene Symbol: GCNT4
  Gene Name: glucosaminyl (N-acetyl) transferase 4, core 2
  Uniprot ID: Q9P109
  ENSP ID: ENSP00000317027
MKIFKCYFKHTLQQKVFILFLTLWLLSLLKLLNVRRLFPQKDIYLVEYSLSTSPFVRNRYTHVKDEVRYEVNCSGIYEQEPLEIGKSLEIRRRDIIDLEDDDVVAMTSDCDIYQTLRGYAQKLVSKEEKSFPIAYSLVVHKDAIMVERLIHAIYNQHNIYCIHYDRKAPDTFKVAMNNLAKCFSNIFIASKLEAVEYAHISRLQADLNCLSDLLKSSIQWKYVINLCGQDFPLKSNFELVSELKKLNGANMLETVKPPNSKLERFTYHHELRRVPYEYVKLPIRTNISKEAPPHNIQIFVGSAYFVLSQAFVKYIFNNSIVQDFFAWSKDTYSPDEHFWATLIRVPGIPGEISRSAQDVSDLQSKTRLVKWNYYEGFFYPSCTGSHLRSVCIYGAAELRWLIKDGHWFANKFDSKVDPILIKCLAEKLEEQQRDWITLPSEKLFMDRNLTTTS

SEQ ID NO: 34820 - protein, 308 aa, Homo sapiens
  Payload ID: 6879
  Gene Symbol: GCNT7
  Gene Name: glucosaminyl (N-acetyl) transferase family member 7
  Uniprot ID: Q6ZNI0
  ENSP ID: ENSP00000243913
MFVQLLRAIYVPQNVYCIHVDEKAPMKYKTAVQTLVNCFENVFISSKTEKVAYAGFTRLQADINCMKVLVHSKFQWNYVINLCGQDFPIKTNREIIHYIRSKWSDKNITPGVIQPLHIKSKTSQSHLEFVPKGSIYAPPNNRFKDKPPHNLTIYFGSAYYVLTRKFVEFILTDIHAKDMLQWSKDIRSPEQHYWVTLNRLKDAPGATPNAGWEGNVRAIKRKSEEGNVHDGCKGRYVEDICVYGPGDLPWLIQSPSLFANKFEPSTDPLVVTCLERRHRLQVLRQAEVPIEPHWHFQQQSHFNMRLNR

SEQ ID NO: 34821 - protein, 429 aa, Homo sapiens
  Payload ID: 6879
  Gene Symbol: GCNT7
  Gene Name: glucosaminyl (N-acetyl) transferase family member 7
  ENSP ID: ENSP00000482600
MSQLRATKSGLVVRAVICIFIFLYLRNPTPAESEEEPAQPEVVECGFYPDELCSALFEGKGAAPIAKFCKTPHKSEIHAHLHTPGNCSRISRGLHFITRPLSAEEGDFSLAYIITIHKELAMFVQLLRAIYVPQNVYCIHVDEKAPMKYKTAVQTLVNCFENVFISSKTEKVAYAGFTRLQADINCMKVLVHSKFQWNYVINLCGQDFPIKTNREIIHYIRSKWSDKNITPGVIQPLHIKSKTSQSHLEFVPKGSIYAPPNNRFKDKPPHNLTIYFGSAYYVLTRKFVEFILTDIHAKDMLQWSKDIRSPEQHYWVTLNRLKDAPGATPNAGWEGNVRAIKRKSEEGNVHDGCKGRYVEDICVYGPGDLPWLIQSPSLFANKFEPSTDPLVVTCLERRHRLQVLRQAEVPIEPHWHFQQQSHFNMRLNR

SEQ ID NO: 34822 - protein, 346 aa, Homo sapiens
  Payload ID: 6880
  Gene Symbol: G6PC3
  Gene Name: glucose 6 phosphatase, catalytic, 3
  Uniprot ID: Q9BUM1
  ENSP ID: ENSP00000269097
MESTLGAGIVIAEALQNQLAWLENVWLWITFLGDPKILFLFYFPAAYYASRRVGIAVLWISLITEWLNLIFKWFLFGDRPFWWVHESGYYSQAPAQVHQFPSSCETGPGSPSGHCMITGAALWPIMTALSSQVATRARSRWVRVMPSLAYCTFLLAVGLSRIFILAHFPHQVLAGLITGAVLGWLMTPRVPMERELSFYGLTALALMLGTSLIYWTLFTLGLDLSWSISLAFKWCERPEWIHVDSRPFASLSRDSGAALGLGIALHSPCYAQVRRAQLGNGQKIACLVLAMGLLGPLDWLGHPPQISLFYIFNFLKYTLWPCLVLALVPWAVHMFSAQEAPPIHSS

SEQ ID NO: 34823 - protein, 69 aa, Homo sapiens
  Payload ID: 6880
  Gene Symbol: G6PC3
  Gene Name: glucose 6 phosphatase, catalytic, 3
  ENSP ID: ENSP00000465111
  MOD_RES (1)..(1): Any amino acid
XALSSQVATRARRRCPGLADDSPSAYGAGAKLLWVDCTGPHARHQPHLLDPLYTGPGSFLVHQPSLQVV

SEQ ID NO: 34824 - protein, 73 aa, Homo sapiens
  Payload ID: 6880
  Gene Symbol: G6PC3
  Gene Name: glucose 6 phosphatase, catalytic, 3
  ENSP ID: ENSP00000466821
MESTLGAGIVIAEALQNQLAWLENVWLWITFLGDPKILFLFYFPAAYYASRRVGIAVLWISLITEWLNLIFKW

SEQ ID NO: 34825 - protein, 73 aa, Homo sapiens; identical to SEQ ID NO: 34824
  Payload ID: 6880
  Gene Symbol: G6PC3
  Gene Name: glucose 6 phosphatase, catalytic, 3
  ENSP ID: ENSP00000466983

SEQ ID NO: 34826 - protein, 72 aa, Homo sapiens
  Payload ID: 6880
  Gene Symbol: G6PC3
  Gene Name: glucose 6 phosphatase, catalytic, 3
  ENSP ID: ENSP00000467624
MESTLGAGIVIAEALQNQLAWLENVWLWITFLGDPKILFLFYFPAAYYASRRVGIAVLWISLITEWLNLIFK

SEQ ID NO: 34827 - protein, 243 aa, Homo sapiens
  Payload ID: 6880
  Gene Symbol: G6PC3
  Gene Name: glucose 6 phosphatase, catalytic, 3
  ENSP ID: ENSP00000468677
MESTLGAGIVIAEALQNQLAWLENVWLWITFLGDPKILFLFYFPAAYYASRRVGIAVLWISLITEWLNLIFKWFLFGDRPFWWVHESGYYSQAPAQVATRARSRWVRVMPSLAYCTFLLAVGLSRIFILAHFPHQVLAGLITGAVLGWLMTPRVPMERELSFYGLTALALMLGTSLIYWTLFTLGLDLSWSISLAFKWCERPEWIHVDSRPFASLSRDSGAALGLGIALHSPCYAQVRRAQLG

SEQ ID NO: 34828 - protein, 357 aa, Homo sapiens
  Payload ID: 6881
  Gene Symbol: G6PC
  Gene Name: glucose-6-phosphatase, catalytic subunit
  Uniprot ID: P35575
  ENSP ID: ENSP00000253801
MEEGMNVLHDFGIQSTHYLQVNYQDSQDWFILVSVIADLRNAFYVLFPIWFHLQEAVGIKLLWVAVIGDWLNLVFKWILFGQRPYWWVLDTDYYSNTSVPLIKQFPVTCETGPGSPSGHAMGTAGVYYVMVTSTLSIFQGKIKPTYRFRCLNVILWLGFWAVQLNVCLSRIYLAAHFPHQVVAGVLSGIAVAETFSHIHSIYNASLKKYFLITFFLFSFAIGFYLLLKGLGVDLLWTLEKAQRWCEQPEWVHIDTTPFASLLKNLGTLFGLGLALNSSMYRESCKGKLSKWLPFRLSSIVASLVLLHVFDSLKPPSQVELVFYVLSFCKSAVVPLASVSVIPYCLAQVLGQPHKKSL

SEQ ID NO: 34829 - protein, 176 aa, Homo sapiens
  Payload ID: 6881
  Gene Symbol: G6PC
  Gene Name: glucose-6-phosphatase, catalytic subunit
  Uniprot ID: P35575
  ENSP ID: ENSP00000465958
MEEGMNVLHDFGIQSTHYLQVNYQDSQDWFILVSVIADLRNAFYVLFPIWFHLQEAVGIKLLWVAVIGDWLNLVFKWILFGQRPYWWVLDTDYYSNTSVPLIKQFPVTCETGPGKDKADLQISVLECHFVVGILGCAAECLSVTNLPCCSFSSSSCCWSPVRHCCCRNFQPHPQHL

SEQ ID NO: 34830 - protein, 163 aa, Homo sapiens
  Payload ID: 6881
  Gene Symbol: G6PC
  Gene Name: glucose-6-phosphatase, catalytic subunit
  ENSP ID: ENSP00000466202
MEEGMNVLHDFGIQSTHYLQVNYQDSQDWFILVSVIADLRNAFYVLFPIWFHLQEAVGIKLLWVAVIGDWLNLVFKWILFGQRPYWWVLDTDYYSNTSVPLIKQFPVTCETGPGSPSGHAMGTAGVYYVMVTSTLSIFQGKIKPTYRFRHCCCRNFQPHPQHL

SEQ ID NO: 34831 - protein, 102 aa, Homo sapiens
  Payload ID: 6882
  Gene Symbol: G6PC2
  Gene Name: glucose-6-phosphatase, catalytic, 2
  Uniprot ID: Q9NQR9
  ENSP ID: ENSP00000282075
MDFLHRNGVLIIQHLQKDYRAYYTFLNFMSNVGDPRNIFFIYFPLCFQFNQTVGTKMIWVAVIGDWLNLIFKWKSIWPCNGRILCLVCHGNRCPEPHCLWDG

SEQ ID NO: 34832 - protein, 355 aa, Homo sapiens
  Payload ID: 6882
  Gene Symbol: G6PC2
  Gene Name: glucose-6-phosphatase, catalytic, 2
  Uniprot ID: Q9NQR9
  ENSP ID: ENSP00000364512
MDFLHRNGVLIIQHLQKDYRAYYTFLNFMSNVGDPRNIFFIYFPLCFQFNQTVGTKMIWVAVIGDWLNLIFKWILFGHRPYWWVQETQIYPNHSSPCLEQFPTTCETGPGSPSGHAMGASCVWYVMVTAALSHTVCGMDKFSITLHRLTWSFLWSVFWLIQISVCISRVFIATHFPHQVILGVIGGMLVAEAFEHTPGIQTASLGTYLKTNLFLFLFAVGFYLLLRVLNIDLLWSVPIAKKWCANPDWIHIDTTPFAGLVRNLGVLFGLGFAINSEMFLLSCRGGNNYTLSFRLLCALTSLTILQLYHFLQIPTHEEHLFYVLSFCKSASIPLTVVAFIPYSVHMLMKQSGKKSQ

SEQ ID NO: 34833 - protein, 80 aa, Homo sapiens
  Payload ID: 6882
  Gene Symbol: G6PC2
  Gene Name: glucose-6-phosphatase, catalytic, 2
  ENSP ID: ENSP00000392183
MDFLHRNGVLIIQHLQKDYRAYYTFLNFMSNVGDPRNIFFIYFPLCFQFNQTVGTKMIWVAVIGDWLNLIFKWHAGGRGL

SEQ ID NO: 34834 - protein, 154 aa, Homo sapiens
  Payload ID: 6882
  Gene Symbol: G6PC2
  Gene Name: glucose-6-phosphatase, catalytic, 2
  Uniprot ID: Q9NQR9
  ENSP ID: ENSP00000396939
MDFLHRNGVLIIQHLQKDYRAYYTFLNFMSNVGDPRNIFFIYFPLCFQFNQTVGTKMIWVAVIGDWLNLIFKWILFGHRPYWWVQETQIYPNHSSPCLEQFPTTCETGPGSPSGHAMGASCVWYVMVTAALSHTVCGMDKFSITLHRHAGGRGL

SEQ ID NO: 34835 - protein, 80 aa, Homo sapiens; identical to SEQ ID NO: 34833
  Payload ID: 6882
  Gene Symbol: G6PC2
  Gene Name: glucose-6-phosphatase, catalytic, 2
  ENSP ID: ENSP00000479442

SEQ ID NO: 34836 - protein, 154 aa, Homo sapiens; identical to SEQ ID NO: 34834
  Payload ID: 6882
  Gene Symbol: G6PC2
  Gene Name: glucose-6-phosphatase, catalytic, 2
  Uniprot ID: Q9NQR9
  ENSP ID: ENSP00000481098

SEQ ID NO: 34837 - protein, 355 aa, Homo sapiens; identical to SEQ ID NO: 34832
  Payload ID: 6882
  Gene Symbol: G6PC2
  Gene Name: glucose-6-phosphatase, catalytic, 2
  Uniprot ID: Q9NQR9
  ENSP ID: ENSP00000482583

SEQ ID NO: 34838 - protein, 102 aa, Homo sapiens; identical to SEQ ID NO: 34831
  Payload ID: 6882
  Gene Symbol: G6PC2
  Gene Name: glucose-6-phosphatase, catalytic, 2
  Uniprot ID: Q9NQR9
  ENSP ID: ENSP00000483899

SEQ ID NO: 34839 - protein, 561 aa, Homo sapiens
  Payload ID: 6883
  Gene Symbol: G6PD
  Gene Name: glucose-6-phosphate dehydrogenase
  Uniprot ID: P11413
  ENSP ID: ENSP00000358633
MAEQVALSRTQVCGILREELFQGDAFHQSDTHIFIIMGASGDLAKKKIYPTIWWLFRDGLLPENTFIVGYARSRLTVADIRKQSEPFFKATPEEKLKLEDFFARNSYVAGQYDDAASYQRLNSHMNALHLGSQANRLFYLALPPTVYEAVTKNIHESCMSQIGWNRIIVEKPFGRDLQSSDRLSNHISSLFREDQIYRIDHYLGKEMVQNLMVLRFANRIFGPIWNRDNIACVILTFKEPFGTEGRGGYFDEFGIIRGPGRQGGSGSESCSLSLGSLVWGPHALEPGEQGGELRRALASSVPRDVMQNHLLQMLCLVAMEKPASTNSDDVRDEKVKVLKCISEVQANNVVLGQYVGNPDGEGEATKGYLDDPTVPRGSTTATFAAVVLYVENERWDGVPFILRCGKALNERKAEVRLQFHDVAGDIFHQQCKRNELVIRVQPNEAVYTKMMTKKPGMFFNPEESELDLTYGNRYKNVKLPDAYERLILDVFCGSQMHFVRSDELREAWRIFTPLLHQIELEKPKPIPYIYGSRGPTEADELMKRVGFQYEGTYKWVNPHKL

SEQ ID NO: 34840 - protein, 545 aa, Homo sapiens
  Payload ID: 6883
  Gene Symbol: G6PD
  Gene Name: glucose-6-phosphate dehydrogenase
  Uniprot ID: P11413
  ENSP ID: ENSP00000377192
MGRRGSAPGNGRTLRGCERGGRRRRSADSVMAEQVALSRTQVCGILREELFQGDAFHQSDTHIFIIMGASGDLAKKKIYPTIWWLFRDGLLPENTFIVGYARSRLTVADIRKQSEPFFKATPEEKLKLEDFFARNSYVAGQYDDAASYQRLNSHMNALHLGSQANRLFYLALPPTVYEAVTKNIHESCMSQIGWNRIIVEKPFGRDLQSSDRLSNHISSLFREDQIYRIDHYLGKEMVQNLMVLRFANRIFGPIWNRDNIACVILTFKEPFGTEGRGGYFDEFGIIRDVMQNHLLQMLCLVAMEKPASTNSDDVRDEKVKVLKCISEVQANNVVLGQYVGNPDGEGEATKGYLDDPTVPRGSTTATFAAVVLYVENERWDGVPFILRCGKALNERKAEVRLQFHDVAGDIFHQQCKRNELVIRVQPNEAVYTKMMTKKPGMFFNPEESELDLTYGNRYKNVKLPDAYERLILDVFCGSQMHFVRSDELREAWRIFTPLLHQIELEKPKPIPYIYGSRGPTEADELMKRVGFQYEGTYKWVNPHKL

SEQ ID NO: 34841 - protein, 515 aa, Homo sapiens [sequence omitted]

SEQ ID NO: 34842 - protein, 256 aa, Homo sapiens
  Payload ID: 6883
  Gene Symbol: G6PD
  Gene Name: glucose-6-phosphate dehydrogenase
  ENSP ID: ENSP00000394690
MAEQVALSRTQVCGILREELFQGDAFHQSDTHIFIIMGASGDLAKKKIYPTIWWLFRDGLLPENTFIVGYARSRLTVADIRKQSEPFFKATPEEKLKLEDFFARNSYVAGQYDDAASYQRLNSHMNALHLGSQANRLFYLALPPTVYEAVTKNIHESCMSQIGWNRIIVEKPFGRDLQSSDRLSNHISSLFREDQIYRIDHYLGKEMVQNLMVLRFANRIFGPIWNRDNIACVILTFKEPFGTEGRGGYFDEFGII

SEQ ID NO: 34843 - protein, 338 aa, Homo sapiens
  Payload ID: 6883
  Gene Symbol: G6PD
  Gene Name: glucose-6-phosphate dehydrogenase
  ENSP ID: ENSP00000395599
MAEQVALSRTQVCGILREELFQGDAFHQSDTHIFIIMGASGDLAKKKIYPTIWWLFRDGLLPENTFIVGYARSRLTVADIRKQSEPFFKATPEEKLKLEDFFARNSYVAGQYDDAASYQRLNSHMNALHLGSQANRLFYLALPPTVYEAVTKNIHESCMSQIRGWNRIIVEKPFGRDLQSSDRLSNHISSLFREDQIYRIDHYLGKEMVQNLMVLRFANRIFGPIWNRDNIACVILTFKEPFGTEGRGGYFDEFGIIRDVMQNHLLQMLCLVAMEKPASTNSDDVRDEKVKVLKCISEVQANNVVLGQYVGNPDGEGEATKGYLDDPTVPRGSTTATF

SEQ ID NO: 34844 - protein, 320 aa, Homo sapiens
  Payload ID: 6883
  Gene Symbol: G6PD
  Gene Name: glucose-6-phosphate dehydrogenase
  ENSP ID: ENSP00000400648
MAEQVALSRTQVCGILREELFQGDAFHQSDTHIFIIMGASGDLAKKKIYPTIWWLFRDGLLPENTFIVGYARSRLTVADIRKQSEPFFKATPEEKLKLEDFFARNSYVAGQYDDAASYQRLNSHMNALHLGSQANRLFYLALPPTVYEAVTKNIHESCMSQIRGWNRIIVEKPFGRDLQSSDRLSNHISSLFREDQIYRIDHYLGKEMVQNLMVLRFANRIFGPIWNRDNIACVILTFKEPFGTEGRGGYFDEFGIIRDVMQNHLLQMLCLVAMEKPASTNSDDVRDEKVKVLKCISEVQANNVVLGQYVGNPDGEGEAT

SEQ ID NO: 34845 - protein, 515 aa, Homo sapiens [sequence omitted]

SEQ ID NO: 34846 - protein, 558 aa, Homo sapiens
  Payload ID: 6884
  Gene Symbol: GPI
  Gene Name: glucose-6-phosphate isomerase
  Uniprot ID: P06744
  ENSP ID: ENSP00000348877
MAALTRDPQFQKLQQWYREHRSELNLRRLFDANKDRFNHFSLTLNTNHGHILVDYSKNLVTEDVMRMLVDLAKSRGVEAARERMFNGEKINYTEGRAVLHVALRNRSNTPILVDGKDVMPEVNKVLDKMKSFCQRVRSGDWKGYTGKTITDVINIGIGGSDLGPLMVTEALKPYSSGGPRVWYVSNIDGTHIAKTLAQLNPESSLFIIASKTFTTQETITNAETAKEWFLQAAKDPSAVAKHFVALSTNTTKVKEFGIDPQNMFEFWDWVGGRYSLWSAIGLSIALHVGFDNFEQLLSGAHWMDQHFRTTPLEKNAPVLLALLGIWYINCFGCETHAMLPYDQYLHRFAAYFQQGDMESNGKYITKSGTRVDHQTGPIVWGEPGTNGQHAFYQLIHQGTKMIPCDFLIPVQTQHPIRKGLHHKILLANFLAQTEALMRGKSTEEARKELQAAGKSPEDLERLLPHKVFEGNRPTNSIVFTKLTPFMLGALVAMYEHKIFVQGIIWDINSFDQWGVELGKQLAKKIEPELDGSAQVTSHDASTNGLINFIKQQREARVQ

SEQ ID NO: 34847 - protein, 569 aa, Homo sapiens
  Payload ID: 6884
  Gene Symbol: GPI
  Gene Name: glucose-6-phosphate isomerase
  Uniprot ID: P06744
  ENSP ID: ENSP00000405573
MVALCSLQHLGSSDPRALPTLPTATSGQRPAKRRRKSPAMAALTRDPQFQKLQQWYREHRSELNLRRLFDANKDRFNHFSLTLNTNHGHILVDYSKNLVTEDVMRMLVDLAKSRGVEAARERMFNGEKINYTEGRAVLHVALRNRSNTPILVDGKDVMPEVNKVLDKMKSFCQGPLMVTEALKPYSSGGPRVWYVSNIDGTHIAKTLAQLNPESSLFIIASKTFTTQETITNAETAKEWFLQAAKDPSAVAKHFVALSTNTTKVKEFGIDPQNMFEFWDWVGGRYSLWSAIGLSIALHVGFDNFEQLLSGAHWMDQHFRTTPLEKNAPVLLALLGIWYINCFGCETHAMLPYDQYLHRFAAYFQQGDMESNGKYITKSGTRVDHQTGPIVWGEPGTNGQHAFYQLIHQGTKMIPCDFLIPVQTQHPIRKGLHHKILLANFLAQTEALMRGKSTEEARKELQAAGKSPEDLERLLPHKVFEGNRPTNSIVFTKLTPFMLGALVAMYEHKIFVQGIIWDINSFDQWGVELGKQLAKKIEPELDGSAQVTSHDASTNGLINFIKQQREARVQ

SEQ ID NO: 34848 - protein, 110 aa, Homo sapiens
  Payload ID: 6884
  Gene Symbol: GPI
  Gene Name: glucose-6-phosphate isomerase
  ENSP ID: ENSP00000464797
MVALCSLQHLGSSDPRALPTLPTATSGQRPAKRRRKSPAMAALTRDPQFQKLQQWYREHRSELNLRRLFDANKDRFNHFSLTLNTNHGHILVDYSKNLVTEDVMRMLVDL

SEQ ID NO: 34849 - protein, 10 aa, Homo sapiens
  Payload ID: 6884
  Gene Symbol: GPI
  Gene Name: glucose-6-phosphate isomerase
  ENSP ID: ENSP00000464798
  MOD_RES (1)..(1): Any amino acid
XRPAKRRRKR

SEQ ID NO: 34850 - protein, 573 aa, Homo sapiens
  Payload ID: 6884
  Gene Symbol: GPI
  Gene Name: glucose-6-phosphate isomerase
  ENSP ID: ENSP00000465858
TSGQRPAKRRRKSPAMAALTRDPQFQKLQQWYREHRSELNLRRLFDANKDRFNHFSLTLNTNHGHILVDYSKNLVTEDVMRMLVDLAKSRGVEAARERMFNGEKINYTEGRAVLHVALRNRSNTPILVDGKDVMPEVNKVLDKMKSFCQRVRSGDWKGYTGKTITDVINIGIGGSDLGPLMVTEALKPYSSGGPRVWYVSNIDGTHIAKTLAQLNPESSLFIIASKTFTTQETITNAETAKEWFLQAAKDPSAVAKHFVALSTNTTKVKEFGIDPQNMFEFWDWVGGRYSLWSAIGLSIALHVGFDNFEQLLSGAHWMDQHFRTTPLEKNAPVLLALLGIWYINCFGCETHAMLPYDQYLHRFAAYFQQGDMESNGKYITKSGTRVDHQTGPIVWGEPGTNGQHAFYQLIHQGTKMIPCDFLIPVQTQHPIRKGLHHKILLANFLAQTEALMRGKSTEEARKELQAAGKSPEDLERLLPHKVFEGNRPTNSIVFTKLTPFMLGALVAMYEHKIFVQGIIWDINSFDQWGVELGKQLAKKIEPELDGSAQVTSHDASTNGLINFIKQQREARVQ

SEQ ID NO: 34851 - protein, 146 aa, Homo sapiens
  Payload ID: 6884
  Gene Symbol: GPI
  Gene Name: glucose-6-phosphate isomerase
  ENSP ID: ENSP00000466191
MVALCSLQHLGSSDPRALPTLPTATSGQRPAKRRRKSPAMAALTRDPQFQKLQQWYREHRSELNLRRLFDANKDRFNHFSLTLNTNHGHILVDYSKNLVTEDVMRMLVDLAKSRGVEAARERMFNGEKINYTEGRAVLHVALRNRS

SEQ ID NO: 34852 - protein, 162 aa, Homo sapiens
  Payload ID: 6884
  Gene Symbol: GPI
  Gene Name: glucose-6-phosphate isomerase
  ENSP ID: ENSP00000466851
MAALTRDPQFQKLQQWYREHRSELNLRRLFDANKDRFNHFSLTLNTNHGHILVDYSKNLVTEDVMRMLVDLAKSRGVEAARERMFNGEKINYTERVRSGDWKGYTGKTITDVINIGIGGSDLGPLMVTEALKPYSSGGPRVWYVSNIDGTHIAKTLAQLNPE

SEQ ID NO: 34853 - protein, 159 aa, Homo sapiens
  Payload ID: 6884
  Gene Symbol: GPI
  Gene Name: glucose-6-phosphate isomerase
  ENSP ID: ENSP00000467221
MAALTRDPQFQKLQQWYREHRSELNLRRLFDANKDRFNHFSLTLNTNHGHILVDYSKNLVTEDVMRMLVDLAKSRGVEAARERMFNGEKINYTEGRAVLHVALRNRSNTPILVDGKDVMPEVNKVLDKMKSFCQRVRSGDWKGYTGKTITDVINIGIGG

SEQ ID NO: 34854 - protein, 166 aa, Homo sapiens
  Payload ID: 6884
  Gene Symbol: GPI
  Gene Name: glucose-6-phosphate isomerase
  ENSP ID: ENSP00000467590
MAALTRDPQFQKLQQWYREHRSELNLRRLFDANKDRFNHFSLTLNTNHGHILVDYSKNLVTEDVMRMLVDLAKSRGVEAARERMFNGEKINYTEGRAVLHVALRNRSNTPILVDGKDVMPEVNKVLDKMKSFCQGPLMVTEALKPYSSGGPRVWYVSNIDGTHIAK

SEQ ID NO: 34855 - protein, 474 aa, Homo sapiens
  Payload ID: 6884
  Gene Symbol: GPI
  Gene Name: glucose-6-phosphate isomerase
  ENSP ID: ENSP00000467670
MAALTRDPQFQKLQQWYREHRSELNLRRLFDANKDRFNHFSLTLNTNHGHILVDYSKNLVTEDVMRMLVDLAKSRGVEAARERMFNGEKINYTEGRAVLHVALRNRSNTPILVDGKDVMPEVNKVLDKMKSFCQRVRSGDWKGYTGKTITDVINIGIGGSDLGPLMVTEALKPYSSGGPRVWYVSNIDGTHIAKTLAQLNPESSLFIIASKTFTTQETITNAETAKEWFLQAAKDPSAVAKHFVALSTNTTKVKEFGIDPQNMFEFWDWVGGRYSLWSAIGLSIALHVGFDNFEQLLSGAHWMDQHFRTTPLEKNAPVLLALLGIWYINCFGCETHAMLPYDQYLHRFAAYFQQGDMESNGKYITKSGTRVDHQTGPIVWGEPGTNGQHAFYQLIHQGTKMIPCDFLIPVQTQHPIRKGLHHKILLANFLAQTEALMRGKSTEEARKELQAAGKSPEDLERLLPHKSGAGKAAG

SEQ ID NO: 34856 - protein, 161 aa, Homo sapiens
  Payload ID: 6884
  Gene Symbol: GPI
  Gene Name: glucose-6-phosphate isomerase
  ENSP ID: ENSP00000468201
MAALTRDPQFQKLQQWYREHRSELNLRRLFDANKDRFNHFSLTLNTNHGHILVDYSKNLVTEDVMRMLVDLAKSRGVEAARERMFNGEKINYTEDVMPEVNKVLDKMKSFCQRVRSGDWKGYTGKTITDVINIGIGGSDLGPLMVTEALKPYSSGGPRVWY

SEQ ID NO: 34857 - protein, 133 aa, Homo sapiens
  Payload ID: 6884
  Gene Symbol: GPI
  Gene Name: glucose-6-phosphate isomerase
  ENSP ID: ENSP00000468298
MVALCSLQHLGSSDPRALPTLPTATSGQRPAKRRRKSPAMAALTRDPQFQKLQQWYREHRSELNLRRLFDANKDRFNHFSLTLNTNHGHILVDYSKNLVTEDVMRMLVDLAKSRGVEAARERMFNGEKINYTE

SEQ ID NO: 34858 - protein, 268 aa, Homo sapiens
  Payload ID: 6884
  Gene Symbol: GPI
  Gene Name: glucose-6-phosphate isomerase
  ENSP ID: ENSP00000487666
MAALTRDPQFQKLQQWYREHRSELNLRRLFDANKDRFNHFSLTLNTNHGHILVDYSKNLVTEDVMRMLVDLAKSRGVEAARERMFNGEKINYTEGRAVLHVALRNRSNTPILVDGKDVMPEVNKVLDKMKSFCQRVRSGDWKGYTGKTITDVINIGIGGSDLGPLMVTEALKPYSSGGPRVWYVSNIDGTHIAKTLAQLNPESSLFIIASKTFTTQETITNAETAKEWFLQAAKDPSAVAKHFVALSTNTTKVKEFGIDPQNMFEFWD

SEQ ID NO: 34859 - protein, 162 aa, Homo sapiens; identical to SEQ ID NO: 34852
  Payload ID: 6884
  Gene Symbol: GPI
  Gene Name: glucose-6-phosphate isomerase
  ENSP ID: ENSP00000487801

SEQ ID NO: 34860 - protein, 159 aa, Homo sapiens; identical to SEQ ID NO: 34853
  Payload ID: 6884
  Gene Symbol: GPI
  Gene Name: glucose-6-phosphate isomerase
  ENSP ID: ENSP00000487931

SEQ ID NO: 34861 - protein, 166 aa, Homo sapiens; identical to SEQ ID NO: 34854
  Payload ID: 6884
  Gene Symbol: GPI
  Gene Name: glucose-6-phosphate isomerase
  ENSP ID: ENSP00000488174

SEQ ID NO: 34862 - protein, 279 aa, Homo sapiens
  Payload ID: 6884
  Gene Symbol: GPI
  Gene Name: glucose-6-phosphate isomerase
  ENSP ID: ENSP00000488295
MVALCSLQHLGSSDPRALPTLPTATSGQRPAKRRRKSPAMAALTRDPQFQKLQQWYREHRSELNLRRLFDANKDRFNHFSLTLNTNHGHILVDYSKNLVTEDVMRMLVDLAKSRGVEAARERMFNGEKINYTEGRAVLHVALRNRSNTPILVDGKDVMPEVNKVLDKMKSFCQGPLMVTEALKPYSSGGPRVWYVSNIDGTHIAKTLAQLNPESSLFIIASKTFTTQETITNAETAKEWFLQAAKDPSAVAKHFVALSTNTTKVKEFGIDPQNMFEFWD

SEQ ID NO: 34863 - protein, 133 aa, Homo sapiens; identical to SEQ ID NO: 34857
  Payload ID: 6884
  Gene Symbol: GPI
  Gene Name: glucose-6-phosphate isomerase
  ENSP ID: ENSP00000488409

SEQ ID NO: 34864 - protein, 161 aa, Homo sapiens; identical to SEQ ID NO: 34856
  Payload ID: 6884
  Gene Symbol: GPI
  Gene Name: glucose-6-phosphate isomerase
  ENSP ID: ENSP00000488465

SEQ ID NO: 34865 - protein, 268 aa, Homo sapiens; identical to SEQ ID NO: 34858
  Payload ID: 6884
  Gene Symbol: GPI
  Gene Name: glucose-6-phosphate isomerase
  ENSP ID: ENSP00000488493

SEQ ID NO: 34866 - protein, 10 aa, Homo sapiens
  Payload ID: 6884
  Gene Symbol: GPI
  Gene Name: glucose-6-phosphate isomerase
  ENSP ID: ENSP00000488679
  MOD_RES (1)..(1): Any amino acid
XRPAKRRRKR

SEQ ID NO: 34867 - protein, 146 aa, Homo sapiens; identical to SEQ ID NO: 34851
  Payload ID: 6884
  Gene Symbol: GPI
  Gene Name: glucose-6-phosphate isomerase
  ENSP ID: ENSP00000488744

SEQ ID NO: 34868 - protein, 283 aa, Homo sapiens
  Payload ID: 6884
  Gene Symbol: GPI
  Gene Name: glucose-6-phosphate isomerase
  ENSP ID: ENSP00000488850
TSGQRPAKRRRKSPAMAALTRDPQFQKLQQWYREHRSELNLRRLFDANKDRFNHFSLTLNTNHGHILVDYSKNLVTEDVMRMLVDLAKSRGVEAARERMFNGEKINYTEGRAVLHVALRNRSNTPILVDGKDVMPEVNKVLDKMKSFCQRVRSGDWKGYTGKTITDVINIGIGGSDLGPLMVTEALKPYSSGGPRVWYVSNIDGTHIAKTLAQLNPESSLFIIASKTFTTQETITNAETAKEWFLQAAKDPSAVAKHFVALSTNTTKVKEFGIDPQNMFEFWD

SEQ ID NO: 34869 - protein, 110 aa, Homo sapiens; identical to SEQ ID NO: 34848
  Payload ID: 6884
  Gene Symbol: GPI
  Gene Name: glucose-6-phosphate isomerase
  ENSP ID: ENSP00000488871

SEQ ID NO: 34870 - protein, 429 aa, Homo sapiens
  Payload ID: 6885
  Gene Symbol:
  Gene Name: Glucose-6-phosphate translocase [Source:UniProtKB/Swiss-Prot
  Acc:O43826]
  Uniprot ID: O43826
  ENSP ID: ENSP00000486168
MAAQGYGYYRTVIFSAMFGGYSLYYFNRKTFSFVMPSLVEEIPLDKDDLGFITSSQSAAYAISKFVSGVLSDQMSARWLFSSGLLLVGLVNIFFAWSSTVPVFAALWFLNGLAQGLGWPPCGKVLRKWFEPSQFGTWWAILSTSMNLAGGLGPILATILAQSYSWRSTLALSGALCVVVSFLCLLLIHNEPADVGLRNLDPMPSEGKKGSLKEESTLQELLLSPYLWVLSTGYLVVFGVKTCCTDWGQFFLIQEKGQSALVGSSYMSALEVGGLVGSIAAGYLSDRAMAKAGLSNYGNPRHGLLLFMMAGMTVSMYLFRVTVTSDSPKLWILVLGAVFGFSSYGPIALFGVIANESAPPNLCGTSHAIVGLMANVGGFLAGLPFSTIAKHYSWSTAFWVAEVICAASTAAFFLLRNIRTKMGRVSKKAE

SEQ ID NO: 34871 - protein, 287 aa, Homo sapiens
  Payload ID: 6886
  Gene Symbol: GFOD1
  Gene Name: glucose-fructose oxidoreductase domain containing 1
  Uniprot ID: Q9NXC2
  ENSP ID: ENSP00000368586
MTSAAHYYPKLMSIMGNVLRFLPAFVRMKQLIEEGYVGEPLVCEVQVHGGSLLGKKYNWSCDDLMGGGGLHSVGTYIIDLLTFLTGQKAVKVHGLLKTFVKQTDHIKGIRQITSDDFCTFQMVLEGGVCCTVTLNFNVPGEFKQDVTVVGSAGRLLAVGTDLYGQRNSAPEQELLVQDATPVSNSLLPEKAFSDIPSPYLRGTIKMMQAVRQAFQDQDDRRTWDGRPLTMAATFDDCLYALCVVDTIKRSSQTGEWQNIAIMTEEPELSPAYLISEAMRRSRMSLYC

SEQ ID NO: 34872 - protein, 390 aa, Homo sapiens
  Payload ID: 6886
  Gene Symbol: GFOD1
  Gene Name: glucose-fructose oxidoreductase domain containing 1
  Uniprot ID: Q9NXC2
  ENSP ID: ENSP00000368589
MLPGVGVFGTSLTARVIIPLLKDEGFAVKALWGRTQEEAEELAKEMSVPFYTSRIDEVLLHQDVDLVCINLPPPLTRQIAVKTLGIGKNVICDRTATPLDAFRMTSAAHYYPKLMSIMGNVLRFLPAFVRMKQLIEEGYVGEPLVCEVQVHGGSLLGKKYNWSCDDLMGGGGLHSVGTYIIDLLTFLTGQKAVKVHGLLKTFVKQTDHIKGIRQITSDDFCTFQMVLEGGVCCTVTLNFNVPGEFKQDVTVVGSAGRLLAVGTDLYGQRNSAPEQELLVQDATPVSNSLLPEKAFSDIPSPYLRGTIKMMQAVRQAFQDQDDRRTWDGRPLTMAATFDDCLYALCVVDTIKRSSQTGEWQNIAIMTEEPELSPAYLISEAMRRSRMSLYC

SEQ ID NO: 34873 - protein, 148 aa, Homo sapiens
  Payload ID: 6886
  Gene Symbol: GFOD1
  Gene Name: glucose-fructose oxidoreductase domain containing 1
  ENSP ID: ENSP00000473812
MLPGVGVFGTSLTARVIIPLLKDEGFAVKALWGRTQEEAEELAKEMSVPFYTSRIDEVLLHQDVDLVCINLPPPLTRQIAVKTLEPGHQRKKISRQKNTGEKKMPRGSVQLSFCSLQHPHMGHLFTPHDAALGESQGTGFKPLGMQPV

SEQ ID NO: 34874 - protein, 287 aa, Homo sapiens; identical to SEQ ID NO: 34871
  Payload ID: 6886
  Gene Symbol: GFOD1
  Gene Name: glucose-fructose oxidoreductase domain containing 1
  Uniprot ID: Q9NXC2
  ENSP ID: ENSP00000479493

SEQ ID NO: 34875 - protein, 385 aa, Homo sapiens
  Payload ID: 6887
  Gene Symbol: GFOD2
  Gene Name: glucose-fructose oxidoreductase domain containing 2
  Uniprot ID: Q3B7J2
  ENSP ID: ENSP00000268797
MKMLPGVGVFGTGSSARVLVPLLRAEGFTVEALWGKTEEEAKQLAEEMNIAFYTSRTDDILLHQDVDLVCISIPPPLTRQISVKALGIGKNVVCEKAATSVDAFRMVTASRYYPQLMSLVGNVLRFLPAFVRMKQLISEHYVGAVMICDARIYSGSLLSPSYGWICDELMGGGGLHTMGTYIVDLLTHLTGRRAEKVHGLLKTFVRQNAAIRGIRHVTSDDFCFFQMLMGGGVCSTVTLNFNMPGAFVHEVMVVGSAGRLVARGADLYGQKNSATQEELLLRDSLAVGAGLPEQGPQDVPLLYLKGMVYMVQALRQSFQGQGDRRTWDRTPVSMAASFEDGLYMQSVVDAIKRSSRSGEWEAVEVLTEEPDTNQNLCEALQRNNL

SEQ ID NO: 34876 - protein, 112 aa, Homo sapiens
  Payload ID: 6887
  Gene Symbol: GFOD2
  Gene Name: glucose-fructose oxidoreductase domain containing 2
  Uniprot ID: Q3B7J2
  ENSP ID: ENSP00000473641
MKMLPGVGVFGTGSSARVLVPLLRAEGFTVEALWGKTEEEAKQLAEEMNIAFYTSRTDDILLHQDVDLVCISIPPPLTRQISVKALGTPGRPQQGQIMSLPLGSPLRVTPLL

SEQ ID NO: 34877 - protein, 90 aa, Homo sapiens
  Payload ID: 6887
  Gene Symbol: GFOD2
  Gene Name: glucose-fructose oxidoreductase domain containing 2
  ENSP ID: ENSP00000477581
MKMLPGVGVFGTGSSARVLVPLLRAEGFTVEALWGKTEEEAKQLAEEMNIAFYTSRTDDILLHQDVDLVCISIPPPLTRQISVKALESSL

SEQ ID NO: 34878 - protein, 88 aa, Homo sapiens
  Payload ID: 6887
  Gene Symbol: GFOD2
  Gene Name: glucose-fructose oxidoreductase domain containing 2
  ENSP ID: ENSP00000477784
MKMLPGVGVFGTGSSARVLVPLLRAEGFTVEALWGKTEEEAKQLAEEMNIAFYTSRTDDILLHQDVDLVLGRMWFARRQQHRWMPSGW

SEQ ID NO: 34879 - protein, 112 aa, Homo sapiens; identical to SEQ ID NO: 34876
  Payload ID: 6887
  Gene Symbol: GFOD2
  Gene Name: glucose-fructose oxidoreductase domain containing 2
  Uniprot ID: Q3B7J2
  ENSP ID: ENSP00000478260

SEQ ID NO: 34880 - protein, 103 aa, Homo sapiens
  Payload ID: 6887
  Gene Symbol: GFOD2
  Gene Name: glucose-fructose oxidoreductase domain containing 2
  ENSP ID: ENSP00000483913
  MOD_RES (1)..(1): Any amino acid
XKTEEEAKQLAEEMNIAFYTSRTDDILLHQDVDLVCISIPPPLTRQISVKALGSTCGVPEWSLDGCGGEAQVHTLPRWASTRRVLGRMWFARRQQHRWMPSGW

SEQ ID NO: 34881 - protein, 952 aa, Homo sapiens
  Payload ID: 6888
  Gene Symbol: GAA
  Gene Name: glucosidase, alpha
  acid
  Uniprot ID: P10253
  ENSP ID: ENSP00000305692
MGVRHPPCSHRLLAVCALVSLATAALLGHILLHDFLLVPRELSGSSPVLEETHPAHQQGASRPGPRDAQAHPGRPRAVPTQCDVPPNSRFDCAPDKAITQEQCEARGCCYIPAKQGLQGAQMGQPWCFFPPSYPSYKLENLSSSEMGYTATLTRTTPTFFPKDILTLRLDVMMETENRLHFTIKDPANRRYEVPLETPHVHSRAPSPLYSVEFSEEPFGVIVRRQLDGRVLLNTTVAPLFFADQFLQLSTSLPSQYITGLAEHLSPLMLSTSWTRITLWNRDLAPTPGANLYGSHPFYLALEDGGSAHGVFLLNSNAMDVVLQPSPALSWRSTGGILDVYIFLGPEPKSVVQQYLDVVGYPFMPPYWGLGFHLCRWGYSSTAITRQVVENMTRAHFPLDVQWNDLDYMDSRRDFTFNKDGFRDFPAMVQELHQGGRRYMMIVDPAISSSGPAGSYRPYDEGLRRGVFITNETGQPLIGKVWPGSTAFPDFTNPTALAWWEDMVAEFHDQVPFDGMWIDMNEPSNFIRGSEDGCPNNELENPPYVPGVVGGTLQAATICASSHQFLSTHYNLHNLYGLTEAIASHRALVKARGTRPFVISRSTFAGHGRYAGHWTGDVWSSWEQLASSVPEILQFNLLGVPLVGADVCGFLGNTSEELCVRWTQLGAFYPFMRNHNSLLSLPQEPYSFSEPAQQAMRKALTLRYALLPHLYTLFHQAHVAGETVARPLFLEFPKDSSTWTVDHQLLWGEALLITPVLQAGKAEVTGYFPLGTWYDLQTVPVEALGSLPPPPAAPREPAIHSEGQWVTLPAPLDTINVHLRAGYIIPLQGPGLTTTESRQQPMALAVALTKGGEARGELFWDDGESLEVLERGAYTQVIFLARNNTIVNELVRVTSEGAGLQLQKVTVLGVATAPQQVLSNGVPVSNFTYSPDTKVLDICVSLLMGEQFLVSWC

SEQ ID NO: 34882 - protein, 952 aa, Homo sapiens; identical to SEQ ID NO: 34881
  Payload ID: 6888
  Gene Symbol: GAA
  Gene Name: glucosidase, alpha
  acid
  Uniprot ID: P10253
  ENSP ID: ENSP00000374665

SEQ ID NO: 34883 - protein, 208 aa, Homo sapiens
  Payload ID: 6888
  Gene Symbol: GAA
  Gene Name: glucosidase, alpha
  acid
  ENSP ID: ENSP00000458306
MGVRHPPCSHRLLAVCALVSLATAALLGHILLHDFLLVPRELSGSSPVLEETHPAHQQGASRPGPRDAQAHPGRPRAVPTQCDVPPNSRFDCAPDKAITQEQCEARGCCYIPAKQGLQGAQMGQPWCFFPPSYPSYKLENLSSSEMGYTATLTRTTPTFFPKDILTLRLDVMMETENRLHFTIKDPANRRYEVPLETPHVHSRAPSPL

SEQ ID NO: 34884 - protein, 93 aa, Homo sapiens
  Payload ID: 6888
  Gene Symbol: GAA
  Gene Name: glucosidase, alpha
  acid
  ENSP ID: ENSP00000459972
  MOD_RES (1)..(1): Any amino acid
XENPPYVPGVVGGTLQAATICASSHQFLSTHYNLHNLYGLTEAIASHRALVKARGTRPFVISRSTFAGHGRYAGHWTGDVWSSWEQLASSVPA

SEQ ID NO: 34885 - protein, 284 aa, Homo sapiens
  Payload ID: 6888
  Gene Symbol: GAA
  Gene Name: glucosidase, alpha
  acid
  ENSP ID: ENSP00000460543
MGVRHPPCSHRLLAVCALVSLATAALLGHILLHDFLLVPRELSGSSPVLEETHPAHQQGASRPGPRDAQAHPGRPRAVPTQCDVPPNSRFDCAPDKAITQEQCEARGCCYIPAKQGLQGAQMGQPWCFFPPSYPSYKLENLSSSEMGYTATLTRTTPTFFPKDILTLRLDVMMETENRLHFTIKDPANRRYEVPLETPHVHSRAPSPLYSVEFSEEPFGVIVRRQLDGRVLLNTTVAPLFFADQFLQLSTSLPSQYITGLAEHLSPLMLSTSWTRITLWNRDLA

SEQ ID NO: 34886 - protein, 966 aa, Homo sapiens
  Payload ID: 6889
  Gene Symbol: GANAB
  Gene Name: glucosidase, alpha
  neutral AB
  Uniprot ID: Q14697
  ENSP ID: ENSP00000340466
MAAVAAVAARRRRSWASLVLAFLGVCLGITLAVDRSNFKTCEESSFCKRQRSIRPGLSPYRALLDSLQLGPDSLTVHLIHEVTKVLLVLELQGLQKNMTRFRIDELEPRRPRYRVPDVLVADPPIARLSVSGRDENSVELTMAEGPYKIILTARPFRLDLLEDRSLLLSVNARGLLEFEHQRAPRVSFSDKVNLTLGSIWDKIKNLFSRQGSKDPAEGDGAQPEETPRDGDKPEETQGKAEKDEPGAWEETFKTHSDSKPYGPMSVGLDFSLPGMEHVYGIPEHADNLRLKVTEGGEPYRLYNLDVFQYELYNPMALYGSVPVLLAHNPHRDLGIFWLNAAETWVDISSNTAGKTLFGKMMDYLQGSGETPQTDVRWMSETGIIDVFLLLGPSISDVFRQYASLTGTQALPPLFSLGYHQSRWNYRDEADVLEVDQGFDDHNLPCDVIWLDIEHADGKRYFTWDPSRFPQPRTMLERLASKRRKLVAIVDPHIKVDSGYRVHEELRNLGLYVKTRDGSDYEGWCWPGSAGYPDFTNPTMRAWWANMFSYDNYEGSAPNLFVWNDMNEPSVFNGPEVTMLKDAQHYGGWEHRDVHNIYGLYVHMATADGLRQRSGGMERPFVLARAFFAGSQRFGAVWTGDNTAEWDHLKISIPMCLSLGLVGLSFCGADVGGFFKNPEPELLVRWYQMGAYQPFFRAHAHLDTGRREPWLLPSQHNDIIRDALGQRYSLLPFWYTLLYQAHREGIPVMRPLWVQYPQDVTTFNIDDQYLLGDALLVHPVSDSGAHGVQVYLPGQGEVWYDIQSYQKHHGPQTLYLPVTLSSIPVFQRGGTIVPRWMRVRRSSECMKDDPITLFVALSPQGTAQGELFLDDGHTFNYQTRQEFLLRRFSFSGNTLVSSSADPEGHFETPIWIERVVIIGAGKPAAVVLQTKGSPESRLSFQHDPETSVLVLRKPGINVASDWSIHLR

SEQ ID NO: 34887 - protein, 944 aa, Homo sapiens
  Payload ID: 6889
  Gene Symbol: GANAB
  Gene Name: glucosidase, alpha
  neutral AB
  Uniprot ID: Q14697
  ENSP ID: ENSP00000349053
MAAVAAVAARRRRSWASLVLAFLGVCLGITLAVDRSNFKTCEESSFCKRQRSIRPGLSPYRALLDSLQLGPDSLTVHLIHEVTKVLLVLELQGLQKNMTRFRIDELEPRRPRYRVPDVLVADPPIARLSVSGRDENSVELTMAEGPYKIILTARPFRLDLLEDRSLLLSVNARGLLEFEHQRAPRVSQGSKDPAEGDGAQPEETPRDGDKPEETQGKAEKDEPGAWEETFKTHSDSKPYGPMSVGLDFSLPGMEHVYGIPEHADNLRLKVTEGGEPYRLYNLDVFQYELYNPMALYGSVPVLLAHNPHRDLGIFWLNAAETWVDISSNTAGKTLFGKMMDYLQGSGETPQTDVRWMSETGIIDVFLLLGPSISDVFRQYASLTGTQALPPLFSLGYHQSRWNYRDEADVLEVDQGFDDHNLPCDVIWLDIEHADGKRYFTWDPSRFPQPRTMLERLASKRRKLVAIVDPHIKVDSGYRVHEELRNLGLYVKTRDGSDYEGWCWPGSAGYPDFTNPTMRAWWANMFSYDNYEGSAPNLFVWNDMNEPSVFNGPEVTMLKDAQHYGGWEHRDVHNIYGLYVHMATADGLRQRSGGMERPFVLARAFFAGSQRFGAVWTGDNTAEWDHLKISIPMCLSLGLVGLSFCGADVGGFFKNPEPELLVRWYQMGAYQPFFRAHAHLDTGRREPWLLPSQHNDIIRDALGQRYSLLPFWYTLLYQAHREGIPVMRPLWVQYPQDVTTFNIDDQYLLGDALLVHPVSDSGAHGVQVYLPGQGEVWYDIQSYQKHHGPQTLYLPVTLSSIPVFQRGGTIVPRWMRVRRSSECMKDDPITLFVALSPQGTAQGELFLDDGHTFNYQTRQEFLLRRFSFSGNTLVSSSADPEGHFETPIWIERVVIIGAGKPAAVVLQTKGSPESRLSFQHDPETSVLVLRKPGINVASDWSIHLR

SEQ ID NO: 34888 - protein, 52 aa, Homo sapiens
  Payload ID: 6889
  Gene Symbol: GANAB
  Gene Name: glucosidase, alpha
  neutral AB
  Uniprot ID: Q14697
  ENSP ID: ENSP00000432181
MAAVAAVAARRRRSWASLVLAFLGVCLGITLAVDRSNFKTCEESSFCKCCWC

SEQ ID NO: 34889 - protein, 76 aa, Homo sapiens
  Payload ID: 6889
  Gene Symbol: GANAB
  Gene Name: glucosidase, alpha
  neutral AB
  ENSP ID: ENSP00000432593
MAAVAAVAARRRRSWASLVLAFLGVCLGITLAVDRSNFKTCEESSFCDREAYGQASLHTEPCWTLYSLVLIPSRSI

SEQ ID NO: 34890 - protein, 52 aa, Homo sapiens; identical to SEQ ID NO: 34888
  Payload ID: 6889
  Gene Symbol: GANAB
  Gene Name: glucosidase, alpha
  neutral AB
  Uniprot ID: Q14697
  ENSP ID: ENSP00000433799

SEQ ID NO: 34891 - protein, 119 aa, Homo sapiens
  Payload ID: 6889
  Gene Symbol: GANAB
  Gene Name: glucosidase, alpha
  neutral AB
  ENSP ID: ENSP00000434805
MAAVAAVAARRRRLSVSGRDENSVELTMAEGPYKIILTARPFRLDLLEDRSLLLSVNARGLLEFEHQRAPRVSFSDKVNLTLGSIWDKIKNLFSRQGSKDPAEGDGAQPEETPRDGDKA

SEQ ID NO: 34892 - protein, 52 aa, Homo sapiens; identical to SEQ ID NO: 34888
  Payload ID: 6889
  Gene Symbol: GANAB
  Gene Name: glucosidase, alpha
  neutral AB
  Uniprot ID: Q14697
  ENSP ID: ENSP00000434921

SEQ ID NO: 34893 - protein, 852 aa, Homo sapiens
  Payload ID: 6889
  Gene Symbol: GANAB
  Gene Name: glucosidase, alpha
  neutral AB
  ENSP ID: ENSP00000435306
MAAVAAVAARRRRLSVSGRDENSVELTMAEGPYKIILTARPFRLDLLEDRSLLLSVNARGLLEFEHQRAPRVSFSDKVNLTLGSIWDKIKNLFSRQGSKDPAEGDGAQPEETPRDGDKPEETQGKAEKDEPGAWEETFKTHSDSKPYGPMSVGLDFSLPGMEHVYGIPEHADNLRLKVTEGGEPYRLYNLDVFQYELYNPMALYGSVPVLLAHNPHRDLGIFWLNAAETWVDISSNTAGKTLFGKMMDYLQGSGETPQTDVRWMSETGIIDVFLLLGPSISDVFRQYASLTGTQALPPLFSLGYHQSRWNYRDEADVLEVDQGFDDHNLPCDVIWLDIEHADGKRYFTWDPSRFPQPRTMLERLASKRRKLVAIVDPHIKVDSGYRVHEELRNLGLYVKTRDGSDYEGWCWPGSAGYPDFTNPTMRAWWANMFSYDNYEGSAPNLFVWNDMNEPSVFNGPEVTMLKDAQHYGGWEHRDVHNIYGLYVHMATADGLRQRSGGMERPFVLARAFFAGSQRFGAVWTGDNTAEWDHLKISIPMCLSLGLVGLSFCGADVGGFFKNPEPELLVRWYQMGAYQPFFRAHAHLDTGRREPWLLPSQHNDIIRDALGQRYSLLPFWYTLLYQAHREGIPVMRPLWVQYPQDVTTFNIDDQYLLGDALLVHPVSDSGAHGVQVYLPGQGEVWYDIQSYQKHHGPQTLYLPVTLSSIPVFQRGGTIVPRWMRVRRSSECMKDDPITLFVALSPQGTAQGELFLDDGHTFNYQTRQEFLLRRFSFSGNTLVSSSADPEGHFETPIWIERVVIIGAGKPAAVVLQTKGSPESRLSFQHDPETSVLVLRKPGINVASDWSIHLR

SEQ ID NO: 34894 - protein, 847 aa, Homo sapiens
  Payload ID: 6889
  Gene Symbol: GANAB
  Gene Name: glucosidase, alpha
  neutral AB
  ENSP ID: ENSP00000442962
MTRFRIDELEPRRPRYRVPDVLVADPPIARLSVSGRDENSVELTMAEGPYKIILTARPFRLDLLEDRSLLLSVNARGLLEFEHQRAPRVSQGSKDPAEGDGAQPEETPRDGDKPEETQGKAEKDEPGAWEETFKTHSDSKPYGPMSVGLDFSLPGMEHVYGIPEHADNLRLKVTEGGEPYRLYNLDVFQYELYNPMALYGSVPVLLAHNPHRDLGIFWLNAAETWVDISSNTAGKTLFGKMMDYLQGSGETPQTDVRWMSETGIIDVFLLLGPSISDVFRQYASLTGTQALPPLFSLGYHQSRWNYRDEADVLEVDQGFDDHNLPCDVIWLDIEHADGKRYFTWDPSRFPQPRTMLERLASKRRKLVAIVDPHIKVDSGYRVHEELRNLGLYVKTRDGSDYEGWCWPGSAGYPDFTNPTMRAWWANMFSYDNYEGSAPNLFVWNDMNEPSVFNGPEVTMLKDAQHYGGWEHRDVHNIYGLYVHMATADGLRQRSGGMERPFVLARAFFAGSQRFGAVWTGDNTAEWDHLKISIPMCLSLGLVGLSFCGADVGGFFKNPEPELLVRWYQMGAYQPFFRAHAHLDTGRREPWLLPSQHNDIIRDALGQRYSLLPFWYTLLYQAHREGIPVMRPLWVQYPQDVTTFNIDDQYLLGDALLVHPVSDSGAHGVQVYLPGQGEVWYDIQSYQKHHGPQTLYLPVTLSSIPVFQRGGTIVPRWMRVRRSSECMKDDPITLFVALSPQGTAQGELFLDDGHTFNYQTRQEFLLRRFSFSGNTLVSSSADPEGHFETPIWIERVVIIGAGKPAAVVLQTKGSPESRLSFQHDPETSVLVLRKPGINVASDWSIHLR

SEQ ID NO: 34895 - protein, 914 aa, Homo sapiens
  Payload ID: 6890
  Gene Symbol: GANC
  Gene Name: glucosidase, alpha
  neutral C
  Uniprot ID: Q8TET4
  ENSP ID: ENSP00000326227
MEAAVKEEISLEDEAVDKNIFRDCNKIAFYRRQKQWLSKKSTYQALLDSVTTDEDSTRFQIINEASKVPLLAEIYGIEGNIFRLKINEETPLKPRFEVPDVLTSKPSTVRLISCSGDTGSLILADGKGDLKCHITANPFKVDLVSEEEVVISINSLGQLYFEHLQILHKQRAAKENEEETSVDTSQENQEDLGLWEEKFGKFVDIKANGPSSIGLDFSLHGFEHLYGIPQHAESHQLKNTGDGDAYRLYNLDVYGYQIYDKMGIYGSVPYLLAHKLGRTIGIFWLNASETLVEINTEPAVEYTLTQMGPVAAKQKVRSRTHVHWMSESGIIDVFLLTGPTPSDVFKQYSHLTGTQAMPPLFSLGYHQCRWNYEDEQDVKAVDAGFDEHDIPYDAMWLDIEHTEGKRYFTWDKNRFPNPKRMQELLRSKKRKLVVISDPHIKIDPDYSVYVKAKDQGFFVKNQEGEDFEGVCWPGLSSYLDFTNPKVREWYSSLFAFPVYQGSTDILFLWNDMNEPSVFRGPEQTMQKNAIHHGNWEHRELHNIYGFYHQMATAEGLIKRSKGKERPFVLTRSFFAGSQKYGAVWTGDNTAEWSNLKISIPMLLTLSITGISFCGADIGGFIGNPETELLVRWYQAGAYQPFFRGHATMNTKRREPWLFGEEHTRLIREAIRERYGLLPYWYSLFYHAHVASQPVMRPLWVEFPDELKTFDMEDEYMLGSALLVHPVTEPKATTVDVFLPGSNEVWYDYKTFAHWEGGCTVKIPVALDTIPVFQRGGSVIPIKTTVGKSTGWMTESSYGLRVALSTKGSSVGELYLDDGHSFQYLHQKQFLHRKFSFCSSVLINSFADQRGHYPSKCVVEKILVLGFRKEPSSVTTHSSDGKDQPVAFTYCAKTSILSLEKLSLNIATDWEVRII

SEQ ID NO: 34896 - protein, 282 aa, Homo sapiens
  Payload ID: 6890
  Gene Symbol: GANC
  Gene Name: glucosidase, alpha
  neutral C
  ENSP ID: ENSP00000399557
MEAAVKEEISLEDEAVDKNIFRDCNKIAFYRRQKQWLSKKSTYQALLDSVTTDEDSTRFQIINEASKVRCQDQSPTTLDAFKGKETTVQEETQDLSTRQHLAQKEAEEPDKQGQITWDISNVAPKTENFEDLLEQTPCSACLQGFTRDNTSSSFSEDAGISLSTSVKLPLASSSKPNENEALPNQPPSQQIRHNYRLLASTVSAEMARNRQLIWELARQSEAHLDRPVVLGEQASAQREVASILCRKSVLAINQLAATVEGTISVLQQFNELLDHPLDPGRS

SEQ ID NO: 34897 - protein, 140 aa, Homo sapiens
  Payload ID: 6890
  Gene Symbol: GANC
  Gene Name: glucosidase, alpha
  neutral C
  ENSP ID: ENSP00000454449
MEAAVKEEISLEDEAVDKNIFRDCNKIAFYRRQKQWLSKKSTYQALLDSVTTDEDSTRFQIINEASKVPLLAEIYGIEGNIFRLKINEETPLKPRFEVPDVLTSKPSTVRLISCSGDTGSLILADGKGDLKCHITANPFK

SEQ ID NO: 34898 - protein, 67 aa, Homo sapiens
  Payload ID: 6890
  Gene Symbol: GANC
  Gene Name: glucosidase, alpha
  neutral C
  ENSP ID: ENSP00000454578
MEAAVKEEISLEDEAVDKNIFRDCNKIAFYRRQKQWLSKKSTYQALLDSVTTDEDSTRFQIINEASK

SEQ ID NO: 34899 - protein, 357 aa, Homo sapiens
  Payload ID: 6890
  Gene Symbol: GANC
  Gene Name: glucosidase, alpha
  neutral C
  ENSP ID: ENSP00000454747
MEAAVKEEISLEDEAVDKNIFRDCNKIAFYRRQKQWLSKKSTYQALLDSVTTDEDSTRFQIINEASKVPLLAEIYGIEGNIFRLKINEETPLKPRFEVPDVLTSKPSTVRLISCSGDTGSLILADGKGDLKCHITANPFKVDLVSEEEVVISINSLGQLYFEHLQILHKQRAAKENEEETSVDTSQENQEDLGLWEEKFGKFVDIKANGPSSIGLDFSLHGFEHLYGIPQHAESHQLKNTGDGDAYRLYNLDVYGYQIYDKMGIYGSVPYLLAHKLGRTIGIFWLNASETLVEINTEPAVEYTLTQMGPVAAKQKVRSRTHVHWMSESGIIDVFLLTGPTPSDVFKQYSHLTDIGEK

SEQ ID NO: 34900 - protein, 9 aa, Homo sapiens
  Payload ID: 6890
  Gene Symbol: GANC
  Gene Name: glucosidase, alpha
  neutral C
  ENSP ID: ENSP00000454816
MEAAVKEEI

SEQ ID NO: 34901 - protein, 103 aa, Homo sapiens
  Payload ID: 6890
  Gene Symbol: GANC
  Gene Name: glucosidase, alpha
  neutral C
  ENSP ID: ENSP00000455511
MTESSYGLRVALSTKGSSVGELYLDDGHSFQYLHQKQFLHRKFSFCSSVLINSFADQRGHYPSKCVVEKILVLGFRKEPSSVTTHSSDGKDQPVAFTYCAKTS

SEQ ID NO: 34902 - protein, 37 aa, Homo sapiens
  Payload ID: 6890
  Gene Symbol: GANC
  Gene Name: glucosidase, alpha
  neutral C
  ENSP ID: ENSP00000455872
MEAAVKEEISLEDEAVDKNIFRDCNKIAFYRKKSVLC

SEQ ID NO: 34903 - protein, 37 aa, Homo sapiens; identical to SEQ ID NO: 34902
  Payload ID: 6890
  Gene Symbol: GANC
  Gene Name: glucosidase, alpha
  neutral C
  ENSP ID: ENSP00000456360

SEQ ID NO: 34904 - protein, 113 aa, Homo sapiens
  Payload ID: 6890
  Gene Symbol: GANC
  Gene Name: glucosidase, alpha
  neutral C
  ENSP ID: ENSP00000457604
MTESSYGLRVALSTKGSSVGELYLDDGHSFQYLHQKQFLHRKFSFCSSVLINSFADQRGHYPSKCVVEKILVLGFRKEPSSVTTHSSDGKDQPVAFTYCAKTSILSLEKLSLN

SEQ ID NO: 34905 - protein, 172 aa, Homo sapiens
  Payload ID: 6891
  Gene Symbol: GBA2
  Gene Name: glucosidase, beta (bile acid) 2
  ENSP ID: ENSP00000367328
MRDCCGMVSSGSLSSLKAAERTPGALFFSSSTPGRYYNYDSSSRPQSRSVMSDQCAGQWFLKACGLGEGDTEVFPTQHVVRALQTIFELNVQAFAGGAMGAVNGMQPHGVPDKSSVQSDEVWVGVVYGLAATMIQEVMHSFSHLSTICILAQKTSSTTKFLQGITQCHLVRL

SEQ ID NO: 34906 - protein, 877 aa, Homo sapiens
  Payload ID: 6891
  Gene Symbol: GBA2
  Gene Name: glucosidase, beta (bile acid) 2
  Uniprot ID: Q9HCG7
  ENSP ID: ENSP00000367334
MGTQDPGNMGTGVPASEQISCAKEDPQVYCPEETGGTKDVQVTDCKSPEDSRPPKETDCCNPEDSGQLMVSYEGKAMGYQVPPFGWRICLAHEFTEKRKPFQANNVSLSNMIKHIGMGLRYLQWWYRKTHVEKKTPFIDMINSVPLRQIYGCPLGGIGGGTITRGWRGQFCRWQLNPGMYQHRTVIADQFTVCLRREGQTVYQQVLSLERPSVLRSWNWGLCGYFAFYHALYPRAWTVYQLPGQNVTLTCRQITPILPHDYQDSSLPVGVFVWDVENEGDEALDVSIMFSMRNGLGGGDDAPGGLWNEPFCLERSGETVRGLLLHHPTLPNPYTMAVAARVTAATTVTHITAFDPDSTGQQVWQDLLQDGQLDSPTGQSTPTQKGVGIAGAVCVSSKLRPRGQCRLEFSLAWDMPRIMFGAKGQVHYRRYTRFFGQDGDAAPALSHYALCRYAEWEERISAWQSPVLDDRSLPAWYKSALFNELYFLADGGTVWLEVLEDSLPEELGRNMCHLRPTLRDYGRFGYLEGQEYRMYNTYDVHFYASFALIMLWPKLELSLQYDMALATLREDLTRRRYLMSGVMAPVKRRNVIPHDIGDPDDEPWLRVNAYLIHDTADWKDLNLKFVLQVYRDYYLTGDQNFLKDMWPVCLAVMESEMKFDKDHDGLIENGGYADQTYDGWVTTGPSAYCGGLWLAAVAVMVQMAALCGAQDIQDKFSSILSRGQEAYERLLWNGRYYNYDSSSRPQSRSVMSDQCAGQWFLKACGLGEGDTEVFPTQHVVRALQTIFELNVQAFAGGAMGAVNGMQPHGVPDKSSVQSDEVWVGVVYGLAATMIQELLPSGFCLWVIVISSTCWELLEGKDSTASIYPVEVALQRVPS

SEQ ID NO: 34907 - protein, 927 aa, Homo sapiens
  Payload ID: 6891
  Gene Symbol: GBA2
  Gene Name: glucosidase, beta (bile acid) 2
  Uniprot ID: Q9HCG7
  ENSP ID: ENSP00000367343
MGTQDPGNMGTGVPASEQISCAKEDPQVYCPEETGGTKDVQVTDCKSPEDSRPPKETDCCNPEDSGQLMVSYEGKAMGYQVPPFGWRICLAHEFTEKRKPFQANNVSLSNMIKHIGMGLRYLQWWYRKTHVEKKTPFIDMINSVPLRQIYGCPLGGIGGGTITRGWRGQFCRWQLNPGMYQHRTVIADQFTVCLRREGQTVYQQVLSLERPSVLRSWNWGLCGYFAFYHALYPRAWTVYQLPGQNVTLTCRQITPILPHDYQDSSLPVGVFVWDVENEGDEALDVSIMFSMRNGLGGGDDAPGGLWNEPFCLERSGETVRGLLLHHPTLPNPYTMAVAARVTAATTVTHITAFDPDSTGQQVWQDLLQDGQLDSPTGQSTPTQKGVGIAGAVCVSSKLRPRGQCRLEFSLAWDMPRIMFGAKGQVHYRRYTRFFGQDGDAAPALSHYALCRYAEWEERISAWQSPVLDDRSLPAWYKSALFNELYFLADGGTVWLEVLEDSLPEELGRNMCHLRPTLRDYGRFGYLEGQEYRMYNTYDVHFYASFALIMLWPKLELSLQYDMALATLREDLTRRRYLMSGVMAPVKRRNVIPHDIGDPDDEPWLRVNAYLIHDTADWKDLNLKFVLQVYRDYYLTGDQNFLKDMWPVCLAVMESEMKFDKDHDGLIENGGYADQTYDGWVTTGPSAYCGGLWLAAVAVMVQMAALCGAQDIQDKFSSILSRGQEAYERLLWNGRYYNYDSSSRPQSRSVMSDQCAGQWFLKACGLGEGDTEVFPTQHVVRALQTIFELNVQAFAGGAMGAVNGMQPHGVPDKSSVQSDEVWVGVVYGLAATMIQEGLTWEGFQTAEGCYRTVWERLGLAFQTPEAYCQQRVFRSLAYMRPLSIWAMQLALQQQQHKKASWPKVKQGTGLRTGPMFGPKEAMANLSPE

SEQ ID NO: 34908 - protein, 536 aa, Homo sapiens
  Payload ID: 6892
  Gene Symbol: GBA
  Gene Name: glucosidase, beta, acid
  Uniprot ID: P04062
  ENSP ID: ENSP00000314508
MEFSSPSREECPKPLSRVSIMAGSLTGLLLLQAVSWASGARPCIPKSFGYSSVVCVCNATYCDSFDPPTFPALGTFSRYESTRSGRRMELSMGPIQANHTGTGLLLTLQPEQKFQKVKGFGGAMTDAAALNILALSPPAQNLLLKSYFSEEGIGYNIIRVPMASCDFSIRTYTYADTPDDFQLHNFSLPEEDTKLKIPLIHRALQLAQRPVSLLASPWTSPTWLKTNGAVNGKGSLKGQPGDIYHQTWARYFVKFLDAYAEHKLQFWAVTAENEPSAGLLSGYPFQCLGFTPEHQRDFIARDLGPTLANSTHHNVRLLMLDDQRLLLPHWAKVVLTDPEAAKYVHGIAVHWYLDFLAPAKATLGETHRLFPNTMLFASEACVGSKFWEQSVRLGSWDRGMQYSHSIITNLLYHVVGWTDWNLALNPEGGPNWVRNFVDSPIIVDITKDTFYKQPMFYHLGHFSKFIPEGSQRVGLVASQKNDLDAVALMHPDGSAVVVVLNRSSKDVPLTIKDPAVGFLETISPGYSIHTYLWRRQ

SEQ ID NO: 34909 - protein, 536 aa, Homo sapiens; identical to SEQ ID NO: 34908
  Payload ID: 6892
  Gene Symbol: GBA
  Gene Name: glucosidase, beta, acid
  Uniprot ID: P04062
  ENSP ID: ENSP00000357357

SEQ ID NO: 34910 - protein, 449 aa, Homo sapiens
  Payload ID: 6892
  Gene Symbol: GBA
  Gene Name: glucosidase, beta, acid
  Uniprot ID: P04062
  ENSP ID: ENSP00000397986
MELSMGPIQANHTGTGLLLTLQPEQKFQKVKGFGGAMTDAAALNILALSPPAQNLLLKSYFSEEGIGYNIIRVPMASCDFSIRTYTYADTPDDFQLHNFSLPEEDTKLKIPLIHRALQLAQRPVSLLASPWTSPTWLKTNGAVNGKGSLKGQPGDIYHQTWARYFVKFLDAYAEHKLQFWAVTAENEPSAGLLSGYPFQCLGFTPEHQRDFIARDLGPTLANSTHHNVRLLMLDDQRLLLPHWAKVVLTDPEAAKYVHGIAVHWYLDFLAPAKATLGETHRLFPNTMLFASEACVGSKFWEQSVRLGSWDRGMQYSHSIITNLLYHVVGWTDWNLALNPEGGPNWVRNFVDSPIIVDITKDTFYKQPMFYHLGHFSKFIPEGSQRVGLVASQKNDLDAVALMHPDGSAVVVVLNRSSKDVPLTIKDPAVGFLETISPGYSIHTYLWRRQ

SEQ ID NO: 34911 - protein, 487 aa, Homo sapiens
  Payload ID: 6892
  Gene Symbol: GBA
  Gene Name: glucosidase, beta, acid
  Uniprot ID: P04062
  ENSP ID: ENSP00000402577
MEFSSPSREECPKPLSRVSIMAGSLTGLLLLQAVSWASGARPCIPKSFGYSSVVCVCNATYCDSFDPPTFPALGTFSRYESTRSGRRMELSMGPIQANHTGTGIGYNIIRVPMASCDFSIRTYTYADTPDDFQLHNFSLPEEDTKLKIPLIHRALQLAQRPVSLLASPWTSPTWLKTNGAVNGKGSLKGQPGDIYHQTWARYFVKFLDAYAEHKLQFWAVTAENEPSAGLLSGYPFQCLGFTPEHQRDFIARDLGPTLANSTHHNVRLLMLDDQRLLLPHWAKVVLTDPEAAKYVHGIAVHWYLDFLAPAKATLGETHRLFPNTMLFASEACVGSKFWEQSVRLGSWDRGMQYSHSIITNLLYHVVGWTDWNLALNPEGGPNWVRNFVDSPIIVDITKDTFYKQPMFYHLGHFSKFIPEGSQRVGLVASQKNDLDAVALMHPDGSAVVVVLNRSSKDVPLTIKDPAVGFLETISPGYSIHTYLWRRQ

SEQ ID NO: 34912 - protein, 536 aa, Homo sapiens
  Payload ID: 6892
  Gene Symbol: GBA
  Gene Name: glucosidase, beta, acid
  ENSP ID: ENSP00000458274
MEFSSPSREECPKPLSRVSIMAGSLTGLLLLQAVSWASGARPCIPKSFGYSSVVCVCNATYCDSFDPPTFPALGTFSRYESTRSGRRMELSMGPIQANHTGTGLLLTLQPEQKFQKVKGFGGAMTDAAALNILALSPPAQNLLLKSYFSEEGIGYNIIRVPMASCDFSIRTYTYADTPDDFQLHNFSLPEEDTKLKIPLIHRALQLAQRPVSLLASPWTSPTWLKTNGAVNGKGSLKGQPGDIYHQTWARYFVKFLDAYAEHKLQFWAVTAENEPSAGLLSGYPFQCLGFTPEHQRDFIARDLGPTLANSTHHNVRLLMLDDQRLLLPHWAKVVLTDPEAAKYVHGIAVHWYLDFLAPAKATLGETHRLFPNTMLFASEACVGSKFWEQSVRLGSWDRGMQYSHSIITNLLYHVVGWTDWNLALNPEGGPNWVRNFVDSPIIVDITKDTFYKQPMFYHLGHFSKFIPEGSQRVGLVASQKNDLDAVALMHPDGSAVVVVLNRSSKDVPLTIKDPAVGFLETISPGYSIHTYLWCRQ

SEQ ID NO: 34913 - protein, 536 aa, Homo sapiens; identical to SEQ ID NO: 34912
  Payload ID: 6892
  Gene Symbol: GBA
  Gene Name: glucosidase, beta, acid
  ENSP ID: ENSP00000459642

SEQ ID NO: 34914 - protein, 487 aa, Homo sapiens
  Payload ID: 6892
  Gene Symbol: GBA
  Gene Name: glucosidase, beta, acid
  ENSP ID: ENSP00000482397
MEFSSPSREECPKPLSRVSIMAGSLTGLLLLQAVSWASGARPCIPKSFGYSSVVCVCNATYCDSFDPPTFPALGTFSRYESTRSGRRMELSMGPIQANHTGTGIGYNIIRVPMASCDFSIRTYTYADTPDDFQLHNFSLPEEDTKLKIPLIHRALQLAQRPVSLLASPWTSPTWLKTNGAVNGKGSLKGQPGDIYHQTWARYFVKFLDAYAEHKLQFWAVTAENEPSAGLLSGYPFQCLGFTPEHQRDFIARDLGPTLANSTHHNVRLLMLDDQRLLLPHWAKVVLTDPEAAKYVHGIAVHWYLDFLAPAKATLGETHRLFPNTMLFASEACVGSKFWEQSVRLGSWDRGMQYSHSIITNLLYHVVGWTDWNLALNPEGGPNWVRNFVDSPIIVDITKDTFYKQPMFYHLGHFSKFIPEGSQRVGLVASQKNDLDAVALMHPDGSAVVVVLNRSSKDVPLTIKDPAVGFLETISPGYSIHTYLWCRQ

SEQ ID NO: 34915 - protein, 449 aa, Homo sapiens
  Payload ID: 6892
  Gene Symbol: GBA
  Gene Name: glucosidase, beta, acid
  ENSP ID: ENSP00000482419
MELSMGPIQANHTGTGLLLTLQPEQKFQKVKGFGGAMTDAAALNILALSPPAQNLLLKSYFSEEGIGYNIIRVPMASCDFSIRTYTYADTPDDFQLHNFSLPEEDTKLKIPLIHRALQLAQRPVSLLASPWTSPTWLKTNGAVNGKGSLKGQPGDIYHQTWARYFVKFLDAYAEHKLQFWAVTAENEPSAGLLSGYPFQCLGFTPEHQRDFIARDLGPTLANSTHHNVRLLMLDDQRLLLPHWAKVVLTDPEAAKYVHGIAVHWYLDFLAPAKATLGETHRLFPNTMLFASEACVGSKFWEQSVRLGSWDRGMQYSHSIITNLLYHVVGWTDWNLALNPEGGPNWVRNFVDSPIIVDITKDTFYKQPMFYHLGHFSKFIPEGSQRVGLVASQKNDLDAVALMHPDGSAVVVVLNRSSKDVPLTIKDPAVGFLETISPGYSIHTYLWCRQ

SEQ ID NO: 34916 - protein, 161 aa, Homo sapiens
  Payload ID: 6893
  Gene Symbol: GBA3
  Gene Name: glucosidase, beta, acid 3 (gene/pseudogene)
  ENSP ID: ENSP00000422220
MAFPAGFGWAAATAAYQVEGGWDADGKGPCVWDTFTHQGGERVFKNQTGDVACGSYTLWEEDLKCIKQLGLTHYRFSLSWSRLLPDGTTGFINQKAIQLDKVNLQVYCAWSLLDNFEWNQGYSSRFGLFHVDFEDPARPRVPYTSAKEAKIIRNNGLEAHL

SEQ ID NO: 34917 - protein, 297 aa, Homo sapiens
  Payload ID: 6893
  Gene Symbol: GBA3
  Gene Name: glucosidase, beta, acid 3 (gene/pseudogene)
  ENSP ID: ENSP00000423754
MSYDLGMFPPGIPHFGTGGYQAAHNLIKAHARSWHSYDSLFRKKQKGMVSLSLFAVWLEPADPNSVSDQEAAKRAITFHLDLFAKPIFIDGDYPEVVKSQIASMSQKQGYPSSRLPEFTEEEKKMIKGTADFFAVQYYTTRLIKYQENKKGELGILQDAEIEFFPDPSWKNVDWIYVVPWGVCKLLKYIKDTYNNPVIYITENGFPQSDPAPLDDTQRWEYFRQTFQELFKAIQLDKVNLQVYCAWSLLDNFEWNQGYSSRFGLFHVDFEDPARPRVPYTSAKEAKIIRNNGLEAHL

SEQ ID NO: 34918 - protein, 468 aa, Homo sapiens
  Payload ID: 6893
  Gene Symbol: GBA3
  Gene Name: glucosidase, beta, acid 3 (gene/pseudogene)
  ENSP ID: ENSP00000427458
MAFPAGFGWAAATAAYQVEGGWDADGKGPCVWDTFTHQGGERVFKNQTGDVACGSYTLWEEDLKCIKQLGLTHYRFSLSWSRLLPDGTTGFINQKGIDYYNKIIDDLLKNGVTPIVTLYHFDLPQTLEDQGGWLSEAIIESFDKYAQFCFSTFGDRVKQWITINEANVLSVMSYDLGMFPPGIPHFGTGGYQAAHNLIKAHARSWHSYDSLFRKKQKGMVSLSLFAVWLEPADPNSVSDQEAAKRAITFHLDLFAKPIFIDGDYPEVVKSQIASMSQKQGYPSSRLPEFTEEEKKMIKGTADFFAVQYYTTRLIKYQENKKGELGILQDAEIEFFPDPSWKNVDWIYVVPWGVCKLLKYIKDTYNNPVIYITENGFPQSDPAPLDDTQRWEYFRQTFQELFKAIQLDKVNLQVYCAWSLLDNFEWNQGYSSRFGLFHVDFEDPARPRVPYTSAKEAKIIRNNGLEAHL

SEQ ID NO: 34919 - protein, 468 aa, Homo sapiens; identical to SEQ ID NO: 34918
  Payload ID: 6893
  Gene Symbol: GBA3
  Gene Name: glucosidase, beta, acid 3 (gene/pseudogene)
  ENSP ID: ENSP00000478226

SEQ ID NO: 34920 - protein, 161 aa, Homo sapiens; identical to SEQ ID NO: 34916
  Payload ID: 6893
  Gene Symbol: GBA3
  Gene Name: glucosidase, beta, acid 3 (gene/pseudogene)
  ENSP ID: ENSP00000480447

SEQ ID NO: 34921 - protein, 409 aa, Homo sapiens
  Payload ID: 6894
  Gene Symbol: GXYLT1
  Gene Name: glucoside xylosyltransferase 1
  Uniprot ID: Q4G148
  ENSP ID: ENSP00000280876
MRRYLRVVVLCVACGFCSLLYAFSQLAVSLEEGTGGGGGKPQAAVASWLAGGGRGAVRGAGVAGPAAHPGVSDRYSLKIQPVEKMHLAVVACGERLEETMTMLKSAIIFSIKPLQFHIFAEDQLHHSFKGRLDNWSFLQTFNYTLYPITFPSENAAEWKKLFKPCASQRLFLPLILKEVDSLLYVDTDILFLRPVDDIWSLLKKFNSTQIAAMAPEHEEPRIGWYNRFARHPYYGKTGVNSGVMLMNMTRMRRKYFKNDMTTVRLQWGDILMPLLKKYKLNITWGDQDLLNIVFFHNPESLFVFPCQWNYRPDHCIYGSNCQEAEEGGIFILHGNRGVYHDDKQPAFRAVYEALRNCSFEDDNIRSLLKPLELELQKTVHTYCGKIYKIFIKQLAKSVRDRYARSPKEK

SEQ ID NO: 34922 - protein, 440 aa, Homo sapiens
  Payload ID: 6894
  Gene Symbol: GXYLT1
  Gene Name: glucoside xylosyltransferase 1
  Uniprot ID: Q4G148
  ENSP ID: ENSP00000381666
MRRYLRVVVLCVACGFCSLLYAFSQLAVSLEEGTGGGGGKPQAAVASWLAGGGRGAVRGAGVAGPAAHPGVSDRCKDFSLCYWNPYWMLPSDVCGMNCFWEAAFRYSLKIQPVEKMHLAVVACGERLEETMTMLKSAIIFSIKPLQFHIFAEDQLHHSFKGRLDNWSFLQTFNYTLYPITFPSENAAEWKKLFKPCASQRLFLPLILKEVDSLLYVDTDILFLRPVDDIWSLLKKFNSTQIAAMAPEHEEPRIGWYNRFARHPYYGKTGVNSGVMLMNMTRMRRKYFKNDMTTVRLQWGDILMPLLKKYKLNITWGDQDLLNIVFFHNPESLFVFPCQWNYRPDHCIYGSNCQEAEEGGIFILHGNRGVYHDDKQPAFRAVYEALRNCSFEDDNIRSLLKPLELELQKTVHTYCGKIYKIFIKQLAKSVRDRYARSPKEK

SEQ ID NO: 34923 - protein, 443 aa, Homo sapiens
  Payload ID: 6895
  Gene Symbol: GXYLT2
  Gene Name: glucoside xylosyltransferase 2
  Uniprot ID: A0PJZ3
  ENSP ID: ENSP00000374268
MKLRSKAAALLLLALAALLLALLSLRAGRAEPPALPARPASAPQRHPAPVPARWPGPGALPGASPGVRRRRPPRPRPRAGRRGAARLEKLARRPGEPRSFQAVLPPELWIHLAVVACGNRLEETLVMLKSAVLFSHRKIQFHIFTEDSLKPEFDKQLRQWPDSYTKKFEHRIYPITFSVGNPQEWKKLFKPCAAQRLFLPVILKDVDSLLYVDTDVLFLRPVDDIWKLLRLFNSTQLAAMAPEHEIPKIGWYSRFARHPFYGSAGVNSGVMLMNLTRIRSTQFKNSMIPTGLAWEDMLYPLYQKYKNAITWGDQDLLNIIFYFNPECLYVFPCQWNYRPDHCMYGSNCREAEHEGVSVLHGNRGVYHDDKQPTFRALYEAIRDFPFQDNLFQSMYYPLQLKFLETVHTLCGRIPQVFLKQIEKTMKRAYEKHVIIHVGPNQMH

SEQ ID NO: 34924 - protein, 102 aa, Homo sapiens
  Payload ID: 6895
  Gene Symbol: GXYLT2
  Gene Name: glucoside xylosyltransferase 2
  ENSP ID: ENSP00000417239
MLKSAVLFSHRKIQFHIFTEDSLKPEFDKQLRQWPDSYTKKFEHRIYPITFSVGNPQEWKKLFKPCAAQRLFLPVILKDVDSLLYVDTDVLFLRPVDDIWKL

SEQ ID NO: 34925 - protein, 164 aa, Homo sapiens
  Payload ID: 6895
  Gene Symbol: GXYLT2
  Gene Name: glucoside xylosyltransferase 2
  ENSP ID: ENSP00000420426
MAPEHEIPKIGWYSRFARHPFYGSAGVNSGVMLMNLTRIRSTQFKNSMIPTGLAWEDMLYPLYQKYKNAITWGDQDLLNIIFYFNPECLYVFPCQWNYRPDHCMYGSNCREAEHEGVSVLHGNRGVYHDDKQPTFRALYEAIRDILRRGGKRKFVLSWISFFVM

SEQ ID NO: 34926 - protein, 617 aa, Homo sapiens
  Payload ID: 6896
  Gene Symbol: GLCE
  Gene Name: glucuronic acid epimerase
  Uniprot ID: O94923
  ENSP ID: ENSP00000261858
MRCLAARVNYKTLIIICALFTLVTVLLWNKCSSDKAIQFPRRSSSGFRVDGFEKRAAASESNNYMNHVAKQQSEEAFPQEQQKAPPVVGGFNSNVGSKVLGLKYEEIDCLINDEHTIKGRREGNEVFLPFTWVEKYFDVYGKVVQYDGYDRFEFSHSYSKVYAQRAPYHPDGVFMSFEGYNVEVRDRVKCISGVEGVPLSTQWGPQGYFYPIQIAQYGLSHYSKNLTEKPPHIEVYETAEDRDKNKPNDWTVPKGCFMANVADKSRFTNVKQFIAPETSEGVSLQLGNTKDFIISFDLKFLTNGSVSVVLETTEKNQLFTIHYVSNAQLIAFKERDIYYGIGPRTSWSTVTRDLVTDLRKGVGLSNTKAVKPTKIMPKKVVRLIAKGKGFLDNITISTTAHMAAFFAASDWLVRNQDEKGGWPIMVTRKLGEGFKSLEPGWYSAMAQGQAISTLVRAYLLTKDHIFLNSALRATAPYKFLSEQHGVKAVFMNKHDWYEEYPTTPSSFVLNGFMYSLIGLYDLKETAGEKLGKEARSLYERGMESLKAMLPLYDTGSGTIYDLRHFMLGIAPNLARWDYHTTHINQLQLLSTIDESPVFKEFVKRWKSYLKGSRAKHN

SEQ ID NO: 34927 - protein, 553 aa, Homo sapiens
  Payload ID: 6896
  Gene Symbol: GLCE
  Gene Name: glucuronic acid epimerase
  ENSP ID: ENSP00000454092
MNHVAKQQSEEAFPQEQQKAPPVVGGFNSNVGSKVLGLKYEEIDCLINDEHTIKGRREGNEVFLPFTWVEKYFDVYGKVVQYDGYDRFEFSHSYSKVYAQRAPYHPDGVFMSFEGYNVEVRDRVKCISGVEGVPLSTQWGPQGYFYPIQIAQYGLSHYSKNLTEKPPHIEVYETAEDRDKNKPNDWTVPKGCFMANVADKSRFTNVKQFIAPETSEGVSLQLGNTKDFIISFDLKFLTNGSVSVVLETTEKNQLFTIHYVSNAQLIAFKERDIYYGIGPRTSWSTVTRDLVTDLRKGVGLSNTKAVKPTKIMPKKVVRLIAKGKGFLDNITISTTAHMAAFFAASDWLVRNQDEKGGWPIMVTRKLGEGFKSLEPGWYSAMAQGQAISTLVRAYLLTKDHIFLNSALRATAPYKFLSEQHGVKAVFMNKHDWYEEYPTTPSSFVLNGFMYSLIGLYDLKETAGEKLGKEARSLYERGMESLKAMLPLYDTGSGTIYDLRHFMLGIAPNLARWDYHTTHINQLQLLSTIDESPVFKEFVKRWKSYLKGSRAKHN

SEQ ID NO: 34928 - protein, 651 aa, Homo sapiens
  Payload ID: 6897
  Gene Symbol: GUSB
  Gene Name: glucuronidase, beta
  Uniprot ID: P08236
  ENSP ID: ENSP00000302728
MARGSAVAWAALGPLLWGCALGLQGGMLYPQESPSRECKELDGLWSFRADFSDNRRRGFEEQWYRRPLWESGPTVDMPVPSSFNDISQDWRLRHFVGWVWYEREVILPERWTQDLRTRVVLRIGSAHSYAIVWVNGVDTLEHEGGYLPFEADISNLVQVGPLPSRLRITIAINNTLTPTTLPPGTIQYLTDTSKYPKGYFVQNTYFDFFNYAGLQRSVLLYTTPTTYIDDITVTTSVEQDSGLVNYQISVKGSNLFKLEVRLLDAENKVVANGTGTQGQLKVPGVSLWWPYLMHERPAYLYSLEVQLTAQTSLGPVSDFYTLPVGIRTVAVTKSQFLINGKPFYFHGVNKHEDADIRGKGFDWPLLVKDFNLLRWLGANAFRTSHYPYAEEVMQMCDRYGIVVIDECPGVGLALPQFFNNVSLHHHMQVMEEVVRRDKNHPAVVMWSVANEPASHLESAGYYLKMVIAHTKSLDPSRPVTFVSNSNYAADKGAPYVDVICLNSYYSWYHDYGHLELIQLQLATQFENWYKKYQKPIIQSEYGAETIAGFHQDPPLMFTEEYQKSLLEQYHLGLDQKRRKYVVGELIWNFADFMTEQSPTRVLGNKKGIFTRQRQPKSAAFLLRERYWKIANETRYPHSVAKSQCLENSLFT

SEQ ID NO: 34929 - protein, 505 aa, Homo sapiens
  Payload ID: 6897
  Gene Symbol: GUSB
  Gene Name: glucuronidase, beta
  Uniprot ID: P08236
  ENSP ID: ENSP00000391390
MARGSAVAWAALGPLLWGCALGLQGGMLYPQESPSRECKELDGLWSFRADFSDNRRRGFEEQWYRRPLWESGPTVDMPVPSSFNDISQDWRLRHFVGWVWYEREVILPERWTQDLRTRVVLRIGSAHSYAIVWVNGVDTLEHEGGYLPFEADISNLVQVQLTAQTSLGPVSDFYTLPVGIRTVAVTKSQFLINGKPFYFHGVNKHEDADIRGKGFDWPLLVKDFNLLRWLGANAFRTSHYPYAEEVMQMCDRYGIVVIDECPGVGLALPQFFNNVSLHHHMQVMEEVVRRDKNHPAVVMWSVANEPASHLESAGYYLKMVIAHTKSLDPSRPVTFVSNSNYAADKGAPYVDVICLNSYYSWYHDYGHLELIQLQLATQFENWYKKYQKPIIQSEYGAETIAGFHQDPPLMFTEEYQKSLLEQYHLGLDQKRRKYVVGELIWNFADFMTEQSPTRVLGNKKGIFTRQRQPKSAAFLLRERYWKIANETRYPHSVAKSQCLENSLFT

SEQ ID NO: 34930 - protein, 144 aa, Homo sapiens
  Payload ID: 6897
  Gene Symbol: GUSB
  Gene Name: glucuronidase, beta
  ENSP ID: ENSP00000411262
MARGSAVAWAALGPLLWGCALGLQGGMLYPQESPSRECKELDGLWSFRADFSDNRRRGFEEQWYRRPLWESGPTVDMPVPSSFNDISQDWRLRHFVGWVWYEREVILPERWTQDLRTRVVLRIGSAHSYAIVVSQGLLCPEHIF

SEQ ID NO: 34931 - protein, 134 aa, Homo sapiens
  Payload ID: 6897
  Gene Symbol: GUSB
  Gene Name: glucuronidase, beta
  ENSP ID: ENSP00000411859
MARGSAVAWAALGPLLWGCALGLQGGMLYPQESPSRECKELDGLWSFRADFSDNRRRGFEEQWYRRPLWESGPTVDMPVPSSFNDISQDWRLRHFVGWVWYEREVILPERWTQDLRTRVVLRIGSAHSYAIVGW

SEQ ID NO: 34932 - protein, 144 aa, Homo sapiens; identical to SEQ ID NO: 34930
  Payload ID: 6897
  Gene Symbol: GUSB
  Gene Name: glucuronidase, beta
  ENSP ID: ENSP00000416793

SEQ ID NO: 34933 - protein, 224 aa, Homo sapiens
  Payload ID: 6898
  Gene Symbol: GAD1
  Gene Name: glutamate decarboxylase 1 (brain, 67kDa)
  Uniprot ID: Q99259
  ENSP ID: ENSP00000341167
MASSTPSSSATSSNAGADPNTTNLRPTTYDTWCGVAHGCTRKLGLKICGFLQRTNSLEEKSRLVSAFKERQSSKNLLSCENSDRDARFRRTETDFSNLFARDLLPAKNGEEQTVQFLLEVVDILLNYVRKTFDRSTKVLDFHHPHQLLEGMEGFNLELSDHPESLEQILVDCRDTLKYGVRTGHPRFFNQLSTGLDIIGLAGEWLTSTANTNMPSDMRECWLLR

SEQ ID NO: 34934 - protein, 594 aa, Homo sapiens
  Payload ID: 6898
  Gene Symbol: GAD1
  Gene Name: glutamate decarboxylase 1 (brain, 67kDa)
  Uniprot ID: Q99259
  ENSP ID: ENSP00000350928
MASSTPSSSATSSNAGADPNTTNLRPTTYDTWCGVAHGCTRKLGLKICGFLQRTNSLEEKSRLVSAFKERQSSKNLLSCENSDRDARFRRTETDFSNLFARDLLPAKNGEEQTVQFLLEVVDILLNYVRKTFDRSTKVLDFHHPHQLLEGMEGFNLELSDHPESLEQILVDCRDTLKYGVRTGHPRFFNQLSTGLDIIGLAGEWLTSTANTNMFTYEIAPVFVLMEQITLKKMREIVGWSSKDGDGIFSPGGAISNMYSIMAARYKYFPEVKTKGMAAVPKLVLFTSEQSHYSIKKAGAALGFGTDNVILIKCNERGKIIPADFEAKILEAKQKGYVPFYVNATAGTTVYGAFDPIQEIADICEKYNLWLHVDAAWGGGLLMSRKHRHKLNGIERANSVTWNPHKMMGVLLQCSAILVKEKGILQGCNQMCAGYLFQPDKQYDVSYDTGDKAIQCGRHVDIFKFWLMWKAKGTVGFENQINKCLELAEYLYAKIKNREEFEMVFNGEPEHTNVCFWYIPQSLRGVPDSPQRREKLHKVAPKIKALMMESGTTMVGYQPQGDKANFFRMVISNPAATQSDIDFLIEEIERLGQDL

SEQ ID NO: 34935 - protein, 224 aa, Homo sapiens; identical to SEQ ID NO: 34933
  Payload ID: 6898
  Gene Symbol: GAD1
  Gene Name: glutamate decarboxylase 1 (brain, 67kDa)
  Uniprot ID: Q99259
  ENSP ID: ENSP00000364421

SEQ ID NO: 34936 - protein, 121 aa, Homo sapiens
  Payload ID: 6898
  Gene Symbol: GAD1
  Gene Name: glutamate decarboxylase 1 (brain, 67kDa)
  ENSP ID: ENSP00000394255
MASSTPSSSATSSNAGADPNTTNLRPTTYDTWCGVAHGCTRKLGLKICGFLQRTNSLEEKSRLVSAFKERQSSKNLLSCENSDRDARFRRTETDFSNLFARDLLPAKNGEEQTVQFLLEVV

SEQ ID NO: 34937 - protein, 37 aa, Homo sapiens
  Payload ID: 6898
  Gene Symbol: GAD1
  Gene Name: glutamate decarboxylase 1 (brain, 67kDa)
  ENSP ID: ENSP00000394948
MASSTPSSSATSSNAGADPNTTNLRPTTYDTWCGVAH

SEQ ID NO: 34938 - protein, 85 aa, Homo sapiens
  Payload ID: 6898
  Gene Symbol: GAD1
  Gene Name: glutamate decarboxylase 1 (brain, 67kDa)
  ENSP ID: ENSP00000402366
MASSTPSSSATSSNAGADPNTTNLRPTTYDTWCGVAHGCTRKLGLKICGFLQRTNSLEEKSRLVSAFKERQSSKNLLSCENSDRD

SEQ ID NO: 34939 - protein, 233 aa, Homo sapiens
  Payload ID: 6898
  Gene Symbol: GAD1
  Gene Name: glutamate decarboxylase 1 (brain, 67kDa)
  ENSP ID: ENSP00000403849
MASSTPSSSATSSNAGADPNTTNLRPTTYDTWCGVAHGCTRKLGLKICGFLQRTNSLEEKSRLVSAFKERQSSKNLLSCENSDRDARFRRTETDFSNLFARDLLPAKNGEEQTVQFLLEVVDILLNYVRKTFDRSTKVLDFHHPHQLLEGMEGFNLELSDHPESLEQILVDCRDTLKYGVRTGHPRFFNQLSTGLDIIGLAGEWLTSTANTNMGRHIQHVQHHGCSLQVLPGS

SEQ ID NO: 34940 - protein, 115 aa, Homo sapiens
  Payload ID: 6898
  Gene Symbol: GAD1
  Gene Name: glutamate decarboxylase 1 (brain, 67kDa)
  ENSP ID: ENSP00000405917
MASSTPSSSATSSNAGADPNTTNLRPTTYDTWCGVAHGCTRKLGLKICGFLQRTNSLEEKSRLVSAFKERQSSKNLLSCENSDRDARFRRTETDFSNLFARDLLPAKNGEEQTVQ

SEQ ID NO: 34941 - protein, 425 aa, Homo sapiens
  Payload ID: 6898
  Gene Symbol: GAD1
  Gene Name: glutamate decarboxylase 1 (brain, 67kDa)
  Uniprot ID: Q99259
  ENSP ID: ENSP00000434696
MASSTPSSSATSSNAGADPNTTNLRPTTYDTWCGVAHGCTRKLGLKICGFLQRTNSLEEKSRLVSAFKERQSSKNLLSCENSDRDARFRRTETDFSNLFARDLLPAKNGEEQTVQFLLEVVDILLNYVRKTFDRSTKVLDFHHPHQLLEGMEGFNLELSDHPESLEQILVDCRDTLKYGVRTGHPRFFNQLSTGLDIIGLAGEWLTSTANTNMFTYEIAPVFVLMEQITLKKMREIVGWSSKDGDGIFSPGGAISNMYSIMAARYKYFPEVKTKGMAAVPKLVLFTSEQSHYSIKKAGAALGFGTDNVILIKCNERGKIIPADFEAKILEAKQKGYVPFYVNATAGTTVYGAFDPIQEIADICEKYNLWLHVDGFNFSQLANRIICLATELMTNKGCVTWHPNYSVNMHHGCLGRWAAHVQEAPP

SEQ ID NO: 34942 - protein, 84 aa, Homo sapiens
  Payload ID: 6898
  Gene Symbol: GAD1
  Gene Name: glutamate decarboxylase 1 (brain, 67kDa)
  ENSP ID: ENSP00000476147
  MOD_RES (1)..(1): Any amino acid
XYDTWCGVAHGCTRKLGLKICGFLQRTNSLEEKSRLVSAFKERQSSKNLLSCENSDRDARFRRTETDFSNLFARGSPCPTPAPC

SEQ ID NO: 34943 - protein, 425 aa, Homo sapiens; identical to SEQ ID NO: 34941
  Payload ID: 6898
  Gene Symbol: GAD1
  Gene Name: glutamate decarboxylase 1 (brain, 67kDa)
  Uniprot ID: Q99259
  ENSP ID: ENSP00000486612

SEQ ID NO: 34944 - protein, 585 aa, Homo sapiens
  Payload ID: 6899
  Gene Symbol: GAD2
  Gene Name: glutamate decarboxylase 2 (pancreatic islets and brain, 65kDa)
  Uniprot ID: Q05329
  ENSP ID: ENSP00000259271
MASPGSGFWSFGSEDGSGDSENPGTARAWCQVAQKFTGGIGNKLCALLYGDAEKPAESGGSQPPRAAARKAACACDQKPCSCSKVDVNYAFLHATDLLPACDGERPTLAFLQDVMNILLQYVVKSFDRSTKVIDFHYPNELLQEYNWELADQPQNLEEILMHCQTTLKYAIKTGHPRYFNQLSTGLDMVGLAADWLTSTANTNMFTYEIAPVFVLLEYVTLKKMREIIGWPGGSGDGIFSPGGAISNMYAMMIARFKMFPEVKEKGMAALPRLIAFTSEHSHFSLKKGAAALGIGTDSVILIKCDERGKMIPSDLERRILEAKQKGFVPFLVSATAGTTVYGAFDPLLAVADICKKYKIWMHVDAAWGGGLLMSRKHKWKLSGVERANSVTWNPHKMMGVPLQCSALLVREEGLMQNCNQMHASYLFQQDKHYDLSYDTGDKALQCGRHVDVFKLWLMWRAKGTTGFEAHVDKCLELAEYLYNIIKNREGYEMVFDGKPQHTNVCFWYIPPSLRTLEDNEERMSRLSKVAPVIKARMMEYGTTMVSYQPLGDKVNFFRMVISNPAATHQDIDFLIEEIERLGQDL

SEQ ID NO: 34945 - protein, 129 aa, Homo sapiens
  Payload ID: 6899
  Gene Symbol: GAD2
  Gene Name: glutamate decarboxylase 2 (pancreatic islets and brain, 65kDa)
  ENSP ID: ENSP00000365424
MNILLQYVVKSFDRSTKVIDFHYPNELLQEYNWELADQPQNLEEILMHCQTTLKYAIKTGHPRYFNQLSTGLDMVGLAADWLTSTANTNMFTYEIAPVFVLLEYVTLKKMREIIGWPGGSGDGIFSPGT

SEQ ID NO: 34946 - protein, 585 aa, Homo sapiens; identical to SEQ ID NO: 34944
  Payload ID: 6899
  Gene Symbol: GAD2
  Gene Name: glutamate decarboxylase 2 (pancreatic islets and brain, 65kDa)
  Uniprot ID: Q05329
  ENSP ID: ENSP00000365437

SEQ ID NO: 34947 - protein, 188 aa, Homo sapiens
  Payload ID: 6899
  Gene Symbol: GAD2
  Gene Name: glutamate decarboxylase 2 (pancreatic islets and brain, 65kDa)
  ENSP ID: ENSP00000390434
MASPGSGFWSFGSEDGSGDSENPGTARAWCQVAQKFTGGIGNKLCALLYGDAEKPAESGGSQPPRAAARKAACACDQKPCSCSKVDVNYAFLHATDLLPACDGERPTLAFLQDVMNILLQYVVKSFDRSTKVIDFHYPNELLQEYNWELADQPQNLEEILMHCQTTLKYAIKTGIVSSKIIKLFFRLQ

SEQ ID NO: 34948 - protein, 521 aa, Homo sapiens
  Payload ID: 6900
  Gene Symbol: GADL1
  Gene Name: glutamate decarboxylase-like 1
  Uniprot ID: Q6ZQY3
  ENSP ID: ENSP00000282538
MSSDSDRQCPVDGDIDQQEMIPSKKNAVLVDGVVLNGPTTDAKAGEKFVEEACRLIMEEVVLKATDVNEKVCEWRPPEQLKQLLDLEMRDSGEPPHKLLELCRDVIHYSVKTNHPRFFNQLYAGLDYYSLVARFMTEALNPSVYTYEVSPVFLLVEEAVLKKMIEFIGWKEGDGIFNPGGSVSNMYAMNLARYKYCPDIKEKGLSGSPRLILFTSAECHYSMKKAASFLGIGTENVCFVETDGRGKMIPEELEKQVWQARKEGAAPFLVCATSGTTVLGAFDPLDEIADICERHSLWLHVDASWGGSALMSRKHRKLLHGIHRADSVAWNPHKMLMAGIQCCALLVKDKSDLLKKCYSAKASYLFQQDKFYDVSYDTGDKSIQCSRRPDAFKFWMTWKALGTLGLEERVNRALALSRYLVDEIKKREGFKLLMEPEYANICFWYIPPSLREMEEGPEFWAKLNLVAPAIKERMMKKGSLMLGYQPHRGKVNFFRQVVISPQVSREDMDFLLDEIDLLGKDM

SEQ ID NO: 34949 - protein, 418 aa, Homo sapiens
  Payload ID: 6900
  Gene Symbol: GADL1
  Gene Name: glutamate decarboxylase-like 1
  Uniprot ID: Q6ZQY3
  ENSP ID: ENSP00000427059
MSSDSDRQCPVDGDIDQQEMIPSKKNAVLVDGVVLNGPTTDAKAGEKFVEEACRLIMEEVVLKATDVNEKVCEWRPPEQLKQLLDLEMRDSGEPPHKLLELCRDVIHYSVKTNHPRFFNQLYAGLDYYSLVARFMTEALNPSVYTYEVSPVFLLVEEAVLKKMIEFIGWKEGDGIFNPGGSVSNMYAMNLARYKYCPDIKEKGLSGSPRLILFTSAECHYSMKKAASFLGIGTENVCFVETDGRGKMIPEELEKQVWQARKEGAAPFLVCATSGTTVLGAFDPLDEIADICERHSLWLHVDASWGGSALMSRKHRKLLHGIHRADSVAWNPHKMLMAGIQCCALLVKDKSDLLKKCYSAKASYLFQQDKFYDVSYDTGDKSIQCSRRPDAFKFWMTWKALGTLGLEERVNRALALSRY

SEQ ID NO: 34950 - protein, 558 aa, Homo sapiens
  Payload ID: 6901
  Gene Symbol: GLUD1
  Gene Name: glutamate dehydrogenase 1
  Uniprot ID: P00367
  ENSP ID: ENSP00000277865
MYRYLGEALLLSRAGPAALGSASADSAALLGWARGQPAAAPQPGLALAARRHYSEAVADREDDPNFFKMVEGFFDRGASIVEDKLVEDLRTRESEEQKRNRVRGILRIIKPCNHVLSLSFPIRRDDGSWEVIEGYRAQHSQHRTPCKGGIRYSTDVSVDEVKALASLMTYKCAVVDVPFGGAKAGVKINPKNYTDNELEKITRRFTMELAKKGFIGPGIDVPAPDMSTGEREMSWIADTYASTIGHYDINAHACVTGKPISQGGIHGRISATGRGVFHGIENFINEASYMSILGMTPGFGDKTFVVQGFGNVGLHSMRYLHRFGAKCIAVGESDGSIWNPDGIDPKELEDFKLQHGSILGFPKAKPYEGSILEADCDILIPAASEKQLTKSNAPRVKAKIIAEGANGPTTPEADKIFLERNIMVIPDLYLNAGGVTVSYFEWLKNLNHVSYGRLTFKYERDSNYHLLMSVQESLERKFGKHGGTIPIVPTAEFQDRISGASEKDIVHSGLAYTMERSARQIMRTAMKYNLGLDLRTAAYVNAIEKVFKVYNEAGVTFT

SEQ ID NO: 34951 - protein, 558 aa, Homo sapiens
  Payload ID: 6902
  Gene Symbol: GLUD2
  Gene Name: glutamate dehydrogenase 2
  Uniprot ID: P49448
  ENSP ID: ENSP00000327589
MYRYLAKALLPSRAGPAALGSAANHSAALLGRGRGQPAAASQPGLALAARRHYSELVADREDDPNFFKMVEGFFDRGASIVEDKLVKDLRTQESEEQKRNRVRGILRIIKPCNHVLSLSFPIRRDDGSWEVIEGYRAQHSQHRTPCKGGIRYSTDVSVDEVKALASLMTYKCAVVDVPFGGAKAGVKINPKNYTENELEKITRRFTMELAKKGFIGPGVDVPAPDMNTGEREMSWIADTYASTIGHYDINAHACVTGKPISQGGIHGRISATGRGVFHGIENFINEASYMSILGMTPGFRDKTFVVQGFGNVGLHSMRYLHRFGAKCIAVGESDGSIWNPDGIDPKELEDFKLQHGSILGFPKAKPYEGSILEVDCDILIPAATEKQLTKSNAPRVKAKIIAEGANGPTTPEADKIFLERNILVIPDLYLNAGGVTVSYFEWLKNLNHVSYGRLTFKYERDSNYHLLLSVQESLERKFGKHGGTIPIVPTAEFQDSISGASEKDIVHSALAYTMERSARQIMHTAMKYNLGLDLRTAAYVNAIEKVFKVYSEAGVTFT

SEQ ID NO: 34952 - protein, 1128 aa, Homo sapiens
  Payload ID: 6903
  Gene Symbol: GRIP1
  Gene Name: glutamate receptor interacting protein 1
  Uniprot ID: Q9Y3R0
  ENSP ID: ENSP00000352780
MIAVSFKCRCQILRRLTKDESPYTKSASQTKPPDGALAVRRQSIPEEFKGSTVVELMKKEGTTLGLTVSGGIDKDGKPRVSNLRQGGIAARSDQLDVGDYIKAVNGINLAKFRHDEIISLLKNVGERVVLEVEYELPPVSVQGSSVIFRTVEVTLHKEGNTFGFVIRGGAHDDRNKSRPVVITCVRPGGPADREGTIKPGDRLLSVDGIRLLGTTHAEAMSILKQCGQEAALLIEYDVSVMDSVATASGPLLVEVAKTPGASLGVALTTSMCCNKQVIVIDKIKSASIADRCGALHVGDHILSIDGTSMEYCTLAEATQFLANTTDQVKLEILPHHQTRLALKGPDHVKIQRSDRQLTWDSWASNHSSLHTNHHYNTYHPDHCRVPALTFPKAPPPNSPPALVSSSFSPTSMSAYSLSSLNMGTLPRSLYSTSPRGTMMRRRLKKKDFKSSLSLASSTVGLAGQVVHTETTEVVLTADPVTGFGIQLQGSVFATETLSSPPLISYIEADSPAERCGVLQIGDRVMAINGIPTEDSTFEEASQLLRDSSITSKVTLEIEFDVAESVIPSSGTFHVKLPKKHNVELGITISSPSSRKPGDPLVISDIKKGSVAHRTGTLELGDKLLAIDNIRLDNCSMEDAVQILQQCEDLVKLKIRKDEDNSDEQESSGAIIYTVELKRYGGPLGITISGTEEPFDPIIISSLTKGGLAERTGAIHIGDRILAINSSSLKGKPLSEAIHLLQMAGETVTLKIKKQTDAQSASSPKKFPISSHLSDLGDVEEDSSPAQKPGKLSDMYPSTVPSVDSAVDSWDGSAIDTSYGTQGTSFQASGYNFNTYDWRSPKQRGSLSPVTKPRSQTYPDVGLSYEDWDRSTASGFAGAADSAETEQEENFWSQALEDLETCGQSGILRELEEKADRRVSLRNMTLLATIMSGSTMSLNHEAPTPRSQLGRQASFQERSSSRPHYSQTTRSNTLPSDVGRKSVTLRKMKQEIKEIMSPTPVELHKVTLYKDSDMEDFGFSVADGLLEKGVYVKNIRPAGPGDLGGLKPYDRLLQVNHVRTRDFDCCLVVPLIAESGNKLDLVISRNPLASQKSIDQQSLPGDWSEQNSAFFQQPSHGGNLETREPTNTL

SEQ ID NO: 34953 - protein, 1076 aa, Homo sapiens
  Payload ID: 6903
  Gene Symbol: GRIP1
  Gene Name: glutamate receptor interacting protein 1
  Uniprot ID: Q9Y3R0
  ENSP ID: ENSP00000381098
MIAVSFKCRCQILRRLTKDESPYTKSASQTKPPDGALAVRRQSIPEEFKGSTVVELMKKEGTTLGLTVSGGIDKDGKPRVSNLRQGGIAARSDQLDVGDYIKAVNGINLAKFRHDEIISLLKNVGERVVLEVEYELPPVSVQGSSVIFRTVEVTLHKEGNTFGFVIRGGAHDDRNKSRPVVITCVRPGGPADREGTIKPGDRLLSVDGIRLLGTTHAEAMSILKQCGQEAALLIEYDVSVMDSVATASGPLLVEVAKTPGASLGVALTTSMCCNKQVIVIDKIKSASIADRCGALHVGDHILSIDGTSMEYCTLAEATQFLANTTDQVKLEILPHHQTRLALKGPDHAALVSSSFSPTSMSAYSLSSLNMGTLPRSLYSTSPRGTMMRRRLKKKDFKSSLSLASSTVGLAGQVVHTETTEVVLTADPVTGFGIQLQGSVFATETLSSPPLISYIEADSPAERCGVLQIGDRVMAINGIPTEDSTFEEASQLLRDSSITSKVTLEIEFDVAESVIPSSGTFHVKLPKKHNVELGITISSPSSRKPGDPLVISDIKKGSVAHRTGTLELGDKLLAIDNIRLDNCSMEDAVQILQQCEDLVKLKIRKDEDNSDEQESSGAIIYTVELKRYGGPLGITISGTEEPFDPIIISSLTKGGLAERTGAIHIGDRILAINSSSLKGKPLSEAIHLLQMAGETVTLKIKKQTDAQSASSPKKFPISSHLSDLGDVEEDSSPAQKPGKLSDMYPSTVPSVDSAVDSWDGSAIDTSYGTQGTSFQASGYNFNTYDWRSPKQRGSLSPVTKPRSQTYPDVGLSYEDWDRSTASGFAGAADSAETEQEENFWSQALEDLETCGQSGILRELEEKADRRVSLRNMTLLATIMSGSTMSLNHEAPTPRSQLGRQASFQERSSSRPHYSQTTRSNTLPSDVGRKSVTLRKMKQEIKEIMSPTPVELHKVTLYKDSDMEDFGFSVADGLLEKGVYVKNIRPAGPGDLGGLKPYDRLLQVNHVRTRDFDCCLVVPLIAESGNKLDLVISRNPLASQKSIDQQSLPGDWSEQNSAFFQQPSHGGNLETREPTNTL

SEQ ID NO: 34954 - protein, 149 aa, Homo sapiens
  Payload ID: 6903
  Gene Symbol: GRIP1
  Gene Name: glutamate receptor interacting protein 1
  ENSP ID: ENSP00000438500
MKKEGTTLGLTVSGGIDKDGKPRVSNLRQGGIAARSDQLDVGDYIKAVNGINLAKFRHDEIISLLKNVGERVVLEVEYELPPVSVQGSSVIFRTVEVTLHKEGNTFGFVIRGGAHDDRNKSRPVVITCVRPGGPADREGTIKPGDRLLS

SEQ ID NO: 34955 - protein, 188 aa, Homo sapiens
  Payload ID: 6903
  Gene Symbol: GRIP1
  Gene Name: glutamate receptor interacting protein 1
  ENSP ID: ENSP00000438921
MDRFLGFVKAIRRSRRRKGKKYRPEEDYHEGYEDVYYYASEHFRNESPYTKSASQTKPPDGALAVRRQSIPEEFKGSTVVELMKKEGTTLGLTVSGGIDKDGKPRVSNLRQGGIAARSDQLDVGDYIKAVNGINLAKFRHDEIISLLKNVGERVVLEVEYELPPVSVQGSSVIFRTVEVTLHKEGNTF

SEQ ID NO: 34956 - protein, 928 aa, Homo sapiens
  Payload ID: 6903
  Gene Symbol: GRIP1
  Gene Name: glutamate receptor interacting protein 1
  ENSP ID: ENSP00000439053
  MOD_RES (1)..(1): Any amino acid
XPGGPADREGTIKPGDRLLSVDGIRLLGTTHAEAMSILKQCGQEAALLIEYDVSVMDSVATASGPLLVEVAKTPGASLGVALTTSMCCNKQVIVIDKIKSASIADRCGALHVGDHILSIDGTSMEYCTLAEATQFLANTTDQVKLEILPHHQTRLALKGPDHVKIQRSDRQLTWDSWASNHSSLHTNHHYNTYHPDHCRVPALTFPKAPPPNSPPALVSSSFSPTSMSAYSLSSLNMGTLPRSLYSTSPRGTMMRRRLKKKDFKSSLSLASSTVGLAGQVVHTETTEVVLTADPVTGFGIQLQGSVFATETLSSPPLISYIEADSPAERCGVLQIGDRVMAINGIPTEDSTFEEASQLLRDSSITSKVTLEIEFDVAESVIPSSGTFHVKLPKKHNVELGITISSPSSRKPGDPLVISDIKKGSVAHRTGTLELGDKLLAIDNIRLDNCSMEDAVQILQQCEDLVKLKIRKDEDNSDEQESSGAIIYTVELKRYGGPLGITISGTEEPFDPIIISSLTKGGLAERTGAIHIGDRILAINSSSLKGKPLSEAIHLLQMAGETVTLKIKKQTDAQSASSPKKFPISSHLSDLGDVEEDSSPAQKPGKLSDMYPSTVPSVDSAVDSWDGSAIDTSYGTQGTSFQASGYNFNTYDWRSPKQRGSLSPVTKPRSQTYPDVGLSYEDWDRSTASGFAGAADSAETEQEENFWSQALEDLETCGQSGILRELEATIMSGSTMSLNHEAPTPRSQLGRQASFQERSSSRPHYSQTTRSNTLPSDVGRKSVTLRKMKQEIKEIMSPTPVELHKVTLYKDSDMEDFGFSVADGLLEKGVYVKNIRPAGPGDLGGLKPYDRLLQVNHVRTRDFDCCLVVPLIAESGNKLDLVISRNPLASQKSIDQQSLPGDWSEQNSAFFQQPSHGGNLETREPTNTL

SEQ ID NO: 34957 - protein, 210 aa, Homo sapiens
  Payload ID: 6903
  Gene Symbol: GRIP1
  Gene Name: glutamate receptor interacting protein 1
  ENSP ID: ENSP00000439124
MIAVSFKCRCQILRRLTKEEFKGSTVVELMKKEGTTLGLTVSGGIDKDGKPRVSNLRQGGIAARSDQLDVGDYIKAVNGINLAKFRHDEIISLLKNVGERVVLEVEYELPPVSVQGSSVIFRTVEVTLHKEGNTFGFVIRGGAHDDRNKSRPVVITCVRPGGPADREGTIKPGDRLLSVDGIRLLGTTHAEAMSILKQCGQEAALLIEYD

SEQ ID NO: 34958 - protein, 77 aa, Homo sapiens
  Payload ID: 6903
  Gene Symbol: GRIP1
  Gene Name: glutamate receptor interacting protein 1
  ENSP ID: ENSP00000440918
  MOD_RES (1)..(1): Any amino acid
XSVATASGPLLVEVAKTPGASLGVALTTSMCCNKQVIVIDKIKSASIADSENSEERQATYLGFLGQQPQQPSHQPSL

SEQ ID NO: 34959 - protein, 121 aa, Homo sapiens
  Payload ID: 6903
  Gene Symbol: GRIP1
  Gene Name: glutamate receptor interacting protein 1
  ENSP ID: ENSP00000443006
LEVEYELPPVSVQGSSVIFRTVEVTLHKEGNTFGFVIRGGAHDDRNKSRPVVITCVRPGGPADREGTIKPGDRLLSVDGIRLLGTTHAEAMSILKQCGQEAALLIEYDVSVMGESCPNQRL

SEQ ID NO: 34960 - protein, 120 aa, Homo sapiens
  Payload ID: 6903
  Gene Symbol: GRIP1
  Gene Name: glutamate receptor interacting protein 1
  ENSP ID: ENSP00000443392
MKKEGTTLGLTVSGGIDKDGKPRVSNLRQGGIAARSDQLDVGDYIKAVNGINLAKFRHDEIISLLKNVGERVVLEVEYELPPVSVQGSSVIFRTVEVTLHKEGNTFGFVIRGGAHDDRNK

SEQ ID NO: 34961 - protein, 283 aa, Homo sapiens
  Payload ID: 6903
  Gene Symbol: GRIP1
  Gene Name: glutamate receptor interacting protein 1
  ENSP ID: ENSP00000443860
  MOD_RES (1)..(1): Any amino acid
XVITCVRPGGPADREGTIKPGDRLLSVDGIRLLGTTHAEAMSILKQCGQEAALLIEYDVSVMDSVATASGPLLVEVAKTPGASLGVALTTSMCCNKQVIVIDKIKSASIADRCGALHVGDHILSIDGTSMEYCTLAEATQFLANTTDQVKLEILPHHQTRLALKGPDHALVSSSFSPTSMSAYSLSSLNMGTLPRSLYSTSPRGTMMRRRLKKKDFKSSLSLASSTVGLAGQVVHTETTEVVLTADPVTGFGIQLQGSVFATETLSSPPLISYIEADSPAERC

SEQ ID NO: 34962 - protein, 787 aa, Homo sapiens
  Payload ID: 6903
  Gene Symbol: GRIP1
  Gene Name: glutamate receptor interacting protein 1
  ENSP ID: ENSP00000446011
MKKEGTTLGLTVSGGIDKDGKPRVSNLRQGGIAARSDQLDVGDYIKAVNGINLAKFRHDEIISLLKNVGERVVLEVEYELPPVSVQGSSVIFRTVEVTLHKEGNTFGFVIRGGAHDDRNKSRPVVITCVRPGGPADREGTIKPGDRLLSVDGIRLLGTTHAEAMSILKQCGQEAALLIEYDVSVMDSVATASGPLLVEVAKTPGASLGVALTTSMCCNKQVIVIDKIKSASIADRCGALHVGDHILSIDGTSMEYCTLAEATQFLANTTDQVKLEILPHHQTRLALKGPDHVSLASSTVGLAGQVVHTETTEVVLTADPVTGFGIQLQGSVFATETLSSPPLISYIEADSPAERCGVLQIGDRVMAINGIPTEDSTFEEASQLLRDSSITSKVTLEIEFDVAESVIPSSGTFHVKLPKKHNVELGITISSPSSRKPGDPLVISDIKKGSVAHRTGTLELGDKLLAIDNIRLDNCSMEDAVQILQQCEDLVKLKIRKDEDNSDEQESSGAIIYTVELKRYGGPLGITISGTEEPFDPIIISSLTKGGLAERTGAIHIGDRILAINSSSLKGKPLSEAIHLLQMAGETVTLKIKKQTDAQSASSPKKFPISSHLSDLGDVEEDSSPAQKPGKLSDMYPSTVPSVDSAVDSWDGSAIDTSYGTQGTSFQASGYNFNTYDWRSPKQRGSLSPVTKPRSQTYPDVGLSYEDWDRSTASGFAGAADSAETEQEENFWSQALEDLETCGQSGILRELEATIMSGSTMSLNHEAPTPRSQLGRQASFQERSSSRP

SEQ ID NO: 34963 - protein, 876 aa, Homo sapiens
  Payload ID: 6903
  Gene Symbol: GRIP1
  Gene Name: glutamate receptor interacting protein 1
  ENSP ID: ENSP00000446024
MKKEGTTLGLTVSGGIDKDGKPRVSNLRQGGIAARSDQLDVGDYIKAVNGINLAKFRHDEIISLLKNVGERVVLEVEYELPPVSVQGSSVIFRTVEVTLHKEGNTFGFVIRGGAHDDRNKSRPVVITCVRPGGPADREGTIKPGDRLLSVDGIRLLGTTHAEAMSILKQCGQEAALLIEYDVSVMDSVATASGPLLVEVAKTPGASLGVALTTSMCCNKQVIVIDKIKSASIADRCGALHVGDHILSIDGTSMEYCTLAEATQFLANTTDQVKLEILPHHQTRLALKGPDHAALVSSSFSPTSMSAYSLSSLNMGTLPRSLYSTSPRGTMMRRRLKKKDFKSSLSLASSTVGLAGQVVHTETTEVVLTADPVTGFGIQLQGSVFATETLSSPPLISYIEADSPAERCGVLQIGDRVMAINGIPTEDSTFEEASQLLRDSSITSKVTLEIEFDVAESVIPSSGTFHVKLPKKHNVELGITISSPSSRKPGDPLVISDIKKGSVAHRTGTLELGDKLLAIDNIRLDNCSMEDAVQILQQCEDLVKLKIRKDEDNSDEQESSGAIIYTVELKRYGGPLGITISGTEEPFDPIIISSLTKGGLAERTGAIHIGDRILAINSSSLKGKPLSEAIHLLQMAGETVTLKIKKQTDAQSASSPKKFPISSHLSDLGDVEEDSSPAQKPGKLSDMYPSTVPSVDSAVDSWDGSAIDTSYGTQGTSFQASGYNFNTYDWRSPKQRGSLSPVTKPRSQTYPDVGLSYEDWDRSTASGFAGAADSAETEQEENFWSQALEDLETCGQSGILRELEEKADRRVSLRNMTLLATIMSGSTMSLNHEAPTPRSQLGRQASFQERSSSRPHYSQTTRSNTLPSDVGRKSVTL

SEQ ID NO: 34964 - protein, 1056 aa, Homo sapiens
  Payload ID: 6903
  Gene Symbol: GRIP1
  Gene Name: glutamate receptor interacting protein 1
  ENSP ID: ENSP00000446047
MIAVSFKCRCQILRRLTKDESPYTKSASQTKPPDGALAVRRQSIPEEFKGSTVVELMKKEGTTLGLTVSGGIDKDGKPRVSNLRQGGIAARSDQLDVGDYIKAVNGINLAKFRHDEIISLLKNVGERVVLEVEYELPPVSVQGSSVIFRTVEVTLHKEGNTFGFVIRGGAHDDRNKSRPVVITCVRPGGPADREGTIKPGDRLLSVDGIRLLGTTHAEAMSILKQCGQEAALLIEYDVSVMDSVATASGPLLVEVAKTPGASLGVALTTSMCCNKQVIVIDKIKSASIADRCGALHVGDHILSIDGTSMEYCTLAEATQFLANTTDQVKLEILPHHQTRLALKGPDHAALVSSSFSPTSMSAYSLSSLNMGTLPRSLYSTSPRGTMMRRRLKKKDFKSSLSLASSTVGLAGQVVHTETTEVVLTADPVTGFGIQLQGSVFATETLSSPPLISYIEADSPAERCGVLQIGDRVMAINGIPTEDSTFEEASQLLRDSSITSKVTLEIEFDVAESVIPSSGTFHVKLPKKHNVELGITISSPSSRKPGDPLVISDIKKGSVAHRTGTLELGDKLLAIDNIRLDNCSMEDAVQILQQCEDLVKLKIRKDEDNSDEQESSGAIIYTVELKRYGGPLGITISGTEEPFDPIIISSLTKGGLAERTGAIHIGDRILAINSSSLKGKPLSEAIHLLQMAGETVTLKIKKQTDAQSASSPKKFPISSHLSDLGDVEEDSSPAQKPGKLSDMYPSTVPSVDSAVDSWDGSAIDTSYGTQGTSFQASGYNFNTYDWRSPKQRGSLSPVTKPRSQTYPDVGLSYEDWDRSTASGFAGAADSAETEQEENFWSQALEDLETCGQSGILRELEATIMSGSTMSLNHEAPTPRSQLGRQASFQERSSSRPHYSQTTRSNTLPSDVGRKSVTLRKMKQEIKEIMSPTPVELHKVTLYKDSDMEDFGFSVADGLLEKGVYVKNIRPAGPGDLGGLKPYDRLLQVNHVRTRDFDCCLVVPLIAESGNKLDLVISRNPLASQKSIDQQSLPGDWSEQNSAFFQQPSHGGNLETRE

SEQ ID NO: 34965 - protein, 15 aa, Homo sapiens
  Payload ID: 6903
  Gene Symbol: GRIP1
  Gene Name: glutamate receptor interacting protein 1
  ENSP ID: ENSP00000446067
MKKEGTTLGLTVSGG

SEQ ID NO: 34966 - protein, 1043 aa, Homo sapiens
  Payload ID: 6904
  Gene Symbol: GRIP2
  Gene Name: glutamate receptor interacting protein 2
  ENSP ID: ENSP00000478352
MLCGLSRETPGEADDGPYSKGGKDAGGADVSLACRRQSIPEEFRGITVVELIKKEGSTLGLTISGGTDKDGKPRVSNLRPGGLAARSDLLNIGDYIRSVNGIHLTRLRHDEIITLLKNVGERVVLEVEYELPPPAPENNPRIISKTVDVSLYKEGNSFGFVLRGGAHEDGHKSRPLVLTYVRPGGPADREGSLKVGDRLLSVDGIPLHGASHATALATLRQCSHEALFQVEYDVATPDTVANASGPLMVEIVKTPGSALGISLTTTSLRNKSVITIDRIKPASVVDRSGALHPGDHILSIDGTSMEHCSLLEATKLLASISEKVRLEILPVPQSQRPLRPSEAVKVQRSEQLHRWDPCVPSCHSPRPGHCRMPTWATPAGQDQSRSLSSTPFSSPTLNHAFSCNNPSTLPRGSQPMSPRTTMGRRRQRRREHKSSLSLASSTVGPGGQIVHTETTEVVLCGDPLSGFGLQLQGGIFATETLSSPPLVCFIEPDSPAERCGLLQVGDRVLSINGIATEDGTMEEANQLLRDAALAHKVVLEVEFDVAESVIPSSGTFHVKLPKKRSVELGITISSASRKRGEPLIISDIKKGSVAHRTGTLEPGDKLLAIDNIRLDNCPMEDAVQILRQCEDLVKLKIRKDEDNSDELETTGAVSYTVELKRYGGPLGITISGTEEPFDPIVISGLTKRGLAERTGAIHVGDRILAINNVSLKGRPLSEAIHLLQVAGETVTLKIKKQLDRPLLPRKSGSLSETSDADEDPADALKGGLPAARFSPAVPSVDSAVESWDSSATEGGFGGPGSYTPQAAARGTTPQERRPGWLRGSPPPTEPRRTSYTPTPADESFPEEEEEDDWEPPTSPAPGPAREEGFWRMFGEALEDLESCGQSELLRELEASIMTGTVQRVALEGRPGHRPWQRGREVRASPAEMEELLLPTPLEMHKVTLHKDPMRHDFGFSVSDGLLEKGVYVHTVRPDGPAHRGGLQPFDRVLQVNHVRTRDFDCCLAVPLLAEAGDVLELIISRKPHTAHSSRAPRSPGPSSPRML

SEQ ID NO: 34967 - protein, 1140 aa, Homo sapiens
  Payload ID: 6904
  Gene Symbol: GRIP2
  Gene Name: glutamate receptor interacting protein 2
  ENSP ID: ENSP00000480660
MRLSSLTEEAVDGGNGGEWGEDLLEQFTCIPSRVVEAKTAPEWPLCPGEGQGLHGEPLPDHCQGTGGQIDPSLGRGGRAKQRGSRGSWWAAGETIANMLCGLSRETPGEADDGPYSKGGKDAGGADVSLACRRQSIPEEFRGITVVELIKKEGSTLGLTISGGTDKDGKPRVSNLRPGGLAARSDLLNIGDYIRSVNGIHLTRLRHDEIITLLKNVGERVVLEVEYELPPPAPENNPRIISKTVDVSLYKEGNSFGFVLRGGAHEDGHKSRPLVLTYVRPGGPADREGSLKVGDRLLSVDGIPLHGASHATALATLRQCSHEALFQVEYDVATPDTVANASGPLMVEIVKTPGSALGISLTTTSLRNKSVITIDRIKPASVVDRSGALHPGDHILSIDGTSMEHCSLLEATKLLASISEKVRLEILPVPQSQRPLRPSEAVKVQRSEQLHRWDPCVPSCHSPRPGHCRMPTWATPAGQDQSRSLSSTPFSSPTLNHAFSCNNPSTLPRGSQPMSPRTTMGRRRQRRREHKSSLSLASSTVGPGGQIVHTETTEVVLCGDPLSGFGLQLQGGIFATETLSSPPLVCFIEPDSPAERCGLLQVGDRVLSINGIATEDGTMEEANQLLRDAALAHKVVLEVEFDVAESVIPSSGTFHVKLPKKRSVELGITISSASRKRGEPLIISDIKKGSVAHRTGTLEPGDKLLAIDNIRLDNCPMEDAVQILRQCEDLVKLKIRKDEDNSDELETTGAVSYTVELKRYGGPLGITISGTEEPFDPIVISGLTKRGLAERTGAIHVGDRILAINNVSLKGRPLSEAIHLLQVAGETVTLKIKKQLDRPLLPRKSGSLSETSDADEDPADALKGGLPAARFSPAVPSVDSAVESWDSSATEGGFGGPGSYTPQAAARGTTPQERRPGWLRGSPPPTEPRRTSYTPTPADESFPEEEEEDDWEPPTSPAPGPAREEGFWRMFGEALEDLESCGQSELLRELEASIMTGTVQRVALEGRPGHRPWQRGREVRASPAEMEELLLPTPLEMHKVTLHKDPMRHDFGFSVSDGLLEKGVYVHTVRPDGPAHRGGLQPFDRVLQVNHVRTRDFDCCLAVPLLAEAGDVLELIISRKPHTAHSSRAPRSPGPSSPRML

SEQ ID NO: 34968 - protein, 327 aa, Homo sapiens
  Payload ID: 6904
  Gene Symbol: GRIP2
  Gene Name: glutamate receptor interacting protein 2
  ENSP ID: ENSP00000481670
ESVIPSSGTFHVKLPKKRSVELGITISSASRKRGEPLIISDIKKGSVAHRTGTLEPGDKLLAIDNIRLDNCPMEDAVQILRQCEDLVKLKIRKDEDNSDELETTGAVSYTVELKRYGGPLGITISGTEEPFDPIVISGLTKRGLAERTGAIHVGDRILAINNVSLKGRPLSEAIHLLQVAGETVTLKIKKQLDRPLLPRKSGSLSETSDADEDPADALKGGLPAARFSPAVPSVDSAVESWDSSATEGGFGGPGSYTPQAAARGTTPQERRPGWLRGSPPPTEPRRTSYTPTPADESFPEEEEEDDWEPPTRHPVSPLSTPSHLPLF

SEQ ID NO: 34969 - protein, 906 aa, Homo sapiens
  Payload ID: 6905
  Gene Symbol: GRIA1
  Gene Name: glutamate receptor, ionotropic, AMPA 1
  Uniprot ID: P42261
  ENSP ID: ENSP00000285900
MQHIFAFFCTGFLGAVVGANFPNNIQIGGLFPNQQSQEHAAFRFALSQLTEPPKLLPQIDIVNISDSFEMTYRFCSQFSKGVYAIFGFYERRTVNMLTSFCGALHVCFITPSFPVDTSNQFVLQLRPELQDALISIIDHYKWQKFVYIYDADRGLSVLQKVLDTAAEKNWQVTAVNILTTTEEGYRMLFQDLEKKKERLVVVDCESERLNAILGQIIKLEKNGIGYHYILANLGFMDIDLNKFKESGANVTGFQLVNYTDTIPAKIMQQWKNSDARDHTRVDWKRPKYTSALTYDGVKVMAEAFQSLRRQRIDISRRGNAGDCLANPAVPWGQGIDIQRALQQVRFEGLTGNVQFNEKGRRTNYTLHVIEMKHDGIRKIGYWNEDDKFVPAATDAQAGGDNSSVQNRTYIVTTILEDPYVMLKKNANQFEGNDRYEGYCVELAAEIAKHVGYSYRLEIVSDGKYGARDPDTKAWNGMVGELVYGRADVAVAPLTITLVREEVIDFSKPFMSLGISIMIKKPQKSKPGVFSFLDPLAYEIWMCIVFAYIGVSVVLFLVSRFSPYEWHSEEFEEGRDQTTSDQSNEFGIFNSLWFSLGAFMQQGCDISPRSLSGRIVGGVWWFFTLIIISSYTANLAAFLTVERMVSPIESAEDLAKQTEIAYGTLEAGSTKEFFRRSKIAVFEKMWTYMKSAEPSVFVRTTEEGMIRVRKSKGKYAYLLESTMNEYIEQRKPCDTMKVGGNLDSKGYGIATPKGSALRNPVNLAVLKLNEQGLLDKLKNKWWYDKGECGSGGGDSKDKTSALSLSNVAGVFYILIGGLGLAMLVALIEFCYKSRSESKRMKGFCLIPQQSINEAIRTSTLPRNSGAGASSGGSGENGRVVSHDFPKSMQSIPCMSHSSGMPLGATGL

SEQ ID NO: 34970 - protein, 906 aa, Homo sapiens
  Payload ID: 6905
  Gene Symbol: GRIA1
  Gene Name: glutamate receptor, ionotropic, AMPA 1
  Uniprot ID: P42261
  ENSP ID: ENSP00000339343
MQHIFAFFCTGFLGAVVGANFPNNIQIGGLFPNQQSQEHAAFRFALSQLTEPPKLLPQIDIVNISDSFEMTYRFCSQFSKGVYAIFGFYERRTVNMLTSFCGALHVCFITPSFPVDTSNQFVLQLRPELQDALISIIDHYKWQKFVYIYDADRGLSVLQKVLDTAAEKNWQVTAVNILTTTEEGYRMLFQDLEKKKERLVVVDCESERLNAILGQIIKLEKNGIGYHYILANLGFMDIDLNKFKESGANVTGFQLVNYTDTIPAKIMQQWKNSDARDHTRVDWKRPKYTSALTYDGVKVMAEAFQSLRRQRIDISRRGNAGDCLANPAVPWGQGIDIQRALQQVRFEGLTGNVQFNEKGRRTNYTLHVIEMKHDGIRKIGYWNEDDKFVPAATDAQAGGDNSSVQNRTYIVTTILEDPYVMLKKNANQFEGNDRYEGYCVELAAEIAKHVGYSYRLEIVSDGKYGARDPDTKAWNGMVGELVYGRADVAVAPLTITLVREEVIDFSKPFMSLGISIMIKKPQKSKPGVFSFLDPLAYEIWMCIVFAYIGVSVVLFLVSRFSPYEWHSEEFEEGRDQTTSDQSNEFGIFNSLWFSLGAFMQQGCDISPRSLSGRIVGGVWWFFTLIIISSYTANLAAFLTVERMVSPIESAEDLAKQTEIAYGTLEAGSTKEFFRRSKIAVFEKMWTYMKSAEPSVFVRTTEEGMIRVRKSKGKYAYLLESTMNEYIEQRKPCDTMKVGGNLDSKGYGIATPKGSALRGPVNLAVLKLSEQGVLDKLKSKWWYDKGECGSKDSGSKDKTSALSLSNVAGVFYILIGGLGLAMLVALIEFCYKSRSESKRMKGFCLIPQQSINEAIRTSTLPRNSGAGASSGGSGENGRVVSHDFPKSMQSIPCMSHSSGMPLGATGL

SEQ ID NO: 34971 - protein, 916 aa, Homo sapiens
  Payload ID: 6905
  Gene Symbol: GRIA1
  Gene Name: glutamate receptor, ionotropic, AMPA 1
  Uniprot ID: P42261
  ENSP ID: ENSP00000415569
MCCSTHLFQPLQLAGGLEWPWSNLLCFLTPVKLHPEVWGLFPNQQSQEHAAFRFALSQLTEPPKLLPQIDIVNISDSFEMTYRFCSQFSKGVYAIFGFYERRTVNMLTSFCGALHVCFITPSFPVDTSNQFVLQLRPELQDALISIIDHYKWQKFVYIYDADRGLSVLQKVLDTAAEKNWQVTAVNILTTTEEGYRMLFQDLEKKKERLVVVDCESERLNAILGQIIKLEKNGIGYHYILANLGFMDIDLNKFKESGANVTGFQLVNYTDTIPAKIMQQWKNSDARDHTRVDWKRPKYTSALTYDGVKVMAEAFQSLRRQRIDISRRGNAGDCLANPAVPWGQGIDIQRALQQVRFEGLTGNVQFNEKGRRTNYTLHVIEMKHDGIRKIGYWNEDDKFVPAATDAQAGGDNSSVQNRTYIVTTILEDPYVMLKKNANQFEGNDRYEGYCVELAAEIAKHVGYSYRLEIVSDGKYGARDPDTKAWNGMVGELVYGRADVAVAPLTITLVREEVIDFSKPFMSLGISIMIKKPQKSKPGVFSFLDPLAYEIWMCIVFAYIGVSVVLFLVSRFSPYEWHSEEFEEGRDQTTSDQSNEFGIFNSLWFSLGAFMQQGCDISPRSLSGRIVGGVWWFFTLIIISSYTANLAAFLTVERMVSPIESAEDLAKQTEIAYGTLEAGSTKEFFRRSKIAVFEKMWTYMKSAEPSVFVRTTEEGMIRVRKSKGKYAYLLESTMNEYIEQRKPCDTMKVGGNLDSKGYGIATPKGSALRGPVNLAVLKLSEQGVLDKLKSKWWYDKGECGSKDSGSKDKTSALSLSNVAGVFYILIGGLGLAMLVALIEFCYKSRSESKRMKGFCLIPQQSINEAIRTSTLPRNSGAGASSGGSGENGRVVSHDFPKSMQSIPCMSHSSGMPLGATGL

SEQ ID NO: 34972 - protein, 837 aa, Homo sapiens
  Payload ID: 6905
  Gene Symbol: GRIA1
  Gene Name: glutamate receptor, ionotropic, AMPA 1
  Uniprot ID: P42261
  ENSP ID: ENSP00000427864
MTYRFCSQFSKGVYAIFGFYERRTVNMLTSFCGALHVCFITPSFPVDTSNQFVLQLRPELQDALISIIDHYKWQKFVYIYDADRGLSVLQKVLDTAAEKNWQVTAVNILTTTEEGYRMLFQDLEKKKERLVVVDCESERLNAILGQIIKLEKNGIGYHYILANLGFMDIDLNKFKESGANVTGFQLVNYTDTIPAKIMQQWKNSDARDHTRVDWKRPKYTSALTYDGVKVMAEAFQSLRRQRIDISRRGNAGDCLANPAVPWGQGIDIQRALQQVRFEGLTGNVQFNEKGRRTNYTLHVIEMKHDGIRKIGYWNEDDKFVPAATDAQAGGDNSSVQNRTYIVTTILEDPYVMLKKNANQFEGNDRYEGYCVELAAEIAKHVGYSYRLEIVSDGKYGARDPDTKAWNGMVGELVYGRADVAVAPLTITLVREEVIDFSKPFMSLGISIMIKKPQKSKPGVFSFLDPLAYEIWMCIVFAYIGVSVVLFLVSRFSPYEWHSEEFEEGRDQTTSDQSNEFGIFNSLWFSLGAFMQQGCDISPRSLSGRIVGGVWWFFTLIIISSYTANLAAFLTVERMVSPIESAEDLAKQTEIAYGTLEAGSTKEFFRRSKIAVFEKMWTYMKSAEPSVFVRTTEEGMIRVRKSKGKYAYLLESTMNEYIEQRKPCDTMKVGGNLDSKGYGIATPKGSALRNPVNLAVLKLNEQGLLDKLKNKWWYDKGECGSGGGDSKDKTSALSLSNVAGVFYILIGGLGLAMLVALIEFCYKSRSESKRMKGFCLIPQQSINEAIRTSTLPRNSGAGASSGGSGENGRVVSHDFPKSMQSIPCMSHSSGMPLGATGL

SEQ ID NO: 34973 - protein, 826 aa, Homo sapiens
  Payload ID: 6905
  Gene Symbol: GRIA1
  Gene Name: glutamate receptor, ionotropic, AMPA 1
  Uniprot ID: P42261
  ENSP ID: ENSP00000427920
MQHIFAFFCTGFLGAVVGANFPNNIQIGGLFPNQQSQEHAAFRFALSQLTEPPKLLPQIDIVNISDSFEMTYRCLSVLQKVLDTAAEKNWQVTAVNILTTTEEGYRMLFQDLEKKKERLVVVDCESERLNAILGQIIKLEKNGIGYHYILANLGFMDIDLNKFKESGANVTGFQLVNYTDTIPAKIMQQWKNSDARDHTRVDWKRPKYTSALTYDGVKVMAEAFQSLRRQRIDISRRGNAGDCLANPAVPWGQGIDIQRALQQVRFEGLTGNVQFNEKGRRTNYTLHVIEMKHDGIRKIGYWNEDDKFVPAATDAQAGGDNSSVQNRTYIVTTILEDPYVMLKKNANQFEGNDRYEGYCVELAAEIAKHVGYSYRLEIVSDGKYGARDPDTKAWNGMVGELVYGRADVAVAPLTITLVREEVIDFSKPFMSLGISIMIKKPQKSKPGVFSFLDPLAYEIWMCIVFAYIGVSVVLFLVSRFSPYEWHSEEFEEGRDQTTSDQSNEFGIFNSLWFSLGAFMQQGCDISPRSLSGRIVGGVWWFFTLIIISSYTANLAAFLTVERMVSPIESAEDLAKQTEIAYGTLEAGSTKEFFRRSKIAVFEKMWTYMKSAEPSVFVRTTEEGMIRVRKSKGKYAYLLESTMNEYIEQRKPCDTMKVGGNLDSKGYGIATPKGSALRNPVNLAVLKLNEQGLLDKLKNKWWYDKGECGSGGGDSKDKTSALSLSNVAGVFYILIGGLGLAMLVALIEFCYKSRSESKRMKGFCLIPQQSINEAIRTSTLPRNSGAGASSGGSGENGRVVSHDFPKSMQSIPCMSHSSGMPLGATGL

SEQ ID NO: 34974 - protein, 916 aa, Homo sapiens
  Payload ID: 6905
  Gene Symbol: GRIA1
  Gene Name: glutamate receptor, ionotropic, AMPA 1
  Uniprot ID: P42261
  ENSP ID: ENSP00000428994
MCCSTHLFQPLQLAGGLEWPWSNLLCFLTPVKLHPEVWGLFPNQQSQEHAAFRFALSQLTEPPKLLPQIDIVNISDSFEMTYRFCSQFSKGVYAIFGFYERRTVNMLTSFCGALHVCFITPSFPVDTSNQFVLQLRPELQDALISIIDHYKWQKFVYIYDADRGLSVLQKVLDTAAEKNWQVTAVNILTTTEEGYRMLFQDLEKKKERLVVVDCESERLNAILGQIIKLEKNGIGYHYILANLGFMDIDLNKFKESGANVTGFQLVNYTDTIPAKIMQQWKNSDARDHTRVDWKRPKYTSALTYDGVKVMAEAFQSLRRQRIDISRRGNAGDCLANPAVPWGQGIDIQRALQQVRFEGLTGNVQFNEKGRRTNYTLHVIEMKHDGIRKIGYWNEDDKFVPAATDAQAGGDNSSVQNRTYIVTTILEDPYVMLKKNANQFEGNDRYEGYCVELAAEIAKHVGYSYRLEIVSDGKYGARDPDTKAWNGMVGELVYGRADVAVAPLTITLVREEVIDFSKPFMSLGISIMIKKPQKSKPGVFSFLDPLAYEIWMCIVFAYIGVSVVLFLVSRFSPYEWHSEEFEEGRDQTTSDQSNEFGIFNSLWFSLGAFMQQGCDISPRSLSGRIVGGVWWFFTLIIISSYTANLAAFLTVERMVSPIESAEDLAKQTEIAYGTLEAGSTKEFFRRSKIAVFEKMWTYMKSAEPSVFVRTTEEGMIRVRKSKGKYAYLLESTMNEYIEQRKPCDTMKVGGNLDSKGYGIATPKGSALRNPVNLAVLKLNEQGLLDKLKNKWWYDKGECGSGGGDSKDKTSALSLSNVAGVFYILIGGLGLAMLVALIEFCYKSRSESKRMKGFCLIPQQSINEAIRTSTLPRNSGAGASSGGSGENGRVVSHDFPKSMQSIPCMSHSSGMPLGATGL

SEQ ID NO: 34975 - protein, 883 aa, Homo sapiens
  Payload ID: 6906
  Gene Symbol: GRIA2
  Gene Name: glutamate receptor, ionotropic, AMPA 2
  Uniprot ID: P42262
  ENSP ID: ENSP00000264426
MQKIMHISVLLSPVLWGLIFGVSSNSIQIGGLFPRGADQEYSAFRVGMVQFSTSEFRLTPHIDNLEVANSFAVTNAFCSQFSRGVYAIFGFYDKKSVNTITSFCGTLHVSFITPSFPTDGTHPFVIQMRPDLKGALLSLIEYYQWDKFAYLYDSDRGLSTLQAVLDSAAEKKWQVTAINVGNINNDKKDEMYRSLFQDLELKKERRVILDCERDKVNDIVDQVITIGKHVKGYHYIIANLGFTDGDLLKIQFGGANVSGFQIVDYDDSLVSKFIERWSTLEEKEYPGAHTTTIKYTSALTYDAVQVMTEAFRNLRKQRIEISRRGNAGDCLANPAVPWGQGVEIERALKQVQVEGLSGNIKFDQNGKRINYTINIMELKTNGPRKIGYWSEVDKMVVTLTELPSGNDTSGLENKTVVVTTILESPYVMMKKNHEMLEGNERYEGYCVDLAAEIAKHCGFKYKLTIVGDGKYGARDADTKIWNGMVGELVYGKADIAIAPLTITLVREEVIDFSKPFMSLGISIMIKKPQKSKPGVFSFLDPLAYEIWMCIVFAYIGVSVVLFLVSRFSPYEWHTEEFEDGRETQSSESTNEFGIFNSLWFSLGAFMQQGCDISPRSLSGRIVGGVWWFFTLIIISSYTANLAAFLTVERMVSPIESAEDLSKQTEIAYGTLDSGSTKEFFRRSKIAVFDKMWTYMRSAEPSVFVRTTAEGVARVRKSKGKYAYLLESTMNEYIEQRKPCDTMKVGGNLDSKGYGIATPKGSSLRNAVNLAVLKLNEQGLLDKLKNKWWYDKGECGSGGGDSKEKTSALSLSNVAGVFYILVGGLGLAMLVALIEFCYKSRAEAKRMKVAKNAQNINPSSSQNSQNFATYKEGYNVYGIESVKI

SEQ ID NO: 34976 - protein, 883 aa, Homo sapiens
  Payload ID: 6906
  Gene Symbol: GRIA2
  Gene Name: glutamate receptor, ionotropic, AMPA 2
  Uniprot ID: P42262
  ENSP ID: ENSP00000296526
MQKIMHISVLLSPVLWGLIFGVSSNSIQIGGLFPRGADQEYSAFRVGMVQFSTSEFRLTPHIDNLEVANSFAVTNAFCSQFSRGVYAIFGFYDKKSVNTITSFCGTLHVSFITPSFPTDGTHPFVIQMRPDLKGALLSLIEYYQWDKFAYLYDSDRGLSTLQAVLDSAAEKKWQVTAINVGNINNDKKDEMYRSLFQDLELKKERRVILDCERDKVNDIVDQVITIGKHVKGYHYIIANLGFTDGDLLKIQFGGANVSGFQIVDYDDSLVSKFIERWSTLEEKEYPGAHTTTIKYTSALTYDAVQVMTEAFRNLRKQRIEISRRGNAGDCLANPAVPWGQGVEIERALKQVQVEGLSGNIKFDQNGKRINYTINIMELKTNGPRKIGYWSEVDKMVVTLTELPSGNDTSGLENKTVVVTTILESPYVMMKKNHEMLEGNERYEGYCVDLAAEIAKHCGFKYKLTIVGDGKYGARDADTKIWNGMVGELVYGKADIAIAPLTITLVREEVIDFSKPFMSLGISIMIKKPQKSKPGVFSFLDPLAYEIWMCIVFAYIGVSVVLFLVSRFSPYEWHTEEFEDGRETQSSESTNEFGIFNSLWFSLGAFMQQGCDISPRSLSGRIVGGVWWFFTLIIISSYTANLAAFLTVERMVSPIESAEDLSKQTEIAYGTLDSGSTKEFFRRSKIAVFDKMWTYMRSAEPSVFVRTTAEGVARVRKSKGKYAYLLESTMNEYIEQRKPCDTMKVGGNLDSKGYGIATPKGSSLRTPVNLAVLKLSEQGVLDKLKNKWWYDKGECGAKDSGSKEKTSALSLSNVAGVFYILVGGLGLAMLVALIEFCYKSRAEAKRMKVAKNAQNINPSSSQNSQNFATYKEGYNVYGIESVKI

SEQ ID NO: 34977 - protein, 730 aa, Homo sapiens
  Payload ID: 6906
  Gene Symbol: GRIA2
  Gene Name: glutamate receptor, ionotropic, AMPA 2
  ENSP ID: ENSP00000318144
MVQFSTSEFRLTPHIDNLEVANSFAVTNAFCSQFSRGVYAIFGFYDKKSVNTITSFCGTLHVSFITPSFPTDGTHPFVIQMRPDLKGALLSLIEYYQWDKFAYLYDSDRGLSTLQAVLDSAAEKKWQVTAINVGNINNDKKDEMYRSLFQDLELKKERRVILDCERDKVNDIVDQVITIGKHVKGYHYIIANLGFTDGDLLKIQFGGANVSGFQIVDYDDSLVSKFIERWSTLEEKEYPGAHTTTIKYTSALTYDAVQVMTEAFRNLRKQRIEISRRGNAGDCLANPAVPWGQGVEIERALKQVQVEGLSGNIKFDQNGKRINYTINIMELKTNGPRKIGYWSEVDKMVVTLTELPSGNDTSGLENKTVVVTTILESPYVMMKKNHEMLEGNERYEGYCVDLAAEIAKHCGFKYKLTIVGDGKYGARDADTKIWNGMVGELVYGKADIAIAPLTITLVREEVIDFSKPFMSLGISIMIKKPQKSKPGVFSFLDPLAYEIWMCIVFAYIGVSVVLFLVSRFSPYEWHTEEFEDGRETQSSESTNEFGIFNSLWFSLGAFMQQGCDISPRSLSGRIVGGVWWFFTLIIISSYTANLAAFLTVERMVSPIESAEDLSKQTEIAYGTLDSGSTKEFFRRSKIAVFDKMWTYMRSAEPSVFVRTTAEGVARVRKSKGKYAYLLESTMNEYIEQRKPCDTMKVGGNLDSKGYGIATPKGSSLSGVTFKTLLFVCCG

SEQ ID NO: 34978 - protein, 836 aa, Homo sapiens
  Payload ID: 6906
  Gene Symbol: GRIA2
  Gene Name: glutamate receptor, ionotropic, AMPA 2
  Uniprot ID: P42262
  ENSP ID: ENSP00000377403
MVQFSTSEFRLTPHIDNLEVANSFAVTNAFCSQFSRGVYAIFGFYDKKSVNTITSFCGTLHVSFITPSFPTDGTHPFVIQMRPDLKGALLSLIEYYQWDKFAYLYDSDRGLSTLQAVLDSAAEKKWQVTAINVGNINNDKKDEMYRSLFQDLELKKERRVILDCERDKVNDIVDQVITIGKHVKGYHYIIANLGFTDGDLLKIQFGGANVSGFQIVDYDDSLVSKFIERWSTLEEKEYPGAHTTTIKYTSALTYDAVQVMTEAFRNLRKQRIEISRRGNAGDCLANPAVPWGQGVEIERALKQVQVEGLSGNIKFDQNGKRINYTINIMELKTNGPRKIGYWSEVDKMVVTLTELPSGNDTSGLENKTVVVTTILESPYVMMKKNHEMLEGNERYEGYCVDLAAEIAKHCGFKYKLTIVGDGKYGARDADTKIWNGMVGELVYGKADIAIAPLTITLVREEVIDFSKPFMSLGISIMIKKPQKSKPGVFSFLDPLAYEIWMCIVFAYIGVSVVLFLVSRFSPYEWHTEEFEDGRETQSSESTNEFGIFNSLWFSLGAFMQQGCDISPRSLSGRIVGGVWWFFTLIIISSYTANLAAFLTVERMVSPIESAEDLSKQTEIAYGTLDSGSTKEFFRRSKIAVFDKMWTYMRSAEPSVFVRTTAEGVARVRKSKGKYAYLLESTMNEYIEQRKPCDTMKVGGNLDSKGYGIATPKGSSLRTPVNLAVLKLSEQGVLDKLKNKWWYDKGECGAKDSGSKEKTSALSLSNVAGVFYILVGGLGLAMLVALIEFCYKSRAEAKRMKVAKNAQNINPSSSQNSQNFATYKEGYNVYGIESVKI

SEQ ID NO: 34979 - protein, 145 aa, Homo sapiens
  Payload ID: 6906
  Gene Symbol: GRIA2
  Gene Name: glutamate receptor, ionotropic, AMPA 2
  ENSP ID: ENSP00000422038
MVQFSTSEFRLTPHIDNLEVANSFAVTNAFCSQFSRGVYAIFGFYDKKSVNTITSFCGTLHVSFITPSFPTDGTHPFVIQMRPDLKGALLSLIEYYQWDKFAYLYDSDRGLSTLQAVLDSAAEKKWQVTAINVGNINNDKKDEMY

SEQ ID NO: 34980 - protein, 214 aa, Homo sapiens
  Payload ID: 6906
  Gene Symbol: GRIA2
  Gene Name: glutamate receptor, ionotropic, AMPA 2
  ENSP ID: ENSP00000423229
  MOD_RES (1)..(1): Any amino acid
XLDSGSTKEFFRRSKIAVFDKMWTYMRSAEPSVFVRTTAEGVARVRKSKGKYAYLLESTMNEYIEQRKPCDTMKVGGNLDSKGYGIATPKGSSLRTPVNLAVLKLSEQGVLDKLKNKWWYDKGECGAKDSGSKEKTSALSLSNVAGVFYILVGGLGLAMLVALIEFCYKSRAEAKRMKVAKNAQNINPSSSQNSQNFATYKEGYNVYGIESVKI

SEQ ID NO: 34981 - protein, 48 aa, Homo sapiens
  Payload ID: 6906
  Gene Symbol: GRIA2
  Gene Name: glutamate receptor, ionotropic, AMPA 2
  ENSP ID: ENSP00000423988
MQKIMHISVLLSPVLWGLIFGVSSNSIQIGGLFPRGADQEYSAFRVGM

SEQ ID NO: 34982 - protein, 124 aa, Homo sapiens
  Payload ID: 6906
  Gene Symbol: GRIA2
  Gene Name: glutamate receptor, ionotropic, AMPA 2
  ENSP ID: ENSP00000425217
MQKIMHISVLLSPVLWGLIFGVSSNSIQIGGLFPRGADQEYSAFRVGMVQFSTSEFRLTPHIDNLEVANSFAVTNAFCSQFSRGVYAIFGFYDKKSVNTITSFCGTLHVSFITPSFPTDGTHPF

SEQ ID NO: 34983 - protein, 57 aa, Homo sapiens
  Payload ID: 6906
  Gene Symbol: GRIA2
  Gene Name: glutamate receptor, ionotropic, AMPA 2
  ENSP ID: ENSP00000426513
MVQFSTSEFRLTPHIDNLEVANSFAVTNAFCSQFSRGVYAIFGFYDKKSVNTITSFC

SEQ ID NO: 34984 - protein, 104 aa, Homo sapiens
  Payload ID: 6906
  Gene Symbol: GRIA2
  Gene Name: glutamate receptor, ionotropic, AMPA 2
  ENSP ID: ENSP00000426784
MRPDLKGALLSLIEYYQWDKFAYLYDSDRGLSTLQAVLDSAAEKKWQVTAINVGNINNDKKDEMYRSLFQDLELKKERRVILDCERDKVNDIVDQVITIGKHVK

SEQ ID NO: 34985 - protein, 836 aa, Homo sapiens; identical to SEQ ID NO: 34978
  Payload ID: 6906
  Gene Symbol: GRIA2
  Gene Name: glutamate receptor, ionotropic, AMPA 2
  Uniprot ID: P42262
  ENSP ID: ENSP00000426845

SEQ ID NO: 34986 - protein, 894 aa, Homo sapiens
  Payload ID: 6907
  Gene Symbol: GRIA3
  Gene Name: glutamate receptor, ionotropic, AMPA 3
  Uniprot ID: P42263
  ENSP ID: ENSP00000446440
MARQKKMGQSVLRAVFFLVLGLLGHSHGGFPNTISIGGLFMRNTVQEHSAFRFAVQLYNTNQNTTEKPFHLNYHVDHLDSSNSFSVTNAFCSQFSRGVYAIFGFYDQMSMNTLTSFCGALHTSFVTPSFPTDADVQFVIQMRPALKGAILSLLGHYKWEKFVYLYDTERGFSILQAIMEAAVQNNWQVTARSVGNIKDVQEFRRIIEEMDRRQEKRYLIDCEVERINTILEQVVILGKHSRGYHYMLANLGFTDILLERVMHGGANITGFQIVNNENPMVQQFIQRWVRLDEREFPEAKNAPLKYTSALTHDAILVIAEAFRYLRRQRVDVSRRGSAGDCLANPAVPWSQGIDIERALKMVQVQGMTGNIQFDTYGRRTNYTIDVYEMKVSGSRKAGYWNEYERFVPFSDQQISNDSASSENRTIVVTTILESPYVMYKKNHEQLEGNERYEGYCVDLAYEIAKHVRIKYKLSIVGDGKYGARDPETKIWNGMVGELVYGRADIAVAPLTITLVREEVIDFSKPFMSLGISIMIKKPQKSKPGVFSFLDPLAYEIWMCIVFAYIGVSVVLFLVSRFSPYEWHLEDNNEEPRDPQSPPDPPNEFGIFNSLWFSLGAFMQQGCDISPRSLSGRIVGGVWWFFTLIIISSYTANLAAFLTVERMVSPIESAEDLAKQTEIAYGTLDSGSTKEFFRRSKIAVYEKMWSYMKSAEPSVFTKTTADGVARVRKSKGKFAFLLESTMNEYIEQRKPCDTMKVGGNLDSKGYGVATPKGSALRNAVNLAVLKLNEQGLLDKLKNKWWYDKGECGSGGGDSKDKTSALSLSNVAGVFYILVGGLGLAMMVALIEFCYKSRAESKRMKLTKNTQNFKPAPATNTQNYATYREGYNVYGTESVKI

SEQ ID NO: 34987 - protein, 894 aa, Homo sapiens
  Payload ID: 6907
  Gene Symbol: GRIA3
  Gene Name: glutamate receptor, ionotropic, AMPA 3
  Uniprot ID: P42263
  ENSP ID: ENSP00000478489
MARQKKMGQSVLRAVFFLVLGLLGHSHGGFPNTISIGGLFMRNTVQEHSAFRFAVQLYNTNQNTTEKPFHLNYHVDHLDSSNSFSVTNAFCSQFSRGVYAIFGFYDQMSMNTLTSFCGALHTSFVTPSFPTDADVQFVIQMRPALKGAILSLLGHYKWEKFVYLYDTERGFSILQAIMEAAVQNNWQVTARSVGNIKDVQEFRRIIEEMDRRQEKRYLIDCEVERINTILEQVVILGKHSRGYHYMLANLGFTDILLERVMHGGANITGFQIVNNENPMVQQFIQRWVRLDEREFPEAKNAPLKYTSALTHDAILVIAEAFRYLRRQRVDVSRRGSAGDCLANPAVPWSQGIDIERALKMVQVQGMTGNIQFDTYGRRTNYTIDVYEMKVSGSRKAGYWNEYERFVPFSDQQISNDSASSENRTIVVTTILESPYVMYKKNHEQLEGNERYEGYCVDLAYEIAKHVRIKYKLSIVGDGKYGARDPETKIWNGMVGELVYGRADIAVAPLTITLVREEVIDFSKPFMSLGISIMIKKPQKSKPGVFSFLDPLAYEIWMCIVFAYIGVSVVLFLVSRFSPYEWHLEDNNEEPRDPQSPPDPPNEFGIFNSLWFSLGAFMQQGCDISPRSLSGRIVGGVWWFFTLIIISSYTANLAAFLTVERMVSPIESAEDLAKQTEIAYGTLDSGSTKEFFRRSKIAVYEKMWSYMKSAEPSVFTKTTADGVARVRKSKGKFAFLLESTMNEYIEQRKPCDTMKVGGNLDSKGYGVATPKGSALRTPVNLAVLKLSEQGILDKLKNKWWYDKGECGAKDSGSKDKTSALSLSNVAGVFYILVGGLGLAMMVALIEFCYKSRAESKRMKLTKNTQNFKPAPATNTQNYATYREGYNVYGTESVKI

SEQ ID NO: 34988 - protein, 144 aa, Homo sapiens
  Payload ID: 6907
  Gene Symbol: GRIA3
  Gene Name: glutamate receptor, ionotropic, AMPA 3
  ENSP ID: ENSP00000478758
MARQKKMGQSVLRAVFFLVLGLLGHSHGGFPNTISIGGLFMRNTVQEHSAFRFAVQLYNTNQNTTEKPFHLNYHVDHLDSSNSFSVTNACPAERDYLPWPGSIRENNWTALPCCKDHGLLHLKCSPGGARQNWAYCIWGVTGEL

SEQ ID NO: 34989 - protein, 144 aa, Homo sapiens; identical to SEQ ID NO: 34988
  Payload ID: 6907
  Gene Symbol: GRIA3
  Gene Name: glutamate receptor, ionotropic, AMPA 3
  ENSP ID: ENSP00000479607

SEQ ID NO: 34990 - protein, 894 aa, Homo sapiens; identical to SEQ ID NO: 34986
  Payload ID: 6907
  Gene Symbol: GRIA3
  Gene Name: glutamate receptor, ionotropic, AMPA 3
  Uniprot ID: P42263
  ENSP ID: ENSP00000481554

SEQ ID NO: 34991 - protein, 824 aa, Homo sapiens
  Payload ID: 6907
  Gene Symbol: GRIA3
  Gene Name: glutamate receptor, ionotropic, AMPA 3
  ENSP ID: ENSP00000481875
MARQKKMGQSVLRAVFFLVLGLLGHSHGGFPNTISIGGLFMRNTVQEHSAFRFAVQLYNTNQNTTEKPFHLNYHVDHLDSSNSFSVTNAFCSQFSRGVYAIFGFYDQMSMNTLTSFCGALHTSFVTPSFPTDADVQFVIQMRPALKGAILSLLGHYKWEKFVYLYDTERGFSILQAIMEAAVQNNWQVTARSVGNIKDVQEFRRIIEEMDRRQEKRYLIDCEVERINTILEQVVILGKHSRGYHYMLANLGFTDILLERVMHGGANITGFQIVNNENPMVQQFIQRWVRLDEREFPEAKNAPLKYTSALTHDAILVIAEAFRYLRRQRVDVSRRGSAGDCLANPAVPWSQGIDIERALKMVQVQGMTGNIQFDTYGRRTNYTIDVYEMKVSGSRKAGYWNEYERFVPFSDQQISNDSASSENRTIVVTTILESPYVMYKKNHEQLEGNERYEGYCVDLAYEIAKHVRIKYKLSIVGDGKYGARDPETKIWNGMVGELVYGRADIAVAPLTITLVREEVIDFSKPFMSLGISIMIKKPQKSKPGVFSFLDPLAYEIWMCIVFAYIGVSVVLFLVSRFSPYEWHLEDNNEEPRDPQSPPDPPNEFGIFNSLWFSLGAFMQQGCDISPRSLSGRIVGGVWWFFTLIIISSYTANLAAFLTVERMVSPIESAEDLAKQTEIAYGTLDSGSTKEFFRRSKIAVYEKMWSYMKSAEPSVFTKTTADGVARVRKSKGKFAFLLESTMNEYIEQRKPCDTMKVGGNLDSKGYGVATPKGSALRNAVNLAVLKLNEQGLLDKLKNKWWYDKGECGSGGGDSKNACKPCSIETQ

SEQ ID NO: 34992 - protein, 902 aa, Homo sapiens
  Payload ID: 6908
  Gene Symbol: GRIA4
  Gene Name: glutamate receptor, ionotropic, AMPA 4
  Uniprot ID: P48058
  ENSP ID: ENSP00000282499
MRIISRQIVLLFSGFWGLAMGAFPSSVQIGGLFIRNTDQEYTAFRLAIFLHNTSPNASEAPFNLVPHVDNIETANSFAVTNAFCSQYSRGVFAIFGLYDKRSVHTLTSFCSALHISLITPSFPTEGESQFVLQLRPSLRGALLSLLDHYEWNCFVFLYDTDRGYSILQAIMEKAGQNGWHVSAICVENFNDVSYRQLLEELDRRQEKKFVIDCEIERLQNILEQIVSVGKHVKGYHYIIANLGFKDISLERFIHGGANVTGFQLVDFNTPMVIKLMDRWKKLDQREYPGSETPPKYTSALTYDGVLVMAETFRSLRRQKIDISRRGNAGDCLANPAAPWGQGIDMERTLKQVRIQGLTGNVQFDHYGRRVNYTMDVFELKSTGPRKVGYWNDMDKLVLIQDVPTLGNDTAAIENRTVVVTTIMESPYVMYKKNHEMFEGNDKYEGYCVDLASEIAKHIGIKYKIAIVPDGKYGARDADTKIWNGMVGELVYGKAEIAIAPLTITLVREEVIDFSKPFMSLGISIMIKKPQKSKPGVFSFLDPLAYEIWMCIVFAYIGVSVVLFLVSRFSPYEWHTEEPEDGKEGPSDQPPNEFGIFNSLWFSLGAFMQQGCDISPRSLSGRIVGGVWWFFTLIIISSYTANLAAFLTVERMVSPIESAEDLAKQTEIAYGTLDSGSTKEFFRRSKIAVYEKMWTYMRSAEPSVFTRTTAEGVARVRKSKGKFAFLLESTMNEYIEQRKPCDTMKVGGNLDSKGYGVATPKGSSLRTPVNLAVLKLSEAGVLDKLKNKWWYDKGECGPKDSGSKDKTSALSLSNVAGVFYILVGGLGLAMLVALIEFCYKSRAEAKRMKLTFSEAIRNKARLSITGSVGENGRVLTPDCPKAVHTGTAIRQSSGLAVIASDLP

SEQ ID NO: 34993 - protein, 433 aa, Homo sapiens
  Payload ID: 6908
  Gene Symbol: GRIA4
  Gene Name: glutamate receptor, ionotropic, AMPA 4
  Uniprot ID: P48058
  ENSP ID: ENSP00000376833
MRIISRQIVLLFSGFWGLAMGAFPSSVQIGGLFIRNTDQEYTAFRLAIFLHNTSPNASEAPFNLVPHVDNIETANSFAVTNAFCSQYSRGVFAIFGLYDKRSVHTLTSFCSALHISLITPSFPTEGESQFVLQLRPSLRGALLSLLDHYEWNCFVFLYDTDRGYSILQAIMEKAGQNGWHVSAICVENFNDVSYRQLLEELDRRQEKKFVIDCEIERLQNILEQIVSVGKHVKGYHYIIANLGFKDISLERFIHGGANVTGFQLVDFNTPMVIKLMDRWKKLDQREYPGSETPPKYTSALTYDGVLVMAETFRSLRRQKIDISRRGNAGDCLANPAAPWGQGIDMERTLKQVRIQGLTGNVQFDHYGRRVNYTMDVFELKSTGPRKVGYWNDMDKLVLIQDVPTLGNDTAAIENRTVVVTTIMPLMKNPILRN

SEQ ID NO: 34994 - protein, 884 aa, Homo sapiens
  Payload ID: 6908
  Gene Symbol: GRIA4
  Gene Name: glutamate receptor, ionotropic, AMPA 4
  ENSP ID: ENSP00000376835
MRIISRQIVLLFSGFWGLAMGAFPSSVQIGGLFIRNTDQEYTAFRLAIFLHNTSPNASEAPFNLVPHVDNIETANSFAVTNAFCSQYSRGVFAIFGLYDKRSVHTLTSFCSALHISLITPSFPTEGESQFVLQLRPSLRGALLSLLDHYEWNCFVFLYDTDRGYSILQAIMEKAGQNGWHVSAICVENFNDVSYRQLLEELDRRQEKKFVIDCEIERLQNILEQIVSVGKHVKGYHYIIANLGFKDISLERFIHGGANVTGFQLVDFNTPMVIKLMDRWKKLDQREYPGSETPPKYTSALTYDGVLVMAETFRSLRRQKIDISRRGNAGDCLANPAAPWGQGIDMERTLKQVRIQGLTGNVQFDHYGRRVNYTMDVFELKSTGPRKVGYWNDMDKLVLIQDVPTLGNDTAAIENRTVVVTTIMESPYVMYKKNHEMFEGNDKYEGYCVDLASEIAKHIGIKYKIAIVPDGKYGARDADTKIWNGMVGELVYGKAEIAIAPLTITLVREEVIDFSKPFMSLGISIMIKKPQKSKPGVFSFLDPLAYEIWMCIVFAYIGVSVVLFLVSRFSPYEWHTEEPEDGKEGPSDQPPNEFGIFNSLWFSLGAFMQQGCDISPRSLSGRIVGGVWWFFTLIIISSYTANLAAFLTVERMVSPIESAEDLAKQTEIAYGTLDSGSTKEFFRRSKIAVYEKMWTYMRSAEPSVFTRTTAEGVARVRKSKGKFAFLLESTMNEYIEQRKPCDTMKVGGNLDSKGYGVATPKGSSLRNAVNLAVLKLNEQGLLDKLKNKWWYDKGECGSGGGDSKDKTSALSLSNVAGVFYILVGGLGLAMLVALIEFCYKSRAEAKRMKVAKSAQTFNPTSSQNTQNLATYREGYNVYGTESIKI

SEQ ID NO: 34995 - protein, 433 aa, Homo sapiens; identical to SEQ ID NO: 34993
  Payload ID: 6908
  Gene Symbol: GRIA4
  Gene Name: glutamate receptor, ionotropic, AMPA 4
  Uniprot ID: P48058
  ENSP ID: ENSP00000415551

SEQ ID NO: 34996 - protein, 884 aa, Homo sapiens; identical to SEQ ID NO: 34994
  Payload ID: 6908
  Gene Symbol: GRIA4
  Gene Name: glutamate receptor, ionotropic, AMPA 4
  ENSP ID: ENSP00000432180

SEQ ID NO: 34997 - protein, 84 aa, Homo sapiens
  Payload ID: 6908
  Gene Symbol: GRIA4
  Gene Name: glutamate receptor, ionotropic, AMPA 4
  ENSP ID: ENSP00000432371
MRIISRQIVLLFSGFWGLAMGAFPSSVQIGGLFIRNTDQEYTAFRLAIFLHNTSPNASEAPFNLVPHVDNIETANSFAVTNACK

SEQ ID NO: 34998 - protein, 225 aa, Homo sapiens
  Payload ID: 6908
  Gene Symbol: GRIA4
  Gene Name: glutamate receptor, ionotropic, AMPA 4
  ENSP ID: ENSP00000432443
MRIISRQIVLLFSGFWGLAMGAFPSSVQIGGLFIRNTDQEYTAFRLAIFLHNTSPNASEAPFNLVPHVDNIETANSFAVTNAFCSQYSRGVFAIFGLYDKRSVHTLTSFCSALHISLITPSFPTEGESQFVLQLRPSLRGALLSLLDHYEWNCFVFLYDTDRGLVISTTPLASNCMPSSVVHSWLYVLYNKSINSITACLLGPSTELNVFNYLIADSNLNNGNYI

SEQ ID NO: 34999 - protein, 82 aa, Homo sapiens
  Payload ID: 6908
  Gene Symbol: GRIA4
  Gene Name: glutamate receptor, ionotropic, AMPA 4
  ENSP ID: ENSP00000433621
MRIISRQIVLLFSGFWGLAMGAFPSSVQIGGLFIRNTDQEYTAFRLAIFLHNTSPNASEAPFNLVPHVDNIETANSFAVTNA

SEQ ID NO: 35000 - protein, 104 aa, Homo sapiens
  Payload ID: 6908
  Gene Symbol: GRIA4
  Gene Name: glutamate receptor, ionotropic, AMPA 4
  ENSP ID: ENSP00000433873
  MOD_RES (1)..(1): Any amino acid
XVARVRKSKGKFAFLLESTMNEYIEQRKPCDTMKVGGNLDSKGYGVATPKGSSLRNAVNLAVLKLNEQGLLDKLKNKWWYDKGECGSGGGDSKNSCKPCRFETQ

SEQ ID NO: 35001 - protein, 902 aa, Homo sapiens; identical to SEQ ID NO: 34992
  Payload ID: 6908
  Gene Symbol: GRIA4
  Gene Name: glutamate receptor, ionotropic, AMPA 4
  Uniprot ID: P48058
  ENSP ID: ENSP00000435775

SEQ ID NO: 35002 - protein, 82 aa, Homo sapiens; identical to SEQ ID NO: 34999
  Payload ID: 6908
  Gene Symbol: GRIA4
  Gene Name: glutamate receptor, ionotropic, AMPA 4
  ENSP ID: ENSP00000436143

SEQ ID NO: 35003 - protein, 82 aa, Homo sapiens; identical to SEQ ID NO: 34999
  Payload ID: 6908
  Gene Symbol: GRIA4
  Gene Name: glutamate receptor, ionotropic, AMPA 4
  ENSP ID: ENSP00000436449

SEQ ID NO: 35004 - protein, 1009 aa, Homo sapiens
  Payload ID: 6909
  Gene Symbol: GRID1
  Gene Name: glutamate receptor, ionotropic, delta 1
  Uniprot ID: Q9ULK0
  ENSP ID: ENSP00000330148
MEALTLWLLPWICQCVSVRADSIIHIGAIFEENAAKDDRVFQLAVSDLSLNDDILQSEKITYSIKVIEANNPFQAVQEACDLMTQGILALVTSTGCASANALQSLTDAMHIPHLFVQRNPGGSPRTACHLNPSPDGEAYTLASRPPVRLNDVMLRLVTELRWQKFVMFYDSEYDIRGLQSFLDQASRLGLDVSLQKVDKNISHVFTSLFTTMKTEELNRYRDTLRRAILLLSPQGAHSFINEAVETNLASKDSHWVFVNEEISDPEILDLVHSALGRMTVVRQIFPSAKDNQKCTRNNHRISSLLCDPQEGYLQMLQISNLYLYDSVLMLANAFHRKLEDRKWHSMASLNCIRKSTKPWNGGRSMLDTIKKGHITGLTGVMEFREDSSNPYVQFEILGTTYSETFGKDMRKLATWDSEKGLNGSLQERPMGSRLQGLTLKVVTVLEEPFVMVAENILGQPKRYKGFSIDVLDALAKALGFKYEIYQAPDGRYGHQLHNTSWNGMIGELISKRADLAISAITITPERESVVDFSKRYMDYSVGILIKKPEEKISIFSLFAPFDFAVWACIAAAIPVVGVLIFVLNRIQAVRAQSAAQPRPSASATLHSAIWIVYGAFVQQGGESSVNSMAMRIVMGSWWLFTLIVCSSYTANLAAFLTVSRMDNPIRTFQDLSKQVEMSYGTVRDSAVYEYFRAKGTNPLEQDSTFAELWRTISKNGGADNCVSSPSEGIRKAKKGNYAFLWDVAVVEYAALTDDDCSVTVIGNSISSKGYGIALQHGSPYRDLFSQRILELQDTGDLDVLKQKWWPHMGRCDLTSHASAQADGKSLKLHSFAGVFCILAIGLLLACLVAALELWWNSNRCHQETPKEDKEVNLEQVHRRMNSLMDEDIAHKQISPASIELSALEMGGLAPTQTLEPTREYQNTQLSVSTFLPEQSSHGTSRTLSSGPSSNLPLPLSSSATMPSMQCKHRSPNGGLFRQSPVKTPIPMSFQPVPGGVLPEALDTSHGTSI

SEQ ID NO: 35005 - protein, 755 aa, Homo sapiens
  Payload ID: 6909
  Gene Symbol: GRID1
  Gene Name: glutamate receptor, ionotropic, delta 1
  ENSP ID: ENSP00000433064
MEALTLWLLPWICQCVSVRADSIIHIGAIFEENAAKDDRVFQLAVSDLSLNDDILQSEKITYSIKVIEANNPFQAVQEACDLMTQGILALVTSTGCASANALQSLTDAMHIPHLFVQRNPGGSPRTACHLNPSPDGEAYTLASRPPVRLNDVMLRLVTELRWQKFVMFYDSEYDIRGLQSFLDQASRLGLDVSLQKVDKNISHVFTSLFTTMKTEELNRYRDTLRRAILLLSPQGAHSFINEAVETNLASKDSHWVFVNEEISDPEILDLVHSALGRMTVVRQIFPSAKDNQKCTRNNHRISSLLCDPQEGYLQMLQISNLYLYDSVLMLANAFHRKLEDRKWHSMASLNCIRKSTKPWNGGRSMLDTIKKGHITGLTGVMEFREDSSNPYVQFEILGTTYSETFGKDMRKLATWDSEKGLNGSLQERPMGSRLQGLTLKVVTVLEEPFVMVAENILGQPKRYKGFSIDVLDALAKALGFKYEIYQAPDGRYGHQLHNTSWNGMIGELISKRADLAISAITITPERESVVDFSKRYMDYSVGILIKKPEEKISIFSLFAPFDFAVWACIAAAIPVVGVLIFVLNRIQAVRAQSAAQPRPSASATLHSAIWIVYGAFVQQGGESSVNSMAMRIVMGSWWLFTLIVCSSYTANLAAFLTVSRMDNPIRTFQDLSKQVEMSYGTVRDSAVYEYFRAKGTNPLEQDSTFAELWRTISKNGGADNCVSSPSEGIRKDPGAAGHRGPGCAEAEVVAAHGPL

SEQ ID NO: 35006 - protein, 749 aa, Homo sapiens
  Payload ID: 6909
  Gene Symbol: GRID1
  Gene Name: glutamate receptor, ionotropic, delta 1
  ENSP ID: ENSP00000444455
EISDPEILDLVHSALGRMTVVRQIFPSAKDNQKCTRNNHRISSLLCDPQEGYLQMLQISNLYLYDSVLMLANAFHRKLEDRKWHSMASLNCIRKSTKPWNGGRSMLDTIKKGHITGLTGVMEFREDSSNPYVQFEILGTTYSETFGKDMRKLATWDSEKGLNGSLQERPMGSRLQGLTLKVVTVLEEPFVMVAENILGQPKRYKGFSIDVLDALAKALGFKYEIYQAPDGRYGHQLHNTSWNGMIGELISKRADLAISAITITPERESVVDFSKRYMDYSVGILIKKPEEKISIFSLFAPFDFAVWACIAAAIPVVGVLIFVLNRIQAVRAQSAAQPRPSASATLHSAIWIVYGAFVQQGGESSVNSMAMRIVMGSWWLFTLIVCSSYTANLAAFLTVSRMDNPIRTFQDLSKQVEMSYGTVRDSAVYEYFRAKGTNPLEQDSTFAELWRTISKNGGADNCVSSPSEGIRKAKKGNYAFLWDVAVVEYAALTDDDCSVTVIGNSISSKGYGIALQHGSPYRDLFSQRILELQDTGDLDVLKQKWWPHMGRCDLTSHASAQADGKSLKLHSFAGVFCILAIGLLLACLVAALELWWNSNRCHQETPKEDKEVNLEQVHRRMNSLMDEDIAHKQISPASIELSALEMGGLAPTQTLEPTREYQNTQLSVSTFLPEQSSHGTSRTLSSGPSSNLPLPLSSSATMPSMQCKHRSPNGGLFRQSPVKTPIPMSFQPVPGGVLPEALDTSHGTSI

SEQ ID NO: 35007 - protein, 1007 aa, Homo sapiens
  Payload ID: 6910
  Gene Symbol: GRID2
  Gene Name: glutamate receptor, ionotropic, delta 2
  Uniprot ID: O43424
  ENSP ID: ENSP00000282020
MEVFPFLLVLSVWWSRTWDSANADSIIHIGAIFDESAKKDDEVFRTAVGDLNQNEEILQTEKITFSVTFVDGNNPFQAVQEACELMNQGILALVSSIGCTSAGSLQSLADAMHIPHLFIQRSTAGTPRSGCGLTRSNRNDDYTLSVRPPVYLHDVILRVVTEYAWQKFIIFYDSEYDIRGIQEFLDKVSQQGMDVALQKVENNINKMITTLFDTMRIEELNRYRDTLRRAILVMNPATAKSFITEVVETNLVAFDCHWIIINEEINDVDVQELVRRSIGRLTIIRQTFPVPQNISQRCFRGNHRISSTLCDPKDPFAQNMEISNLYIYDTVLLLANAFHKKLEDRKWHSMASLSCIRKNSKPWQGGRSMLETIKKGGVSGLTGELEFGENGGNPNVHFEILGTNYGEELGRGVRKLGCWNPVTGLNGSLTDKKLENNMRGVVLRVVTVLEEPFVMVSENVLGKPKKYQGFSIDVLDALSNYLGFNYEIYVAPDHKYGSPQEDGTWNGLVGELVFKRADIGISALTITPDRENVVDFTTRYMDYSVGVLLRRAEKTVDMFACLAPFDLSLWACIAGTVLLVGLLVYLLNWLNPPRLQMGSMTSTTLYNSMWFVYGSFVQQGGEVPYTTLATRMMMGAWWLFALIVISSYTANLAAFLTITRIESSIQSLQDLSKQTEIPYGTVLDSAVYEHVRMKGLNPFERDSMYSQMWRMINRSNGSENNVLESQAGIQKVKYGNYAFVWDAAVLEYVAINDPDCSFYTIGNTVADRGYGIALQHGSPYRDVFSQRILELQQNGDMDILKHKWWPKNGQCDLYSSVDTKQKGGALDIKSFAGVFCILAAGIVLSCFIAMLETWWNKRKGSRVPSKEDDKEIDLEHLHRRVNSLCTDDDSPHKQFSTSSIDLTPLDIDTLPTRQALEQISDFRNTHITTTTFIPEQIQTLSRTLSAKAASGFTFGNVPEHRTGPFRHRAPNGGFFRSPIKTMSSIPYQPTPTLGLNLGNDPDRGTSI

SEQ ID NO: 35008 - protein, 912 aa, Homo sapiens
  Payload ID: 6910
  Gene Symbol: GRID2
  Gene Name: glutamate receptor, ionotropic, delta 2
  Uniprot ID: O43424
  ENSP ID: ENSP00000421257
MEVFPFLLVLSVWWSRTWDSANADSIIHIGAIFDESAKKDDEVFRTAVGDLNQNEEILQTEKITFSVTFVDGNNPFQAVQEDIRGIQEFLDKVSQQGMDVALQKVENNINKMITTLFDTMRIEELNRYRDTLRRAILVMNPATAKSFITEVVETNLVAFDCHWIIINEEINDVDVQELVRRSIGRLTIIRQTFPVPQNISQRCFRGNHRISSTLCDPKDPFAQNMEISNLYIYDTVLLLANAFHKKLEDRKWHSMASLSCIRKNSKPWQGGRSMLETIKKGGVSGLTGELEFGENGGNPNVHFEILGTNYGEELGRGVRKLGCWNPVTGLNGSLTDKKLENNMRGVVLRVVTVLEEPFVMVSENVLGKPKKYQGFSIDVLDALSNYLGFNYEIYVAPDHKYGSPQEDGTWNGLVGELVFKRADIGISALTITPDRENVVDFTTRYMDYSVGVLLRRAEKTVDMFACLAPFDLSLWACIAGTVLLVGLLVYLLNWLNPPRLQMGSMTSTTLYNSMWFVYGSFVQQGGEVPYTTLATRMMMGAWWLFALIVISSYTANLAAFLTITRIESSIQSLQDLSKQTEIPYGTVLDSAVYEHVRMKGLNPFERDSMYSQMWRMINRSNGSENNVLESQAGIQKVKYGNYAFVWDAAVLEYVAINDPDCSFYTIGNTVADRGYGIALQHGSPYRDVFSQRILELQQNGDMDILKHKWWPKNGQCDLYSSVDTKQKGGALDIKSFAGVFCILAAGIVLSCFIAMLETWWNKRKGSRVPSKEDDKEIDLEHLHRRVNSLCTDDDSPHKQFSTSSIDLTPLDIDTLPTRQALEQISDFRNTHITTTTFIPEQIQTLSRTLSAKAASGFTFGNVPEHRTGPFRHRAPNGGFFRSPIKTMSSIPYQPTPTLGLNLGNDPDRGTSI

SEQ ID NO: 35009 - protein, 163 aa, Homo sapiens
  Payload ID: 6910
  Gene Symbol: GRID2
  Gene Name: glutamate receptor, ionotropic, delta 2
  ENSP ID: ENSP00000422845
MNQGILALVSSIGCTSAGSLQSLADAMHIPHLFIQRSTAGTPRSGCGLTRSNRNDDYTLSVRPPVYLHDVILRVVTEYAWQKFIIFYDSEYDIRGIQEFLDKVSQQGMDVALQKVENNINKMITTLFDTMRIEELNRYRDTLRRAILVMNPATAKSFITEMSF

SEQ ID NO: 35010 - protein, 73 aa, Homo sapiens
  Payload ID: 6910
  Gene Symbol: GRID2
  Gene Name: glutamate receptor, ionotropic, delta 2
  ENSP ID: ENSP00000423331
MEISNLYIYDTVLLLANAFHKKLEDRKWHSMASLSCIRKNSKPWQGGRSMLETIKKGGVSGLTGELEFGENGG

SEQ ID NO: 35011 - protein, 62 aa, Homo sapiens
  Payload ID: 6910
  Gene Symbol: GRID2
  Gene Name: glutamate receptor, ionotropic, delta 2
  ENSP ID: ENSP00000425794
GGVSGLTGELEFGENGGNPNVHFEILGTNYGEELGRGVRKNERIRPQGSTGKIWPQVNFIFK

SEQ ID NO: 35012 - protein, 926 aa, Homo sapiens
  Payload ID: 6910
  Gene Symbol: GRID2
  Gene Name: glutamate receptor, ionotropic, delta 2
  ENSP ID: ENSP00000483084
ACELMNQGILALVSSIGCTSAGSLQSLADAMHIPHLFIQRSTAGTPRSGCGLTRSNRNDDYTLSVRPPVYLHDVILRVVTEYAWQKFIIFYDSEYDIRGIQEFLDKVSQQGMDVALQKVENNINKMITTLFDTMRIEELNRYRDTLRRAILVMNPATAKSFITEVVETNLVAFDCHWIIINEEINDVDVQELVRRSIGRLTIIRQTFPVPQNISQRCFRGNHRISSTLCDPKDPFAQNMEISNLYIYDTVLLLANAFHKKLEDRKWHSMASLSCIRKNSKPWQGGRSMLETIKKGGVSGLTGELEFGENGGNPNVHFEILGTNYGEELGRGVRKLGCWNPVTGLNGSLTDKKLENNMRGVVLRVVTVLEEPFVMVSENVLGKPKKYQGFSIDVLDALSNYLGFNYEIYVAPDHKYGSPQEDGTWNGLVGELVFKRADIGISALTITPDRENVVDFTTRYMDYSVGVLLRRAEKTVDMFACLAPFDLSLWACIAGTVLLVGLLVYLLNWLNPPRLQMGSMTSTTLYNSMWFVYGSFVQQGGEVPYTTLATRMMMGAWWLFALIVISSYTANLAAFLTITRIESSIQSLQDLSKQTEIPYGTVLDSAVYEHVRMKGLNPFERDSMYSQMWRMINRSNGSENNVLESQAGIQKVKYGNYAFVWDAAVLEYVAINDPDCSFYTIGNTVADRGYGIALQHGSPYRDVFSQRILELQQNGDMDILKHKWWPKNGQCDLYSSVDTKQKGGALDIKSFAGVFCILAAGIVLSCFIAMLETWWNKRKGSRVPSKEDDKEIDLEHLHRRVNSLCTDDDSPHKQFSTSSIDLTPLDIDTLPTRQALEQISDFRNTHITTTTFIPEQIQTLSRTLSAKAASGFTFGNVPEHRTGPFRHRAPNGGFFRSPIKTMSSIPYQPTPTLGLNLGNDPDRGTSI

SEQ ID NO: 35013 - protein, 1211 aa, Homo sapiens
  Payload ID: 6911
  Gene Symbol: GRID2IP
  Gene Name: glutamate receptor, ionotropic, delta 2 (Grid2) interacting protein
  Uniprot ID: A4D2P6
  ENSP ID: ENSP00000397351
MATTATPATNQGWPEDFGFRLGGSGPCFVLEVAKGSSAHAGGLRPGDQILEVEGLAVGGLSRERLVRLARRCPRVPPSLGVLPAPDGGPGPGSGPAAPTTVLRAPRCGRGLALGRELLRLAGRKRPDAVHRERRRKAQEFSRKVDEILGDQPTAKEQVFAALKQFAAEQRVDDLVWTLTLALPREACGPLLDNLRIFIPKKHRARFDEVVSQGLLGKLCRARRAQGAQRLRRSRSEERPERLLVSTRASAPPRRPDEPPPRRASLLVGGLAGPGGARRTVRVYKGNKSFGFTLRGHGPVWIESVLPGSPADNAALKSGDRILFLNGLDMRNCSHDKVVSMLQGSGAMPTLVVEEGLVPFASDSDSLDSPNPSSALTSLQWVAEILPSSIRVQGRTFSQQLEHLLTPPERYGVCRALESFFQHRNIDTLIVDVYPVLDTPAKQVLWQFIYQLLTYEEQELCQEKIACFLGYTAMTAEPEPELDLESEPTPEPQPRSSLRASSMCRRSLRSQGLEAGLSCGPSECPEMPLPLIPGERQAGDGTSLPETPNPKMMSAVYAELESRLNSSFKGKMGTVSKSRASPPGPSPAVTTGPRTLSGVSWPSERLLPSPCYHPLCSGGLASPSSSESHPYASLDSSRAPSPQPGPGPICPDSPPSPDPTRPPSRRKLFTFSHPVRSRDTDRFLDVLSEQLGPRVTIVDDFLTPENDYEEMSFHDDQGSFVTNERSSASDCISSSEEGSSLTYSSISDHIPPPPLSPPPPPPLPFHDAKPSSRSSDGSRGPAQALAKPLTQLSHPVPPPPPPPLPPPVPCAPPMLSRGLGHRRSETSHMSVKRLRWEQVENSEGTIWGQLGEDSDYDKLSDMVKYLDLELHFGTQKPAKPVPGPEPFRKKEVVEILSHKKAYNTSILLAHLKLSPAELRQVLMSMEPRRLEPAHLAQLLLFAPDADEEQRYQAFREAPGRLSEPDQFVLQMLSVPEYKTRLRSLHFQATLQEKTEEIRGSLECLRQASLELKNSRKLAKILEFVLAMGNYLNDGQPKTNKTTGFKINFLTELNSTKTVDGKSTFLHILAKSLSQHFPELLGFAQDLPTVPLAAKVNQRALTSDLADLHGTISEIQDACQSISPSSEDKFAMVMSSFLETAQPALRALDGLQREAMEELGKALAFFGEDSKATTSEAFFGIFAEFMSKFERALSDLQAGEGLRSSGMVSPLAW

SEQ ID NO: 35014 - protein, 1020 aa, Homo sapiens
  Payload ID: 6911
  Gene Symbol: GRID2IP
  Gene Name: glutamate receptor, ionotropic, delta 2 (Grid2) interacting protein
  ENSP ID: ENSP00000397887
MSCLGIFIPKKHRARFDEVVSQGLLGKLCRARRAQGAQRLRRSRSEERPERLLVSTRASAPPRRPDEPPPRRASLLVGGLAGPGGARRTVRVYKGNKSFGFTLRGHGPVWIESVLPGSPADNAALKSGDRILFLNGLDMRNCSHDKVVSMLQGSGAMPTLVVEEGLVPFASDSDSLDSPNPSSALTSLQWVAEILPSSIRVQGRTFSQQLEHLLTPPERYGVCRALESFFQHRNIDTLIVDVYPVLDTPAKQVLWQFIYQLLTYEEQELCQEKIACFLGYTAMTEPEPELDLESEPTPEPQPRSSLRASSMCRRSLRSQGLEAGLSCGPSECPEMPLPLIPGERQAGDGTSLPETPNPKMMSAVYAELESRLNSSFKGKMGTVSKSRASPPGPSPAVTTGPRTLSGVSWPSERLLPSPCYHPLCSGGLASPSSSESHPYASLDSSRAPSPQPGPGPICPDSPPSPDPTRPPSRRKLFTFSHPVRSRDTDRFLDVLSEQLGPRVTIVDDFLTPENDYEEMSFHDDQGSFVTNERSSASDCISSSEEGSSLTYSSISDHIPPPPLSPPPPPPLPFHDAKPSSRSSDGSRGPAQALAKPLTQLSHPVPPPPPPPLPPPVPCAPPMLSRGLGHRRSETSHMSVKRLRWEQVENSEGTIWGQLGEDSDYDKLSDMVKYLDLELHFGTQKPAKPVPGPEPFRKKEVVEILSHKKAYNTSILLAHLKLSPAELRQVLMSMEPRRLEPAHLAQLLLFAPDADEEQRYQAFREAPGRLSEPDQFVLQMLSVPEYKTRLRSLHFQATLQEKTEEIRGSLECLRQASLELKNSRKLAKILEFVLAMGNYLNDGQPKTNKTTGFKINFLTELNSTKTVDGKSTFLHILAKSLSQHFPELLGFAQDLPTVPLAAKVNQRALTSDLADLHGTISEIQDACQSISPSSEDKFAMVMSSFLETAQPALRALDGLQREAMEELGKALAFFGEDSKATTSEAFFGIFAEFMSKFERALSDLQAGEGLRSSGMVSPLAW

SEQ ID NO: 35015 - protein, 1027 aa, Homo sapiens
  Payload ID: 6911
  Gene Symbol: GRID2IP
  Gene Name: glutamate receptor, ionotropic, delta 2 (Grid2) interacting protein
  ENSP ID: ENSP00000408364
MGKDQGFSRHFRIFIPKKHRARFDEVVSQGLLGKLCRARRAQGAQRLRRSRSEERPERLLVSTRASAPPRRPDEPPPRRASLLVGGLAGPGGARRTVRVYKGNKSFGFTLRGHGPVWIESVLPGSPADNAALKSGDRILFLNGLDMRNCSHDKVVSMLQGSGAMPTLVVEEGLVPFASDSDSLDSPNPSSALTSLQWVAEILPSSIRVQGRTFSQQLEHLLTPPERYGVCRALESFFQHRNIDTLIVDVYPVLDTPAKQVLWQFIYQLLTYEEQELCQEKIACFLGYTAMTEPEPELDLESEPTPEPQPRSSLRASSMCRRSLRSQGLEAGLSCGPSECPEMPLPLIPGERQAGDGTSLPETPNPKMMSAVYAELESRLNSSFKGKMGTVSKSRASPPGPSPAVTTGPRTLSGVSWPSERLLPSPCYHPLCSGGLASPSSSESHPYASLDSSRAPSPQPGPGPICPDSPPSPDPTRPPSRRKLFTFSHPVRSRDTDRFLDVLSEQLGPRVTIVDDFLTPENDYEEMSFHDDQGSFVTNERSSASDCISSSEEGSSLTYSSISDHIPPPPLSPPPPPPLPFHDAKPSSRSSDGSRGPAQALAKPLTQLSHPVPPPPPPPLPPPVPCAPPMLSRGLGHRRSETSHMSVKRLRWEQVENSEGTIWGQLGEDSDYDKLSDMVKYLDLELHFGTQKPAKPVPGPEPFRKKEVVEILSHKKAYNTSILLAHLKLSPAELRQVLMSMEPRRLEPAHLAQLLLFAPDADEEQRYQAFREAPGRLSEPDQFVLQMLSVPEYKTRLRSLHFQATLQEKTEEIRGSLECLRQASLELKNSRKLAKILEFVLAMGNYLNDGQPKTNKTTGFKINFLTELNSTKTVDGKSTFLHILAKSLSQHFPELLGFAQDLPTVPLAAKVNQRALTSDLADLHGTISEIQDACQSISPSSEDKFAMVMSSFLETAQPALRALDGLQREAMEELGKALAFFGEDSKATTSEAFFGIFAEFMSKFERALSDLQAGEGLRSSGMVSPLAW

SEQ ID NO: 35016 - protein, 879 aa, Homo sapiens
  Payload ID: 6912
  Gene Symbol: GRIK1
  Gene Name: glutamate receptor, ionotropic, kainate 1
  ENSP ID: ENSP00000311646
GGIFETVENEPVNVEELAFKFAVTSINRNRTLMPNTTLTYDIQRINLFDSFEASRRACDQLALGVAALFGPSHSSSVSAVQSICNALEVPHIQTRWKHPSVDNKDLFYINLYPDYAAISRAILDLVLYYNWKTVTVVYEDSTGLIRLQELIKAPSRYNIKIKIRQLPSGNKDAKPLLKEMKKGKEFYVIFDCSHETAAEILKQILFMGMMTEYYHYFFTTLDLFALDLELYRYSGVNMTGFRLLNIDNPHVSSIIEKWSMERLQAPPRPETGLLDGMMTTEAALMYDAVYMVAIASHRASQLTVSSLQCHRHKPWRLGPRFMNLIKEARWDGLTGHITFNKTNGLRKDFDLDIISLKEEGTEKAAGEVSKHLYKVWKKIGIWNSNSGLNMTDSNKDKSSNITDSLANRTLIVTTILEEPYVMYRKSDKPLYGNDRFEGYCLDLLKELSNILGFIYDVKLVPDGKYGAQNDKGEWNGMVKELIDHRADLAVAPLTITYVREKVIDFSKPFMTLGISILYRKPNGTNPGVFSFLNPLSPDIWMYVLLACLGVSCVLFVIARFTPYEWYNPHPCNPDSDVVENNFTLLNSFWFGVGALMQQGSELMPKALSTRIVGGIWWFFTLIIISSYTANLAAFLTVERMESPIDSADDLAKQTKIEYGAVRDGSTMTFFKKSKISTYEKMWAFMSSRQQTALVRNSDEGIQRVLTTDYALLMESTSIEYVTQRNCNLTQIGGLIDSKGYGVGTPIGSPYRDKITIAILQLQEEGKLHMMKEKWWRGNGCPEEDNKEASALGVENIGGIFIVLAAGLVLSVFVAIGEFIYKSRKNNDIEQAFCFFYGLQCKQTHPTNSTSGTTLSTDLECGKLIREERGIRKQSSVHTV

SEQ ID NO: 35017 - protein, 949 aa, Homo sapiens
  Payload ID: 6912
  Gene Symbol: GRIK1
  Gene Name: glutamate receptor, ionotropic, kainate 1
  ENSP ID: ENSP00000327687
MEHGTLLAQPGLWTRDTSWALLYFLCYILPQTAPQVLRIGGIFETVENEPVNVEELAFKFAVTSINRNRTLMPNTTLTYDIQRINLFDSFEASRRACDQLALGVAALFGPSHSSSVSAVQSICNALEVPHIQTRWKHPSVDNKDLFYINLYPDYAAISRAILDLVLYYNWKTVTVVYEDSTGLIRLQELIKAPSRYNIKIKIRQLPSGNKDAKPLLKEMKKGKEFYVIFDCSHETAAEILKQILFMGMMTEYYHYFFTTLDLFALDLELYRYSGVNMTGFRLLNIDNPHVSSIIEKWSMERLQAPPRPETGLLDGMMTTEAALMYDAVYMVAIASHRASQLTVSSLQCHRHKPWRLGPRFMNLIKEARWDGLTGHITFNKTNGLRKDFDLDIISLKEEGTEKAAGEVSKHLYKVWKKIGIWNSNSGLNMTDSNKDKSSNITDSLANRTLIVTTILEEPYVMYRKSDKPLYGNDRFEGYCLDLLKELSNILGFIYDVKLVPDGKYGAQNDKGEWNGMVKELIDHRADLAVAPLTITYVREKVIDFSKPFMTLGISILYRKPNGTNPGVFSFLNPLSPDIWMYVLLACLGVSCVLFVIARFTPYEWYNPHPCNPDSDVVENNFTLLNSFWFGVGALMQQGSELMPKALSTRIVGGIWWFFTLIIISSYTANLAAFLTVERMESPIDSADDLAKQTKIEYGAVRDGSTMTFFKKSKISTYEKMWAFMSSRQQTALVRNSDEGIQRVLTTDYALLMESTSIEYVTQRNCNLTQIGGLIDSKGYGVGTPIGSPYRDKITIAILQLQEEGKLHMMKEKWWRGNGCPEEDNKEASALGVENIGGIFIVLAAGLVLSVFVAIGEFIYKSRKNNDIEQKGKSSRIRFYFRNKVRFHGRKKQSLGVEKCLSFNAIMEELGISLKNQKKIKKKSRTKGKSSFTSILTCHQRRTQRKETVA

SEQ ID NO: 35018 - protein, 871 aa, Homo sapiens
  Payload ID: 6912
  Gene Symbol: GRIK1
  Gene Name: glutamate receptor, ionotropic, kainate 1
  ENSP ID: ENSP00000373776
MEHGTLLAQPGLWTRDTSWALLYFLCYILPQTAPQVLRIGGIFETVENEPVNVEELAFKFAVTSINRNRTLMPNTTLTYDIQRINLFDSFEASRRACDQLALGVAALFGPSHSSSVSAVQSICNALEVPHIQTRWKHPSVDNKDLFYINLYPDYAAISRAILDLVLYYNWKTVTVVYEDSTGLIRLQELIKAPSRYNIKIKIRQLPSGNKDAKPLLKEMKKGKEFYVIFDCSHETAAEILKQILFMGMMTEYYHYFFTTLDLFALDLELYRYSGVNMTGFRLLNIDNPHVSSIIEKWSMERLQAPPRPETGLLDGMMTTEAALMYDAVYMVAIASHRASQLTVSSLQCHRHKPWRLGPRFMNLIKEARWDGLTGHITFNKTNGLRKDFDLDIISLKEEGTEKAAGEVSKHLYKVWKKIGIWNSNSGLNMTDSNKDKSSNITDSLANRTLIVTTILEEPYVMYRKSDKPLYGNDRFEGYCLDLLKELSNILGFIYDVKLVPDGKYGAQNDKGEWNGMVKELIDHRADLAVAPLTITYVREKVIDFSKPFMTLGISILYRKPNGTNPGVFSFLNPLSPDIWMYVLLACLGVSCVLFVIARFTPYEWYNPHPCNPDSDVVENNFTLLNSFWFGVGALMQQGSELMPKALSTRIVGGIWWFFTLIIISSYTANLAAFLTVERMESPIDSADDLAKQTKIEYGAVRDGSTMTFFKKSKISTYEKMWAFMSSRQQTALVRNSDEGIQRVLTTDYALLMESTSIEYVTQRNCNLTQIGGLIDSKGYGVGTPIGSPYRDKITIAILQLQEEGKLHMMKEKWWRGNGCPEEDNKEASALGVENIGGIFIVLAAGLVLSVFVAIGEFIYKSRKNNDIEQHY

SEQ ID NO: 35019 - protein, 905 aa, Homo sapiens
  Payload ID: 6912
  Gene Symbol: GRIK1
  Gene Name: glutamate receptor, ionotropic, kainate 1
  Uniprot ID: P39086
  ENSP ID: ENSP00000373777
MEHGTLLAQPGLWTRDTSWALLYFLCYILPQTAPQVLRIGGIFETVENEPVNVEELAFKFAVTSINRNRTLMPNTTLTYDIQRINLFDSFEASRRACDQLALGVAALFGPSHSSSVSAVQSICNALEVPHIQTRWKHPSVDNKDLFYINLYPDYAAISRAILDLVLYYNWKTVTVVYEDSTGLIRLQELIKAPSRYNIKIKIRQLPSGNKDAKPLLKEMKKGKEFYVIFDCSHETAAEILKQILFMGMMTEYYHYFFTTLDLFALDLELYRYSGVNMTGFRLLNIDNPHVSSIIEKWSMERLQAPPRPETGLLDGMMTTEAALMYDAVYMVAIASHRASQLTVSSLQCHRHKPWRLGPRFMNLIKEARWDGLTGHITFNKTNGLRKDFDLDIISLKEEGTEKIGIWNSNSGLNMTDSNKDKSSNITDSLANRTLIVTTILEEPYVMYRKSDKPLYGNDRFEGYCLDLLKELSNILGFIYDVKLVPDGKYGAQNDKGEWNGMVKELIDHRADLAVAPLTITYVREKVIDFSKPFMTLGISILYRKPNGTNPGVFSFLNPLSPDIWMYVLLACLGVSCVLFVIARFTPYEWYNPHPCNPDSDVVENNFTLLNSFWFGVGALMQQGSELMPKALSTRIVGGIWWFFTLIIISSYTANLAAFLTVERMESPIDSADDLAKQTKIEYGAVRDGSTMTFFKKSKISTYEKMWAFMSSRQQTALVRNSDEGIQRVLTTDYALLMESTSIEYVTQRNCNLTQIGGLIDSKGYGVGTPIGSPYRDKITIAILQLQEEGKLHMMKEKWWRGNGCPEEDNKEASALGVENIGGIFIVLAAGLVLSVFVAIGEFIYKSRKNNDIEQCLSFNAIMEELGISLKNQKKIKKKSRTKGKSSFTSILTCHQRRTQRKETVA

SEQ ID NO: 35020 - protein, 918 aa, Homo sapiens
  Payload ID: 6912
  Gene Symbol: GRIK1
  Gene Name: glutamate receptor, ionotropic, kainate 1
  Uniprot ID: P39086
  ENSP ID: ENSP00000382791
MEHGTLLAQPGLWTRDTSWALLYFLCYILPQTAPQVLRIGGIFETVENEPVNVEELAFKFAVTSINRNRTLMPNTTLTYDIQRINLFDSFEASRRACDQLALGVAALFGPSHSSSVSAVQSICNALEVPHIQTRWKHPSVDNKDLFYINLYPDYAAISRAILDLVLYYNWKTVTVVYEDSTGLIRLQELIKAPSRYNIKIKIRQLPSGNKDAKPLLKEMKKGKEFYVIFDCSHETAAEILKQILFMGMMTEYYHYFFTTLDLFALDLELYRYSGVNMTGFRLLNIDNPHVSSIIEKWSMERLQAPPRPETGLLDGMMTTEAALMYDAVYMVAIASHRASQLTVSSLQCHRHKPWRLGPRFMNLIKEARWDGLTGHITFNKTNGLRKDFDLDIISLKEEGTEKAAGEVSKHLYKVWKKIGIWNSNSGLNMTDSNKDKSSNITDSLANRTLIVTTILEEPYVMYRKSDKPLYGNDRFEGYCLDLLKELSNILGFIYDVKLVPDGKYGAQNDKGEWNGMVKELIDHRADLAVAPLTITYVREKVIDFSKPFMTLGISILYRKPNGTNPGVFSFLNPLSPDIWMYVLLACLGVSCVLFVIARFTPYEWYNPHPCNPDSDVVENNFTLLNSFWFGVGALMQQGSELMPKALSTRIVGGIWWFFTLIIISSYTANLAAFLTVERMESPIDSADDLAKQTKIEYGAVRDGSTMTFFKKSKISTYEKMWAFMSSRQQTALVRNSDEGIQRVLTTDYALLMESTSIEYVTQRNCNLTQIGGLIDSKGYGVGTPIGSPYRDKITIAILQLQEEGKLHMMKEKWWRGNGCPEEDNKEASALGVENIGGIFIVLAAGLVLSVFVAIGEFIYKSRKNNDIEQAFCFFYGLQCKQTHPTNSTSGTTLSTDLECGKLIREERGIRKQSSVHTV

SEQ ID NO: 35021 - protein, 903 aa, Homo sapiens
  Payload ID: 6912
  Gene Symbol: GRIK1
  Gene Name: glutamate receptor, ionotropic, kainate 1
  ENSP ID: ENSP00000382793
MEHGTLLAQPGLWTRDTSWALLYFLCYILPQTAPQVLRIGGIFETVENEPVNVEELAFKFAVTSINRNRTLMPNTTLTYDIQRINLFDSFEASRRACDQLALGVAALFGPSHSSSVSAVQSICNALEVPHIQTRWKHPSVDNKDLFYINLYPDYAAISRAILDLVLYYNWKTVTVVYEDSTGLIRLQELIKAPSRYNIKIKIRQLPSGNKDAKPLLKEMKKGKEFYVIFDCSHETAAEILKQILFMGMMTEYYHYFFTTLDLFALDLELYRYSGVNMTGFRLLNIDNPHVSSIIEKWSMERLQAPPRPETGLLDGMMTTEAALMYDAVYMVAIASHRASQLTVSSLQCHRHKPWRLGPRFMNLIKEARWDGLTGHITFNKTNGLRKDFDLDIISLKEEGTEKIGIWNSNSGLNMTDSNKDKSSNITDSLANRTLIVTTILEEPYVMYRKSDKPLYGNDRFEGYCLDLLKELSNILGFIYDVKLVPDGKYGAQNDKGEWNGMVKELIDHRADLAVAPLTITYVREKVIDFSKPFMTLGISILYRKPNGTNPGVFSFLNPLSPDIWMYVLLACLGVSCVLFVIARFTPYEWYNPHPCNPDSDVVENNFTLLNSFWFGVGALMQQGSELMPKALSTRIVGGIWWFFTLIIISSYTANLAAFLTVERMESPIDSADDLAKQTKIEYGAVRDGSTMTFFKKSKISTYEKMWAFMSSRQQTALVRNSDEGIQRVLTTDYALLMESTSIEYVTQRNCNLTQIGGLIDSKGYGVGTPIGSPYRDKITIAILQLQEEGKLHMMKEKWWRGNGCPEEDNKEASALGVENIGGIFIVLAAGLVLSVFVAIGEFIYKSRKNNDIEQAFCFFYGLQCKQTHPTNSTSGTTLSTDLECGKLIREERGIRKQSSVHTV

SEQ ID NO: 35022 - protein, 920 aa, Homo sapiens
  Payload ID: 6912
  Gene Symbol: GRIK1
  Gene Name: glutamate receptor, ionotropic, kainate 1
  ENSP ID: ENSP00000382797
MEHGTLLAQPGLWTRDTSWALLYFLCYILPQTAPQVLRIGGIFETVENEPVNVEELAFKFAVTSINRNRTLMPNTTLTYDIQRINLFDSFEASRRACDQLALGVAALFGPSHSSSVSAVQSICNALEVPHIQTRWKHPSVDNKDLFYINLYPDYAAISRAILDLVLYYNWKTVTVVYEDSTGLIRLQELIKAPSRYNIKIKIRQLPSGNKDAKPLLKEMKKGKEFYVIFDCSHETAAEILKQILFMGMMTEYYHYFFTTLDLFALDLELYRYSGVNMTGFRLLNIDNPHVSSIIEKWSMERLQAPPRPETGLLDGMMTTEAALMYDAVYMVAIASHRASQLTVSSLQCHRHKPWRLGPRFMNLIKEARWDGLTGHITFNKTNGLRKDFDLDIISLKEEGTEKAAGEVSKHLYKVWKKIGIWNSNSGLNMTDSNKDKSSNITDSLANRTLIVTTILEEPYVMYRKSDKPLYGNDRFEGYCLDLLKELSNILGFIYDVKLVPDGKYGAQNDKGEWNGMVKELIDHRADLAVAPLTITYVREKVIDFSKPFMTLGISILYRKPNGTNPGVFSFLNPLSPDIWMYVLLACLGVSCVLFVIARFTPYEWYNPHPCNPDSDVVENNFTLLNSFWFGVGALMQQGSELMPKALSTRIVGGIWWFFTLIIISSYTANLAAFLTVERMESPIDSADDLAKQTKIEYGAVRDGSTMTFFKKSKISTYEKMWAFMSSRQQTALVRNSDEGIQRVLTTDYALLMESTSIEYVTQRNCNLTQIGGLIDSKGYGVGTPIGSPYRDKITIAILQLQEEGKLHMMKEKWWRGNGCPEEDNKEASALGVENIGGIFIVLAAGLVLSVFVAIGEFIYKSRKNNDIEQCLSFNAIMEELGISLKNQKKIKKKSRTKGKSSFTSILTCHQRRTQRKETVA

SEQ ID NO: 35023 - protein, 934 aa, Homo sapiens
  Payload ID: 6912
  Gene Symbol: GRIK1
  Gene Name: glutamate receptor, ionotropic, kainate 1
  ENSP ID: ENSP00000382798
MEHGTLLAQPGLWTRDTSWALLYFLCYILPQTAPQVLRIGGIFETVENEPVNVEELAFKFAVTSINRNRTLMPNTTLTYDIQRINLFDSFEASRRACDQLALGVAALFGPSHSSSVSAVQSICNALEVPHIQTRWKHPSVDNKDLFYINLYPDYAAISRAILDLVLYYNWKTVTVVYEDSTGLIRLQELIKAPSRYNIKIKIRQLPSGNKDAKPLLKEMKKGKEFYVIFDCSHETAAEILKQILFMGMMTEYYHYFFTTLDLFALDLELYRYSGVNMTGFRLLNIDNPHVSSIIEKWSMERLQAPPRPETGLLDGMMTTEAALMYDAVYMVAIASHRASQLTVSSLQCHRHKPWRLGPRFMNLIKEARWDGLTGHITFNKTNGLRKDFDLDIISLKEEGTEKIGIWNSNSGLNMTDSNKDKSSNITDSLANRTLIVTTILEEPYVMYRKSDKPLYGNDRFEGYCLDLLKELSNILGFIYDVKLVPDGKYGAQNDKGEWNGMVKELIDHRADLAVAPLTITYVREKVIDFSKPFMTLGISILYRKPNGTNPGVFSFLNPLSPDIWMYVLLACLGVSCVLFVIARFTPYEWYNPHPCNPDSDVVENNFTLLNSFWFGVGALMQQGSELMPKALSTRIVGGIWWFFTLIIISSYTANLAAFLTVERMESPIDSADDLAKQTKIEYGAVRDGSTMTFFKKSKISTYEKMWAFMSSRQQTALVRNSDEGIQRVLTTDYALLMESTSIEYVTQRNCNLTQIGGLIDSKGYGVGTPIGSPYRDKITIAILQLQEEGKLHMMKEKWWRGNGCPEEDNKEASALGVENIGGIFIVLAAGLVLSVFVAIGEFIYKSRKNNDIEQKGKSSRIRFYFRNKVRFHGRKKQSLGVEKCLSFNAIMEELGISLKNQKKIKKKSRTKGKSSFTSILTCHQRRTQRKETVA

SEQ ID NO: 35024 - protein, 866 aa, Homo sapiens
  Payload ID: 6912
  Gene Symbol: GRIK1
  Gene Name: glutamate receptor, ionotropic, kainate 1
  ENSP ID: ENSP00000446326
GGIFETVENEPVNVEELAFKFAVTSINRNRTLMPNTTLTYDIQRINLFDSFEASRRACDQLALGVAALFGPSHSSSVSAVQSICNALEVPHIQTRWKHPSVDNKDLFYINLYPDYAAISRAILDLVLYYNWKTVTVVYEDSTGLIRLQELIKAPSRYNIKIKIRQLPSGNKDAKPLLKEMKKGKEFYVIFDCSHETAAEILKQILFMGMMTEYYHYFFTTLDLFALDLELYRYSGVNMTGFRLLNIDNPHVSSIIEKWSMERLQAPPRPETGLLDGMMTTEAALMYDAVYMVAIASHRASQLTVSSLQCHRHKPWRLGPRFMNLIKEARWDGLTGHITFNKTNGLRKDFDLDIISLKEEGTEKIGIWNSNSGLNMTDSNKDKSSNITDSLANRTLIVTTILEEPYVMYRKSDKPLYGNDRFEGYCLDLLKELSNILGFIYDVKLVPDGKYGAQNDKGEWNGMVKELIDHRADLAVAPLTITYVREKVIDFSKPFMTLGISILYRKPNGTNPGVFSFLNPLSPDIWMYVLLACLGVSCVLFVIARFTPYEWYNPHPCNPDSDVVENNFTLLNSFWFGVGALMQQGSELMPKALSTRIVGGIWWFFTLIIISSYTANLAAFLTVERMESPIDSADDLAKQTKIEYGAVRDGSTMTFFKKSKISTYEKMWAFMSSRQQTALVRNSDEGIQRVLTTDYALLMESTSIEYVTQRNCNLTQIGGLIDSKGYGVGTPIGSPYRDKITIAILQLQEEGKLHMMKEKWWRGNGCPEEDNKEASALGVENIGGIFIVLAAGLVLSVFVAIGEFIYKSRKNNDIEQCLSFNAIMEELGISLKNQKKIKKKSRTKGKSSFTSILTCHQRRTQRKETVA

SEQ ID NO: 35025 - protein, 854 aa, Homo sapiens
  Payload ID: 6913
  Gene Symbol: GRIK2
  Gene Name: glutamate receptor, ionotropic, kainate 2
  ENSP ID: ENSP00000313276
GGIFEYVESGPMGAEELAFRFAVNTINRNRTLLPNTTLTYDTQKINLYDSFEASKKACDQLSLGVAAIFGPSHSSSANAVQSICNALGVPHIQTRWKHQVSDNKDSFYVSLYPDFSSLSRAILDLVQFFKWKTVTVVYDDSTGLIRLQELIKAPSRYNLRLKIRQLPADTKDAKPLLKEMKRGKEFHVIFDCSHEMAAGILKQALAMGMMTEYYHYIFTTLDLFALDVEPYRYSGVNMTGFRILNTENTQVSSIIEKWSMERLQAPPKPDSGLLDGFMTTDAALMYDAVHVVSVAVQQFPQMTVSSLQCNRHKPWRFGTRFMSLIKEAHWEGLTGRITFNKTNGLRTDFDLDVISLKEEGLEKIGTWDPASGLNMTESQKGKPANITDSLSNRSLIVTTILEEPYVLFKKSDKPLYGNDRFEGYCIDLLRELSTILGFTYEIRLVEDGKYGAQDDANGQWNGMVRELIDHKADLAVAPLAITYVREKVIDFSKPFMTLGISILYRKPNGTNPGVFSFLNPLSPDIWMYILLAYLGVSCVLFVIARFSPYEWYNPHPCNPDSDVVENNFTLLNSFWFGVGALMQQGSELMPKALSTRIVGGIWWFFTLIIISSYTANLAAFLTVERMESPIDSADDLAKQTKIEYGAVEDGATMTFFKKSKISTYDKMWAFMSSRRQSVLVKSNEEGIQRVLTSDYAFLMESTTIEFVTQRNCNLTQIGGLIDSKGYGVGTPMGSPYRDKITIAILQLQEEGKLHMMKEKWWRGNGCPEEESKEASALGVQNIGGIFIVLAAGLVLSVFVAVGEFLYKSKKNAQLEKRAKTKLPQDYVFLPILESVSISTVLSSSPSSSSLSSCS

SEQ ID NO: 35026 - protein, 353 aa, Homo sapiens
  Payload ID: 6913
  Gene Symbol: GRIK2
  Gene Name: glutamate receptor, ionotropic, kainate 2
  ENSP ID: ENSP00000351128
MKIIFPILSNPVFRRTVKLLLCLLWIGYSQGTTHVLRFGGIFEYVESGPMGAEELAFRFAVNTINRNRTLLPNTTLTYDTQKINLYDSFEASKKACDQLSLGVAAIFGPSHSSSANAVQSICNALGVPHIQTRWKHQVSDNKDSFYVSLYPDFSSLSRAILDLVQFFKWKTVTVVYDDSTGLIRLQELIKAPSRYNLRLKIRQLPADTKDAKPLLKEMKRGKEFHVIFDCSHEMAAGILKQALAMGMMTEYYHYIFTTLDLFALDVEPYRYSGVNMTGFRILNTENTQVSSIIEKWSMERLQAPPKPDSGLLDGFMTMEFHSCCPGWSAMARSQLTATSASWVQAILLPQPPE

SEQ ID NO: 35027 - protein, 870 aa, Homo sapiens
  Payload ID: 6913
  Gene Symbol: GRIK2
  Gene Name: glutamate receptor, ionotropic, kainate 2
  ENSP ID: ENSP00000358130
GGIFEYVESGPMGAEELAFRFAVNTINRNRTLLPNTTLTYDTQKINLYDSFEASKKACDQLSLGVAAIFGPSHSSSANAVQSICNALGVPHIQTRWKHQVSDNKDSFYVSLYPDFSSLSRAILDLVQFFKWKTVTVVYDDSTGLIRLQELIKAPSRYNLRLKIRQLPADTKDAKPLLKEMKRGKEFHVIFDCSHEMAAGILKQALAMGMMTEYYHYIFTTLDLFALDVEPYRYSGVNMTGFRILNTENTQVSSIIEKWSMERLQAPPKPDSGLLDGFMTTDAALMYDAVHVVSVAVQQFPQMTVSSLQCNRHKPWRFGTRFMSLIKEAHWEGLTGRITFNKTNGLRTDFDLDVISLKEEGLEKIGTWDPASGLNMTESQKGKPANITDSLSNRSLIVTTILEEPYVLFKKSDKPLYGNDRFEGYCIDLLRELSTILGFTYEIRLVEDGKYGAQDDANGQWNGMVRELIDHKADLAVAPLAITYVREKVIDFSKPFMTLGISILYRKPNGTNPGVFSFLNPLSPDIWMYILLAYLGVSCVLFVIARFSPYEWYNPHPCNPDSDVVENNFTLLNSFWFGVGALMQQGSELMPKALSTRIVGGIWWFFTLIIISSYTANLAAFLTVERMESPIDSADDLAKQTKIEYGAVEDGATMTFFKKSKISTYDKMWAFMSSRRQSVLVKSNEEGIQRVLTSDYAFLMESTTIEFVTQRNCNLTQIGGLIDSKGYGVGTPMGSPYRDKITIAILQLQEEGKLHMMKEKWWRGNGCPEEESKEASALGVQNIGGIFIVLAAGLVLSVFVAVGEFLYKSKKNAQLEKRSFCSAMVEELRMSLKCQRRLKHKPQAPVIVKTEEVINMHTFNDRRLPGKETMA

SEQ ID NO: 35028 - protein, 831 aa, Homo sapiens
  Payload ID: 6913
  Gene Symbol: GRIK2
  Gene Name: glutamate receptor, ionotropic, kainate 2
  ENSP ID: ENSP00000358133
GGIFEYVESGPMGAEELAFRFAVNTINRNRTLLPNTTLTYDTQKINLYDSFEASKKACDQLSLGVAAIFGPSHSSSANAVQSICNALGVPHIQTRWKHQVSDNKDSFYVSLYPDFSSLSRAILDLVQFFKWKTVTVVYDDSTGLIRLQELIKAPSRYNLRLKIRQLPADTKDAKPLLKEMKRGKEFHVIFDCSHEMAAGILKQALAMGMMTEYYHYIFTTLDLFALDVEPYRYSGVNMTGFRILNTENTQVSSIIEKWSMERLQAPPKPDSGLLDGFMTTDAALMYDAVHVVSVAVQQFPQMTVSSLQCNRHKPWRFGTRFMSLIKEAHWEGLTGRITFNKTNGLRTDFDLDVISLKEEGLEKIGTWDPASGLNMTESQKGKPANITDSLSNRSLIVTTILEEPYVLFKKSDKPLYGNDRFEGYCIDLLRELSTILGFTYEIRLVEDGKYGAQDDANGQWNGMVRELIDHKADLAVAPLAITYVREKVIDFSKPFMTLGISILYRKPNGTNPGVFSFLNPLSPDIWMYILLAYLGVSCVLFVIARFSPYEWYNPHPCNPDSDVVENNFTLLNSFWFGVGALMQQGSELMPKALSTRIVGGIWWFFTLIIISSYTANLAAFLTVERMESPIDSADDLAKQTKIEYGAVEDGATMTFFKKSKISTYDKMWAFMSSRRQSVLVKSNEEGIQRVLTSDYAFLMESTTIEFVTQRNCNLTQIGGLIDSKGYGVGTPMGSPYRDKITIAILQLQEEGKLHMMKEKWWRGNGCPEEESKEASALGVQNIGGIFIVLAAGLVLSVFVAVGEFLYKSKKNAQLEKESSIWLVPPYHPDTV

SEQ ID NO: 35029 - protein, 892 aa, Homo sapiens
  Payload ID: 6913
  Gene Symbol: GRIK2
  Gene Name: glutamate receptor, ionotropic, kainate 2
  Uniprot ID: Q13002
  ENSP ID: ENSP00000358134
MKIIFPILSNPVFRRTVKLLLCLLWIGYSQGTTHVLRFGGIFEYVESGPMGAEELAFRFAVNTINRNRTLLPNTTLTYDTQKINLYDSFEASKKACDQLSLGVAAIFGPSHSSSANAVQSICNALGVPHIQTRWKHQVSDNKDSFYVSLYPDFSSLSRAILDLVQFFKWKTVTVVYDDSTGLIRLQELIKAPSRYNLRLKIRQLPADTKDAKPLLKEMKRGKEFHVIFDCSHEMAAGILKQALAMGMMTEYYHYIFTTLDLFALDVEPYRYSGVNMTGFRILNTENTQVSSIIEKWSMERLQAPPKPDSGLLDGFMTTDAALMYDAVHVVSVAVQQFPQMTVSSLQCNRHKPWRFGTRFMSLIKEAHWEGLTGRITFNKTNGLRTDFDLDVISLKEEGLEKIGTWDPASGLNMTESQKGKPANITDSLSNRSLIVTTILEEPYVLFKKSDKPLYGNDRFEGYCIDLLRELSTILGFTYEIRLVEDGKYGAQDDANGQWNGMVRELIDHKADLAVAPLAITYVREKVIDFSKPFMTLGISILYRKPNGTNPGVFSFLNPLSPDIWMYILLAYLGVSCVLFVIARFSPYEWYNPHPCNPDSDVVENNFTLLNSFWFGVGALMQQGSELMPKALSTRIVGGIWWFFTLIIISSYTANLAAFLTVERMESPIDSADDLAKQTKIEYGAVEDGATMTFFKKSKISTYDKMWAFMSSRRQSVLVKSNEEGIQRVLTSDYAFLMESTTIEFVTQRNCNLTQIGGLIDSKGYGVGTPMGSPYRDKITIAILQLQEEGKLHMMKEKWWRGNGCPEEESKEASALGVQNIGGIFIVLAAGLVLSVFVAVGEFLYKSKKNAQLEKRAKTKLPQDYVFLPILESVSISTVLSSSPSSSSLSSCS

SEQ ID NO: 35030 - protein, 180 aa, Homo sapiens
  Payload ID: 6913
  Gene Symbol: GRIK2
  Gene Name: glutamate receptor, ionotropic, kainate 2
  ENSP ID: ENSP00000391988
CSHEMAAGILKQALAMGMMTEYYHYIFTTLTDAALMYDAVHVVSVAVQQFPQMTVSSLQCNRHKPWRFGTRFMSLIKEAHWEGLTGRITFNKTNGLRTDFDLDVISLKEEGLEKIGTWDPASGLNMTESQKGKPANITDSLSNRSLIVTTILEEPYVLFKKSDKPLYGNDRFEGYCIDLL

SEQ ID NO: 35031 - protein, 908 aa, Homo sapiens
  Payload ID: 6913
  Gene Symbol: GRIK2
  Gene Name: glutamate receptor, ionotropic, kainate 2
  Uniprot ID: Q13002
  ENSP ID: ENSP00000397026
MKIIFPILSNPVFRRTVKLLLCLLWIGYSQGTTHVLRFGGIFEYVESGPMGAEELAFRFAVNTINRNRTLLPNTTLTYDTQKINLYDSFEASKKACDQLSLGVAAIFGPSHSSSANAVQSICNALGVPHIQTRWKHQVSDNKDSFYVSLYPDFSSLSRAILDLVQFFKWKTVTVVYDDSTGLIRLQELIKAPSRYNLRLKIRQLPADTKDAKPLLKEMKRGKEFHVIFDCSHEMAAGILKQALAMGMMTEYYHYIFTTLDLFALDVEPYRYSGVNMTGFRILNTENTQVSSIIEKWSMERLQAPPKPDSGLLDGFMTTDAALMYDAVHVVSVAVQQFPQMTVSSLQCNRHKPWRFGTRFMSLIKEAHWEGLTGRITFNKTNGLRTDFDLDVISLKEEGLEKIGTWDPASGLNMTESQKGKPANITDSLSNRSLIVTTILEEPYVLFKKSDKPLYGNDRFEGYCIDLLRELSTILGFTYEIRLVEDGKYGAQDDANGQWNGMVRELIDHKADLAVAPLAITYVREKVIDFSKPFMTLGISILYRKPNGTNPGVFSFLNPLSPDIWMYILLAYLGVSCVLFVIARFSPYEWYNPHPCNPDSDVVENNFTLLNSFWFGVGALMQQGSELMPKALSTRIVGGIWWFFTLIIISSYTANLAAFLTVERMESPIDSADDLAKQTKIEYGAVEDGATMTFFKKSKISTYDKMWAFMSSRRQSVLVKSNEEGIQRVLTSDYAFLMESTTIEFVTQRNCNLTQIGGLIDSKGYGVGTPMGSPYRDKITIAILQLQEEGKLHMMKEKWWRGNGCPEEESKEASALGVQNIGGIFIVLAAGLVLSVFVAVGEFLYKSKKNAQLEKRSFCSAMVEELRMSLKCQRRLKHKPQAPVIVKTEEVINMHTFNDRRLPGKETMA

SEQ ID NO: 35032 - protein, 869 aa, Homo sapiens
  Payload ID: 6913
  Gene Symbol: GRIK2
  Gene Name: glutamate receptor, ionotropic, kainate 2
  Uniprot ID: Q13002
  ENSP ID: ENSP00000405596
MKIIFPILSNPVFRRTVKLLLCLLWIGYSQGTTHVLRFGGIFEYVESGPMGAEELAFRFAVNTINRNRTLLPNTTLTYDTQKINLYDSFEASKKACDQLSLGVAAIFGPSHSSSANAVQSICNALGVPHIQTRWKHQVSDNKDSFYVSLYPDFSSLSRAILDLVQFFKWKTVTVVYDDSTGLIRLQELIKAPSRYNLRLKIRQLPADTKDAKPLLKEMKRGKEFHVIFDCSHEMAAGILKQALAMGMMTEYYHYIFTTLDLFALDVEPYRYSGVNMTGFRILNTENTQVSSIIEKWSMERLQAPPKPDSGLLDGFMTTDAALMYDAVHVVSVAVQQFPQMTVSSLQCNRHKPWRFGTRFMSLIKEAHWEGLTGRITFNKTNGLRTDFDLDVISLKEEGLEKIGTWDPASGLNMTESQKGKPANITDSLSNRSLIVTTILEEPYVLFKKSDKPLYGNDRFEGYCIDLLRELSTILGFTYEIRLVEDGKYGAQDDANGQWNGMVRELIDHKADLAVAPLAITYVREKVIDFSKPFMTLGISILYRKPNGTNPGVFSFLNPLSPDIWMYILLAYLGVSCVLFVIARFSPYEWYNPHPCNPDSDVVENNFTLLNSFWFGVGALMQQGSELMPKALSTRIVGGIWWFFTLIIISSYTANLAAFLTVERMESPIDSADDLAKQTKIEYGAVEDGATMTFFKKSKISTYDKMWAFMSSRRQSVLVKSNEEGIQRVLTSDYAFLMESTTIEFVTQRNCNLTQIGGLIDSKGYGVGTPMGSPYRDKITIAILQLQEEGKLHMMKEKWWRGNGCPEEESKEASALGVQNIGGIFIVLAAGLVLSVFVAVGEFLYKSKKNAQLEKESSIWLVPPYHPDTV

SEQ ID NO: 35033 - protein, 182 aa, Homo sapiens
  Payload ID: 6913
  Gene Symbol: GRIK2
  Gene Name: glutamate receptor, ionotropic, kainate 2
  ENSP ID: ENSP00000407140
IGTWDPASGLNMTESQKGKPANITDSLSNRSLIVTTILEEPYVLFKKSDKPLYGNDRFEGYCIDLLRELSTILGFTYEIRLVEDGKYGAQDDANGQWNGMVRELIDHKADLAVAPLAITYVREKVIDFSKPFMTLGISILYRKPNGTNPGVFSFLNPLSPDIWMYILLAYLGVSCVLFVIAR

SEQ ID NO: 35034 - protein, 919 aa, Homo sapiens [sequence omitted]

SEQ ID NO: 35035 - protein, 872 aa, Homo sapiens
  Payload ID: 6914
  Gene Symbol: GRIK3
  Gene Name: glutamate receptor, ionotropic, kainate 3
  Uniprot ID: Q13003
  ENSP ID: ENSP00000362185
MTAPWRRLRSLVWEYWAGLLVCAFWIPDSRGMPHVIRIGGIFEYADGPNAQVMNAEEHAFRFSANIINRNRTLLPNTTLTYDIQRIHFHDSFEATKKACDQLALGVVAIFGPSQGSCTNAVQSICNALEVPHIQLRWKHHPLDNKDTFYVNLYPDYASLSHAILDLVQYLKWRSATVVYDDSTGLIRLQELIMAPSRYNIRLKIRQLPIDSDDSRPLLKEMKRGREFRIIFDCSHTMAAQILKQAMAMGMMTEYYHFIFTTLDLYALDLEPYRYSGVNLTGFRILNVDNPHVSAIVEKWSMERLQAAPRSESGLLDGVMMTDAALLYDAVHIVSVCYQRAPQMTVNSLQCHRHKAWRFGGRFMNFIKEAQWEGLTGRIVFNKTSGLRTDFDLDIISLKEDGLEKVGVWSPADGLNITEVAKGRGPNVTDSLTNRSLIVTTVLEEPFVMFRKSDRTLYGNDRFEGYCIDLLKELAHILGFSYEIRLVEDGKYGAQDDKGQWNGMVKELIDHKADLAVAPLTITHVREKAIDFSKPFMTLGVSILYRKPNGTNPSVFSFLNPLSPDIWMYVLLAYLGVSCVLFVIARFSPYEWYDAHPCNPGSEVVENNFTLLNSFWFGMGSLMQQGSELMPKALSTRIIGGIWWFFTLIIISSYTANLAAFLTVERMESPIDSADDLAKQTKIEYGAVKDGATMTFFKKSKISTFEKMWAFMSSKPSALVKNNEEGIQRALTADYALLMESTTIEYVTQRNCNLTQIGGLIDSKGYGIGTPMGSPYRDKITIAILQLQEEDKLHIMKEKWWRGSGCPEEENKEASALGIQKIGGIFIVLAAGLVLSVLVAVGEFVYKLRKTAEREQVSLRAWSLHRMGNGDSR

SEQ ID NO: 35036 - protein, 956 aa, Homo sapiens
  Payload ID: 6915
  Gene Symbol: GRIK4
  Gene Name: glutamate receptor, ionotropic, kainate 4
  Uniprot ID: Q16099
  ENSP ID: ENSP00000404063
MPRVSAPLVLLPAWLVMVACSPHSLRIAAILDDPMECSRGERLSITLAKNRINRAPERLGKAKVEVDIFELLRDSEYETAETMCQILPKGVVAVLGPSSSPASSSIISNICGEKEVPHFKVAPEEFVKFQFQRFTTLNLHPSNTDISVAVAGILNFFNCTTACLICAKAECLLNLEKLLRQFLISKDTLSVRMLDDTRDPTPLLKEIRDDKTATIIIHANASMSHTILLKAAELGMVSAYYTYIFTNLEFSLQRMDSLVDDRVNILGFSIFNQSHAFFQEFAQSLNQSWQENCDHVPFTGPALSSALLFDAVYAVVTAVQELNRSQEIGVKPLSCGSAQIWQHGTSLMNYLRMVELEGLTGHIEFNSKGQRSNYALKILQFTRNGFRQIGQWHVAEGLSMDSHLYASNISDTLFNTTLVVTTILENPYLMLKGNHQEMEGNDRYEGFCVDMLKELAEILRFNYKIRLVGDGVYGVPEANGTWTGMVGELIARKADLAVAGLTITAEREKVIDFSKPFMTLGISILYRVHMGRKPGYFSFLDPFSPGVWLFMLLAYLAVSCVLFLVARLTPYEWYSPHPCAQGRCNLLVNQYSLGNSLWFPVGGFMQQGSTIAPRALSTRCVSGVWWAFTLIIISSYTANLAAFLTVQRMDVPIESVDDLADQTAIEYGTIHGGSSMTFFQNSRYQTYQRMWNYMYSKQPSVFVKSTEEGIARVLNSNYAFLLESTMNEYYRQRNCNLTQIGGLLDTKGYGIGMPVGSVFRDEFDLAILQLQENNRLEILKRKWWEGGKCPKEEDHRAKGLGMENIGGIFVVLICGLIVAIFMAMLEFLWTLRHSEATEVSVCQEMVTELRSIILCQDSIHPRRRRAAVPPPRPPIPEERRPRGTATLSNGKLCGAGEPDQLAQRLAQEAALVARGCTHIRVCPECRRFQGLRARPSPARSEESLEWEKTTNSSEPE

SEQ ID NO: 35037 - protein, 956 aa, Homo sapiens; identical to SEQ ID NO: 35036
  Payload ID: 6915
  Gene Symbol: GRIK4
  Gene Name: glutamate receptor, ionotropic, kainate 4
  Uniprot ID: Q16099
  ENSP ID: ENSP00000435648

SEQ ID NO: 35038 - protein, 980 aa, Homo sapiens
  Payload ID: 6916
  Gene Symbol: GRIK5
  Gene Name: glutamate receptor, ionotropic, kainate 5
  Uniprot ID: Q16478
  ENSP ID: ENSP00000262895
MPAELLLLLIVAFASPSCQVLSSLRMAAILDDQTVCGRGERLALALAREQINGIIEVPAKARVEVDIFELQRDSQYETTDTMCQILPKGVVSVLGPSSSPASASTVSHICGEKEIPHIKVGPEETPRLQYLRFASVSLYPSNEDVSLAVSRILKSFNYPSASLICAKAECLLRLEELVRGFLISKETLSVRMLDDSRDPTPLLKEIRDDKVSTIIIDANASISHLILRKASELGMTSAFYKYILTTMDFPILHLDGIVEDSSNILGFSMFNTSHPFYPEFVRSLNMSWRENCEASTYLGPALSAALMFDAVHVVVSAVRELNRSQEIGVKPLACTSANIWPHGTSLMNYLRMVEYDGLTGRVEFNSKGQRTNYTLRILEKSRQGHREIGVWYSNRTLAMNATTLDINLSQTLANKTLVVTTILENPYVMRRPNFQALSGNERFEGFCVDMLRELAELLRFRYRLRLVEDGLYGAPEPNGSWTGMVGELINRKADLAVAAFTITAEREKVIDFSKPFMTLGISILYRVHMGRKPGYFSFLDPFSPAVWLFMLLAYLAVSCVLFLAARLSPYEWYNPHPCLRARPHILENQYTLGNSLWFPVGGFMQQGSEIMPRALSTRCVSGVWWAFTLIIISSYTANLAAFLTVQRMEVPVESADDLADQTNIEYGTIHAGSTMTFFQNSRYQTYQRMWNYMQSKQPSVFVKSTEEGIARVLNSRYAFLLESTMNEYHRRLNCNLTQIGGLLDTKGYGIGMPLGSPFRDEITLAILQLQENNRLEILKRKWWEGGRCPKEEDHRAKGLGMENIGGIFIVLICGLIIAVFVAVMEFIWSTRRSAESEEVSVCQEMLQELRHAVSCRKTSRSRRRRRPGGPSRALLSLRAVREMRLSNGKLYSAGAGGDAGSAHGGPQRLLDDPGPPSGARPAAPTPCTHVRVCQECRRIQALRASGAGAPPRGLGVPAEATSPPRPRPGPAGPRELAEHE

SEQ ID NO: 35039 - protein, 981 aa, Homo sapiens
  Payload ID: 6916
  Gene Symbol: GRIK5
  Gene Name: glutamate receptor, ionotropic, kainate 5
  Uniprot ID: Q16478
  ENSP ID: ENSP00000301218
MPAELLLLLIVAFASPSCQVLSSLRMAAILDDQTVCGRGERLALALAREQINGIIEVPAKARVEVDIFELQRDSQYETTDTMCQILPKGVVSVLGPSSSPASASTVSHICGEKEIPHIKVGPEETPRLQYLRFASVSLYPSNEDVSLAVSRILKSFNYPSASLICAKAECLLRLEELVRGFLISKETLSVRMLDDSRDPTPLLKEIRDDKVSTIIIDANASISHLILRKASELGMTSAFYKYILTTMDFPILHLDGIVEDSSNILGFSMFNTSHPFYPEFVRSLNMSWRENCEASTYLGPALSAALMFDAVHVVVSAVRELNRSQEIGVKPLACTSANIWPHGTSLMNYLRMVEYDGLTGRVEFNSKGQRTNYTLRILEKSRQGHREIGVWYSNRTLAMNATTLDINLSQTLANKTLVVTTILENPYVMRRPNFQALSGNERFEGFCVDMLRELAELLRFRYRLRLVEDGLYGAPEPNGSWTGMVGELINRKADLAVAAFTITAEREKVIDFSKPFMTLGISILYRVHMGRKPGYFSFLDPFSPAVWLFMLLAYLAVSCVLFLAARLSPYEWYNPHPCLRARPHILENQYTLGNSLWFPVGGFMQQGSEIMPRALSTRCVSGVWWAFTLIIISSYTANLAAFLTVQRMEVPVESADDLADQTNIEYGTIHAGSTMTFFQNSRYQTYQRMWNYMQSKQPSVFVKSTEEGIARVLNSRYAFLLESTMNEYHRRLNCNLTQIGGLLDTKGYGIGMPLGSPFRDEITLAILQLQENNRLEILKRKWWEGGRCPKEEDHRAKGLGMENIGGIFIVLICGLIIAVFVAVMEFIWSTRRSAESEETPALHPAACQCSALGPRTPLKEPSMLLVKVPSTRVQVAFSRTSLRQVCPFLLQHQLSSLYWIQATNVQICCHFSSLKPSPDLTFPPSHRPLSSLLFTALAAVGGLPDASSFFFPPISSCPPLQSGIGPCHSTEATLVTSNFHV

SEQ ID NO: 35040 - protein, 110 aa, Homo sapiens
  Payload ID: 6916
  Gene Symbol: GRIK5
  Gene Name: glutamate receptor, ionotropic, kainate 5
  ENSP ID: ENSP00000469135
MPAELLLLLIVAFASPSCQVLSSLRMAAILDDQTVCGRGERLALALAREQINGIIEVPAKARVEVDIFELQRDSQYETTDTIAMARRMEFCDSPRPASGASQSWEPWTEG

SEQ ID NO: 35041 - protein, 980 aa, Homo sapiens; identical to SEQ ID NO: 35038
  Payload ID: 6916
  Gene Symbol: GRIK5
  Gene Name: glutamate receptor, ionotropic, kainate 5
  Uniprot ID: Q16478
  ENSP ID: ENSP00000470251

SEQ ID NO: 35042 - protein, 356 aa, Homo sapiens
  Payload ID: 6917
  Gene Symbol: GRIN1
  Gene Name: glutamate receptor, ionotropic, N-methyl D-aspartate 1
  ENSP ID: ENSP00000316915
MSTMRLLTLALLFSCSVARAACDPKIVNIGAVLSTRKHEQMFREAVNQANKRHGSWKIQLNATSVTHKPNAIQMALSVCEDLISSQVYAILVSHPPTPNDHFTPTPVSYTAGFYRIPVLGLTTRMSIYSDKSIHLSFLRTVPPYSHQSSVWFEMMRVYSWNHIILLVSDDHEGRAAQKRLETLLEERESKSKKRNYENLDQLSYDNKRGPKAEKVLQFDPGTKNVTALLMEAKELEARVIILSASEDDAATVYRAAAMLNMTGSGYVWLVGEREISGNALRYAPDAHQRQERVGPHQRRRGRGGPGRARAPREGEHHRPAAGLRGQHQHLEDRAALQESADVFQVCGWGDWSRGVQ

SEQ ID NO: 35043 - protein, 959 aa, Homo sapiens
  Payload ID: 6917
  Gene Symbol: GRIN1
  Gene Name: glutamate receptor, ionotropic, N-methyl D-aspartate 1
  Uniprot ID: Q05586
  ENSP ID: ENSP00000360601
MSTMRLLTLALLFSCSVARAACDPKIVNIGAVLSTRKHEQMFREAVNQANKRHGSWKIQLNATSVTHKPNAIQMALSVCEDLISSQVYAILVSHPPTPNDHFTPTPVSYTAGFYRIPVLGLTTRMSIYSDKSIHLSFLRTVPPYSHQSSVWFEMMRVYSWNHIILLVSDDHEGRAAQKRLETLLEERESKSKKRNYENLDQLSYDNKRGPKAEKVLQFDPGTKNVTALLMEAKELEARVIILSASEDDAATVYRAAAMLNMTGSGYVWLVGEREISGNALRYAPDGILGLQLINGKNESAHISDAVGVVAQAVHELLEKENITDPPRGCVGNTNIWKTGPLFKRVLMSSKYADGVTGRVEFNEDGDRKFANYSIMNLQNRKLVQVGIYNGTHVIPNDRKIIWPGGETEKPRGYQMSTRLKIVTIHQEPFVYVKPTLSDGTCKEEFTVNGDPVKKVICTGPNDTSPGSPRHTVPQCCYGFCIDLLIKLARTMNFTYEVHLVADGKFGTQERVNNSNKKEWNGMMGELLSGQADMIVAPLTINNERAQYIEFSKPFKYQGLTILVKKEIPRSTLDSFMQPFQSTLWLLVGLSVHVVAVMLYLLDRFSPFGRFKVNSEEEEEDALTLSSAMWFSWGVLLNSGIGEGAPRSFSARILGMVWAGFAMIIVASYTANLAAFLVLDRPEERITGINDPRLRNPSDKFIYATVKQSSVDIYFRRQVELSTMYRHMEKHNYESAAEAIQAVRDNKLHAFIWDSAVLEFEASQKCDLVTTGELFFRSGFGIGMRKDSPWKQNVSLSILKSHENGFMEDLDKTWVRYQECDSRSNAPATLTFENMAGVFMLVAGGIVAGIFLIFIEIAYKRHKDARRKQMQLAFAAVNVWRKNLQDRKSGRAEPDPKKKATFRAITSTLASSFKRRRSSKDTSTGGGRGALQNQKDTVLPRRAIEREEGQLQLCSRHRES

SEQ ID NO: 35044 - protein, 901 aa, Homo sapiens
  Payload ID: 6917
  Gene Symbol: GRIN1
  Gene Name: glutamate receptor, ionotropic, N-methyl D-aspartate 1
  Uniprot ID: Q05586
  ENSP ID: ENSP00000360605
MSTMRLLTLALLFSCSVARAACDPKIVNIGAVLSTRKHEQMFREAVNQANKRHGSWKIQLNATSVTHKPNAIQMALSVCEDLISSQVYAILVSHPPTPNDHFTPTPVSYTAGFYRIPVLGLTTRMSIYSDKSIHLSFLRTVPPYSHQSSVWFEMMRVYSWNHIILLVSDDHEGRAAQKRLETLLEERESKAEKVLQFDPGTKNVTALLMEAKELEARVIILSASEDDAATVYRAAAMLNMTGSGYVWLVGEREISGNALRYAPDGILGLQLINGKNESAHISDAVGVVAQAVHELLEKENITDPPRGCVGNTNIWKTGPLFKRVLMSSKYADGVTGRVEFNEDGDRKFANYSIMNLQNRKLVQVGIYNGTHVIPNDRKIIWPGGETEKPRGYQMSTRLKIVTIHQEPFVYVKPTLSDGTCKEEFTVNGDPVKKVICTGPNDTSPGSPRHTVPQCCYGFCIDLLIKLARTMNFTYEVHLVADGKFGTQERVNNSNKKEWNGMMGELLSGQADMIVAPLTINNERAQYIEFSKPFKYQGLTILVKKEIPRSTLDSFMQPFQSTLWLLVGLSVHVVAVMLYLLDRFSPFGRFKVNSEEEEEDALTLSSAMWFSWGVLLNSGIGEGAPRSFSARILGMVWAGFAMIIVASYTANLAAFLVLDRPEERITGINDPRLRNPSDKFIYATVKQSSVDIYFRRQVELSTMYRHMEKHNYESAAEAIQAVRDNKLHAFIWDSAVLEFEASQKCDLVTTGELFFRSGFGIGMRKDSPWKQNVSLSILKSHENGFMEDLDKTWVRYQECDSRSNAPATLTFENMAGVFMLVAGGIVAGIFLIFIEIAYKRHKDARRKQMQLAFAAVNVWRKNLQSTGGGRGALQNQKDTVLPRRAIEREEGQLQLCSRHRES

SEQ ID NO: 35045 - protein, 943 aa, Homo sapiens
  Payload ID: 6917
  Gene Symbol: GRIN1
  Gene Name: glutamate receptor, ionotropic, N-methyl D-aspartate 1
  Uniprot ID: Q05586
  ENSP ID: ENSP00000360608
MSTMRLLTLALLFSCSVARAACDPKIVNIGAVLSTRKHEQMFREAVNQANKRHGSWKIQLNATSVTHKPNAIQMALSVCEDLISSQVYAILVSHPPTPNDHFTPTPVSYTAGFYRIPVLGLTTRMSIYSDKSIHLSFLRTVPPYSHQSSVWFEMMRVYSWNHIILLVSDDHEGRAAQKRLETLLEERESKSKKRNYENLDQLSYDNKRGPKAEKVLQFDPGTKNVTALLMEAKELEARVIILSASEDDAATVYRAAAMLNMTGSGYVWLVGEREISGNALRYAPDGILGLQLINGKNESAHISDAVGVVAQAVHELLEKENITDPPRGCVGNTNIWKTGPLFKRVLMSSKYADGVTGRVEFNEDGDRKFANYSIMNLQNRKLVQVGIYNGTHVIPNDRKIIWPGGETEKPRGYQMSTRLKIVTIHQEPFVYVKPTLSDGTCKEEFTVNGDPVKKVICTGPNDTSPGSPRHTVPQCCYGFCIDLLIKLARTMNFTYEVHLVADGKFGTQERVNNSNKKEWNGMMGELLSGQADMIVAPLTINNERAQYIEFSKPFKYQGLTILVKKEIPRSTLDSFMQPFQSTLWLLVGLSVHVVAVMLYLLDRFSPFGRFKVNSEEEEEDALTLSSAMWFSWGVLLNSGIGEGAPRSFSARILGMVWAGFAMIIVASYTANLAAFLVLDRPEERITGINDPRLRNPSDKFIYATVKQSSVDIYFRRQVELSTMYRHMEKHNYESAAEAIQAVRDNKLHAFIWDSAVLEFEASQKCDLVTTGELFFRSGFGIGMRKDSPWKQNVSLSILKSHENGFMEDLDKTWVRYQECDSRSNAPATLTFENMAGVFMLVAGGIVAGIFLIFIEIAYKRHKDARRKQMQLAFAAVNVWRKNLQDRKSGRAEPDPKKKATFRAITSTLASSFKRRRSSKDTQYHPTDITGPLNLSDPSVSTVV

SEQ ID NO: 35046 - protein, 922 aa, Homo sapiens
  Payload ID: 6917
  Gene Symbol: GRIN1
  Gene Name: glutamate receptor, ionotropic, N-methyl D-aspartate 1
  ENSP ID: ENSP00000360610
MSTMRLLTLALLFSCSVARAACDPKIVNIGAVLSTRKHEQMFREAVNQANKRHGSWKIQLNATSVTHKPNAIQMALSVCEDLISSQVYAILVSHPPTPNDHFTPTPVSYTAGFYRIPVLGLTTRMSIYSDKSIHLSFLRTVPPYSHQSSVWFEMMRVYSWNHIILLVSDDHEGRAAQKRLETLLEERESKSKKRNYENLDQLSYDNKRGPKAEKVLQFDPGTKNVTALLMEAKELEARVIILSASEDDAATVYRAAAMLNMTGSGYVWLVGEREISGNALRYAPDGILGLQLINGKNESAHISDAVGVVAQAVHELLEKENITDPPRGCVGNTNIWKTGPLFKRVLMSSKYADGVTGRVEFNEDGDRKFANYSIMNLQNRKLVQVGIYNGTHVIPNDRKIIWPGGETEKPRGYQMSTRLKIVTIHQEPFVYVKPTLSDGTCKEEFTVNGDPVKKVICTGPNDTSPGSPRHTVPQCCYGFCIDLLIKLARTMNFTYEVHLVADGKFGTQERVNNSNKKEWNGMMGELLSGQADMIVAPLTINNERAQYIEFSKPFKYQGLTILVKKEIPRSTLDSFMQPFQSTLWLLVGLSVHVVAVMLYLLDRFSPFGRFKVNSEEEEEDALTLSSAMWFSWGVLLNSGIGEGAPRSFSARILGMVWAGFAMIIVASYTANLAAFLVLDRPEERITGINDPRLRNPSDKFIYATVKQSSVDIYFRRQVELSTMYRHMEKHNYESAAEAIQAVRDNKLHAFIWDSAVLEFEASQKCDLVTTGELFFRSGFGIGMRKDSPWKQNVSLSILKSHENGFMEDLDKTWVRYQECDSRSNAPATLTFENMAGVFMLVAGGIVAGIFLIFIEIAYKRHKDARRKQMQLAFAAVNVWRKNLQSTGGGRGALQNQKDTVLPRRAIEREEGQLQLCSRHRES

SEQ ID NO: 35047 - protein, 885 aa, Homo sapiens
  Payload ID: 6917
  Gene Symbol: GRIN1
  Gene Name: glutamate receptor, ionotropic, N-methyl D-aspartate 1
  Uniprot ID: Q05586
  ENSP ID: ENSP00000360614
MSTMRLLTLALLFSCSVARAACDPKIVNIGAVLSTRKHEQMFREAVNQANKRHGSWKIQLNATSVTHKPNAIQMALSVCEDLISSQVYAILVSHPPTPNDHFTPTPVSYTAGFYRIPVLGLTTRMSIYSDKSIHLSFLRTVPPYSHQSSVWFEMMRVYSWNHIILLVSDDHEGRAAQKRLETLLEERESKAEKVLQFDPGTKNVTALLMEAKELEARVIILSASEDDAATVYRAAAMLNMTGSGYVWLVGEREISGNALRYAPDGILGLQLINGKNESAHISDAVGVVAQAVHELLEKENITDPPRGCVGNTNIWKTGPLFKRVLMSSKYADGVTGRVEFNEDGDRKFANYSIMNLQNRKLVQVGIYNGTHVIPNDRKIIWPGGETEKPRGYQMSTRLKIVTIHQEPFVYVKPTLSDGTCKEEFTVNGDPVKKVICTGPNDTSPGSPRHTVPQCCYGFCIDLLIKLARTMNFTYEVHLVADGKFGTQERVNNSNKKEWNGMMGELLSGQADMIVAPLTINNERAQYIEFSKPFKYQGLTILVKKEIPRSTLDSFMQPFQSTLWLLVGLSVHVVAVMLYLLDRFSPFGRFKVNSEEEEEDALTLSSAMWFSWGVLLNSGIGEGAPRSFSARILGMVWAGFAMIIVASYTANLAAFLVLDRPEERITGINDPRLRNPSDKFIYATVKQSSVDIYFRRQVELSTMYRHMEKHNYESAAEAIQAVRDNKLHAFIWDSAVLEFEASQKCDLVTTGELFFRSGFGIGMRKDSPWKQNVSLSILKSHENGFMEDLDKTWVRYQECDSRSNAPATLTFENMAGVFMLVAGGIVAGIFLIFIEIAYKRHKDARRKQMQLAFAAVNVWRKNLQQYHPTDITGPLNLSDPSVSTVV

SEQ ID NO: 35048 - protein, 906 aa, Homo sapiens
  Payload ID: 6917
  Gene Symbol: GRIN1
  Gene Name: glutamate receptor, ionotropic, N-methyl D-aspartate 1
  Uniprot ID: Q05586
  ENSP ID: ENSP00000360615
MSTMRLLTLALLFSCSVARAACDPKIVNIGAVLSTRKHEQMFREAVNQANKRHGSWKIQLNATSVTHKPNAIQMALSVCEDLISSQVYAILVSHPPTPNDHFTPTPVSYTAGFYRIPVLGLTTRMSIYSDKSIHLSFLRTVPPYSHQSSVWFEMMRVYSWNHIILLVSDDHEGRAAQKRLETLLEERESKSKKRNYENLDQLSYDNKRGPKAEKVLQFDPGTKNVTALLMEAKELEARVIILSASEDDAATVYRAAAMLNMTGSGYVWLVGEREISGNALRYAPDGILGLQLINGKNESAHISDAVGVVAQAVHELLEKENITDPPRGCVGNTNIWKTGPLFKRVLMSSKYADGVTGRVEFNEDGDRKFANYSIMNLQNRKLVQVGIYNGTHVIPNDRKIIWPGGETEKPRGYQMSTRLKIVTIHQEPFVYVKPTLSDGTCKEEFTVNGDPVKKVICTGPNDTSPGSPRHTVPQCCYGFCIDLLIKLARTMNFTYEVHLVADGKFGTQERVNNSNKKEWNGMMGELLSGQADMIVAPLTINNERAQYIEFSKPFKYQGLTILVKKEIPRSTLDSFMQPFQSTLWLLVGLSVHVVAVMLYLLDRFSPFGRFKVNSEEEEEDALTLSSAMWFSWGVLLNSGIGEGAPRSFSARILGMVWAGFAMIIVASYTANLAAFLVLDRPEERITGINDPRLRNPSDKFIYATVKQSSVDIYFRRQVELSTMYRHMEKHNYESAAEAIQAVRDNKLHAFIWDSAVLEFEASQKCDLVTTGELFFRSGFGIGMRKDSPWKQNVSLSILKSHENGFMEDLDKTWVRYQECDSRSNAPATLTFENMAGVFMLVAGGIVAGIFLIFIEIAYKRHKDARRKQMQLAFAAVNVWRKNLQQYHPTDITGPLNLSDPSVSTVV

SEQ ID NO: 35049 - protein, 938 aa, Homo sapiens
  Payload ID: 6917
  Gene Symbol: GRIN1
  Gene Name: glutamate receptor, ionotropic, N-methyl D-aspartate 1
  Uniprot ID: Q05586
  ENSP ID: ENSP00000360616
MSTMRLLTLALLFSCSVARAACDPKIVNIGAVLSTRKHEQMFREAVNQANKRHGSWKIQLNATSVTHKPNAIQMALSVCEDLISSQVYAILVSHPPTPNDHFTPTPVSYTAGFYRIPVLGLTTRMSIYSDKSIHLSFLRTVPPYSHQSSVWFEMMRVYSWNHIILLVSDDHEGRAAQKRLETLLEERESKAEKVLQFDPGTKNVTALLMEAKELEARVIILSASEDDAATVYRAAAMLNMTGSGYVWLVGEREISGNALRYAPDGILGLQLINGKNESAHISDAVGVVAQAVHELLEKENITDPPRGCVGNTNIWKTGPLFKRVLMSSKYADGVTGRVEFNEDGDRKFANYSIMNLQNRKLVQVGIYNGTHVIPNDRKIIWPGGETEKPRGYQMSTRLKIVTIHQEPFVYVKPTLSDGTCKEEFTVNGDPVKKVICTGPNDTSPGSPRHTVPQCCYGFCIDLLIKLARTMNFTYEVHLVADGKFGTQERVNNSNKKEWNGMMGELLSGQADMIVAPLTINNERAQYIEFSKPFKYQGLTILVKKEIPRSTLDSFMQPFQSTLWLLVGLSVHVVAVMLYLLDRFSPFGRFKVNSEEEEEDALTLSSAMWFSWGVLLNSGIGEGAPRSFSARILGMVWAGFAMIIVASYTANLAAFLVLDRPEERITGINDPRLRNPSDKFIYATVKQSSVDIYFRRQVELSTMYRHMEKHNYESAAEAIQAVRDNKLHAFIWDSAVLEFEASQKCDLVTTGELFFRSGFGIGMRKDSPWKQNVSLSILKSHENGFMEDLDKTWVRYQECDSRSNAPATLTFENMAGVFMLVAGGIVAGIFLIFIEIAYKRHKDARRKQMQLAFAAVNVWRKNLQDRKSGRAEPDPKKKATFRAITSTLASSFKRRRSSKDTSTGGGRGALQNQKDTVLPRRAIEREEGQLQLCSRHRES

SEQ ID NO: 35050 - protein, 1464 aa, Homo sapiens [sequence omitted]

SEQ ID NO: 35051 - protein, 1464 aa, Homo sapiens [sequence omitted]

SEQ ID NO: 35052 - protein, 1327 aa, Homo sapiens
  Payload ID: 6918
  Gene Symbol: GRIN2A
  Gene Name: glutamate receptor, ionotropic, N-methyl D-aspartate 2A
  ENSP ID: ENSP00000379820
QDPTSTFFQFGASIQQQATVMLKIMQDYDWHVFSLVTTIFPGYREFISFVKTTVDNSFVGWDMQNVITLDTSFEDAKTQVQLKKIHSSVILLYCSKDEAVLILSEARSLGLTGYDFFWIVPSLVSGNTELIPKEFPSGLISVSYDDWDYSLEARVRDGIGILTTAASSMLEKFSYIPEAKASCYGQMERPEVPMHTLHPFMVNVTWDGKDLSFTEEGYQVHPRLVVIVLNKDREWEKVGKWENHTLSLRHAVWPRYKSFSDCEPDDNHLSIVTLEEAPFVIVEDIDPLTETCVRNTVPCRKFVKINNSTNEGMNVKKCCKGFCIDILKKLSRTVKFTYDLYLVTNGKHGKKVNNVWNGMIGEVVYQRAVMAVGSLTINEERSEVVDFSVPFVETGISVMVSRSNGTVSPSAFLEPFSASVWVMMFVMLLIVSAIAVFVFEYFSPVGYNRNLAKGKAPHGPSFTIGKAIWLLWGLVFNNSVPVQNPKGTTSKIMVSVWAFFAVIFLASYTANLAAFMIQEEFVDQVTGLSDKKFQRPHDYSPPFRFGTVPNGSTERNIRNNYPYMHQYMTKFNQKGVEDALVSLKTGKLDAFIYDAAVLNYKAGRDEGCKLVTIGSGYIFATTGYGIALQKGSPWKRQIDLALLQFVGDGEMEELETLWLTGICHNEKNEVMSSQLDIDNMAGVFYMLAAAMALSLITFIWEHLFYWKLRFCFTGVCSDRPGLLFSISRGIYSCIHGVHIEEKKKSPDFNLTGSQSNMLKLLRSAKNISSMSNMNSSRMDSPKRAADFIQRGSLIMDMVSDKGNLMYSDNRSFQGKESIFGDNMNELQTFVANRQKDNLNNYVFQGQHPLTLNESNPNTVEVAVSTESKANSRPRQLWKKSVDSIRQDSLSQNPVSQRDEATAENRTHSLKSPRYLPEEMAHSDISETSNRATCHREPDNSKNHKTKDNFKRSVASKYPKDCSEVERTYLKTKSSSPRDKIYTIDGEKEPGFHLDPPQFVENVTLPENVDFPDPYQDPSENFRKGDSTLPMNRNPLHNEEGLSNNDQYKLYSKHFTLKDKGSPHSETSERYRQNSTHCRSCLSNMPTYSGHFTMRSPFKCDACLRMGNLYDIDEDQMLQETGNPATGEQVYQQDWAQNNALQLQKNKLRISRQHSYDNIVDKPRELDLSRPSRSISLKDRERLLEGNFYGSLFSVPSSKLSGKKSSLFPQGLEDSKRSKSLLPDHTSDNPFLHSHRDDQRLVIGRCPSDPYKHSLPSQAVNDSYLRSSLRSTASYCSRDSRGHNDVYISEHVMPYAANKNNMYSTPRVLNSCSNRRVYKKMPSIESDV

SEQ ID NO: 35053 - protein, 1144 aa, Homo sapiens
  Payload ID: 6918
  Gene Symbol: GRIN2A
  Gene Name: glutamate receptor, ionotropic, N-methyl D-aspartate 2A
  ENSP ID: ENSP00000441572
QDPTSTFFQFGASIQQQATVMLKIMQDYDWHVFSLVTTIFPGYREFISFVKTTVDNSFVGWDMQNVITLDTSFEDAKTQVQLKKIHSSVILLYCSKDEAVLILSEARSLGLTGYDFFWIVPSLVSGNTELIPKEFPSGLISVSYDDWDYSLEARVRDGIGILTTAASSMLEKFSYIPEAKASCYGQMERPEVPMHTLHPFMVNVTWDGKDLSFTEEGYQVHPRLVVIVLNKDREWEKVGKWENHTLSLRHAVWPRYKSFSDCEPDDNHLSIVTLEEAPFVIVEDIDPLTETCVRNTVPCRKFVKINNSTNEGMNVKKCCKGFCIDILKKLSRTVKFTYDLYLVTNGKHGKKVNNVWNGMIGEVVYQRAVMAVGSLTINEERSEVVDFSVPFVETGISVMVSRSNGTVSPSAFLEPFSASVWVMMFVMLLIVSAIAVFVFEYFSPVGYNRNLAKGKAPHGPSFTIGKAIWLLWGLVFNNSVPVQNPKGTTSKIMVSVWAFFAVIFLASYTANLAAFMIQEEFVDQVTGLSDKKFQRPHDYSPPFRFGTVPNGSTERNIRNNYPYMHQYMTKFNQKGVEDALVSLKTGKLDAFIYDAAVLNYKAGRDEGCKLVTIGSGYIFATTGYGIALQKGSPWKRQIDLALLQFVGDGEMEELETLWLTGICHNEKNEVMSSQLDIDNMAGVFYMLAAAMALSLITFIWEHLFYWKLRFCFTGVCSDRPGLLFSISRGIYSCIHGVHIEEKKKSPDFNLTGSQSNMLKLLRSAKNISSMSNMNSSRMDSPKRAADFIQRGSLIMDMVSDKGNLMYSDNRSFQGKESIFGDNMNELQTFVANRQKDNLNNYVFQGQHPLTLNESNPNTVEVAVSTESKANSRPRQLWKKSVDSIRQDSLSQNPVSQRDEATAENRTHSLKSPRYLPEEMAHSDISETSNRATCHREPDNSKNHKTKDNFKRSVASKYPKDCSEVERTYLKTKSSSPRDKIYTIDGEKEPGFHLDPPQFVENVTLPENVDFPDPYQDPSENFRKGDSTLPMNRNPLHNEEGLSNNDQYKLYSKHFTLKDKGSPHSETSERYRQNSTHCRSCLSNMPTYSGHFTMRSPFKCDACLRMGNLYDIDEDQMLQETGMTNAWLLGDAPRTLTNTRCHPRR

SEQ ID NO: 35054 - protein, 1281 aa, Homo sapiens
  Payload ID: 6918
  Gene Symbol: GRIN2A
  Gene Name: glutamate receptor, ionotropic, N-methyl D-aspartate 2A
  Uniprot ID: Q12879
  ENSP ID: ENSP00000454998
MGRVGYWTLLVLPALLVWRGPAPSAAAEKGPPALNIAVMLGHSHDVTERELRTLWGPEQAAGLPLDVNVVALLMNRTDPKSLITHVCDLMSGARIHGLVFGDDTDQEAVAQMLDFISSHTFVPILGIHGGASMIMADKDPTSTFFQFGASIQQQATVMLKIMQDYDWHVFSLVTTIFPGYREFISFVKTTVDNSFVGWDMQNVITLDTSFEDAKTQVQLKKIHSSVILLYCSKDEAVLILSEARSLGLTGYDFFWIVPSLVSGNTELIPKEFPSGLISVSYDDWDYSLEARVRDGIGILTTAASSMLEKFSYIPEAKASCYGQMERPEVPMHTLHPFMVNVTWDGKDLSFTEEGYQVHPRLVVIVLNKDREWEKVGKWENHTLSLRHAVWPRYKSFSDCEPDDNHLSIVTLEEAPFVIVEDIDPLTETCVRNTVPCRKFVKINNSTNEGMNVKKCCKGFCIDILKKLSRTVKFTYDLYLVTNGKHGKKVNNVWNGMIGEVVYQRAVMAVGSLTINEERSEVVDFSVPFVETGISVMVSRSNGTVSPSAFLEPFSASVWVMMFVMLLIVSAIAVFVFEYFSPVGYNRNLAKGKAPHGPSFTIGKAIWLLWGLVFNNSVPVQNPKGTTSKIMVSVWAFFAVIFLASYTANLAAFMIQEEFVDQVTGLSDKKFQRPHDYSPPFRFGTVPNGSTERNIRNNYPYMHQYMTKFNQKGVEDALVSLKTGKLDAFIYDAAVLNYKAGRDEGCKLVTIGSGYIFATTGYGIALQKGSPWKRQIDLALLQFVGDGEMEELETLWLTGICHNEKNEVMSSQLDIDNMAGVFYMLAAAMALSLITFIWEHLFYWKLRFCFTGVCSDRPGLLFSISRGIYSCIHGVHIEEKKKSPDFNLTGSQSNMLKLLRSAKNISSMSNMNSSRMDSPKRAADFIQRGSLIMDMVSDKGNLMYSDNRSFQGKESIFGDNMNELQTFVANRQKDNLNNYVFQGQHPLTLNESNPNTVEVAVSTESKANSRPRQLWKKSVDSIRQDSLSQNPVSQRDEATAENRTHSLKSPRYLPEEMAHSDISETSNRATCHREPDNSKNHKTKDNFKRSVASKYPKDCSEVERTYLKTKSSSPRDKIYTIDGEKEPGFHLDPPQFVENVTLPENVDFPDPYQDPSENFRKGDSTLPMNRNPLHNEEGLSNNDQYKLYSKHFTLKDKGSPHSETSERYRQNSTHCRSCLSNMPTYSGHFTMRSPFKCDACLRMGNLYDIDEDQMLQETGMTNAWLLGDAPRTLTNTRCHPRR

SEQ ID NO: 35055 - protein, 1484 aa, Homo sapiens [sequence omitted]

SEQ ID NO: 35056 - protein, 35 aa, Homo sapiens
  Payload ID: 6919
  Gene Symbol: GRIN2B
  Gene Name: glutamate receptor, ionotropic, N-methyl D-aspartate 2B
  ENSP ID: ENSP00000486411
MKPRAECCSPKFWLVLAVLAVSGSRARSQKSPPSI

SEQ ID NO: 35057 - protein, 35 aa, Homo sapiens; identical to SEQ ID NO: 35056
  Payload ID: 6919
  Gene Symbol: GRIN2B
  Gene Name: glutamate receptor, ionotropic, N-methyl D-aspartate 2B
  ENSP ID: ENSP00000486677

SEQ ID NO: 35058 - protein, 1233 aa, Homo sapiens
  Payload ID: 6920
  Gene Symbol: GRIN2C
  Gene Name: glutamate receptor, ionotropic, N-methyl D-aspartate 2C
  Uniprot ID: Q14957
  ENSP ID: ENSP00000293190
MGGALGPALLLTSLFGAWAGLGPGQGEQGMTVAVVFSSSGPPQAQFRARLTPQSFLDLPLEIQPLTVGVNTTNPSSLLTQICGLLGAAHVHGIVFEDNVDTEAVAQILDFISSQTHVPILSISGGSAVVLTPKEPGSAFLQLGVSLEQQLQVLFKVLEEYDWSAFAVITSLHPGHALFLEGVRAVADASHVSWRLLDVVTLELGPGGPRARTQRLLRQLDAPVFVAYCSREEAEVLFAEAAQAGLVGPGHVWLVPNLALGSTDAPPATFPVGLISVVTESWRLSLRQKVRDGVAILALGAHSYWRQHGTLPAPAGDCRVHPGPVSPAREAFYRHLLNVTWEGRDFSFSPGGYLVQPTMVVIALNRHRLWEMVGRWEHGVLYMKYPVWPRYSASLQPVVDSRHLTVATLEERPFVIVESPDPGTGGCVPNTVPCRRQSNHTFSSGDVAPYTKLCCKGFCIDILKKLARVVKFSYDLYLVTNGKHGKRVRGVWNGMIGEVYYKRADMAIGSLTINEERSEIVDFSVPFVETGISVMVARSNGTVSPSAFLEPYSPAVWVMMFVMCLTVVAITVFMFEYFSPVSYNQNLTRGKKSGGPAFTIGKSVWLLWALVFNNSVPIENPRGTTSKIMVLVWAFFAVIFLASYTANLAAFMIQEQYIDTVSGLSDKKFQRPQDQYPPFRFGTVPNGSTERNIRSNYRDMHTHMVKFNQRSVEDALTSLKMGKLDAFIYDAAVLNYMAGKDEGCKLVTIGSGKVFATTGYGIAMQKDSHWKRAIDLALLQFLGDGETQKLETVWLSGICQNEKNEVMSSKLDIDNMAGVFYMLLVAMGLALLVFAWEHLVYWKLRHSVPNSSQLDFLLAFSRGIYSCFSGVQSLASPPRQASPDLTASSAQASVLKMLQAARDMVTTAGVSSSLDRATRTIENWGGGRRAPPPSPCPTPRSGPSPCLPTPDPPPEPSPTGWGPPDGGRAALVRRAPQPPGRPPTPGPPLSDVSRVSRRPAWEARWPVRTGHCGRHLSASERPLSPARCHYSSFPRADRSGRPFLPLFPELEDLPLLGPEQLARREALLHAAWARGSRPRHASLPSSVAEAFARPSSLPAGCTGPACARPDGHSACRRLAQAQSMCLPIYREACQEGEQAGAPAWQHRQHVCLHAHAHLPFCWGAVCPHLPPCASHGSWLSGAWGPLGHRGRTLGLGTGYRDSGGLDEISRVARGTQGFPGPCTWRRISSLESEV

SEQ ID NO: 35059 - protein, 873 aa, Homo sapiens
  Payload ID: 6920
  Gene Symbol: GRIN2C
  Gene Name: glutamate receptor, ionotropic, N-methyl D-aspartate 2C
  ENSP ID: ENSP00000338645
MGGALGPALLLTSLFGAWAGLGPGQGEQGMTVAVVFSSSGPPQAQFRARLTPQSFLDLPLEIQPLTVGVNTTNPSSLLTQICGLLGAAHVHGIVFEDNVDTEAVAQILDFISSQTHVPILSISGGSAVVLTPKEPGSAFLQLGVSLEQQLQVLFKVLEEYDWSAFAVITSLHPGHALFLEGVRAVADASHVSWRLLDVVTLELGPGGPRARTQRLLRQLDAPVFVAYCSREEAEVLFAEAAQAGLVGPGHVWLVPNLALGSTDAPPATFPVGLISVVTESWRLSLRQKVRDGVAILALGAHSYWRQHGTLPAPAGDCRVHPGPVSPAREAFYRHLLNVTWEGRDFSFSPGGYLVQPTMVVIALNRHRLWEMVGRWEHGVLYMKYPVWPRYSASLQPVVDSRHLTVATLEERPFVIVESPDPGTGGCVPNTVPCRRQSNHTFSSGDVAPYTKLCCKGFCIDILKKLARVVKFSYDLYLVTNGKHGKRVRGVWNGMIGEVYYKRADMAIGSLTINEERSEIVDFSVPFVETGISVMVARSNGTVSPSAFLEPYSPAVWVMMFVMCLTVVAITVFMFEYFSPVSYNQNLTRGKKSGGPAFTIGKSVWLLWALVFNNSVPIENPRGTTSKIMVLVWAFFAVIFLASYTANLAAFMIQEQYIDTVSGLSDKKFQRPQDQYPPFRFGTVPNGSTERNIRSNYRDMHTHMVKFNQRSVEDALTSLKMGKLDAFIYDAAVLNYMAGKDEGCKLVTIGSGKVFATTGYGIAMQKDSHWKRAIDLALLQFLGDGETQKLETVWLSGICQNEKNEVMSSKLDIDNMAGVFYMLLVAMGLALLVFAWEHLVYWKLRHSVPNSSQLDFLLAFSRVGAHPSPHRPKF

SEQ ID NO: 35060 - protein, 1336 aa, Homo sapiens
  Payload ID: 6921
  Gene Symbol: GRIN2D
  Gene Name: glutamate receptor, ionotropic, N-methyl D-aspartate 2D
  Uniprot ID: O15399
  ENSP ID: ENSP00000263269
MRGAGGPRGPRGPAKMLLLLALACASPFPEEAPGPGGAGGPGGGLGGARPLNVALVFSGPAYAAEAARLGPAVAAAVRSPGLDVRPVALVLNGSDPRSLVLQLCDLLSGLRVHGVVFEDDSRAPAVAPILDFLSAQTSLPIVAVHGGAALVLTPKEKGSTFLQLGSSTEQQLQVIFEVLEEYDWTSFVAVTTRAPGHRAFLSYIEVLTDGSLVGWEHRGALTLDPGAGEAVLSAQLRSVSAQIRLLFCAREEAEPVFRAAEEAGLTGSGYVWFMVGPQLAGGGGSGAPGEPPLLPGGAPLPAGLFAVRSAGWRDDLARRVAAGVAVVARGAQALLRDYGFLPELGHDCRAQNRTHRGESLHRYFMNITWDNRDYSFNEDGFLVNPSLVVISLTRDRTWEVVGSWEQQTLRLKYPLWSRYGRFLQPVDDTQHLTVATLEERPFVIVEPADPISGTCIRDSVPCRSQLNRTHSPPPDAPRPEKRCCKGFCIDILKRLAHTIGFSYDLYLVTNGKHGKKIDGVWNGMIGEVFYQRADMAIGSLTINEERSEIVDFSVPFVETGISVMVARSNGTVSPSAFLEPYSPAVWVMMFVMCLTVVAVTVFIFEYLSPVGYNRSLATGKRPGGSTFTIGKSIWLLWALVFNNSVPVENPRGTTSKIMVLVWAFFAVIFLASYTANLAAFMIQEEYVDTVSGLSDRKFQRPQEQYPPLKFGTVPNGSTEKNIRSNYPDMHSYMVRYNQPRVEEALTQLKAGKLDAFIYDAAVLNYMARKDEGCKLVTIGSGKVFATTGYGIALHKGSRWKRPIDLALLQFLGDDEIEMLERLWLSGICHNDKIEVMSSKLDIDNMAGVFYMLLVAMGLSLLVFAWEHLVYWRLRHCLGPTHRMDFLLAFSRGMYSCCSAEAAPPPAKPPPPPQPLPSPAYPAPRPAPGPAPFVPRERASVDRWRRTKGAGPPGGAGLADGFHRYYGPIEPQGLGLGLGEARAAPRGAAGRPLSPPAAQPPQKPPPSYFAIVRDKEPAEPPAGAFPGFPSPPAPPAAAATAVGPPLCRLAFEDESPPAPARWPRSDPESQPLLGPGAGGAGGTGGAGGGAPAAPPPCRAAPPPCPYLDLEPSPSDSEDSESLGGASLGGLEPWWFADFPYPYAERLGPPPGRYWSVDKLGGWRAGSWDYLPPRSGPAAWHCRHCASLELLPPPRHLSCSHDGLDGGWWAPPPPPWAAGPLPRRRARCGCPRSHPHRPRASHRTPAAAAPHHHRHRRAAGGWDLPPPAPTSRSLEDLSSCPRAAPARRLTGPSRHARRCPHAAHWGPPLPTASHRRHRGGDLGTRRGSAHFSSLESEV

SEQ ID NO: 35061 - protein, 371 aa, Homo sapiens
  Payload ID: 6922
  Gene Symbol: GRINA
  Gene Name: glutamate receptor, ionotropic, N-methyl D-aspartate-associated protein 1 (glutamate binding)
  Uniprot ID: Q7Z429
  ENSP ID: ENSP00000314380
MSHEKSFLVSGDNYPPPNPGYPGGPQPPMPPYAQPPYPGAPYPQPPFQPSPYGQPGYPHGPSPYPQGGYPQGPYPQGGYPQGPYPQEGYPQGPYPQGGYPQGPYPQSPFPPNPYGQPQVFPGQDPDSPQHGNYQEEGPPSYYDNQDFPATNWDDKSIRQAFIRKVFLVLTLQLSVTLSTVSVFTFVAEVKGFVRENVWTYYVSYAVFFISLIVLSCCGDFRRKHPWNLVALSVLTASLSYMVGMIASFYNTEAVIMAVGITTAVCFTVVIFSMQTRYDFTSCMGVLLVSMVVLFIFAILCIFIRNRILEIVYASLGALLFTCFLAVDTQLLLGNKQLSLSPEEYVFAALNLYTDIINIFLYILTIIGRAKE

SEQ ID NO: 35062 - protein, 371 aa, Homo sapiens; identical to SEQ ID NO: 35061
  Payload ID: 6922
  Gene Symbol: GRINA
  Gene Name: glutamate receptor, ionotropic, N-methyl D-aspartate-associated protein 1 (glutamate binding)
  Uniprot ID: Q7Z429
  ENSP ID: ENSP00000378507

SEQ ID NO: 35063 - protein, 184 aa, Homo sapiens
  Payload ID: 6922
  Gene Symbol: GRINA
  Gene Name: glutamate receptor, ionotropic, N-methyl D-aspartate-associated protein 1 (glutamate binding)
  ENSP ID: ENSP00000431217
  MOD_RES (1)..(1): Any amino acid
XDFPATNWDDKSIRQAFIRKVFLVLTLQLSVTLSTVSVFTFVAESVLTASLSYMVGMIASFYNTEAVIMAVGITTAVCFTVVIFSMQTRYDFTSCMGVLLVSMVVLFIFAILCIFIRNRILEIVYASLGALLFTCFLAVDTQLLLGNKQLSLSPEEYVFAALNLYTDIINIFLYILTIIGRAKE

SEQ ID NO: 35064 - protein, 188 aa, Homo sapiens
  Payload ID: 6922
  Gene Symbol: GRINA
  Gene Name: glutamate receptor, ionotropic, N-methyl D-aspartate-associated protein 1 (glutamate binding)
  ENSP ID: ENSP00000432095
  MOD_RES (1)..(1): Any amino acid
XNPYGQPQVFPGQDPDSPQHGNYQEEGPPSYYDNQDFPATNWDDKSIRQAFIRKSVLTASLSYMVGMIASFYNTEAVIMAVGITTAVCFTVVIFSMQTRYDFTSCMGVLLVSMVVLFIFAILCIFIRNRILEIVYASLGALLFTCFLAVDTQLLLGNKQLSLSPEEYVFAALNLYTDIINIFLYILTI

SEQ ID NO: 35065 - protein, 274 aa, Homo sapiens
  Payload ID: 6922
  Gene Symbol: GRINA
  Gene Name: glutamate receptor, ionotropic, N-methyl D-aspartate-associated protein 1 (glutamate binding)
  ENSP ID: ENSP00000432706
MSHEKSFLVSGDNYPPPNPGYPGGPQPPMPPYAQPPYPGAPYPQPPFQPSPYGQPGYPHGPSPYPQGGYPQGPYPQGGYPQGPYPQEGYPQGPYPQGGYPQGPYPQSPFPPNPYGQPQVFPGQDPDSPQHGNYQEEGPPSYYDNQDFPATNWDDKSIRQAFIRKVFLVLTLQLSVTLSTVSVFTFVAEVKGFVRENVWTYYVSYAVFFISLIVLSCCGDFRRKHPWNLVALSVLTASLSYMVGMIASFYNTEAVIMAVGITTAVCFTVVIFSMQ

SEQ ID NO: 35066 - protein, 350 aa, Homo sapiens
  Payload ID: 6922
  Gene Symbol: GRINA
  Gene Name: glutamate receptor, ionotropic, N-methyl D-aspartate-associated protein 1 (glutamate binding)
  ENSP ID: ENSP00000435901
  MOD_RES (1)..(1): Any amino acid
XGYPQGPYPQEGYPQGPYPQGGYPQGPYPQSPFPPNPYGQPQVFPGQDPDSPQHGNYQEEGPPSYYDNQDFPATNWDDKSIRQAFIRKVFLVLTLQLSVTLSTVSVFTFVAEVKGFVRENVWTYYVSYAVFFISLIVLSCCGDFRRKHPWNLVALVTPKPEPLCLGPAMQSHTPTLPGLVTVVLLVLMRQGPAGVAWGHTPKVSLCLPTAVGPDRQPVVHGGDDRQLLQHRGSHHGRGHHHSRLLHRRHLLHADPLRLHLMHGRAPGEHGGALHLRHSLHLHPEPHPGDRVRLTGRSALHLLPRSGHPAATGEQAAVPEPRRVCVCCAEPVHRHHQHLPVHPHHHWPRQG

SEQ ID NO: 35067 - protein, 101 aa, Homo sapiens
  Payload ID: 6922
  Gene Symbol: GRINA
  Gene Name: glutamate receptor, ionotropic, N-methyl D-aspartate-associated protein 1 (glutamate binding)
  ENSP ID: ENSP00000436807
MSHEKSFLVSGDNYPPPNPGYPGGPQPPMPPYAQPPYPGAPYPQPPFQPSPYGQPGYPHGPSPYPQGGYPQGPYPQGGYPQGPYPQEGYPQGPYPQGGYPQ

SEQ ID NO: 35068 - protein, 1115 aa, Homo sapiens
  Payload ID: 6923
  Gene Symbol: GRIN3A
  Gene Name: glutamate receptor, ionotropic, N-methyl-D-aspartate 3A
  Uniprot ID: Q8TCU5
  ENSP ID: ENSP00000355155
MRRLSLWWLLSRVCLLLPPPCALVLAGVPSSSSHPQPCQILKRIGHAVRVGAVHLQPWTTAPRAASRAPDDSRAGAQRDEPEPGTRRSPAPSPGARWLGSTLHGRGPPGSRKPGEGARAEALWPRDALLFAVDNLNRVEGLLPYNLSLEVVMAIEAGLGDLPLLPFSSPSSPWSSDPFSFLQSVCHTVVVQGVSALLAFPQSQGEMMELDLVSLVLHIPVISIVRHEFPRESQNPLHLQLSLENSLSSDADVTVSILTMNNWYNFSLLLCQEDWNITDFLLLTQNNSKFHLGSIINITANLPSTQDLLSFLQIQLESIKNSTPTVVMFGCDMESIRRIFEITTQFGVMPPELRWVLGDSQNVEELRTEGLPLGLIAHGKTTQSVFEHYVQDAMELVARAVATATMIQPELALIPSTMNCMEVETTNLTSGQYLSRFLANTTFRGLSGSIRVKGSTIVSSENNFFIWNLQHDPMGKPMWTRLGSWQGGKIVMDYGIWPEQAQRHKTHFQHPSKLHLRVVTLIEHPFVFTREVDDEGLCPAGQLCLDPMTNDSSTLDSLFSSLHSSNDTVPIKFKKCCYGYCIDLLEKIAEDMNFDFDLYIVGDGKYGAWKNGHWTGLVGDLLRGTAHMAVTSFSINTARSQVIDFTSPFFSTSLGILVRTRDTAAPIGAFMWPLHWTMWLGIFVALHITAVFLTLYEWKSPFGLTPKGRNRSKVFSFSSALNICYALLFGRTVAIKPPKCWTGRFLMNLWAIFCMFCLSTYTANLAAVMVGEKIYEELSGIHDPKLHHPSQGFRFGTVRESSAEDYVRQSFPEMHEYMRRYNVPATPDGVEYLKNDPEKLDAFIMDKALLDYEVSIDADCKLLTVGKPFAIEGYGIGLPPNSPLTANISELISQYKSHGFMDMLHDKWYRVVPCGKRSFAVTETLQMGIKHFSGLFVLLCIGFGLSILTTIGEHIVYRLLLPRIKNKSKLQYWLHTSQRLHRAINTSFIEEKQQHFKTKRVEKRSNVGPRQLTVWNTSNLSHDNRRKYIFSDEEGQNQLGIRIHQDIPLPPRRRELPALRTTNGKADSLNVSRNSVMQELSELEKQIQVIRQELQLAVSRKTELEEYQRTSRTCES

SEQ ID NO: 35069 - protein, 1043 aa, Homo sapiens
  Payload ID: 6924
  Gene Symbol: GRIN3B
  Gene Name: glutamate receptor, ionotropic, N-methyl-D-aspartate 3B
  Uniprot ID: O60391
  ENSP ID: ENSP00000234389
MEFVRALWLGLALALGPGSAGGHPQPCGVLARLGGSVRLGALLPRAPLARARARAALARAALAPRLPHNLSLELVVAAPPARDPASLTRGLCQALVPPGVAALLAFPEARPELLQLHFLAAATETPVLSLLRREARAPLGAPNPFHLQLHWASPLETLLDVLVAVLQAHAWEDVGLALCRTQDPGGLVALWTSRAGRPPQLVLDLSRRDTGDAGLRARLAPMAAPVGGEAPVPAAVLLGCDIARARRVLEAVPPGPHWLLGTPLPPKALPTAGLPPGLLALGEVARPPLEAAIHDIVQLVARALGSAAQVQPKRALLPAPVNCGDLQPAGPESPGRFLARFLANTSFQGRTGPVWVTGSSQVHMSRHFKVWSLRRDPRGAPAWATVGSWRDGQLDLEPGGASARPPPPQGAQVWPKLRVVTLLEHPFVFARDPDEDGQCPAGQLCLDPGTNDSATLDALFAALANGSAPRALRKCCYGYCIDLLERLAEDTPFDFELYLVGDGKYGALRDGRWTGLVGDLLAGRAHMAVTSFSINSARSQVVDFTSPFFSTSLGIMVRARDTASPIGAFMWPLHWSTWLGVFAALHLTALFLTVYEWRSPYGLTPRGRNRSTVFSYSSALNLCYAILFRRTVSSKTPKCPTGRLLMNLWAIFCLLVLSSYTANLAAVMVGDKTFEELSGIHDPKLHHPAQGFRFGTVWESSAEAYIKKSFPDMHAHMRRHSAPTTPRGVAMLTSDPPKLNAFIMDKSLLDYEVSIDADCKLLTVGKPFAIEGYGIGLPQNSPLTSNLSEFISRYKSSGFIDLLHDKWYKMVPCGKRVFAVTETLQMSIYHFAGLFVLLCLGLGSALLSSLGEHAFFRLALPRIRKGSRLQYWLHTSQKIHRALNTEPPEGSKEETAEAEPSGPEVEQQQQQQDQPTAPEGWKRARRAVDKERRVRFLLEPAVVVAPEADAEAEAAPREGPVWLCSYGRPPAARPTGAPQPGELQELERRIEVARERLRQALVRRGQLLAQLGDSARHRPRRLLQARAAPAEAPPHSGRPGSQE

SEQ ID NO: 35070 - protein, 1194 aa, Homo sapiens
  Payload ID: 6925
  Gene Symbol: GRM1
  Gene Name: glutamate receptor, metabotropic 1
  Uniprot ID: Q13255
  ENSP ID: ENSP00000282753
MVGLLLFFFPAIFLEVSLLPRSPGRKVLLAGASSQRSVARMDGDVIIGALFSVHHQPPAEKVPERKCGEIREQYGIQRVEAMFHTLDKINADPVLLPNITLGSEIRDSCWHSSVALEQSIEFIRDSLISIRDEKDGINRCLPDGQSLPPGRTKKPIAGVIGPGSSSVAIQVQNLLQLFDIPQIAYSATSIDLSDKTLYKYFLRVVPSDTLQARAMLDIVKRYNWTYVSAVHTEGNYGESGMDAFKELAAQEGLCIAHSDKIYSNAGEKSFDRLLRKLRERLPKARVVVCFCEGMTVRGLLSAMRRLGVVGEFSLIGSDGWADRDEVIEGYEVEANGGITIKLQSPEVRSFDDYFLKLRLDTNTRNPWFPEFWQHRFQCRLPGHLLENPNFKRICTGNESLEENYVQDSKMGFVINAIYAMAHGLQNMHHALCPGHVGLCDAMKPIDGSKLLDFLIKSSFIGVSGEEVWFDEKGDAPGRYDIMNLQYTEANRYDYVHVGTWHEGVLNIDDYKIQMNKSGVVRSVCSEPCLKGQIKVIRKGEVSCCWICTACKENEYVQDEFTCKACDLGWWPNADLTGCEPIPVRYLEWSNIESIIAIAFSCLGILVTLFVTLIFVLYRDTPVVKSSSRELCYIILAGIFLGYVCPFTLIAKPTTTSCYLQRLLVGLSSAMCYSALVTKTNRIARILAGSKKKICTRKPRFMSAWAQVIIASILISVQLTLVVTLIIMEPPMPILSYPSIKEVYLICNTSNLGVVAPLGYNGLLIMSCTYYAFKTRNVPANFNEAKYIAFTMYTTCIIWLAFVPIYFGSNYKIITTCFAVSLSVTVALGCMFTPKMYIIIAKPERNVRSAFTTSDVVRMHVGDGKLPCRSNTFLNIFRRKKAGAGNANSNGKSVSWSEPGGGQVPKGQHMWHRLSVHVKTNETACNQTAVIKPLTKSYQGSGKSLTFSDTSTKTLYNVEEEEDAQPIRFSPPGSPSMVVHRRVPSAATTPPLPSHLTAEETPLFLAEPALPKGLPPPLQQQQQPPPQQKSLMDQLQGVVSNFSTAIPDFHAVLAGPGGPGNGLRSLYPPPPPPQHLQMLPLQLSTFGEELVSPPADDDDDSERFKLLQEYVYEHEREGNTEEDELEEEEEDLQAASKLTPDDSPALTPPSPFRDSVASGSSVPSSPVSESVLCTPPNVSYASVILRDYKQSSSTL

SEQ ID NO: 35071 - protein, 908 aa, Homo sapiens
  Payload ID: 6925
  Gene Symbol: GRM1
  Gene Name: glutamate receptor, metabotropic 1
  Uniprot ID: Q13255
  ENSP ID: ENSP00000347437
MVGLLLFFFPAIFLEVSLLPRSPGRKVLLAGASSQRSVARMDGDVIIGALFSVHHQPPAEKVPERKCGEIREQYGIQRVEAMFHTLDKINADPVLLPNITLGSEIRDSCWHSSVALEQSIEFIRDSLISIRDEKDGINRCLPDGQSLPPGRTKKPIAGVIGPGSSSVAIQVQNLLQLFDIPQIAYSATSIDLSDKTLYKYFLRVVPSDTLQARAMLDIVKRYNWTYVSAVHTEGNYGESGMDAFKELAAQEGLCIAHSDKIYSNAGEKSFDRLLRKLRERLPKARVVVCFCEGMTVRGLLSAMRRLGVVGEFSLIGSDGWADRDEVIEGYEVEANGGITIKLQSPEVRSFDDYFLKLRLDTNTRNPWFPEFWQHRFQCRLPGHLLENPNFKRICTGNESLEENYVQDSKMGFVINAIYAMAHGLQNMHHALCPGHVGLCDAMKPIDGSKLLDFLIKSSFIGVSGEEVWFDEKGDAPGRYDIMNLQYTEANRYDYVHVGTWHEGVLNIDDYKIQMNKSGVVRSVCSEPCLKGQIKVIRKGEVSCCWICTACKENEYVQDEFTCKACDLGWWPNADLTGCEPIPVRYLEWSNIESIIAIAFSCLGILVTLFVTLIFVLYRDTPVVKSSSRELCYIILAGIFLGYVCPFTLIAKPTTTSCYLQRLLVGLSSAMCYSALVTKTNRIARILAGSKKKICTRKPRFMSAWAQVIIASILISVQLTLVVTLIIMEPPMPILSYPSIKEVYLICNTSNLGVVAPLGYNGLLIMSCTYYAFKTRNVPANFNEAKYIAFTMYTTCIIWLAFVPIYFGSNYKIITTCFAVSLSVTVALGCMFTPKMYIIIAKPERNVRSAFTTSDVVRMHVGDGKLPCRSNTFLNIFRRKKAGAGNAKWRTGAQGTAYVAPPLCAREDQ

SEQ ID NO: 35072 - protein, 1194 aa, Homo sapiens; identical to SEQ ID NO: 35070
  Payload ID: 6925
  Gene Symbol: GRM1
  Gene Name: glutamate receptor, metabotropic 1
  Uniprot ID: Q13255
  ENSP ID: ENSP00000354896

SEQ ID NO: 35073 - protein, 906 aa, Homo sapiens
  Payload ID: 6925
  Gene Symbol: GRM1
  Gene Name: glutamate receptor, metabotropic 1
  Uniprot ID: Q13255
  ENSP ID: ENSP00000424095
MVGLLLFFFPAIFLEVSLLPRSPGRKVLLAGASSQRSVARMDGDVIIGALFSVHHQPPAEKVPERKCGEIREQYGIQRVEAMFHTLDKINADPVLLPNITLGSEIRDSCWHSSVALEQSIEFIRDSLISIRDEKDGINRCLPDGQSLPPGRTKKPIAGVIGPGSSSVAIQVQNLLQLFDIPQIAYSATSIDLSDKTLYKYFLRVVPSDTLQARAMLDIVKRYNWTYVSAVHTEGNYGESGMDAFKELAAQEGLCIAHSDKIYSNAGEKSFDRLLRKLRERLPKARVVVCFCEGMTVRGLLSAMRRLGVVGEFSLIGSDGWADRDEVIEGYEVEANGGITIKLQSPEVRSFDDYFLKLRLDTNTRNPWFPEFWQHRFQCRLPGHLLENPNFKRICTGNESLEENYVQDSKMGFVINAIYAMAHGLQNMHHALCPGHVGLCDAMKPIDGSKLLDFLIKSSFIGVSGEEVWFDEKGDAPGRYDIMNLQYTEANRYDYVHVGTWHEGVLNIDDYKIQMNKSGVVRSVCSEPCLKGQIKVIRKGEVSCCWICTACKENEYVQDEFTCKACDLGWWPNADLTGCEPIPVRYLEWSNIESIIAIAFSCLGILVTLFVTLIFVLYRDTPVVKSSSRELCYIILAGIFLGYVCPFTLIAKPTTTSCYLQRLLVGLSSAMCYSALVTKTNRIARILAGSKKKICTRKPRFMSAWAQVIIASILISVQLTLVVTLIIMEPPMPILSYPSIKEVYLICNTSNLGVVAPLGYNGLLIMSCTYYAFKTRNVPANFNEAKYIAFTMYTTCIIWLAFVPIYFGSNYKIITTCFAVSLSVTVALGCMFTPKMYIIIAKPERNVRSAFTTSDVVRMHVGDGKLPCRSNTFLNIFRRKKAGAGNAKKRQPEFSPTSQCPSAHVQL

SEQ ID NO: 35074 - protein, 906 aa, Homo sapiens; identical to SEQ ID NO: 35073
  Payload ID: 6925
  Gene Symbol: GRM1
  Gene Name: glutamate receptor, metabotropic 1
  Uniprot ID: Q13255
  ENSP ID: ENSP00000425599

SEQ ID NO: 35075 - protein, 435 aa, Homo sapiens
  Payload ID: 6926
  Gene Symbol: GRM2
  Gene Name: glutamate receptor, metabotropic 2
  ENSP ID: ENSP00000296479
MGSLLALLALLLLWGAVAEGPAKKVLTLEGDLVLGGLFPVHQKGGPAEDCGPVNEHRGIQRLEAMLFALDRINRDPHLLPGVRLGAHILDSCSKDTHALEQALDFVRASLSRGADGSRHICPDGSYATHGDAPTAITGVIGGSYSDVSIQVANLLRLFQIPQISYASTSAKLSDKSRYDYFARTVPPDFFQAKAMAEILRFFNWTYVSTVASEGDYGETGIEAFELEARARNICVATSEKVGRAMSRAAFEGVVRALLQKPSARVAVLFTRSEDARELLAASQRLNASFTWVASDGWGALESVVAGSEGAAEGAITIELASYPISDFASYFQSLDPWNNSRNPWFREFWEQRFRCSFRQRDCAAHSLRAVPFEQESKIMFVVNAVYAMAHALHNMHRALCPNTTRLCDAMRPVNGRRLYKDFVLNVKFDGDLKVS

SEQ ID NO: 35076 - protein, 872 aa, Homo sapiens [sequence omitted]

SEQ ID NO: 35077 - protein, 70 aa, Homo sapiens [sequence omitted]

SEQ ID NO: 35078 - protein, 594 aa, Homo sapiens
  Payload ID: 6926
  Gene Symbol: GRM2
  Gene Name: glutamate receptor, metabotropic 2
  ENSP ID: ENSP00000408906
MGSLLALLALLLLWGAVAEGPAKKVLTLEGDLVLGGLFPVHQKGGPAEDCGPVNEHRGIQRLEAMLFALDRINRDPHLLPGVRLGAHILDSCSKDTHALEQALDFVRASLSRGADGSRHICPDGSYATHGDAPTAITGVIGGSYSDVSIQVANLLRLFQIPQISYASTSAKLSDKSRYDYFARTVPPDFFQAKAMAEILRFFNWTYVSTVASEGDYGETGIEAFELEARARNICVATSEKVGRAMSRAAFEGVVRALLQKPSARVAVLFTRSEDARELLAASQRLNASFTWVASDGWGALESVVAGSEGAAEGAITIELASYPISDFASYFQSLDPWNNSRNPWFREFWEQRFRCSFRQRDCAAHSLRAVPFEQESKIMFVVNAVYAMAHALHNMHRALCPNTTRLCDAMRPVNGRRLYKDFVLNVKFDAPFRPADTHNEVRFDRFGDGIGRYNIFTYLRAGSGRYRYQKTRKCPENFNEAKFIGFTMYTTCIIWLAFLPIFYVTSSDYRVQTTTMCVSVSLSGSVVLGCLFAPKLHIILFQPQKNVVSHRAPTSRFGSAAARASSSLGQGSGSQFVPTVCNGREVVDSTTSSL

SEQ ID NO: 35079 - protein, 879 aa, Homo sapiens
  Payload ID: 6927
  Gene Symbol: GRM3
  Gene Name: glutamate receptor, metabotropic 3
  Uniprot ID: Q14832
  ENSP ID: ENSP00000355316
MKMLTRLQVLTLALFSKGFLLSLGDHNFLRREIKIEGDLVLGGLFPINEKGTGTEECGRINEDRGIQRLEAMLFAIDEINKDDYLLPGVKLGVHILDTCSRDTYALEQSLEFVRASLTKVDEAEYMCPDGSYAIQENIPLLIAGVIGGSYSSVSIQVANLLRLFQIPQISYASTSAKLSDKSRYDYFARTVPPDFYQAKAMAEILRFFNWTYVSTVASEGDYGETGIEAFEQEARLRNICIATAEKVGRSNIRKSYDSVIRELLQKPNARVVVLFMRSDDSRELIAAASRANASFTWVASDGWGAQESIIKGSEHVAYGAITLELASQPVRQFDRYFQSLNPYNNHRNPWFRDFWEQKFQCSLQNKRNHRRVCDKHLAIDSSNYEQESKIMFVVNAVYAMAHALHKMQRTLCPNTTKLCDAMKILDGKKLYKDYLLKINFTAPFNPNKDADSIVKFDTFGDGMGRYNVFNFQNVGGKYSYLKVGHWAETLSLDVNSIHWSRNSVPTSQCSDPCAPNEMKNMQPGDVCCWICIPCEPYEYLADEFTCMDCGSGQWPTADLTGCYDLPEDYIRWEDAWAIGPVTIACLGFMCTCMVVTVFIKHNNTPLVKASGRELCYILLFGVGLSYCMTFFFIAKPSPVICALRRLGLGSSFAICYSALLTKTNCIARIFDGVKNGAQRPKFISPSSQVFICLGLILVQIVMVSVWLILEAPGTRRYTLAEKRETVILKCNVKDSSMLISLTYDVILVILCTVYAFKTRKCPENFNEAKFIGFTMYTTCIIWLAFLPIFYVTSSDYRVQTTTMCISVSLSGFVVLGCLFAPKVHIILFQPQKNVVTHRLHLNRFSVSGTGTTYSQSSASTYVPTVCNGREVLDSTTSSL

SEQ ID NO: 35080 - protein, 87 aa, Homo sapiens
  Payload ID: 6927
  Gene Symbol: GRM3
  Gene Name: glutamate receptor, metabotropic 3
  ENSP ID: ENSP00000390037
MKMLTRLQVLTLALFSKGFLLSLGDHNFLRREIKIEGDLVLGGLFPINEKGTGTEECGRINEDRGIQRLEAMLFAIDEINKDDYLLP

SEQ ID NO: 35081 - protein, 537 aa, Homo sapiens
  Payload ID: 6927
  Gene Symbol: GRM3
  Gene Name: glutamate receptor, metabotropic 3
  Uniprot ID: Q14832
  ENSP ID: ENSP00000398767
MKMLTRLQVLTLALFSKGFLLSLGDHNFLRREIKIEGDLVLGGLFPINEKGTGTEECGRINEDRGIQRLEAMLFAIDEINKDDYLLPGVKLGVHILDTCSRDTYALEQSLEFVRASLTKVDEAEYMCPDGSYAIQENIPLLIAGVIGGSYSSVSIQVANLLRLFQIPQISYASTSAKLSDKSRYDYFARTVPPDFYQAKAMAEILRFFNWTYVSTVASEGDYGETGIEAFEQEARLRNICIATAEKVGRSNIRKSYDSVIRELLQKPNARVVVLFMRSDDSRELIAAASRANASFTWVASDGWGAQESIIKGSEHVAYGAITLELASQPVRQFDRYFQSLNPYNNHRNPWFRDFWEQKFQCSLQNKRNHRRVCDKHLAIDSSNYEQESKIMFVVNAVYAMAHALHKMQRTLCPNTTKLCDAMKILDGKKLYKDYLLKINFTGADDNHVHLCQPEWLCGLGLFVCTQGSHHPVSTPEECCHTQTAPQQVQCQWNWDHILSVLCKHVCANGVQWAGSPRLHHLISVIVNCSSVLVFLDC

SEQ ID NO: 35082 - protein, 171 aa, Homo sapiens
  Payload ID: 6927
  Gene Symbol: GRM3
  Gene Name: glutamate receptor, metabotropic 3
  ENSP ID: ENSP00000405427
MSQSPGAGSPPPLPPRSAPVPARSCRCEVANLLRLFQIPQISYASTSAKLSDKSRYDYFARTVPPDFYQAKAMAEILRFFNWTYVSTVASEGDYGETGIEAFEQEARLRNICIATAEKVGRSNIRKSYDSVIRELLQKPNARVVVLFMRSDDSRELIAAASRANASFTWVA

SEQ ID NO: 35083 - protein, 81 aa, Homo sapiens
  Payload ID: 6927
  Gene Symbol: GRM3
  Gene Name: glutamate receptor, metabotropic 3
  ENSP ID: ENSP00000407490
MKMLTRLQVLTLALFSKGFLLSLGDHNFLRREIKIEGDLVLGGLFPINEKGTGTEECGRINEDRGIQRLEAMLFAIDEINK

SEQ ID NO: 35084 - protein, 796 aa, Homo sapiens
  Payload ID: 6928
  Gene Symbol: GRM4
  Gene Name: glutamate receptor, metabotropic 4
  Uniprot ID: Q14833
  ENSP ID: ENSP00000363292
MPAWEPGVAASCGWRAPPCSPLRLCIAPHPCTPPSSHQGNLTCRLPPRSFGFCRCVWVRTRGPSLPGEQVSLAAHESEGAAAQLGSSPEIDPRRPRCLLPESAQIPQISYASTAPDLSDNSRYDFFSRVVPSDTYQAQAMVDIVRALKWNYVSTVASEGSYGESGVEAFIQKSREDGGVCIAQSVKIPREPKAGEFDKIIRRLLETSNARAVIIFANEDDIRRVLEAARRANQTGHFFWMGSDSWGSKIAPVLHLEEVAEGAVTILPKRMSVRDRERIGQDSAYEQEGKVQFVIDAVYAMGHALHAMHRDLCPGRVGLCPRMDPVDGTQLLKYIRNVNFSGIAGNPVTFNENGDAPGRYDIYQYQLRNDSAEYKVIGSWTDHLHLRIERMHWPGSGQQLPRSICSLPCQPGERKKTVKGMPCCWHCEPCTGYQYQVDRYTCKTCPYDMRPTENRTGCRPIPIIKLEWGSPWAVLPLFLAVVGIAATLFVVITFVRYNDTPIVKASGRELSYVLLAGIFLCYATTFLMIAEPDLGTCSLRRIFLGLGMSISYAALLTKTNRIYRIFEQGKRSVSAPRFISPASQLAITFSLISLQLLGICVWFVVDPSHSVVDFQDQRTLDPRFARGVLKCDISDLSLICLLGYSMLLMVTCTVYAIKTRGVPETFNEAKPIGFTMYTTCIVWLAFIPIFFGTSQSADKLYIQTTTLTVSVSLSASVSLGMLYMPKVYIILFHPEQNVPKRKRSLKAVVTAATMSNKFTQKGNFRPNGEAKSELCENLEAPALATKQTYVTYTNHAI

SEQ ID NO: 35085 - protein, 865 aa, Homo sapiens
  Payload ID: 6928
  Gene Symbol: GRM4
  Gene Name: glutamate receptor, metabotropic 4
  ENSP ID: ENSP00000363296
MPGKRGLGWWWARLPLCLLLSLYGPWMPSSLGKPKGHPHMNSIRIDGDITLGGLFPVHGRGSEGKPCGELKKEKGIHRLEAMLFALDRINNDPDLLPNITLGARILDTCSRDTHALEQSLTFVQALIEKDGTEVRCGSGGPPIITKPERVVGVIGASGSSVSIMVANILRLFKIPQISYASTAPDLSDNSRYDFFSRVVPSDTYQAQAMVDIVRALKWNYVSTVASEGSYGESGVEAFIQKSREDGGVCIAQSVKIPREPKAGEFDKIIRRLLETSNARAVIIFANEDDIRRVLEAARRANQTGHFFWMGSDSWGSKIAPVLHLEEVAEGAVTILPKRMSVRDRERIGQDSAYEQEGKVQFVIDAVYAMGHALHAMHRDLCPGRVGLCPRMDPVDGTQLLKYIRNVNFSGIAGNPVTFNENGDAPGRYDIYQYQLRNDSAEYKVIGSWTDHLHLRIERMHWPGSGQQLPRSICSLPCQPGERKKTVKGMPCCWHCEPCTGYQYQVDRYTCKTCPYDMRPTENRTGCRPIPIIKLEWGSPWAVLPLFLAVVGIAATLFVVITFVRYNDTPIVKASGRELSYVLLAGIFLCYATTFLMIAEPDLGTCSLRRIFLGLGMSISYAALLTKTNRIYRIFEQGKRSVSAPRFISPASQLAITFSLISLQLLGICVWFVVDPSHSVVDFQDQRTLDPRFARGVLKCDISDLSLICLLGYSMLLMVTCTVYAIKTRGVPETFNEAKPIGFTMYTTCIVWLAFIPIFFGTSQSADKLYIQTTTLTVSVSLSASVSLGMLYMPKVYIILFHPEQNVPKRKRSLKAVVTAATMSNKFTQKGNFRPNGEAKSELCENLEAPALATKQTYVTYTNHAI

SEQ ID NO: 35086 - protein, 772 aa, Homo sapiens
  Payload ID: 6928
  Gene Symbol: GRM4
  Gene Name: glutamate receptor, metabotropic 4
  Uniprot ID: Q14833
  ENSP ID: ENSP00000398456
MVQTLPKLFPHDGAKRKKRTLRTSGPCFGGGGQIPQISYASTAPDLSDNSRYDFFSRVVPSDTYQAQAMVDIVRALKWNYVSTVASEGSYGESGVEAFIQKSREDGGVCIAQSVKIPREPKAGEFDKIIRRLLETSNARAVIIFANEDDIRRVLEAARRANQTGHFFWMGSDSWGSKIAPVLHLEEVAEGAVTILPKRMSVRGFDRYFSSRTLDNNRRNIWFAEFWEDNFHCKLSRHALKKGSHVKKCTNRERIGQDSAYEQEGKVQFVIDAVYAMGHALHAMHRDLCPGRVGLCPRMDPVDGTQLLKYIRNVNFSGIAGNPVTFNENGDAPGRYDIYQYQLRNDSAEYKVIGSWTDHLHLRIERMHWPGSGQQLPRSICSLPCQPGERKKTVKGMPCCWHCEPCTGYQYQVDRYTCKTCPYDMRPTENRTGCRPIPIIKLEWGSPWAVLPLFLAVVGIAATLFVVITFVRYNDTPIVKASGRELSYVLLAGIFLCYATTFLMIAEPDLGTCSLRRIFLGLGMSISYAALLTKTNRIYRIFEQGKRSVSAPRFISPASQLAITFSLISLQLLGICVWFVVDPSHSVVDFQDQRTLDPRFARGVLKCDISDLSLICLLGYSMLLMVTCTVYAIKTRGVPETFNEAKPIGFTMYTTCIVWLAFIPIFFGTSQSADKLYIQTTTLTVSVSLSASVSLGMLYMPKVYIILFHPEQNVPKRKRSLKAVVTAATMSNKFTQKGNFRPNGEAKSELCENLEAPALATKQTYVTYTNHAI

SEQ ID NO: 35087 - protein, 743 aa, Homo sapiens
  Payload ID: 6928
  Gene Symbol: GRM4
  Gene Name: glutamate receptor, metabotropic 4
  Uniprot ID: Q14833
  ENSP ID: ENSP00000437730
MSCKIPQISYASTAPDLSDNSRYDFFSRVVPSDTYQAQAMVDIVRALKWNYVSTVASEGSYGESGVEAFIQKSREDGGVCIAQSVKIPREPKAGEFDKIIRRLLETSNARAVIIFANEDDIRRVLEAARRANQTGHFFWMGSDSWGSKIAPVLHLEEVAEGAVTILPKRMSVRGFDRYFSSRTLDNNRRNIWFAEFWEDNFHCKLSRHALKKGSHVKKCTNRERIGQDSAYEQEGKVQFVIDAVYAMGHALHAMHRDLCPGRVGLCPRMDPVDGTQLLKYIRNVNFSGIAGNPVTFNENGDAPGRYDIYQYQLRNDSAEYKVIGSWTDHLHLRIERMHWPGSGQQLPRSICSLPCQPGERKKTVKGMPCCWHCEPCTGYQYQVDRYTCKTCPYDMRPTENRTGCRPIPIIKLEWGSPWAVLPLFLAVVGIAATLFVVITFVRYNDTPIVKASGRELSYVLLAGIFLCYATTFLMIAEPDLGTCSLRRIFLGLGMSISYAALLTKTNRIYRIFEQGKRSVSAPRFISPASQLAITFSLISLQLLGICVWFVVDPSHSVVDFQDQRTLDPRFARGVLKCDISDLSLICLLGYSMLLMVTCTVYAIKTRGVPETFNEAKPIGFTMYTTCIVWLAFIPIFFGTSQSADKLYIQTTTLTVSVSLSASVSLGMLYMPKVYIILFHPEQNVPKRKRSLKAVVTAATMSNKFTQKGNFRPNGEAKSELCENLEAPALATKQTYVTYTNHAI

SEQ ID NO: 35088 - protein, 779 aa, Homo sapiens
  Payload ID: 6928
  Gene Symbol: GRM4
  Gene Name: glutamate receptor, metabotropic 4
  Uniprot ID: Q14833
  ENSP ID: ENSP00000437925
MAVPLGAPCWASALPAWAPPGLPHRSLLTRLLSQHVKPAKIPQISYASTAPDLSDNSRYDFFSRVVPSDTYQAQAMVDIVRALKWNYVSTVASEGSYGESGVEAFIQKSREDGGVCIAQSVKIPREPKAGEFDKIIRRLLETSNARAVIIFANEDDIRRVLEAARRANQTGHFFWMGSDSWGSKIAPVLHLEEVAEGAVTILPKRMSVRGFDRYFSSRTLDNNRRNIWFAEFWEDNFHCKLSRHALKKGSHVKKCTNRERIGQDSAYEQEGKVQFVIDAVYAMGHALHAMHRDLCPGRVGLCPRMDPVDGTQLLKYIRNVNFSGIAGNPVTFNENGDAPGRYDIYQYQLRNDSAEYKVIGSWTDHLHLRIERMHWPGSGQQLPRSICSLPCQPGERKKTVKGMPCCWHCEPCTGYQYQVDRYTCKTCPYDMRPTENRTGCRPIPIIKLEWGSPWAVLPLFLAVVGIAATLFVVITFVRYNDTPIVKASGRELSYVLLAGIFLCYATTFLMIAEPDLGTCSLRRIFLGLGMSISYAALLTKTNRIYRIFEQGKRSVSAPRFISPASQLAITFSLISLQLLGICVWFVVDPSHSVVDFQDQRTLDPRFARGVLKCDISDLSLICLLGYSMLLMVTCTVYAIKTRGVPETFNEAKPIGFTMYTTCIVWLAFIPIFFGTSQSADKLYIQTTTLTVSVSLSASVSLGMLYMPKVYIILFHPEQNVPKRKRSLKAVVTAATMSNKFTQKGNFRPNGEAKSELCENLEAPALATKQTYVTYTNHAI

SEQ ID NO: 35089 - protein, 912 aa, Homo sapiens
  Payload ID: 6928
  Gene Symbol: GRM4
  Gene Name: glutamate receptor, metabotropic 4
  Uniprot ID: Q14833
  ENSP ID: ENSP00000440556
MPGKRGLGWWWARLPLCLLLSLYGPWMPSSLGKPKGHPHMNSIRIDGDITLGGLFPVHGRGSEGKPCGELKKEKGIHRLEAMLFALDRINNDPDLLPNITLGARILDTCSRDTHALEQSLTFVQALIEKDGTEVRCGSGGPPIITKPERVVGVIGASGSSVSIMVANILRLFKIPQISYASTAPDLSDNSRYDFFSRVVPSDTYQAQAMVDIVRALKWNYVSTVASEGSYGESGVEAFIQKSREDGGVCIAQSVKIPREPKAGEFDKIIRRLLETSNARAVIIFANEDDIRRVLEAARRANQTGHFFWMGSDSWGSKIAPVLHLEEVAEGAVTILPKRMSVRGFDRYFSSRTLDNNRRNIWFAEFWEDNFHCKLSRHALKKGSHVKKCTNRERIGQDSAYEQEGKVQFVIDAVYAMGHALHAMHRDLCPGRVGLCPRMDPVDGTQLLKYIRNVNFSGIAGNPVTFNENGDAPGRYDIYQYQLRNDSAEYKVIGSWTDHLHLRIERMHWPGSGQQLPRSICSLPCQPGERKKTVKGMPCCWHCEPCTGYQYQVDRYTCKTCPYDMRPTENRTGCRPIPIIKLEWGSPWAVLPLFLAVVGIAATLFVVITFVRYNDTPIVKASGRELSYVLLAGIFLCYATTFLMIAEPDLGTCSLRRIFLGLGMSISYAALLTKTNRIYRIFEQGKRSVSAPRFISPASQLAITFSLISLQLLGICVWFVVDPSHSVVDFQDQRTLDPRFARGVLKCDISDLSLICLLGYSMLLMVTCTVYAIKTRGVPETFNEAKPIGFTMYTTCIVWLAFIPIFFGTSQSADKLYIQTTTLTVSVSLSASVSLGMLYMPKVYIILFHPEQNVPKRKRSLKAVVTAATMSNKFTQKGNFRPNGEAKSELCENLEAPALATKQTYVTYTNHAI

SEQ ID NO: 35090 - protein, 96 aa, Homo sapiens
  Payload ID: 6928
  Gene Symbol: GRM4
  Gene Name: glutamate receptor, metabotropic 4
  ENSP ID: ENSP00000476561
MGSDSWGSKIAPVLHLEEVAEGAVTILPKRMSVRGFDRYFSSRTLDNNRRNIWFAEFWEDNFHCKLSRHALKKGSHVKKCTNRERIGQDSAYEQEG

SEQ ID NO: 35091 - protein, 181 aa, Homo sapiens
  Payload ID: 6928
  Gene Symbol: GRM4
  Gene Name: glutamate receptor, metabotropic 4
  ENSP ID: ENSP00000477016
MPGKRGLGWWWARLPLCLLLSLYGPWMPSSLGKPKGHPHMNSIRIDGDITLGGLFPVHGRGSEGKPCGELKKEKGIHRLEAMLFALDRINNDPDLLPNITLGARILDTCSRDTHALEQSLTFVQALIEKDGTEVRCGSGGPPIITKPERVVGVIGASGSSVSIMVANILRLFKGACASPSR

SEQ ID NO: 35092 - protein, 779 aa, Homo sapiens; identical to SEQ ID NO: 35088
  Payload ID: 6928
  Gene Symbol: GRM4
  Gene Name: glutamate receptor, metabotropic 4
  Uniprot ID: Q14833
  ENSP ID: ENSP00000477466

SEQ ID NO: 35093 - protein, 1180 aa, Homo sapiens
  Payload ID: 6929
  Gene Symbol: GRM5
  Gene Name: glutamate receptor, metabotropic 5
  Uniprot ID: P41594
  ENSP ID: ENSP00000305905
MVLLLILSVLLLKEDVRGSAQSSERRVVAHMPGDIIIGALFSVHHQPTVDKVHERKCGAVREQYGIQRVEAMLHTLERINSDPTLLPNITLGCEIRDSCWHSAVALEQSIEFIRDSLISSEEEEGLVRCVDGSSSSFRSKKPIVGVIGPGSSSVAIQVQNLLQLFNIPQIAYSATSMDLSDKTLFKYFMRVVPSDAQQARAMVDIVKRYNWTYVSAVHTEGNYGESGMEAFKDMSAKEGICIAHSYKIYSNAGEQSFDKLLKKLTSHLPKARVVACFCEGMTVRGLLMAMRRLGLAGEFLLLGSDGWADRYDVTDGYQREAVGGITIKLQSPDVKWFDDYYLKLRPETNHRNPWFQEFWQHRFQCRLEGFPQENSKYNKTCNSSLTLKTHHVQDSKMGFVINAIYSMAYGLHNMQMSLCPGYAGLCDAMKPIDGRKLLESLMKTNFTGVSGDTILFDENGDSPGRYEIMNFKEMGKDYFDYINVGSWDNGELKMDDDEVWSKKSNIIRSVCSEPCEKGQIKVIRKGEVSCCWTCTPCKENEYVFDEYTCKACQLGSWPTDDLTGCDLIPVQYLRWGDPEPIAAVVFACLGLLATLFVTVVFIIYRDTPVVKSSSRELCYIILAGICLGYLCTFCLIAKPKQIYCYLQRIGIGLSPAMSYSALVTKTNRIARILAGSKKKICTKKPRFMSACAQLVIAFILICIQLGIIVALFIMEPPDIMHDYPSIREVYLICNTTNLGVVTPLGYNGLLILSCTFYAFKTRNVPANFNEAKYIAFTMYTTCIIWLAFVPIYFGSNYKIITMCFSVSLSATVALGCMFVPKVYIILAKPERNVRSAFTTSTVVRMHVGDGKSSSAASRSSSLVNLWKRRGSSGETLSSNGKSVTWAQNEKSSRGQHLWQRLSIHINKKENPNQTAVIKPFPKSTESRGLGAGAGAGGSAGGVGATGGAGCAGAGPGGPESPDAGPKALYDVAEAEEHFPAPARPRSPSPISTLSHRAGSASRTDDDVPSLHSEPVARSSSSQGSLMEQISSVVTRFTANISELNSMMLSTAAPSPGVGAPLCSSYLIPKEIQLPTTMTTFAEIQPLPAIEVTGGAQPAAGAQAAGDAARESPAAGPEAAAAKPDLEELVALTPPSPFRDSVDSGSTTPNSPVSESALCIPSSPKYDTLIIRDYTQSSSSL

SEQ ID NO: 35094 - protein, 1212 aa, Homo sapiens
  Payload ID: 6929
  Gene Symbol: GRM5
  Gene Name: glutamate receptor, metabotropic 5
  Uniprot ID: P41594
  ENSP ID: ENSP00000306138
MVLLLILSVLLLKEDVRGSAQSSERRVVAHMPGDIIIGALFSVHHQPTVDKVHERKCGAVREQYGIQRVEAMLHTLERINSDPTLLPNITLGCEIRDSCWHSAVALEQSIEFIRDSLISSEEEEGLVRCVDGSSSSFRSKKPIVGVIGPGSSSVAIQVQNLLQLFNIPQIAYSATSMDLSDKTLFKYFMRVVPSDAQQARAMVDIVKRYNWTYVSAVHTEGNYGESGMEAFKDMSAKEGICIAHSYKIYSNAGEQSFDKLLKKLTSHLPKARVVACFCEGMTVRGLLMAMRRLGLAGEFLLLGSDGWADRYDVTDGYQREAVGGITIKLQSPDVKWFDDYYLKLRPETNHRNPWFQEFWQHRFQCRLEGFPQENSKYNKTCNSSLTLKTHHVQDSKMGFVINAIYSMAYGLHNMQMSLCPGYAGLCDAMKPIDGRKLLESLMKTNFTGVSGDTILFDENGDSPGRYEIMNFKEMGKDYFDYINVGSWDNGELKMDDDEVWSKKSNIIRSVCSEPCEKGQIKVIRKGEVSCCWTCTPCKENEYVFDEYTCKACQLGSWPTDDLTGCDLIPVQYLRWGDPEPIAAVVFACLGLLATLFVTVVFIIYRDTPVVKSSSRELCYIILAGICLGYLCTFCLIAKPKQIYCYLQRIGIGLSPAMSYSALVTKTNRIARILAGSKKKICTKKPRFMSACAQLVIAFILICIQLGIIVALFIMEPPDIMHDYPSIREVYLICNTTNLGVVTPLGYNGLLILSCTFYAFKTRNVPANFNEAKYIAFTMYTTCIIWLAFVPIYFGSNYKIITMCFSVSLSATVALGCMFVPKVYIILAKPERNVRSAFTTSTVVRMHVGDGKSSSAASRSSSLVNLWKRRGSSGETLRYKDRRLAQHKSEIECFTPKGSMGNGGRATMSSSNGKSVTWAQNEKSSRGQHLWQRLSIHINKKENPNQTAVIKPFPKSTESRGLGAGAGAGGSAGGVGATGGAGCAGAGPGGPESPDAGPKALYDVAEAEEHFPAPARPRSPSPISTLSHRAGSASRTDDDVPSLHSEPVARSSSSQGSLMEQISSVVTRFTANISELNSMMLSTAAPSPGVGAPLCSSYLIPKEIQLPTTMTTFAEIQPLPAIEVTGGAQPAAGAQAAGDAARESPAAGPEAAAAKPDLEELVALTPPSPFRDSVDSGSTTPNSPVSESALCIPSSPKYDTLIIRDYTQSSSSL

SEQ ID NO: 35095 - protein, 298 aa, Homo sapiens
  Payload ID: 6929
  Gene Symbol: GRM5
  Gene Name: glutamate receptor, metabotropic 5
  ENSP ID: ENSP00000376972
MVLLLILSVLLLKEDVRGSAQSSERRVVAHMPGDIIIGALFSVHHQPTVDKVHERKCGAVREQYGIQRVEAMLHTLERINSDPTLLPNITLGCEIRDSCWHSAVALEQSIEFIRDSLISSEEEEGLVRCVDGSSSSFRSKKPIVGVIGPGSSSVAIQVQNLLQLFNIPQIAYSATSMDLSDKTLFKYFMRVVPSDAQQARAMVDIVKRYNWTYVSAVHTEGRGTKKEEMRKRDQTLMLSFMRCVFLRFEEIRWNDSLVYDALENENIQVLSLCFPSSAVIQINTFLSPIALINRLNVT

SEQ ID NO: 35096 - protein, 87 aa, Homo sapiens
  Payload ID: 6929
  Gene Symbol: GRM5
  Gene Name: glutamate receptor, metabotropic 5
  ENSP ID: ENSP00000403724
  MOD_RES (1)..(1): Any amino acid
XQIAYSATSMDLSDKTLFKYFMRVVPSDAQQARAMVDIVKRYNWTYVSAVHTEGRGTKKEEMRKRDQTLMLSFMRFKLFSCLSLQRS

SEQ ID NO: 35097 - protein, 1180 aa, Homo sapiens; identical to SEQ ID NO: 35093
  Payload ID: 6929
  Gene Symbol: GRM5
  Gene Name: glutamate receptor, metabotropic 5
  Uniprot ID: P41594
  ENSP ID: ENSP00000405690

SEQ ID NO: 35098 - protein, 877 aa, Homo sapiens
  Payload ID: 6930
  Gene Symbol: GRM6
  Gene Name: glutamate receptor, metabotropic 6
  Uniprot ID: O15303
  ENSP ID: ENSP00000231188
MARPRRAREPLLVALLPLAWLAQAGLARAAGSVRLAGGLTLGGLFPVHARGAAGRACGQLKKEQGVHRLEAMLYALDRVNADPELLPGVRLGARLLDTCSRDTYALEQALSFVQALIRGRGDGDEVGVRCPGGVPPLRPAPPERVVAVVGASASSVSIMVANVLRLFAIPQISYASTAPELSDSTRYDFFSRVVPPDSYQAQAMVDIVRALGWNYVSTLASEGNYGESGVEAFVQISREAGGVCIAQSIKIPREPKPGEFSKVIRRLMETPNARGIIIFANEDDIRRVLEAARQANLTGHFLWVGSDSWGAKTSPILSLEDVAVGAITILPKRASIDGFDQYFMTRSLENNRRNIWFAEFWEENFNCKLTSSGTQSDDSTRKCTGEERIGRDSTYEQEGKVQFVIDAVYAIAHALHSMHQALCPGHTGLCPAMEPTDGRMLLQYIRAVRFNGSAGTPVMFNENGDAPGRYDIFQYQATNGSASSGGYQAVGQWAETLRLDVEALQWSGDPHEVPSSLCSLPCGPGERKKMVKGVPCCWHCEACDGYRFQVDEFTCEACPGDMRPTPNHTGCRPTPVVRLSWSSPWAAPPLLLAVLGIVATTTVVATFVRYNNTPIVRASGRELSYVLLTGIFLIYAITFLMVAEPGAAVCAARRLFLGLGTTLSYSALLTKTNRIYRIFEQGKRSVTPPPFISPTSQLVITFSLTSLQVVGMIAWLGARPPHSVIDYEEQRTVDPEQARGVLKCDMSDLSLIGCLGYSLLLMVTCTVYAIKARGVPETFNEAKPIGFTMYTTCIIWLAFVPIFFGTAQSAEKIYIQTTTLTVSLSLSASVSLGMLYVPKTYVILFHPEQNVQKRKRSLKATSTVAAPPKGEDAEAHK

SEQ ID NO: 35099 - protein, 877 aa, Homo sapiens; identical to SEQ ID NO: 35098
  Payload ID: 6930
  Gene Symbol: GRM6
  Gene Name: glutamate receptor, metabotropic 6
  Uniprot ID: O15303
  ENSP ID: ENSP00000430767

SEQ ID NO: 35100 - protein, 915 aa, Homo sapiens
  Payload ID: 6931
  Gene Symbol: GRM7
  Gene Name: glutamate receptor, metabotropic 7
  Uniprot ID: Q14831
  ENSP ID: ENSP00000350348
MVQLRKLLRVLTLMKFPCCVLEVLLCALAAAARGQEMYAPHSIRIEGDVTLGGLFPVHAKGPSGVPCGDIKRENGIHRLEAMLYALDQINSDPNLLPNVTLGARILDTCSRDTYALEQSLTFVQALIQKDTSDVRCTNGEPPVFVKPEKVVGVIGASGSSVSIMVANILRLFQIPQISYASTAPELSDDRRYDFFSRVVPPDSFQAQAMVDIVKALGWNYVSTLASEGSYGEKGVESFTQISKEAGGLCIAQSVRIPQERKDRTIDFDRIIKQLLDTPNSRAVVIFANDEDIKQILAAAKRADQVGHFLWVGSDSWGSKINPLHQHEDIAEGAITIQPKRATVEGFDAYFTSRTLENNRRNVWFAEYWEENFNCKLTISGSKKEDTDRKCTGQERIGKDSNYEQEGKVQFVIDAVYAMAHALHHMNKDLCADYRGVCPEMEQAGGKKLLKYIRNVNFNGSAGTPVMFNKNGDAPGRYDIFQYQTTNTSNPGYRLIGQWTDELQLNIEDMQWGKGVREIPASVCTLPCKPGQRKKTQKGTPCCWTCEPCDGYQYQFDEMTCQHCPYDQRPNENRTGCQDIPIIKLEWHSPWAVIPVFLAMLGIIATIFVMATFIRYNDTPIVRASGRELSYVLLTGIFLCYIITFLMIAKPDVAVCSFRRVFLGLGMCISYAALLTKTNRIYRIFEQGKKSVTAPRLISPTSQLAITSSLISVQLLGVFIWFGVDPPNIIIDYDEHKTMNPEQARGVLKCDITDLQIICSLGYSILLMVTCTVYAIKTRGVPENFNEAKPIGFTMYTTCIVWLAFIPIFFGTAQSAEKLYIQTTTLTISMNLSASVALGMLYMPKVYIIIFHPELNVQKRKRSFKAVVTAATMSSRLSHKPSDRPNGEAKTELCENVDPNSPAAKKKYVSYNNLVI

SEQ ID NO: 35101 - protein, 911 aa, Homo sapiens
  Payload ID: 6931
  Gene Symbol: GRM7
  Gene Name: glutamate receptor, metabotropic 7
  Uniprot ID: Q14831
  ENSP ID: ENSP00000373986
MVQLRKLLRVLTLMKFPCCVLEVLLCALAAAARGQEMYAPHSIRIEGDVTLGGLFPVHAKGPSGVPCGDIKRENGIHRLEAMLYALDQINSDPNLLPNVTLGARILDTCSRDTYALEQSLTFVQALIQKDTSDVRCTNGEPPVFVKPEKVVGVIGASGSSVSIMVANILRLFQIPQISYASTAPELSDDRRYDFFSRVVPPDSFQAQAMVDIVKALGWNYVSTLASEGSYGEKGVESFTQISKEAGGLCIAQSVRIPQERKDRTIDFDRIIKQLLDTPNSRAVVIFANDEDIKQILAAAKRADQVGHFLWVGSDSWGSKINPLHQHEDIAEGAITIQPKRATVEGFDAYFTSRTLENNRRNVWFAEYWEENFNCKLTISGSKKEDTDRKCTGQERIGKDSNYEQEGKVQFVIDAVYAMAHALHHMNKDLCADYRGVCPEMEQAGGKKLLKYIRNVNFNGSAGTPVMFNKNGDAPGRYDIFQYQTTNTSNPGYRLIGQWTDELQLNIEDMQWGKGVREIPASVCTLPCKPGQRKKTQKGTPCCWTCEPCDGYQYQFDEMTCQHCPYDQRPNENRTGCQDIPIIKLEWHSPWAVIPVFLAMLGIIATIFVMATFIRYNDTPIVRASGRELSYVLLTGIFLCYIITFLMIAKPDVAVCSFRRVFLGLGMCISYAALLTKTNRIYRIFEQGKKSVTAPRLISPTSQLAITSSLISVQLLGVFIWFGVDPPNIIIDYDEHKTMNPEQARGVLKCDITDLQIICSLGYSILLMVTCTVYAIKTRGVPENFNEAKPIGFTMYTTCIVWLAFIPIFFGTAQSAEKLYIQTTTLTISMNLSASVALGMLYMPKVYIIIFHPELNVQKRKRSFKAVVTAATMSSRLSHKPSDRPNGEAKTELCENVDPNITSEDLSLHKED

SEQ ID NO: 35102 - protein, 906 aa, Homo sapiens
  Payload ID: 6931
  Gene Symbol: GRM7
  Gene Name: glutamate receptor, metabotropic 7
  Uniprot ID: Q14831
  ENSP ID: ENSP00000373987
MVQLRKLLRVLTLMKFPCCVLEVLLCALAAAARGQEMYAPHSIRIEGDVTLGGLFPVHAKGPSGVPCGDIKRENGIHRLEAMLYALDQINSDPNLLPNVTLGARILDTCSRDTYALEQSLTFVQALIQKDTSDVRCTNGEPPVFVKPEKVVGVIGASGSSVSIMVANILRLFQIPQISYASTAPELSDDRRYDFFSRVVPPDSFQAQAMVDIVKALGWNYVSTLASEGSYGEKGVESFTQISKEAGGLCIAQSVRIPQERKDRTIDFDRIIKQLLDTPNSRAVVIFANDEDIKQILAAAKRADQVGHFLWVGSDSWGSKINPLHQHEDIAEGAITIQPKRATVEGFDAYFTSRTLENNRRNVWFAEYWEENFNCKLTISGSKKEDTDRKCTGQERIGKDSNYEQEGKVQFVIDAVYAMAHALHHMNKDLCADYRGVCPEMEQAGGKKLLKYIRNVNFNGSAGTPVMFNKNGDAPGRYDIFQYQTTNTSNPGYRLIGQWTDELQLNIEDMQWGKGVREIPASVCTLPCKPGQRKKTQKGTPCCWTCEPCDGYQYQFDEMTCQHCPYDQRPNENRTGCQDIPIIKLEWHSPWAVIPVFLAMLGIIATIFVMATFIRYNDTPIVRASGRELSYVLLTGIFLCYIITFLMIAKPDVAVCSFRRVFLGLGMCISYAALLTKTNRIYRIFEQGKKSVTAPRLISPTSQLAITSSLISVQLLGVFIWFGVDPPNIIIDYDEHKTMNPEQARGVLKCDITDLQIICSLGYSILLMVTCTVYAIKTRGVPENFNEAKPIGFTMYTTCIVWLAFIPIFFGTAQSAEKLYIQTTTLTISMNLSASVALGMLYMPKVYIIIFHPELNVQKRKRSFKAVVTAATMSSRLSHKPSDRPNGEAKTELCENVDPNSEKCNCY

SEQ ID NO: 35103 - protein, 677 aa, Homo sapiens
  Payload ID: 6931
  Gene Symbol: GRM7
  Gene Name: glutamate receptor, metabotropic 7
  ENSP ID: ENSP00000384585
GGLCIAQSVRIPQERKDRTIDFDRIIKQLLDTPNSRAVVIFANDEDIKQILAAAKRADQVGHFLWVGSDSWGSKINPLHQHEDIAEGAITIQPKRATVEGFDAYFTSRTLENNRRNVWFAEYWEENFNCKLTISGSKKEDTDRKCTGQERIGKDSNYEQEGKVQFVIDAVYAMAHALHHMNKDLCADYRGVCPEMEQAGGKKLLKYIRNVNFNGSAGTPVMFNKNGDAPGRYDIFQYQTTNTSNPGYRLIGQWTDELQLNIEDMQWGKGVREIPASVCTLPCKPGQRKKTQKGTPCCWTCEPCDGYQYQFDEMTCQHCPYDQRPNENRTGCQDIPIIKLEWHSPWAVIPVFLAMLGIIATIFVMATFIRYNDTPIVRASGRELSYVLLTGIFLCYIITFLMIAKPDVAVCSFRRVFLGLGMCISYAALLTKTNRIYRIFEQGKKSVTAPRLISPTSQLAITSSLISVQLLGVFIWFGVDPPNIIIDYDEHKTMNPEQARGVLKCDITDLQIICSLGYSILLMVTCTVYAIKTRGVPENFNEAKPIGFTMYTTCIVWLAFIPIFFGTAQSAEKLYIQTTTLTISMNLSASVALGMLYMPKVYIIIFHPELNVQKRKRSFKAVVTAATMSSRLSHKPSDRPNGEAKTELCENVDPNNCIPPVRKSVQKSVTWYTIPPTV

SEQ ID NO: 35104 - protein, 122 aa, Homo sapiens
  Payload ID: 6931
  Gene Symbol: GRM7
  Gene Name: glutamate receptor, metabotropic 7
  ENSP ID: ENSP00000393799
MVDIVKALGWNYVSTLASEGSYGEKGVESFTQISKEAGGLCIAQSVRIPQERKDRTIDFDRIIKQLLDTPNSRAVVIFANDEDIKQILAAAKRADQVGHFLWVGSDSWGSKINPLHQHEDIA

SEQ ID NO: 35105 - protein, 185 aa, Homo sapiens
  Payload ID: 6931
  Gene Symbol: GRM7
  Gene Name: glutamate receptor, metabotropic 7
  ENSP ID: ENSP00000395035
MGFDAYFTSRTLENNRRNVWFAEYWEENFNCKLTISGSKKEDTDRKCTGQERIGKDSNYEQEGKVQFVIDAVYAMAHALHHMNKDLCADYRGVCPEMEQAGGKKLLKYIRNVNFNGSAGTPVMFNKNGDAPGRYDIFQYQTTNTSNPGYRLIGQWTDELQLNIEDMQWGKGVREIPASVCTLPCK

SEQ ID NO: 35106 - protein, 68 aa, Homo sapiens
  Payload ID: 6931
  Gene Symbol: GRM7
  Gene Name: glutamate receptor, metabotropic 7
  ENSP ID: ENSP00000404161
MNPVPQMEMQKSPVFGHLGSSPEVLWNTRYYTEAAIWKDHLERFFIKTEPQSIRKHPCLISMKVMRRT

SEQ ID NO: 35107 - protein, 37 aa, Homo sapiens
  Payload ID: 6931
  Gene Symbol: GRM7
  Gene Name: glutamate receptor, metabotropic 7
  ENSP ID: ENSP00000405194
MAPELHWGDALLSCLSFPILNVLQKSPRLVMHQRHPS

SEQ ID NO: 35108 - protein, 913 aa, Homo sapiens
  Payload ID: 6931
  Gene Symbol: GRM7
  Gene Name: glutamate receptor, metabotropic 7
  ENSP ID: ENSP00000412329
MVQLRKLLRVLTLMKFPCCVLEVLLCALAAAARGQEMYAPHSIRIEGDVTLGGLFPVHAKGPSGVPCGDIKRENGIHRLEAMLYALDQINSDPNLLPNVTLGARILDTCSRDTYALEQSLTFVQALIQKDTSDVRCTNGEPPVFVKPEKVVGVIGASGSSVSIMVANILRLFQIPQISYASTAPELSDDRRYDFFSRVVPPDSFQAQAMVDIVKALGWNYVSTLASEGSYGEKGVESFTQISKEAGGLCIAQSVRIPQERKDRTIDFDRIIKQLLDTPNSRAVVIFANDEDIKQILAAAKRADQVGHFLWVGSDSWGSKINPLHQHEDIAEGAITIQPKRATVEGFDAYFTSRTLENNRRNVWFAEYWEENFNCKLTISGSKKEDTDRKCTGQERIGKDSNYEQEGKVQFVIDAVYAMAHALHHMNKDLCADYRGVCPEMEQAGGKKLLKYIRNVNFNGSAGTPVMFNKNGDAPGRYDIFQYQTTNTSNPGYRLIGQWTDELQLNIEDMQWGKGVREIPASVCTLPCKPGQRKKTQKGTPCCWTCEPCDGYQYQFDEMTCQHCPYDQRPNENRTGCQDIPIIKLEWHSPWAVIPVFLAMLGIIATIFVMATFIRYNDTPIVRASGRELSYVLLTGIFLCYIITFLMIAKPDVAVCSFRRVFLGLGMCISYAALLTKTNRIYRIFEQGKKSVTAPRLISPTSQLAITSSLISVQLLGVFIWFGVDPPNIIIDYDEHKTMNPEQARGVLKCDITDLQIICSLGYSILLMVTCTVYAIKTRGVPENFNEAKPIGFTMYTTCIVWLAFIPIFFGTAQSAEKLYIQTTTLTISMNLSASVALGMLYMPKVYIIIFHPELNVQKRKRSFKAVVTAATMSSRLSHKPSDRPNGEAKTELCENVDPNNFFFWLYSGTWITL

SEQ ID NO: 35109 - protein, 922 aa, Homo sapiens
  Payload ID: 6931
  Gene Symbol: GRM7
  Gene Name: glutamate receptor, metabotropic 7
  Uniprot ID: Q14831
  ENSP ID: ENSP00000417536
MVQLRKLLRVLTLMKFPCCVLEVLLCALAAAARGQEMYAPHSIRIEGDVTLGGLFPVHAKGPSGVPCGDIKRENGIHRLEAMLYALDQINSDPNLLPNVTLGARILDTCSRDTYALEQSLTFVQALIQKDTSDVRCTNGEPPVFVKPEKVVGVIGASGSSVSIMVANILRLFQIPQISYASTAPELSDDRRYDFFSRVVPPDSFQAQAMVDIVKALGWNYVSTLASEGSYGEKGVESFTQISKEAGGLCIAQSVRIPQERKDRTIDFDRIIKQLLDTPNSRAVVIFANDEDIKQILAAAKRADQVGHFLWVGSDSWGSKINPLHQHEDIAEGAITIQPKRATVEGFDAYFTSRTLENNRRNVWFAEYWEENFNCKLTISGSKKEDTDRKCTGQERIGKDSNYEQEGKVQFVIDAVYAMAHALHHMNKDLCADYRGVCPEMEQAGGKKLLKYIRNVNFNGSAGTPVMFNKNGDAPGRYDIFQYQTTNTSNPGYRLIGQWTDELQLNIEDMQWGKGVREIPASVCTLPCKPGQRKKTQKGTPCCWTCEPCDGYQYQFDEMTCQHCPYDQRPNENRTGCQDIPIIKLEWHSPWAVIPVFLAMLGIIATIFVMATFIRYNDTPIVRASGRELSYVLLTGIFLCYIITFLMIAKPDVAVCSFRRVFLGLGMCISYAALLTKTNRIYRIFEQGKKSVTAPRLISPTSQLAITSSLISVQLLGVFIWFGVDPPNIIIDYDEHKTMNPEQARGVLKCDITDLQIICSLGYSILLMVTCTVYAIKTRGVPENFNEAKPIGFTMYTTCIVWLAFIPIFFGTAQSAEKLYIQTTTLTISMNLSASVALGMLYMPKVYIIIFHPELNVQKRKRSFKAVVTAATMSSRLSHKPSDRPNGEAKTELCENVDPNNCIPPVRKSVQKSVTWYTIPPTV

SEQ ID NO: 35110 - protein, 922 aa, Homo sapiens; identical to SEQ ID NO: 35109
  Payload ID: 6931
  Gene Symbol: GRM7
  Gene Name: glutamate receptor, metabotropic 7
  Uniprot ID: Q14831
  ENSP ID: ENSP00000419835

SEQ ID NO: 35111 - protein, 908 aa, Homo sapiens
  Payload ID: 6932
  Gene Symbol: GRM8
  Gene Name: glutamate receptor, metabotropic 8
  Uniprot ID: O00222
  ENSP ID: ENSP00000344173
MVCEGKRSASCPCFFLLTAKFYWILTMMQRTHSQEYAHSIRVDGDIILGGLFPVHAKGERGVPCGELKKEKGIHRLEAMLYAIDQINKDPDLLSNITLGVRILDTCSRDTYALEQSLTFVQALIEKDASDVKCANGDPPIFTKPDKISGVIGAAASSVSIMVANILRLFKIPQISYASTAPELSDNTRYDFFSRVVPPDSYQAQAMVDIVTALGWNYVSTLASEGNYGESGVEAFTQISREIGGVCIAQSQKIPREPRPGEFEKIIKRLLETPNARAVIMFANEDDIRRILEAAKKLNQSGHFLWIGSDSWGSKIAPVYQQEEIAEGAVTILPKRASIDGFDRYFRSRTLANNRRNVWFAEFWEENFGCKLGSHGKRNSHIKKCTGLERIARDSSYEQEGKVQFVIDAVYSMAYALHNMHKDLCPGYIGLCPRMSTIDGKELLGYIRAVNFNGSAGTPVTFNENGDAPGRYDIFQYQITNKSTEYKVIGHWTNQLHLKVEDMQWAHREHTHPASVCSLPCKPGERKKTVKGVPCCWHCERCEGYNYQVDELSCELCPLDQRPNMNRTGCQLIPIIKLEWHSPWAVVPVFVAILGIIATTFVIVTFVRYNDTPIVRASGRELSYVLLTGIFLCYSITFLMIAAPDTIICSFRRVFLGLGMCFSYAALLTKTNRIHRIFEQGKKSVTAPKFISPASQLVITFSLISVQLLGVFVWFVVDPPHIIIDYGEQRTLDPEKARGVLKCDISDLSLICSLGYSILLMVTCTVYAIKTRGVPETFNEAKPIGFTMYTTCIIWLAFIPIFFGTAQSAEKMYIQTTTLTVSMSLSASVSLGMLYMPKVYIIIFHPEQNVQKRKRSFKAVVTAATMQSKLIQKGNDRPNGEVKSELCESLETNTSSTKTTYISYSNHSI

SEQ ID NO: 35112 - protein, 501 aa, Homo sapiens
  Payload ID: 6932
  Gene Symbol: GRM8
  Gene Name: glutamate receptor, metabotropic 8
  Uniprot ID: O00222
  ENSP ID: ENSP00000345747
MVCEGKRSASCPCFFLLTAKFYWILTMMQRTHSQEYAHSIRVDGDIILGGLFPVHAKGERGVPCGELKKEKGIHRLEAMLYAIDQINKDPDLLSNITLGVRILDTCSRDTYALEQSLTFVQALIEKDASDVKCANGDPPIFTKPDKISGVIGAAASSVSIMVANILRLFKIPQISYASTAPELSDNTRYDFFSRVVPPDSYQAQAMVDIVTALGWNYVSTLASEGNYGESGVEAFTQISREIGGVCIAQSQKIPREPRPGEFEKIIKRLLETPNARAVIMFANEDDIRRILEAAKKLNQSGHFLWIGSDSWGSKIAPVYQQEEIAEGAVTILPKRASIDGFDRYFRSRTLANNRRNVWFAEFWEENFGCKLGSHGKRNSHIKKCTGLERIARDSSYEQEGKVQFVIDAVYSMAYALHNMHKDLCPGYIGLCPRMSTIDGKELLGYIRAVNFNGCRRGIQMSLPWPTLFTPSFSSSWAVLALLSLLMKTEMLLDVMISSSIK

SEQ ID NO: 35113 - protein, 908 aa, Homo sapiens
  Payload ID: 6932
  Gene Symbol: GRM8
  Gene Name: glutamate receptor, metabotropic 8
  Uniprot ID: O00222
  ENSP ID: ENSP00000351142
MVCEGKRSASCPCFFLLTAKFYWILTMMQRTHSQEYAHSIRVDGDIILGGLFPVHAKGERGVPCGELKKEKGIHRLEAMLYAIDQINKDPDLLSNITLGVRILDTCSRDTYALEQSLTFVQALIEKDASDVKCANGDPPIFTKPDKISGVIGAAASSVSIMVANILRLFKIPQISYASTAPELSDNTRYDFFSRVVPPDSYQAQAMVDIVTALGWNYVSTLASEGNYGESGVEAFTQISREIGGVCIAQSQKIPREPRPGEFEKIIKRLLETPNARAVIMFANEDDIRRILEAAKKLNQSGHFLWIGSDSWGSKIAPVYQQEEIAEGAVTILPKRASIDGFDRYFRSRTLANNRRNVWFAEFWEENFGCKLGSHGKRNSHIKKCTGLERIARDSSYEQEGKVQFVIDAVYSMAYALHNMHKDLCPGYIGLCPRMSTIDGKELLGYIRAVNFNGSAGTPVTFNENGDAPGRYDIFQYQITNKSTEYKVIGHWTNQLHLKVEDMQWAHREHTHPASVCSLPCKPGERKKTVKGVPCCWHCERCEGYNYQVDELSCELCPLDQRPNMNRTGCQLIPIIKLEWHSPWAVVPVFVAILGIIATTFVIVTFVRYNDTPIVRASGRELSYVLLTGIFLCYSITFLMIAAPDTIICSFRRVFLGLGMCFSYAALLTKTNRIHRIFEQGKKSVTAPKFISPASQLVITFSLISVQLLGVFVWFVVDPPHIIIDYGEQRTLDPEKARGVLKCDISDLSLICSLGYSILLMVTCTVYAIKTRGVPETFNEAKPIGFTMYTTCIIWLAFIPIFFGTAQSAEKMYIQTTTLTVSMSLSASVSLGMLYMPKVYIIIFHPEQNVQKRKRSFKAVVTAATMQSKLIQKGNDRPNGEVKSELCESLETNSKSSVEFPMVKSGSTS

SEQ ID NO: 35114 - protein, 20 aa, Homo sapiens
  Payload ID: 6932
  Gene Symbol: GRM8
  Gene Name: glutamate receptor, metabotropic 8
  ENSP ID: ENSP00000398012
MVCEGKRSASCPCFFLLTAK

SEQ ID NO: 35115 - protein, 416 aa, Homo sapiens
  Payload ID: 6932
  Gene Symbol: GRM8
  Gene Name: glutamate receptor, metabotropic 8
  ENSP ID: ENSP00000409790
NFLYPQVEDMQWAHREHTHPASVCSLPCKPGERKKTVKGVPCCWHCERCEGYNYQVDELSCELCPLDQRPNMNRTGCQLIPIIKLEWHSPWAVVPVFVAILGIIATTFVIVTFVRYNDTPIVRASGRELSYVLLTGIFLCYSITFLMIAAPDTIICSFRRVFLGLGMCFSYAALLTKTNRIHRIFEQGKKSVTAPKFISPASQLVITFSLISVQLLGVFVWFVVDPPHIIIDYGEQRTLDPEKARGVLKCDISDLSLICSLGYSILLMVTCTVYAIKTRGVPETFNEAKPIGFTMYTTCIIWLAFIPIFFGTAQSAEKMYIQTTTLTVSMSLSASVSLGMLYMPKVYIIIFHPEQNVQKRKRSFKAVVTAATMQSKLIQKGNDRPNGEVKSELCESLETNTSSTKTTYISYSNHSI

SEQ ID NO: 35116 - protein, 293 aa, Homo sapiens
  Payload ID: 6932
  Gene Symbol: GRM8
  Gene Name: glutamate receptor, metabotropic 8
  ENSP ID: ENSP00000415522
MVCEGKRSASCPCFFLLTAKFYWILTMMQRTHSQEYAHSIRVDGDIILGGLFPVHAKGERGVPCGELKKEKGIHRLEAMLYAIDQINKDPDLLSNITLGVRILDTCSRDTYALEQSLTFVQALIEKDASDVKCANGDPPIFTKPDKISGVIGAAASSVSIMVANILRLFKIPQISYASTAPELSDNTRYDFFSRVVPPDSYQAQAMVDIVTALGWNYVSTLASEGNYGESGVEAFTQISREIGGVCIAQSQKIPREPRPGEFEKIIKRLLETPNARAVIMFANEDDIRRILEA

SEQ ID NO: 35117 - protein, 91 aa, Homo sapiens
  Payload ID: 6932
  Gene Symbol: GRM8
  Gene Name: glutamate receptor, metabotropic 8
  ENSP ID: ENSP00000418255
FFSRVVPPDSYQAQAMVDIVTALGWNYVSTLASEGNYGESGVEAFTQISREIGYPSLFGIQGCLHECFAILCQVVYQFLLLMQLSDAQTVY

SEQ ID NO: 35118 - protein, 908 aa, Homo sapiens; identical to SEQ ID NO: 35113
  Payload ID: 6932
  Gene Symbol: GRM8
  Gene Name: glutamate receptor, metabotropic 8
  Uniprot ID: O00222
  ENSP ID: ENSP00000419832

SEQ ID NO: 35119 - protein, 373 aa, Homo sapiens
  Payload ID: 6933
  Gene Symbol: GLUL
  Gene Name: glutamate-ammonia ligase
  Uniprot ID: P15104
  ENSP ID: ENSP00000307900
MTTSASSHLNKGIKQVYMSLPQGEKVQAMYIWIDGTGEGLRCKTRTLDSEPKCVEELPEWNFDGSSTLQSEGSNSDMYLVPAAMFRDPFRKDPNKLVLCEVFKYNRRPAETNLRHTCKRIMDMVSNQHPWFGMEQEYTLMGTDGHPFGWPSNGFPGPQGPYYCGVGADRAYGRDIVEAHYRACLYAGVKIAGTNAEVMPAQWEFQIGPCEGISMGDHLWVARFILHRVCEDFGVIATFDPKPIPGNWNGAGCHTNFSTKAMREENGLKYIEEAIEKLSKRHQYHIRAYDPKGGLDNARRLTGFHETSNINDFSAGVANRSASIRIPRTVGQEKKGYFEDRRPSANCDPFSVTEALIRTCLLNETGDEPFQYKN

SEQ ID NO: 35120 - protein, 373 aa, Homo sapiens; identical to SEQ ID NO: 35119
  Payload ID: 6933
  Gene Symbol: GLUL
  Gene Name: glutamate-ammonia ligase
  Uniprot ID: P15104
  ENSP ID: ENSP00000344958

SEQ ID NO: 35121 - protein, 373 aa, Homo sapiens; identical to SEQ ID NO: 35119
  Payload ID: 6933
  Gene Symbol: GLUL
  Gene Name: glutamate-ammonia ligase
  Uniprot ID: P15104
  ENSP ID: ENSP00000356537

SEQ ID NO: 35122 - protein, 373 aa, Homo sapiens; identical to SEQ ID NO: 35119
  Payload ID: 6933
  Gene Symbol: GLUL
  Gene Name: glutamate-ammonia ligase
  Uniprot ID: P15104
  ENSP ID: ENSP00000398320

SEQ ID NO: 35123 - protein, 233 aa, Homo sapiens
  Payload ID: 6933
  Gene Symbol: GLUL
  Gene Name: glutamate-ammonia ligase
  ENSP ID: ENSP00000481855
MTTSASSHLNKGIKQVYMSLPQGEKVQAMYIWIDGTGEGLRCKTRTLDSEPKCVEELPEWNFDGSSTLQSEGSNSDMYLVPAAMFRDPFRKDPNKLVLCEVFKYNRRPAETNLRHTCKRIMDMVSNQHPWFGMEQEYTLMGTDGHPFGWPSNGFQGPRVHITVVWEQTEPMAGTSWRPITGPACMLESRLRGLMPRSCLPSGNFRLDLVKESAWEIISGWPVSSCIVCVKTLE

SEQ ID NO: 35124 - protein, 637 aa, Homo sapiens
  Payload ID: 6934
  Gene Symbol: GCLC
  Gene Name: glutamate-cysteine ligase, catalytic subunit
  Uniprot ID: P48506
  ENSP ID: ENSP00000229416
MGLLSQGSPLSWEETKRHADHVRRHGILQFLHIYHAVKDRHKDVLKWGDEVEYMLVSFDHENKKVRLVLSGEKVLETLQEKGERTNPNHPTLWRPEYGSYMIEGTPGQPYGGTMSEFNTVEANMRKRRKEATSILEENQALCTITSFPRLGCPGFTLPEVKPNPVEGGASKSLFFPDEAINKHPRFSTLTRNIRHRRGEKVVINVPIFKDKNTPSPFIETFTEDDEASRASKPDHIYMDAMGFGMGNCCLQVTFQACSISEARYLYDQLATICPIVMALSAASPFYRGYVSDIDCRWGVISASVDDRTREERGLEPLKNNNYRISKSRYDSIDSYLSKCGEKYNDIDLTIDKEIYEQLLQEGIDHLLAQHVAHLFIRDPLTLFEEKIHLDDANESDHFENIQSTNWQTMRFKPPPPNSDIGWRVEFRPMEVQLTDFENSAYVVFVVLLTRVILSYKLDFLIPLSKVDENMKVAQKRDAVLQGMFYFRKDICKGGNAVVDGCGKAQNSTELAAEEYTLMSIDTIINGKEGVFPGLIPILNSYLENMEVDVDTRCSILNYLKLIKKRASGELMTVARWMREFIANHPDYKQDSVITDEMNYSLILKCNQIANELCECPELLGSAFRKVKYSGSKTDSSN

SEQ ID NO: 35125 - protein, 54 aa, Homo sapiens
  Payload ID: 6934
  Gene Symbol: GCLC
  Gene Name: glutamate-cysteine ligase, catalytic subunit
  ENSP ID: ENSP00000421228
MGLLSQGSPLSWEETKRHADHVRRHGILQFLHIYHAVKDRHKDVLKWGDEVTNL

SEQ ID NO: 35126 - protein, 122 aa, Homo sapiens
  Payload ID: 6934
  Gene Symbol: GCLC
  Gene Name: glutamate-cysteine ligase, catalytic subunit
  ENSP ID: ENSP00000421629
MLVSFDHENKKVRLVLSGEKVLETLQEKGERTNPNHPTLWRPEYGSYMIEGTPGQPYGGTMSEFNTVEANMRKRRKEATSILEENQALCTITSFPRLSWVHTARGQTQPSGRRSFQVPLLSR

SEQ ID NO: 35127 - protein, 252 aa, Homo sapiens
  Payload ID: 6934
  Gene Symbol: GCLC
  Gene Name: glutamate-cysteine ligase, catalytic subunit
  ENSP ID: ENSP00000421908
MGLLSQGSPLSWEETKRHADHVRRHGILQFLHIYHAVKDRHKDVLKWGDEVEYMLVSFDHENKKVRLVLSGEKVLETLQEKGERTNPNHPTLWRPEYGSYMIEGTPGQPYGGTMSEFNTVEANMRKRRKEATSILEENQALCTITSFPRLGCPGFTLPEVKPNPVEGGASKSLFFPDEAINKHPRFSTLTRNIRHRRGEKVVINVPIFKDKNTPSPFIETFTEDDEASRASKPDHIYMDAMGFGMGNCCLQV

SEQ ID NO: 35128 - protein, 154 aa, Homo sapiens
  Payload ID: 6934
  Gene Symbol: GCLC
  Gene Name: glutamate-cysteine ligase, catalytic subunit
  ENSP ID: ENSP00000423615
MLVSFDHENKKVRLVLSGEKVLETLQEKGERTNPNHPTLWRPEYGSYMIEGTPGQPYGGTMSEFNTVEANMRKRRKEATSILEENQALCTITSFPRLGCPGFTLPEVKPNPVEGGASKSLFFPDEAINKHPRFSTLTRNIRHRRGEKVVINVPI

SEQ ID NO: 35129 - protein, 173 aa, Homo sapiens
  Payload ID: 6934
  Gene Symbol: GCLC
  Gene Name: glutamate-cysteine ligase, catalytic subunit
  ENSP ID: ENSP00000424211
  MOD_RES (1)..(1): Any amino acid
XETKRHADHVRRHGILQFLHIYHAVKDRHKDVLKWGDEVEYMLVSFDHENKKVRLVLSGEKVLETLQEKGERTNPNHPTLWRPEYGSYMIEGTPGQPYGGTMSEFNTVEANMRKRRKEATSILEENQALCTITSFPSTLTRNIRHRRGEKVVINVPIFKDKNTPSPFIETFTE

SEQ ID NO: 35130 - protein, 93 aa, Homo sapiens
  Payload ID: 6934
  Gene Symbol: GCLC
  Gene Name: glutamate-cysteine ligase, catalytic subunit
  ENSP ID: ENSP00000426578
NIQSTNWQTMRFKPPPPNSDIGWRVEFRPMEVQLTDFENSAYVVFVVLLTRVILSYKLDFLIPLSKVRICFFMVMGIDLSVDIFIYICYLFPT

SEQ ID NO: 35131 - protein, 18 aa, Homo sapiens
  Payload ID: 6934
  Gene Symbol: GCLC
  Gene Name: glutamate-cysteine ligase, catalytic subunit
  ENSP ID: ENSP00000427403
MLVSFDHENKKVRLVLSG

SEQ ID NO: 35132 - protein, 599 aa, Homo sapiens
  Payload ID: 6934
  Gene Symbol: GCLC
  Gene Name: glutamate-cysteine ligase, catalytic subunit
  ENSP ID: ENSP00000482756
MGLLSQGSPLSWEETKRHADHVRRHGILQFLHIYHAVKDRHKDVLKWGDEVEYMLVSFDHENKKVRLVLSGEKVLETLQEKGERTNPNHPTLWRPEYGSYMIEGTPGQPYGGTMSEFNTVEANMRKRRKEATSILEENQALCTITSFPSTLTRNIRHRRGEKVVINVPIFKDKNTPSPFIETFTEDDEASRASKPDHIYMDAMGFGMGNCCLQVTFQACSISEARYLYDQLATICPIVMALSAASPFYRGYVSDIDCRWGVISASVDDRTREERGLEPLKNNNYRISKSRYDSIDSYLSKCGEKYNDIDLTIDKEIYEQLLQEGIDHLLAQHVAHLFIRDPLTLFEEKIHLDDANESDHFENIQSTNWQTMRFKPPPPNSDIGWRVEFRPMEVQLTDFENSAYVVFVVLLTRVILSYKLDFLIPLSKVDENMKVAQKRDAVLQGMFYFRKDICKGGNAVVDGCGKAQNSTELAAEEYTLMSIDTIINGKEGVFPGLIPILNSYLENMEVDVDTRCSILNYLKLIKKRASGELMTVARWMREFIANHPDYKQDSVITDEMNYSLILKCNQIANELCECPELLGSAFRKVKYSGSKTDSSN

SEQ ID NO: 35133 - protein, 274 aa, Homo sapiens
  Payload ID: 6935
  Gene Symbol: GCLM
  Gene Name: glutamate-cysteine ligase, modifier subunit
  Uniprot ID: P48507
  ENSP ID: ENSP00000359258
MGTDSRAAKALLARARTLHLQTGNLLNWGRLRKKCPSTHSEELHDCIQKTLNEWSSQINPDLVREFPDVLECTVSHAVEKINPDEREEMKVSAKLFIVESNSSSSTRSAVDMACSVLGVAQLDSVIIASPPIEDGVNLSLEHLQPYWEELENLVQSKKIVAIGTSDLDKTQLEQLYQWAQVKPNSNQVNLASCCVMPPDLTAFAKQFDIQLLTHNDPKELLSEASFQEALQESIPDIQAHEWVPLWLLRYSVIVKSRGIIKSKGYILQAKRRGS

SEQ ID NO: 35134 - protein, 252 aa, Homo sapiens
  Payload ID: 6935
  Gene Symbol: GCLM
  Gene Name: glutamate-cysteine ligase, modifier subunit
  Uniprot ID: P48507
  ENSP ID: ENSP00000484507
MGTDSRAAKALLARARTLHLQTGNLLNWGRLRKKCPSTHSEEEFPDVLECTVSHAVEKINPDEREEMKVSAKLFIVESNSSSSTRSAVDMACSVLGVAQLDSVIIASPPIEDGVNLSLEHLQPYWEELENLVQSKKIVAIGTSDLDKTQLEQLYQWAQVKPNSNQVNLASCCVMPPDLTAFAKQFDIQLLTHNDPKELLSEASFQEALQESIPDIQAHEWVPLWLLRYSVIVKSRGIIKSKGYILQAKRRGS

SEQ ID NO: 35135 - protein, 443 aa, Homo sapiens
  Payload ID: 6936
  Gene Symbol: ERICH1
  Gene Name: glutamate-rich 1
  Uniprot ID: Q86X53
  ENSP ID: ENSP00000262109
MAAHRKHVFVEKVLQRLFPPVPSGQGKREPQTLAVQNPPKKVTSEKVSQKHAEPLTDTGSETPTARRLYTASGPPEGYVPCWPEPSSCGSPENASSGDDTEDQDPHDQPKRRRIRKHKSKKKFKNPNNVLIEQAELEKQQSLLQEKSQRQHTDGTTISKNKKRKLKKKQQIKRKKAAGLAAKAAGVSFMYQPEDSSNEGEGVGEACEEDGVDTSEEDPTLAGEEDVKDTREEDGADASEEDLTRARQEEGADASEEDPTPAGEEDVKDAREEDGVDTIEEDLTRAGEEDGKDTREEDGADASEEDPTWAGEEEGADSGEEDGADASEEDDTITNEKAHSILNFLKSTQEMYFYDGVSRDAASAALADAAEELLDRLASHSMLPSDVSILYHMKTLLLLQDTERLKHALEMFPEHCTMPPDHARVISAFFSYWITHILPEKSSD

SEQ ID NO: 35136 - protein, 223 aa, Homo sapiens
  Payload ID: 6936
  Gene Symbol: ERICH1
  Gene Name: glutamate-rich 1
  ENSP ID: ENSP00000428556
  MOD_RES (1)..(1): Any amino acid
XDGADASEEDLTRARQEEGADASEEDPTPAGEEDVKDAREEDGVDTIEEDLTRAGEEDGKDTREEDGADASEEDPTWAGEEEGADSGEEDGADASEEDDTITNEKAHSILNFLKSTQEMYFYDGVSRDAASAALADAAEELLDRLASHSMLPSDVSILYHMKTLLLLQDTERLKHALEMFPEHCTMPPGKYRTIYSRSCLRYSHRGLPLKDLHATKTAMSWKI

SEQ ID NO: 35137 - protein, 345 aa, Homo sapiens
  Payload ID: 6936
  Gene Symbol: ERICH1
  Gene Name: glutamate-rich 1
  ENSP ID: ENSP00000428635
MAAHRKHDQDPHDQPKRRRIRKHKSKKKFKNPNNVLIEQAELEKQQSLLQEKSQRQHTDGTTISKNKKRKLKKKQQIKRKKAAGLAAKAAGVSFMYQPEDSSNEGEGVGEACEEDGVDTSEEDPTLAGEEDVKDTREEDGADASEEDLTRARQEEGADASEEDPTPAGEEDVKDAREEDGVDTIEEDLTRAGEEDGKDTREEDGADASEEDPTWAGEEEGADSGEEDGADASEEDDTITNEKAHSILNFLKSTQEMYFYDGVSRDAASAALADAAEELLDRLASHSMLPSDVSILYHMKTLLLLQDTERLKHALEMFPEHCTMPPGVLSRLKAKKIRRGKREGLP

SEQ ID NO: 35138 - protein, 124 aa, Homo sapiens
  Payload ID: 6936
  Gene Symbol: ERICH1
  Gene Name: glutamate-rich 1
  ENSP ID: ENSP00000430296
  MOD_RES (1)..(1): Any amino acid
XFLKSTQEMYFYDGVSRDAASAALADAAEELLDRLASHSMLPSDVSILYHMKTLLLLQDTERLKHALEMFPEHCTMPPGGKSEAQRAWANGTGHTAHQWLHVSSDLGLLLSVFPISMTLTDAGV

SEQ ID NO: 35139 - protein, 7 aa, Homo sapiens
  Payload ID: 6936
  Gene Symbol: ERICH1
  Gene Name: glutamate-rich 1
  ENSP ID: ENSP00000488494
MAAHRKH

SEQ ID NO: 35140 - protein, 7 aa, Homo sapiens
  Payload ID: 6936
  Gene Symbol: ERICH1
  Gene Name: glutamate-rich 1
  ENSP ID: ENSP00000488567
MAAHRKH

SEQ ID NO: 35141 - protein, 156 aa, Homo sapiens
  Payload ID: 6937
  Gene Symbol: ERICH2
  Gene Name: glutamate-rich 2
  Uniprot ID: A1L162
  ENSP ID: ENSP00000387298
METVNEPETGEVSKDAVIVKQEKNNEYCLQDIDDKLSESAEDDGEDDTNDEDDDEDSNPKKNTQAPLELMAEFLRAEMAREYQLAKKLCQMILIYEPENPEAKEFFTLIEEMLLMEKTQNHEQDGENSDEDSSGESKGESDEELSDESSDEGEDGS

SEQ ID NO: 35142 - protein, 1530 aa, Homo sapiens
  Payload ID: 6938
  Gene Symbol: ERICH3
  Gene Name: glutamate-rich 3
  Uniprot ID: Q5RHP9
  ENSP ID: ENSP00000322609
MSHSHPAGLLAAYNSLMDKHLAGYFNNTRIRRHLLRSGLITRSGRILSEKEYKLNMMKRDHQKYIRECLAQAIFHKVLDMERYHQLEIKKKLETLARKERIQRFKGEHTRRSVENNMPILSPHPPVGPKSNRGHSVLVDEGHSSPLALTAPRPYTAPGNMQPPIRLQPLPSNPAVETVPKVTSRSRSKTSLLENEALFPIGGKKAVMKFRNSIGNSQRMNSYQLPNINSYMMPIPPPLPPTGKITRENRSETWRRRRFRPTTAPNGLEPLLTKDSRRIHKTSLHSNAAITMIYLGKNVHLSSDNPDFRDEIKVYQQHCGGENLCVYKGKLLEKETFQFISKRHHGFPFSLTFFLNGMQVNRLSSCCEYKHRKGSRLGGKRGYFGFVCVERSSPCYKCIIAMGLDKKPSLPKSRKEKSTEKGEELKKAEGKVRKEREYVIPKRNEIKENKTSVSAKFSAQEIKTGLKEVVTAVEEMTSKGKPGQEVLEDDQENTLKYEYEEDFEVDEEKQGEKSNEEGQADVQMNGIPQSPLDDKKDNLDPEKESETSSQKAPDARDNVKDENDGCSESELEEDKQDMKTASSTSSRSHPYSSDSEDESAVGDREAHTDSSTDESARRSSSQELSENDKPRKSHLPIEESLEIEIEDQEITKADVETKPMPIDESFENVLKEGTEKGTQEIAEGLSEKSGKHVSAEEKEKDKSKLWEESTAQVKDKKAGLPGLEEGGKDSLPLAYVLALGAPTMNFMVDETAAINSNKESQQLVQKTYTLEKKEAMEEDEAPQHRDADIVQGKGEAALWGEAGAVHEAPLRAWKPTAEQPELAEEFTEKREIPPGIERGAEGAAEAEGVRRLGEGGSDPIGQAAAKDAVGLSKDEAPEKQALMLTVLETDKAASEGEQGLEKAVLANEAAALNLEHLHEVAALREAATSEEGEAEGGVAVSDVGESEEEASIDLEDTGPMEDTASKREDGSEEAILGGEEPAKERKEVMRTETRLSPFTGEAEASRMQVSEGSPEEGSLAKEAFLCKEDVEGEEMVTEAEANREDDRKEILPKELDLARERRKAERPKTSLRKTDSEREEVTRANALKDEDAFKEEQKLKAEEGETETEVRAEEETKAPPNEMGSDAENEAPVEASELSDNPGLLGEDSLKETVVPIFEATPGFEKSLENITALRKEGGGERLSEARDTEHKDREELSSRENRALKEGHRQDGEGALAAPEAEPAGKVQAPEGLIPATGQAEELAAKDHDSCAGLEGRAEGQGGVDVVLRTQEAVAEEDPIMAEKFREEAVDEDPEEEEDKECTLETEAMQDRNSEGDGDMEGEGNTQKNEGMGGGRVVAVEVLHGGGETAETAAEEREVLAGSETAEEKTIANKASSFSDVAEEETWHQQDELVGKTAAAGKVVVEELARSGEEVPAAEEMTVTYTTEAGVGTPGALERKTSGLGQEQEEGSEGQEAATGSGDGRQETGAAEKFRLGLSREGERELSPESLQAMATLPVKPDFTETREKQQHMVQGESETADVSPNNVQV

SEQ ID NO: 35143 - protein, 533 aa, Homo sapiens
  Payload ID: 6938
  Gene Symbol: ERICH3
  Gene Name: glutamate-rich 3
  Uniprot ID: Q5RHP9
  ENSP ID: ENSP00000398581
MLAKGKKAVMKFRNSIGNSQRMNSYQLPNINSYMMPIPPPLPPTGKITRENRSETWRRRRFRPTTAPNGLEPLLTKDSRRIHKTSLHSNAAITMIYLGKNVHLSSDNPDFRDEIKVYQQHCGGENLCVYKGKLLEKETFQFISKRHHGFPFSLTFFLNGMQVNRLSSCCEYKHRKGSRLGGKRGYFGFVCVERSSPCYKCIIAMGLDKKPSLPKSRKEKSTEKGEELKKAEGKVRKEREYVIPKRNEIKENKTSVSAKFSAQEIKTGLKEVVTAVEEMTSKGKPGQEVLEDDQENTLKYEYEEDFEVDEEKQGEKSNEEGQADVQMNGIPQSPLDDKKDNLDPEKESETSSQKAPDARDNVKDENDGCSESELEEDKQDMKTASSTSSRSHPYSSDSEDESAVGDREAHTDSSTDESARRSSSQELSENDKPRKSHLPIEESLEIEIEDQEITKADVETKPMPIDESFENVLKEGTEKGTQEIAEGLSEKSGKHVSAEEKEKDKSKLWEESTAQVKDKKAGLPGLEEGGKYGR

SEQ ID NO: 35144 - protein, 110 aa, Homo sapiens
  Payload ID: 6938
  Gene Symbol: ERICH3
  Gene Name: glutamate-rich 3
  ENSP ID: ENSP00000473404
MLAKGKKAVMKFRNSIGNSQRMNSYQLPNINSYMMPIPPPLPPTGKITRENRSETWRRRRFRPTTAPNGLEPLLTKLSCTCLRNLKRNEKESHKQLVKEIRKKSFSYAGA

SEQ ID NO: 35145 - protein, 130 aa, Homo sapiens
  Payload ID: 6939
  Gene Symbol: ERICH4
  Gene Name: glutamate-rich 4
  Uniprot ID: A6NGS2
  ENSP ID: ENSP00000367429
MELWRQLNQAGLVPPGLGPPPQALREVSPVEIPGQTLRTAGADTGGACDSLLWIREELGNLRRVDVQLLGQLCSLGLEMGALREELVTILEEEEESSKEEEEDQEPQRKQEEEHLEACPAPHPPDFEMMI

SEQ ID NO: 35146 - protein, 374 aa, Homo sapiens
  Payload ID: 6940
  Gene Symbol: ERICH5
  Gene Name: glutamate-rich 5
  Uniprot ID: Q6P6B1
  ENSP ID: ENSP00000315614
MGCSSSALNKAGDSSRFPSVTSNEHFSTAEESESCFAQPKPHALGRESTVDGNVQRESRPPLQKLKVSAEPTANGVKPLQEQPLAKDVAPGRDATDQSGSTEKTQPGEGLEESGPPQPGGKEDAPAAEGKKKDAGAGTEAESLKGNAEAQPLGPEAKGQPLQAAVEKDSLRAVEVTENPQTAAEMKPLGTTENVLTLQIAGELQPQGTVGKDEQAPLLETISKENESPEILEGSQFVETAEEQQLQATLGKEEQPQLLERIPKENVTPEVLDRSQLVEKPVMNDPFHKTPEGPGNMEQIQPEGIVGSMEHPARNVEAGAYVEMIRNIHTNEEDQRIEGETGEKVETDMENEKVSEGAETKEEETGEVVDLSAAT

SEQ ID NO: 35147 - protein, 56 aa, Homo sapiens
  Payload ID: 6940
  Gene Symbol: ERICH5
  Gene Name: glutamate-rich 5
  Uniprot ID: Q6P6B1
  ENSP ID: ENSP00000440297
MGCSSSALNKAGDSSRFPSGETGEKVETDMENEKVSEGAETKEEETGEVVDLSAAT

SEQ ID NO: 35148 - protein, 663 aa, Homo sapiens
  Payload ID: 6941
  Gene Symbol: ERICH6
  Gene Name: glutamate-rich 6
  Uniprot ID: Q7L0X2
  ENSP ID: ENSP00000295910
MAHLRSPSGFGDPGKKDQKESEEELEEEEEEEEVEEEEEEVEEEEEEVEEEEEEVVEEELVGEEQELEAPETFSEEYLWKVTDIGDYDDDFPDVRPRLASIVSPSLTSTFVPSQSATSTETPSASPPSSTSSHKSFPKIFQTFRKDMSEMSIDRNIHRNLSPGIPVSVQTEESWLQDLSDKVQSRKKASKEKAEPECLASKLREKWVINPEESKLNILYELEFKEDFITLFEPSLRTLPSIGPPSILAYKEESSNLGINFKDEEEETSPKCEFCGSDLRAFFSNVDVSSEPKGHASCCIAFQNLIDYIYEEQIKTKPPKAELIAIDPHAAHGSEVDRLKAKEKALQRKQEQRMARHFAIISREQTHFSEDDSKRLKTISYQLSVDIPEKQIIDDIVFDFQLRNSNMSIICCDSRIACGKVVRNELLEKHYKHGSKFLTSFPDGTTQIFYPSGNLAIIRVPNKVNGFTCIVQEDMPTNPAILAVLDSSGRSSCYHPNGNVWVYINILGGQYSDQAGNRIRAWNWSNSITSSPFVSFKPVFLALNRYIGVRILEQDKISITFLAMGQQARISVGTKVKLPNPEEIPILRYVSGDDLLLLASLIKIRRLFHKLEGCVNFPSSQVWEKLKQPSYLSSLSLKLIALCHSSGIKQDIMKTIRNIINEEI

SEQ ID NO: 35149 - protein, 135 aa, Homo sapiens
  Payload ID: 6941
  Gene Symbol: ERICH6
  Gene Name: glutamate-rich 6
  ENSP ID: ENSP00000417780
MAHLRSPSGFGDPGKKDQKESEEELEEEEEEEEVEEEEEEVTDIGDYDDDFPDVRPRLASIVSPSLTSTFVPSQSATSTETPSASPPSSTSSHKSFPKIFQTFRKDMSEMSIDRNIHRNLSPGIPVSVQTEESWL

SEQ ID NO: 35150 - protein, 164 aa, Homo sapiens
  Payload ID: 6941
  Gene Symbol: ERICH6
  Gene Name: glutamate-rich 6
  ENSP ID: ENSP00000419304
MAHLRSPSGFGDPGKKDQKESEEELEEEEEEEEVEEEEEEVEEEEEEVEEEEEEVTDIGDYDDDFPDVRPRLASIVSPSLTSTFVPSQSATSTETPSASPPSSTSSHKSFPKIFQTFRKDMSEMSIDRNIHRNLSPGIPVSVQTEESWLQDLSDKVQSRKKASK

SEQ ID NO: 35151 - protein, 517 aa, Homo sapiens
  Payload ID: 6941
  Gene Symbol: ERICH6
  Gene Name: glutamate-rich 6
  Uniprot ID: Q7L0X2
  ENSP ID: ENSP00000419366
MSEMSIDRNIHRNLSPGIPVSVQTEESWLQDLSDKVQSRKKASKEKAEPECLASKLREKWVINPEESKLNILYELEFKEDFITLFEPSLRTLPSIGPPSILAYKEESSNLGINFKDEEEETSPKCEFCGSDLRAFFSNVDVSSEPKGHASCCIAFQNLIDYIYEEQIKTKPPKAELIAIDPHAAHGSEVDRLKAKEKALQRKQEQRMARHFAIISREQTHFSEDDSKRLKTISYQLSVDIPEKQIIDDIVFDFQLRNSNMSIICCDSRIACGKVVRNELLEKHYKHGSKFLTSFPDGTTQIFYPSGNLAIIRVPNKVNGFTCIVQEDMPTNPAILAVLDSSGRSSCYHPNGNVWVYINILGGQYSDQAGNRIRAWNWSNSITSSPFVSFKPVFLALNRYIGVRILEQDKISITFLAMGQQARISVGTKVKLPNPEEIPILRYVSGDDLLLLASLIKIRRLFHKLEGCVNFPSSQVWEKLKQPSYLSSLSLKLIALCHSSGIKQDIMKTIRNIINEEI

SEQ ID NO: 35152 - protein, 696 aa, Homo sapiens
  Payload ID: 6942
  Gene Symbol: ERICH6B
  Gene Name: glutamate-rich 6B
  Uniprot ID: Q5W0A0
  ENSP ID: ENSP00000298738
MSAENNQLSGASPPHPPTTPQYSTQNLPSEKEDTEVELDEESLQDESPFSPEGESLEDKEYLEEEEDLEEEEYLGKEEYLKEEEYLGKEEHLEEEEYLEKAGYLEEEEYIEEEEYLGKEGYLEEEEYLGKEEHLEEEEYLGKEGYLEKEDYIEEVDYLGKKAYLEEEEYLGKKSYLEEEKALEKEENLEEEEALEKEENLDGKENLYKKYLKEPKASYSSQTMLLRDARSPDAGPSQVTTFLTVPLTFATPSPVSESATESSELLLTLYRRSQASQTDWCYDRTAVKSLKSKSETEQETTTKLAPEEHVNTKVQQKKEENVLEFASKENFWDGITDESIDKLEVEDLDENFLNSSYQTVFKTIIKEMAAHNELEEDFDIPLTKLLESENRWKLVIMLKKNYEKFKETILRIKRRREAQKLTEMTSFTFHLMSKPTPEKPETEEIQKPQRVVHHRKKLERDKEWIQKKTVVHQGDGKLILYPNKNVYQILFPDGTGQIHYPSGNLAMLILYAKMKKFTYIILEDSLEGRIRALINNSGNATFYDENSDIWLNLSSNLGYYFPKDKRQKAWNWWNLNIHVHAPPVQPISLKINEYIQVQIRSQDKIIFCFTYEQKQICLNLGTRYKFVIPEVLSEMKKKTILEAEPGPTAQKIRVLLGKMNRLLNYATTPDLENFIEAVSISLMDNKYLKKMLSKLWF

SEQ ID NO: 35153 - protein, 446 aa, Homo sapiens
  Payload ID: 6943
  Gene Symbol: GRWD1
  Gene Name: glutamate-rich WD repeat containing 1
  Uniprot ID: Q9BQ67
  ENSP ID: ENSP00000253237
MAARKGRRRTCETGEPMEAESGDTSSEGPAQVYLPGRGPPLREGEELVMDEEAYVLYHRAQTGAPCLSFDIVRDHLGDNRTELPLTLYLCAGTQAESAQSNRLMMLRMHNLHGTKPPPSEGSDEEEEEEDEEDEEERKPQLELAMVPHYGGINRVRVSWLGEEPVAGVWSEKGQVEVFALRRLLQVVEEPQALAAFLRDEQAQMKPIFSFAGHMGEGFALDWSPRVTGRLLTGDCQKNIHLWTPTDGGSWHVDQRPFVGHTRSVEDLQWSPTENTVFASCSADASIRIWDIRAAPSKACMLTTATAHDGDVNVISWSRREPFLLSGGDDGALKIWDLRQFKSGSPVATFKQHVAPVTSVEWHPQDSGVFAASGADHQITQWDLAVERDPEAGDVEADPGLADLPQQLLFVHQGETELKELHWHPQCPGLLVSTALSGFTIFRTISV

SEQ ID NO: 35154 - protein, 228 aa, Homo sapiens
  Payload ID: 6943
  Gene Symbol: GRWD1
  Gene Name: glutamate-rich WD repeat containing 1
  ENSP ID: ENSP00000468943
MMLRMHNLHGTKPPPSEGSDEEEEEEDEEDEEERKPQLELAMVPHYGGINRVRVSWLGEEPVAGVWSEKGQVEVFALRRLLQVVEEPQALAAFLRDEQAQMKPIFSFAGHMGEGFALDWSPRVTGRLLTGDCQKNIHLWTPTDGGSWHVDQRPFVGHTRSVEDLQWSPTENTVFASCSADASIRIWDIRAAPSKACMLTTATAHDGDVNVISWSRREPFLLSGGDDGA

SEQ ID NO: 35155 - protein, 523 aa, Homo sapiens
  Payload ID: 6944
  Gene Symbol: GPT2
  Gene Name: glutamic pyruvate transaminase (alanine aminotransferase) 2
  Uniprot ID: Q8TD30
  ENSP ID: ENSP00000345282
MQRAAALVRRGCGPRTPSSWGRSQSSAAAEASAVLKVRPERSRRERILTLESMNPQVKAVEYAVRGPIVLKAGEIELELQRGIKKPFTEVIRANIGDAQAMGQQPITFLRQVMALCTYPNLLDSPSFPEDAKKRARRILQACGGNSLGSYSASQGVNCIREDVAAYITRRDGGVPADPDNIYLTTGASDGISTILKILVSGGGKSRTGVMIPIPQYPLYSAVISELDAIQVNYYLDEENCWALNVNELRRAVQEAKDHCDPKVLCIINPGNPTGQVQSRKCIEDVIHFAWEEKLFLLADEVYQDNVYSPDCRFHSFKKVLYEMGPEYSSNVELASFHSTSKGYMGECGYRGGYMEVINLHPEIKGQLVKLLSVRLCPPVSGQAAMDIVVNPPVAGEESFEQFSREKESVLGNLAKKAKLTEDLFNQVPGIHCNPLQGAMYAFPRIFIPAKAVEAAQAHQMAPDMFYCMKLLEETGICVVPGSGFGQREGTYHFRMTILPPVEKLKTVLQKVKDFHINFLEKYA

SEQ ID NO: 35156 - protein, 423 aa, Homo sapiens
  Payload ID: 6944
  Gene Symbol: GPT2
  Gene Name: glutamic pyruvate transaminase (alanine aminotransferase) 2
  Uniprot ID: Q8TD30
  ENSP ID: ENSP00000413804
MGQQPITFLRQVMALCTYPNLLDSPSFPEDAKKRARRILQACGGNSLGSYSASQGVNCIREDVAAYITRRDGGVPADPDNIYLTTGASDGISTILKILVSGGGKSRTGVMIPIPQYPLYSAVISELDAIQVNYYLDEENCWALNVNELRRAVQEAKDHCDPKVLCIINPGNPTGQVQSRKCIEDVIHFAWEEKLFLLADEVYQDNVYSPDCRFHSFKKVLYEMGPEYSSNVELASFHSTSKGYMGECGYRGGYMEVINLHPEIKGQLVKLLSVRLCPPVSGQAAMDIVVNPPVAGEESFEQFSREKESVLGNLAKKAKLTEDLFNQVPGIHCNPLQGAMYAFPRIFIPAKAVEAAQAHQMAPDMFYCMKLLEETGICVVPGSGFGQREGTYHFRMTILPPVEKLKTVLQKVKDFHINFLEKYA

SEQ ID NO: 35157 - protein, 177 aa, Homo sapiens
  Payload ID: 6944
  Gene Symbol: GPT2
  Gene Name: glutamic pyruvate transaminase (alanine aminotransferase) 2
  ENSP ID: ENSP00000457475
MQRGIKKPFTEVIRANIGDAQAMGQQPITFLRQVMALCTYPNLLDSPSFPEDAKKRARRILQACGGNSLGSYSASQGVNCIREDVAAYITRRDGGVPADPDNIYLTTGASDGISTILKILVSGGGKSRTGVMIPIPQYPLYSAVISELDAIQVNYYLDEENCWALNVNELRRAVQEA

SEQ ID NO: 35158 - protein, 413 aa, Homo sapiens
  Payload ID: 6945
  Gene Symbol: GOT1
  Gene Name: glutamic-oxaloacetic transaminase 1, soluble
  Uniprot ID: P17174
  ENSP ID: ENSP00000359539
MAPPSVFAEVPQAQPVLVFKLTADFREDPDPRKVNLGVGAYRTDDCHPWVLPVVKKVEQKIANDNSLNHEYLPILGLAEFRSCASRLALGDDSPALKEKRVGGVQSLGGTGALRIGADFLARWYNGTNNKNTPVYVSSPTWENHNAVFSAAGFKDIRSYRYWDAEKRGLDLQGFLNDLENAPEFSIVVLHACAHNPTGIDPTPEQWKQIASVMKHRFLFPFFDSAYQGFASGNLERDAWAIRYFVSEGFEFFCAQSFSKNFGLYNERVGNLTVVGKEPESILQVLSQMEKIVRITWSNPPAQGARIVASTLSNPELFEEWTGNVKTMADRILTMRSELRARLEALKTPGTWNHITDQIGMFSFTGLNPKQVEYLVNEKHIYLLPSGRINVSGLTTKNLDYVATSIHEAVTKIQ

SEQ ID NO: 35159 - protein, 421 aa, Homo sapiens
  Payload ID: 6946
  Gene Symbol: GOT1L1
  Gene Name: glutamic-oxaloacetic transaminase 1-like 1
  Uniprot ID: Q8NHS2
  ENSP ID: ENSP00000303077
MPTLSVFMDVPLAHKLEGSLLKTYKQDDYPNKIFLAYRVCMTNEGHPWVSLVVQKTRLQISQDPSLNYEYLPTMGLKSFIQASLALLFGKHSQAIVENRVGGVHTVGDSGAFQLGVQFLRAWHKDARIVYIISSQKELHGLVFQDMGFTVYEYSVWDPKKLCMDPDILLNVVEQIPHGCVLVMGNIIDCKLTPSGWAKLMSMIKSKQIFPFFDIPCQGLYTSDLEEDTRILQYFVSQGFEFFCSQSLSKNFGIYDEGVGMLVVVAVNNQQLLCVLSQLEGLAQALWLNPPNTGARVITSILCNPALLGEWKQSLKEVVENIMLTKEKVKEKLQLLGTPGSWGHITEQSGTHGYLGLNSQQVEYLVRKKHIYIPKNGQINFSCINANNINYITEGINEAVLLTESSEMCLPKEKKTLIGIKL

SEQ ID NO: 35160 - protein, 121 aa, Homo sapiens
  Payload ID: 6946
  Gene Symbol: GOT1L1
  Gene Name: glutamic-oxaloacetic transaminase 1-like 1
  ENSP ID: ENSP00000429558
MLVVVAVNNQQLLCVLSQLEGLAQALWLNPPNTGARVITSILCNPALLGEWKQSLKEVVENIMLTKEKVKEKLQLLGTPGSWGHITEQSGTHGYLGLNCKGLGGWCPPFLTFGLYLSIKLH

SEQ ID NO: 35161 - protein, 168 aa, Homo sapiens
  Payload ID: 6946
  Gene Symbol: GOT1L1
  Gene Name: glutamic-oxaloacetic transaminase 1-like 1
  ENSP ID: ENSP00000430453
MDVPLAHKLEGSLLKTYKQDDYPNKIFLAYRGTFPQPHGVQERFVCRLSAELSPGGPNQASGAPSVVFLTVCMTNEGHPWVSLVVQKTRLQISQDPSLNYEYLPTMGLKSFIQASLALLFGKHSQAIVENRVGGVHTVGDSGAFQLGVQFLRAWHKDARIVYIISSQK

SEQ ID NO: 35162 - protein, 430 aa, Homo sapiens
  Payload ID: 6947
  Gene Symbol: GOT2
  Gene Name: glutamic-oxaloacetic transaminase 2, mitochondrial
  Uniprot ID: P00505
  ENSP ID: ENSP00000245206
MALLHSGRVLPGIAAAFHPGLAAAASARASSWWTHVEMGPPDPILGVTEAFKRDTNSKKMNLGVGAYRDDNGKPYVLPSVRKAEAQIAAKNLDKEYLPIGGLAEFCKASAELALGENSEVLKSGRFVTVQTISGTGALRIGASFLQRFFKFSRDVFLPKPTWGNHTPIFRDAGMQLQGYRYYDPKTCGFDFTGAVEDISKIPEQSVLLLHACAHNPTGVDPRPEQWKEIATVVKKRNLFAFFDMAYQGFASGDGDKDAWAVRHFIEQGINVCLCQSYAKNMGLYGERVGAFTMVCKDADEAKRVESQLKILIRPMYSNPPLNGARIAAAILNTPDLRKQWLQEVKVMADRIIGMRTQLVSNLKKEGSTHNWQHITDQIGMFCFTGLKPEQVERLIKEFSIYMTKDGRISVAGVTSSNVGYLAHAIHQVTK

SEQ ID NO: 35163 - protein, 387 aa, Homo sapiens
  Payload ID: 6947
  Gene Symbol: GOT2
  Gene Name: glutamic-oxaloacetic transaminase 2, mitochondrial
  Uniprot ID: P00505
  ENSP ID: ENSP00000394100
MALLHSGRVLPGIAAAFHPGLAAAASARASSWWTHVEMGPPDPILGVTEAFKRDTNSKKMNLGVGAYRDDNGKPYVLPSVRKFVTVQTISGTGALRIGASFLQRFFKFSRDVFLPKPTWGNHTPIFRDAGMQLQGYRYYDPKTCGFDFTGAVEDISKIPEQSVLLLHACAHNPTGVDPRPEQWKEIATVVKKRNLFAFFDMAYQGFASGDGDKDAWAVRHFIEQGINVCLCQSYAKNMGLYGERVGAFTMVCKDADEAKRVESQLKILIRPMYSNPPLNGARIAAAILNTPDLRKQWLQEVKVMADRIIGMRTQLVSNLKKEGSTHNWQHITDQIGMFCFTGLKPEQVERLIKEFSIYMTKDGRISVAGVTSSNVGYLAHAIHQVTK

SEQ ID NO: 35164 - protein, 59 aa, Homo sapiens
  Payload ID: 6947
  Gene Symbol: GOT2
  Gene Name: glutamic-oxaloacetic transaminase 2, mitochondrial
  ENSP ID: ENSP00000456205
MALLHSGRVLPGIAAAFHPGLAAAASARARQRPRLPQKIWTRNTCPLGDWLNFARHLQN

SEQ ID NO: 35165 - protein, 496 aa, Homo sapiens
  Payload ID: 6948
  Gene Symbol: GPT
  Gene Name: glutamic-pyruvate transaminase (alanine aminotransferase)
  Uniprot ID: P24298
  ENSP ID: ENSP00000378408
MASSTGDRSQAVRHGLRAKVLTLDGMNPRVRRVEYAVRGPIVQRALELEQELRQGVKKPFTEVIRANIGDAQAMGQRPITFLRQVLALCVNPDLLSSPNFPDDAKKRAERILQACGGHSLGAYSVSSGIQLIREDVARYIERRDGGIPADPNNVFLSTGASDAIVTVLKLLVAGEGHTRTGVLIPIPQYPLYSATLAELGAVQVDYYLDEERAWALDVAELHRALGQARDHCRPRALCVINPGNPTGQVQTRECIEAVIRFAFEERLFLLADEVYQDNVYAAGSQFHSFKKVLMEMGPPYAGQQELASFHSTSKGYMGECGFRGGYVEVVNMDAAVQQQMLKLMSVRLCPPVPGQALLDLVVSPPAPTDPSFAQFQAEKQAVLAELAAKAKLTEQVFNEAPGISCNPVQGAMYSFPRVQLPPRAVERAQELGLAPDMFFCLRLLEETGICVVPGSGFGQREGTYHFRMTILPPLEKLRLLLEKLSRFHAKFTLEYS

SEQ ID NO: 35166 - protein, 496 aa, Homo sapiens; identical to SEQ ID NO: 35165
  Payload ID: 6948
  Gene Symbol: GPT
  Gene Name: glutamic-pyruvate transaminase (alanine aminotransferase)
  Uniprot ID: P24298
  ENSP ID: ENSP00000433586

SEQ ID NO: 35167 - protein, 669 aa, Homo sapiens
  Payload ID: 6949
  Gene Symbol: GLS
  Gene Name: glutaminase
  Uniprot ID: O94925
  ENSP ID: ENSP00000317379
MMRLRGSGMLRDLLLRSPAGVSATLRRAQPLVTLCRRPRGGGRPAAGPAAAARLHPWWGGGGWPAEPLARGLSSSPSEILQELGKGSTHPQPGVSPPAAPAAPGPKDGPGETDAFGNSEGKELVASGENKIKQGLLPSLEDLLFYTIAEGQEKIPVHKFITALKSTGLRTSDPRLKECMDMLRLTLQTTSDGVMLDKDLFKKCVQSNIVLLTQAFRRKFVIPDFMSFTSHIDELYESAKKQSGGKVADYIPQLAKFSPDLWGVSVCTVDGQRHSTGDTKVPFCLQSCVKPLKYAIAVNDLGTEYVHRYVGKEPSGLRFNKLFLNEDDKPHNPMVNAGAIVVTSLIKQGVNNAEKFDYVMQFLNKMAGNEYVGFSNATFQSERESGDRNFAIGYYLKEKKCFPEGTDMVGILDFYFQLCSIEVTCESASVMAATLANGGFCPITGERVLSPEAVRNTLSLMHSCGMYDFSGQFAFHVGLPAKSGVAGGILLVVPNVMGMMCWSPPLDKMGNSVKGIHFCHDLVSLCNFHNYDNLRHFAKKLDPRREGGDQRVKSVINLLFAAYTGDVSALRRFALSAMDMEQRDYDSRTALHVAAAEGHVEVVKFLLEACKVNPFPKDRWNNTPMDEALHFGHHDVFKILQEYQVQYTPQGDSDNGKENQTVHKNLDGLL

SEQ ID NO: 35168 - protein, 598 aa, Homo sapiens
  Payload ID: 6949
  Gene Symbol: GLS
  Gene Name: glutaminase
  Uniprot ID: O94925
  ENSP ID: ENSP00000340689
MMRLRGSGMLRDLLLRSPAGVSATLRRAQPLVTLCRRPRGGGRPAAGPAAAARLHPWWGGGGWPAEPLARGLSSSPSEILQELGKGSTHPQPGVSPPAAPAAPGPKDGPGETDAFGNSEGKELVASGENKIKQGLLPSLEDLLFYTIAEGQEKIPVHKFITALKSTGLRTSDPRLKECMDMLRLTLQTTSDGVMLDKDLFKKCVQSNIVLLTQAFRRKFVIPDFMSFTSHIDELYESAKKQSGGKVADYIPQLAKFSPDLWGVSVCTVDGQRHSTGDTKVPFCLQSCVKPLKYAIAVNDLGTEYVHRYVGKEPSGLRFNKLFLNEDDKPHNPMVNAGAIVVTSLIKQGVNNAEKFDYVMQFLNKMAGNEYVGFSNATFQSERESGDRNFAIGYYLKEKKCFPEGTDMVGILDFYFQLCSIEVTCESASVMAATLANGGFCPITGERVLSPEAVRNTLSLMHSCGMYDFSGQFAFHVGLPAKSGVAGGILLVVPNVMGMMCWSPPLDKMGNSVKGIHFCHDLVSLCNFHNYDNLRHFAKKLDPRREGGDQRHSFGPLDYESLQQELALKETVWKKVSPESNEDISTTVVYRMESLGEKS

SEQ ID NO: 35169 - protein, 169 aa, Homo sapiens
  Payload ID: 6949
  Gene Symbol: GLS
  Gene Name: glutaminase
  ENSP ID: ENSP00000386417
MAATLANGGFCPITGERVLSPEAVRNTLSLMHSCGMYDFSGQFAFHVGLPAKSGVAGGILLVVPNVMGMMCWSPPLDKMGNSVKGIHFCHDLVSLCNFHNYDNLRHFAKKLDPRREGGDQRHSFGPLDYESLQQELALKETVWKKVSPESNEDISTTVVYRMESLGEKS

SEQ ID NO: 35170 - protein, 103 aa, Homo sapiens
  Payload ID: 6949
  Gene Symbol: GLS
  Gene Name: glutaminase
  ENSP ID: ENSP00000387135
MGMMCWSPPLDKMGNSVKGIHFCHDLVSLCNFHNYDNLRHFAKKLDPRREGGDQRHSFGPLDYESLQQELALKETVWKKVSPESNEDISTTVVYRMESLGEKS

SEQ ID NO: 35171 - protein, 174 aa, Homo sapiens
  Payload ID: 6949
  Gene Symbol: GLS
  Gene Name: glutaminase
  ENSP ID: ENSP00000387177
MGMMCWSPPLDKMGNSVKGIHFCHDLVSLCNFHNYDNLRHFAKKLDPRREGGDQRVKSVINLLFAAYTGDVSALRRFALSAMDMEQRDYDSRTALHVAAAEGHVEVVKFLLEACKVNPFPKDRWNNTPMDEALHFGHHDVFKILQEYQVQYTPQGDSDNGKENQTVHKNLDGLL

SEQ ID NO: 35172 - protein, 114 aa, Homo sapiens
  Payload ID: 6949
  Gene Symbol: GLS
  Gene Name: glutaminase
  ENSP ID: ENSP00000388990
ESAKKQSGGKVADYIPQLAKFSPDLWGVSVCTVDGQRHSTGDTKVPFCLQSCVKPLKYAIAVNDLGTEYVHRYVGKEPSGLRFNKLFLNEDDKPHNPMVNAGAIVVTSLIKDWW

SEQ ID NO: 35173 - protein, 164 aa, Homo sapiens
  Payload ID: 6949
  Gene Symbol: GLS
  Gene Name: glutaminase
  ENSP ID: ENSP00000395596
MAATLANGGFCPITGERVLSPEAVRNTLSLMHSCGMYDFSGQFAFHVGLPAKSGVAGGILLVVPNVMGMMCWSPPLDKMGNSVKGIHFCHDLVSLCNFHNYDNLRHFAKKLDPRREGGDQRVKSVINLLFAAYTGDVSALRRFALSAMDMEQRDYDSRTALHVA

SEQ ID NO: 35174 - protein, 182 aa, Homo sapiens
  Payload ID: 6949
  Gene Symbol: GLS
  Gene Name: glutaminase
  ENSP ID: ENSP00000403329
AKSGVAGGILLVVPNVMGMMCWSPPLDKMGNSVKGIHFCHDLVSLCNFHNYDNLRHFAKKLDPRREGGDQRVKSVINLLFAAYTGDVSALRRFALSAMDMEQRDYDSRTALHVAAAEGGITLPWMKHCTLDTMMYLKFSKNTKSSTHLKEILTTGRKIKPSIRILMDCCNGLKSQDLNHLPI

SEQ ID NO: 35175 - protein, 602 aa, Homo sapiens
  Payload ID: 6950
  Gene Symbol: GLS2
  Gene Name: glutaminase 2 (liver, mitochondrial)
  Uniprot ID: Q9UI32
  ENSP ID: ENSP00000310447
MRSMKALQKALSRAGSHCGRGGWGHPSRSPLLGGGVRHHLSEAAAQGRETPHSHQPQHQDHDSSESGMLSRLGDLLFYTIAEGQERIPIHKFTTALKATGLQTSDPRLRDCMSEMHRVVQESSSGGLLDRDLFRKCVSSNIVLLTQAFRKKFVIPDFEEFTGHVDRIFEDVKELTGGKVAAYIPQLAKSNPDLWGVSLCTVDGQRHSVGHTKIPFCLQSCVKPLTYAISISTLGTDYVHKFVGKEPSGLRYNKLSLNEEGIPHNPMVNAGAIVVSSLIKMDCNKAEKFDFVLQYLNKMAGNEYMGFSNATFQSEKETGDRNYAIGYYLKEKKCFPKGVDMMAALDLYFQLCSVEVTCESGSVMAATLANGGICPITGESVLSAEAVRNTLSLMHSCGMYDFSGQFAFHVGLPAKSAVSGAILLVVPNVMGMMCLSPPLDKLGNSHRGTSFCQKLVSLFNFHNYDNLRHCARKLDPRREGAEIRNKTVVNLLFAAYSGDVSALRRFALSAMDMEQKDYDSRTALHVAAAEGHIEVVKFLIEACKVNPFAKDRWGNIPLDDAVQFNHLEVVKLLQDYQDSYTLSETQAEAAAEALSKENLESMV

SEQ ID NO: 35176 - protein, 177 aa, Homo sapiens
  Payload ID: 6950
  Gene Symbol: GLS2
  Gene Name: glutaminase 2 (liver, mitochondrial)
  ENSP ID: ENSP00000416282
MRSMKALQKALSRAGSHCGRGGWGHPSRSPLLGGGVRHHLSEAAAQGRETPHSHQPQHQDHDSSESGMLSRLGDLLFYTIAEGQERIPIHKFTTALKATGLQTSDPRLRDCMSEMHRVVQESSSGGLLDRDLFRKWQPTSLSWPSQTQTCGVSPCALWMVNGTLWATQRSPSACSPV

SEQ ID NO: 35177 - protein, 184 aa, Homo sapiens
  Payload ID: 6950
  Gene Symbol: GLS2
  Gene Name: glutaminase 2 (liver, mitochondrial)
  ENSP ID: ENSP00000417244
MRSMKALQKALSRAGSHCGRGGWGHPSRSPLLGGGVRHHLSEAAAQGRETPHSHQPQHQDHDSSESGMLSRLGDLLFYTIAEGQERIPIHKFTTALKATGLQTSDPRLRDCMSEMHRVVQESSSGGLLDRDLFRKWTVTKQRSLILCCSISTKWLGMNTWVSAMPHSSQRRKQGIGIMPSAIIS

SEQ ID NO: 35178 - protein, 62 aa, Homo sapiens
  Payload ID: 6950
  Gene Symbol: GLS2
  Gene Name: glutaminase 2 (liver, mitochondrial)
  ENSP ID: ENSP00000417723
MRSMKALQKALSRAGSHCGRGGWGHPSRSPLLGGGVRHHLSEAAAQGRETPHSHQPQHQDQH

SEQ ID NO: 35179 - protein, 157 aa, Homo sapiens
  Payload ID: 6950
  Gene Symbol: GLS2
  Gene Name: glutaminase 2 (liver, mitochondrial)
  ENSP ID: ENSP00000417796
MRSMKALQKALSRAGSHCGRGGWGHPSRSPLLGGGVRHHLSEAAAQGRETPHSHQPQHQDHDSSESGMLSRLGDLLFYTIAEGQERIPIHKFTTALKATGLQTSDPRLRDCMSEMHRVVQESSSGGLLDRDLFRKCCSISTKWLGMNTWVSAMPLLS

SEQ ID NO: 35180 - protein, 209 aa, Homo sapiens
  Payload ID: 6950
  Gene Symbol: GLS2
  Gene Name: glutaminase 2 (liver, mitochondrial)
  Uniprot ID: Q9UI32
  ENSP ID: ENSP00000419661
MRSMKALQKALSRAGSHCGRGGWGHPSRSPLLGGGVRHHLSEAAAQGRETPHSHQPQHQDHDSSESGMLSRLGDLLFYTIAEGQERIPIHKFTTALKATGLQTSDPRLRDCMSEMHRVVQESSSGGLLDRDLFRKHSERSLSFLILRSSRAMWIASLRMSKSSLEAKWQPTSLSWPSQTQTCGVSPCALWMVNGTLWATQRSPSACSPV

SEQ ID NO: 35181 - protein, 103 aa, Homo sapiens
  Payload ID: 6950
  Gene Symbol: GLS2
  Gene Name: glutaminase 2 (liver, mitochondrial)
  ENSP ID: ENSP00000419996
MRSMKALQKALSRAGSHCGRGGWGHPSRSPLLGGGVRHHLSEAAAQGRETPHSHQPQHQDQWQPTSLSWPSQTQTCGVSPCALWMVNGTLWATQRSPSACSPV

SEQ ID NO: 35182 - protein, 327 aa, Homo sapiens
  Payload ID: 6950
  Gene Symbol: GLS2
  Gene Name: glutaminase 2 (liver, mitochondrial)
  ENSP ID: ENSP00000420328
MRSMKALQKALSRAGSHCGRGGWGHPSRSPLLGGGVRHHLSEAAAQGRETPHSHQPQHQDHDSSESGMLSRLGDLLFYTIAEGQERIPIHKFTTALKATGLQTSDPRLRDCMSEMHRVVQESSSGGLLDRDLFRKCVSSNIVLLTQAFRKKFVIPDFEEFTGHVDRIFEDVKELTGGKVAAYIPQLAKSNPDLWGVSLCTVDGQRHSVGHTKIPFCLQSCVKPLTYAISISTLGTDYVHKFVGKEPSGLRYNKLSLNEEGIPHNPMVNAGAIVVSSLIKMDCNKAEKFDFVLQYLNKMAGNEYMGFSNATEGNFSPSPNTHSSNFKY

SEQ ID NO: 35183 - protein, 280 aa, Homo sapiens
  Payload ID: 6950
  Gene Symbol: GLS2
  Gene Name: glutaminase 2 (liver, mitochondrial)
  ENSP ID: ENSP00000441739
MLQKEEQVAVLRPHFPPHSLPPNSDSSESGMLSRLGDLLFYTIAEGQERIPIHKFTTALKATGLQTSDPRLRDCMSEMHRVVQESSSGGLLDRDLFRKCVSSNIVLLTQAFRKKFVIPDFEEFTGHVDRIFEDVKELTGGKVAAYIPQLAKSNPDLWGVSLCTVDGQRHSVGHTKIPFCLQSCVKPLTYAISISTLGTDYVHKFVGKEPSGLRYNKLSLNEEGIPHNPMVNAGAIVVSSLIKMDCNKAEKFDFVLQYLNKMAGNEYMGFSNATAFLRGWT

SEQ ID NO: 35184 - protein, 337 aa, Homo sapiens
  Payload ID: 6950
  Gene Symbol: GLS2
  Gene Name: glutaminase 2 (liver, mitochondrial)
  ENSP ID: ENSP00000483010
MVNAGAIVVSSLIKMDCNKAEKFDFVLQYLNKMAGNEYMGFSNATFQSEKETGDRNYAIGYYLKEKKCFPKGVDMMAALDLYFQLCSVEVTCESGSVMAATLANGGICPITGESVLSAEAVRNTLSLMHSCGMYDFSGQFAFHVGLPAKSAVSGAILLVVPNVMGMMCLSPPLDKLGNSHRGTSFCQKLVSLFNFHNYDNLRHCARKLDPRREGAEIRNKTVVNLLFAAYSGDVSALRRFALSAMDMEQKDYDSRTALHVAAAEGHIEVVKFLIEACKVNPFAKDRWGNIPLDDAVQFNHLEVVKLLQDYQDSYTLSETQAEAAAEALSKENLESMV

SEQ ID NO: 35185 - protein, 337 aa, Homo sapiens; identical to SEQ ID NO: 35184
  Payload ID: 6950
  Gene Symbol: GLS2
  Gene Name: glutaminase 2 (liver, mitochondrial)
  ENSP ID: ENSP00000485315

SEQ ID NO: 35186 - protein, 1735 aa, Homo sapiens
  Payload ID: 6951
  Gene Symbol: QSER1
  Gene Name: glutamine and serine rich 1
  Uniprot ID: Q2KHR3
  ENSP ID: ENSP00000382241
MNFLSTAESRTAQAAASGTTLLPQFRAPSWQTGMHSSAATELFATGPLPSTGTLPPSLSAYQHPTTFSNRNFATTSPLVLQDSTFNTTSNGILSHHDPLLQIKTSQGTVPTALAFERLGSSVLSNSIPPQSSTYRSAQESAPHLLQPQFSLLPSALGGSQQTPQAYSSTLFTSSTASIERALLRECSVIKHHQRPSGTQSIQAQLTGSQHSLHSYLSNSSVVNFQETTRQSSLSCSPIGDSTQVSNGGLQQKTSQVSVELAQSYSSAIPSSGYPPSTTKIKSCSTEQPLTSTKTPKPQSIIPPVQTLSYSKPLHNQSSVISGQAQIYSTAQLPSLLSVSQSQNYGLVQPHNVPSIVHSQVYRSSKVEKLPPLYKTLTFSGSSQTVTPENQTLNYSSNQQEVLSSVTNENYPAQTRDLSSVSQSQSYSSGHSQGLSPVSQTQVSYSSQSQVLSVVSLSESYASGESLTLTAPSLSYSSASRAQNLPDSSPTQNYISMHSSQNVQTQESSSPQSQKFLPAVQSSSFASSTHCQTLQNNITSPDPKSYAERKLDSDVYPSSKQEDGFPMQELQVLQPQASLESSTQRLSDGEINAQESTYKVSKADDRYSQSVIRSNSRLEDQVIGVALQASKKEESVVGSVTQLNQQIGQVNNAATLDLKNSTNLIQTPQIRLNTKDLKQQHPLILKVHESKVQEQHDQIINASSQIQIPNHALGHGHQASLPNTQVLLDSACDLQILQQSILQAGLGQVKASLQAQRVQSPQQIVHPFLQMEGHVIQSNGDHSQQQLHPQNSEVMKMDLSESSKPLQQHLTTKGHFSETNQHDSKNQFVSLGSMCFPEAVLLSDERNILSNVDDILAATAAACGVTPTDFSKSTSNETMQAVEDGDSKSHFQQSLDVRHVTSDFNSMTATVGKPQNINDTSLNGNQVTVNLSPVPALQSKMTLDQQHIETPGQNIPTKVTSAVVGPSHEVQEQSSGPFKKQSATNLESEEDSEAPVDSTLNNNRNQEFVSSSRSISGENATSESEFTLGGDDSGVSMNPARSALALLAMAQSGDAVSVKIEEENQDLMHFNLQKKRAKGKGQVKEEDNSNQKQLKRPAQGKRQNPRGTDIYLPYTPPSSESCHDGYQHQEKMRQKIKEVEEKQPEVKTGFIASFLDFLKSGPKQQFSTLAVRMPNRTRRPGTQMVRTFCPPPLPKPSSTTPTPLVSETGGNSPSDKVDNELKNLEHLSSFSSDEDDPGYSQDAYKSVSTPLTTLDATSDKKKKTEALQVATTSPTANTTGTATTSSTTVGAVKQEPLHSTSYAVNILENISSSESSKPIELDGLPSDQFAKGQDTVAIEGFTDEEDTESGGEGQYRERDEFVVKIEDIETFKEALKTGKEPPAIWKVQKALLQKFVPEIRDGQREFAATNSYLGYFGDAKSKYKRIYVKFIENANKKEYVRVCSKKPRNKPSQTIRTVQAKPSSSSKTSDPLASKTTTTKAPSVKPKVKQPKVKAEPPPKKRKKWKEEFSSSQSDSSPEIHTSSSDDEEFEPPAPFVTRFLNTRAMKETFKSYMELLVSIALDPDTMQALEKSNDELLLPHMKKIDGMLNDNRKRLLLNLHLDQSFKNALESFPELTIITRDSKAKSGGTAISKIKMNGKAYNKKTLRTSKTTTKSAQEFAVDPEKIQLYSLYHSLHHYKYHVYLICKDEISSVQKKNEDLGQEEIVQLCMKNVKWVEDLFEKFGELLNHVQQKCS

SEQ ID NO: 35187 - protein, 780 aa, Homo sapiens
  Payload ID: 6951
  Gene Symbol: QSER1
  Gene Name: glutamine and serine rich 1
  ENSP ID: ENSP00000432136
  MOD_RES (1)..(1): Any amino acid
XSATNLESEEDSEAPVDSTLNNNRNQEFVSSSRSISGENATSESEFTLGGDDSGVSMNPARSALALLAMAQSGDAVSVKIEEENQDLMHFNLQKKRAKGKGQVKEEDNSNQKQLKRPAQGKRQNPRGTDIYLPYTPPSSESCHDGYQHQEKMRQKIKEVEEKQPEVKTGFIASFLDFLKSGPKQQFSTLAVRMPNRTRRPGTQMVRTFCPPPLPKPSSTTPTPLVSETGGNSPSDKVDNELKNLEHLSSFSSDEDDPGYSQDAYKSVSTPLTTLDATSDKKKKTEALQVATTSPTANTTGTATTSSTTVGAVKQEPLHSTSYAVNILENISSSESSKPIELDGLPSDQFAKGQDTVAIEGFTDEEDTESGGEGQYRERDEFVVKIEDIETFKEALKTGKEPPAIWKVQKALLQKFVPEIRDGQREFAATNSYLGYFGDAKSKYKRIYVKFIENANKKEYVRVCSKKPRNKPSQTIRTVQAKPSSSSKTSDPLASKTTTTKAPSVKPKVKQPKVKAEPPPKKRKKWKEEFSSSQSDSSPEIHTSSSDDEEFEPPAPFVTRFLNTRAMKETFKSYMELLVSIALDPDTMQALEKSNDELLLPHMKKIDGMLNDNRKRLLLNLHLDQSFKNALESFPELTIITRDSKAKSGGTAISKIKMNGKAYNKKTLRTSKTTTKSAQEFAVDPEKIQLYSLYHSLHHYKYHVYLICKDEVISSHLLKKNVFQNVKETLAIVFWSVLKRVVKYMCVCILSMYSVNNDLIYCSESLCYVLCSDLPEPHHLL

SEQ ID NO: 35188 - protein, 1529 aa, Homo sapiens
  Payload ID: 6951
  Gene Symbol: QSER1
  Gene Name: glutamine and serine rich 1
  Uniprot ID: Q2KHR3
  ENSP ID: ENSP00000432766
MNFLSTAESRTAQAAASGTTLLPQFRAPSWQTGMHSSAATELFATGPLPSTGTLPPSLSAYQHPTTFSNRNFATTSPLVLQDSTFNTTSNGILSHHDPLLQIKTSQGTVPTALAFERLGSSVLSNSIPPQSSTYRSAQESAPHLLQPQFSLLPSALGGSQQTPQAYSSTLFTSSTASIERALLRECSVIKHHQRPSGTQSIQAQLTGSQHSLHSYLSNSSVVNFQETTRQSSLSCSPIGDSTQNLPDSSPTQNYISMHSSQNVQTQESSSPQSQKFLPAVQSSSFASSTHCQTLQNNITSPDPKSYAERKLDSDVYPSSKQEDGFPMQELQVLQPQASLESSTQRLSDGEINAQESTYKVSKADDRYSQSVIRSNSRLEDQVIGVALQASKKEESVVGSVTQLNQQIGQVNNAATLDLKNSTNLIQTPQIRLNTKDLKQQHPLILKVHESKVQEQHDQIINASSQIQIPNHALGHGHQASLPNTQVLLDSACDLQILQQSILQAGLGQVKASLQAQRVQSPQQIVHPFLQMEGHVIQSNGDHSQQQLHPQNSEVMKMDLSESSKPLQQHLTTKGHFSETNQHDSKNQFVSLGSMCFPEAVLLSDERNILSNVDDILAATAAACGVTPTDFSKSTSNETMQAVEDGDSKSHFQQSLDVRHVTSDFNSMTATVGKPQNINDTSLNGNQVTVNLSPVPALQSKMTLDQQHIETPGQNIPTKVTSAVVGPSHEVQEQSSGPFKKQSATNLESEEDSEAPVDSTLNNNRNQEFVSSSRSISGENATSESEFTLGGDDSGVSMNPARSALALLAMAQSGDAVSVKIEEENQDLMHFNLQKKRAKGKGQVKEEDNSNQKQLKRPAQGKRQNPRGTDIYLPYTPPSSESCHDGYQHQEKMRQKIKEVEEKQPEVKTGFIASFLDFLKSGPKQQFSTLAVRMPNRTRRPGTQMVRTFCPPPLPKPSSTTPTPLVSETGGNSPSDKVDNELKNLEHLSSFSSDEDDPGYSQDAYKSVSTPLTTLDATSDKKKKTEALQVATTSPTANTTGTATTSSTTVGAVKQEPLHSTSYAVNILENISSSESSKPIELDGLPSDQFAKGQDTVAIEGFTDEEDTESGGEGQYRERDEFVVKIEDIETFKEALKTGKEPPAIWKVQKALLQKFVPEIRDGQREFAATNSYLGYFGDAKSKYKRIYVKFIENANKKEYVRVCSKKPRNKPSQTIRTVQAKPSSSSKTSDPLASKTTTTKAPSVKPKVKQPKVKAEPPPKKRKKWKEEFSSSQSDSSPEIHTSSSDDEEFEPPAPFVTRFLNTRAMKETFKSYMELLVSIALDPDTMQALEKSNDELLLPHMKKIDGMLNDNRKRLLLNLHLDQSFKNALESFPELTIITRDSKAKSGGTAISKIKMNGKAYNKKTLRTSKTTTKSAQEFAVDPEKIQLYSLYHSLHHYKYHVYLICKDEISSVQKKNEDLGQEEIVQLCMKNVKWVEDLFEKFGELLNHTGMLGEMQSVSVSSTRRSEQQNILEAGKSKIKVPVSGDC

SEQ ID NO: 35189 - protein, 64 aa, Homo sapiens
  Payload ID: 6951
  Gene Symbol: QSER1
  Gene Name: glutamine and serine rich 1
  ENSP ID: ENSP00000436870
MNFLSTAESRTAQAAASGTTLLPQFRAPSWQTGMHSSAATELFATGPLPSTGTLPPSLSAYQHP

SEQ ID NO: 35190 - protein, 1663 aa, Homo sapiens
  Payload ID: 6952
  Gene Symbol: QRICH2
  Gene Name: glutamine rich 2
  Uniprot ID: Q9H0J4
  ENSP ID: ENSP00000262765
MKDAAEELSFARVLLQRVDELEKLFKDREQFLELVSRKLSLVPGAEEVTMVTWEELEQAITDGWRASQAGSETLMGFSKHGGFTSLTSPEGTLSGDSTKQPSIEQALDSASGLGPDRTASGSGGTAHPSDGVSSREQSKVPSGTGRQQQPRARDEAGVPRLHQSSTFQFKSDSDRHRSREKLTSTQPRRNARPGPVQQDLPLARDQPSSVPASQSQVHLRPDRRGLEPTGMNQPGLVPASTYPHGVVPLSMGQLGVPPPEMDDRELIPFVVDEQRMLPPSVPGRDQQGLELPSTDQHGLVSVSAYQHGMTFPGTDQRSMEPLGMDQRGCVISGMGQQGLVPPGIDQQGLTLPVVDQHGLVLPFTDQHGLVSPGLMPISADQQGFVQPSLEATGFIQPGTEQHDLIQSGRFQRALVQRGAYQPGLVQPGADQRGLVRPGMDQSGLAQPGADQRGLVWPGMDQSGLAQPGRDQHGLIQPGTGQHDLVQSGTGQGVLVQPGVDQPGMVQPGRFQRALVQPGAYQPGLVQPGADQIDVVQPGADQHGLVQSGADQSDLAQPGAVQHGLVQPGVDQRGLAQPRADHQRGLVPPGADQRGLVQPGADQHGLVQPGVDQHGLAQPGEVQRSLVQPGIVQRGLVQPGAVQRGLVQPGAVQRGLVQPGVDQRGLVQPGAVQRGLVQPGAVQHGLVQPGADQRGLVQPGVDQRGLVQPGVDQRGLVQPGMDQRGLIQPGADQPGLVQPGAGQLGMVQPGIGQQGMVQPQADPHGLVQPGAYPLGLVQPGAYLHDLSQSGTYPRGLVQPGMDQYGLRQPGAYQPGLIAPGTKLRGSSTFQADSTGFISVRPYQHGMVPPGREQYGQVSPLLASQGLASPGIDRRSLVPPETYQQGLMHPGTDQHSPIPLSTGLGSTHPDQQHVASPGPGEHDQVYPDAAQHGHAFSLFDSHDSMYPGYRGPGYLSADQHGQEGLDPNRTRASDRHGIPAQKAPGQDVTLFRSPDSVDRVLSEGSEVSSEVLSERRNSLRRMSSSFPTAVETFHLMGELSSLYVGLKESMKDLDEEQAGQTDLEKIQFLLAQMVKRTIPPELQEQLKTVKTLAKEVWQEKAKVERLQRILEGEGNQEAGKELKAGELRLQLGVLRVTVADIEKELAELRESQDRGKAAMENSVSEASLYLQDQLDKLRMIIESMLTSSSTLLSMSMAPHKAHTLAPGQIDPEATCPACSLDVSHQVSTLVRRYEQLQDMVNSLAVSRPSKKAKLQRQDEELLGRVQSAILQVQGDCEKLNITTSNLIEDHRQKQKDIAMLYQGLEKLEKEKANREHLEMEIDVKADKSALATKVSRVQFDATTEQLNHMMQELVAKMSGQEQDWQKMLDRLLTEMDNKLDRLELDPVKQLLEDRWKSLRQQLRERPPLYQADEAAAMRRQLLAHFHCLSCDRPLETPVTGHAIPVTPAGPGLPGHHSIRPYTVFELEQVRQHSRNLKLGSAFPRGDLAQMEQSVGRLRSMHSKMLMNIEKVQIHFGGSTKASSQIIRELLHAQCLGSPCYKRVTDMADYTYSTVPRRCGGSHTLTYPYHRSRPQHLPRGLYPTEEIQIAMKHDEVDILGLDGHIYKGRMDTRLPGILRKDSSGTSKRKSQQPRPHVHRPPSLSSNGQLPSRPQSAQISAGNTSER

SEQ ID NO: 35191 - protein, 495 aa, Homo sapiens
  Payload ID: 6952
  Gene Symbol: QRICH2
  Gene Name: glutamine rich 2
  ENSP ID: ENSP00000394461
DSVDRVLSEGSEVSSEVLSERRNSLRRMSSSFPTAVETFHLMGELSSLYVGLKESMKDLDEEQAGQTDLEKIQFLLAQMVKRTIPPELQEQLKTVKTLAKEVWQEKAKVERLQRILEGEGNQEAGKELKAGELRLQLGVLRVTVADIEKELAELRESQDRGKAAMENSVSEASLYLQDQLDKLRMIIESMLTSSSTLLSMSMAPHKAHTLAPGQIDPEATCPACSLDVSHQVSTLVRRYEQLQDMVNSLAVSRPSKKAKLQRQDEELLGRVQSAILQVQGDCEKLNITTSNLIEDHRQKQKDIAMLYQGLEKLEKEKANREHLEMEIDVKADKSALATKVSRVQFDATTEQLNHMMQELVAKMSGQEQDWQKMLDRLLTEMDNKAARHPPKRQLRDLKAQVPAAQAPRAQAAIPQQQWPAALSATERPDFGWQHLRKIDLPPRAVSPSRTQPTRPAPPRWQTGGWRGTWTCLLGRGSRSPRGGRGPAPLSERRCK

SEQ ID NO: 35192 - protein, 108 aa, Homo sapiens
  Payload ID: 6952
  Gene Symbol: QRICH2
  Gene Name: glutamine rich 2
  ENSP ID: ENSP00000432679
MKDAAEELSFARVLLQRVDELEKLFKDREQFLELVSRKLSLVPGAEEVTMVTWEELEQAITDGWRASQAAGVQWCDLGSLQPSPLGLKQSSCLSLPGSWDHSQKDHTS

SEQ ID NO: 35193 - protein, 280 aa, Homo sapiens
  Payload ID: 6952
  Gene Symbol: QRICH2
  Gene Name: glutamine rich 2
  ENSP ID: ENSP00000433329
  MOD_RES (1)..(1): Any amino acid
XKMSGQEQDWQKMLDRLLTEMDNKLDRLELDPVKQLLEDRWKSLRQQLRERPPLYQADEAAAMRRQLLAHFHCLSCDRPLETPVTGHAIPVTPAGPGLPGHHSIRPYTVFELEQVRQHSRNLKLGSAFPRGDLAQMEQSVGRLRSMHSKMLMNIEKVQIHFGGSTKASSQIIRELLHAQCLGSPCYKRMMRWTSWAWMATFTRDGWTQGCQASSEKTAQGPQSASPSSPGPTCTGRHPSAAMASCPLGHRAPRFRLATPQKDRPSSEGRLSQPNTAHPPS

SEQ ID NO: 35194 - protein, 699 aa, Homo sapiens
  Payload ID: 6953
  Gene Symbol: GFPT1
  Gene Name: glutamine--fructose-6-phosphate transaminase 1
  Uniprot ID: Q06210
  ENSP ID: ENSP00000349860
MCGIFAYLNYHVPRTRREILETLIKGLQRLEYRGYDSAGVGFDGGNDKDWEANACKIQLIKKKGKVKALDEEVHKQQDMDLDIEFDVHLGIAHTRWATHGEPSPVNSHPQRSDKNNEFIVIHNGIITNYKDLKKFLESKGYDFESETDTETIAKLVKYMYDNRESQDTSFTTLVERVIQQLEGAFALVFKSVHFPGQAVGTRRGSPLLIGVRSEHKLSTDHIPILYRTARTQIGSKFTRWGSQGERGKDKKGSCNLSRVDSTTCLFPVEEKAVEYYFASDASAVIEHTNRVIFLEDDDVAAVVDGRLSIHRIKRTAGDHPGRAVQTLQMELQQIMKGNFSSFMQKEIFEQPESVVNTMRGRVNFDDYTVNLGGLKDHIKEIQRCRRLILIACGTSYHAGVATRQVLEELTELPVMVELASDFLDRNTPVFRDDVCFFLSQSGETADTLMGLRYCKERGALTVGITNTVGSSISRETDCGVHINAGPEIGVASTKAYTSQFVSLVMFALMMCDDRISMQERRKEIMLGLKRLPDLIKEVLSMDDEIQKLATELYHQKSVLIMGRGYHYATCLEGALKIKEITYMHSEGILAGELKHGPLALVDKLMPVIMIIMRDHTYAKCQNALQQVVARQGRPVVICDKEDTETIKNTKRTIKVPHSVDCLQGILSVIPLQLLAFHLAVLRGYDVDFPRNLAKSVTVE

SEQ ID NO: 35195 - protein, 681 aa, Homo sapiens
  Payload ID: 6953
  Gene Symbol: GFPT1
  Gene Name: glutamine--fructose-6-phosphate transaminase 1
  Uniprot ID: Q06210
  ENSP ID: ENSP00000354347
MCGIFAYLNYHVPRTRREILETLIKGLQRLEYRGYDSAGVGFDGGNDKDWEANACKIQLIKKKGKVKALDEEVHKQQDMDLDIEFDVHLGIAHTRWATHGEPSPVNSHPQRSDKNNEFIVIHNGIITNYKDLKKFLESKGYDFESETDTETIAKLVKYMYDNRESQDTSFTTLVERVIQQLEGAFALVFKSVHFPGQAVGTRRGSPLLIGVRSEHKLSTDHIPILYRTGKDKKGSCNLSRVDSTTCLFPVEEKAVEYYFASDASAVIEHTNRVIFLEDDDVAAVVDGRLSIHRIKRTAGDHPGRAVQTLQMELQQIMKGNFSSFMQKEIFEQPESVVNTMRGRVNFDDYTVNLGGLKDHIKEIQRCRRLILIACGTSYHAGVATRQVLEELTELPVMVELASDFLDRNTPVFRDDVCFFLSQSGETADTLMGLRYCKERGALTVGITNTVGSSISRETDCGVHINAGPEIGVASTKAYTSQFVSLVMFALMMCDDRISMQERRKEIMLGLKRLPDLIKEVLSMDDEIQKLATELYHQKSVLIMGRGYHYATCLEGALKIKEITYMHSEGILAGELKHGPLALVDKLMPVIMIIMRDHTYAKCQNALQQVVARQGRPVVICDKEDTETIKNTKRTIKVPHSVDCLQGILSVIPLQLLAFHLAVLRGYDVDFPRNLAKSVTVE

SEQ ID NO: 35196 - protein, 682 aa, Homo sapiens
  Payload ID: 6954
  Gene Symbol: GFPT2
  Gene Name: glutamine-fructose-6-phosphate transaminase 2
  Uniprot ID: O94808
  ENSP ID: ENSP00000253778
MCGIFAYMNYRVPRTRKEIFETLIKGLQRLEYRGYDSAGVAIDGNNHEVKERHIQLVKKRGKVKALDEELYKQDSMDLKVEFETHFGIAHTRWATHGVPSAVNSHPQRSDKGNEFVVIHNGIITNYKDLRKFLESKGYEFESETDTETIAKLIKYVFDNRETEDITFSTLVERVIQQLEGAFALVFKSVHYPGEAVATRRGSPLLIGVRSKYKLSTEQIPILYRTCTLENVKNICKTRMKRLDSSACLHAVGDKAVEFFFASDASAIIEHTNRVIFLEDDDIAAVADGKLSIHRVKRSASDDPSRAIQTLQMELQQIMKGNFSAFMQKEIFEQPESVFNTMRGRVNFETNTVLLGGLKDHLKEIRRCRRLIVIGCGTSYHAAVATRQVLEELTELPVMVELASDFLDRNTPVFRDDVCFFISQSGETADTLLALRYCKDRGALTVGVTNTVGSSISRETDCGVHINAGPEIGVASTKAYTSQFISLVMFGLMMSEDRISLQNRRQEIIRGLRSLPELIKEVLSLEEKIHDLALELYTQRSLLVMGRGYNYATCLEGALKIKEITYMHSEGILAGELKHGPLALIDKQMPVIMVIMKDPCFAKCQNALQQVTARQGRPIILCSKDDTESSKFAYKTIELPHTVDCLQGILSVIPLQLLSFHLAVLRGYDVDFPRNLAKSVTVE

SEQ ID NO: 35197 - protein, 178 aa, Homo sapiens
  Payload ID: 6954
  Gene Symbol: GFPT2
  Gene Name: glutamine-fructose-6-phosphate transaminase 2
  ENSP ID: ENSP00000422771
MPTEVALLHVSQSPTKAATRRPAHPECGAPIPTQPAAPTEERRGDPAPPSPQPARSPPLRQCLRQGLRVLLATPKERLVPRRVAAALPPLCAGKRQSLPEPRPEATRGSPGRGAGPGVRFPRRSRAVPRGCGTVGRAAAARSAHLQFFTLLAGPPPLAGREPGTSAGTKGIFAYMNYR

SEQ ID NO: 35198 - protein, 216 aa, Homo sapiens
  Payload ID: 6954
  Gene Symbol: GFPT2
  Gene Name: glutamine-fructose-6-phosphate transaminase 2
  ENSP ID: ENSP00000431125
MNLLLNSISLLTFLSEFVVIHNGIITNYKDLRKFLESKGYEFESETDTETIAKLIKYVFDNRETEDITFSTLVERVIQQLEGAFALVFKSVHYPGEAVATRRGSPLLIGVRSKYKLSTEQIPILYRTCTLENVKNICKTRMKRLDSSACLHAVGDKAVEFFFASDASAIIEHTNRVIFLEDDDIAAVADGKLSIHRVKRSASDDPSRAIQTLQMEL

SEQ ID NO: 35199 - protein, 776 aa, Homo sapiens
  Payload ID: 6955
  Gene Symbol: QRICH1
  Gene Name: glutamine-rich 1
  Uniprot ID: Q2TAL8
  ENSP ID: ENSP00000350094
MNNSLENTISFEEYIRVKARSVPQHRMKEFLDSLASKGPEALQEFQQTATTTMVYQQGGNCIYTDSTEVAGSLLELACPVTTSVQPQTQQEQQIQVQQPQQVQVQVQVQQSPQQVSAQLSPQLTVHQPTEQPIQVQVQIQGQAPQSAAPSIQTPSLQSPSPSQLQAAQIQVQHVQAAQQIQAAEIPEEHIPHQQIQAQLVAGQSLAGGQQIQIQTVGALSPPPSQQGSPREGERRVGTASVLQPVKKRKVDMPITVSYAISGQPVATVLAIPQGQQQSYVSLRPDLLTVDSAHLYSATGTITSPTGETWTIPVYSAQPRGDPQQQSITHIAIPQEAYNAVHVSGSPTALAAVKLEDDKEKMVGTTSVVKNSHEEVVQTLANSLFPAQFMNGNIHIPVAVQAVAGTYQNTAQTVHIWDPQQQPQQQTPQEQTPPPQQQQQQLQVTCSAQTVQVAEVEPQSQPQPSPELLLPNSLKPEEGLEVWKNWAQTKNAELEKDAQNRLAPIGRRQLLRFQEDLISSAVAELNYGLCLMTREARNGEGEPYDPDVLYYIFLCIQKYLFENGRVDDIFSDLYYVRFTEWLHEVLKDVQPRVTPLGYVLPSHVTEEMLWECKQLGAHSPSTLLTTLMFFNTKYFLLKTVDQHMKLAFSKVLRQTKKNPSNPKDKSTSIRYLKALGIHQTGQKVTDDMYAEQTENPENPLRCPIKLYDFYLFKCPQSVKGRNDTFYLTPEPVVAPNSPIWYSVQPISREQMGQMLTRILVIREIQEAIAVANASTMH

SEQ ID NO: 35200 - protein, 776 aa, Homo sapiens; identical to SEQ ID NO: 35199
  Payload ID: 6955
  Gene Symbol: QRICH1
  Gene Name: glutamine-rich 1
  Uniprot ID: Q2TAL8
  ENSP ID: ENSP00000378830

SEQ ID NO: 35201 - protein, 48 aa, Homo sapiens
  Payload ID: 6955
  Gene Symbol: QRICH1
  Gene Name: glutamine-rich 1
  ENSP ID: ENSP00000405505
MNNSLENTISFEEYIRVKARSVPQHRMKEFLDSLASKGPEALQEFQQT

SEQ ID NO: 35202 - protein, 103 aa, Homo sapiens
  Payload ID: 6955
  Gene Symbol: QRICH1
  Gene Name: glutamine-rich 1
  ENSP ID: ENSP00000412870
MNNSLENTISFEEYIRVKARSVPQHRMKEFLDSLASKGPEALQEFQQTATTTMVYQQGGNCIYTDSTEVAGSLLELACPVTTSVQPQTQQEQQIQVQQPQQVQ

SEQ ID NO: 35203 - protein, 776 aa, Homo sapiens; identical to SEQ ID NO: 35199
  Payload ID: 6955
  Gene Symbol: QRICH1
  Gene Name: glutamine-rich 1
  Uniprot ID: Q2TAL8
  ENSP ID: ENSP00000412890

SEQ ID NO: 35204 - protein, 103 aa, Homo sapiens; identical to SEQ ID NO: 35202
  Payload ID: 6955
  Gene Symbol: QRICH1
  Gene Name: glutamine-rich 1
  ENSP ID: ENSP00000413051

SEQ ID NO: 35205 - protein, 103 aa, Homo sapiens; identical to SEQ ID NO: 35202
  Payload ID: 6955
  Gene Symbol: QRICH1
  Gene Name: glutamine-rich 1
  ENSP ID: ENSP00000416133

SEQ ID NO: 35206 - protein, 361 aa, Homo sapiens
  Payload ID: 6956
  Gene Symbol: QPCT
  Gene Name: glutaminyl-peptide cyclotransferase
  Uniprot ID: Q16769
  ENSP ID: ENSP00000344829
MAGGRHRRVVGTLHLLLLVAALPWASRGVSPSASAWPEEKNYHQPAILNSSALRQIAEGTSISEMWQNDLQPLLIERYPGSPGSYAARQHIMQRIQRLQADWVLEIDTFLSQTPYGYRSFSNIISTLNPTAKRHLVLACHYDSKYFSHWNNRVFVGATDSAVPCAMMLELARALDKKLLSLKTVSDSKPDLSLQLIFFDGEEAFLHWSPQDSLYGSRHLAAKMASTPHPPGARGTSQLHGMDLLVLLDLIGAPNPTFPNFFPNSARWFERLQAIEHELHELGLLKDHSLEGRYFQNYSYGGVIQDDHIPFLRRGVPVLHLIPSPFPEVWHTMDDNEENLDESTIDNLNKILQVFVLEYLHL

SEQ ID NO: 35207 - protein, 284 aa, Homo sapiens
  Payload ID: 6956
  Gene Symbol: QPCT
  Gene Name: glutaminyl-peptide cyclotransferase
  ENSP ID: ENSP00000385391
MAGGRHRRVVGTLHLLLLVAALPWASRGVSPSASAWPEEKHIMQRIQRLQADWVLEIDTFLSQTPYGYRSFSNIISTLNPTAKRHLVLACHYDSKYFSHWNNRVFVGATDSAVPCAMMLELARALDKKLLSLKTVSDSKPDLSLQLIFFDGEEAFLHWSPQDSLYGSRHLAAKMASTPHPPGARGTSQLHGMDLLVLLDLIGAPNPTFPNFFPNSARWFERLQAIEHELHELGLLKDHSLEGRYFQNYSYGGVIQDDHIPFLRRGVPVLHLIPSPFPEVWHTMD

SEQ ID NO: 35208 - protein, 117 aa, Homo sapiens
  Payload ID: 6956
  Gene Symbol: QPCT
  Gene Name: glutaminyl-peptide cyclotransferase
  ENSP ID: ENSP00000389227
MGQGNVDLLVLLDLIGAPNPTFPNFFPNSARWFERLQAIEHELHELGLLKDHSLEGRYFQNYSYGGVIQDDHIPFLRRGVPVLHLIPSPFPEVWHTMDDNEENLDESTIDNLNKILQ

SEQ ID NO: 35209 - protein, 382 aa, Homo sapiens
  Payload ID: 6957
  Gene Symbol: QPCTL
  Gene Name: glutaminyl-peptide cyclotransferase-like
  Uniprot ID: Q9NXS2
  ENSP ID: ENSP00000012049
MRSGGRGRPRLRLGERGLMEPLLPPKRRLLPRVRLLPLLLALAVGSAFYTIWSGWHRRTEELPLGRELRVPLIGSLPEARLRRVVGQLDPQRLWSTYLRPLLVVRTPGSPGNLQVRKFLEATLRSLTAGWHVELDPFTASTPLGPVDFGNVVATLDPRAARHLTLACHYDSKLFPPGSTPFVGATDSAVPCALLLELAQALDLELSRAKKQAAPVTLQLLFLDGEEALKEWGPKDSLYGSRHLAQLMESIPHSPGPTRIQAIELFMLLDLLGAPNPTFYSHFPRTVRWFHRLRSIEKRLHRLNLLQSHPQEVMYFQPGEPFGSVEDDHIPFLRRGVPVLHLISTPFPAVWHTPADTEVNLHPPTVHNLCRILAVFLAEYLGL

SEQ ID NO: 35210 - protein, 288 aa, Homo sapiens
  Payload ID: 6957
  Gene Symbol: QPCTL
  Gene Name: glutaminyl-peptide cyclotransferase-like
  Uniprot ID: Q9NXS2
  ENSP ID: ENSP00000387944
MRSGGRGRPRLRLGERGLMEPLLPPKRRLLPRVRLLPLLLALAVGSAFYTIWSGWHRRTEELPLGRELRVPLIGSLPEARLRRVVGQLDPQRLWSTYLRPLLVVRTPGSPGNLQVRKAAPVTLQLLFLDGEEALKEWGPKDSLYGSRHLAQLMESIPHSPGPTRIQAIELFMLLDLLGAPNPTFYSHFPRTVRWFHRLRSIEKRLHRLNLLQSHPQEVMYFQPGEPFGSVEDDHIPFLRRGVPVLHLISTPFPAVWHTPADTEVNLHPPTVHNLCRILAVFLAEYLGL

SEQ ID NO: 35211 - protein, 121 aa, Homo sapiens
  Payload ID: 6957
  Gene Symbol: QPCTL
  Gene Name: glutaminyl-peptide cyclotransferase-like
  ENSP ID: ENSP00000467813
MEPLLPPKRRLLPRVRLLPLLLALAVGSAFYTIWSGWHRRTEELPLGRELRVPLIGSLPEARLRRVVGQLDPQRLWSTYLRPLLVVRTPGSPGNLQVRKGPRIRLCPVPCCWSWPKHLTWS

SEQ ID NO: 35212 - protein, 319 aa, Homo sapiens
  Payload ID: 6958
  Gene Symbol: QRSL1
  Gene Name: glutaminyl-tRNA synthase (glutamine-hydrolyzing)-like 1
  ENSP ID: ENSP00000358040
MLGRSLREVSAALKQGQITPTELCQKCLSLIKKTKFLNAYITVSEEVALKQAEESEKRYKNGQSLGDLDGIPIAVKDNFSTSGIETTCASNMLKGYIPPYNATVVQKLLDQGALLMGKTNLDEFAMGSGSTDGVFGPVKNPWSYSKQYREKRKQNPHSENEDSDWLITGGSSGGSAAAVSAFTCYAALGSDTGGSTRNPAAHCGLVGFKPSYGLVSRHGLIPLVNSMDVPGILTRCVDDAAIVLGALAGPDPRDSTTVHEPINKPFMLPSLADVSKLCIGIPKVTFSFHYFTEILSSPIESTDLGGGLGGFESLLCHFY

SEQ ID NO: 35213 - protein, 528 aa, Homo sapiens
  Payload ID: 6958
  Gene Symbol: QRSL1
  Gene Name: glutaminyl-tRNA synthase (glutamine-hydrolyzing)-like 1
  Uniprot ID: Q9H0R6
  ENSP ID: ENSP00000358042
MLGRSLREVSAALKQGQITPTELCQKCLSLIKKTKFLNAYITVSEEVALKQAEESEKRYKNGQSLGDLDGIPIAVKDNFSTSGIETTCASNMLKGYIPPYNATVVQKLLDQGALLMGKTNLDEFAMGSGSTDGVFGPVKNPWSYSKQYREKRKQNPHSENEDSDWLITGGSSGGSAAAVSAFTCYAALGSDTGGSTRNPAAHCGLVGFKPSYGLVSRHGLIPLVNSMDVPGILTRCVDDAAIVLGALAGPDPRDSTTVHEPINKPFMLPSLADVSKLCIGIPKEYLVPELSSEVQSLWSKAADLFESEGAKVIEVSLPHTSYSIVCYHVLCTSEVASNMARFDGLQYGHRCDIDVSTEAMYAATRREGFNDVVRGRILSGNFFLLKENYENYFVKAQKVRRLIANDFVNAFNSGVDVLLTPTTLSEAVPYLEFIKEDNRTRSAQDDIFTQAVNMAGLPAVSIPVALSNQGLPIGLQFIGRAFCDQQLLTVAKWFEKQVQFPVIQLQELMDDCSAVLENEKLASVSLKQ

SEQ ID NO: 35214 - protein, 775 aa, Homo sapiens
  Payload ID: 6959
  Gene Symbol: QARS
  Gene Name: glutaminyl-tRNA synthetase
  Uniprot ID: P47897
  ENSP ID: ENSP00000307567
MAALDSLSLFTSLGLSEQKARETLKNSALSAQLREAATQAQQTLGSTIDKATGILLYGLASRLRDTRRLSFLVSYIASKKIHTEPQLSAALEYVRSHPLDPIDTVDFERECGVGVIVTPEQIEEAVEAAINRHRPQLLVERYHFNMGLLMGEARAVLKWADGKMIKNEVDMQVLHLLGPKLEADLEKKFKVAKARLEETDRRTAKDVVENGETADQTLSLMEQLRGEALKFHKPGENYKTPGYVVTPHTMNLLKQHLEITGGQVRTRFPPEPNGILHIGHAKAINFNFGYAKANNGICFLRFDDTNPEKEEAKFFTAICDMVAWLGYTPYKVTYASDYFDQLYAWAVELIRRGLAYVCHQRGEELKGHNTLPSPWRDRPMEESLLLFEAMRKGKFSEGEATLRMKLVMEDGKMDPVAYRVKYTPHHRTGDKWCIYPTYDYTHCLCDSIEHITHSLCTKEFQARRSSYFWLCNALDVYCPVQWEYGRLNLHYAVVSKRKILQLVATGAVRDWDDPRLFTLTALRRRGFPPEAINNFCARVGVTVAQTTMEPHLLEACVRDVLNDTAPRAMAVLESLRVIITNFPAAKSLDIQVPNFPADETKGFHQVPFAPIVFIERTDFKEEPEPGFKRLAWGQPVGLRHTGYVIELQHVVKGPSGCVESLEVTCRRADAGEKPKAFIHWVSQPLMCEVRLYERLFQHKNPEDPTEVPGGFLSDLNLASLHVVDAALVDCSVALAKPFDKFQFERLGYFSVDPDSHQGKLVFNRTVTLKEDPGKV

SEQ ID NO: 35215 - protein, 100 aa, Homo sapiens
  Payload ID: 6959
  Gene Symbol: QARS
  Gene Name: glutaminyl-tRNA synthetase
  ENSP ID: ENSP00000389823
MAALDSLSLFTSLGLSEQKARETLKNSALSAQLREAATQAQQTLGSTIDKATGILLYGLASRLRDTRRLSFLLPLSMCGVTPWTPSTLWTSSGNVAWVSL

SEQ ID NO: 35216 - protein, 764 aa, Homo sapiens
  Payload ID: 6959
  Gene Symbol: QARS
  Gene Name: glutaminyl-tRNA synthetase
  Uniprot ID: P47897
  ENSP ID: ENSP00000390015
MAALDSLSLFTSLGLSEQKARETLKNSALSAQLREAATQAQQTLGSTIDKATGILLYGLASRLRDTRRLSFLVSYIATALEYVRSHPLDPIDTVDFERECGVGVIVTPEQIEEAVEAAINRHRPQLLVERYHFNMGLLMGEARAVLKWADGKMIKNEVDMQVLHLLGPKLEADLEKKFKVAKARLEETDRRTAKDVVENGETADQTLSLMEQLRGEALKFHKPGENYKTPGYVVTPHTMNLLKQHLEITGGQVRTRFPPEPNGILHIGHAKAINFNFGYAKANNGICFLRFDDTNPEKEEAKFFTAICDMVAWLGYTPYKVTYASDYFDQLYAWAVELIRRGLAYVCHQRGEELKGHNTLPSPWRDRPMEESLLLFEAMRKGKFSEGEATLRMKLVMEDGKMDPVAYRVKYTPHHRTGDKWCIYPTYDYTHCLCDSIEHITHSLCTKEFQARRSSYFWLCNALDVYCPVQWEYGRLNLHYAVVSKRKILQLVATGAVRDWDDPRLFTLTALRRRGFPPEAINNFCARVGVTVAQTTMEPHLLEACVRDVLNDTAPRAMAVLESLRVIITNFPAAKSLDIQVPNFPADETKGFHQVPFAPIVFIERTDFKEEPEPGFKRLAWGQPVGLRHTGYVIELQHVVKGPSGCVESLEVTCRRADAGEKPKAFIHWVSQPLMCEVRLYERLFQHKNPEDPTEVPGGFLSDLNLASLHVVDAALVDCSVALAKPFDKFQFERLGYFSVDPDSHQGKLVFNRTVTLKEDPGKV

SEQ ID NO: 35217 - protein, 339 aa, Homo sapiens
  Payload ID: 6959
  Gene Symbol: QARS
  Gene Name: glutaminyl-tRNA synthetase
  ENSP ID: ENSP00000392850
MAALDSLSLFTSLGLSEQKARETLKNSALSAQLREAATQAQQTLGSTIDKATGILLYGLASRLRDTRRLSFLVSYIASKKIHTEPQLSGWWCQGLTFQEARLSLEFHEIRTLSVHFLEQRCHKLTGSFFSAALEYVRSHPLDPIDTVDFERECGVGVIVTPEQIEEAVEAAINRHRPQLLVERYHFNMGLLMGEARAVLKWADGKMIKNEVDMQVLHLLGPKLEADLEKKFKVAKARLEETDRRTAKDVVENGETADQTLSLMEQLRGEALKFHKPGENYKTPGYVVTPHTMNLLKQHLEITGGQVRTRFPPEPNGILHIGHAKAINFNFGYAKANNGI

SEQ ID NO: 35218 - protein, 253 aa, Homo sapiens
  Payload ID: 6959
  Gene Symbol: QARS
  Gene Name: glutaminyl-tRNA synthetase
  ENSP ID: ENSP00000396326
QWEYGRLNLHYAVVSKRKILQLVATGAVRDWDDPRLFTLTALRRRGFPPEAINNFCARVGVTVAQTTMEPHLLEACVRDVLNDTAPRAMAVLESLRVIITNFPAAKSLDIQVPNFPADETKGFHQVPFAPIVFIERTDFKEEPEPGFKRLAWGQPVGLRHTGYVIELQHVVKGPSGCVESLEVTCRRADAGEKPKAFIHWVSQPLMCEVRLYERLFQHKNPEDPTEVPGGFLSDLNLLVFNRTVTLKEDPGKV

SEQ ID NO: 35219 - protein, 100 aa, Homo sapiens; identical to SEQ ID NO: 35215
  Payload ID: 6959
  Gene Symbol: QARS
  Gene Name: glutaminyl-tRNA synthetase
  ENSP ID: ENSP00000415247

SEQ ID NO: 35220 - protein, 67 aa, Homo sapiens
  Payload ID: 6959
  Gene Symbol: QARS
  Gene Name: glutaminyl-tRNA synthetase
  ENSP ID: ENSP00000488917
MAALDSLSLFTSLGLSEQKARETLKNSALSAQLREAATQLPLSMCGVTPWTPSTLWTSSGNVAWVSL

SEQ ID NO: 35221 - protein, 187 aa, Homo sapiens
  Payload ID: 6959
  Gene Symbol: QARS
  Gene Name: glutaminyl-tRNA synthetase
  ENSP ID: ENSP00000488960
MAALDSLSLFTSLGLSEQKARETLKNSALSAQLREAATQQTLGSTIDKATGILLYGLASRLRDTRRLSFLVSYIASKKIHTEPQLSAALEYVRSHPLDPIDTVDFERECGVGVIVTPEQIEEAVEAAINRHRPQLLVERYHFNMGLLMGEARAVLKWADGKMIKNEVDMQVLHLLGPKLEADLEKKF

SEQ ID NO: 35222 - protein, 26 aa, Homo sapiens
  Payload ID: 6959
  Gene Symbol: QARS
  Gene Name: glutaminyl-tRNA synthetase
  ENSP ID: ENSP00000489004
QGGVKWCNHSSLWPQTTGLKLFSCLS

SEQ ID NO: 35223 - protein, 630 aa, Homo sapiens
  Payload ID: 6959
  Gene Symbol: QARS
  Gene Name: glutaminyl-tRNA synthetase
  ENSP ID: ENSP00000489011
MGLLMGEARAVLKWADGKMIKNEVDMQVLHLLGPKLEADLEKKFKVAKARLEETDRRTAKDVVENGETADQTLSLMEQLRGEALKFHKPGENYKTPGYVVTPHTMNLLKQHLEITGGQVRTRFPPEPNGILHIGHAKAINFNFGYAKANNGICFLRFDDTNPEKEEAKFFTAICDMVAWLGYTPYKVTYASDYFDQLYAWAVELIRRGLAYVCHQRGEELKGHNTLPSPWRDRPMEESLLLFEAMRKGKFSEGEATLRMKLVMEDGKMDPVAYRVKYTPHHRTGDKWCIYPTYDYTHCLCDSIEHITHSLCTKEFQARRSSYFWLCNALDVYCPVQWEYGRLNLHYAVVSKRKILQLVATGAVRDWDDPRLFTLTALRRRGFPPEAINNFCARVGVTVAQTTMEPHLLEACVRDVLNDTAPRAMAVLESLRVIITNFPAAKSLDIQVPNFPADETKGFHQVPFAPIVFIERTDFKEEPEPGFKRLAWGQPVGLRHTGYVIELQHVVKGPSGCVESLEVTCRRADAGEKPKAFIHWVSQPLMCEVRLYERLFQHKNPEDPTEVPGGFLSDLNLASLHVVDAALVDCSVALAKPFDKFQFERLGYFSVDPDSHQGKLVFNRTVTLKEDPGKV

SEQ ID NO: 35224 - protein, 96 aa, Homo sapiens
  Payload ID: 6959
  Gene Symbol: QARS
  Gene Name: glutaminyl-tRNA synthetase
  ENSP ID: ENSP00000489039
MGLLMGEARAVLKWADGKMIKNEVDMQVLHLLGPKLEADLEKKFKVAKARLEETDRRTAKDVVENGETADQTLSLMEQLRGEALKFHKPGENYKTP

SEQ ID NO: 35225 - protein, 191 aa, Homo sapiens
  Payload ID: 6959
  Gene Symbol: QARS
  Gene Name: glutaminyl-tRNA synthetase
  ENSP ID: ENSP00000489056
TLGSTIDKATGILLYGLASRLRDTRRLSFLVSYIASKKIHTEPQLSAALEYVRSHPLDPIDTVDFERECGVGVIVTPEQIEEAVEAAINRHRPQLLVERYHFNMGLLMEVGGVLFFAFLQLLVPMLLGEARAVLKWADGKMIKNEVDMQVLHLLGPKLEADLEKKFKVAKARLEETDRRTAKDVVENGETA

SEQ ID NO: 35226 - protein, 173 aa, Homo sapiens
  Payload ID: 6959
  Gene Symbol: QARS
  Gene Name: glutaminyl-tRNA synthetase
  ENSP ID: ENSP00000489082
MAALDSLSLFTSLGLSEQKARETLKNSALSAQLREAATQAQQTLGSTIDKATGILLYGLASRLRDTRRLSFLVSYIASKKIHTEPQLSAALEYVRSHPLDPIDTVDFERECGVGVIVTPEQIEEAVEAAINRHRPQLLVERYHFNMGLLMGEARAVLKWADGETADQTLSLME

SEQ ID NO: 35227 - protein, 194 aa, Homo sapiens
  Payload ID: 6959
  Gene Symbol: QARS
  Gene Name: glutaminyl-tRNA synthetase
  ENSP ID: ENSP00000489118
  MOD_RES (1)..(1): Any amino acid
XFDQLYAWAVELIRRGLAYVCHQRGEELKGHNTLPSPWRDRPMEESLLLFEAMRKGKFSEGEATLRMKLVMEDGKMDPVAYRVKCIYPTYDYTHCLCDSIEHITHSLCTKEFQARRSSYFWLCNALDVYCPVQWEYGRLNLHYAVVSKRKILQLVATGAVRDWDDPRLFTLTALRRRGFPPEAINNFCARVGVT

SEQ ID NO: 35228 - protein, 342 aa, Homo sapiens
  Payload ID: 6959
  Gene Symbol: QARS
  Gene Name: glutaminyl-tRNA synthetase
  ENSP ID: ENSP00000489154
MAALDSLSLFTSLGLSEQKARETLKNSALSAQLREAATQAQQTLGSTIDKATGILLYGLASRLRDTRRLSFLVSYIASKKIHTEPQLSAALEYVRSHPLDPIDTVDFERECGVGVIVTPEQIEEAVEAAINRHRPQLLVERYHFNMGLLMGEARAVLKWADGKMIKNEVDMQVLHLLGPKLEADLEKKFKVAKARLEETDRRTAKDVVENGETADQTLSLMEQLRGEALKFHKPGENYKTPGYVVTPHTMNLLKQHLEITGGQANNGICFLRFDDTNPEKEEAKFFTAICDMVAWLGYTPYKVTYASDYFDQLYAWAVELIRRGLAYVCHQRGEELKGHNTL

SEQ ID NO: 35229 - protein, 174 aa, Homo sapiens
  Payload ID: 6959
  Gene Symbol: QARS
  Gene Name: glutaminyl-tRNA synthetase
  ENSP ID: ENSP00000489170
MAALDSLSLFTSLGLSEQKARETLKNSALSAQLREAATQAQQTLGSTIDKATGILLYGLASRLRDTRRLSFLVSYIASKKIHTEPQLSAALEYVRSHPLDPIDTVDFERECGVGVIVTPEQIEEAVEAAINRHRPQLLVERYHFNMGLLMAPCAYASRRGSGCAEVGRWQNDQE

SEQ ID NO: 35230 - protein, 134 aa, Homo sapiens
  Payload ID: 6959
  Gene Symbol: QARS
  Gene Name: glutaminyl-tRNA synthetase
  ENSP ID: ENSP00000489214
AKSLDIQVPNFPADETKGFHQVPFAPIVFIERTDFKEEPEPGFKRLAWGQPVGLRHTGYVIELQHVVKGPSGCVESLEVTCRRADAGEKPKAFIHWVSQPLMCEVRLYERLFQHKNPEDPTEVPGGFLSDLNLH

SEQ ID NO: 35231 - protein, 83 aa, Homo sapiens
  Payload ID: 6959
  Gene Symbol: QARS
  Gene Name: glutaminyl-tRNA synthetase
  ENSP ID: ENSP00000489223
  MOD_RES (1)..(1): Any amino acid
XPEPGFKRLAWGQPVGLRHTGYVIELQHVVKGPSGCVESLEVTCRRADAGEKPKAFIHWVSQPLMCEVRLYERLHHYTWWMQH

SEQ ID NO: 35232 - protein, 100 aa, Homo sapiens; identical to SEQ ID NO: 35215
  Payload ID: 6959
  Gene Symbol: QARS
  Gene Name: glutaminyl-tRNA synthetase
  ENSP ID: ENSP00000489331

SEQ ID NO: 35233 - protein, 173 aa, Homo sapiens
  Payload ID: 6959
  Gene Symbol: QARS
  Gene Name: glutaminyl-tRNA synthetase
  ENSP ID: ENSP00000489365
MLLGEARAVLKWADGKMIKNEVDMQVLHLLGPKLEADLEKKFKVAKARLEETDRRTAKDVVENGETADQTLSLMEQLRGEALKFHKPGENYKTPGYVVTPHTMNLLKQHLEITGGQVRTRFPPEPNGILHIGHAKAINFNFGYAKANNGICFLRFDDTNPEKEEAKFFTAICD

SEQ ID NO: 35234 - protein, 75 aa, Homo sapiens
  Payload ID: 6959
  Gene Symbol: QARS
  Gene Name: glutaminyl-tRNA synthetase
  ENSP ID: ENSP00000489384
ASLHVVDAALVDCSVALAKPFDKFQFERLGYFSVDPDSHQGKRRGLTLAQGGVKWCNHSSLWPQTTGLKLFSCLS

SEQ ID NO: 35235 - protein, 100 aa, Homo sapiens; identical to SEQ ID NO: 35215
  Payload ID: 6959
  Gene Symbol: QARS
  Gene Name: glutaminyl-tRNA synthetase
  ENSP ID: ENSP00000489409

SEQ ID NO: 35236 - protein, 91 aa, Homo sapiens
  Payload ID: 6959
  Gene Symbol: QARS
  Gene Name: glutaminyl-tRNA synthetase
  ENSP ID: ENSP00000489462
SLDIQVPNFPADETKGFHQVPFAPIVFIERTDFKEEPEPGFKRLAWGQPVGLRHTGYVIELQHVVKVRASCSLPTAVPAGAKILSLTELSH

SEQ ID NO: 35237 - protein, 182 aa, Homo sapiens
  Payload ID: 6959
  Gene Symbol: QARS
  Gene Name: glutaminyl-tRNA synthetase
  ENSP ID: ENSP00000489550
MAALDSLSLFTSLGLSEQKARETLKNSAQQTLGSTIDKATGILLYGLASRLRDTRRLSFLVSYIASKKIHTEPQLSAALEYVRSHPLDPIDTVDFERECGVGVIVTPEQIEEAVEAAINRHRPQLLVERYHFNMGLLMGEARAVLKWADGKMIKNEVDMQVLHLLGPKLEADLEKKFKVAKA

SEQ ID NO: 35238 - protein, 68 aa, Homo sapiens
  Payload ID: 6959
  Gene Symbol: QARS
  Gene Name: glutaminyl-tRNA synthetase
  ENSP ID: ENSP00000489558
MLLGEARAVLKWADGKMIKNEVDMQVLHLLGPKLEADLEKKFKVAKARLEETDRRTAKDVVENGETAD

SEQ ID NO: 35239 - protein, 957 aa, Homo sapiens
  Payload ID: 6960
  Gene Symbol: ENPEP
  Gene Name: glutamyl aminopeptidase (aminopeptidase A)
  Uniprot ID: Q07075
  ENSP ID: ENSP00000265162
MNFAEREGSKRYCIQTKHVAILCAVVVGVGLIVGLAVGLTRSCDSSGDGGPGTAPAPSHLPSSTASPSGPPAQDQDICPASEDESGQWKNFRLPDFVNPVHYDLHVKPLLEEDTYTGTVSISINLSAPTRYLWLHLRETRITRLPELKRPSGDQVQVRRCFEYKKQEYVVVEAEEELTPSSGDGLYLLTMEFAGWLNGSLVGFYRTTYTENGQVKSIVATDHEPTDARKSFPCFDEPNKKATYTISITHPKEYGALSNMPVAKEESVDDKWTRTTFEKSVPMSTYLVCFAVHQFDSVKRISNSGKPLTIYVQPEQKHTAEYAANITKSVFDYFEEYFAMNYSLPKLDKIAIPDFGTGAMENWGLITYRETNLLYDPKESASSNQQRVATVVAHELVHQWFGNIVTMDWWEDLWLNEGFASFFEFLGVNHAETDWQMRDQMLLEDVLPVQEDDSLMSSHPIIVTVTTPDEITSVFDGISYSKGSSILRMLEDWIKPENFQKGCQMYLEKYQFKNAKTSDFWAALEEASRLPVKEVMDTWTRQMGYPVLNVNGVKNITQKRFLLDPRANPSQPPSDLGYTWNIPVKWTEDNITSSVLFNRSEKEGITLNSSNPSGNAFLKINPDHIGFYRVNYEVATWDSIATALSLNHKTFSSADRASLIDDAFALARAQLLDYKVALNLTKYLKREENFLPWQRVISAVTYIISMFEDDKELYPMIEEYFQGQVKPIADSLGWNDAGDHVTKLLRSSVLGFACKMGDREALNNASSLFEQWLNGTVSLPVNLRLLVYRYGMQNSGNEISWNYTLEQYQKTSLAQEKEKLLYGLASVKNVTLLSRYLDLLKDTNLIKTQDVFTVIRYISYNSYGKNMAWNWIQLNWDYLVNRYTLNNRNLGRIVTIAEPFNTELQLWQMESFFAKYPQAGAGEKPREQVLETVKNNIEWLKQHRNTIREWFFNLLESG

SEQ ID NO: 35240 - protein, 144 aa, Homo sapiens
  Payload ID: 6960
  Gene Symbol: ENPEP
  Gene Name: glutamyl aminopeptidase (aminopeptidase A)
  ENSP ID: ENSP00000426265
  MOD_RES (1)..(1): Any amino acid
XVTVTTPDEITSVFDGISYSKGSSILRMLEDWIKPENFQKGCQMYLEKYQFKNAKTSDFWAALEEASRLPVKEVMDTWTRQMGYPVLNVNGVKNITQKRFLLDPRANPSQPPSDLGYTWNIPVKWTEDNITSSVLFNRSEKEVN

SEQ ID NO: 35241 - protein, 1512 aa, Homo sapiens
  Payload ID: 6961
  Gene Symbol: EPRS
  Gene Name: glutamyl-prolyl-tRNA synthetase
  Uniprot ID: P07814
  ENSP ID: ENSP00000355890
MATLSLTVNSGDPPLGALLAVEHVKDDVSISVEEGKENILHVSENVIFTDVNSILRYLARVATTAGLYGSNLMEHTEIDHWLEFSATKLSSCDSFTSTINELNHCLSLRTYLVGNSLSLADLCVWATLKGNAAWQEQLKQKKAPVHVKRWFGFLEAQQAFQSVGTKWDVSTTKARVAPEKKQDVGKFVELPGAEMGKVTVRFPPEASGYLHIGHAKAALLNQHYQVNFKGKLIMRFDDTNPEKEKEDFEKVILEDVAMLHIKPDQFTYTSDHFETIMKYAEKLIQEGKAYVDDTPAEQMKAEREQRIDSKHRKNPIEKNLQMWEEMKKGSQFGQSCCLRAKIDMSSNNGCMRDPTLYRCKIQPHPRTGNKYNVYPTYDFACPIVDSIEGVTHALRTTEYHDRDEQFYWIIEALGIRKPYIWEYSRLNLNNTVLSKRKLTWFVNEGLVDGWDDPRFPTVRGVLRRGMTVEGLKQFIAAQGSSRSVVNMEWDKIWAFNKKVIDPVAPRYVALLKKEVIPVNVPEAQEEMKEVAKHPKNPEVGLKPVWYSPKVFIEGADAETFSEGEMVTFINWGNLNITKIHKNADGKIISLDAKLNLENKDYKKTTKVTWLAETTHALPIPVICVTYEHLITKPVLGKDEDFKQYVNKNSKHEELMLGDPCLKDLKKGDIIQLQRRGFFICDQPYEPVSPYSCKEAPCVLIYIPDGHTKEMPTSGSKEKTKVEATKNETSAPFKERPTPSLNNNCTTSEDSLVLYNRVAVQGDVVRELKAKKAPKEDVDAAVKQLLSLKAEYKEKTGQEYKPGNPPAEIGQNISSNSSASILESKSLYDEVAAQGEVVRKLKAEKSPKAKINEAVECLLSLKAQYKEKTGKEYIPGQPPLSQSSDSSPTRNSEPAGLETPEAKVLFDKVASQGEVVRKLKTEKAPKDQVDIAVQELLQLKAQYKSLIGVEYKPVSATGAEDKDKKKKEKENKSEKQNKPQKQNDGQRKDPSKNQGGGLSSSGAGEGQGPKKQTRLGLEAKKEENLADWYSQVITKSEMIEYHDISGCYILRPWAYAIWEAIKDFFDAEIKKLGVENCYFPMFVSQSALEKEKTHVADFAPEVAWVTRSGKTELAEPIAIRPTSETVMYPAYAKWVQSHRDLPIKLNQWCNVVRWEFKHPQPFLRTREFLWQEGHSAFATMEEAAEEVLQILDLYAQVYEELLAIPVVKGRKTEKEKFAGGDYTTTIEAFISASGRAIQGGTSHHLGQNFSKMFEIVFEDPKIPGEKQFAYQNSWGLTTRTIGVMTMVHGDNMGLVLPPRVACVQVVIIPCGITNALSEEDKEALIAKCNDYRRRLLSVNIRVRADLRDNYSPGWKFNHWELKGVPIRLEVGPRDMKSCQFVAVRRDTGEKLTVAENEAETKLQAILEDIQVTLFTRASEDLKTHMVVANTMEDFQKILDSGKIVQIPFCGEIDCEDWIKKTTARDQDLEPGAPSMGAKSLCIPFKPLCELQPGAKCVCGKNPAKYYTLFGRSY

SEQ ID NO: 35242 - protein, 968 aa, Homo sapiens
  Payload ID: 6961
  Gene Symbol: EPRS
  Gene Name: glutamyl-prolyl-tRNA synthetase
  ENSP ID: ENSP00000477245
MATLSLTVNSGDPPLGALLAVEHVKDDVSISVEEGKENILHVSENVIFTDVNSILRYLARVATTAGLYGSNLMEHTEIDHWLEFSATKLSSCDSFTSTINELNHCLSLRTYLVGNSLSLADLCVWATLKGNAAWQEQLKQKKAPVHVKRWFGFLEAQQAFQSVGTKWDVSTTKARVAPEKKQDVGKFVELPGAEMGKVTVRFPPEASGYLHIGHAKAALLNQHYQVNFKGKLIMRFDDTNPEKEKEDFEKVILEDVAMLHIKPDQFTYTSDHFETIMKYAEKLIQEGKAYVDDTPAEQMKAEREQRIDSKHRKNPIEKNLQMWEEMKKGSQFGQSCCLRAKIDMSSNNGCMRDPTLYRCKIQPHPRTGNKYNVYPTYDFACPIVDSIEGVTHALRTTEYHDRDEQFYWIIEALGIRKPYIWEYSRLNLNNTVLSKRKLTWFVNEGLVDGWDDPRFPTVRGVLRRGMTVEGLKQFIAAQGSSRSVVNMEWDKIWAFNKKLRALCKKVIDPVAPRYVALLKKEVIPVNVPEAQEEMKEVAKHPKNPEVGLKPVWYSPKVFIEGADAETFSEGEMVTFINWGNLNITKIHKNADGKIISLDAKLNLENKDYKKTTKVTWLAETTHALPIPVICVTYEHLITKPVLGKDEDFKQYVNKNSKHEELMLGDPCLKDLKKGDIIQLQRRGFFICDQPYEPVSPYSCKEAPCVLIYIPDGHTKEMPTSGSKEKTKVEATKNETSAPFKERPTPSLNNNCTTSEDSLVLYNRVAVQGDVVRELKAKKAPKEDVDAAVKQLLSLKAEYKEKTGQEYKPGNPPAEIGQNISSNSSASILESKSLYDEVAAQGEVVRKLKAEKSPKAKINEAVECLLSLKAQYKEKTGKEYIPGQPPLSQSSDSSPTRNSEPAGLETPEAKVLFDKVASQGEVVRKLKTEKAPKDQVDIAVQELLQLKAQYKSLIGVEYKPVSATGAEDK

SEQ ID NO: 35243 - protein, 194 aa, Homo sapiens
  Payload ID: 6961
  Gene Symbol: EPRS
  Gene Name: glutamyl-prolyl-tRNA synthetase
  ENSP ID: ENSP00000477493
MATLSLTVNSGDPPLGALLAVEHVKDDVSISVEEGKENILHVSENVIFTDVNSILRYLARVATTAGLYGSNLMEHTEIDHWLEFSATKLSSCDSFTSTINELNHCLSLRTYLVGNSLSLADLCVWATLKGNAAWQEQLKQKKAPVHVKRWFGFLEAQQAFQSVGTKWDVSTTKARVLLTHWACKSCSSEPALPG

SEQ ID NO: 35244 - protein, 523 aa, Homo sapiens
  Payload ID: 6962
  Gene Symbol: EARS2
  Gene Name: glutamyl-tRNA synthetase 2, mitochondrial
  Uniprot ID: Q5JPH6
  ENSP ID: ENSP00000395196
MAALLRRLLQRERPSAASGRPVGRREANLGTDAGVAVRVRFAPSPTGFLHLGGLRTALYNYIFAKKYQGSFILRLEDTDQTRVVPGAAENIEDMLEWAGIPPDESPRRGGPAGPYQQSQRLELYAQATEALLKTGAAYPCFCSPQRLELLKKEALRNHQTPRYDNRCRNMSQEQVAQKLAKDPKPAIRFRLEQVVPAFQDLVYGWNRHEVASVEGDPVIMKSDGFPTYHLACVVDDHHMGISHVLRGSEWLVSTAKHLLLYQALGWQPPHFAHLPLLLNRDGSKLSKRQGDVFLEHFAADGFLPDSLLDIITNCGSGFAENQMGRTLPELITQFNLTQVTCHSALLDLEKLPEFNRLHLQRLVSNESQRRQLVGKLQVLVEEAFGCQLQNRDVLNPVYVERILLLRQGHICRLQDLVSPVYSYLWTRPAVGRAQLDAISEKVDVIAKRVLGLLERSSMSLTQDMLNGELKKLSEGLEGTKYSNVMKLLRMALSGQQQGPPVAEMMLALGPKEVRERIQKVVSS

SEQ ID NO: 35245 - protein, 54 aa, Homo sapiens
  Payload ID: 6962
  Gene Symbol: EARS2
  Gene Name: glutamyl-tRNA synthetase 2, mitochondrial
  ENSP ID: ENSP00000455519
MAALLRRLLQRERPSAASGRPVGRREANLGTDAGVAVRVRFAPSPTGVVDAGIQ

SEQ ID NO: 35246 - protein, 99 aa, Homo sapiens
  Payload ID: 6962
  Gene Symbol: EARS2
  Gene Name: glutamyl-tRNA synthetase 2, mitochondrial
  ENSP ID: ENSP00000455789
MAALLRRLLQRERPSAASGRPVGRREANLGTDAGVAVRVRFAPSPTESHSTAAQAGVQRRDHGSLQPQRPQAQASCTWVASALPCTTTSLLRSTRGASS

SEQ ID NO: 35247 - protein, 79 aa, Homo sapiens
  Payload ID: 6962
  Gene Symbol: EARS2
  Gene Name: glutamyl-tRNA synthetase 2, mitochondrial
  ENSP ID: ENSP00000455875
MAALLRRLLQRERPSAASGRPVGRREANLGTDAGVAVRVRFAPSPTESHSTAAQAGVQRRDHGSLQPQRPQAQVILPPQ

SEQ ID NO: 35248 - protein, 534 aa, Homo sapiens
  Payload ID: 6962
  Gene Symbol: EARS2
  Gene Name: glutamyl-tRNA synthetase 2, mitochondrial
  Uniprot ID: Q5JPH6
  ENSP ID: ENSP00000456218
MAALLRRLLQRERPSAASGRPVGRREANLGTDAGVAVRVRFAPSPTGFLHLGGLRTALYNYIFAKKYQGSFILRLEDTDQTRVVPGAAENIEDMLEWAGIPPDESPRRGGPAGPYQQSQRLELYAQATEALLKTGAAYPCFCSPQRLELLKKEALRNHQTPRYDNRCRNMSQEQVAQKLAKDPKPAIRFRLEQVVPAFQDLVYGWNRHEVASVEGDPVIMKSDGFPTYHLACVVDDHHMGISHVLRGSEWLVSTAKHLLLYQALGWQPPHFAHLPLLLNRDGSKLSKRQGDVFLEHFAADGFLPDSLLDIITNCGSGFAENQMGRTLPELITQFNLTQVTCHSALLDLEKLPEFNRLHLQRLVSNESQRRQLVGKLQVLVEEAFGCQLQNRDVLNPVYVERILLLRQGHICRLQDLVSPVYSYLWTRPAVGRAQLDAISEKVDVIAKRVLGLLERSSMSLTQDMLNGELKKLSEGLEGTKYSNVMKLLRMALSGQQVRQGHGLDCSLEPLIDPLNLHFLAGTELNIEYTKVNET

SEQ ID NO: 35249 - protein, 523 aa, Homo sapiens; identical to SEQ ID NO: 35244
  Payload ID: 6962
  Gene Symbol: EARS2
  Gene Name: glutamyl-tRNA synthetase 2, mitochondrial
  Uniprot ID: Q5JPH6
  ENSP ID: ENSP00000456467

SEQ ID NO: 35250 - protein, 506 aa, Homo sapiens
  Payload ID: 6962
  Gene Symbol: EARS2
  Gene Name: glutamyl-tRNA synthetase 2, mitochondrial
  ENSP ID: ENSP00000457107
MAALLRRLLQRERPSAASGRPVGRREANLGTDAGVAVRVRFAPSPTGFLHLGGLRTALYNYIFAKKYQGSFILRLEDTDQTRVVPGAAENIEDMLEWAGIPPDESPRRGGPAGPYQQSQRLELYAQATEALLKTGAAYPCFCSPQRLELLKKEALRNHQTPRYDNRCRNMSQEQVAQKLAKDPKPAIRFRLEQVVPAFQDLVYGWNRHEVASVEGDPVIMKSDGFPTYHLACVVDDHHMGISHVLRGSEWLVSTAKHLLLYQALGWQPPHFAHLPLLLNRDGSKLSKRQGDVFLEHFAADGFLPDSLLDIITNCGSGFAENQMGRTLPELITQFNLTQVTCHSALLDLEKLPEFNRLHLQRLVSNESQRRQLVGKLQVLVEEAFGCQLQNRDVLNPVYVERILLLRQGHICRLQDLVSPVYSYLWTRPAVGRAQLDAISEKVDVIAKRVLGLLERSSMSLTQDMLNGELKKLSEGLEGTKYSNVMKLLRMALSGQQALSSILSIQR

SEQ ID NO: 35251 - protein, 112 aa, Homo sapiens
  Payload ID: 6962
  Gene Symbol: EARS2
  Gene Name: glutamyl-tRNA synthetase 2, mitochondrial
  ENSP ID: ENSP00000458604
MAALLRRLLQRERPSAASGRPAEAPCPVSAPRMFPNESFPVVSEWAGGGGLRQREPILQRRKLRCRSGNNSNCQEFLVFFVPSHLFRSFFHAFHTCALMTTCVTGVVDAGIQ

SEQ ID NO: 35252 - protein, 557 aa, Homo sapiens
  Payload ID: 6963
  Gene Symbol: GATB
  Gene Name: glutamyl-tRNA(Gln) amidotransferase, subunit B
  Uniprot ID: O75879
  ENSP ID: ENSP00000263985
MAAPMLRWGCRGRRWAFARVDGGSCHRRGAPTGSTSNQIRGESSVAQQPLHTAQKTRKGEHKWAAVVGLEIHAQISSNSKLFSGSQVRFSAPPNSLVSFFDASLPGTLPVLNRRCVEAAVMTGLALNCHINKKSLFDRKHYFYADLPAGYQITQQRLPIAVNGSLIYGVCAGKKQSQVIPKTVRIKQIQLEQDSGKSLHDNLRSQTLIDLNRAGVGLLEVVLEPDMSCGEEAATAVRELQLILQALGTSQANMAEGQLRVDANISVHHPGEPLGVRTEVKNLNSIRFLAKAIDYEIQRQINELENGGEILNETRSFHHKLGCTMSMRDKEGKQDYRFMPEPNLPPLVLYDATSLPAGADPQQVINIDQIRETLPELPSVTREKLVQQYGMLLEHSFTLLNEVGLLEFFQNVIKETRAEPKKVTSWVLNTFLGYLKQQNLAVSESPVTPSALAELLDLLDSRTISSSAAKQVFEELWKREGKTPGQIVSEKQLELMQDQGALEQLCHSVMEAHPQVVMDVKNRNPRAINKLIGLVRKATQSRADPVMIKEILEKKLSL

SEQ ID NO: 35253 - protein, 357 aa, Homo sapiens
  Payload ID: 6963
  Gene Symbol: GATB
  Gene Name: glutamyl-tRNA(Gln) amidotransferase, subunit B
  ENSP ID: ENSP00000420831
MAAPMLRWGCRGRRWAFARVDGGSCHRRGAPTGSTSNQIRGESSVAQQPLHTAQKTRKGEHKWAAVVGLEIHAQISSNSKLFSGSQVRFSAPPNSLVSFFDASLPGTLPVLNRRCVEAAVMTGLALNCHINKKSLFDRKHYFYADLPAGYQITQQRLPIAVNGSLIYGVCAGKKQSQVIPKTVRIKQIQLEQDSGKSLHDNLRSQTLIDLNRAGVGLLEVVLEPDMSCGEEAATAVRELQLILQALGTSQANMAEGQLRVDANISVHHPGEPLGVRTEVKNLNSIRFLAKAIDYEIQRQINELENGGEILNETRSFHHKLGCTMSMRDKEGKQDYRWLLLMAKYRYISGAGAYFKFI

SEQ ID NO: 35254 - protein, 136 aa, Homo sapiens
  Payload ID: 6963
  Gene Symbol: GATB
  Gene Name: glutamyl-tRNA(Gln) amidotransferase, subunit B
  ENSP ID: ENSP00000421005
  MOD_RES (1)..(1): Any amino acid
XRVDGGSCHRRGAPTGSTSNQIRGESSVAQQPLHTAQKTRKGEHKWAAVVGLEIHAQISSNSKLFSGSQVRFSAPPNSLVSFFDASLPGTLPVLNRRCVEAAVMTGLALNCHINKKSLFDRKHYFYADLPGRSRVR

SEQ ID NO: 35255 - protein, 115 aa, Homo sapiens
  Payload ID: 6963
  Gene Symbol: GATB
  Gene Name: glutamyl-tRNA(Gln) amidotransferase, subunit B
  ENSP ID: ENSP00000421105
MAAPMLRWGCRGRRWAFARVDGGSCHRRGAPTGSTSNQIRGESSVAQQPLHTAQKTRKGEHKWAAVVGLEIHAQISSNSKLFSGSQVRFSAPPNSLVSFFDASLPGTLPSEDSPS

SEQ ID NO: 35256 - protein, 146 aa, Homo sapiens
  Payload ID: 6963
  Gene Symbol: GATB
  Gene Name: glutamyl-tRNA(Gln) amidotransferase, subunit B
  ENSP ID: ENSP00000421240
MLRWGCRGRRWAFARVDGGSCHRRGAPTGSTSNQIRGESSVAQQPLHTAQKTRKGEHKWAAVVGLEIHAQISSNSKLFSGSQVRFSAPPNSLVSFFDASLPGTLPVLNRRCVEAAVMTGLALNCHINKKSLFDRKHYFYADLPRAS

SEQ ID NO: 35257 - protein, 141 aa, Homo sapiens
  Payload ID: 6963
  Gene Symbol: GATB
  Gene Name: glutamyl-tRNA(Gln) amidotransferase, subunit B
  ENSP ID: ENSP00000423999
  MOD_RES (1)..(1): Any amino acid
XRGRRWAFARVDGGSCHRRGAPTGSTSNQIRGESSVAQQPLHTAQKTRKGEHKWAAVVGLEIHAQISSNSKLFSGSQVRFSAPPNSLVSFFDASLPGTLPVLNRRCVEAAVMTGLALNCHINKKSLFDRKHYFYADLPRAS

SEQ ID NO: 35258 - protein, 132 aa, Homo sapiens
  Payload ID: 6963
  Gene Symbol: GATB
  Gene Name: glutamyl-tRNA(Gln) amidotransferase, subunit B
  ENSP ID: ENSP00000425294
  MOD_RES (1)..(1): Any amino acid
XFMPEPNLPPLVLYDATSLPAGADPQQVINIDQIRETLPELPSVTREKLVQQYGMLLEHSFTLLNEVGLLEFFQNVIKETRAEPKKVTSWVLNTFLGYLKQQNLAVSERCLRNCGRGKARLQGRLFQKSSLN

SEQ ID NO: 35259 - protein, 516 aa, Homo sapiens
  Payload ID: 6963
  Gene Symbol: GATB
  Gene Name: glutamyl-tRNA(Gln) amidotransferase, subunit B
  ENSP ID: ENSP00000426859
MAAPMLRWGCRGRRWAFARVDGGSCHRRGAPTGSTSNQIRGESSVAQQPLHTAQKTRKGEHKWAAVVGLEIHAQISSNSKLFSGSQVRFSAPPNSLVSFFDASLPGTLPVLNRRCVEAAVMTGLALNCHINKKSLFDRKHYFYADLPAGYQITQQRLPIAVNGSLIYGVCAGKKQSQVIPKTVRIKQIQLEQDSGKSLHDNLRSQTLIDLNRAEGQLRVDANISVHHPGEPLGVRTEVKNLNSIRFLAKAIDYEIQRQINELENGGEILNETRSFHHKLGCTMSMRDKEGKQDYRFMPEPNLPPLVLYDATSLPAGADPQQVINIDQIRETLPELPSVTREKLVQQYGMLLEHSFTLLNEVGLLEFFQNVIKETRAEPKKVTSWVLNTFLGYLKQQNLAVSESPVTPSALAELLDLLDSRTISSSAAKQVFEELWKREGKTPGQIVSEKQLELMQDQGALEQLCHSVMEAHPQVVMDVKNRNPRAINKLIGLVRKATQSRADPVMIKEILEKKLSL

SEQ ID NO: 35260 - protein, 47 aa, Homo sapiens
  Payload ID: 6964
  Gene Symbol: GATC
  Gene Name: glutamyl-tRNA(Gln) amidotransferase, subunit C
  ENSP ID: ENSP00000229384
MESVLEDRCLYLRSDNVVEGNCADELLQNSHRVVEEYFVAPPGNISL

SEQ ID NO: 35261 - protein, 136 aa, Homo sapiens
  Payload ID: 6964
  Gene Symbol: GATC
  Gene Name: glutamyl-tRNA(Gln) amidotransferase, subunit C
  Uniprot ID: O43716
  ENSP ID: ENSP00000446872
MWSRLVWLGLRAPLGGRQGFTSKADPQGSGRITAAVIEHLERLALVDFGSREAVARLEKAIAFADRLRAVDTDGVEPMESVLEDRCLYLRSDNVVEGNCADELLQNSHRVVEEYFVAPPGNISLPKLDEQEPFPHS

SEQ ID NO: 35262 - protein, 121 aa, Homo sapiens
  Payload ID: 6964
  Gene Symbol: GATC
  Gene Name: glutamyl-tRNA(Gln) amidotransferase, subunit C
  ENSP ID: ENSP00000448397
MWSRLVWLGLRAPLGGRQGFTSKADPQGSGRITAAVIEHLERLALVDFGSREAVARLEKAIAFADRLRAVDTDGVEPMESVLEDRLECSGVISAHYKLCFLHSSDSCASASQVAGITDVYT

SEQ ID NO: 35263 - protein, 106 aa, Homo sapiens
  Payload ID: 6965
  Gene Symbol: GLRX
  Gene Name: glutaredoxin (thioltransferase)
  Uniprot ID: P35754
  ENSP ID: ENSP00000237858
MAQEFVNCKIQPGKVVVFIKPTCPYCRRAQEILSQLPIKQGLLEFVDITATNHTNEIQDYLQQLTGARTVPRVFIGKDCIGGCSDLVSLQQSGELLTRLKQIGALQ

SEQ ID NO: 35264 - protein, 106 aa, Homo sapiens; identical to SEQ ID NO: 35263
  Payload ID: 6965
  Gene Symbol: GLRX
  Gene Name: glutaredoxin (thioltransferase)
  Uniprot ID: P35754
  ENSP ID: ENSP00000369314

SEQ ID NO: 35265 - protein, 106 aa, Homo sapiens; identical to SEQ ID NO: 35263
  Payload ID: 6965
  Gene Symbol: GLRX
  Gene Name: glutaredoxin (thioltransferase)
  Uniprot ID: P35754
  ENSP ID: ENSP00000422708

SEQ ID NO: 35266 - protein, 106 aa, Homo sapiens; identical to SEQ ID NO: 35263
  Payload ID: 6965
  Gene Symbol: GLRX
  Gene Name: glutaredoxin (thioltransferase)
  Uniprot ID: P35754
  ENSP ID: ENSP00000424636

SEQ ID NO: 35267 - protein, 106 aa, Homo sapiens; identical to SEQ ID NO: 35263
  Payload ID: 6965
  Gene Symbol: GLRX
  Gene Name: glutaredoxin (thioltransferase)
  Uniprot ID: P35754
  ENSP ID: ENSP00000427353

SEQ ID NO: 35268 - protein, 164 aa, Homo sapiens
  Payload ID: 6966
  Gene Symbol: GLRX2
  Gene Name: glutaredoxin 2
  Uniprot ID: Q9NS18
  ENSP ID: ENSP00000356409
MIWRRAALAGTRLVWSRSGSAGWLDRAAGAAGAAAAAASGMESNTSSSLENLATAPVNQIQETISDNCVVIFSKTSCSYCTMAKKLFHDMNVNYKVVELDLLEYGNQFQDALYKMTGERTVPRIFVNGTFIGGATDTHRLHKEGKLLPLVHQCYLKKSKRKEFQ

SEQ ID NO: 35269 - protein, 165 aa, Homo sapiens
  Payload ID: 6966
  Gene Symbol: GLRX2
  Gene Name: glutaredoxin 2
  Uniprot ID: Q9NS18
  ENSP ID: ENSP00000356410
MNPRDKQVSRFSPLKDVYTWVALAGIQRSGSPGRTRSAARRMESNTSSSLENLATAPVNQIQETISDNCVVIFSKTSCSYCTMAKKLFHDMNVNYKVVELDLLEYGNQFQDALYKMTGERTVPRIFVNGTFIGGATDTHRLHKEGKLLPLVHQCYLKKSKRKEFQ

SEQ ID NO: 35270 - protein, 335 aa, Homo sapiens
  Payload ID: 6967
  Gene Symbol: GLRX3
  Gene Name: glutaredoxin 3
  Uniprot ID: O76003
  ENSP ID: ENSP00000330836
MAAGAAEAAVAAVEEVGSAGQFEELLRLKAKSLLVVHFWAPWAPQCAQMNEVMAELAKELPQVSFVKLEAEGVPEVSEKYEISSVPTFLFFKNSQKIDRLDGAHAPELTKKVQRHASSGSFLPSANEHLKEDLNLRLKKLTHAAPCMLFMKGTPQEPRCGFSKQMVEILHKHNIQFSSFDIFSDEEVRQGLKAYSSWPTYPQLYVSGELIGGLDIIKELEASEELDTICPKAPKLEERLKVLTNKASVMLFMKGNKQEAKCGFSKQILEILNSTGVEYETFDILEDEEVRQGLKAYSNWPTYPQLYVKGELVGGLDIVKELKENGELLPILRGEN

SEQ ID NO: 35271 - protein, 335 aa, Homo sapiens; identical to SEQ ID NO: 35270
  Payload ID: 6967
  Gene Symbol: GLRX3
  Gene Name: glutaredoxin 3
  Uniprot ID: O76003
  ENSP ID: ENSP00000357633

SEQ ID NO: 35272 - protein, 335 aa, Homo sapiens; identical to SEQ ID NO: 35270
  Payload ID: 6967
  Gene Symbol: GLRX3
  Gene Name: glutaredoxin 3
  Uniprot ID: O76003
  ENSP ID: ENSP00000435445

SEQ ID NO: 35273 - protein, 157 aa, Homo sapiens
  Payload ID: 6968
  Gene Symbol: GLRX5
  Gene Name: glutaredoxin 5
  Uniprot ID: Q86SX6
  ENSP ID: ENSP00000328570
MSGSLGRAAAALLRWGRGAGGGGLWGPGVRAAGSGAGGGGSAEQLDALVKKDKVVVFLKGTPEQPQCGFSNAVVQILRLHGVRDYAAYNVLDDPELRQGIKDYSNWPTIPQVYLNGEFVGGCDILLQMHQNGDLVEELKKLGIHSALLDEKKDQDSK

SEQ ID NO: 35274 - protein, 137 aa, Homo sapiens
  Payload ID: 6968
  Gene Symbol: GLRX5
  Gene Name: glutaredoxin 5
  ENSP ID: ENSP00000451800
  MOD_RES (1)..(1): Any amino acid
XGAAPVRLQQRRGADPAAARRPRLRGLQRAGRPGAPTSHHPCGSELNRVVAQLRCHRVSLISCVSSEPFAHRTDHMHAGWFLGCCERLRAERVSLPHPSALDRDLAELWAFIRLTSHFGFCTEPHHPLHREPITVAG

SEQ ID NO: 35275 - protein, 290 aa, Homo sapiens
  Payload ID: 6969
  Gene Symbol: GRXCR1
  Gene Name: glutaredoxin, cysteine rich 1
  Uniprot ID: A8MXD5
  ENSP ID: ENSP00000382670
MLKREMKPESDRPRKVRFRIASSHSGRVLKEVYEDGQPSGSLDSECASICGIDGLGDSDGQQNGHIESEGDENENDQDSLLVLARAASEKGFGTRRVNILSKNGTVRGVKYKVSAGQALFNNLTKVLQQPSTDLEFDRVVIYTTCLRVVRTTFERCELVRKIFQNHRVKFEEKNIALNGEYGKELDERCRRVSEAPSLPVVFIDGHYLGGAEKILSMNESGELQDILTKIERVQHPHECPSCGGFGFLPCSVCHGSKMSMFRNCFTDSFKALKCTACNENGLQRCKNCAG

SEQ ID NO: 35276 - protein, 248 aa, Homo sapiens
  Payload ID: 6970
  Gene Symbol: GRXCR2
  Gene Name: glutaredoxin, cysteine rich 2
  Uniprot ID: A6NFK2
  ENSP ID: ENSP00000367214
MEDPEKKLNQKSDGKPRKVRFKISSSYSGRVLKQVFEDGQELESPKEEYPHSFLQESLETMDGVYGSGEVPRPQMCSPKLTAQRISVFREGNAYTLAGGQPRFNDYKANDHKPLPIIDFGKIIIYTNNLKIIRTPMDKRDFVRKILQKEEEAEEESLMNKEESYGGRDQHDRPLVEAESTLPQNRYTQEGDIPEDSCFHCRGSGSATCSLCHGSKFSMLANRFKESYRALRCPACNENGLQPCQICNQ

SEQ ID NO: 35277 - protein, 438 aa, Homo sapiens
  Payload ID: 6971
  Gene Symbol: GCDH
  Gene Name: glutaryl-CoA dehydrogenase
  Uniprot ID: Q92947
  ENSP ID: ENSP00000222214
MALRGVSVRLLSRGPGLHVLRTWVSSAAQTEKGGRTQSQLAKSSRPEFDWQDPLVLEEQLTTDEILIRDTFRTYCQERLMPRILLANRNEVFHREIISEMGELGVLGPTIKGYGCAGVSSVAYGLLARELERVDSGYRSAMSVQSSLVMHPIYAYGSEEQRQKYLPQLAKGELLGCFGLTEPNSGSDPSSMETRAHYNSSNKSYTLNGTKTWITNSPMADLFVVWARCEDGCIRGFLLEKGMRGLSAPRIQGKFSLRASATGMIIMDGVEVPEENVLPGASSLGGPFGCLNNARYGIAWGVLGASEFCLHTARQYALDRMQFGVPLARNQLIQKKLADMLTEITLGLHACLQLGRLKDQDKAAPEMVSLLKRNNCGKALDIARQARDMLGGNGISDEYHVIRHAMNLEAVNTYEGTHDIHALILGRAITGIQAFTASK

SEQ ID NO: 35278 - protein, 148 aa, Homo sapiens
  Payload ID: 6971
  Gene Symbol: GCDH
  Gene Name: glutaryl-CoA dehydrogenase
  ENSP ID: ENSP00000465618
MALRGVSVRLLSRGPGLHVLRTWVSSAAQTEKGGRTQSQLAKSSRPEFDWQDPLVLEEQLTTDEILIRDTFRTYCQERLMPRILLANRNEGYGCAGVSSVAYGLLARELERVDSGYRSAMSVQSSLVMHPIYAYGSEEQRQKYLPQLA

SEQ ID NO: 35279 - protein, 164 aa, Homo sapiens
  Payload ID: 6971
  Gene Symbol: GCDH
  Gene Name: glutaryl-CoA dehydrogenase
  ENSP ID: ENSP00000465770
MALRGVSVRLLSRGPGLHVLRTWVSSAAQTASRPEFDWQDPLVLEEQLTTDEILIRDTFRTYCQERLMPRILLANRNEVFHREIISEMGELGVLGPTIKGYGCAGVSSVAYGLLARELERVDSGYRSAMSVQSSLVMHPIYAYGSEEQRQKYLPQLAKGELLGC

SEQ ID NO: 35280 - protein, 438 aa, Homo sapiens; identical to SEQ ID NO: 35277
  Payload ID: 6971
  Gene Symbol: GCDH
  Gene Name: glutaryl-CoA dehydrogenase
  Uniprot ID: Q92947
  ENSP ID: ENSP00000466845

SEQ ID NO: 35281 - protein, 102 aa, Homo sapiens
  Payload ID: 6971
  Gene Symbol: GCDH
  Gene Name: glutaryl-CoA dehydrogenase
  ENSP ID: ENSP00000467735
  MOD_RES (1)..(1): Any amino acid
XGLHACLQLGRLKDQDKAAPEMVSLLKRNNCGKALDIARQARDMLGGNGISDEYHVIRHAMNLEAVNTYEGELIHSTAAAETMTPTEPSPDPHPTPSSGSES

SEQ ID NO: 35282 - protein, 86 aa, Homo sapiens
  Payload ID: 6971
  Gene Symbol: GCDH
  Gene Name: glutaryl-CoA dehydrogenase
  ENSP ID: ENSP00000468125
MALRGVSVRLLSRGPGLHVLRTWVSSAAQTEKGGRTQSQLAKCKDLWSHRVSAAPVQLSVCRRWTLSQNPRAARAGWQGRGQGQRH

SEQ ID NO: 35283 - protein, 204 aa, Homo sapiens
  Payload ID: 6971
  Gene Symbol: GCDH
  Gene Name: glutaryl-CoA dehydrogenase
  ENSP ID: ENSP00000468452
MALRGVSVRLLSRGPGLHVLRTWVSSAAQTEKGGRTQSQLAKSSRPEFDWQDPLVLEEQLTTDEILIRDTFRTYCQERLMPRILLANRNEESGSVAQAGVQWHDLGSLQILPPRLKRFSCLHPSSSWDYRIWLCWGFVCGLWAPGPRAGAGGQWLQVGDECPVLPRHAPYLCLWQRGTAAEVPAPAGQGGAPGLLRAHRAQQRK

SEQ ID NO: 35284 - protein, 131 aa, Homo sapiens
  Payload ID: 6971
  Gene Symbol: GCDH
  Gene Name: glutaryl-CoA dehydrogenase
  ENSP ID: ENSP00000468584
MALRGVSVRLLSRGPGLHVLRTWVSSAAQTEKGGRTQSQLAKSSRPEFDWQDPLVLEEQLTTDEILIRDTFRTYCQERLMPRILLANRNEVFHREIISEMGELGVLGPTIKGSSDSPASTPLVAGITGYGC

SEQ ID NO: 35285 - protein, 115 aa, Homo sapiens
  Payload ID: 6971
  Gene Symbol: GCDH
  Gene Name: glutaryl-CoA dehydrogenase
  ENSP ID: ENSP00000468625
  MOD_RES (1)..(1): Any amino acid
XMQFGVPLARNQLIQKKLADMLTEITLGLHACLQLGRLKDQDKAAPEMVSLLKRNNCGKALDIARQARDMLGGNGISDEYHVIRHAMNLEAVNTYEGMFLRQVSSEGSPGVRPDS

SEQ ID NO: 35286 - protein, 98 aa, Homo sapiens
  Payload ID: 6972
  Gene Symbol: GPX1
  Gene Name: glutathione peroxidase 1
  Uniprot ID: P07203
  ENSP ID: ENSP00000391316
  MOD_RES (49)..(49): Selenocysteine
MCAARLAAAAAAAQSVYAFSARPLAGGEPVSLGSLRGKVLLIENVASLXGTTVRDYTQMNELQRRLGPRGLVVLGFPCNQFGHQVRRAERGGAGADVQ

SEQ ID NO: 35287 - protein, 203 aa, Homo sapiens
  Payload ID: 6972
  Gene Symbol: GPX1
  Gene Name: glutathione peroxidase 1
  Uniprot ID: P07203
  ENSP ID: ENSP00000407375
  MOD_RES (49)..(49): Selenocysteine
MCAARLAAAAAAAQSVYAFSARPLAGGEPVSLGSLRGKVLLIENVASLXGTTVRDYTQMNELQRRLGPRGLVVLGFPCNQFGHQENAKNEEILNSLKYVRPGGGFEPNFMLFEKCEVNGAGAHPLFAFLREALPAPSDDATALMTDPKLITWSPVCRNDVAWNFEKFLVGPDGVPLRRYSRRFQTIDIEPDIEALLSQGPSCA

SEQ ID NO: 35288 - protein, 202 aa, Homo sapiens
  Payload ID: 6972
  Gene Symbol: GPX1
  Gene Name: glutathione peroxidase 1
  ENSP ID: ENSP00000478837
MCAARLAAAAAAAQSVYAFSARPLAGGEPVSLGSLRGKVLLIENVASLGTTVRDYTQMNELQRRLGPRGLVVLGFPCNQFGHQENAKNEEILNSLKYVRPGGGFEPNFMLFEKCEVNGAGAHPLFAFLREALPAPSDDATALMTDPKLITWSPVCRNDVAWNFEKFLVGPDGVPLRRYSRRFQTIDIEPDIEALLSQGPSCA

SEQ ID NO: 35289 - protein, 190 aa, Homo sapiens
  Payload ID: 6973
  Gene Symbol: GPX2
  Gene Name: glutathione peroxidase 2
  Uniprot ID: P18283
  ENSP ID: ENSP00000374265
  MOD_RES (40)..(40): Selenocysteine
MAFIAKSFYDLSAISLDGEKVDFNTFRGRAVLIENVASLXGTTTRDFTQLNELQCRFPRRLVVLGFPCNQFGHQENCQNEEILNSLKYVRPGGGYQPTFTLVQKCEVNGQNEHPVFAYLKDKLPYPYDDPFSLMTDPKLIIWSPVRRSDVAWNFEKFLIGPEGEPFRRYSRTFPTINIEPDIKRLLKVAI

SEQ ID NO: 35290 - protein, 78 aa, Homo sapiens
  Payload ID: 6973
  Gene Symbol: GPX2
  Gene Name: glutathione peroxidase 2
  ENSP ID: ENSP00000450991
  MOD_RES (40)..(40): Selenocysteine
MAFIAKSFYDLSAISLDGEKVDFNTFRGRAVLIENVASLXGTTTRDFTQLNELQCRFPRRLVVLGFPCNQFGHQNCSG

SEQ ID NO: 35291 - protein, 134 aa, Homo sapiens
  Payload ID: 6973
  Gene Symbol: GPX2
  Gene Name: glutathione peroxidase 2
  ENSP ID: ENSP00000451721
FIAKSFYDLSAISLDGEKENCQNEEILNSLKYVRPGGGYQPTFTLVQKCEVNGQNEHPVFAYLKDKLPYPYDDPFSLMTDPKLIIWSPVRRSDVAWNFEKFLIGPEGEPFRRYSRTFPTINIEPDIKRLLKVAI

SEQ ID NO: 35292 - protein, 78 aa, Homo sapiens
  Payload ID: 6973
  Gene Symbol: GPX2
  Gene Name: glutathione peroxidase 2
  ENSP ID: ENSP00000451844
  MOD_RES (40)..(40): Selenocysteine
MAFIAKSFYDLSAISLDGEKVDFNTFRGRAVLIENVASLXGTTTRDFTQLNELQCRFPRRLVVLGFPCNQFGHQERQK

SEQ ID NO: 35293 - protein, 189 aa, Homo sapiens
  Payload ID: 6973
  Gene Symbol: GPX2
  Gene Name: glutathione peroxidase 2
  ENSP ID: ENSP00000478082
MAFIAKSFYDLSAISLDGEKVDFNTFRGRAVLIENVASLGTTTRDFTQLNELQCRFPRRLVVLGFPCNQFGHQENCQNEEILNSLKYVRPGGGYQPTFTLVQKCEVNGQNEHPVFAYLKDKLPYPYDDPFSLMTDPKLIIWSPVRRSDVAWNFEKFLIGPEGEPFRRYSRTFPTINIEPDIKRLLKVAI

SEQ ID NO: 35294 - protein, 226 aa, Homo sapiens
  Payload ID: 6974
  Gene Symbol: GPX3
  Gene Name: glutathione peroxidase 3
  Uniprot ID: P22352
  ENSP ID: ENSP00000373477
  MOD_RES (73)..(73): Selenocysteine
MARLLQASCLLSLLLAGFVSQSRGQEKSKMDCHGGISGTIYEYGALTIDGEEYIPFKQYAGKYVLFVNVASYXGLTGQYIELNALQEELAPFGLVILGFPCNQFGKQEPGENSEILPTLKYVRPGGGFVPNFQLFEKGDVNGEKEQKFYTFLKNSCPPTSELLGTSDRLFWEPMKVHDIRWNFEKFLVGPDGIPIMRWHHRTTVSNVKMDILSYMRRQAALGVKRK

SEQ ID NO: 35295 - protein, 138 aa, Homo sapiens
  Payload ID: 6974
  Gene Symbol: GPX3
  Gene Name: glutathione peroxidase 3
  ENSP ID: ENSP00000427873
  MOD_RES (82)..(82): Selenocysteine
MARLLQASCLLSLLLAGFVSQSRGQEKSKAPRQMGNPQMDCHGGISGTIYEYGALTIDGEEYIPFKQYAGKYVLFVNVASYXGLTGQYIELNALQEELAPFGLVILGFPCNQFGKQEPGENSEILPTLKYVRPGGGFV

SEQ ID NO: 35296 - protein, 79 aa, Homo sapiens
  Payload ID: 6974
  Gene Symbol: GPX3
  Gene Name: glutathione peroxidase 3
  ENSP ID: ENSP00000429314
  MOD_RES (1)..(1): Any amino acid
XFGKQEPGENSEILPTLKYVRPGGGFVPNFQLFEKGDVNGEKEQKFYTFLKGQAIPQEGLGRKRVRGPQARLTLLLSLL

SEQ ID NO: 35297 - protein, 100 aa, Homo sapiens
  Payload ID: 6974
  Gene Symbol: GPX3
  Gene Name: glutathione peroxidase 3
  ENSP ID: ENSP00000429709
  MOD_RES (31)..(31): Selenocysteine
MARLLQASCLLSLLLAGFVSQSRGQEKSKNXMHYRKSLHHSVWSFWAFPATNLENRNQERTQRSFLPSSMSDQVEALSLISSSLRKGMSMERKSRNSTLS

SEQ ID NO: 35298 - protein, 63 aa, Homo sapiens
  Payload ID: 6974
  Gene Symbol: GPX3
  Gene Name: glutathione peroxidase 3
  ENSP ID: ENSP00000430508
  MOD_RES (44)..(44): Selenocysteine
MARLLQASCLLSLLLAGFVSQSRGQEKSKAPRQMGNPQVRETSXTPFAAPSAAGTPPPTVVVS

SEQ ID NO: 35299 - protein, 174 aa, Homo sapiens
  Payload ID: 6974
  Gene Symbol: GPX3
  Gene Name: glutathione peroxidase 3
  ENSP ID: ENSP00000430743
  MOD_RES (1)..(1): Any amino acid
  MOD_RES (43)..(43): Selenocysteine
  MOD_RES (111)..(111): Selenocysteine
  MOD_RES (152)..(152): Selenocysteine
  MOD_RES (165)..(165): Selenocysteine
XCHGGISGTIYEYGALTIDGEEYIPFKQYAGKYVLFVNVASYXGLTGQYIELNALQEELAPFGLVILGFPCNQFGKQEPGENSEILPTLKTPVLPPRSSWVHLTASSGNPXRFTTSAGTLRSSWWGQMVYPSCAGTTGPRSATSRWTSCPTXGGRQPWGSRGSNXRPSHPMSTM

SEQ ID NO: 35300 - protein, 72 aa, Homo sapiens
  Payload ID: 6974
  Gene Symbol: GPX3
  Gene Name: glutathione peroxidase 3
  ENSP ID: ENSP00000483660
MARLLQASCLLSLLLAGFVSQSRGQEKSKMDCHGGISGTIYEYGALTIDGEEYIPFKQYAGKYVLFVNVASY

SEQ ID NO: 35301 - protein, 225 aa, Homo sapiens
  Payload ID: 6974
  Gene Symbol: GPX3
  Gene Name: glutathione peroxidase 3
  ENSP ID: ENSP00000484258
MARLLQASCLLSLLLAGFVSQSRGQEKSKMDCHGGISGTIYEYGALTIDGEEYIPFKQYAGKYVLFVNVASYGLTGQYIELNALQEELAPFGLVILGFPCNQFGKQEPGENSEILPTLKYVRPGGGFVPNFQLFEKGDVNGEKEQKFYTFLKNSCPPTSELLGTSDRLFWEPMKVHDIRWNFEKFLVGPDGIPIMRWHHRTTVSNVKMDILSYMRRQAALGVKRK

SEQ ID NO: 35302 - protein, 197 aa, Homo sapiens
  Payload ID: 6975
  Gene Symbol: GPX4
  Gene Name: glutathione peroxidase 4
  Uniprot ID: P36969
  ENSP ID: ENSP00000346103
  MOD_RES (73)..(73): Selenocysteine
MSLGRLCRLLKPALLCGALAAPGLAGTMCASRDDWRCARSMHEFSAKDIDGHMVNLDKYRGFVCIVTNVASQXGKTEVNYTQLVDLHARYAECGLRILAFPCNQFGKQEPGSNEEIKEFAAGYNVKFDMFSKICVNGDDAHPLWKWMKIQPKGKGILGNAIKWNFTKFLIDKNGCVVKRYGPMEEPLVIEKDLPHYF

SEQ ID NO: 35303 - protein, 242 aa, Homo sapiens
  Payload ID: 6975
  Gene Symbol: GPX4
  Gene Name: glutathione peroxidase 4
  ENSP ID: ENSP00000464989
  MOD_RES (46)..(46): Selenocysteine
  MOD_RES (201)..(201): Selenocysteine
MCASRDDWRCARSMHEFSAKDIDGHMVNLDKYRGFVCIVTNVASQXGKTEVNYTQLVDLHARYAECGLRILAFPCNQFGKQEPGSNEEIKEFAAGYNVKFDMFSKICVNGDDAHPLWKWMKIQPKGKGILGNAIKWNFTKFGHRLSTVPHRQERLRGEALRTHGGAPGDREGPAPLFLAPQVCGPARAPAHALGAFHRHSXRPACKPAGGADPKIQRAPRRRKVPWPAGLGSAPPPLATLWE

SEQ ID NO: 35304 - protein, 175 aa, Homo sapiens
  Payload ID: 6975
  Gene Symbol: GPX4
  Gene Name: glutathione peroxidase 4
  ENSP ID: ENSP00000465828
  MOD_RES (46)..(46): Selenocysteine
MCASRDDWRCARSMHEFSAKDIDGHMVNLDKYRGFVCIVTNVASQXGKTEVNYTQLVDLHARYAECGLRILAFPCNQFGKQEPGSNEEIKEFAAGYNVKFDMFSKICVNGDDAHPLWKWMKIQPKGKGILGKTAWGLWGAAGDAHVHVLLFQCHQVELHQVPHRQERLRGEALRT

SEQ ID NO: 35305 - protein, 180 aa, Homo sapiens
  Payload ID: 6975
  Gene Symbol: GPX4
  Gene Name: glutathione peroxidase 4
  ENSP ID: ENSP00000466872
  MOD_RES (73)..(73): Selenocysteine
  MOD_RES (169)..(169): Selenocysteine
  MOD_RES (180)..(180): Selenocysteine
MSLGRLCRLLKPALLCGALAAPGLAGTMCASRDDWRCARSMHEFSAKDIDGHMVNLDKYRGFVCIVTNVASQXGKTEVNYTQLVDLHARYAECGLRILAFPCNQFGKQEPGSNEEIKEFAAGYNVKFDMFSKICVNGDDAHPLWKWMKIQPKGKGILGNSSSTRTAAWXSATDPWRSPWX

SEQ ID NO: 35306 - protein, 166 aa, Homo sapiens
  Payload ID: 6975
  Gene Symbol: GPX4
  Gene Name: glutathione peroxidase 4
  ENSP ID: ENSP00000467900
YAECGLRILAFPCNQFGKQEPGSNEEIKEFAAGYNVKFDMFSKICVNGDDAHPLWKWMKIQPKGKGILGNAIKWNFTKFLIDKNGCVVKRYGPMEEPLLHKCVAPPEPLPTPLEPSTGTHDGLPANLLVGQTRKSSVHPAGGRSHGLLGLARRPHPWLPCGNKQTN

SEQ ID NO: 35307 - protein, 155 aa, Homo sapiens
  Payload ID: 6975
  Gene Symbol: GPX4
  Gene Name: glutathione peroxidase 4
  ENSP ID: ENSP00000468349
  MOD_RES (33)..(33): Selenocysteine
MHEFSAKDIDGHMVNLDKYRGFVCIVTNVASQXGKTEVNYTQLVDLHARYAECGLRILAFPCNQFGKQEPGSNEEIKEFAAGYNVKFDMFSKICVNGDDAHPLWKWMKIQPKGKGILGNAIKWNFTKFLIDKNGCVVKRYGPMEEPLVIEKDLPH

SEQ ID NO: 35308 - protein, 179 aa, Homo sapiens
  Payload ID: 6975
  Gene Symbol: GPX4
  Gene Name: glutathione peroxidase 4
  ENSP ID: ENSP00000473614
  MOD_RES (110)..(110): Selenocysteine
MGRAGAGSPGRRRQRCQSRGRRRPRAPRRRKAPACRRRRARRRRKKPCPRSLRPEIHECPKSQDPCASRDDWRCARSMHEFSAKDIDGHMVNLDKYRGFVCIVTNVASQXGKTEVNYTQLVDLHARYAECGLRILAFPCNQFGKQEPGSNEEIKEFAAGYNVKFDMFSKICVNGDDAHP

SEQ ID NO: 35309 - protein, 233 aa, Homo sapiens
  Payload ID: 6975
  Gene Symbol: GPX4
  Gene Name: glutathione peroxidase 4
  ENSP ID: ENSP00000477503
MGRAGAGSPGRRRQRCQSRGRRRPRAPRRRKAPACRRRRARRRRKKPCPRSLRPEIHECPKSQDPCASRDDWRCARSMHEFSAKDIDGHMVNLDKYRGFVCIVTNVASQGKTEVNYTQLVDLHARYAECGLRILAFPCNQFGKQEPGSNEEIKEFAAGYNVKFDMFSKICVNGDDAHPLWKWMKIQPKGKGILGNAIKWNFTKFLIDKNGCVVKRYGPMEEPLVIEKDLPHYF

SEQ ID NO: 35310 - protein, 170 aa, Homo sapiens
  Payload ID: 6975
  Gene Symbol: GPX4
  Gene Name: glutathione peroxidase 4
  Uniprot ID: P36969
  ENSP ID: ENSP00000483655
  MOD_RES (46)..(46): Selenocysteine
MCASRDDWRCARSMHEFSAKDIDGHMVNLDKYRGFVCIVTNVASQXGKTEVNYTQLVDLHARYAECGLRILAFPCNQFGKQEPGSNEEIKEFAAGYNVKFDMFSKICVNGDDAHPLWKWMKIQPKGKGILGNAIKWNFTKFLIDKNGCVVKRYGPMEEPLVIEKDLPHYF

SEQ ID NO: 35311 - protein, 134 aa, Homo sapiens
  Payload ID: 6975
  Gene Symbol: GPX4
  Gene Name: glutathione peroxidase 4
  ENSP ID: ENSP00000484697
  MOD_RES (108)..(108): Selenocysteine
MGRAGAGSPGRRRQRCQSRGRRRPRAPRRRKAPACRRRRARRRRKKPCPRSLRPEIHECPKSQDPCASRDDWRCARSMHEFSAKDIDGHMVNLDKGFVCIVTNVASQXGKTEVNYTQLVDLHARYAECGLRILA

SEQ ID NO: 35312 - protein, 196 aa, Homo sapiens
  Payload ID: 6975
  Gene Symbol: GPX4
  Gene Name: glutathione peroxidase 4
  ENSP ID: ENSP00000485000
MSLGRLCRLLKPALLCGALAAPGLAGTMCASRDDWRCARSMHEFSAKDIDGHMVNLDKYRGFVCIVTNVASQGKTEVNYTQLVDLHARYAECGLRILAFPCNQFGKQEPGSNEEIKEFAAGYNVKFDMFSKICVNGDDAHPLWKWMKIQPKGKGILGNAIKWNFTKFLIDKNGCVVKRYGPMEEPLVIEKDLPHYF

SEQ ID NO: 35313 - protein, 221 aa, Homo sapiens
  Payload ID: 6976
  Gene Symbol: GPX5
  Gene Name: glutathione peroxidase 5
  Uniprot ID: O75715
  ENSP ID: ENSP00000392398
MTTQLRVVHLLPLLLACFVQTSPKQEKMKMDCHKDEKGTIYDYEAIALNKNEYVSFKQYVGKHILFVNVATYCGLTAQYPELNALQEELKPYGLVVLGFPCNQFGKQEPGDNKEILPGLKYVRPGGGFVPSFQLFEKGDVNGEKEQKVFSFLKHSCPHPSEILGTFKSISWDPVKVHDIRWNFEKFLVGPDGIPVMRWSHRATVSSVKTDILAYLKQFKTK

SEQ ID NO: 35314 - protein, 100 aa, Homo sapiens
  Payload ID: 6976
  Gene Symbol: GPX5
  Gene Name: glutathione peroxidase 5
  Uniprot ID: O75715
  ENSP ID: ENSP00000419935
MTTQLRVVHLLPLLLACFVQTSPKQEKMKMDCHKDEKGTIYDYEAIALNKNEYVSFKQYVGKHILFVNVATYCGLTAQYPGMSVQGEDLYLVSSFLRKGM

SEQ ID NO: 35315 - protein, 100 aa, Homo sapiens; identical to SEQ ID NO: 35314
  Payload ID: 6976
  Gene Symbol: GPX5
  Gene Name: glutathione peroxidase 5
  ENSP ID: ENSP00000449271

SEQ ID NO: 35316 - protein, 221 aa, Homo sapiens; identical to SEQ ID NO: 35313
  Payload ID: 6976
  Gene Symbol: GPX5
  Gene Name: glutathione peroxidase 5
  ENSP ID: ENSP00000450365

SEQ ID NO: 35317 - protein, 221 aa, Homo sapiens
  Payload ID: 6977
  Gene Symbol: GPX6
  Gene Name: glutathione peroxidase 6
  Uniprot ID: P59796
  ENSP ID: ENSP00000354581
  MOD_RES (73)..(73): Selenocysteine
MFQQFQASCLVLFFLVGFAQQTLKPQNRKVDCNKGVTGTIYEYGALTLNGEEYIQFKQFAGKHVLFVNVAAYXGLAAQYPELNALQEELKNFGVIVLAFPCNQFGKQEPGTNSEILLGLKYVCPGSGFVPSFQLFEKGDVNGEKEQKVFTFLKNSCPPTSDLLGSSSQLFWEPMKVHDIRWNFEKFLVGPDGVPVMHWFHQAPVSTVKSDILEYLKQFNTH

SEQ ID NO: 35318 - protein, 181 aa, Homo sapiens
  Payload ID: 6977
  Gene Symbol: GPX6
  Gene Name: glutathione peroxidase 6
  ENSP ID: ENSP00000417364
  MOD_RES (73)..(73): Selenocysteine
  MOD_RES (141)..(141): Selenocysteine
MFQQFQASCLVLFFLVGFAQQTLKPQNRKVDCNKGVTGTIYEYGALTLNGEEYIQFKQFAGKHVLFVNVAAYXGLAAQYPELNALQEELKNFGVIVLAFPCNQFGKQEPGTNSEILLGLKTPALRPLIFWAHQANSSGSPXRSMISAGTLRNFWWGPMESLSCIGSTRLQSAQSSQTSWST

SEQ ID NO: 35319 - protein, 220 aa, Homo sapiens
  Payload ID: 6977
  Gene Symbol: GPX6
  Gene Name: glutathione peroxidase 6
  ENSP ID: ENSP00000483462
MFQQFQASCLVLFFLVGFAQQTLKPQNRKVDCNKGVTGTIYEYGALTLNGEEYIQFKQFAGKHVLFVNVAAYGLAAQYPELNALQEELKNFGVIVLAFPCNQFGKQEPGTNSEILLGLKYVCPGSGFVPSFQLFEKGDVNGEKEQKVFTFLKNSCPPTSDLLGSSSQLFWEPMKVHDIRWNFEKFLVGPDGVPVMHWFHQAPVSTVKSDILEYLKQFNTH

SEQ ID NO: 35320 - protein, 72 aa, Homo sapiens
  Payload ID: 6977
  Gene Symbol: GPX6
  Gene Name: glutathione peroxidase 6
  ENSP ID: ENSP00000486277
MFQQFQASCLVLFFLVGFAQQTLKPQNRKVDCNKGVTGTIYEYGALTLNGEEYIQFKQFAGKHVLFVNVAAY

SEQ ID NO: 35321 - protein, 187 aa, Homo sapiens
  Payload ID: 6978
  Gene Symbol: GPX7
  Gene Name: glutathione peroxidase 7
  Uniprot ID: Q96SL4
  ENSP ID: ENSP00000354677
MVAATVAAAWLLLWAAACAQQEQDFYDFKAVNIRGKLVSLEKYRGSVSLVVNVASECGFTDQHYRALQQLQRDLGPHHFNVLAFPCNQFGQQEPDSNKEIESFARRTYSVSFPMFSKIAVTGTGAHPAFKYLAQTSGKEPTWNFWKYLVAPDGKVVGAWDPTVSVEEVRPQITALVRKLILLKREDL

SEQ ID NO: 35322 - protein, 90 aa, Homo sapiens
  Payload ID: 6979
  Gene Symbol: GPX8
  Gene Name: glutathione peroxidase 8 (putative)
  ENSP ID: ENSP00000296734
MEPLAAYPLKCSGPRAKVFAVLLSIVLCTVTLFLLQLKFLKPKINSFYAFEVKDAKGRTVSLEKYKGKILQRRNQGGIFGSILSTLRVKL

SEQ ID NO: 35323 - protein, 209 aa, Homo sapiens
  Payload ID: 6979
  Gene Symbol: GPX8
  Gene Name: glutathione peroxidase 8 (putative)
  Uniprot ID: Q8TED1
  ENSP ID: ENSP00000423822
MEPLAAYPLKCSGPRAKVFAVLLSIVLCTVTLFLLQLKFLKPKINSFYAFEVKDAKGRTVSLEKYKGKVSLVVNVASDCQLTDRNYLGLKELHKEFGPSHFSVLAFPCNQFGESEPRPSKEVESFARKNYGVTFPIFHKIKILGSEGEPAFRFLVDSSKKEPRWNFWKYLVNPEGQVVKFWKPEEPIEVIRPDIAALVRQVIIKKKEDL

SEQ ID NO: 35324 - protein, 158 aa, Homo sapiens
  Payload ID: 6979
  Gene Symbol: GPX8
  Gene Name: glutathione peroxidase 8 (putative)
  ENSP ID: ENSP00000427466
MEPLAAYPLKCSGPRAKVSLVVNVASDCQLTDRNYLGLKELHKEFGPSHFSVLAFPCNQFGESEPRPSKEVESFARKNYGVTFPIFHKIKILGSEGEPAFRFLVDSSKKEPRWNFWKYLVNPEGQVVKFWKPEEPIEVIRPDIAALVRQVIIKKKEDL

SEQ ID NO: 35325 - protein, 522 aa, Homo sapiens
  Payload ID: 6980
  Gene Symbol: GSR
  Gene Name: glutathione reductase
  Uniprot ID: P00390
  ENSP ID: ENSP00000221130
MALLPRALSAGAGPSWRRAARAFRGFLLLLPEPAALTRALSRAMACRQEPQPQGPPPAAGAVASYDYLVIGGGSGGLASARRAAELGARAAVVESHKLGGTCVNVGCVPKKVMWNTAVHSEFMHDHADYGFPSCEGKFNWRVIKEKRDAYVSRLNAIYQNNLTKSHIEIIRGHAAFTSDPKPTIEVSGKKYTAPHILIATGGMPSTPHESQIPGASLGITSDGFFQLEELPGRSVIVGAGYIAVEMAGILSALGSKTSLMIRHDKVLRSFDSMISTNCTEELENAGVEVLKFSQVKEVKKTLSGLEVSMVTAVPGRLPVMTMIPDVDCLLWAIGRVPNTKDLSLNKLGIQTDDKGHIIVDEFQNTNVKGIYAVGDVCGKALLTPVAIAAGRKLAHRLFEYKEDSKLDYNNIPTVVFSHPPIGTVGLTEDEAIHKYGIENVKTYSTSFTPMYHAVTKRKTKCVMKMVCANKEEKVVGIHMQGLGCDEMLQGFAVAVKMGATKADFDNTVAIHPTSSEELVTLR

SEQ ID NO: 35326 - protein, 144 aa, Homo sapiens
  Payload ID: 6980
  Gene Symbol: GSR
  Gene Name: glutathione reductase
  ENSP ID: ENSP00000430825
MWNTAVHSEFMHDHADYGFPSCEGKFNWRVIKEKRDAYVSRLNAIYQNNLTKSHIEIIRGHAAFTSDPKPTIEVSGKKYTAPHILIATGGMPSTPHESQIPGASLGITSDGFFQLEELPGRSVIVGAGYIAVEMAGILSALGSK

SEQ ID NO: 35327 - protein, 131 aa, Homo sapiens
  Payload ID: 6980
  Gene Symbol: GSR
  Gene Name: glutathione reductase
  ENSP ID: ENSP00000431044
PAAGAVASYDYLVIGGGSGGLASARRAAELGARAAVVESHKLGGTCVNVGCVPKKVMWNTAVHSEFMHDHADYGFPSCEGKFNWRVIKEKRDAYVSRLNAIYQNNLTKPQRHCWCRLHCCGDGRDPVSPGF

SEQ ID NO: 35328 - protein, 440 aa, Homo sapiens
  Payload ID: 6980
  Gene Symbol: GSR
  Gene Name: glutathione reductase
  Uniprot ID: P00390
  ENSP ID: ENSP00000438845
MALLPRALSAGAGPSWRRAARAFRGFLLLLPEPAALTRALSRAMACRQEPQPQGPPPAAGAVASYDYLVIGGGSGGLASARRAAELGARAAVVESHKLGGTCVNVGCVPKKVMWNTAVHSEFMHDHADYGFPSCEGKFNWRVIKEKRDAYVSRLNAIYQNNLTKSHIEIIRGHAAFTSDPKPTIEVSGKKYTAPHILIATGGMPSTPHESQIPGASLGITSDGFFQLEELPGRSVIVGAGYIAVEMAGILSALGSKTSLMIRHDKGIQTDDKGHIIVDEFQNTNVKGIYAVGDVCGKALLTPVAIAAGRKLAHRLFEYKEDSKLDYNNIPTVVFSHPPIGTVGLTEDEAIHKYGIENVKTYSTSFTPMYHAVTKRKTKCVMKMVCANKEEKVVGIHMQGLGCDEMLQGFAVAVKMGATKADFDNTVAIHPTSSEELVTLR

SEQ ID NO: 35329 - protein, 469 aa, Homo sapiens
  Payload ID: 6980
  Gene Symbol: GSR
  Gene Name: glutathione reductase
  Uniprot ID: P00390
  ENSP ID: ENSP00000444559
MALLPRALSAGAGPSWRRAARAFRGFLLLLPEPAALTRALSRAMACRQEPQPQGPPPAAGAVASYDYLVIGGGSGGLASARRAAELGARAAVVESHKLGGTCVNVGCVPKKVMWNTAVHSEFMHDHADYGFPSCEGKFNWRVIKEKRDAYVSRLNAIYQNNLTKSHIEIIRGHAAFTSDPKPTIEVSGKKYTAPHILIATGGMPSTPHESQIPGASLGITSDGFFQLEELPGRSVIVGAGYIAVEMAGILSALGSKTSLMIRHDKVLRSFDSMISTNCTEELENAGVEVLKFSQGIQTDDKGHIIVDEFQNTNVKGIYAVGDVCGKALLTPVAIAAGRKLAHRLFEYKEDSKLDYNNIPTVVFSHPPIGTVGLTEDEAIHKYGIENVKTYSTSFTPMYHAVTKRKTKCVMKMVCANKEEKVVGIHMQGLGCDEMLQGFAVAVKMGATKADFDNTVAIHPTSSEELVTLR

SEQ ID NO: 35330 - protein, 493 aa, Homo sapiens
  Payload ID: 6980
  Gene Symbol: GSR
  Gene Name: glutathione reductase
  Uniprot ID: P00390
  ENSP ID: ENSP00000445516
MALLPRALSAGAGPSWRRAARAFRGFLLLLPEPAALTRALSRAMACRQEPQPQGPPPAAGAVASYDYLVIGGGSGGLASARRAAELGARAAVVESHKLGGTCVNVGCVPKKVMWNTAVHSEFMHDHADYGFPSCEGKFNWRVIKEKRDAYVSRLNAIYQNNLTKSHIEIIRGHAAFTSDPKPTIEVSGKKYTAPHILIATGGMPSTPHESQIPGASLGITSDGFFQLEELPGRSVIVGAGYIAVEMAGILSALGSKTSLMIRHDKVKEVKKTLSGLEVSMVTAVPGRLPVMTMIPDVDCLLWAIGRVPNTKDLSLNKLGIQTDDKGHIIVDEFQNTNVKGIYAVGDVCGKALLTPVAIAAGRKLAHRLFEYKEDSKLDYNNIPTVVFSHPPIGTVGLTEDEAIHKYGIENVKTYSTSFTPMYHAVTKRKTKCVMKMVCANKEEKVVGIHMQGLGCDEMLQGFAVAVKMGATKADFDNTVAIHPTSSEELVTLR

SEQ ID NO: 35331 - protein, 222 aa, Homo sapiens
  Payload ID: 6981
  Gene Symbol: GSTA1
  Gene Name: glutathione S-transferase alpha 1
  Uniprot ID: P08263
  ENSP ID: ENSP00000335620
MAEKPKLHYFNARGRMESTRWLLAAAGVEFEEKFIKSAEDLDKLRNDGYLMFQQVPMVEIDGMKLVQTRAILNYIASKYNLYGKDIKERALIDMYIEGIADLGEMILLLPVCPPEEKDAKLALIKEKIKNRYFPAFEKVLKSHGQDYLVGNKLSRADIHLVELLYYVEELDSSLISSFPLLKALKTRISNLPTVKKFLQPGSPRKPPMDEKSLEEARKIFRF

SEQ ID NO: 35332 - protein, 222 aa, Homo sapiens
  Payload ID: 6982
  Gene Symbol: GSTA2
  Gene Name: glutathione S-transferase alpha 2
  Uniprot ID: P09210
  ENSP ID: ENSP00000420168
MAEKPKLHYSNIRGRMESIRWLLAAAGVEFEEKFIKSAEDLDKLRNDGYLMFQQVPMVEIDGMKLVQTRAILNYIASKYNLYGKDIKEKALIDMYIEGIADLGEMILLLPFSQPEEQDAKLALIQEKTKNRYFPAFEKVLKSHGQDYLVGNKLSRADIHLVELLYYVEELDSSLISSFPLLKALKTRISNLPTVKKFLQPGSPRKPPMDEKSLEESRKIFRF

SEQ ID NO: 35333 - protein, 222 aa, Homo sapiens
  Payload ID: 6983
  Gene Symbol: GSTA3
  Gene Name: glutathione S-transferase alpha 3
  Uniprot ID: Q16772
  ENSP ID: ENSP00000211122
MAGKPKLHYFNGRGRMEPIRWLLAAAGVEFEEKFIGSAEDLGKLRNDGSLMFQQVPMVEIDGMKLVQTRAILNYIASKYNLYGKDIKERALIDMYTEGMADLNEMILLLPLCRPEEKDAKIALIKEKTKSRYFPAFEKVLQSHGQDYLVGNKLSRADISLVELLYYVEELDSSLISNFPLLKALKTRISNLPTVKKFLQPGSPRKPPADAKALEEARKIFRF

SEQ ID NO: 35334 - protein, 172 aa, Homo sapiens
  Payload ID: 6983
  Gene Symbol: GSTA3
  Gene Name: glutathione S-transferase alpha 3
  ENSP ID: ENSP00000360007
MFQQVPMVEIDGMKLVQTRAILNYIASKYNLYGKDIKERALIDMYTEGMADLNEMILLLPLCRPEEKDAKIALIKEKTKSRYFPAFEKVLQSHGQDYLVGNKLSRADISLVELLYYVEELDSSLISNFPLLKALKTRISNLPTVKKFLQPGSPRKPPADAKALEEARKIFRF

SEQ ID NO: 35335 - protein, 108 aa, Homo sapiens
  Payload ID: 6983
  Gene Symbol: GSTA3
  Gene Name: glutathione S-transferase alpha 3
  ENSP ID: ENSP00000399142
MFQQVPMVEIDGMKLVQTRAILNYIASKYNLYGKDIKERALIDMYTEGMADLNEMILLLPLCRPEEKDAKIALIKEKTKSRYFPAFRADISLVELLYYVEELDSSLIS

SEQ ID NO: 35336 - protein, 222 aa, Homo sapiens
  Payload ID: 6983
  Gene Symbol: GSTA3
  Gene Name: glutathione S-transferase alpha 3
  ENSP ID: ENSP00000481135
MAGKPKLHYFNGRGRMEPIRWLLAAAGVEFEEKFIGSAEDLGKLRNDGSLMFQQVPMVEIDGMKLVQTRAILNYIASKYNLYGKDIKERALIDMYTEGMADLNEMILLLPLCRPEEKDAKIALIKEKTKSRYFPAFEKVLQSHGQDYLVGNKLSRADISLVELLYYVEELDSSLISNFPLLKALKTRISNLPMVKKFLQPGSPRKSLMDEKSLEEARKIFRF

SEQ ID NO: 35337 - protein, 222 aa, Homo sapiens
  Payload ID: 6984
  Gene Symbol: GSTA4
  Gene Name: glutathione S-transferase alpha 4
  Uniprot ID: O15217
  ENSP ID: ENSP00000359998
MAARPKLHYPNGRGRMESVRWVLAAAGVEFDEEFLETKEQLYKLQDGNHLLFQQVPMVEIDGMKLVQTRSILHYIADKHNLFGKNLKERTLIDMYVEGTLDLLELLIMHPFLKPDDQQKEVVNMAQKAIIRYFPVFEKILRGHGQSFLVGNQLSLADVILLQTILALEEKIPNILSAFPFLQEYTVKLSNIPTIKRFLEPGSKKKPPPDEIYVRTVYNIFRP

SEQ ID NO: 35338 - protein, 129 aa, Homo sapiens
  Payload ID: 6984
  Gene Symbol: GSTA4
  Gene Name: glutathione S-transferase alpha 4
  Uniprot ID: O15217
  ENSP ID: ENSP00000359999
MYVEGTLDLLELLIMHPFLKPDDQQKEVVNMAQKAIIRYFPVFEKILRGHGQSFLVGNQLSLADVILLQTILALEEKIPNILSAFPFLQEYTVKLSNIPTIKRFLEPGSKKKPPPDEIYVRTVYNIFRP

SEQ ID NO: 35339 - protein, 222 aa, Homo sapiens; identical to SEQ ID NO: 35337
  Payload ID: 6984
  Gene Symbol: GSTA4
  Gene Name: glutathione S-transferase alpha 4
  Uniprot ID: O15217
  ENSP ID: ENSP00000360002

SEQ ID NO: 35340 - protein, 89 aa, Homo sapiens
  Payload ID: 6984
  Gene Symbol: GSTA4
  Gene Name: glutathione S-transferase alpha 4
  ENSP ID: ENSP00000394228
MYVEGTLDLLELLIMHPFLKPDDQQKEVVNMAQKAIIRYFPVFEKILRGHGQSFLVGNQLSLADVILLQTILALEEKIPNILSAFPFLQ

SEQ ID NO: 35341 - protein, 222 aa, Homo sapiens
  Payload ID: 6985
  Gene Symbol: GSTA5
  Gene Name: glutathione S-transferase alpha 5
  Uniprot ID: Q7RTV2
  ENSP ID: ENSP00000284562
MAEKPKLHYSNARGSMESIRWLLAAAGVELEEKFLESAEDLDKLRNDGSLLFQQVPMVEIDGMKLVQTRAILNYIASKYNLYGKDMKERALIDMYTEGIVDLTEMILLLLICQPEERDAKTALVKEKIKNRYFPAFEKVLKSHRQDYLVGNKLSWADIHLVELFYYVEELDSSLISSFPLLKALKTRISNLPTVKKFLQPGSQRKPPMDEKSLEEARKIFRF

SEQ ID NO: 35342 - protein, 222 aa, Homo sapiens; identical to SEQ ID NO: 35341
  Payload ID: 6985
  Gene Symbol: GSTA5
  Gene Name: glutathione S-transferase alpha 5
  Uniprot ID: Q7RTV2
  ENSP ID: ENSP00000360028

SEQ ID NO: 35343 - protein, 222 aa, Homo sapiens
  Payload ID: 6985
  Gene Symbol: GSTA5
  Gene Name: glutathione S-transferase alpha 5
  ENSP ID: ENSP00000482006
MAEKPKLHYSNAQGRMESTWWLLAAAGVELEEKFLESAEDLDKLRNDGSLLFQQVPMVEIDGMKLVQTRAILNYIASKYNLYGKDMKERALIDMYTEGIVDLTEMILLLLICQPEERDAKTALVKEKIKNRYFPAFEKVLKSHRQDYLVGNKLSWADIHLVELFYYVEELDSSLISSFPLLKALKTRISNLPTVKKFLQPGSQRKPPMDEKSLEEARKIFRF

SEQ ID NO: 35344 - protein, 226 aa, Homo sapiens
  Payload ID: 6986
  Gene Symbol: GSTK1
  Gene Name: glutathione S-transferase kappa 1
  Uniprot ID: Q9Y2Q3
  ENSP ID: ENSP00000351181
MGPLPRTVELFYDVLSPYSWLGFEILCRYQNIWNINLQLRPSLITGIMKDSGNKPPGLLPRKGLYMANDLKLLRHHLQIPIHFPKDFLSVMLEKGSLSAMRFLTAVNLEHPEMLEKASRELWMRVWSRNEDITEPQSILAAAEKAGMSAEQAQGLLEKIATPKVKNQLKETTEAACRYGAFGLPITVAHVDGQTHMLFGSDRMELLAHLLGEKWMGPIPPAVNARL

SEQ ID NO: 35345 - protein, 214 aa, Homo sapiens
  Payload ID: 6986
  Gene Symbol: GSTK1
  Gene Name: glutathione S-transferase kappa 1
  Uniprot ID: Q9Y2Q3
  ENSP ID: ENSP00000386944
MGPLPRTVELFYDVLSPYSWLGFEILCRYQNIWNINLQLRPSLITGIMKDSGNKPPGLLPRKGLYMANDLKLLRHHLQIPIHFPKDFLSVMLEKGSLSAMRFLTAVNLEHPEMLEKASRELWMRVWSRAAEKAGMSAEQAQGLLEKIATPKVKNQLKETTEAACRYGAFGLPITVAHVDGQTHMLFGSDRMELLAHLLGEKWMGPIPPAVNARL

SEQ ID NO: 35346 - protein, 190 aa, Homo sapiens
  Payload ID: 6986
  Gene Symbol: GSTK1
  Gene Name: glutathione S-transferase kappa 1
  ENSP ID: ENSP00000406802
MGPLPRTVELFYDVLSPYSWLGFEILCRYQNIWNINLQLRPSLITGIMKDSGNKPPGLLPRKGLYMANDLKLLRHHLQIPIHFPKDFLSVMLEKGSLSAMRFLTAVNLEHPEMLEKASRELWMRVWSRNEDITEPQSILAAAEKAGMSAEQAQGLLEKIATPKVKNQLKETTEAACRYGERSGWALYLQP

SEQ ID NO: 35347 - protein, 118 aa, Homo sapiens
  Payload ID: 6986
  Gene Symbol: GSTK1
  Gene Name: glutathione S-transferase kappa 1
  ENSP ID: ENSP00000408341
MTKGSLEVKGTMELILCRYQNIWNINLQLRPSLITGIMKDSGNKPPGLLPRKGLYMANDLKLLRHHLQIPIHFPKDFLSVMLEKGSLSAMRFLTAVNLEHPEMLEKASRELWMRVWSR

SEQ ID NO: 35348 - protein, 183 aa, Homo sapiens
  Payload ID: 6986
  Gene Symbol: GSTK1
  Gene Name: glutathione S-transferase kappa 1
  Uniprot ID: Q9Y2Q3
  ENSP ID: ENSP00000415813
MGPLPRTVELFYDVLSPYSWLGFEILCRYQNIWNINLQLRPSLITGIMKDSGSLSAMRFLTAVNLEHPEMLEKASRELWMRVWSRNEDITEPQSILAAAEKAGMSAEQAQGLLEKIATPKVKNQLKETTEAACRYGAFGLPITVAHVDGQTHMLFGSDRMELLAHLLGEKWMGPIPPAVNARL

SEQ ID NO: 35349 - protein, 282 aa, Homo sapiens
  Payload ID: 6986
  Gene Symbol: GSTK1
  Gene Name: glutathione S-transferase kappa 1
  Uniprot ID: Q9Y2Q3
  ENSP ID: ENSP00000431049
MGPLPRTVELFYDVLSPYSWLGFEILCRYQNIWNINLQLRPSLITGIMKDSGNKPPGLLPRKGLYMANDLKLLRHHLQIPIHFPKDFLSVMLEKGSLSAMRFLTAVNLEHPEMLEKASRELWMRVWSRVSVGLWESSGRTLDDFLTFPRHVFRVMILPPPGGSTVLPVTPLSPHRLPAVFSSSQNEDITEPQSILAAAEKAGMSAEQAQGLLEKIATPKVKNQLKETTEAACRYGAFGLPITVAHVDGQTHMLFGSDRMELLAHLLGEKWMGPIPPAVNARL

SEQ ID NO: 35350 - protein, 181 aa, Homo sapiens
  Payload ID: 6987
  Gene Symbol: GSTM1
  Gene Name: glutathione S-transferase mu 1
  Uniprot ID: P09488
  ENSP ID: ENSP00000234981
MPMILGYWDIRGLAHAIRLLLEYTDSSYEEKKYTMGDAPDYDRSQWLNEKFKLGLDFPNLPYLIDGAHKITQSNAILCYIARKHNLCGETEEEKIRVDILENQTMDNHMQLGMICYNPEFEKLKPKYLEELPEKLKLYSEFLGKRPWFAGNKGLEKISAYMKSSRFLPRPVFSKMAVWGNK

SEQ ID NO: 35351 - protein, 218 aa, Homo sapiens
  Payload ID: 6987
  Gene Symbol: GSTM1
  Gene Name: glutathione S-transferase mu 1
  Uniprot ID: P09488
  ENSP ID: ENSP00000311469
MPMILGYWDIRGLAHAIRLLLEYTDSSYEEKKYTMGDAPDYDRSQWLNEKFKLGLDFPNLPYLIDGAHKITQSNAILCYIARKHNLCGETEEEKIRVDILENQTMDNHMQLGMICYNPEFEKLKPKYLEELPEKLKLYSEFLGKRPWFAGNKITFVDFLVYDVLDLHRIFEPKCLDAFPNLKDFISRFEGLEKISAYMKSSRFLPRPVFSKMAVWGNK

SEQ ID NO: 35352 - protein, 149 aa, Homo sapiens
  Payload ID: 6987
  Gene Symbol: GSTM1
  Gene Name: glutathione S-transferase mu 1
  ENSP ID: ENSP00000358834
MPMILGYWDIRGLAHAIRLLLEYTDSSYEEKKYTMGDAPDYDRSQWLNEKFKLGLDFPNLPYLIDGAHKITQSNAILCYIARKHNLCGETEEEKIRVDILENQTMDNHMQLGMICYNPEFGLEKISAYMKSSRFLPRPVFSKMAVWGNK

SEQ ID NO: 35353 - protein, 237 aa, Homo sapiens
  Payload ID: 6987
  Gene Symbol: GSTM1
  Gene Name: glutathione S-transferase mu 1
  ENSP ID: ENSP00000358838
MPMILGYWDIRGLAHAIRLLLEYTDSSYEEKKYTMGDAPDYDRSQWLNEKFKLGLDFPNGMLGSLVAQLSFAGFPSIQLPYLIDGAHKITQSNAILCYIARKHNLCGETEEEKIRVDILENQTMDNHMQLGMICYNPEFEKLKPKYLEELPEKLKLYSEFLGKRPWFAGNKITFVDFLVYDVLDLHRIFEPKCLDAFPNLKDFISRFEGLEKISAYMKSSRFLPRPVFSKMAVWGNK

SEQ ID NO: 35354 - protein, 85 aa, Homo sapiens
  Payload ID: 6987
  Gene Symbol: GSTM1
  Gene Name: glutathione S-transferase mu 1
  ENSP ID: ENSP00000455929
MPMILGYWDIRGLAHAIRLLLEYTDSSYEEKKYTMGDAPDYDRSQWLNEKFKLGLDFPNVGRQKRRRFVWTFWRTRPWTTICSWA

SEQ ID NO: 35355 - protein, 102 aa, Homo sapiens
  Payload ID: 6987
  Gene Symbol: GSTM1
  Gene Name: glutathione S-transferase mu 1
  ENSP ID: ENSP00000456315
MGDAPDYDRSQWLNEKFKLGLDFPNLPYLIDGAHKITQSNAILCYIARKHNLCGETEEEKIRVDILENQTMDNHMQLGMICYNPEFEKLKPKYLEELPEKLK

SEQ ID NO: 35356 - protein, 218 aa, Homo sapiens
  Payload ID: 6988
  Gene Symbol: GSTM2
  Gene Name: glutathione S-transferase mu 2 (muscle)
  Uniprot ID: P28161
  ENSP ID: ENSP00000241337
MPMTLGYWNIRGLAHSIRLLLEYTDSSYEEKKYTMGDAPDYDRSQWLNEKFKLGLDFPNLPYLIDGTHKITQSNAILRYIARKHNLCGESEKEQIREDILENQFMDSRMQLAKLCYDPDFEKLKPEYLQALPEMLKLYSQFLGKQPWFLGDKITFVDFIAYDVLERNQVFEPSCLDAFPNLKDFISRFEGLEKISAYMKSSRFLPRPVFTKMAVWGNK

SEQ ID NO: 35357 - protein, 181 aa, Homo sapiens
  Payload ID: 6988
  Gene Symbol: GSTM2
  Gene Name: glutathione S-transferase mu 2 (muscle)
  ENSP ID: ENSP00000358842
MPMTLGYWNIRGLAHSIRLLLEYTDSSYEEKKYTMGDAPDYDRSQWLNEKFKLGLDFPNLPYLIDGTHKITQSNAILRYIARKHNLCGESEKEQIREDILENQFMDSRMQLAKLCYDPDFEKLKPEYLQALPEMLKLYSQFLGKQPWFLGDKGLEKISAYMKSSRFLPRPVFTKMAVWGNK

SEQ ID NO: 35358 - protein, 193 aa, Homo sapiens
  Payload ID: 6988
  Gene Symbol: GSTM2
  Gene Name: glutathione S-transferase mu 2 (muscle)
  ENSP ID: ENSP00000358844
MPMTLGYWNIRGLAHSIRLLLEYTDSSYEEKKYTMGDAPDYDRSQWLNEKFKLGLDFPNLPYLIDGTHKITQSNAILRYIARKHNLCGESEKEQIREDILENQFMDSRMQLAKLCYDPDFEKLKPEYLQALPEMLKLYSQFLGKQPWFLGDKITFVDFIAYDVLERNQVFEPSCLDAFPNLKDFISRFEVFPL

SEQ ID NO: 35359 - protein, 220 aa, Homo sapiens
  Payload ID: 6988
  Gene Symbol: GSTM2
  Gene Name: glutathione S-transferase mu 2 (muscle)
  ENSP ID: ENSP00000358846
MPMTLGYWNIRGLAHSIRLLLEYTDSSYEEKKYTMGDAPDYDRSQWLNEKFKLGLDFPNLPYLIDGTHKITQSNAILRYIARKHNLCGESEKEQIREDILENQFMDSRMQLAKLCYDPDFEKLKPEYLQALPEMLKLYSQFLGKQPWFLGDKITFVDFIAYDVLERNQVFEPSCLDAFPNLKDFISRFEEKCNVGWSSRRNLDTVCRTSQRILCQNRENE

SEQ ID NO: 35360 - protein, 87 aa, Homo sapiens
  Payload ID: 6988
  Gene Symbol: GSTM2
  Gene Name: glutathione S-transferase mu 2 (muscle)
  ENSP ID: ENSP00000404662
MDSRMQLAKLCYDPDFEKLKPEYLQALPEMLKLYSQFLGKQPWFLGDKITFVDFIAYDVLERNQVFEPSCLDAFPNLKDFISRFEHS

SEQ ID NO: 35361 - protein, 191 aa, Homo sapiens
  Payload ID: 6988
  Gene Symbol: GSTM2
  Gene Name: glutathione S-transferase mu 2 (muscle)
  Uniprot ID: P28161
  ENSP ID: ENSP00000416883
MPMTLGYWNIRGLAHSIRLLLEYTDSSYEEKKYTMGDAPDYDRSQWLNEKFKLGLDFPNLPYLIDGTHKITQSNAILRYIARKHNLCGESEKEQIREDILENQFMDSRMQLAKLCYDPDFEKLKPEYLQALPEMLKLYSQFLGKQPWFLGDKITFVDFIAYDVLERNQVFEPSCLDAFPNLKDFISRFEHS

SEQ ID NO: 35362 - protein, 147 aa, Homo sapiens
  Payload ID: 6988
  Gene Symbol: GSTM2
  Gene Name: glutathione S-transferase mu 2 (muscle)
  ENSP ID: ENSP00000435157
MPMTLGYWNIRGLAHSIRLLLEYTDSSYEEKKYTMGDAPDYDRSQWLNEKFKLGLDFPNLPYLIDGTHKITQSNAILRYIARKHNLCGESEKEQIREDILENQFMDSRMQLAKLCYDPDFALPEMLKLYSQFLGKQPWFLGDKITFV

SEQ ID NO: 35363 - protein, 191 aa, Homo sapiens; identical to SEQ ID NO: 35361
  Payload ID: 6988
  Gene Symbol: GSTM2
  Gene Name: glutathione S-transferase mu 2 (muscle)
  Uniprot ID: P28161
  ENSP ID: ENSP00000435910

SEQ ID NO: 35364 - protein, 225 aa, Homo sapiens
  Payload ID: 6989
  Gene Symbol: GSTM3
  Gene Name: glutathione S-transferase mu 3 (brain)
  Uniprot ID: P21266
  ENSP ID: ENSP00000256594
MSCESSMVLGYWDIRGLAHAIRLLLEFTDTSYEEKRYTCGEAPDYDRSQWLDVKFKLDLDFPNLPYLLDGKNKITQSNAILRYIARKHNMCGETEEEKIRVDIIENQVMDFRTQLIRLCYSSDHEKLKPQYLEELPGQLKQFSMFLGKFSWFAGEKLTFVDFLTYDILDQNRIFDPKCLDEFPNLKAFMCRFEALEKIAAYLQSDQFCKMPINNKMAQWGNKPVC

SEQ ID NO: 35365 - protein, 225 aa, Homo sapiens; identical to SEQ ID NO: 35364
  Payload ID: 6989
  Gene Symbol: GSTM3
  Gene Name: glutathione S-transferase mu 3 (brain)
  Uniprot ID: P21266
  ENSP ID: ENSP00000354357

SEQ ID NO: 35366 - protein, 212 aa, Homo sapiens [sequence omitted]

SEQ ID NO: 35367 - protein, 195 aa, Homo sapiens
  Payload ID: 6990
  Gene Symbol: GSTM4
  Gene Name: glutathione S-transferase mu 4
  Uniprot ID: Q03013
  ENSP ID: ENSP00000316471
MSMTLGYWDIRGLAHAIRLLLEYTDSSYEEKKYTMGDAPDYDRSQWLNEKFKLGLDFPNLPYLIDGAHKITQSNAILCYIARKHNLCGETEEEKIRVDILENQAMDVSNQLARVCYSPDFEKLKPEYLEELPTMMQHFSQFLGKRPWFVGDKITFVDFLAYDVLDLHRIFEPNCLDAFPNLKDFISRFEVSCGIM

SEQ ID NO: 35368 - protein, 218 aa, Homo sapiens
  Payload ID: 6990
  Gene Symbol: GSTM4
  Gene Name: glutathione S-transferase mu 4
  ENSP ID: ENSP00000336744
MSMTLGYWDIRGLAHAIRLLLEYTDSSYEEKKYTMGDAPDYDRSQWLNEKFKLGLDFPNLPYLIDGAHKITQSNAILCYIARKHNLCGETEEEKIRVDILENQAMDVSNQLARVCYSPDFEKLKPEYLEELPTMMQHFSQFLGKRPWFVGDKITFVDFLAYDVLDLHRIFEPNCLDAFPNLKDFISRFEGLEKISAYMKSSRFLPRPVFTKMAVWGNK

SEQ ID NO: 35369 - protein, 202 aa, Homo sapiens
  Payload ID: 6990
  Gene Symbol: GSTM4
  Gene Name: glutathione S-transferase mu 4
  ENSP ID: ENSP00000358848
MLGSLLAQLSFPGFPSIQLPYLIDGAHKITQSNAILCYIARKHNLCGETEEEKIRVDILENQAMDVSNQLARVCYSPDFEKLKPEYLEELPTMMQHFSQFLGKRPWFVGDKITFVDFLAYDVLDLHRIFEPNCLDAFPNLKDFISRFEVMPPSSFLFDAPCSVTSFQMLSQSWSYIKNNLHLLSAGFMPGTLPSTLYLSCGI

SEQ ID NO: 35370 - protein, 218 aa, Homo sapiens
  Payload ID: 6990
  Gene Symbol: GSTM4
  Gene Name: glutathione S-transferase mu 4
  Uniprot ID: Q03013
  ENSP ID: ENSP00000358851
MSMTLGYWDIRGLAHAIRLLLEYTDSSYEEKKYTMGDAPDYDRSQWLNEKFKLGLDFPNLPYLIDGAHKITQSNAILCYIARKHNLCGETEEEKIRVDILENQAMDVSNQLARVCYSPDFEKLKPEYLEELPTMMQHFSQFLGKRPWFVGDKITFVDFLAYDVLDLHRIFEPNCLDAFPNLKDFISRFEGLEKISAYMKSSRFLPKPLYTRVAVWGNK

SEQ ID NO: 35371 - protein, 218 aa, Homo sapiens
  Payload ID: 6991
  Gene Symbol: GSTM5
  Gene Name: glutathione S-transferase mu 5
  Uniprot ID: P46439
  ENSP ID: ENSP00000256593
MPMTLGYWDIRGLAHAIRLLLEYTDSSYVEKKYTLGDAPDYDRSQWLNEKFKLGLDFPNLPYLIDGAHKITQSNAILRYIARKHNLCGETEEEKIRVDILENQVMDNHMELVRLCYDPDFEKLKPKYLEELPEKLKLYSEFLGKRPWFAGDKITFVDFLAYDVLDMKRIFEPKCLDAFLNLKDFISRFEGLKKISAYMKSSQFLRGLLFGKSATWNSK

SEQ ID NO: 35372 - protein, 218 aa, Homo sapiens
  Payload ID: 6991
  Gene Symbol: GSTM5
  Gene Name: glutathione S-transferase mu 5
  ENSP ID: ENSP00000358827
MPMTLGYWDIRGLAHAIRLLLEYTDSSYVEKKYTLGDAPDYDRSQWLNEKFKLGLDFPNLPYLIDGAHKITQSNAILRYIARKHNLCGETEEEKIRVDILENQTTDNWMQLVMICYHPEFEKLKPKYLEELPEKLKLYSEFLGKRPWFAGDKITFVDFLAYDVLDMKRIFEPKCLDAFLNLKDFISRFEGLKKISAYMKSSQFLRGLLFGKSATWNSK

SEQ ID NO: 35373 - protein, 202 aa, Homo sapiens
  Payload ID: 6991
  Gene Symbol: GSTM5
  Gene Name: glutathione S-transferase mu 5
  ENSP ID: ENSP00000358828
MLGSLVAQLSFPGFPSIQLPYLIDGAHKITQSNAILRYIARKHNLCGETEEEKIRVDILENQVMDNHMELVRLCYDPDFEKLKPKYLEELPEKLKLYSEFLGKRPWFAGDKITFVDFLAYDVLDMKRIFEPKCLDAFLNLKDFISRFEVMPPSSFLFDAPCSFLSFQMLSQSWSYTKNNSYVLSTGFMPGIMPSTLYLSCRI

SEQ ID NO: 35374 - protein, 208 aa, Homo sapiens
  Payload ID: 6992
  Gene Symbol: GSTO1
  Gene Name: glutathione S-transferase omega 1
  Uniprot ID: P78417
  ENSP ID: ENSP00000358724
MSGESARSLGKGSAPPGPVPEGSIRIYSMRFCPFAERTRLVLKAKGIRHEVININLKNKPEWFFKKNPFGLVPVLENSQGQLIYESAITCEYLDEAYPGKKLLPDDPYEKACQKMILELFSKVLTNKKTTFFGGNSISMIDYLIWPWFERLEAMKLNECVDHTPKLKLWMAAMKEDPTVSALLTSEKDWQGFLELYLQNSPEACDYGL

SEQ ID NO: 35375 - protein, 241 aa, Homo sapiens
  Payload ID: 6992
  Gene Symbol: GSTO1
  Gene Name: glutathione S-transferase omega 1
  Uniprot ID: P78417
  ENSP ID: ENSP00000358727
MSGESARSLGKGSAPPGPVPEGSIRIYSMRFCPFAERTRLVLKAKGIRHEVININLKNKPEWFFKKNPFGLVPVLENSQGQLIYESAITCEYLDEAYPGKKLLPDDPYEKACQKMILELFSKVPSLVGSFIRSQNKEDYAGLKEEFRKEFTKLEEVLTNKKTTFFGGNSISMIDYLIWPWFERLEAMKLNECVDHTPKLKLWMAAMKEDPTVSALLTSEKDWQGFLELYLQNSPEACDYGL

SEQ ID NO: 35376 - protein, 180 aa, Homo sapiens
  Payload ID: 6992
  Gene Symbol: GSTO1
  Gene Name: glutathione S-transferase omega 1
  ENSP ID: ENSP00000405325
MRFCPFAERTRLVLKAKGIRHEVININLKNKPEWFFKKNPFGLVPVLENSQGQLIYESAITCEYLDEAYPGKKLLPDDPYEKACQKMILELFSKVLTNKKTTFFGGNSISMIDYLIWPWFERLEAMKLNECVDHTPKLKLWMAAMKEDPTVSALLTSEKDWQGFLELYLQNSPEACDYGL

SEQ ID NO: 35377 - protein, 200 aa, Homo sapiens
  Payload ID: 6992
  Gene Symbol: GSTO1
  Gene Name: glutathione S-transferase omega 1
  ENSP ID: ENSP00000406708
MRFCPFAERTRLVLKAKGIRHEVININLKNKPEWFFKKNPFGLVPVLENSQGQLIYESAITCEYLDEAYPGKKLLPDDPYEKACQKMILELFSKVPSLVGSFIRSQNKEDYAGLKEEFRKEFTKLEEVLTNKKTTFFGGNSISMIDYLIWPWFERLEAMKLNECVDHTPKLKLWMAAMKEDPTVSALLTSEKDWQGFLEL

SEQ ID NO: 35378 - protein, 213 aa, Homo sapiens
  Payload ID: 6992
  Gene Symbol: GSTO1
  Gene Name: glutathione S-transferase omega 1
  Uniprot ID: P78417
  ENSP ID: ENSP00000441488
MRFCPFAERTRLVLKAKGIRHEVININLKNKPEWFFKKNPFGLVPVLENSQGQLIYESAITCEYLDEAYPGKKLLPDDPYEKACQKMILELFSKVPSLVGSFIRSQNKEDYAGLKEEFRKEFTKLEEVLTNKKTTFFGGNSISMIDYLIWPWFERLEAMKLNECVDHTPKLKLWMAAMKEDPTVSALLTSEKDWQGFLELYLQNSPEACDYGL

SEQ ID NO: 35379 - protein, 243 aa, Homo sapiens
  Payload ID: 6993
  Gene Symbol: GSTO2
  Gene Name: glutathione S-transferase omega 2
  Uniprot ID: Q9H4Y5
  ENSP ID: ENSP00000345023
MSGDATRTLGKGSQPPGPVPEGLIRIYSMRFCPYSHRTRLVLKAKDIRHEVVNINLRNKPEWYYTKHPFGHIPVLETSQCQLIYESVIACEYLDDAYPGRKLFPYDPYERARQKMLLELFCKVPHLTKECLVALRCGRECTNLKAALRQEFSNLEEILEYQNTTFFGGTCISMIDYLLWPWFERLDVYGILDCVSHTPALRLWISAMKWDPTVCALLMDKSIFQGFLNLYFQNNPNAFDFGLC

SEQ ID NO: 35380 - protein, 215 aa, Homo sapiens
  Payload ID: 6993
  Gene Symbol: GSTO2
  Gene Name: glutathione S-transferase omega 2
  Uniprot ID: Q9H4Y5
  ENSP ID: ENSP00000358721
MRFCPYSHRTRLVLKAKDIRHEVVNINLRNKPEWYYTKHPFGHIPVLETSQCQLIYESVIACEYLDDAYPGRKLFPYDPYERARQKMLLELFCKVPHLTKECLVALRCGRECTNLKAALRQEFSNLEEILEYQNTTFFGGTCISMIDYLLWPWFERLDVYGILDCVSHTPALRLWISAMKWDPTVCALLMDKSIFQGFLNLYFQNNPNAFDFGLC

SEQ ID NO: 35381 - protein, 209 aa, Homo sapiens
  Payload ID: 6993
  Gene Symbol: GSTO2
  Gene Name: glutathione S-transferase omega 2
  Uniprot ID: Q9H4Y5
  ENSP ID: ENSP00000390986
MSGDATRTLGKGSQPPGPVPEGLIRIYSMRFCPYSHRTRLVLKAKDIRHEVVNINLRNKPEWYYTKHPFGHIPVLETSQCQLIYESVIACEYLDDAYPGRKLFPYDPYERARQKMLLELFCKILEYQNTTFFGGTCISMIDYLLWPWFERLDVYGILDCVSHTPALRLWISAMKWDPTVCALLMDKSIFQGFLNLYFQNNPNAFDFGLC

SEQ ID NO: 35382 - protein, 174 aa, Homo sapiens
  Payload ID: 6994
  Gene Symbol: GSTP1
  Gene Name: glutathione S-transferase pi 1
  ENSP ID: ENSP00000381604
MPPYTVVYFPVRGRCAALRMLLADQGQSWKEEVVTVETWQEGSLKASCLYGQLPKFQDGDLTLYQSNTILRHLGRTLGLYGKDQQEAALVDMVNDGVEDLRCKYISLIYTNYISFADYNLLDLLLIHEVLAPGCLDAFPLLSAYVGRLSARPKLKAFLASPEYVNLPINGNGKQ

SEQ ID NO: 35383 - protein, 210 aa, Homo sapiens
  Payload ID: 6994
  Gene Symbol: GSTP1
  Gene Name: glutathione S-transferase pi 1
  Uniprot ID: P09211
  ENSP ID: ENSP00000381607
MPPYTVVYFPVRGRCAALRMLLADQGQSWKEEVVTVETWQEGSLKASCLYGQLPKFQDGDLTLYQSNTILRHLGRTLGLYGKDQQEAALVDMVNDGVEDLRCKYISLIYTNYEAGKDDYVKALPGQLKPFETLLSQNQGGKTFIVGDQISFADYNLLDLLLIHEVLAPGCLDAFPLLSAYVGRLSARPKLKAFLASPEYVNLPINGNGKQ

SEQ ID NO: 35384 - protein, 69 aa, Homo sapiens
  Payload ID: 6994
  Gene Symbol: GSTP1
  Gene Name: glutathione S-transferase pi 1
  ENSP ID: ENSP00000484686
EAGKDDYVKALPGQLKPFETLLSQNQGGKTFIVGDQVSIWPHAVPSSPPSASRWTQVSPSLTTTCWTCC

SEQ ID NO: 35385 - protein, 79 aa, Homo sapiens
  Payload ID: 6994
  Gene Symbol: GSTP1
  Gene Name: glutathione S-transferase pi 1
  ENSP ID: ENSP00000484929
  MOD_RES (1)..(1): Any amino acid
XRCAALRMLLADQGQSWKEEVVTVETWQEGSLKASCLYGQLPKFQDGDLTLYQSNTILRHLGRTLGWGSQTAPWLAHPQ

SEQ ID NO: 35386 - protein, 44 aa, Homo sapiens
  Payload ID: 6995
  Gene Symbol: GSTT1
  Gene Name: glutathione S-transferase theta 1
  ENSP ID: ENSP00000479871
MGLELYLDLLSQPCRAVYIFAKKNDIPFELRIVDLIKVWPSCST

SEQ ID NO: 35387 - protein, 240 aa, Homo sapiens
  Payload ID: 6995
  Gene Symbol: GSTT1
  Gene Name: glutathione S-transferase theta 1
  Uniprot ID: P30711
  ENSP ID: ENSP00000481741
MGLELYLDLLSQPCRAVYIFAKKNDIPFELRIVDLIKGQHLSDAFAQVNPLKKVPALKDGDFTLTESVAILLYLTRKYKVPDYWYPQDLQARARVDEYLAWQHTTLRRSCLRALWHKVMFPVFLGEPVSPQTLAATLAELDVTLQLLEDKFLQNKAFLTGPHISLADLVAITELMHPVGAGCQVFEGRPKLATWRQRVEAAVGEDLFQEAHEVILKAKDFPPADPTIKQKLMPWVLAMIR

SEQ ID NO: 35388 - protein, 65 aa, Homo sapiens
  Payload ID: 6995
  Gene Symbol: GSTT1
  Gene Name: glutathione S-transferase theta 1
  ENSP ID: ENSP00000485765
MGLELYLDLLSQPCRAVYIFAKKNDIPFELRIVDLIKGQHLSDAFAQVNPLKKVPALKDGDFTLT

SEQ ID NO: 35389 - protein, 45 aa, Homo sapiens
  Payload ID: 6995
  Gene Symbol: GSTT1
  Gene Name: glutathione S-transferase theta 1
  ENSP ID: ENSP00000485775
MGLELYLDLLSQPCRAVYIFAKKNDIPFELRIVDLIKGDVPCFPG

SEQ ID NO: 35390 - protein, 97 aa, Homo sapiens
  Payload ID: 6995
  Gene Symbol: GSTT1
  Gene Name: glutathione S-transferase theta 1
  ENSP ID: ENSP00000485976
MGLELYLDLLSQPCRAVYIFAKKNDIPFELRIVDLIKGQHLSDAFAQVNPLKKVPALKDGDFTLTERTCRPVPVWMSTWHGSTRLCGEAASGPCGIR

SEQ ID NO: 35391 - protein, 65 aa, Homo sapiens
  Payload ID: 6995
  Gene Symbol: GSTT1
  Gene Name: glutathione S-transferase theta 1
  ENSP ID: ENSP00000485987
MGLELYLDLLSQPCRAVYIFAKKNDIPFELRIVDLIKARGCWLPSLRRPTQAGHMAAARGGSSGG

SEQ ID NO: 35392 - protein, 46 aa, Homo sapiens
  Payload ID: 6995
  Gene Symbol: GSTT1
  Gene Name: glutathione S-transferase theta 1
  ENSP ID: ENSP00000486732
MGLELYLDLLSQPCRAVYIFAKKNDIPFELRIVDLIKGPAGPCPCG

SEQ ID NO: 35393 - protein, 114 aa, Homo sapiens
  Payload ID: 6995
  Gene Symbol: GSTT1
  Gene Name: glutathione S-transferase theta 1
  ENSP ID: ENSP00000486820
MGLELYLDLLSQPCRAVYIFAKKNDIPFELRIVDLIKDGVSLCRPGWSAVAGSQLTATSAARNLVLCLLFLLGRSALKRCLCPGEPPQEGASLEGRGLHLDGECGHPALPDAQI

SEQ ID NO: 35394 - protein, 105 aa, Homo sapiens
  Payload ID: 6995
  Gene Symbol: GSTT1
  Gene Name: glutathione S-transferase theta 1
  ENSP ID: ENSP00000486937
MGLELYLDLLSQPCRAVYIFAKKNDIPFELRIVDLIKGQHLSDAFAQVNPLKKVPALKDGDFTLTESPWVLAAKSSKADPSWPHGGSAWRQQWGRTSSRRPMRSF

SEQ ID NO: 35395 - protein, 226 aa, Homo sapiens
  Payload ID: 6995
  Gene Symbol: GSTT1
  Gene Name: glutathione S-transferase theta 1
  ENSP ID: ENSP00000486973
MGLELYLDLLSQPCRAVYIFAKKNDIPFELRIVDLIKDGVSLCRPGWSAVAGSQLTATSAARNLVLCLLFLLGRSALKRCLCPGEPPQEGASLEGRGLHLDGEVMFPVFLGEPVSPQTLAATLAELDVTLQLLEDKFLQNKAFLTGPHISLADLVAITELMHPVGAGCQVFEGRPKLATWRQRVEAAVGEDLFQEAHEVILKAKDFPPADPTIKQKLMPWVLAMIR

SEQ ID NO: 35396 - protein, 229 aa, Homo sapiens
  Payload ID: 6996
  Gene Symbol: GSTT2
  Gene Name: glutathione S-transferase theta 2 (gene/pseudogene)
  ENSP ID: ENSP00000385765
MGLELFLDLVSQPSRAVYIFAKKNGIPLELRTVDLVKGQHKSKEFLQINSLGKLPTLKDGDFILTESSAILIYLSCKYQTPDHWYPSDLQARARVHEYLGWHADCIRGTFGIPLWVQMLGPLIGVQVPEEKVERNRTAMDQALQWLEDKFLGDRPFLAGQQPVALGYELFEGRPRLAAWRGVEAFLGAELCQEAHSIILSILEQAAKKTLPTPSPEAYQAMLLRIARIP

SEQ ID NO: 35397 - protein, 244 aa, Homo sapiens
  Payload ID: 6996
  Gene Symbol: GSTT2
  Gene Name: glutathione S-transferase theta 2 (gene/pseudogene)
  Uniprot ID: P0CG29
  ENSP ID: ENSP00000477540
MGLELFLDLVSQPSRAVYIFAKKNGIPLELRTVDLVKGQHKSKEFLQINSLGKLPTLKDGDFILTESSAILIYLSCKYQTPDHWYPSDLQARARVHEYLGWHADCIRGTFGIPLWVQVLGPLIGVQVPKEKVERNRTAMDQALQWLEDKFLGDRPFLAGQQVTLADLMALEELMQPVALGYELFEGRPRLAAWRGRVEAFLGAELCQEAHSIILSILEQAAKKTLPTPSPEAYQAMLLRIARIP

SEQ ID NO: 35398 - protein, 243 aa, Homo sapiens
  Payload ID: 6996
  Gene Symbol: GSTT2
  Gene Name: glutathione S-transferase theta 2 (gene/pseudogene)
  ENSP ID: ENSP00000481555
MGLELFLDLVSQPSRAVYIFAKKNGIPLELRTVDLVKGQHKSKEFLQINSLGKLPTLKDGDFILTESSAILIYLSCKYQTPDHWYPSDLQARARVHEYLGWHADCIRGTFGIPLWVQMLGPLIGVQVPEEKVERNRTAMDQALQWLEDKFLGDRPFLAGQQVTLADLMALEELMQPVALGYELFEGRPRLAAWRGVEAFLGAELCQEAHSIILSILEQAAKKTLPTPSPEAYQAMLLRIARIP

SEQ ID NO: 35399 - protein, 243 aa, Homo sapiens; identical to SEQ ID NO: 35398
  Payload ID: 6996
  Gene Symbol: GSTT2
  Gene Name: glutathione S-transferase theta 2 (gene/pseudogene)
  ENSP ID: ENSP00000488993

SEQ ID NO: 35400 - protein, 244 aa, Homo sapiens
  Payload ID: 6997
  Gene Symbol: GSTT2B
  Gene Name: glutathione S-transferase theta 2B (gene/pseudogene)
  Uniprot ID: P0CG30
  ENSP ID: ENSP00000290765
MGLELFLDLVSQPSRAVYIFAKKNGIPLELRTVDLVKGQHKSKEFLQINSLGKLPTLKDGDFILTESSAILIYLSCKYQTPDHWYPSDLQARARVHEYLGWHADCIRGTFGIPLWVQVLGPLIGVQVPEEKVERNRTAMDQALQWLEDKFLGDRPFLAGQQVTLADLMALEELMQPVALGYELFEGRPRLAAWRGRVEAFLGAELCQEAHSIILSILEQAAKKTLPTPSPEAYQAMLLRIARIP

SEQ ID NO: 35401 - protein, 230 aa, Homo sapiens
  Payload ID: 6997
  Gene Symbol: GSTT2B
  Gene Name: glutathione S-transferase theta 2B (gene/pseudogene)
  ENSP ID: ENSP00000385116
MGLELFLDLVSQPSRAVYIFAKKNGIPLELRTVDLVKGQHKSKEFLQINSLGKLPTLKDGDFILTESSAILIYLSCKYQTPDHWYPSDLQARARVHEYLGWHADCIRGTFGIPLWVQVLGPLIGVQVPEEKVERNRTAMDQALQWLEDKFLGDRPFLAGQQPVALGYELFEGRPRLAAWRGRVEAFLGAELCQEAHSIILSILEQAAKKTLPTPSPEAYQAMLLRIARIP

SEQ ID NO: 35402 - protein, 244 aa, Homo sapiens; identical to SEQ ID NO: 35400
  Payload ID: 6997
  Gene Symbol: GSTT2B
  Gene Name: glutathione S-transferase theta 2B (gene/pseudogene)
  ENSP ID: ENSP00000478389

SEQ ID NO: 35403 - protein, 216 aa, Homo sapiens
  Payload ID: 6998
  Gene Symbol: GSTZ1
  Gene Name: glutathione S-transferase zeta 1
  ENSP ID: ENSP00000216465
MQAGKPILYSYFRSSCSWRVRIALALKGIDYETVPINLIKDGGQQFSKDFQALNPMKQVPTLKIDGITIHQSLAIIEYLEEMRPTPRLLPQDPKKRASVRMISDLIAGGIQPLQNLSVLKQVGEEMQLTWAQNAITCGFNALEQILQSTAGIYCVGDEVTMADLCLVPQVANAERFKVDLTPYPTISSINKRLLVLEAFQVSHPCRQPDTPTELRA

SEQ ID NO: 35404 - protein, 174 aa, Homo sapiens
  Payload ID: 6998
  Gene Symbol: GSTZ1
  Gene Name: glutathione S-transferase zeta 1
  ENSP ID: ENSP00000314404
MQAGKPILYSYFRSSCSWRVRIALALKGIDYETVPINLIKDGGQQFSKDFQALNPMKQVPTLKIDGITIHQSNLSVLKQVGEEMQLTWAQNAITCGFNALEQILQSTAGIYCVGDEVTMADLCLVPQVANAERFKVDLTPYPTISSINKRLLVLEAFQVSHPCRQPDTPTELRA

SEQ ID NO: 35405 - protein, 161 aa, Homo sapiens
  Payload ID: 6998
  Gene Symbol: GSTZ1
  Gene Name: glutathione S-transferase zeta 1
  Uniprot ID: O43708
  ENSP ID: ENSP00000354959
MKQVPTLKIDGITIHQSLAIIEYLEEMRPTPRLLPQDPKKRASVRMISDLIAGGIQPLQNLSVLKQVGEEMQLTWAQNAITCGFNALEQILQSTAGIYCVGDEVTMADLCLVPQVANAERFKVDLTPYPTISSINKRLLVLEAFQVSHPCRQPDTPTELRA

SEQ ID NO: 35406 - protein, 161 aa, Homo sapiens; identical to SEQ ID NO: 35405
  Payload ID: 6998
  Gene Symbol: GSTZ1
  Gene Name: glutathione S-transferase zeta 1
  Uniprot ID: O43708
  ENSP ID: ENSP00000377335

SEQ ID NO: 35407 - protein, 189 aa, Homo sapiens
  Payload ID: 6998
  Gene Symbol: GSTZ1
  Gene Name: glutathione S-transferase zeta 1
  ENSP ID: ENSP00000450487
MQAGKPILYSYFRSSCSWRVRIALALKGIDYETVPINLIKDGGQQLAIIEYLEEMRPTPRLLPQDPKKRASVRMISDLIAGGIQPLQNLSVLKQVGEEMQLTWAQNAITCGFNALEQILQSTAGIYCVGDEVTMADLCLVPQVANAERFKVDLTPYPTISSINKRLLVLEAFQVSHPCRQPDTPTELRA

SEQ ID NO: 35408 - protein, 119 aa, Homo sapiens
  Payload ID: 6998
  Gene Symbol: GSTZ1
  Gene Name: glutathione S-transferase zeta 1
  ENSP ID: ENSP00000451150
MKQVPTLKIDGITIHQSNLSVLKQVGEEMQLTWAQNAITCGFNALEQILQSTAGIYCVGDEVTMADLCLVPQVANAERFKVDLTPYPTISSINKRLLVLEAFQVSHPCRQPDTPTELRA

SEQ ID NO: 35409 - protein, 70 aa, Homo sapiens
  Payload ID: 6998
  Gene Symbol: GSTZ1
  Gene Name: glutathione S-transferase zeta 1
  ENSP ID: ENSP00000451850
VRMISDLIAGGIQPLQNLSVLKQVGEEMQLTWAQNAITCGFNALEQILQSTAGIYCVGDESRSGHTQSSH

SEQ ID NO: 35410 - protein, 161 aa, Homo sapiens; identical to SEQ ID NO: 35405
  Payload ID: 6998
  Gene Symbol: GSTZ1
  Gene Name: glutathione S-transferase zeta 1
  Uniprot ID: O43708
  ENSP ID: ENSP00000451927

SEQ ID NO: 35411 - protein, 217 aa, Homo sapiens
  Payload ID: 6998
  Gene Symbol: GSTZ1
  Gene Name: glutathione S-transferase zeta 1
  ENSP ID: ENSP00000451976
MTESGKPILYSYFRSSCSWRVRIALALKGIDYETVPINLIKDGGQQFSKDFQALNPMKQVPTLKIDGITIHQSLAIIEYLEEMRPTPRLLPQDPKKRASVRMISDLIAGGIQPLQNLSVLKQVGEEMQLTWAQNAITCGFNALEQILQSTAGIYCVGDEVTMADLCLVPQVANAERFKVDLTPYPTISSINKRLLVLEAFQVSHPCRQPDTPTELRA

SEQ ID NO: 35412 - protein, 38 aa, Homo sapiens
  Payload ID: 6998
  Gene Symbol: GSTZ1
  Gene Name: glutathione S-transferase zeta 1
  ENSP ID: ENSP00000452346
MKQVPTLKIDGITIHQSLAIIEYLEEMRPTPRLLPQDP

SEQ ID NO: 35413 - protein, 202 aa, Homo sapiens
  Payload ID: 6998
  Gene Symbol: GSTZ1
  Gene Name: glutathione S-transferase zeta 1
  ENSP ID: ENSP00000452498
MQAGKPILYSYFRSSCSWRVRIALALKGIDYETVPINLIKDGGQQFSKDFQALNPMKQLAIIEYLEEMRPTPRLLPQDPKKRASVRMISDLIAGGIQPLQNLSVLKQVGEEMQLTWAQNAITCGFNALEQILQSTAGIYCVGDEVTMADLCLVPQVANAERFKVDLTPYPTISSINKRLLVLEAFQVSHPCRQPDTPTELRA

SEQ ID NO: 35414 - protein, 59 aa, Homo sapiens
  Payload ID: 6998
  Gene Symbol: GSTZ1
  Gene Name: glutathione S-transferase zeta 1
  ENSP ID: ENSP00000452531
MKQVPTLKIDGITIHQSLAIIEYLEEMRPTPRLLPQDPKKRASVRMISDLIAGGIQPLQ

SEQ ID NO: 35415 - protein, 633 aa, Homo sapiens
  Payload ID: 6999
  Gene Symbol: GSTCD
  Gene Name: glutathione S-transferase, C-terminal domain containing
  Uniprot ID: Q8NEC7
  ENSP ID: ENSP00000353695
MKAIKKSLTEEEYLYLDFSHQTEGCIFPLHTSVTLFLLSYCDCKIFKICLVVTKEVSRDSSLLRDDLIQDVEIQIISRQELPPIVQNCCLPAVVERSDNFCRAGLAVVLRHIIQKSYEADPLKKELLELLGFKKTCLKACAEVSQWTRLCELTIPLAIENFLRESSDQPPTIPVEILQLEKKLSEPVRVHNDDKLRRQKLKQQKADGVGPPLTKGKAKSKVHTQETSEGLDSSSKSLELKVAFSKLTVQEEPATTNREPSHIRKAKASDLPPLEHVFAEGLYFTLADIVLLPCIHHFLVIISRKFSEKLVEFPLLASWYQRIQEVPGVKTAASKCGIQFLHLPKLLTTSTEQHPNLCEVPGVEEQSDPLFIGGPRPTMAKLMEKGIEVMFSPHPCPTWTLDWNVLPAAVSPKEGKMSSDRALRKQQQLNNLVYVVTNQAKPGDRIVDFCSGGGHVGIVLAHMLPSCQVTLIENKELSLIRAKKRSDELGLSNIWFIQANMEYFTGMFNIGVALHACGVATDMVIEHCIKTRASFVTCPCCYGFIQNTSKFNFPKSEQFKKTLSYKEHMILCRFADQTAVQLPPQRRLIGKQCMCLVDLDRARAAEECGYSVQVISMEPESCSPKNNMIVGVPI

SEQ ID NO: 35416 - protein, 633 aa, Homo sapiens; identical to SEQ ID NO: 35415
  Payload ID: 6999
  Gene Symbol: GSTCD
  Gene Name: glutathione S-transferase, C-terminal domain containing
  Uniprot ID: Q8NEC7
  ENSP ID: ENSP00000378216

SEQ ID NO: 35417 - protein, 546 aa, Homo sapiens
  Payload ID: 6999
  Gene Symbol: GSTCD
  Gene Name: glutathione S-transferase, C-terminal domain containing
  Uniprot ID: Q8NEC7
  ENSP ID: ENSP00000378218
MKAIKKSLTEEEYLYLDFSHQTEGCIFPLHTSVTLFLLSYCDCKIFKICLVVTKEVSQWTRLCELTIPLAIENFLRESSDQPPTIPVEILQLEKKLSEPVRVHNDDKLRRQKLKQQKADGVGPPLTKGKAKSKVHTQETSEGLDSSSKSLELKVAFSKLTVQEEPATTNREPSHIRKAKASDLPPLEHVFAEGLYFTLADIVLLPCIHHFLVIISRKFSEKLVEFPLLASWYQRIQEVPGVKTAASKCGIQFLHLPKLLTTSTEQHPNLCEVPGVEEQSDPLFIGGPRPTMAKLMEKGIEVMFSPHPCPTWTLDWNVLPAAVSPKEGKMSSDRALRKQQQLNNLVYVVTNQAKPGDRIVDFCSGGGHVGIVLAHMLPSCQVTLIENKELSLIRAKKRSDELGLSNIWFIQANMEYFTGMFNIGVALHACGVATDMVIEHCIKTRASFVTCPCCYGFIQNTSKFNFPKSEQFKKTLSYKEHMILCRFADQTAVQLPPQRRLIGKQCMCLVDLDRARAAEECGYSVQVISMEPESCSPKNNMIVGVPI

SEQ ID NO: 35418 - protein, 633 aa, Homo sapiens; identical to SEQ ID NO: 35415
  Payload ID: 6999
  Gene Symbol: GSTCD
  Gene Name: glutathione S-transferase, C-terminal domain containing
  Uniprot ID: Q8NEC7
  ENSP ID: ENSP00000422354

SEQ ID NO: 35419 - protein, 340 aa, Homo sapiens
  Payload ID: 6999
  Gene Symbol: GSTCD
  Gene Name: glutathione S-transferase, C-terminal domain containing
  ENSP ID: ENSP00000422858
MKAIKKSLTEEEYLYLDFSHQTEGCIFPLHTSVTLFLLSYCDCKIFKICLVVTKEVSQWTRLCELTIPLAIENFLRESSDQPPTIPVEILQLEKKLSEPVRVHNDDKLRRQKLKQQKADGVGPPLTKGKAKSKVHTQETSEGLDSSSKSLELKVAFSKLTVQEEPATTNREPSHIRKAKASDLPPLEHVFAEGLYFTLADIVLLPCIHHFLVIISRKFSEKLVEFPLLASWYQRIQEVPGVKTAASKCGIQFLHLPKLLTTSTEQHPNLCEVPGVEEQSDPLFIGGPRPTMAKLMEKGIEVMFSPHPCPTWTLDWNVLPAAVSPKEDGVLLCHSGWNAVV

SEQ ID NO: 35420 - protein, 40 aa, Homo sapiens
  Payload ID: 6999
  Gene Symbol: GSTCD
  Gene Name: glutathione S-transferase, C-terminal domain containing
  ENSP ID: ENSP00000423639
MKAIKKSLTEEEYLYLDFSHQTEGCIFPLHTSVTLFLLSY

SEQ ID NO: 35421 - protein, 167 aa, Homo sapiens
  Payload ID: 6999
  Gene Symbol: GSTCD
  Gene Name: glutathione S-transferase, C-terminal domain containing
  ENSP ID: ENSP00000423779
MKAIKKSLTEEEYLYLDFSHQTEGCIFPLHTSVTLFLLSYCDCKIFKICLVVTKEVSRDSSLLRDDLIQDVEIQIISRQELPPIVQNCCLPAVVERSDNFCRAGLAVVLRHIIQKSYEADPLKKELLELLGFKKTCLKACAEVSQWTRLCELTIPLAIENFLRESSD

SEQ ID NO: 35422 - protein, 166 aa, Homo sapiens
  Payload ID: 6999
  Gene Symbol: GSTCD
  Gene Name: glutathione S-transferase, C-terminal domain containing
  ENSP ID: ENSP00000423792
MKAIKKSLTEEEYLYLDFSHQTEGCIFPLHTSVTLFLLSYCDCKIFKICLVVTKEVSRDSSLLRDDLIQDVEIQIISRQELPPIVQNCCLPAVVERSDNFCRAGLAVVLRHIIQKSYEADPLKKELLELLGFKKTCLKACAEVSQWTRLCELTIPLAIENFLRESS

SEQ ID NO: 35423 - protein, 474 aa, Homo sapiens
  Payload ID: 7000
  Gene Symbol: GSS
  Gene Name: glutathione synthetase
  Uniprot ID: P48637
  ENSP ID: ENSP00000216951
MATNWGSLLQDKQQLEELARQAVDRALAEGVLLRTSQEPTSSEVVSYAPFTLFPSLVPSALLEQAYAVQMDFNLLVDAVSQNAAFLEQTLSSTIKQDDFTARLFDIHKQVLKEGIAQTVFLGLNRSDYMFQRSADGSPALKQIEINTISASFGGLASRTPAVHRHVLSVLSKTKEAGKILSNNPSKGLALGIAKAWELYGSPNALVLLIAQEKERNIFDQRAIENELLARNIHVIRRTFEDISEKGSLDQDRRLFVDGQEIAVVYFRDGYMPRQYSLQNWEARLLLERSHAAKCPDIATQLAGTKKVQQELSRPGMLEMLLPGQPEAVARLRATFAGLYSLDVGEEGDQAIAEALAAPSRFVLKPQREGGGNNLYGEEMVQALKQLKDSEERASYILMEKIEPEPFENCLLRPGSPARVVQCISELGIFGVYVRQEKTLVMNKHVGHLLRTKAIEHADGGVAAGVAVLDNPYPV

SEQ ID NO: 35424 - protein, 363 aa, Homo sapiens
  Payload ID: 7000
  Gene Symbol: GSS
  Gene Name: glutathione synthetase
  Uniprot ID: P48637
  ENSP ID: ENSP00000407517
MATNWGSLLQDKQQLEELARQAVDRALAEGVLLRTSQEPTSSEVVSYAPFTLFPSLVPSALLEQAYAVQMDFNLLVDAVSQNAAFLEQTLSSALVLLIAQEKERNIFDQRAIENELLARNIHVIRRTFEDISEKGSLDQDRRLFVDGQEIAVVYFRDGYMPRQYSLQNWEARLLLERSHAAKCPDIATQLAGTKKVQQELSRPGMLEMLLPGQPEAVARLRATFAGLYSLDVGEEGDQAIAEALAAPSRFVLKPQREGGGNNLYGEEMVQALKQLKDSEERASYILMEKIEPEPFENCLLRPGSPARVVQCISELGIFGVYVRQEKTLVMNKHVGHLLRTKAIEHADGGVAAGVAVLDNPYPV

SEQ ID NO: 35425 - protein, 335 aa, Homo sapiens
  Payload ID: 7001
  Gene Symbol: GAPDH
  Gene Name: glyceraldehyde-3-phosphate dehydrogenase
  Uniprot ID: P04406
  ENSP ID: ENSP00000229239
MGKVKVGVNGFGRIGRLVTRAAFNSGKVDIVAINDPFIDLNYMVYMFQYDSTHGKFHGTVKAENGKLVINGNPITIFQERDPSKIKWGDAGAEYVVESTGVFTTMEKAGAHLQGGAKRVIISAPSADAPMFVMGVNHEKYDNSLKIISNASCTTNCLAPLAKVIHDNFGIVEGLMTTVHAITATQKTVDGPSGKLWRDGRGALQNIIPASTGAAKAVGKVIPELNGKLTGMAFRVPTANVSVVDLTCRLEKPAKYDDIKKVVKQASEGPLKGILGYTEHQVVSSDFNSDTHSSTFDAGAGIALNDHFVKLISWYDNEFGYSNRVVDLMAHMASKE

SEQ ID NO: 35426 - protein, 260 aa, Homo sapiens
  Payload ID: 7001
  Gene Symbol: GAPDH
  Gene Name: glyceraldehyde-3-phosphate dehydrogenase
  ENSP ID: ENSP00000380065
MEEMRDPSKIKWGDAGAEYVVESTGVFTTMEKAGAHLQGGAKRVIISAPSADAPMFVMGVNHEKYDNSLKIISNASCTTNCLAPLAKVIHDNFGIVEGLMTTVHAITATQKTVDGPSGKLWRDGRGALQNIIPASTGAAKAVGKVIPELNGKLTGMAFRVPTANVSVVDLTCRLEKPAKYDDIKKVVKQASEGPLKGILGYTEHQVVSSDFNSDTHSSTFDAGAGIALNDHFVKLISWYDNEFGYSNRVVDLMAHMASKE

SEQ ID NO: 35427 - protein, 293 aa, Homo sapiens
  Payload ID: 7001
  Gene Symbol: GAPDH
  Gene Name: glyceraldehyde-3-phosphate dehydrogenase
  Uniprot ID: P04406
  ENSP ID: ENSP00000380067
MVYMFQYDSTHGKFHGTVKAENGKLVINGNPITIFQERDPSKIKWGDAGAEYVVESTGVFTTMEKAGAHLQGGAKRVIISAPSADAPMFVMGVNHEKYDNSLKIISNASCTTNCLAPLAKVIHDNFGIVEGLMTTVHAITATQKTVDGPSGKLWRDGRGALQNIIPASTGAAKAVGKVIPELNGKLTGMAFRVPTANVSVVDLTCRLEKPAKYDDIKKVVKQASEGPLKGILGYTEHQVVSSDFNSDTHSSTFDAGAGIALNDHFVKLISWYDNEFGYSNRVVDLMAHMASKE

SEQ ID NO: 35428 - protein, 335 aa, Homo sapiens; identical to SEQ ID NO: 35425
  Payload ID: 7001
  Gene Symbol: GAPDH
  Gene Name: glyceraldehyde-3-phosphate dehydrogenase
  Uniprot ID: P04406
  ENSP ID: ENSP00000380068

SEQ ID NO: 35429 - protein, 335 aa, Homo sapiens; identical to SEQ ID NO: 35425
  Payload ID: 7001
  Gene Symbol: GAPDH
  Gene Name: glyceraldehyde-3-phosphate dehydrogenase
  Uniprot ID: P04406
  ENSP ID: ENSP00000380070

SEQ ID NO: 35430 - protein, 293 aa, Homo sapiens; identical to SEQ ID NO: 35427
  Payload ID: 7001
  Gene Symbol: GAPDH
  Gene Name: glyceraldehyde-3-phosphate dehydrogenase
  Uniprot ID: P04406
  ENSP ID: ENSP00000478864

SEQ ID NO: 35431 - protein, 408 aa, Homo sapiens
  Payload ID: 7002
  Gene Symbol: GAPDHS
  Gene Name: glyceraldehyde-3-phosphate dehydrogenase, spermatogenic
  Uniprot ID: O14556
  ENSP ID: ENSP00000222286
MSKRDIVLTNVTVVQLLRQPCPVTRAPPPPEPKAEVEPQPQPEPTPVREEIKPPPPPLPPHPATPPPKMVSVARELTVGINGFGRIGRLVLRACMEKGVKVVAVNDPFIDPEYMVYMFKYDSTHGRYKGSVEFRNGQLVVDNHEISVYQCKEPKQIPWRAVGSPYVVESTGVYLSIQAASDHISAGAQRVVISAPSPDAPMFVMGVNENDYNPGSMNIVSNASCTTNCLAPLAKVIHERFGIVEGLMTTVHSYTATQKTVDGPSRKAWRDGRGAHQNIIPASTGAAKAVTKVIPELKGKLTGMAFRVPTPDVSVVDLTCRLAQPAPYSAIKEAVKAAAKGPMAGILAYTEDEVVSTDFLGDTHSSIFDAKAGIALNDNFVKLISWYDNEYGYSHRVVDLLRYMFSRDK

SEQ ID NO: 35432 - protein, 44 aa, Homo sapiens
  Payload ID: 7002
  Gene Symbol: GAPDHS
  Gene Name: glyceraldehyde-3-phosphate dehydrogenase, spermatogenic
  ENSP ID: ENSP00000466432
MSKRDIVLTNVTVVQLLRQPCPDLDASVAWSCAPAWRRVLRWWL

SEQ ID NO: 35433 - protein, 179 aa, Homo sapiens
  Payload ID: 7002
  Gene Symbol: GAPDHS
  Gene Name: glyceraldehyde-3-phosphate dehydrogenase, spermatogenic
  ENSP ID: ENSP00000467255
MVSVARELTVGINGFGRIGRLVLRACMEKGVKVVAVNDPFIDPEYMVYMFKYDSTHGRYKGSVEFRNGQLVVDNHEISVYQCKEPKQIPWRAVGSPYVVESTGVYLSIQAASDHISAGAQRVVISAPSPDAPMFVMGVNENDYNPGSMNIVSNASCTTNCLAPLAKVIHERFGIVEGLM

SEQ ID NO: 35434 - protein, 234 aa, Homo sapiens
  Payload ID: 7003
  Gene Symbol: GLYCTK
  Gene Name: glycerate kinase
  Uniprot ID: Q8IVS8
  ENSP ID: ENSP00000301965
MAAALQVLPRLARAPLHPLLWRGSVARLASSMALAEQARQLFESAVGAVLPGPMLHRALSLDPGGRQLKVRDRNFQLRQNLYLVGFGKAVLGMAAAAEELLGQHLVQGVISVPKGIRAAMERAGKQEMLLKPHSRVQVFEGAEDNLPDRDALRAALAIQQLAEGLTADDLLLVLISGGEPHPVRCGGGPCGGDCQWPHRGQFPQCARLPAYPQSLRPPCSPATFCEDCAVSGRL

SEQ ID NO: 35435 - protein, 523 aa, Homo sapiens
  Payload ID: 7003
  Gene Symbol: GLYCTK
  Gene Name: glycerate kinase
  Uniprot ID: Q8IVS8
  ENSP ID: ENSP00000389175
MAAALQVLPRLARAPLHPLLWRGSVARLASSMALAEQARQLFESAVGAVLPGPMLHRALSLDPGGRQLKVRDRNFQLRQNLYLVGFGKAVLGMAAAAEELLGQHLVQGVISVPKGIRAAMERAGKQEMLLKPHSRVQVFEGAEDNLPDRDALRAALAIQQLAEGLTADDLLLVLISGGGSALLPAPIPPVTLEEKQTLTRLLAARGATIQELNTIRKALSQLKGGGLAQAAYPAQVVSLILSDVVGDPVEVIASGPTVASSHNVQDCLHILNRYGLRAALPRSVKTVLSRADSDPHGPHTCGHVLNVIIGSNVLALAEAQRQAEALGYQAVVLSAAMQGDVKSMAQFYGLLAHVARTRLTPSMAGASVEEDAQLHELAAELQIPDLQLEEALETMAWGRGPVCLLAGGEPTVQLQGSGRGGRNQELALRVGAELRRWPLGPIDVLFLSGGTDGQDGPTEAAGAWVTPELASQAAAEGLDIATFLAHNDSHTFFCCLQGGAHLLHTGMTGTNVMDTHLLFLRPR

SEQ ID NO: 35436 - protein, 283 aa, Homo sapiens
  Payload ID: 7003
  Gene Symbol: GLYCTK
  Gene Name: glycerate kinase
  ENSP ID: ENSP00000417264
MELLLSQSCIWWPMVGEGRTIISCGIKAMERSGNYLIWLQKGEMLLKPHSRVQVFEGAEDNLPDRDALRAALAIQQLAEGLTADDLLLVLISGGGSALLPAPIPPVTLEEKQTLTRLLAARGATIQELNTIRKALSQLKGGGLAQAAYPAQVVSLILSDVVGDPVEVIASGPTVASSHNVQDCLHILNRYGLRAALPRSVKTVLSRADSDPHGPHTCGHVLNVIIGSNVLALAEAQRQAEALGYQAVVLSAAMQGWGTPAAHRDDRYQCHGHPPLVPAASVMA

SEQ ID NO: 35437 - protein, 240 aa, Homo sapiens
  Payload ID: 7003
  Gene Symbol: GLYCTK
  Gene Name: glycerate kinase
  ENSP ID: ENSP00000417526
MLLKPHSRVQVFEGAEDNLPDRDALRAALAIQQLAEGLTADDLLLVLISGGGSALLPAPIPPVTLEEKQTLTRLLAARGATIQELNTIRKALSQLKGGGLAQAAYPAQVVSLILSDVVGDPVEVIASGPTVASSHNVQDCLHILNRYGLRAALPRSVKTVLSRADSDPHGPHTCGHVLNVIIGSNVLALAEAQRQAEALGYQAVVLSAAMQGWGTPAAHRDDRYQCHGHPPLVPAASVMA

SEQ ID NO: 35438 - protein, 205 aa, Homo sapiens
  Payload ID: 7003
  Gene Symbol: GLYCTK
  Gene Name: glycerate kinase
  Uniprot ID: Q8IVS8
  ENSP ID: ENSP00000418951
MAAALQVLPRLARAPLHPLLWRGSVARLASSMALAEQARQLFESAVGAVLPGPMLHRALSLDPGGRQLKVRDRNFQLRQNLYLVGFGKAVLGMAAAAEELLGQHLVQGVISVPKGIRAAMERAGKQEMLLKPHSRVQVFEGAEDNLPDRDALRAALAIQQLAEGLTADDLLLVLISGWGTPAAHRDDRYQCHGHPPLVPAASVMA

SEQ ID NO: 35439 - protein, 234 aa, Homo sapiens; identical to SEQ ID NO: 35434
  Payload ID: 7003
  Gene Symbol: GLYCTK
  Gene Name: glycerate kinase
  Uniprot ID: Q8IVS8
  ENSP ID: ENSP00000419008

SEQ ID NO: 35440 - protein, 212 aa, Homo sapiens
  Payload ID: 7003
  Gene Symbol: GLYCTK
  Gene Name: glycerate kinase
  ENSP ID: ENSP00000419868
MAAALQVLPRLARAPLHPLLWRGSVARLASSMALAEQARQLFESAVGAVLPGPMLHRALSLDPGGRQLKVRDRNFQLRQNLYLVGFGKAVLGMAAAAEELLGQHLVQGVISVPKGIRAAMERAGKQEMLLKPHSRVQVFEGAEDNLPDRDALRAALAIQQLAEGLTADDLLLVLISEVGVQLCCLPPSHLSHWRRSRHSLDCWQPVEPPSRS

SEQ ID NO: 35441 - protein, 94 aa, Homo sapiens
  Payload ID: 7004
  Gene Symbol: GK
  Gene Name: glycerol kinase
  ENSP ID: ENSP00000368221
KILDAMNRDCGIPLSHLQVDGGMTSNKILMQLQADILYIPVVKPSMPETTALGAAMAAGAAEGVGVWSLEPEDLSAVTMERFEPQINAEGTFKE

SEQ ID NO: 35442 - protein, 118 aa, Homo sapiens
  Payload ID: 7004
  Gene Symbol: GK
  Gene Name: glycerol kinase
  ENSP ID: ENSP00000368224
MAASKKAVLGPLVGAVDQGTSSTRFLVFNSKTAELLSHHQVEIKQEFPREGWVEQDPKEILHSVYECIEKTCEKLGQLNIDISNIKAIGVSNQRETTVVWDKITGEPLYNAVDCLTNE

SEQ ID NO: 35443 - protein, 553 aa, Homo sapiens
  Payload ID: 7004
  Gene Symbol: GK
  Gene Name: glycerol kinase
  Uniprot ID: P32189
  ENSP ID: ENSP00000368226
MAASKKAVLGPLVGAVDQGTSSTRFLVFNSKTAELLSHHQVEIKQEFPREGWVEQDPKEILHSVYECIEKTCEKLGQLNIDISNIKAIGVSNQRETTVVWDKITGEPLYNAVVWLDLRTQSTVESLSKRIPGNNNFVKSKTGLPLSTYFSAVKLRWLLDNVRKVQKAVEEKRALFGTIDSWLIWSLTGGVNGGVHCTDVTNASRTMLFNIHSLEWDKQLCEFFGIPMEILPNVRSSSEIYGLMKAGALEGVPISGCLGDQSAALVGQMCFQIGQAKNTYGTGCFLLCNTGHKCVFSDHGLLTTVAYKLGRDKPVYYALEGSVAIAGAVIRWLRDNLGIIKTSEEIEKLAKEVGTSYGCYFVPAFSGLYAPYWEPSARGIICGLTQFTNKCHIAFAALEAVCFQTREILDAMNRDCGIPLSHLQVDGGMTSNKILMQLQADILYIPVVKPSMPETTALGAAMAAGAAEGVGVWSLEPEDLSAVTMERFEPQINAEESEIRYSTWKKAVMKSMGWVTTQSPESGDPSIFCSLPLGFFIVSSMVMLIGARYISGIP

SEQ ID NO: 35444 - protein, 524 aa, Homo sapiens
  Payload ID: 7004
  Gene Symbol: GK
  Gene Name: glycerol kinase
  Uniprot ID: P32189
  ENSP ID: ENSP00000368228
MAASKKAVLGPLVGAVDQGTSSTRFLVFNSKTAELLSHHQVEIKQEFPREGWVEQDPKEILHSVYECIEKTCEKLGQLNIDISNIKAIGVSNQRETTVVWDKITGEPLYNAVVWLDLRTQSTVESLSKRIPGNNNFVKSKTGLPLSTYFSAVKLRWLLDNVRKVQKAVEEKRALFGTIDSWLIWSLTGGVNGGVHCTDVTNASRTMLFNIHSLEWDKQLCEFFGIPMEILPNVRSSSEIYGLMKAGALEGVPISGCLGDQSAALVGQMCFQIGQAKNTYGTGCFLLCNTGHKCVFSDHGLLTTVAYKLGRDKPVYYALEGSVAIAGAVIRWLRDNLGIIKTSEEIEKLAKEVGTSYGCYFVPAFSGLYAPYWEPSARGIICGLTQFTNKCHIAFAALEAVCFQTREILDAMNRDCGIPLSHLQVDGGMTSNKILMQLQADILYIPVVKPSMPETTALGAAMAAGAAEGVGVWSLEPEDLSAVTMERFEPQINAEESEIRYSTWKKAVMKSMGWVTTQSPESGIP

SEQ ID NO: 35445 - protein, 530 aa, Homo sapiens
  Payload ID: 7004
  Gene Symbol: GK
  Gene Name: glycerol kinase
  Uniprot ID: P32189
  ENSP ID: ENSP00000368229
MAASKKAVLGPLVGAVDQGTSSTRFLVFNSKTAELLSHHQVEIKQEFPREGWVEQDPKEILHSVYECIEKTCEKLGQLNIDISNIKAIGVSNQRETTVVWDKITGEPLYNAVVWLDLRTQSTVESLSKRIPGNNNFVKSKTGLPLSTYFSAVKLRWLLDNVRKVQKAVEEKRALFGTIDSWLIWSLTGGVNGGVHCTDVTNASRTMLFNIHSLEWDKQLCEFFGIPMEILPNVRSSSEIYGLMKISHSVKAGALEGVPISGCLGDQSAALVGQMCFQIGQAKNTYGTGCFLLCNTGHKCVFSDHGLLTTVAYKLGRDKPVYYALEGSVAIAGAVIRWLRDNLGIIKTSEEIEKLAKEVGTSYGCYFVPAFSGLYAPYWEPSARGIICGLTQFTNKCHIAFAALEAVCFQTREILDAMNRDCGIPLSHLQVDGGMTSNKILMQLQADILYIPVVKPSMPETTALGAAMAAGAAEGVGVWSLEPEDLSAVTMERFEPQINAEESEIRYSTWKKAVMKSMGWVTTQSPESGIP

SEQ ID NO: 35446 - protein, 559 aa, Homo sapiens
  Payload ID: 7004
  Gene Symbol: GK
  Gene Name: glycerol kinase
  Uniprot ID: P32189
  ENSP ID: ENSP00000401720
MAASKKAVLGPLVGAVDQGTSSTRFLVFNSKTAELLSHHQVEIKQEFPREGWVEQDPKEILHSVYECIEKTCEKLGQLNIDISNIKAIGVSNQRETTVVWDKITGEPLYNAVVWLDLRTQSTVESLSKRIPGNNNFVKSKTGLPLSTYFSAVKLRWLLDNVRKVQKAVEEKRALFGTIDSWLIWSLTGGVNGGVHCTDVTNASRTMLFNIHSLEWDKQLCEFFGIPMEILPNVRSSSEIYGLMKISHSVKAGALEGVPISGCLGDQSAALVGQMCFQIGQAKNTYGTGCFLLCNTGHKCVFSDHGLLTTVAYKLGRDKPVYYALEGSVAIAGAVIRWLRDNLGIIKTSEEIEKLAKEVGTSYGCYFVPAFSGLYAPYWEPSARGIICGLTQFTNKCHIAFAALEAVCFQTREILDAMNRDCGIPLSHLQVDGGMTSNKILMQLQADILYIPVVKPSMPETTALGAAMAAGAAEGVGVWSLEPEDLSAVTMERFEPQINAEESEIRYSTWKKAVMKSMGWVTTQSPESGDPSIFCSLPLGFFIVSSMVMLIGARYISGIP

SEQ ID NO: 35447 - protein, 123 aa, Homo sapiens
  Payload ID: 7004
  Gene Symbol: GK
  Gene Name: glycerol kinase
  ENSP ID: ENSP00000404682
NAPAAPVSPGPSVPVAVVPSGSSVPAPGTSSVWLDLRTQSTVESLSKRIPGNNNFVKSKTGLPLSTYFSAVKLRWLLDNVRKVQKAVEEKRALFGTIDSWLIWSLTGGVNGGVHCTDVTNASR

SEQ ID NO: 35448 - protein, 90 aa, Homo sapiens
  Payload ID: 7004
  Gene Symbol: GK
  Gene Name: glycerol kinase
  ENSP ID: ENSP00000417942
MAASKKAVLGPLVGAVDQGTSSTRFLVFNSKTAELLSHHQVEIKQEFPREGYWCQQPEGNHCSLGQDNWRASLQCCGPRQAFHLALTSVQ

SEQ ID NO: 35449 - protein, 102 aa, Homo sapiens
  Payload ID: 7004
  Gene Symbol: GK
  Gene Name: glycerol kinase
  ENSP ID: ENSP00000418873
MAASKKAVLGPLVGAVDQGTSSTRFLVFNSKTAELLSHHQVEIKQEFPREGWVEQDPKEILHSVYECIEKTCEKLGQLNIDISNIKDNPTSCFMEKVEGLRP

SEQ ID NO: 35450 - protein, 37 aa, Homo sapiens
  Payload ID: 7004
  Gene Symbol: GK
  Gene Name: glycerol kinase
  ENSP ID: ENSP00000419332
MAASKKAVLGPLVGAVDQGTSSTRFLLLVSATRGKPL

SEQ ID NO: 35451 - protein, 41 aa, Homo sapiens
  Payload ID: 7004
  Gene Symbol: GK
  Gene Name: glycerol kinase
  ENSP ID: ENSP00000419771
SARVAKFRCCLIPDSDSITCIPLKPAFSGMAPDVAYSTPTS

SEQ ID NO: 35452 - protein, 79 aa, Homo sapiens
  Payload ID: 7004
  Gene Symbol: GK
  Gene Name: glycerol kinase
  ENSP ID: ENSP00000420676
MAASKKAVLGPLVGAVDQGTSSTRFLVFNSKTAELLSHHQVEIKQEFPREGYWCQQPEGNHCSLGQDNWRASLQCCGVA

SEQ ID NO: 35453 - protein, 553 aa, Homo sapiens
  Payload ID: 7005
  Gene Symbol: GK2
  Gene Name: glycerol kinase 2
  Uniprot ID: Q14410
  ENSP ID: ENSP00000351706
MAAPKTAAVGPLVGAVVQGTNSTRFLVFNSKTAELLSHHKVELTQEFPKEGWVEQDPKEILQSVYECIARTCEKLDELNIDISNIKAVGVSNQRETTVIWDKLTGEPLYNAVVWLDLRTQTTVEDLSKKIPGNSNFVKSKTGLPLSTYFSAVKLRWMLDNVRNVQKAVEEGRALFGTIDSWLIWSLTGGVNGGVHCTDVTNASRTMLFNIHSLEWDKELCDFFEIPMDLLPNVFSSSEIYGLIKTGALEGVPISGCLGDQCAALVGQMCFQEGQAKNTYGTGCFLLCNTGRKCVFSEHGLLTTVAYKLGREKPAYYALEGSVAIAGAVIRWLRDNLGIIETSGDIERLAKEVGTSYGCYFVPAFSGLYAPYWEPSARGILCGLTQFTNKCHIAFAALEAVCFQTREILEAMNRDCGIPLRHLQVDGGMTNNKVLMQLQADILHIPVIKPFMPETTALGAAMAAGAAEGVSVWSLEPQALSVLRMERFEPQIQATESEIRYATWKKAVMKSMGWVTSQSPEGGDPSIFSSLPLGFFIVSSMVMLIGARYISGVP

SEQ ID NO: 35454 - protein, 17 aa, Homo sapiens
  Payload ID: 7006
  Gene Symbol: GK5
  Gene Name: glycerol kinase 5 (putative)
  ENSP ID: ENSP00000417153
  MOD_RES (1)..(1): Any amino acid
XFVPSFSGLQTLSHSVT

SEQ ID NO: 35455 - protein, 529 aa, Homo sapiens
  Payload ID: 7006
  Gene Symbol: GK5
  Gene Name: glycerol kinase 5 (putative)
  Uniprot ID: Q6ZS86
  ENSP ID: ENSP00000418001
MSGLLTDPEQRAQEPRYPGFVLGLDVGSSVIRCHVYDRAARVCGSSVQKVENLYPQIGWVEIDPDVLWIQFVAVIKEAVKAAGIQMNQIVGLGISTQRATFITWNKKTGNHFHNFISWQDLRAVELVKSWNNSLLMKIFHSSCRVLHFFTRSKRLFTASLFTFTTQQTSLRLVWILQNLTEVQKAVEEENCCFGTIDTWLLYKLTKGSVYATDFSNASTTGLFDPYKMCWSGMITSLISIPLSLLPPVRDTSHNFGSVDEEIFGVPIPIVALVADQQSAMFGECCFQTGDVKLTMGTGTFLDINTGNSLQQTTGGFYPLIGWKIGQEVVCLAESNAGDTGTAIKWAQQLDLFTDAAETEKMAKSLEDSEGVCFVPSFSGLQAPLNDPWACASFMGLKPSTSKYHLVRAILESIAFRNKQLYEMMKKEIHIPVRKIRADGGVCKNGFVMQMTSDLINENIDRPADIDMSCLGAASLAGLAVGFWTDKEELKKLRQSEVVFKPQKKCQEYEMSLENWAKAVKRSMNWYNKT

SEQ ID NO: 35456 - protein, 153 aa, Homo sapiens
  Payload ID: 7006
  Gene Symbol: GK5
  Gene Name: glycerol kinase 5 (putative)
  ENSP ID: ENSP00000418239
MSGLLTDPEQRAQEPRYPGFVLGLDVGSSVIRCHVYDRAARVCGSSVQKVENLYPQIGWVEIDPDVLWIQFVAVIKEAVKAAGIQMNQIVGLGISTQRATFITWNKKTGNHFHNFISWQDLRAVELVKSWNNSLLMKVIFFLCDLDIVGFFFL

SEQ ID NO: 35457 - protein, 301 aa, Homo sapiens
  Payload ID: 7006
  Gene Symbol: GK5
  Gene Name: glycerol kinase 5 (putative)
  Uniprot ID: Q6ZS86
  ENSP ID: ENSP00000419031
MSGLLTDPEQRAQEPRYPGFVLGLDVGSSVIRCHVYDRAARVCGSSVQKVENLYPQIGWVEIDPDVLWIQFVAVIKEAVKAAGIQMNQIVGLGISTQRATFITWNKKTGNHFHNFISWQDLRAVELVKSWNNSLLMKIFHSSCRVLHFFTRSKRLFTASLFTFTTQQTSLRLVWILQNLTEVQKAVEEENCCFGTIDTWLLYKLTKGSVYATDFSNASTTGLFDPYKMCWSGMITSLISIPLSLLPPVRDTSHNFGSVDEEIFGVPIPIVALLKVPGYDQNICYIFGKGTIEPVFYHGSTL

SEQ ID NO: 35458 - protein, 301 aa, Homo sapiens; identical to SEQ ID NO: 35457
  Payload ID: 7006
  Gene Symbol: GK5
  Gene Name: glycerol kinase 5 (putative)
  Uniprot ID: Q6ZS86
  ENSP ID: ENSP00000420312

SEQ ID NO: 35459 - protein, 172 aa, Homo sapiens
  Payload ID: 7006
  Gene Symbol: GK5
  Gene Name: glycerol kinase 5 (putative)
  ENSP ID: ENSP00000420593
QQLDLFTDAAETEKMAKSLEDSEGVCFVPSFSGLQAPLNDPWACASFMGLKPSTSKYHLVRAILESIAFRNKQLYEMMKKEIHIPVRKIRADGGVCKNGFVMQMTSDLINENIDRPADIDMSCLGAASLAGLAVGMCEIYKNESFLANSSLQIAFLLSNYKILESLESLGVH

SEQ ID NO: 35460 - protein, 795 aa, Homo sapiens
  Payload ID: 7007
  Gene Symbol: GPAT2
  Gene Name: glycerol-3-phosphate acyltransferase 2, mitochondrial
  Uniprot ID: Q6NUI2
  ENSP ID: ENSP00000352547
MATMLEGRCQTQPRSSPSGREASLWSSGFGMKLEAVTPFLGKYRPFVGRCCQTCTPKSWESLFHRSITDLGFCNVILVKEENTRFRGWLVRRLCYFLWSLEQHIPPCQDVPQKIMESTGVQNLLSGRVPGGTGEGQVPDLVKKEVQRILGHIQAPPRPFLVRLFSWALLRFLNCLFLNVQLHKGQMKMVQKAAQAGLPLVLLSTHKTLLDGILLPFMLLSQGLGVLRVAWDSRACSPALRALLRKLGGLFLPPEASLSLDSSEGLLARAVVQAVIEQLLVSGQPLLIFLEEPPGALGPRLSALGQAWVGFVVQAVQVGIVPDALLVPVAVTYDLVPDAPCDIDHASAPLGLWTGALAVLRSLWSRWGCSHRICSRVHLAQPFSLQEYIVSARSCWGGRQTLEQLLQPIVLGQCTAVPDTEKEQEWTPITGPLLALKEEDQLLVRRLSCHVLSASVGSSAVMSTAIMATLLLFKHQKLLGEFSWLTEEILLRGFDVGFSGQLRSLLQHSLSLLRAHVALLRIRQGDLLVVPQPGPGLTHLAQLSAELLPVFLSEAVGACAVRGLLAGRVPPQGPWELQGILLLSQNELYRQILLLMHLLPQDLLLLKPCQSSYCYCQEVLDRLIQCGLLVAEETPGSRPACDTGRQRLSRKLLWKPSGDFTDSDSDDFGEADGRYFRLSQQSHCPDFFLFLCRLLSPLLKAFAQAAAFLRQGQLPDTELGYTEQLFQFLQATAQEEGIFECADPKLAISAVWTFRDLGVLQQTPSPAGPRLHLSPTFASLDNQEKLEQFIRQFICS

SEQ ID NO: 35461 - protein, 795 aa, Homo sapiens; identical to SEQ ID NO: 35460
  Payload ID: 7007
  Gene Symbol: GPAT2
  Gene Name: glycerol-3-phosphate acyltransferase 2, mitochondrial
  Uniprot ID: Q6NUI2
  ENSP ID: ENSP00000389395

SEQ ID NO: 35462 - protein, 724 aa, Homo sapiens
  Payload ID: 7007
  Gene Symbol: GPAT2
  Gene Name: glycerol-3-phosphate acyltransferase 2, mitochondrial
  ENSP ID: ENSP00000393770
MATMLEGRCQTQPRSSPSGREASLWSSGFGMKLEAVTPFLGKYRPFVGRCCQTCTPKSWESLFHRSITDLGFCNVILVKEENTRFRGWLVRRLCYFLWSLEQHIPPCQDVPQKIMESTGVQNLLSGRVPGGTGEGQVPDLVKKEVQRILGHIQAPPRPFLVRLFSWALLRFLNCLFLNVQLHKGQMKMVQKAAQAGLPLVLLSTHKTLLDGILLPFMLLSQGLGVLRVAWDSRACSPALRALLRKLGGLFLPPEASLSLDSSEGLLARAVVQAASAPLGLWTGALAVLRSLWSRWGCSHRICSRVHLAQPFSLQEYIVSARSCWGGRQTLEQLLQPIVLGQCTAVPDTEKEQEWTPITGPLLALKEEDQLLVRRLSCHVLSASVGSSAVMSTAIMATLLLFKHQKLLGEFSWLTEEILLRGFDVGFSGQLRSLLQHSLSLLRAHVALLRIRQGDLLVVPQPGPGLTHLAQLSAELLPVFLSEAVGACAVRGLLAGRVPPQGPWELQGILLLSQNELYRQILLLMHLLPQDLLLLKPCQSSYCYCQEVLDRLIQCGLLVAEETPGSRPACDTGRQRLSRKLLWKPSGDFTDSDSDDFGEADGRYFRLSQQSHCPDFFLFLCRLLSPLLKAFAQAAAFLRQGQLPDTELGYTEQLFQFLQATAQEEGIFECADPKLAISAVWTFRDLGVLQQTPSPAGPRLHLSPTFASLDNQEKLEQFIRQFICS

SEQ ID NO: 35463 - protein, 160 aa, Homo sapiens
  Payload ID: 7007
  Gene Symbol: GPAT2
  Gene Name: glycerol-3-phosphate acyltransferase 2, mitochondrial
  ENSP ID: ENSP00000401334
MATMLEGRCQTQPRSSPSGREASLWSSGFGMKLEAVTPFLGKYRPFVGRCCQTCTPKSWESLFHRSITDLGFCNVILVKEENTRFRGWLVRRLCYFLWSLEQHIPPCQDVPQKIMESTGVQNLLSGRVPGGTGEGQVPDLVKKEVQRILGHIQAPPRPFL

SEQ ID NO: 35464 - protein, 434 aa, Homo sapiens
  Payload ID: 7008
  Gene Symbol: GPAT3
  Gene Name: glycerol-3-phosphate acyltransferase 3
  Uniprot ID: Q53EU6
  ENSP ID: ENSP00000264409
MEGAELAGKILSTWLTLVLGFILLPSVFGVSLGISEIYMKILVKTLEWATIRIEKGTPKESILKNSASVGIIQRDESPMEKGLSGLRGRDFELSDVFYFSKKGLEAIVEDEVTQRFSSEELVSWNLLTRTNVNFQYISLRLTMVWVLGVIVRYCVLLPLRVTLAFIGISLLVIGTTLVGQLPDSSLKNWLSELVHLTCCRICVRALSGTIHYHNKQYRPQKGGICVANHTSPIDVLILTTDGCYAMVGQVHGGLMGIIQRAMVKACPHVWFERSEMKDRHLVTKRLKEHIADKKKLPILIFPEGTCINNTSVMMFKKGSFEIGGTIHPVAIKYNPQFGDAFWNSSKYNMVSYLLRMMTSWAIVCDVWYMPPMTREEGEDAVQFANRVKSAIAIQGGLTELPWDGGLKRAKVKDIFKEEQQKNYSKMIVGNGSLS

SEQ ID NO: 35465 - protein, 434 aa, Homo sapiens; identical to SEQ ID NO: 35464
  Payload ID: 7008
  Gene Symbol: GPAT3
  Gene Name: glycerol-3-phosphate acyltransferase 3
  Uniprot ID: Q53EU6
  ENSP ID: ENSP00000378651

SEQ ID NO: 35466 - protein, 434 aa, Homo sapiens; identical to SEQ ID NO: 35464
  Payload ID: 7008
  Gene Symbol: GPAT3
  Gene Name: glycerol-3-phosphate acyltransferase 3
  Uniprot ID: Q53EU6
  ENSP ID: ENSP00000482571

SEQ ID NO: 35467 - protein, 456 aa, Homo sapiens
  Payload ID: 7009
  Gene Symbol: GPAT4
  Gene Name: glycerol-3-phosphate acyltransferase 4
  Uniprot ID: Q86UL3
  ENSP ID: ENSP00000380184
MFLLLPFDSLIVNLLGISLTVLFTLLLVFIIVPAIFGVSFGIRKLYMKSLLKIFAWATLRMERGAKEKNHQLYKPYTNGIIAKDPTSLEEEIKEIRRSGSSKALDNTPEFELSDIFYFCRKGMETIMDDEVTKRFSAEELESWNLLSRTNYNFQYISLRLTVLWGLGVLIRYCFLLPLRIALAFTGISLLVVGTTVVGYLPNGRFKEFMSKHVHLMCYRICVRALTAIITYHDRENRPRNGGICVANHTSPIDVIILASDGYYAMVGQVHGGLMGVIQRAMVKACPHVWFERSEVKDRHLVAKRLTEHVQDKSKLPILIFPEGTCINNTSVMMFKKGSFEIGATVYPVAIKYDPQFGDAFWNSSKYGMVTYLLRMMTSWAIVCSVWYLPPMTREADEDAVQFANRVKSAIARQGGLVDLLWDGGLKREKVKDTFKEEQQKLYSKMIVGNHKDRSRS

SEQ ID NO: 35468 - protein, 179 aa, Homo sapiens
  Payload ID: 7009
  Gene Symbol: GPAT4
  Gene Name: glycerol-3-phosphate acyltransferase 4
  ENSP ID: ENSP00000428630
MFLLLPFDSLIVNLLGISLTVLFTLLLVFIIVPAIFGVSFGIRKLYMKSLLKIFAWATLRMERGAKEKNHQLYKPYTNGIIAKDPTSLEEEIKEIRRSGSSKALDNTPEFELSDIFYFCRKGMETIMDDEVTKRFSAEELESWNLLSRTNYNFQYISLRLTVLWGLGVLIRYCFLLPLR

SEQ ID NO: 35469 - protein, 29 aa, Homo sapiens
  Payload ID: 7009
  Gene Symbol: GPAT4
  Gene Name: glycerol-3-phosphate acyltransferase 4
  ENSP ID: ENSP00000428648
MFLLLPFDSLIVNLLGISLTVLFTLLLVF

SEQ ID NO: 35470 - protein, 158 aa, Homo sapiens
  Payload ID: 7009
  Gene Symbol: GPAT4
  Gene Name: glycerol-3-phosphate acyltransferase 4
  ENSP ID: ENSP00000429477
MKSLLKIFAWATLRMERGAKEKNHQLYKPYTNGIIAKDPTSLEEEIKEIRRSGSSKALDNTPEFELSDIFYFCRKGMETIMDDEVTKRFSAEELESWNLLSRTNYNFQYISLRLTVLWGLGVLIRYCFLLPLRIALAFTGISLLVVGTTVVGYLPNGR

SEQ ID NO: 35471 - protein, 828 aa, Homo sapiens
  Payload ID: 7010
  Gene Symbol: GPAM
  Gene Name: glycerol-3-phosphate acyltransferase, mitochondrial
  Uniprot ID: Q9HCL2
  ENSP ID: ENSP00000265276
MDESALTLGTIDVSYLPHSSEYSVGRCKHTSEEWGECGFRPTIFRSATLKWKESLMSRKRPFVGRCCYSCTPQSWDKFFNPSIPSLGLRNVIYINETHTRHRGWLARRLSYVLFIQERDVHKGMFATNVTENVLNSSRVQEAIAEVAAELNPDGSAQQQSKAVNKVKKKAKRILQEMVATVSPAMIRLTGWVLLKLFNSFFWNIQIHKGQLEMVKAATETNLPLLFLPVHRSHIDYLLLTFILFCHNIKAPYIASGNNLNIPIFSTLIHKLGGFFIRRRLDETPDGRKDVLYRALLHGHIVELLRQQQFLEIFLEGTRSRSGKTSCARAGLLSVVVDTLSTNVIPDILIIPVGISYDRIIEGHYNGEQLGKPKKNESLWSVARGVIRMLRKNYGCVRVDFAQPFSLKEYLESQSQKPVSALLSLEQALLPAILPSRPSDAADEGRDTSINESRNATDESLRRRLIANLAEHILFTASKSCAIMSTHIVACLLLYRHRQGIDLSTLVEDFFVMKEEVLARDFDLGFSGNSEDVVMHAIQLLGNCVTITHTSRNDEFFITPSTTVPSVFELNFYSNGVLHVFIMEAIIACSLYAVLNKRGLGGPTSTPPNLISQEQLVRKAASLCYLLSNEGTISLPCQTFYQVCHETVGKFIQYGILTVAEHDDQEDISPSLAEQQWDKKLPEPLSWRSDEEDEDSDFGEEQRDCYLKVSQSKEHQQFITFLQRLLGPLLEAYSSAAIFVHNFSGPVPEPEYLQKLHKYLITRTERNVAVYAESATYCLVKNAVKMFKDIGVFKETKQKRVSVLELSSTFLPQCNRQKLLEYILSFVVL

SEQ ID NO: 35472 - protein, 710 aa, Homo sapiens
  Payload ID: 7010
  Gene Symbol: GPAM
  Gene Name: glycerol-3-phosphate acyltransferase, mitochondrial
  ENSP ID: ENSP00000358433
MDESALTLGTIDVSYLPHSSEYSVGRCKHTSEEWGECGFRPTIFRSATLKWKESLMSRKRPFVGRCCYSCTPQSWDKFFNPSIPSLGLRNVIYINETHTRHRGWLARRLSYVLFIQERDVHKGMFATNVTENVLNSSRVQEAIAEVAAELNPDGSAQQQSKAVNKVKKKAKRILQEMVATVSPAMIRLTGWVLLKLFNSFFWNIQIHKGQLEMVKAATETNLPLLFLPVHRSHIDYLLLTFILFCHNIKAPYIASGNNLNIPIFSTLIHKLGGFFIRRRLDETPDGRKDVLYRALLHGHIVELLRQQQFLEIFLEGTRSRSGKTSCARAGLLSVVVDTLSTNVIPDILIIPVGISYDRIIEGHYNGEQLGKPKKNESLWSVARGVIRMLRKNYGCVRVDFAQPFSLKEYLESQSQKPVSALLSLEQALLPAILPSRPSDAADEGRDTSINESRNATDESLRRRLIANLAEHILFTASKSCAIMSTHIVACLLLYRHRQGIDLSTLVEDFFVMKEEVLARDFDLGFSGNSEDVVMHAIQLLGNCVTITHTSRNDEFFITPSTTVPSVFELNFYSNGVLHVFIMEAIIACSLYAVLNKRGLGGPTSTPPNLISQEQLVRKAASLCYLLSNEGTISLPCQTFYQVCHETVGKFIQYGILTVAEHDDQEDISPSLAEQQWDKKLPEPLSWRSDEEDEDSDFGEEQRDCYLKVLG

SEQ ID NO: 35473 - protein, 349 aa, Homo sapiens
  Payload ID: 7011
  Gene Symbol: GPD1
  Gene Name: glycerol-3-phosphate dehydrogenase 1 (soluble)
  Uniprot ID: P21695
  ENSP ID: ENSP00000301149
MASKKVCIVGSGNWGSAIAKIVGGNAAQLAQFDPRVTMWVFEEDIGGKKLTEIINTQHENVKYLPGHKLPPNVVAVPDVVQAAEDADILIFVVPHQFIGKICDQLKGHLKANATGISLIKGVDEGPNGLKLISEVIGERLGIPMSVLMGANIASEVADEKFCETTIGCKDPAQGQLLKELMQTPNFRITVVQEVDTVEICGALKNVVAVGAGFCDGLGFGDNTKAAVIRLGLMEMIAFAKLFCSGPVSSATFLESCGVADLITTCYGGRNRKVAEAFARTGKSIEQLEKELLNGQKLQGPETARELYSILQHKGLVDKFPLFMAVYKVCYEGQPVGEFIHCLQNHPEHM

SEQ ID NO: 35474 - protein, 326 aa, Homo sapiens
  Payload ID: 7011
  Gene Symbol: GPD1
  Gene Name: glycerol-3-phosphate dehydrogenase 1 (soluble)
  Uniprot ID: P21695
  ENSP ID: ENSP00000446768
MASKKVCIVGSGNWGSAIAKIVGGNAAQLAQFDPRVTMWVFEEDIGGKKLTEIINTQHENVKYLPGHKLPPNVFIGKICDQLKGHLKANATGISLIKGVDEGPNGLKLISEVIGERLGIPMSVLMGANIASEVADEKFCETTIGCKDPAQGQLLKELMQTPNFRITVVQEVDTVEICGALKNVVAVGAGFCDGLGFGDNTKAAVIRLGLMEMIAFAKLFCSGPVSSATFLESCGVADLITTCYGGRNRKVAEAFARTGKSIEQLEKELLNGQKLQGPETARELYSILQHKGLVDKFPLFMAVYKVCYEGQPVGEFIHCLQNHPEHM

SEQ ID NO: 35475 - protein, 50 aa, Homo sapiens
  Payload ID: 7011
  Gene Symbol: GPD1
  Gene Name: glycerol-3-phosphate dehydrogenase 1 (soluble)
  ENSP ID: ENSP00000448244
MASKKVCIVGSGNWSLGTICHGSGGDKEGAQPSPRSWVAMQPSWHSLTHG

SEQ ID NO: 35476 - protein, 351 aa, Homo sapiens
  Payload ID: 7012
  Gene Symbol: GPD1L
  Gene Name: glycerol-3-phosphate dehydrogenase 1-like
  Uniprot ID: Q8N335
  ENSP ID: ENSP00000282541
MAAAPLKVCIVGSGNWGSAVAKIIGNNVKKLQKFASTVKMWVFEETVNGRKLTDIINNDHENVKYLPGHKLPENVVAMSNLSEAVQDADLLVFVIPHQFIHRICDEITGRVPKKALGITLIKGIDEGPEGLKLISDIIREKMGIDISVLMGANIANEVAAEKFCETTIGSKVMENGLLFKELLQTPNFRITVVDDADTVELCGALKNIVAVGAGFCDGLRCGDNTKAAVIRLGLMEMIAFARIFCKGQVSTATFLESCGVADLITTCYGGRNRRVAEAFARTGKTIEELEKEMLNGQKLQGPQTSAEVYRILKQKGLLDKFPLFTAVYQICYESRPVQEMLSCLQSHPEHT

SEQ ID NO: 35477 - protein, 64 aa, Homo sapiens
  Payload ID: 7012
  Gene Symbol: GPD1L
  Gene Name: glycerol-3-phosphate dehydrogenase 1-like
  ENSP ID: ENSP00000392199
MAAAPLKVCIVGSGNWLPCQILARLCRMQTCWCLSFPTSSFTESVMRSLGECPRKRWESPSSRA

SEQ ID NO: 35478 - protein, 127 aa, Homo sapiens
  Payload ID: 7012
  Gene Symbol: GPD1L
  Gene Name: glycerol-3-phosphate dehydrogenase 1-like
  ENSP ID: ENSP00000393861
MWVFEETVNGRKLTDIINNDHENVKYLPGHKLPENVVAMSNLSEAVQDADLLVFVIPHQFIHRICDEITGRVPKKALGITLIKGIDEGPEGLKLISDIIREKMGIDISVLMGANIANEVAAEKFCET

SEQ ID NO: 35479 - protein, 173 aa, Homo sapiens
  Payload ID: 7012
  Gene Symbol: GPD1L
  Gene Name: glycerol-3-phosphate dehydrogenase 1-like
  ENSP ID: ENSP00000408770
MAAAPLKVCIVGSGNWGSAVAKIIGNNVKKLQKFASTVKMWVFEETVNGRKLTDIINNDHENVKYLPGHKLPENVGIDEGPEGLKLISDIIREKMGIDISVLMGANIANEVAAEKFCETTIGSKVMENGLLFKELLQTPNFRITVVDDADTVELCGALKNIVAVGAGFCDGLR

SEQ ID NO: 35480 - protein, 144 aa, Homo sapiens
  Payload ID: 7012
  Gene Symbol: GPD1L
  Gene Name: glycerol-3-phosphate dehydrogenase 1-like
  ENSP ID: ENSP00000416518
MWVFEETVNGRKLTDIINNDHENVKYLPGHKLPENVVAMSNLSEAVQDADLLVFVIPHQFIHRICDEITGRVPKKALGITLIKGIDEGPEGLKLISDIIREKMGIDISVLMGANIANEVAAEKFCETTIGSKVMENGLLFKELL

SEQ ID NO: 35481 - protein, 727 aa, Homo sapiens
  Payload ID: 7013
  Gene Symbol: GPD2
  Gene Name: glycerol-3-phosphate dehydrogenase 2 (mitochondrial)
  Uniprot ID: P43304
  ENSP ID: ENSP00000308610
MAFQKAVKGTILVGGGALATVLGLSQFAHYRRKQMNLAYVKAADCISEPVNREPPSREAQLLTLQNTSEFDILVIGGGATGSGCALDAVTRGLKTALVERDDFSSGTSSRSTKLIHGGVRYLQKAIMKLDIEQYRMVKEALHERANLLEIAPHLSAPLPIMLPVYKWWQLPYYWVGIKLYDLVAGSNCLKSSYVLSKSRALEHFPMLQKDKLVGAIVYYDGQHNDARMNLAIALTAARYGAATANYMEVVSLLKKTDPQTGKVRVSGARCKDVLTGQEFDVRAKCVINATGPFTDSVRKMDDKDAAAICQPSAGVHIVMPGYYSPESMGLLDPATSDGRVIFFLPWQKMTIAGTTDTPTDVTHHPIPSEEDINFILNEVRNYLSCDVEVRRGDVLAAWSGIRPLVTDPKSADTQSISRNHVVDISESGLITIAGGKWTTYRSMAEDTINAAVKTHNLKAGPSRTVGLFLQGGKDWSPTLYIRLVQDYGLESEVAQHLAATYGDKAFEVAKMASVTGKRWPIVGVRLVSEFPYIEAEVKYGIKEYACTAVDMISRRTRLAFLNVQAAEEALPRIVELMGRELNWDDYKKQEQLETARKFLYYEMGYKSRSEQLTDRSEISLLPSDIDRYKKRFHKFDADQKGFITIVDVQRVLESINVQMDENTLHEILNEVDLNKNGQVELNEFLQLMSAIQKGRVSGSRLAILMKTAEENLDRRVPIPVDRSCGGL

SEQ ID NO: 35482 - protein, 727 aa, Homo sapiens; identical to SEQ ID NO: 35481
  Payload ID: 7013
  Gene Symbol: GPD2
  Gene Name: glycerol-3-phosphate dehydrogenase 2 (mitochondrial)
  Uniprot ID: P43304
  ENSP ID: ENSP00000386425

SEQ ID NO: 35483 - protein, 601 aa, Homo sapiens
  Payload ID: 7013
  Gene Symbol: GPD2
  Gene Name: glycerol-3-phosphate dehydrogenase 2 (mitochondrial)
  Uniprot ID: P43304
  ENSP ID: ENSP00000386484
MKLDIEQYRMVKEALHERANLLEIAPHLSAPLPIMLPVYKWWQLPYYWVGIKLYDLVAGSNCLKSSYVLSKSRALEHFPMLQKDKLVGAIVYYDGQHNDARMNLAIALTAARYGAATANYMEVVSLLKKTDPQTGKVRVSGARCKDVLTGQEFDVRAKCVINATGPFTDSVRKMDDKDAAAICQPSAGVHIVMPGYYSPESMGLLDPATSDGRVIFFLPWQKMTIAGTTDTPTDVTHHPIPSEEDINFILNEVRNYLSCDVEVRRGDVLAAWSGIRPLVTDPKSADTQSISRNHVVDISESGLITIAGGKWTTYRSMAEDTINAAVKTHNLKAGPSRTVGLFLQGGKDWSPTLYIRLVQDYGLESEVAQHLAATYGDKAFEVAKMASVTGKRWPIVGVRLVSEFPYIEAEVKYGIKEYACTAVDMISRRTRLAFLNVQAAEEALPRIVELMGRELNWDDYKKQEQLETARKFLYYEMGYKSRSEQLTDRSEISLLPSDIDRYKKRFHKFDADQKGFITIVDVQRVLESINVQMDENTLHEILNEVDLNKNGQVELNEFLQLMSAIQKGRVSGSRLAILMKTAEENLDRRVPIPVDRSCGGL

SEQ ID NO: 35484 - protein, 727 aa, Homo sapiens; identical to SEQ ID NO: 35481
  Payload ID: 7013
  Gene Symbol: GPD2
  Gene Name: glycerol-3-phosphate dehydrogenase 2 (mitochondrial)
  Uniprot ID: P43304
  ENSP ID: ENSP00000386626

SEQ ID NO: 35485 - protein, 56 aa, Homo sapiens
  Payload ID: 7013
  Gene Symbol: GPD2
  Gene Name: glycerol-3-phosphate dehydrogenase 2 (mitochondrial)
  ENSP ID: ENSP00000387475
MAFQKAVKGTILVGGGALATVLGLSQFAHYRRKQNIVLSGELRNEECILLRKCGKT

SEQ ID NO: 35486 - protein, 56 aa, Homo sapiens; identical to SEQ ID NO: 35485
  Payload ID: 7013
  Gene Symbol: GPD2
  Gene Name: glycerol-3-phosphate dehydrogenase 2 (mitochondrial)
  ENSP ID: ENSP00000408522

SEQ ID NO: 35487 - protein, 727 aa, Homo sapiens; identical to SEQ ID NO: 35481
  Payload ID: 7013
  Gene Symbol: GPD2
  Gene Name: glycerol-3-phosphate dehydrogenase 2 (mitochondrial)
  Uniprot ID: P43304
  ENSP ID: ENSP00000409708

SEQ ID NO: 35488 - protein, 109 aa, Homo sapiens
  Payload ID: 7013
  Gene Symbol: GPD2
  Gene Name: glycerol-3-phosphate dehydrogenase 2 (mitochondrial)
  ENSP ID: ENSP00000412621
MAFQKAVKGTILVGGGALATVLGLSQFAHYRRKQMNLAYVKAADCISEPVNREPPSREAQLLTLQNTSEFDILVIGGGATGSGCALDAVTRGLKTALVERDDFSSGTSS

SEQ ID NO: 35489 - protein, 379 aa, Homo sapiens
  Payload ID: 7013
  Gene Symbol: GPD2
  Gene Name: glycerol-3-phosphate dehydrogenase 2 (mitochondrial)
  ENSP ID: ENSP00000440892
MAFQKAVKGTILVGGGALATVLGLSQFAHYRRKQMNLAYVKAADCISEPVNREPPSREAQLLTLQNTSEFDILVIGGGATGSGCALDAVTRGLKTALVERDDFSSGTSSRSTKLIHGGVRYLQKAIMKLDIEQYRMVKEALHERANLLEIAPHLSAPLPIMLPVYKWWQLPYYWVGIKLYDLVAGSNCLKSSYVLSKSRALEHFPMLQKDKLVGAIVYYDGQHNDARMNLAIALTAARYGAATANYMEVVSLLKKTDPQTGKVRVSGARCKDVLTGQEFDVRAKCVINATGPFTDSVRKMDDKDAAAICQPSAGVHIVMPGYYSPESMGLLDPATSDGRVIFFLPWQKMTIAGTTDTPTDVTHHPIPSEEDINFILNEV

SEQ ID NO: 35490 - protein, 680 aa, Homo sapiens
  Payload ID: 7014
  Gene Symbol: GNPAT
  Gene Name: glyceronephosphate O-acyltransferase
  Uniprot ID: O15228
  ENSP ID: ENSP00000355607
MESSSSSNSYFSVGPTSPSAVVLLYSKELKKWDEFEDILEERRHVSDLKFAMKCYTPLVYKGITPCKPIDIKCSVLNSEEIHYVIKQLSKESLQSVDVLREEVSEILDEMSHKLRLGAIRFCAFTLSKVFKQIFSKVCVNEEGIQKLQRAIQEHPVVLLPSHRSYIDFLMLSFLLYNYDLPVPVIAAGMDFLGMKMVGELLRMSGAFFMRRTFGGNKLYWAVFSEYVKTMLRNGYAPVEFFLEGTRSRSAKTLTPKFGLLNIVMEPFFKREVFDTYLVPISISYDKILEETLYVYELLGVPKPKESTTGLLKARKILSENFGSIHVYFGDPVSLRSLAAGRMSRSSYNLVPRYIPQKQSEDMHAFVTEVAYKMELLQIENMVLSPWTLIVAVLLQNRPSMDFDALVEKTLWLKGLTQAFGGFLIWPDNKPAEEVVPASILLHSNIASLVKDQVILKVDSGDSEVVDGLMLQHITLLMCSAYRNQLLNIFVRPSLVAVALQMTPGFRKEDVYSCFRFLRDVFADEFIFLPGNTLKDFEEGCYLLCKSEAIQVTTKDILVTEKGNTVLEFLVGLFKPFVESYQIICKYLLSEEEDHFSEEQYLAAVRKFTSQLLDQGTSQCYDVLSSDVQKNALAACVRLGVVEKKKINNNCIFNVNEPATTKLEEMLGCKTPIGKPATAKL

SEQ ID NO: 35491 - protein, 222 aa, Homo sapiens
  Payload ID: 7014
  Gene Symbol: GNPAT
  Gene Name: glyceronephosphate O-acyltransferase
  ENSP ID: ENSP00000402811
MESSSSSNSYFSVGPTSPSAVVLLYSLSKESLQSVDVLREEVSEILDEMSHKLRLGAIRFCAFTLSKVFKQIFSKVCVNEEGIQKLQRAIQEHPVVLLPSHRSYIDFLMLSFLLYNYDLPVPVIAAGMDFLGMKMVGELLRMSGAFFMRRTFGGNKLYWAVFSEYVKTMLRNGYAPVEFFLEGTRSRSAKTLTPKFGLLNIVMEPFFKREVFDTYLVPISIS

SEQ ID NO: 35492 - protein, 587 aa, Homo sapiens
  Payload ID: 7014
  Gene Symbol: GNPAT
  Gene Name: glyceronephosphate O-acyltransferase
  ENSP ID: ENSP00000411640
MESSSSSNSYFSVGPTSPSAVVLLYSKELKKWDEFEDILEERRHVSDLKFAMKCYTPLVYKGITPCKPIDIKCSVLNSEEIHYVIKQLSKESLQSVDVLREEVSEILDEMSHKLRLGAIRFCAFTLSKVFKQIFSKLQRAIQEHPVVLLPSHRSYIDFLMLSFLLYNYDLPVPVIAAGMDFLGMKMVGELLRMSGAFFMRRTFGGNKLYWAVFSEYVKTMLRNGYAPVEFFLEGTRSRSAKTLTPKFGLLNIVMEPFFKREVFDTYLVPISISYDKILEETLYVYELLGVPKPKESTTGLLKARKILSENFGSIHVYFGDPVSLRSLAAGRMSRSSYNLVPRYIPQKQSEDMHAFVTEVAYKMELLQIENMVLSPWTLIVAVLLQNRPSMDFDALVEKTLWLKGLTQAFGGFLIWPDNKPAEEVVPASILLHSNIASLVKDQVILKVDSGDSEVVDGLMLQHITLLMCSAYRNQLLNIFVRPSLVAVALQMTPGFRKEDVYSCFRFLRDVFADEFIFLPGNTLKDFEEGCYLLCKSEAIQVTTKDILVTEKGNTVLEFLVGLFKPFVESYQIICKYLLSEEEDHFSE

SEQ ID NO: 35493 - protein, 672 aa, Homo sapiens
  Payload ID: 7015
  Gene Symbol: GPCPD1
  Gene Name: glycerophosphocholine phosphodiesterase 1
  Uniprot ID: Q9NPB8
  ENSP ID: ENSP00000368305
MTPSQVAFEIRGTLLPGEVFAICGSCDALGNWNPQNAVALLPENDTGESMLWKATIVLSRGVSVQYRYFKGYFLEPKTIGGPCQVIVHKWETHLQPRSITPLESEIIIDDGQFGIHNGVETLDSGWLTCQTEIRLRLHYSEKPPVSITKKKLKKSRFRVKLTLEGLEEDDDDRVSPTVLHKMSNSLEISLISDNEFKCRHSQPECGYGLQPDRWTEYSIQTMEPDNLELIFDFFEEDLSEHVVQGDALPGHVGTACLLSSTIAESGKSAGILTLPIMSRNSRKTIGKVRVDYIIIKPLPGYSCDMKSSFSKYWKPRIPLDVGHRGAGNSTTTAQLAKVQENTIASLRNAASHGAAFVEFDVHLSKDFVPVVYHDLTCCLTMKKKFDADPVELFEIPVKELTFDQLQLLKLTHVTALKSKDRKESVVQEENSFSENQPFPSLKMVLESLPEDVGFNIEIKWICQQRDGMWDGNLSTYFDMNLFLDIILKTVLENSGKRRIVFSSFDADICTMVRQKQNKYPILFLTQGKSEIYPELMDLRSRTTPIAMSFAQFENLLGINVHTEDLLRNPSYIQEAKAKGLVIFCWGDDTNDPENRRKLKELGVNGLIYDRIYDWMPEQPNIFQVEQLERLKQELPELKSCLCPTVSRFVPSSLCGESDIHVDANGIDNVENA

SEQ ID NO: 35494 - protein, 264 aa, Homo sapiens
  Payload ID: 7015
  Gene Symbol: GPCPD1
  Gene Name: glycerophosphocholine phosphodiesterase 1
  ENSP ID: ENSP00000396720
  MOD_RES (1)..(1): Any amino acid
XCDMKSSFSKYWKPRIPLDVGHRGAGNSTTTAQLAKVQENTIASLRNAASHGAAFVEFDVHLSKDFVPVVYHDLTCCLTMKKNLWFRRKIPFQKISHFLLLRWVRQKQNKYPILFLTQGKSEIYPELMDLRSRTTPIAMSFAQFENLLGINVHTEDLLRNPSYIQEAKAKGLVIFCWGDDTNDPENRRKLKELGVNGLIYDRIYDWMPEQPNIFQVEQLERLKQELPELKSCLCPTVSRFVPSSLCGESDIHVDANGIDNVENA

SEQ ID NO: 35495 - protein, 62 aa, Homo sapiens
  Payload ID: 7015
  Gene Symbol: GPCPD1
  Gene Name: glycerophosphocholine phosphodiesterase 1
  ENSP ID: ENSP00000487616
  MOD_RES (1)..(1): Any amino acid
XENTIASLRNAASHGAAFVEFDVHLSKDFVPVVYHDLTCCLTMKKLSSALQLSASCIFLPEI

SEQ ID NO: 35496 - protein, 101 aa, Homo sapiens
  Payload ID: 7015
  Gene Symbol: GPCPD1
  Gene Name: glycerophosphocholine phosphodiesterase 1
  ENSP ID: ENSP00000488635
MTPSQVAFEIRGTLLPGEVFAICGSCDALGNWNPQNAVALLPENDTGESMLWKATIVLSRGVSVQYRYFKGYFLEPKKAKLLLTMDNLESTMVLKLWILDG

SEQ ID NO: 35497 - protein, 331 aa, Homo sapiens
  Payload ID: 7016
  Gene Symbol: GDE1
  Gene Name: glycerophosphodiester phosphodiesterase 1
  Uniprot ID: Q9NZC3
  ENSP ID: ENSP00000261386
MWLWEDQGGLLGPFSFLLLVLLLVTRSPVNACLLTGSLFVLLRVFSFEPVPSCRALQVLKPRDRISAIAHRGGSHDAPENTLAAIRQAAKNGATGVELDIEFTSDGIPVLMHDNTVDRTTDGTGRLCDLTFEQIRKLNPAANHRLRNDFPDEKIPTLREAVAECLNHNLTIFFDVKGHAHKATEALKKMYMEFPQLYNNSVVCSFLPEVIYKMRQTDRDVITALTHRPWSLSHTGDGKPRYDTFWKHFIFVMMDILLDWSMHNILWYLCGISAFLMQKDFVSPAYLKKWSAKGIQVVGWTVNTFDEKSYYESHLGSSYITDSMVEDCEPHF

SEQ ID NO: 35498 - protein, 102 aa, Homo sapiens
  Payload ID: 7016
  Gene Symbol: GDE1
  Gene Name: glycerophosphodiester phosphodiesterase 1
  ENSP ID: ENSP00000454755
MHDNTVDRTTDGTGRLCDLTFEQIRKLNPAANHRLRNDFPDEKIPTLREAVAECLNHNLTIFFDVKGHAHKATEALKKMYMEFPQLYNNSVVCSFLPEVIYK

SEQ ID NO: 35499 - protein, 129 aa, Homo sapiens
  Payload ID: 7016
  Gene Symbol: GDE1
  Gene Name: glycerophosphodiester phosphodiesterase 1
  ENSP ID: ENSP00000456295
GVELDIEFTSDGIPVLMHDNTVDRTTDGTGRLCDLTFEQIRKLNPAANHRLRNDFPDEKIPTLREAVAECLNHNLTIFFDVKGHAHKATEALKKMYMEFPQLYNNSVVCSFLPEVIYKVTFGIFLVHIR

SEQ ID NO: 35500 - protein, 108 aa, Homo sapiens
  Payload ID: 7016
  Gene Symbol: GDE1
  Gene Name: glycerophosphodiester phosphodiesterase 1
  ENSP ID: ENSP00000457431
MWLWEDQGGLLGPFSFLLLVLLLVTRSPVNACLLTGSLFVLLRVFSFEPVPSCRALQVLKPRDRISAIAHRGGSHDAPENTLAAIRQLRMEQQAWSWTLSLLLTGFLS

SEQ ID NO: 35501 - protein, 314 aa, Homo sapiens
  Payload ID: 7017
  Gene Symbol: GDPD1
  Gene Name: glycerophosphodiester phosphodiesterase domain containing 1
  Uniprot ID: Q8N9F7
  ENSP ID: ENSP00000284116
MSSTAAFYLLSTLGGYLVTSFLLLKYPTLLHQRKKQRFLSKHISHRGGAGENLENTMAAFQHAVKIGTDMLELDCHITKDEQVVVSHDENLKRATGVNVNISDLKYCELPPYLGKLDVSFQRACQCEGKDNRIPLLKEVFEAFPNTPINIDIKVNNNVLIKKVSELVKRYNREHLTVWGNANYEIVEKCYKENSDIPILFSLQRVLLILGLFFTGLLPFVPIREQFFEIPMPSIILKLKEPHTMSRSQKFLIWLSDLLLMRKALFDHLTARGIQVYIWVLNEEQEYKRAFDLGATGVMTDYPTKLRDFLHNFSA

SEQ ID NO: 35502 - protein, 130 aa, Homo sapiens
  Payload ID: 7017
  Gene Symbol: GDPD1
  Gene Name: glycerophosphodiester phosphodiesterase domain containing 1
  ENSP ID: ENSP00000462895
MSSTAAFYLLSTLGGYLVTSFLLLKYPTLLHQRKKQRFLSKHISHRGGAGENLENTMAAFQHAVKIGTDMLELDCHITKDEQVVVSHDENLKRATGVNVNISDLKYCELPPYLGKLDVSFQRGFRVGEAV

SEQ ID NO: 35503 - protein, 289 aa, Homo sapiens
  Payload ID: 7017
  Gene Symbol: GDPD1
  Gene Name: glycerophosphodiester phosphodiesterase domain containing 1
  Uniprot ID: Q8N9F7
  ENSP ID: ENSP00000463273
MSSTAAFYLLSTLGGYLVTSFLLLKYPTLLHQRKKQRFLSKHISHRGGAGENLENTMAAFQHAVKIGTDMLELDCHITKDEQVVVSHDENLKRATGVNVNISDLKYCELPPYLGKLDVSFQRACQCEGKDNRIPLLKEVFEAFPNTPINIDIKVNNNVLIKKVSELVKRYNREHLTVWGNANYEIVEKCYKENSDIPILFSLQRVLLILGLFFTGLLPFVPIREQFFEIPMPSIILKLKEPHTMSRSQKFLIWLSDLLLMRKALFEPLHPASKRNFEGHCSYLVVSCYF

SEQ ID NO: 35504 - protein, 210 aa, Homo sapiens
  Payload ID: 7017
  Gene Symbol: GDPD1
  Gene Name: glycerophosphodiester phosphodiesterase domain containing 1
  ENSP ID: ENSP00000463818
MSSTAAFYLLSTLGGYLVTSFLLLKYPTLLHQRKKQRFLSKHISHRGGAGENLENTMAAFQHAVKIGTDMLELDCHITKDEQVVVSHDENLKRATGVNVNISDLKYCELPPYLGKLDVSFQRACQCEGKDNRIPLLKEVFEAFPNTPINIDIKVNNNVLIKKVSELVKRYNREHLTVWGNANYEIVEKCYKEAKRTTHHVQKSKVSHLAF

SEQ ID NO: 35505 - protein, 121 aa, Homo sapiens
  Payload ID: 7017
  Gene Symbol: GDPD1
  Gene Name: glycerophosphodiester phosphodiesterase domain containing 1
  ENSP ID: ENSP00000464351
SDIPILFSLQRVLLILGLFFTGLLPFVPIREQFFEIPMPSIILKLKEPHTMSRSQKFLIWLSDLLLMRKALFDHLTARGIQVYIWVLNEEQEYKRAFDLGATGVMTDYPTKLRDFLHNFSA

SEQ ID NO: 35506 - protein, 290 aa, Homo sapiens
  Payload ID: 7017
  Gene Symbol: GDPD1
  Gene Name: glycerophosphodiester phosphodiesterase domain containing 1
  Uniprot ID: Q8N9F7
  ENSP ID: ENSP00000464690
MSSTAAFYLLSTLGGYLVTSFLLLKYPTLLHQRKKQRFLSKHISHRGGAGENLENTMAAFQHAVKIGTDMLELDCHITKDEQVVVSHDENLKRATGVNVNISDLKYCELPPYLGKLDVSFQRACQCEGKDNRIPLLKEVFEAFPNTPINIDIKVNNNVLIKKVSELVKRYNREHLTVWGNANYEIVEKCYKENSDIPILFSLQRVLLILGLFFTGLLPFVPIREQFFEIPMPSIILKLKEPHTMSRSQKFLIWLSDLLLMRKALFDHLTARGIQVSFWNDAFWKQHSSPV

SEQ ID NO: 35507 - protein, 539 aa, Homo sapiens
  Payload ID: 7018
  Gene Symbol: GDPD2
  Gene Name: glycerophosphodiester phosphodiesterase domain containing 2
  Uniprot ID: Q9HCC8
  ENSP ID: ENSP00000363503
MAESPGCCSVWARCLHCLYSCHWRKCPRERMQTSKCDCIWFGLLFLTFLLSLSWLYIGLVLLNDLHNFNEFLFRRWGHWMDWSLAFLLVISLLVTYASLLLVLALLLRLCRQPLHLHSLHKVLLLLIMLLVAAGLVGLDIQWQQEWHSLRVSLQATAPFLHIGAAAGIALLAWPVADTFYRIHRRGPKILLLLLFFGVVLVIYLAPLCISSPCIMEPRDLPPKPGLVGHRGAPMLAPENTLMSLRKTAECGATVFETDVMVSSDGVPFLMHDEHLSRTTNVASVFPTRITAHSSDFSWTELKRLNAGSWFLERRPFWGAKPLAGPDQKEAESQTVPALEELLEEAAALNLSIMFDLRRPPQNHTYYDTFVIQTLETVLNARVPQAMVFWLPDEDRANVQRRAPGMRQIYGRQGGNRTERPQFLNLPYQDLPLLDIKALHKDNVSVNLFVVNKPWLFSLLWCAGVDSVTTNDCQLLQQMRYPIWLITPQTYLIIWVITNCVSTMLLLWTFLLQRRFVKKRGKTGLETAVLLTRINNFMME

SEQ ID NO: 35508 - protein, 590 aa, Homo sapiens
  Payload ID: 7018
  Gene Symbol: GDPD2
  Gene Name: glycerophosphodiester phosphodiesterase domain containing 2
  Uniprot ID: Q9HCC8
  ENSP ID: ENSP00000414019
MAESPGCCSVWARCLHCLYSCHWRKCPRERMQTSKCDCIWFGLLFLTFLLSLSWLYIGLVLLNDLHNFNEFLFRRWGHWMDWSLAFLLVISLLVTYASLLLVLALLLRLCRQPLHLHSLHKVLLLLIMLLVAAGLVGLDIQWQQEWHSLRVSLQATAPFLHIGAAAGIALLAWPVADTFYRIHRRGPKILLLLLFFGVVLVIYLAPLCISSPCIMEPRDLPPKPGLVGHRGAPMLAPENTLMSLRKTAECGATVFETDVMVSSDGVPFLMHDEHLSRTTNVASVFPTRITAHSSDFSWTELKRLNAGSWFLERRPFWGAKPLAGPDQKEAESQTVPALEELLEEAAALNLSIMFDLRRPPQNHTYYDTFVIQTLETVLNARVPQAMVFWLPDEDRANVQRRAPGMRQIYGRQGGNRTERPQFLNLPYQDLPLLDIKDRFLLPAQAGLKLLASSNLPASASQSAGITGLSHCPPQPPGYKHELSHLAMALHKDNVSVNLFVVNKPWLFSLLWCAGVDSVTTNDCQLLQQMRYPIWLITPQTYLIIWVITNCVSTMLLLWTFLLQRRFVKKRGKTGLETAVLLTRINNFMME

SEQ ID NO: 35509 - protein, 460 aa, Homo sapiens
  Payload ID: 7018
  Gene Symbol: GDPD2
  Gene Name: glycerophosphodiester phosphodiesterase domain containing 2
  Uniprot ID: Q9HCC8
  ENSP ID: ENSP00000444601
MDWSLAFLLVISLLVTYASLLLVLALLLRLCRQPLHLHSLHKVLLLLIMLLVAAGLVGLDIQWQQEWHSLRVSLQATAPFLHIGAAAGIALLAWPVADTFYRIHRRGPKILLLLLFFGVVLVIYLAPLCISSPCIMEPRDLPPKPGLVGHRGAPMLAPENTLMSLRKTAECGATVFETDVMVSSDGVPFLMHDEHLSRTTNVASVFPTRITAHSSDFSWTELKRLNAGSWFLERRPFWGAKPLAGPDQKEAESQTVPALEELLEEAAALNLSIMFDLRRPPQNHTYYDTFVIQTLETVLNARVPQAMVFWLPDEDRANVQRRAPGMRQIYGRQGGNRTERPQFLNLPYQDLPLLDIKALHKDNVSVNLFVVNKPWLFSLLWCAGVDSVTTNDCQLLQQMRYPIWLITPQTYLIIWVITNCVSTMLLLWTFLLQRRFVKKRGKTGLETAVLLTRINNFMME

SEQ ID NO: 35510 - protein, 460 aa, Homo sapiens; identical to SEQ ID NO: 35509
  Payload ID: 7018
  Gene Symbol: GDPD2
  Gene Name: glycerophosphodiester phosphodiesterase domain containing 2
  Uniprot ID: Q9HCC8
  ENSP ID: ENSP00000445982

SEQ ID NO: 35511 - protein, 318 aa, Homo sapiens
  Payload ID: 7019
  Gene Symbol: GDPD3
  Gene Name: glycerophosphodiester phosphodiesterase domain containing 3
  Uniprot ID: Q7L5L3
  ENSP ID: ENSP00000384363
MSLLLYYALPALGSYAMLSIFFLRRPHLLHTPRAPTFRIRLGAHRGGSGELLENTMEAMENSMAQRSDLLELDCQLTRDRVVVVSHDENLCRQSGLNRDVGSLDFEDLPLYKEKLEVYFSPGHFAHGSDRRMVRLEDLFQRFPRTPMSVEIKGKNEELIREIAGLVRRYDRNEITIWASEKSSVMKKCKAANPEMPLSFTISRGFWVLLSYYLGLLPFIPIPEKFFFCFLPNIINRTYFPFSCSCLNQLLAVVSKWLIMRKSLIRHLEERGVQVVFWCLNEESDFEAAFSVGATGVITDYPTALRHYLDNHGPAARTS

SEQ ID NO: 35512 - protein, 47 aa, Homo sapiens
  Payload ID: 7019
  Gene Symbol: GDPD3
  Gene Name: glycerophosphodiester phosphodiesterase domain containing 3
  ENSP ID: ENSP00000454472
  MOD_RES (1)..(1): Any amino acid
XINRTYFPFSCSCLNQLLAVVSKWWSFGALMKSRILKQPSAWEPLAS

SEQ ID NO: 35513 - protein, 41 aa, Homo sapiens
  Payload ID: 7019
  Gene Symbol: GDPD3
  Gene Name: glycerophosphodiester phosphodiesterase domain containing 3
  ENSP ID: ENSP00000455508
  MOD_RES (1)..(1): Any amino acid
XTYFPFSCSCLNQLLAVVSKWLIMRKSLIRHLEERGVQVRP

SEQ ID NO: 35514 - protein, 520 aa, Homo sapiens
  Payload ID: 7020
  Gene Symbol: GDPD4
  Gene Name: glycerophosphodiester phosphodiesterase domain containing 4
  Uniprot ID: Q6W3E5
  ENSP ID: ENSP00000320815
MLLFLWIETSSEYFNFDWVTFLGTGYWFFWSIFILSLARILTAYSSLLLLLGFLLLWERIELYLHLCHKILILLVILLCVILMFIICKFWKERWLVAGLSMQIFAPYVHLVSITVMVILFWPVAFYVACLEREVRMRRYRMTHSEKKRLKQCNVITRLRGLQVPVGLPFLLILLGLYLMPLGIYSPCIQEKENLGPKPTIFGHRGAPMLGPENTMMSFEKAVEHGAHGLETDIHLSYDHVPFLMHDFDLKRTTNIGEVQPESACENPAFFNWDFLSTLNAGKWFVKPELRPFYNMKPLSEADKERARNQSIPTLADLLTLAEKERKFVIFDLHRPPPKHPLRHTFVRQVVSVILASKIEQHLIFWLPAHDRQYVRSVAPGFQHVGRLVSIETLAKNNISIINVDYKKLFPNGLRDYKAANIHINVYTVNEPWLFSLAWCSRINSVTTDNIGLLSQLDHPHFFMTPKFYVFMWLLADIISVLFIVAIFCFHWRRETEKEKLFETSSTRTDTQSGSKNEEDR

SEQ ID NO: 35515 - protein, 623 aa, Homo sapiens
  Payload ID: 7020
  Gene Symbol: GDPD4
  Gene Name: glycerophosphodiester phosphodiesterase domain containing 4
  Uniprot ID: Q6W3E5
  ENSP ID: ENSP00000365390
MLLFLWIETSSEYFNFDWVTFLGTGYWFFWSIFILSLARILTAYSSLLLLLGFLLLWERIELYLHLCHKILILLVILLCVILMFIICKFWKERWLVAGLSMQIFAPYVHLVSITVMVILFWPVAFYVACLEREVRMRRYRMTHSEKKRLKQCNVITRLRGLQVPVGLPFLLILLGLYLMPLGIYSPCIQEKENLGPKPTIFGHRGAPMLGPENTMMSFEKAVEHGAHGLETDIHLSYDHVPFLMHDFDLKRTTNIGEVQPESACENPAFFNWDFLSTLNAGKWFVKPELRPFYNMKPLSEADKERARNQSIPTLADLLTLAEKERKFVIFDLHRPPPKHPLRHTFVRQVVSVILASKIEQHLIFWLPAHDRQYVRSVAPGFQHVGRLVSIETLAKNNISIINVDYKKLFPNGLRDYKAANIHINVYTVNEPWLFSLAWCSRINSVTTDNIGLLSQLDHPHFFMTPKFYVFMWLLADIISVLFIVAIFCFHWRRETEKEKLFETSSTRTDTQSGNLHIAMKPPVRVVEGPWTLAALYPALPKSGKEHQGHFNFAAPSKKLLPIKNAVTPLKPGKHEIQPPMPTVVFELTQAPTRQATSEATFQTTLPTLKVDKPTMPSIEVPYP

SEQ ID NO: 35516 - protein, 605 aa, Homo sapiens
  Payload ID: 7021
  Gene Symbol: GDPD5
  Gene Name: glycerophosphodiester phosphodiesterase domain containing 5
  Uniprot ID: Q8WTR4
  ENSP ID: ENSP00000337972
MVRHQPLQYYEPQLCLSCLTGIYGCRWKRYQRSHDDTTPWERLWFLLLTFTFGLTLTWLYFWWEVHNDYDEFNWYLYNRMGYWSDWPVPILVTTAAAFAYIAGLLVLALCHIAVGQQMNLHWLHKIGLVVILASTVVAMSAVAQLWEDEWEVLLISLQGTAPFLHVGAVAAVTMLSWIVAGQFARAERTSSQVTILCTFFTVVFALYLAPLTISSPCIMEKKDLGPKPALIGHRGAPMLAPEHTLMSFRKALEQKLYGLQADITISLDGVPFLMHDTTLRRTTNVEEEFPELARRPASMLNWTTLQRLNAGQWFLKTDPFWTASSLSPSDHREAQNQSICSLAELLELAKGNATLLLNLRDPPREHPYRSSFINVTLEAVLHSGFPQHQVMWLPSRQRPLVRKVAPGFQQTSGSKEAVASLRRGHIQRLNLRYTQVSRQELRDYASWNLSVNLYTVNAPWLFSLLWCAGVPSVTSDNSHALSQVPSPLWIMPPDEYCLMWVTADLVSFTLIVGIFVLQKWRLGGIRSYNPEQIMLSAAVRRTSRDVSIMKEKLIFSEISDGVEVSDVLSVCSDNSYDTYANSTATPVGPRGGGSHTKTLIERSGR

SEQ ID NO: 35517 - protein, 135 aa, Homo sapiens
  Payload ID: 7021
  Gene Symbol: GDPD5
  Gene Name: glycerophosphodiester phosphodiesterase domain containing 5
  ENSP ID: ENSP00000396535
MVRHQPLQYYEPQLCLSCLTGIYGCRWKRYQRSHDDTTPWERLWFLLLTFTFGLTLTWLYFWWEVHNDYDEFNWYLYNRMGYWSDWPVPILVTTAAAFAYIAGLLVLALCHIAVGQQMNLHWLHKASSGLPLSPL

SEQ ID NO: 35518 - protein, 605 aa, Homo sapiens; identical to SEQ ID NO: 35516
  Payload ID: 7021
  Gene Symbol: GDPD5
  Gene Name: glycerophosphodiester phosphodiesterase domain containing 5
  Uniprot ID: Q8WTR4
  ENSP ID: ENSP00000433214

SEQ ID NO: 35519 - protein, 73 aa, Homo sapiens
  Payload ID: 7021
  Gene Symbol: GDPD5
  Gene Name: glycerophosphodiester phosphodiesterase domain containing 5
  ENSP ID: ENSP00000433727
MVRHQPLQYYEPQLCLSCLTGIYGCRWKRYQRSHDDTTPWERLWFLLLTFTFGLTLTWLYFWWEVHNDYDEFN

SEQ ID NO: 35520 - protein, 467 aa, Homo sapiens
  Payload ID: 7021
  Gene Symbol: GDPD5
  Gene Name: glycerophosphodiester phosphodiesterase domain containing 5
  Uniprot ID: Q8WTR4
  ENSP ID: ENSP00000434050
MSAVAQLWEDEWEVLLISLQGTAPFLHVGAVAAVTMLSWIVAGQFARAERTSSQVTILCTFFTVVFALYLAPLTISSPCIMEKKDLGPKPALIGHRGAPMLAPEHTLMSFRKALEQKLYGLQADITISLDGVPFLMHDTTLRRTTNVEEEFPELARRPASMLNWTTLQRLNAGQWFLKTDPFWTASSLSPSDHREAQNQSICSLAELLELAKGNATLLLNLRDPPREHPYRSSFINVTLEAVLHSGFPQHQVMWLPSRQRPLVRKVAPGFQQTSGSKEAVASLRRGHIQRLNLRYTQVSRQELRDYASWNLSVNLYTVNAPWLFSLLWCAGVPSVTSDNSHALSQVPSPLWIMPPDEYCLMWVTADLVSFTLIVGIFVLQKWRLGGIRSYNPEQIMLSAAVRRTSRDVSIMKEKLIFSEISDGVEVSDVLSVCSDNSYDTYANSTATPVGPRGGGSHTKTLIERSGR

SEQ ID NO: 35521 - protein, 360 aa, Homo sapiens
  Payload ID: 7021
  Gene Symbol: GDPD5
  Gene Name: glycerophosphodiester phosphodiesterase domain containing 5
  Uniprot ID: Q8WTR4
  ENSP ID: ENSP00000435196
MSFRKALEQKLYGLQADITISLDGVPFLMHDTTLRRTTNVEEEFPELARRPASMLNWTTLQRLNAGQWFLKTDPFWTASSLSPSDHREAQNQSICSLAELLELAKGNATLLLNLRDPPREHPYRSSFINVTLEAVLHSGFPQHQVMWLPSRQRPLVRKVAPGFQQTSGSKEAVASLRRGHIQRLNLRYTQVSRQELRDYASWNLSVNLYTVNAPWLFSLLWCAGVPSVTSDNSHALSQVPSPLWIMPPDEYCLMWVTADLVSFTLIVGIFVLQKWRLGGIRSYNPEQIMLSAAVRRTSRDVSIMKEKLIFSEISDGVEVSDVLSVCSDNSYDTYANSTATPVGPRGGGSHTKTLIERSGR

SEQ ID NO: 35522 - protein, 175 aa, Homo sapiens
  Payload ID: 7021
  Gene Symbol: GDPD5
  Gene Name: glycerophosphodiester phosphodiesterase domain containing 5
  ENSP ID: ENSP00000435728
AVASLRRGHIQRLNLRYTQVSRQELRDYASWNLSVNLYTVNAPWLFSLLWCAGVPSVTSDNSHALSQVPSPLWIMPPDEYCLMWVTADLVSFTLIVGIFVLQNYHLIRWRLGGIRSYNPEQIMLSAAVRRTSRDVSIMKEKLIFSEISDGVEVSDVLSVCSDNSYDTYANSTATP

SEQ ID NO: 35523 - protein, 486 aa, Homo sapiens
  Payload ID: 7021
  Gene Symbol: GDPD5
  Gene Name: glycerophosphodiester phosphodiesterase domain containing 5
  Uniprot ID: Q8WTR4
  ENSP ID: ENSP00000437049
MVRHQPLQYYEPQLCLSCLTGIYGCRWKRYQRSHDDTTPGTAPFLHVGAVAAVTMLSWIVAGQFARAERTSSQVTILCTFFTVVFALYLAPLTISSPCIMEKKDLGPKPALIGHRGAPMLAPEHTLMSFRKALEQKLYGLQADITISLDGVPFLMHDTTLRRTTNVEEEFPELARRPASMLNWTTLQRLNAGQWFLKTDPFWTASSLSPSDHREAQNQSICSLAELLELAKGNATLLLNLRDPPREHPYRSSFINVTLEAVLHSGFPQHQVMWLPSRQRPLVRKVAPGFQQTSGSKEAVASLRRGHIQRLNLRYTQVSRQELRDYASWNLSVNLYTVNAPWLFSLLWCAGVPSVTSDNSHALSQVPSPLWIMPPDEYCLMWVTADLVSFTLIVGIFVLQKWRLGGIRSYNPEQIMLSAAVRRTSRDVSIMKEKLIFSEISDGVEVSDVLSVCSDNSYDTYANSTATPVGPRGGGSHTKTLIERSGR

SEQ ID NO: 35524 - protein, 135 aa, Homo sapiens; identical to SEQ ID NO: 35517
  Payload ID: 7021
  Gene Symbol: GDPD5
  Gene Name: glycerophosphodiester phosphodiesterase domain containing 5
  ENSP ID: ENSP00000437123

SEQ ID NO: 35525 - protein, 423 aa, Homo sapiens
  Payload ID: 7022
  Gene Symbol: GATM
  Gene Name: glycine amidinotransferase (L-arginine:glycine amidinotransferase)
  Uniprot ID: P50440
  ENSP ID: ENSP00000379895
MLRVRCLRGGSRGAEAVHYIGSRLGRTLTGWVQRTFQSTQAATASSRNSCAADDKATEPLPKDCPVSSYNEWDPLEEVIVGRAENACVPPFTIEVKANTYEKYWPFYQKQGGHYFPKDHLKKAVAEIEEMCNILKTEGVTVRRPDPIDWSLKYKTPDFESTGLYSAMPRDILIVVGNEIIEAPMAWRSRFFEYRAYRSIIKDYFHRGAKWTTAPKPTMADELYNQDYPIHSVEDRHKLAAQGKFVTTEFEPCFDAADFIRAGRDIFAQRSQVTNYLGIEWMRRHLAPDYRVHIISFKDPNPMHIDATFNIIGPGIVLSNPDRPCHQIDLFKKAGWTIITPPTPIIPDDHPLWMSSKWLSMNVLMLDEKRVMVDANEVPIQKMFEKLGITTIKVNIRNANSLGGGFHCWTCDVRRRGTLQSYLD

SEQ ID NO: 35526 - protein, 96 aa, Homo sapiens
  Payload ID: 7022
  Gene Symbol: GATM
  Gene Name: glycine amidinotransferase (L-arginine:glycine amidinotransferase)
  ENSP ID: ENSP00000452971
MLRVRCLRGGSRGAEAVHYIGSRLGRTLTGWVQRTFQSTQAATASSRNSCAADDKATEPLPKDCPVSSYNEWDPLEEVIVGRAENACVPPFTIEVK

SEQ ID NO: 35527 - protein, 15 aa, Homo sapiens
  Payload ID: 7022
  Gene Symbol: GATM
  Gene Name: glycine amidinotransferase (L-arginine:glycine amidinotransferase)
  ENSP ID: ENSP00000453087
MCNILKTEGVTVRRP

SEQ ID NO: 35528 - protein, 32 aa, Homo sapiens
  Payload ID: 7022
  Gene Symbol: GATM
  Gene Name: glycine amidinotransferase (L-arginine:glycine amidinotransferase)
  ENSP ID: ENSP00000453151
MCNILKTEGVTVRRPDPIDWSLKYKTPDFEST

SEQ ID NO: 35529 - protein, 167 aa, Homo sapiens
  Payload ID: 7022
  Gene Symbol: GATM
  Gene Name: glycine amidinotransferase (L-arginine:glycine amidinotransferase)
  ENSP ID: ENSP00000453781
MLRVRCLRGGSRGAEAVHYIGSRANTYEKYWPFYQKQGGHYFPKDHLKKAVAEIEEMCNILKTEGVTVRRPDPIDWSLKYKTPDFESTGLYSAMPRDILIVVGNEIIEAPMAWRSRFFEYRAYRSIIKDYFHRGAKWTTAPKPTMADELYNQDYPIHSVEDRHKLAA

SEQ ID NO: 35530 - protein, 31 aa, Homo sapiens
  Payload ID: 7022
  Gene Symbol: GATM
  Gene Name: glycine amidinotransferase (L-arginine:glycine amidinotransferase)
  ENSP ID: ENSP00000453860
MCNILKTEGVTVRRPDPIDWSLKYKTPDFES

SEQ ID NO: 35531 - protein, 391 aa, Homo sapiens
  Payload ID: 7022
  Gene Symbol: GATM
  Gene Name: glycine amidinotransferase (L-arginine:glycine amidinotransferase)
  Uniprot ID: P50440
  ENSP ID: ENSP00000454008
MLRVRCLRGGSRGAEAVHYIGSRLGRTLTGWVQRTFQSTQAATASSRNSCAADDKATEPLPKDCPVSSYNEWDPLEEVIVGRAENACVPPFTIEVKANTYEKYWPFYQKQGGHYFPKDHLKKAVAEIEEMCNILKTEGVTVRRPDPIDWSLKYKTPDFESTGLYSAMPRDILIVVGNEIIEAPMAWRSRFFEYRAYRSIIKDYFHRGAKWTTAPKPTMADELYNQDYPIHSVEDRHKLAAQGKFVTTEFEPCFDAADFIRAGRDIFAQRSQVTNYLGIEWMRRHLAPDYRVHIISFKDPNPMHIDATFNIIGPGIVLSNPDRPCHQIDLFKKAGWTIITPPTPIIPDDHPLWMSSKWLSMNVLMLDEKRVMVDANEVPIQKMFEKLGMYNK

SEQ ID NO: 35532 - protein, 419 aa, Homo sapiens
  Payload ID: 7023
  Gene Symbol: GCAT
  Gene Name: glycine C-acetyltransferase
  Uniprot ID: O75600
  ENSP ID: ENSP00000248924
MWPGNAWRAALFWVPRGRRAQSALAQLRGILEGELEGIRGAGTWKSERVITSRQGPHIRVDGVSGGILNFCANNYLGLSSHPEVIQAGLQALEEFGAGLSSVRFICGTQSIHKNLEAKIARFHQREDAILYPSCYDANAGLFEALLTPEDAVLSDELNHASIIDGIRLCKAHKYRYRHLDMADLEAKLQEAQKHRLRLVATDGAFSMDGDIAPLQEICCLASRYGALVFMDECHATGFLGPTGRGTDELLGVMDQVTIINSTLGKALGGASGGYTTGPGPLVSLLRQRARPYLFSNSLPPAVVGCASKALDLLMGSNTIVQSMAAKTQRFRSKMEAAGFTISGASHPICPVMLGDARLASRMADDMLKRGIFVIGFSYPVVPKGKARIRVQISAVHSEEDIDRCVEAFVEVGRLHGALP

SEQ ID NO: 35533 - protein, 445 aa, Homo sapiens
  Payload ID: 7023
  Gene Symbol: GCAT
  Gene Name: glycine C-acetyltransferase
  Uniprot ID: O75600
  ENSP ID: ENSP00000371110
MWPGNAWRAALFWVPRGRRAQSALAQLRGILEGELEGIRGAGTWKSERVITSRQGPHIRVDGVSGGPGTVIFPGLPLPHLSCCIHLLSFTSGILNFCANNYLGLSSHPEVIQAGLQALEEFGAGLSSVRFICGTQSIHKNLEAKIARFHQREDAILYPSCYDANAGLFEALLTPEDAVLSDELNHASIIDGIRLCKAHKYRYRHLDMADLEAKLQEAQKHRLRLVATDGAFSMDGDIAPLQEICCLASRYGALVFMDECHATGFLGPTGRGTDELLGVMDQVTIINSTLGKALGGASGGYTTGPGPLVSLLRQRARPYLFSNSLPPAVVGCASKALDLLMGSNTIVQSMAAKTQRFRSKMEAAGFTISGASHPICPVMLGDARLASRMADDMLKRGIFVIGFSYPVVPKGKARIRVQISAVHSEEDIDRCVEAFVEVGRLHGALP

SEQ ID NO: 35534 - protein, 239 aa, Homo sapiens
  Payload ID: 7023
  Gene Symbol: GCAT
  Gene Name: glycine C-acetyltransferase
  ENSP ID: ENSP00000388151
  MOD_RES (1)..(1): Any amino acid
XGRRAQSALAQLRGILEGELEGIRGAGTWKSERVITSRQGPHIRVDGVSGGILNFCANNYLGLSSHPEVIQAGLQALEEFGAGLSSVRFICGTQSIHKNLEAKIARFHQREDAILYPSCYDANAGLFESRALVQPGTETRGPQREAQNTLPLYPEERPGWQYSFLICWSPGQGRSPGWLNDGSTLTASLQALLTPEDAVLSDELNHASIIDGIRLCKAHKYRYRHLDMADLEAKLQEAQ

SEQ ID NO: 35535 - protein, 91 aa, Homo sapiens
  Payload ID: 7023
  Gene Symbol: GCAT
  Gene Name: glycine C-acetyltransferase
  ENSP ID: ENSP00000402213
MWPGNAWRAALFWVPRGRRAQSALAQLRGILEGELEGIRGAGTWKSERVITSRQGPHIRVDGVSGEHPQESRSKNSPLPPAGGCHPLSQLL

SEQ ID NO: 35536 - protein, 177 aa, Homo sapiens
  Payload ID: 7023
  Gene Symbol: GCAT
  Gene Name: glycine C-acetyltransferase
  ENSP ID: ENSP00000406719
MWPGNAWRAALFWVPRGRRAQSALAQLRGILEGELEGIRGAGTWKSERVITSRQGPHIRVDGVSGGPGTVIFPGLPLPHLSCCIHLLSFTSGILNFCANNYLGLSSHPEVIQAGLQALEEFGAGLSSVRFICGTQSIHKNLEAKIARFHQREDAILYPSCYDANAGLFESRALVQPG

SEQ ID NO: 35537 - protein, 173 aa, Homo sapiens
  Payload ID: 7024
  Gene Symbol: GCSH
  Gene Name: glycine cleavage system protein H (aminomethyl carrier)
  Uniprot ID: P23434
  ENSP ID: ENSP00000319531
MALRVVRSVRALLCTLRAVPSPAAPCPPRPWQLGVGAVRTLRTGPALLSVRKFTEKHEWVTTENGIGTVGISNFAQEALGDVVYCSLPEVGTKLNKQDEFGALESVKAASELYSPLSGEVTEINEALAENPGLVNKSCYEDGWLIKMTLSNPSELDELMSEEAYEKYIKSIEE

SEQ ID NO: 35538 - protein, 162 aa, Homo sapiens
  Payload ID: 7024
  Gene Symbol: GCSH
  Gene Name: glycine cleavage system protein H (aminomethyl carrier)
  ENSP ID: ENSP00000455019
MALRVVRSVRALLCTLRAVPSPAAPCPPRPWQLGVGAVRTLRTGPALLSVRKFTEKHEWVTTENGIGTVGISNFAQEALGDVVYCSLPEVGTKLNKQDEFGALESVKAASELYSPLSGEVTEINEALAENPGLVNKSCYEDGKLLLEISQGITTTVNILSRI

SEQ ID NO: 35539 - protein, 50 aa, Homo sapiens
  Payload ID: 7024
  Gene Symbol: GCSH
  Gene Name: glycine cleavage system protein H (aminomethyl carrier)
  ENSP ID: ENSP00000455287
MALRVVRSVRALLCTLRAVPSPAAPCPPRPWQLGVGAVRTLRTGPALLSG

SEQ ID NO: 35540 - protein, 66 aa, Homo sapiens
  Payload ID: 7024
  Gene Symbol: GCSH
  Gene Name: glycine cleavage system protein H (aminomethyl carrier)
  ENSP ID: ENSP00000455579
  MOD_RES (1)..(1): Any amino acid
XCTLRAVPSPAAPCPPRPWQLGVGAVRTLRTGPALLSVRKFTEKHEWVTTENGIGTVGISNFAQVG

SEQ ID NO: 35541 - protein, 79 aa, Homo sapiens
  Payload ID: 7024
  Gene Symbol: GCSH
  Gene Name: glycine cleavage system protein H (aminomethyl carrier)
  ENSP ID: ENSP00000457630
  MOD_RES (1)..(1): Any amino acid
XRSVRALLCTLRAVPSPAAPCPPRPWQLGVGAVRTLRTGPALLSVRKFTEKHEWVTTENGIGTVGISNFAQMSLVLWKV

SEQ ID NO: 35542 - protein, 43 aa, Homo sapiens
  Payload ID: 7024
  Gene Symbol: GCSH
  Gene Name: glycine cleavage system protein H (aminomethyl carrier)
  ENSP ID: ENSP00000457645
  MOD_RES (1)..(1): Any amino acid
XRAGPALHPARGPVTRRALPAEALAAGGGRRPYAAHWTRSALG

SEQ ID NO: 35543 - protein, 1020 aa, Homo sapiens
  Payload ID: 7025
  Gene Symbol: GLDC
  Gene Name: glycine dehydrogenase (decarboxylating)
  Uniprot ID: P23378
  ENSP ID: ENSP00000370737
MQSCARAWGLRLGRGVGGGRRLAGGSGPCWAPRSRDSSSGGGDSAAAGASRLLERLLPRHDDFARRHIGPGDKDQREMLQTLGLASIDELIEKTVPANIRLKRPLKMEDPVCENEILATLHAISSKNQIWRSYIGMGYYNCSVPQTILRNLLENSGWITQYTPYQPEVSQGRLESLLNYQTMVCDITGLDMANASLLDEGTAAAEALQLCYRHNKRRKFLVDPRCHPQTIAVVQTRAKYTGVLTELKLPCEMDFSGKDVSGVLFQYPDTEGKVEDFTELVERAHQSGSLACCATDLLALCILRPPGEFGVDIALGSSQRFGVPLGYGGPHAAFFAVRESLVRMMPGRMVGVTRDATGKEVYRLALQTREQHIRRDKATSNICTAQALLANMAAMFAIYHGSHGLEHIARRVHNATLILSEGLKRAGHQLQHDLFFDTLKIQCGCSVKEVLGRAAQRQINFRLFEDGTLGISLDETVNEKDLDDLLWIFGCESSAELVAESMGEECRGIPGSVFKRTSPFLTHQVFNSYHSETNIVRYMKKLENKDISLVHSMIPLGSCTMKLNSSSELAPITWKEFANIHPFVPLDQAQGYQQLFRELEKDLCELTGYDQVCFQPNSGAQGEYAGLATIRAYLNQKGEGHRTVCLIPKSAHGTNPASAHMAGMKIQPVEVDKYGNIDAVHLKAMVDKHKENLAAIMITYPSTNGVFEENISDVCDLIHQHGGQVYLDGANMNAQVGICRPGDFGSDVSHLNLHKTFCIPHGGGGPGMGPIGVKKHLAPFLPNHPVISLKRNEDACPVGTVSAAPWGSSSILPISWAYIKMMGGKGLKQATETAILNANYMAKRLETHYRILFRGARGYVGHEFILDTRPFKKSANIEAVDVAKRLQDYGFHAPTMSWPVAGTLMVEPTESEDKAELDRFCDAMISIRQEIADIEEGRIDPRVNPLKMSPHSLTCVTSSHWDRPYSREVAAFPLPFVKPENKFWPTIARIDDIYGDQHLVCTCPPMEVYESPFSEQKRASS

SEQ ID NO: 35544 - protein, 295 aa, Homo sapiens
  Payload ID: 7026
  Gene Symbol: GNMT
  Gene Name: glycine N-methyltransferase
  Uniprot ID: Q14749
  ENSP ID: ENSP00000361894
MVDSVYRTRSLGVAAEGLPDQYADGEAARVWQLYIGDTRSRTAEYKAWLLGLLRQHGCQRVLDVACGTGVDSIMLVEEGFSVTSVDASDKMLKYALKERWNRRHEPAFDKWVIEEANWMTLDKDVPQSAEGGFDAVICLGNSFAHLPDCKGDQSEHRLALKNIASMVRAGGLLVIDHRNYDHILSTGCAPPGKNIYYKSDLTKDVTTSVLIVNNKAHMVTLDYTVQVPGAGQDGSPGLSKFRLSYYPHCLASFTELLQAAFGGKCQHSVLGDFKPYKPGQTYIPCYFIHVLKRTD

SEQ ID NO: 35545 - protein, 449 aa, Homo sapiens
  Payload ID: 7027
  Gene Symbol: GLRA1
  Gene Name: glycine receptor, alpha 1
  Uniprot ID: P23415
  ENSP ID: ENSP00000274576
MYSFNTLRLYLWETIVFFSLAASKEAEAARSAPKPMSPSDFLDKLMGRTSGYDARIRPNFKGPPVNVSCNIFINSFGSIAETTMDYRVNIFLRQQWNDPRLAYNEYPDDSLDLDPSMLDSIWKPDLFFANEKGAHFHEITTDNKLLRISRNGNVLYSIRITLTLACPMDLKNFPMDVQTCIMQLESFGYTMNDLIFEWQEQGAVQVADGLTLPQFILKEEKDLRYCTKHYNTGKFTCIEARFHLERQMGYYLIQMYIPSLLIVILSWISFWINMDAAPARVGLGITTVLTMTTQSSGSRASLPKVSYVKAIDIWMAVCLLFVFSALLEYAAVNFVSRQHKELLRFRRKRRHHKEDEAGEGRFNFSAYGMGPACLQAKDGISVKGANNSNTTNPPPAPSKSPEEMRKLFIQRAKKIDKISRIGFPMAFLIFNMFYWIIYKIVRREDVHNQ

SEQ ID NO: 35546 - protein, 457 aa, Homo sapiens
  Payload ID: 7027
  Gene Symbol: GLRA1
  Gene Name: glycine receptor, alpha 1
  Uniprot ID: P23415
  ENSP ID: ENSP00000411593
MYSFNTLRLYLWETIVFFSLAASKEAEAARSAPKPMSPSDFLDKLMGRTSGYDARIRPNFKGPPVNVSCNIFINSFGSIAETTMDYRVNIFLRQQWNDPRLAYNEYPDDSLDLDPSMLDSIWKPDLFFANEKGAHFHEITTDNKLLRISRNGNVLYSIRITLTLACPMDLKNFPMDVQTCIMQLESFGYTMNDLIFEWQEQGAVQVADGLTLPQFILKEEKDLRYCTKHYNTGKFTCIEARFHLERQMGYYLIQMYIPSLLIVILSWISFWINMDAAPARVGLGITTVLTMTTQSSGSRASLPKVSYVKAIDIWMAVCLLFVFSALLEYAAVNFVSRQHKELLRFRRKRRHHKSPMLNLFQEDEAGEGRFNFSAYGMGPACLQAKDGISVKGANNSNTTNPPPAPSKSPEEMRKLFIQRAKKIDKISRIGFPMAFLIFNMFYWIIYKIVRREDVHNQ

SEQ ID NO: 35547 - protein, 37 aa, Homo sapiens
  Payload ID: 7027
  Gene Symbol: GLRA1
  Gene Name: glycine receptor, alpha 1
  ENSP ID: ENSP00000430595
MYSFNTLRLYLWETIVFFRSPSERELQHFHQQLWFHC

SEQ ID NO: 35548 - protein, 452 aa, Homo sapiens [sequence omitted]

SEQ ID NO: 35549 - protein, 452 aa, Homo sapiens
  Payload ID: 7028
  Gene Symbol: GLRA2
  Gene Name: glycine receptor, alpha 2
  Uniprot ID: P23416
  ENSP ID: ENSP00000347123
MNRQLVNILTALFAFFLETNHFRTAFCKDHDSRSGKQPSQTLSPSDFLDKLMGRTSGYDARIRPNFKGPPVNVTCNIFINSFGSIAETTMDYRVNIFLRQQWNDSRLAYSEYPDDSLDLDPSMLDSIWKPDLFFANEKGANFHDVTTDNKLLRISKNGKVLYSIRLTLTLSCPMDLKNFPMDVQTCTMQLESFGYTMNDLIFEWLSDGPVQVAEGLTLPQFILKEEKELGYCTKHYNTGKFTCIEVKFHLERQMGYYLIQMYIPSLLIVILSWVSFWINMDAAPARVALGITTVLTMTTQSSGSRASLPKVSYVKAIDIWMAVCLLFVFAALLEYAAVNFVSRQHKEFLRLRRRQKRQNKEEDVTRESRFNFSGYGMGHCLQVKDGTAVKATPANPLPQPPKDGDAIKKKFVDRAKRIDTISRAAFPLAFLIFNIFYWITYKIIRHEDVHKK

SEQ ID NO: 35550 - protein, 363 aa, Homo sapiens
  Payload ID: 7028
  Gene Symbol: GLRA2
  Gene Name: glycine receptor, alpha 2
  Uniprot ID: P23416
  ENSP ID: ENSP00000387756
MDYRVNIFLRQQWNDSRLAYSEYPDDSLDLDPSMLDSIWKPDLFFANEKGANFHDVTTDNKLLRISKNGKVLYSIRLTLTLSCPMDLKNFPMDVQTCTMQLESFGYTMNDLIFEWLSDGPVQVAEGLTLPQFILKEEKELGYCTKHYNTGKFTCIEVKFHLERQMGYYLIQMYIPSLLIVILSWVSFWINMDAAPARVALGITTVLTMTTQSSGSRASLPKVSYVKAIDIWMAVCLLFVFAALLEYAAVNFVSRQHKEFLRLRRRQKRQNKEEDVTRESRFNFSGYGMGHCLQVKDGTAVKATPANPLPQPPKDGDAIKKKFVDRAKRIDTISRAAFPLAFLIFNIFYWITYKIIRHEDVHKK

SEQ ID NO: 35551 - protein, 215 aa, Homo sapiens
  Payload ID: 7028
  Gene Symbol: GLRA2
  Gene Name: glycine receptor, alpha 2
  ENSP ID: ENSP00000391606
MNLHMRMTAFCKDHDSRSGKQPSQTLSPSDFLDKLMGRTSGYDARIRPNFKGPPVNVTCNIFINSFGSVTETTMDYRVNIFLRQQWNDSRLAYSEYPDDSLDLDPSMLDSIWKPDLFFANEKGANFHDVTTDNKLLRISKNGKVLYSIRLTLTLSCPMDLKNFPMDVQTCTMQLESFGYTMNDLIFEWLSDGPVQVAEGLTLPQFILKEEKELGY

SEQ ID NO: 35552 - protein, 464 aa, Homo sapiens
  Payload ID: 7029
  Gene Symbol: GLRA3
  Gene Name: glycine receptor, alpha 3
  Uniprot ID: O75311
  ENSP ID: ENSP00000274093
MAHVRHFRTLVSGFYFWEAALLLSLVATKETDSARSRSAPMSPSDFLDKLMGRTSGYDARIRPNFKGPPVNVTCNIFINSFGSIAETTMDYRVNIFLRQKWNDPRLAYSEYPDDSLDLDPSMLDSIWKPDLFFANEKGANFHEVTTDNKLLRIFKNGNVLYSIRLTLTLSCPMDLKNFPMDVQTCIMQLESFGYTMNDLIFEWQDEAPVQVAEGLTLPQFLLKEEKDLRYCTKHYNTGKFTCIEVRFHLERQMGYYLIQMYIPSLLIVILSWVSFWINMDAAPARVALGITTVLTMTTQSSGSRASLPKVSYVKAIDIWMAVCLLFVFSALLEYAAVNFVSRQHKELLRFRRKRKNKTEAFALEKFYRFSDMDDEVRESRFSFTAYGMGPCLQAKDGMTPKGPNHPVQVMPKSPDEMRKVFIDRAKKIDTISRACFPLAFLIFNIFYWVIYKILRHEDIHQQQD

SEQ ID NO: 35553 - protein, 449 aa, Homo sapiens
  Payload ID: 7029
  Gene Symbol: GLRA3
  Gene Name: glycine receptor, alpha 3
  Uniprot ID: O75311
  ENSP ID: ENSP00000345284
MAHVRHFRTLVSGFYFWEAALLLSLVATKETDSARSRSAPMSPSDFLDKLMGRTSGYDARIRPNFKGPPVNVTCNIFINSFGSIAETTMDYRVNIFLRQKWNDPRLAYSEYPDDSLDLDPSMLDSIWKPDLFFANEKGANFHEVTTDNKLLRIFKNGNVLYSIRLTLTLSCPMDLKNFPMDVQTCIMQLESFGYTMNDLIFEWQDEAPVQVAEGLTLPQFLLKEEKDLRYCTKHYNTGKFTCIEVRFHLERQMGYYLIQMYIPSLLIVILSWVSFWINMDAAPARVALGITTVLTMTTQSSGSRASLPKVSYVKAIDIWMAVCLLFVFSALLEYAAVNFVSRQHKELLRFRRKRKNKDDEVRESRFSFTAYGMGPCLQAKDGMTPKGPNHPVQVMPKSPDEMRKVFIDRAKKIDTISRACFPLAFLIFNIFYWVIYKILRHEDIHQQQD

SEQ ID NO: 35554 - protein, 417 aa, Homo sapiens
  Payload ID: 7030
  Gene Symbol: GLRA4
  Gene Name: glycine receptor, alpha 4
  Uniprot ID: Q5JXX5
  ENSP ID: ENSP00000361700
MTTLVPATLSFLLLWTLPGQVLLRVALAKEEVKSGTKGSQPMSPSDFLDKLMGRTSGYDARIRPNFKGPPVNVTCNIFINSFSSITKTTMDYRVNVFLRQQWNDPRLSYREYPDDSLDLDPSMLDSIWKPDLFFANEKGANFHEVTTDNKLLRIFKNGNVLYSIRLTLILSCLMDLKNFPMDIQTCTMQLESFGYTMKDLVFEWLEDAPAVQVAEGLTLPQFILRDEKDLGCCTKHYNTGKFTCIEVKFHLERQMGYYLIQMYIPSLLIVILSWVSFWINMDAAPARVGLGITTVLTMTTQSSGSRASLPKVSYVKAIDIWMAVCLLFVFAALLEYAAINFVSRQHKEFIRLRRRQRRQRLEEDIIQESRFYFRGYGLGHCLQARDGGPMEGSGIYSPQPPAPLLREGETTRKLYVD

SEQ ID NO: 35555 - protein, 44 aa, Homo sapiens
  Payload ID: 7030
  Gene Symbol: GLRA4
  Gene Name: glycine receptor, alpha 4
  ENSP ID: ENSP00000412480
MTTLVPATLSFLLLWTLPGQVLLSRQVAGGQKQQQHLASVDILW

SEQ ID NO: 35556 - protein, 497 aa, Homo sapiens
  Payload ID: 7031
  Gene Symbol: GLRB
  Gene Name: glycine receptor, beta
  Uniprot ID: P48167
  ENSP ID: ENSP00000264428
MKFLLTTAFLILISLWVEEAYSKEKSSKKGKGKKKQYLCPSQQSAEDLARVPANSTSNILNRLLVSYDPRIRPNFKGIPVDVVVNIFINSFGSIQETTMDYRVNIFLRQKWNDPRLKLPSDFRGSDALTVDPTMYKCLWKPDLFFANEKSANFHDVTQENILLFIFRDGDVLVSMRLSITLSCPLDLTLFPMDTQRCKMQLESFGYTTDDLRFIWQSGDPVQLEKIALPQFDIKKEDIEYGNCTKYYKGTGYYTCVEVIFTLRRQVGFYMMGVYAPTLLIVVLSWLSFWINPDASAARVPLGIFSVLSLASECTTLAAELPKVSYVKALDVWLIACLLFGFASLVEYAVVQVMLNNPKRVEAEKARIAKAEQADGKGGNVAKKNTVNGTGTPVHISTLQVGETRCKKVCTSKSDLRSNDFSIVGSLPRDFELSNYDCYGKPIEVNNGLGKSQAKNNKKPPPAKPVIPTAAKRIDLYARALFPFCFLFFNVIYWSIYL

SEQ ID NO: 35557 - protein, 46 aa, Homo sapiens
  Payload ID: 7031
  Gene Symbol: GLRB
  Gene Name: glycine receptor, beta
  ENSP ID: ENSP00000421044
MKFLLTTAFLILISLWVEEAYSKEKSSKKGKGKKKQYLCPSERLYH

SEQ ID NO: 35558 - protein, 46 aa, Homo sapiens; identical to SEQ ID NO: 35557
  Payload ID: 7031
  Gene Symbol: GLRB
  Gene Name: glycine receptor, beta
  ENSP ID: ENSP00000422039

SEQ ID NO: 35559 - protein, 56 aa, Homo sapiens
  Payload ID: 7031
  Gene Symbol: GLRB
  Gene Name: glycine receptor, beta
  ENSP ID: ENSP00000425433
MKFLLTTAFLILISLWVEEAYSKEKSSKKGKGKKKQYLCPSLVRPDAKKFVLLSLI

SEQ ID NO: 35560 - protein, 497 aa, Homo sapiens; identical to SEQ ID NO: 35556
  Payload ID: 7031
  Gene Symbol: GLRB
  Gene Name: glycine receptor, beta
  Uniprot ID: P48167
  ENSP ID: ENSP00000427186

SEQ ID NO: 35561 - protein, 303 aa, Homo sapiens
  Payload ID: 7031
  Gene Symbol: GLRB
  Gene Name: glycine receptor, beta
  Uniprot ID: P48167
  ENSP ID: ENSP00000441873
MKFLLTTAFLILISLWVEEAYSKEKSSKKGKGKKKQYLCPSQQSAEDLARVPANSTSNILNRLLVSYDPRIRPNFKGIPVDVVVNIFINSFGSIQETTMDYRVNIFLRQKWNDPRLKLPSDFRGSDALTVDPTMYKCLWKPDLFFANEKSANFHDVTQENILLFIFRDGDVLVSMRLSITLSCPLDLTLFPMDTQRCKMQLESFGYTTDDLRFIWQSGDPVQLEKIALPQFDIKKEDIEYGNCTKYYKGTGYYTCVEVIFTLRRQVGFYMMGVYAPTLLIVVLSWLSFWINPDASAARVPLGW

SEQ ID NO: 35562 - protein, 163 aa, Homo sapiens
  Payload ID: 7032
  Gene Symbol: GLYAT
  Gene Name: glycine-N-acyltransferase
  Uniprot ID: Q6IB77
  ENSP ID: ENSP00000278400
MMLPLQGAQMLQMLEKSLRKSLPASLKVYGTVFHINHGNPFNLKAVVDKWPDFNTVVVCPQEQDMTDDLDHYTNTYQIYSKDPQNCQEFLGSPELINWKQHLQIQSSQPSLNEAIQNLAAIKSFKVKQTQRILYMAAETAKELTPFLLKSKILSPNGGKPKAM

SEQ ID NO: 35563 - protein, 296 aa, Homo sapiens
  Payload ID: 7032
  Gene Symbol: GLYAT
  Gene Name: glycine-N-acyltransferase
  Uniprot ID: Q6IB77
  ENSP ID: ENSP00000340200
MMLPLQGAQMLQMLEKSLRKSLPASLKVYGTVFHINHGNPFNLKAVVDKWPDFNTVVVCPQEQDMTDDLDHYTNTYQIYSKDPQNCQEFLGSPELINWKQHLQIQSSQPSLNEAIQNLAAIKSFKVKQTQRILYMAAETAKELTPFLLKSKILSPNGGKPKAINQEMFKLSSMDVTHAHLVNKFWHFGGNERSQRFIERCIQTFPTCCLLGPEGTPVCWDLMDQTGEMRMAGTLPEYRLHGLVTYVIYSHAQKLGKLGFPVYSHVDYSNEAMQKMSYTLQHVPIPRSWNQWNCVPL

SEQ ID NO: 35564 - protein, 296 aa, Homo sapiens; identical to SEQ ID NO: 35563
  Payload ID: 7032
  Gene Symbol: GLYAT
  Gene Name: glycine-N-acyltransferase
  Uniprot ID: Q6IB77
  ENSP ID: ENSP00000431688

SEQ ID NO: 35565 - protein, 71 aa, Homo sapiens
  Payload ID: 7032
  Gene Symbol: GLYAT
  Gene Name: glycine-N-acyltransferase
  ENSP ID: ENSP00000468512
  MOD_RES (1)..(1): Any amino acid
XQIYSKDPQNCQEFLGSPELINWKQHLQIQSLIGSQCYKQRATAGFCLRVCHDPSCPSGDGNTCWKVAEIT

SEQ ID NO: 35566 - protein, 296 aa, Homo sapiens; identical to SEQ ID NO: 35563
  Payload ID: 7032
  Gene Symbol: GLYAT
  Gene Name: glycine-N-acyltransferase
  Uniprot ID: Q6IB77
  ENSP ID: ENSP00000484592

SEQ ID NO: 35567 - protein, 333 aa, Homo sapiens
  Payload ID: 7033
  Gene Symbol: GLYATL1
  Gene Name: glycine-N-acyltransferase-like 1
  Uniprot ID: Q969I3
  ENSP ID: ENSP00000300079
MFKLCSNKMVSQEGSEVELLVSPGARSEHGRYLQDPIVSIDLSEWLRIIEFLLQGLKVYGSVYHINHGNPFNMEVLVDSWPEYQMVIIRPQKQEMTDDMDSYTNVYRMFSKEPQKSEEVLKNCEIVNWKQRLQIQGLQESLGEGIRVATFSKSVKVEHSRALLLVTEDILKLNASSKSKLGSWAETGHPDDEFESETPNFKYAQLDVSYSGLVNDNWKRGKNERSLHYIKRCIEDLPAACMLGPEGVPVSWVTMDPSCEVGMAYSMEKYRRTGNMARVMVRYMKYLRQKNIPFYISVLEENEDSRRFVGQFGFFEASCEWHQWTCYPQNLVPF

SEQ ID NO: 35568 - protein, 302 aa, Homo sapiens
  Payload ID: 7033
  Gene Symbol: GLYATL1
  Gene Name: glycine-N-acyltransferase-like 1
  Uniprot ID: Q969I3
  ENSP ID: ENSP00000322223
MILLNNSHKLLALYKSLARSIPESLKVYGSVYHINHGNPFNMEVLVDSWPEYQMVIIRPQKQEMTDDMDSYTNVYRMFSKEPQKSEEVLKNCEIVNWKQRLQIQGLQESLGEGIRVATFSKSVKVEHSRALLLVTEDILKLNASSKSKLGSWAETGHPDDEFESETPNFKYAQLDVSYSGLVNDNWKRGKNERSLHYIKRCIEDLPAACMLGPEGVPVSWVTMDPSCEVGMAYSMEKYRRTGNMARVMVRYMKYLRQKNIPFYISVLEENEDSRRFVGQFGFFEASCEWHQWTCYPQNLVPF

SEQ ID NO: 35569 - protein, 50 aa, Homo sapiens
  Payload ID: 7033
  Gene Symbol: GLYATL1
  Gene Name: glycine-N-acyltransferase-like 1
  ENSP ID: ENSP00000431640
MVSQEGSEVELLVSPGARSEHGRYLQDPIVSIDLSEWLRIIEFLLQGLKV

SEQ ID NO: 35570 - protein, 50 aa, Homo sapiens; identical to SEQ ID NO: 35569
  Payload ID: 7033
  Gene Symbol: GLYATL1
  Gene Name: glycine-N-acyltransferase-like 1
  ENSP ID: ENSP00000432225

SEQ ID NO: 35571 - protein, 68 aa, Homo sapiens
  Payload ID: 7033
  Gene Symbol: GLYATL1
  Gene Name: glycine-N-acyltransferase-like 1
  ENSP ID: ENSP00000433716
MILLNNSHKLLALYKSLARSIPESLKVYGSVYHINHGNPFNMEVLVDSWPEYQMVIIRPQKQEMTDDM

SEQ ID NO: 35572 - protein, 173 aa, Homo sapiens
  Payload ID: 7033
  Gene Symbol: GLYATL1
  Gene Name: glycine-N-acyltransferase-like 1
  ENSP ID: ENSP00000434652
MVSQEGSEVELLVSPGARSEHGRYLQDPIVSIDLSEWLRIIEFLLQGLKVYGSVYHINHGNPFNMEVLVDSWPEYQMVIIRPQKQEMTDDMDSYTNVYRMFSKEPQKSEEVLKNCEIVNWKQRLQIQGLQESLGEGIRVATFSKSVKVEHSRALLLVTEDILKLNASSKSKLG

SEQ ID NO: 35573 - protein, 73 aa, Homo sapiens
  Payload ID: 7033
  Gene Symbol: GLYATL1
  Gene Name: glycine-N-acyltransferase-like 1
  ENSP ID: ENSP00000434661
MFKLCSNKMVSQEGSEVELLVSPGARSEHGRYLQDPIVSIDLSEWLRIIGVWLCVSHQSREPLQHGGAGGFLA

SEQ ID NO: 35574 - protein, 58 aa, Homo sapiens
  Payload ID: 7033
  Gene Symbol: GLYATL1
  Gene Name: glycine-N-acyltransferase-like 1
  ENSP ID: ENSP00000434757
MFKLCSNKMVSQEGSEVELLVSPGARSEHGRYLQDPIVSIDLSEWLRIIEFLLQGLKV

SEQ ID NO: 35575 - protein, 79 aa, Homo sapiens
  Payload ID: 7033
  Gene Symbol: GLYATL1
  Gene Name: glycine-N-acyltransferase-like 1
  ENSP ID: ENSP00000436116
MILLNNSHKLLALYKSLARSIPESLKVYGSVYHINHGNPFNMEVLVDSWPEYQMVIIRPQKQEMTDDMDSYTNVYRMFS

SEQ ID NO: 35576 - protein, 50 aa, Homo sapiens; identical to SEQ ID NO: 35569
  Payload ID: 7033
  Gene Symbol: GLYATL1
  Gene Name: glycine-N-acyltransferase-like 1
  ENSP ID: ENSP00000437155

SEQ ID NO: 35577 - protein, 302 aa, Homo sapiens; identical to SEQ ID NO: 35568
  Payload ID: 7033
  Gene Symbol: GLYATL1
  Gene Name: glycine-N-acyltransferase-like 1
  Uniprot ID: Q969I3
  ENSP ID: ENSP00000479741

SEQ ID NO: 35578 - protein, 302 aa, Homo sapiens
  Payload ID: 7034
  Gene Symbol: GLYATL1P3
  Gene Name: glycine-N-acyltransferase-like 1 pseudogene 3
  ENSP ID: ENSP00000488958
MILLNNSERLLALFKSLARSIPESLKVYGSLFHINHGNPFNMEVLVDSWPEYQMVIIRPQKQEMTDDMDSYTNVYRVFSKDPQKSQEVLKNSEIINWKQKLQIQGFQESLGEGIRAAAFSNSVKVEHSRALLFVTEDILKLYATNKSKLGSWAETGHPDDELESETPNFKYAQLNVSYSGLVNDNWKLGMNKRSLRYIKRCLGALPAACMLGPEGVPVSWVTMDPSCEIGMGYSVEKYRRRGNGTRLIMRCMKYLCQKNIPFYGSVLEENQGVIRKTSALGFLEASCQWHQWNCYPQNLVPL

SEQ ID NO: 35579 - protein, 294 aa, Homo sapiens
  Payload ID: 7035
  Gene Symbol: GLYATL2
  Gene Name: glycine-N-acyltransferase-like 2
  Uniprot ID: Q8WU03
  ENSP ID: ENSP00000287275
MLVLHNSQKLQILYKSLEKSIPESIKVYGAIFNIKDKNPFNMEVLVDAWPDYQIVITRPQKQEMKDDQDHYTNTYHIFTKAPDKLEEVLSYSNVISWEQTLQIQGCQEGLDEAIRKVATSKSVQVDYMKTILFIPELPKKHKTSSNDKMELFEVDDDNKEGNFSNMFLDASHAGLVNEHWAFGKNERSLKYIERCLQDFLGFGVLGPEGQLVSWIVMEQSCELRMGYTVPKYRHQGNMLQIGYHLEKYLSQKEIPFYFHVADNNEKSLQALNNLGFKICPCGWHQWKCTPKKYC

SEQ ID NO: 35580 - protein, 294 aa, Homo sapiens; identical to SEQ ID NO: 35579
  Payload ID: 7035
  Gene Symbol: GLYATL2
  Gene Name: glycine-N-acyltransferase-like 2
  Uniprot ID: Q8WU03
  ENSP ID: ENSP00000434277

SEQ ID NO: 35581 - protein, 288 aa, Homo sapiens
  Payload ID: 7036
  Gene Symbol: GLYATL3
  Gene Name: glycine-N-acyltransferase-like 3
  Uniprot ID: Q5SZD4
  ENSP ID: ENSP00000360240
MLVLNCSTKLLILEKMLKSCFPESLKVYGAVMNINRGNPFQKEVVLDSWPDFKAVITRRQREAETDNLDHYTNAYAVFYKDVRAYRQLLEECDVFNWDQVFQIQGLQSELYDVSKAVANSKQLNIKLTSFKAVHFSPVSSLPDTSFLKGPSPRLTYLSVANADLLNRTWSRGGNEQCLRYIANLISCFPSVCVRDEKGNPVSWSITDQFATMCHGYTLPEHRRKGYSRLVALTLARKLQSRGFPSQGNVLDDNTASISLLKSLHAEFLPCRFHRLILTPATFSGLPHL

SEQ ID NO: 35582 - protein, 156 aa, Homo sapiens
  Payload ID: 7036
  Gene Symbol: GLYATL3
  Gene Name: glycine-N-acyltransferase-like 3
  ENSP ID: ENSP00000440029
MLVLNCSTKLLILEKMLKSCFPESLKVYGAVMNINRGNPFQKEVVLDSWPDFKAVITRRQREAETDNLDHYTNAYAVFYKDVRAYRQLLEECDVFNWDQVFQIQGLQSELYDVSKAVANSKQLNIKLTSFKAVHFSPVSSLPDTSFLKGPSPRLTY

SEQ ID NO: 35583 - protein, 673 aa, Homo sapiens
  Payload ID: 7037
  Gene Symbol: GYS1
  Gene Name: glycogen synthase 1 (muscle)
  Uniprot ID: P13807
  ENSP ID: ENSP00000263276
MPLNRTLSMSSLPGLEDWEDEFDLENAVLFEVAWEVANKVGGIYTVLQTKAKVTGDEWGDNYFLVGPYTEQGVRTQVELLEAPTPALKRTLDSMNSKGCKFLAQSEEKPHVVAHFHEWLAGVGLCLCRARRLPVATIFTTHATLLGRYLCAGAVDFYNNLENFNVDKEAGERQIYHRYCMERAAAHCAHVFTTVSQITAIEAQHLLKRKPDIVTPNGLNVKKFSAMHEFQNLHAQSKARIQEFVRGHFYGHLDFNLDKTLYFFIAGRYEFSNKGADVFLEALARLNYLLRVNGSEQTVVAFFIMPARTNNFNVETLKGQAVRKQLWDTANTVKEKFGRKLYESLLVGSLPDMNKMLDKEDFTMMKRAIFATQRQSFPPVCTHNMLDDSSDPILTTIRRIGLFNSSADRVKVIFHPEFLSSTSPLLPVDYEEFVRGCHLGVFPSYYEPWGYTPAECTVMGIPSISTNLSGFGCFMEEHIADPSAYGIYILDRRFRSLDDSCSQLTSFLYSFCQQSRRQRIIQRNRTERLSDLLDWKYLGRYYMSARHMALSKAFPEHFTYEPNEADAAQGYRYPRPASVPPSPSLSRHSSPHQSEDEEDPRNGPLEEDGERYDEDEEAAKDRRNIRAPEWPRRASCTSSTSGSKRNSVDTATSSSLSTPSEPLSPTSSLGEERN

SEQ ID NO: 35584 - protein, 737 aa, Homo sapiens
  Payload ID: 7037
  Gene Symbol: GYS1
  Gene Name: glycogen synthase 1 (muscle)
  Uniprot ID: P13807
  ENSP ID: ENSP00000317904
MPLNRTLSMSSLPGLEDWEDEFDLENAVLFEVAWEVANKVGGIYTVLQTKAKVTGDEWGDNYFLVGPYTEQGVRTQVELLEAPTPALKRTLDSMNSKGCKVYFGRWLIEGGPLVVLLDVGASAWALERWKGELWDTCNIGVPWYDREANDAVLFGFLTTWFLGEFLAQSEEKPHVVAHFHEWLAGVGLCLCRARRLPVATIFTTHATLLGRYLCAGAVDFYNNLENFNVDKEAGERQIYHRYCMERAAAHCAHVFTTVSQITAIEAQHLLKRKPDIVTPNGLNVKKFSAMHEFQNLHAQSKARIQEFVRGHFYGHLDFNLDKTLYFFIAGRYEFSNKGADVFLEALARLNYLLRVNGSEQTVVAFFIMPARTNNFNVETLKGQAVRKQLWDTANTVKEKFGRKLYESLLVGSLPDMNKMLDKEDFTMMKRAIFATQRQSFPPVCTHNMLDDSSDPILTTIRRIGLFNSSADRVKVIFHPEFLSSTSPLLPVDYEEFVRGCHLGVFPSYYEPWGYTPAECTVMGIPSISTNLSGFGCFMEEHIADPSAYGIYILDRRFRSLDDSCSQLTSFLYSFCQQSRRQRIIQRNRTERLSDLLDWKYLGRYYMSARHMALSKAFPEHFTYEPNEADAAQGYRYPRPASVPPSPSLSRHSSPHQSEDEEDPRNGPLEEDGERYDEDEEAAKDRRNIRAPEWPRRASCTSSTSGSKRNSVDTATSSSLSTPSEPLSPTSSLGEERN

SEQ ID NO: 35585 - protein, 113 aa, Homo sapiens
  Payload ID: 7037
  Gene Symbol: GYS1
  Gene Name: glycogen synthase 1 (muscle)
  ENSP ID: ENSP00000470072
  MOD_RES (1)..(1): Any amino acid
XIYILDRRFRSLDDSCSQLTSFLYSFCQQSRRQRIIQRNRTERLSDLLDWKYLGRVGPPLSYPLLANQQLLARGLWCRVQGLILLVTVAVPLSNEPGRSRWWLMVVIPALWEA

SEQ ID NO: 35586 - protein, 703 aa, Homo sapiens
  Payload ID: 7038
  Gene Symbol: GYS2
  Gene Name: glycogen synthase 2 (liver)
  Uniprot ID: P54840
  ENSP ID: ENSP00000261195
MLRGRSLSVTSLGGLPQWEVEELPVEELLLFEVAWEVTNKVGGIYTVIQTKAKTTADEWGENYFLIGPYFEHNMKTQVEQCEPVNDAVRRAVDAMNKHGCQVHFGRWLIEGSPYVVLFDIGYSAWNLDRWKGDLWEACSVGIPYHDREANDMLIFGSLTAWFLKEVTDHADGKYVVAQFHEWQAGIGLILSRARKLPIATIFTTHATLLGRYLCAANIDFYNHLDKFNIDKEAGERQIYHRYCMERASVHCAHVFTTVSEITAIEAEHMLKRKPDVVTPNGLNVKKFSAVHEFQNLHAMYKARIQDFVRGHFYGHLDFDLEKTLFLFIAGRYEFSNKGADIFLESLSRLNFLLRMHKSDITVMVFFIMPAKTNNFNVETLKGQAVRKQLWDVAHSVKEKFGKKLYDALLRGEIPDLNDILDRDDLTIMKRAIFSTQRQSLPPVTTHNMIDDSTDPILSTIRRIGLFNNRTDRVKVILHPEFLSSTSPLLPMDYEEFVRGCHLGVFPSYYEPWGYTPAECTVMGIPSVTTNLSGFGCFMQEHVADPTAYGIYIVDRRFRSPDDSCNQLTKFLYGFCKQSRRQRIIQRNRTERLSDLLDWRYLGRYYQHARHLTLSRAFPDKFHVELTSPPTTEGFKYPRPSSVPPSPSGSQASSPQSSDVEDEVEDERYDEEEEAERDRLNIKSPFSLSHVPHGKKKLHGEYKN

SEQ ID NO: 35587 - protein, 483 aa, Homo sapiens
  Payload ID: 7039
  Gene Symbol: GSK3A
  Gene Name: glycogen synthase kinase 3 alpha
  Uniprot ID: P49840
  ENSP ID: ENSP00000222330
MSGGGPSGGGPGGSGRARTSSFAEPGGGGGGGGGGPGGSASGPGGTGGGKASVGAMGGGVGASSSGGGPGGSGGGGSGGPGAGTSFPPPGVKLGRDSGKVTTVVATLGQGPERSQEVAYTDIKVIGNGSFGVVYQARLAETRELVAIKKVLQDKRFKNRELQIMRKLDHCNIVRLRYFFYSSGEKKDELYLNLVLEYVPETVYRVARHFTKAKLTIPILYVKVYMYQLFRSLAYIHSQGVCHRDIKPQNLLVDPDTAVLKLCDFGSAKQLVRGEPNVSYICSRYYRAPELIFGATDYTSSIDVWSAGCVLAELLLGQPIFPGDSGVDQLVEIIKVLGTPTREQIREMNPNYTEFKFPQIKAHPWTKVFKSRTPPEAIALCSSLLEYTPSSRLSPLEACAHSFFDELRCLGTQLPNNRPLPPLFNFSAGELSIQPSLNAILIPPHLRSPAGTTTLTPSSQALTETPTSSDWQSTDATPTLTNSS

SEQ ID NO: 35588 - protein, 401 aa, Homo sapiens
  Payload ID: 7039
  Gene Symbol: GSK3A
  Gene Name: glycogen synthase kinase 3 alpha
  ENSP ID: ENSP00000381301
MGQWIVYPLCSPGDSGKVTTVVATLGQGPERSQEVAYTDIKVIGNGSFGVVYQARLAETRELVAIKKVLQDKRFKNRELQIMRKLDHCNIVRLRYFFYSSGEKKDELYLNLVLEYVPETVYRVARHFTKAKLTIPILYVKVYMYQLFRSLAYIHSQGVCHRDIKPQNLLVDPDTAVLKLCDFGSAKQLVRGEPNVSYICSRYYRAPELIFGATDYTSSIDVWSAGCVLAELLLGQPIFPGDSGVDQLVEIIKVLGTPTREQIREMNPNYTEFKFPQIKAHPWTKVFKSRTPPEAIALCSSLLEYTPSSRLSPLEACAHSFFDELRCLGTQLPNNRPLPPLFNFSAGELSIQPSLNAILIPPHLRSPAGTTTLTPSSQALTETPTSSDWQSTDATPTLTNSS

SEQ ID NO: 35589 - protein, 483 aa, Homo sapiens; identical to SEQ ID NO: 35587
  Payload ID: 7039
  Gene Symbol: GSK3A
  Gene Name: glycogen synthase kinase 3 alpha
  Uniprot ID: P49840
  ENSP ID: ENSP00000412663

SEQ ID NO: 35590 - protein, 420 aa, Homo sapiens
  Payload ID: 7040
  Gene Symbol: GSK3B
  Gene Name: glycogen synthase kinase 3 beta
  Uniprot ID: P49841
  ENSP ID: ENSP00000264235
MSGRPRTTSFAESCKPVQQPSAFGSMKVSRDKDGSKVTTVVATPGQGPDRPQEVSYTDTKVIGNGSFGVVYQAKLCDSGELVAIKKVLQDKRFKNRELQIMRKLDHCNIVRLRYFFYSSGEKKDEVYLNLVLDYVPETVYRVARHYSRAKQTLPVIYVKLYMYQLFRSLAYIHSFGICHRDIKPQNLLLDPDTAVLKLCDFGSAKQLVRGEPNVSYICSRYYRAPELIFGATDYTSSIDVWSAGCVLAELLLGQPIFPGDSGVDQLVEIIKVLGTPTREQIREMNPNYTEFKFPQIKAHPWTKVFRPRTPPEAIALCSRLLEYTPTARLTPLEACAHSFFDELRDPNVKLPNGRDTPALFNFTTQELSSNPPLATILIPPHARIQAAASTPTNATAASDANTGDRGQTNNAASASASNST

SEQ ID NO: 35591 - protein, 433 aa, Homo sapiens
  Payload ID: 7040
  Gene Symbol: GSK3B
  Gene Name: glycogen synthase kinase 3 beta
  Uniprot ID: P49841
  ENSP ID: ENSP00000324806
MSGRPRTTSFAESCKPVQQPSAFGSMKVSRDKDGSKVTTVVATPGQGPDRPQEVSYTDTKVIGNGSFGVVYQAKLCDSGELVAIKKVLQDKRFKNRELQIMRKLDHCNIVRLRYFFYSSGEKKDEVYLNLVLDYVPETVYRVARHYSRAKQTLPVIYVKLYMYQLFRSLAYIHSFGICHRDIKPQNLLLDPDTAVLKLCDFGSAKQLVRGEPNVSYICSRYYRAPELIFGATDYTSSIDVWSAGCVLAELLLGQPIFPGDSGVDQLVEIIKVLGTPTREQIREMNPNYTEFKFPQIKAHPWTKDSSGTGHFTSGVRVFRPRTPPEAIALCSRLLEYTPTARLTPLEACAHSFFDELRDPNVKLPNGRDTPALFNFTTQELSSNPPLATILIPPHARIQAAASTPTNATAASDANTGDRGQTNNAASASASNST

SEQ ID NO: 35592 - protein, 333 aa, Homo sapiens
  Payload ID: 7041
  Gene Symbol: GYG1
  Gene Name: glycogenin 1
  Uniprot ID: P46976
  ENSP ID: ENSP00000296048
MTDQAFVTLTTNDAYAKGALVLGSSLKQHRTTRRLVVLATPQVSDSMRKVLETVFDEVIMVDVLDSGDSAHLTLMKRPELGVTLTKLHCWSLTQYSKCVFMDADTLVLANIDDLFDREELSAAPDPGWPDCFNSGVFVYQPSVETYNQLLHLASEQGSFDGGDQGILNTFFSSWATTDIRKHLPFIYNLSSISIYSYLPAFKVFGASAKVVHFLGRVKPWNYTYDPKTKSVKSEAHDPNMTHPEFLILWWNIFTTNVLPLLQQFGLVKDTCSYVNVEDVSGAISHLSLGEIPAMAQPFVSSEERKERWEQGQADYMGADSFDNIKRKLDTYLQ

SEQ ID NO: 35593 - protein, 350 aa, Homo sapiens
  Payload ID: 7041
  Gene Symbol: GYG1
  Gene Name: glycogenin 1
  Uniprot ID: P46976
  ENSP ID: ENSP00000340736
MTDQAFVTLTTNDAYAKGALVLGSSLKQHRTTRRLVVLATPQVSDSMRKVLETVFDEVIMVDVLDSGDSAHLTLMKRPELGVTLTKLHCWSLTQYSKCVFMDADTLVLANIDDLFDREELSAAPDPGWPDCFNSGVFVYQPSVETYNQLLHLASEQGSFDGGDQGILNTFFSSWATTDIRKHLPFIYNLSSISIYSYLPAFKVFGASAKVVHFLGRVKPWNYTYDPKTKSVKSEAHDPNMTHPEFLILWWNIFTTNVLPLLQQFGLVKDTCSYVNVLSDLVYTLAFSCGFCRKEDVSGAISHLSLGEIPAMAQPFVSSEERKERWEQGQADYMGADSFDNIKRKLDTYLQ

SEQ ID NO: 35594 - protein, 60 aa, Homo sapiens
  Payload ID: 7041
  Gene Symbol: GYG1
  Gene Name: glycogenin 1
  ENSP ID: ENSP00000417671
MRKVLETVFDEVIMVDVLDSGDSAHLTLMKRPELGVTLTKLHCWSLTQYSKCVFMDADTL

SEQ ID NO: 35595 - protein, 110 aa, Homo sapiens
  Payload ID: 7041
  Gene Symbol: GYG1
  Gene Name: glycogenin 1
  ENSP ID: ENSP00000418297
MRKVLETVFDEVIMVDVLDSGDSAHLTLMKRPELGVTLTKLHCWSLTQYSKCVFMDADTLVLANIDDLFDREELSAAPDPGWPDCFNSGVFVYQPSVETYNQLLHLASEQ

SEQ ID NO: 35596 - protein, 193 aa, Homo sapiens
  Payload ID: 7041
  Gene Symbol: GYG1
  Gene Name: glycogenin 1
  ENSP ID: ENSP00000419499
MTDQAFVTLTTNDAYAKGALVLGSSLKQHRTTRRLVVLATPQVSDSMRKVLETVFDEVIMVDVLDSGDSAHLTLMKRPELGVTLTKLHCWSLTQYSKCVFMDADTLVLANIDDLFDREELSAAPDPGWPDCFNSGVFVYQPSVETYNQLLHLASEQGLVQVPKLCISWDESNHGIILMIPKQKVSKVRPMIPT

SEQ ID NO: 35597 - protein, 265 aa, Homo sapiens
  Payload ID: 7041
  Gene Symbol: GYG1
  Gene Name: glycogenin 1
  ENSP ID: ENSP00000420247
MTDQAFVTLTTNDAYAKGALVLGSSLKQHRTTRRLVVLATPQVSDSMRKVLETVFDEVIMVDVLDSGDSAHLTLMKRPELGVTLTKLHCWSLTQYSKCVFMDADTLVLANIDDLFDREELSAAPDPGWPDCFNSGVFVYQPSVETYNQLLHLASEQGGDQGILNTFFSSWATTDIRKHLPFIYNLSSISIYSYLPAFKVFGASAKVVHFLGRVKPWNYTYDPKTKSVKSEAHDPNMTHPEFLILWWNIFTTNVLPLLQQFGLVKD

SEQ ID NO: 35598 - protein, 279 aa, Homo sapiens
  Payload ID: 7041
  Gene Symbol: GYG1
  Gene Name: glycogenin 1
  Uniprot ID: P46976
  ENSP ID: ENSP00000420683
MTDQAFVTLTTNDAYAKGALVLGSSLKQHRTTRRLVVLATPQVSDSMRKVLETVFDEVIMVDVLDSGDSAHLTLMKRPELGVTLTKLHCWSLTQYSKCVFMDADTLVLANIDDLFDREELSAAPDPGWPDCFNSGVFVYQPSVETYNQLLHLASEQGSFDGGDQGILNTFFSSWATTDIRKHLPFIYNLSSISIYSYLPAFKVKMSQEPYHICPLGRSQLWHSRLYPRKNGRNDGNRARLIIWEQIPLTTSRGNLTLTSSRNTAFFCEHIHFTSLVSDT

SEQ ID NO: 35599 - protein, 193 aa, Homo sapiens; identical to SEQ ID NO: 35596
  Payload ID: 7041
  Gene Symbol: GYG1
  Gene Name: glycogenin 1
  ENSP ID: ENSP00000486061

SEQ ID NO: 35600 - protein, 244 aa, Homo sapiens
  Payload ID: 7042
  Gene Symbol: GYG2
  Gene Name: glycogenin 2
  ENSP ID: ENSP00000370549
  MOD_RES (1)..(1): Any amino acid
XLQHAMEHGSFDGADQGLLNSFFRNWSTTDIHKHLPFIYNLSSNTMYTYSPAFKQFGSSAKVVHFLGSMKPWNYKYNPQSGSVLEQGSASSSQHQAAFLHLWWTVYQNNVLPLYKSVQAGEARASPGHTLCHSDVGGPCADSASGVGEPCENSTPSAGVPCANSPLGSNQPAQGLPEPTQIVDETLSLPEGRRSEDMIACPETETPAVITCDPLSQPSPQPADFTETETILVDLAVSVSQISIE

SEQ ID NO: 35601 - protein, 501 aa, Homo sapiens
  Payload ID: 7042
  Gene Symbol: GYG2
  Gene Name: glycogenin 2
  Uniprot ID: O15488
  ENSP ID: ENSP00000370555
MSETEFHHGAQAGLELLRSSNSPTSASQSAGMTVTDQAFVTLATNDIYCQGALVLGQSLRRHRLTRKLVVLITPQVSSLLRVILSKVFDEVIEVNLIDSADYIHLAFLKRPELGLTLTKLHCWTLTHYSKCVFLDADTLVLSNVDELFDRGEFSAAPDPGWPDCFNSGVFVFQPSLHTHKLLLQHAMEHGSFDGADQGLLNSFFRNWSTTDIHKHLPFIYNLSSNTMYTYSPAFKQFGSSAKVVHFLGSMKPWNYKYNPQSGSVLEQGSASSSQHQAAFLHLWWTVYQNNVLPLYKSVQAGEARASPGHTLCHSDVGGPCADSASGVGEPCENSTPSAGVPCANSPLGSNQPAQGLPEPTQIVDETLSLPEGRRSEDMIACPETETPAVITCDPLSQPSPQPADFTETETILQPANKVESVSSEETFEPSQELPAEALRDPSLQDALEVDLAVSVSQISIEEKVKELSPEEERRKWEEGRIDYMGKDAFARIQEKLDRFLQ

SEQ ID NO: 35602 - protein, 470 aa, Homo sapiens
  Payload ID: 7042
  Gene Symbol: GYG2
  Gene Name: glycogenin 2
  Uniprot ID: O15488
  ENSP ID: ENSP00000381786
MSVTDQAFVTLATNDIYCQGALVLGQSLRRHRLTRKLVVLITPQVSSLLRVILSKVFDEVIEVNLIDSADYIHLAFLKRPELGLTLTKLHCWTLTHYSKCVFLDADTLVLSNVDELFDRGEFSAAPDPGWPDCFNSGVFVFQPSLHTHKLLLQHAMEHGSFDGADQGLLNSFFRNWSTTDIHKHLPFIYNLSSNTMYTYSPAFKQFGSSAKVVHFLGSMKPWNYKYNPQSGSVLEQGSASSSQHQAAFLHLWWTVYQNNVLPLYKSVQAGEARASPGHTLCHSDVGGPCADSASGVGEPCENSTPSAGVPCANSPLGSNQPAQGLPEPTQIVDETLSLPEGRRSEDMIACPETETPAVITCDPLSQPSPQPADFTETETILQPANKVESVSSEETFEPSQELPAEALRDPSLQDALEVDLAVSVSQISIEEKVKELSPEEERRKWEEGRIDYMGKDAFARIQEKLDRFLQ

SEQ ID NO: 35603 - protein, 137 aa, Homo sapiens
  Payload ID: 7042
  Gene Symbol: GYG2
  Gene Name: glycogenin 2
  ENSP ID: ENSP00000430764
MSVTDQAFVTLATNDIYCQGALVLGQSLRRHRLTRKLVVLITPQVSSLLRVILSKVFDEVIEVNLIDSADYIHLAFLKRPELGLTLTKLHCWTLTHYSKCVFLDADTLVLSNVDELFDRGEFSAAPDPGWPDCFNSG

SEQ ID NO: 35604 - protein, 430 aa, Homo sapiens
  Payload ID: 7042
  Gene Symbol: GYG2
  Gene Name: glycogenin 2
  Uniprot ID: O15488
  ENSP ID: ENSP00000487294
MSETEFHHGAQAGLELLRSSNSPTSASQSAGMTVTDQAFVTLATNDIYCQGALVLGQSLRRHRLTRKLVVLITPQVSSLLRVILSKVFDEVIEVNLIDSADYIHLAFLKRPELGLTLTKLHCWTLTHYSKCVFLDADTLVLSNVDELFDRGEFSAAPDPGWPDCFNSGVFVFQPSLHTHKLLLQHAMEHGSFDGADQGLLNSFFRNWSTTDIHKHLPFIYNLSSNTMYTYSPAFKQFGSSAKVVHFLGSMKPWNYKYNPQSGSVLEQGSASSSQHQAAFLHLWWTVYQNNVLPLYKSVQAGEARASPGHTLCHSDVGGPCADSASGVGEPCENSTPSAGVPCANSPLGSNQPAQGLPEPTQIVDETLSLPEGRRSEDVDLAVSVSQISIEEKVKELSPEEERRKWEEGRIDYMGKDAFARIQEKLDRFLQ

SEQ ID NO: 35605 - protein, 209 aa, Homo sapiens
  Payload ID: 7043
  Gene Symbol: GLTP
  Gene Name: glycolipid transfer protein
  Uniprot ID: Q9NZD2
  ENSP ID: ENSP00000315263
MALLAEHLLKPLPADKQIETGPFLEAVSHLPPFFDCLGSPVFTPIKADISGNITKIKAVYDTNPAKFRTLQNILEVEKEMYGAEWPKVGATLALMWLKRGLRFIQVFLQSICDGERDENHPNLIRVNATKAYEMALKKYHGWIVQKIFQAALYAAPYKSDFLKALSKGQNVTEEECLEKIRLFLVNYTATIDVIYEMYTQMNAELNYKV

SEQ ID NO: 35606 - protein, 67 aa, Homo sapiens
  Payload ID: 7043
  Gene Symbol: GLTP
  Gene Name: glycolipid transfer protein
  ENSP ID: ENSP00000438128
MALLAEHLLKPLPADKQIETGPFLEAVSHLPPFFDCLGSPVFTPIKADISGNITMRKLRLRGVEGLA

SEQ ID NO: 35607 - protein, 183 aa, Homo sapiens
  Payload ID: 7043
  Gene Symbol: GLTP
  Gene Name: glycolipid transfer protein
  ENSP ID: ENSP00000440136
  MOD_RES (1)..(1): Any amino acid
XDRDRALPRGGVPPAALLRLPWVPSVYSHQGRHKRQHHENQSCVRHQPSQVPDPAEHPGGGERNVWSRVAQSRGHTGADVAEKSICDGERDENHPNLIRVNATKAYEMALKKYHGWIVQKIFQAALYAAPYKSDFLKALSKGQNVTEEECLEKIRLFLVNYTATIDVIYEMYTQMNAELNYKV

SEQ ID NO: 35608 - protein, 67 aa, Homo sapiens; identical to SEQ ID NO: 35606
  Payload ID: 7043
  Gene Symbol: GLTP
  Gene Name: glycolipid transfer protein
  ENSP ID: ENSP00000441537

SEQ ID NO: 35609 - protein, 190 aa, Homo sapiens
  Payload ID: 7043
  Gene Symbol: GLTP
  Gene Name: glycolipid transfer protein
  ENSP ID: ENSP00000445919
MALLAEHLLKPLPADKQIETGPFLEAVSHLPPFFDCLGSPVFTPIKADISGNITKIKAVYDTNPAKFRTLQNILEVEKEIGLRFIQVFLQSICDGERDENHPNLIRVNATKAYEMALKKYHGWIVQKIFQAALYAAPYKSDFLKALSKGQNVTEEECLEKIRLFLVNYTATIDVIYEMYTQMNAELNYKV

SEQ ID NO: 35610 - protein, 67 aa, Homo sapiens; identical to SEQ ID NO: 35606
  Payload ID: 7043
  Gene Symbol: GLTP
  Gene Name: glycolipid transfer protein
  ENSP ID: ENSP00000481582

SEQ ID NO: 35611 - protein, 291 aa, Homo sapiens
  Payload ID: 7044
  Gene Symbol: GLTPD2
  Gene Name: glycolipid transfer protein domain containing 2
  Uniprot ID: A6NH11
  ENSP ID: ENSP00000328070
MGVAARPPALRHWFSHSIPLAIFALLLLYLSVRSLGARSGCGPRAQPCVPGETAPFQVRQESGTLEAPERKQPPCLGPRGMLGRMMRRFHASLKPEGDVGLSPYLAGWRALVEFLTPLGSVFAFATREAFTKVTDLEARVHGPDAEHYWSLVAMAAWERRAGLLEQPGAAPRDPTRSSGSRTLLLLHRALRWSQLCLHRVATGALGGPDAGVQCSDAYRAALGPHHPWLVRQTARLAFLAFPGRRRLLELACPGATEAEARAALVRAAGTLEDVYNRTQSLLAERGLLQLA

SEQ ID NO: 35612 - protein, 117 aa, Homo sapiens
  Payload ID: 7045
  Gene Symbol: GYPA
  Gene Name: glycophorin A (MNS blood group)
  Uniprot ID: P02724
  ENSP ID: ENSP00000324483
MYGKIIFVLLLSDTHKRDTYAATPRAHEVSEISVRTVYPPEEETGERVQLAHHFSEPEITLIIFGVMAGVIGTILLISYGIRRLIKKSPSDVKPLPSPDTDVPLSSVEIENPETSDQ

SEQ ID NO: 35613 - protein, 150 aa, Homo sapiens
  Payload ID: 7045
  Gene Symbol: GYPA
  Gene Name: glycophorin A (MNS blood group)
  ENSP ID: ENSP00000354003
MYGKIIFVLLLSEIVSISALSTTEVAMHTSTSSSVTKSYISSQTNDTHKRDTYAATPRAHEVSEISVRTVYPPEEETGERVQLAHHFSEPEITLIIFGVMAGVIGTILLISYGIRRLIKKSPSDVKPLPSPDTDVPLSSVEIENPETSDQ

SEQ ID NO: 35614 - protein, 105 aa, Homo sapiens
  Payload ID: 7045
  Gene Symbol: GYPA
  Gene Name: glycophorin A (MNS blood group)
  ENSP ID: ENSP00000421243
MYGKIIFVLLLSEIVSISALSTTEVAMHTSTSSSVTKSYISSQTNEITLIIFGVMAGVIGTILLISYGIRRLIKKSPSDVKPLPSPDTDVPLSSVEIENPETSDQ

SEQ ID NO: 35615 - protein, 85 aa, Homo sapiens
  Payload ID: 7045
  Gene Symbol: GYPA
  Gene Name: glycophorin A (MNS blood group)
  ENSP ID: ENSP00000425193
MYGKIIFVLLLSGERVQLAHHFSEPEITLIIFGVMAGVIGTILLISYGIRRLIKKSPSDVKPLPSPDTDVPLSSVEIENPETSDQ

SEQ ID NO: 35616 - protein, 118 aa, Homo sapiens
  Payload ID: 7045
  Gene Symbol: GYPA
  Gene Name: glycophorin A (MNS blood group)
  ENSP ID: ENSP00000425549
MYGKIIFVLLLSEIVSISALSTTEVAMHTSTSSSVTKSYISSQTNGERVQLAHHFSEPEITLIIFGVMAGVIGTILLISYGIRRLIKKSPSDVKPLPSPDTDVPLSSVEIENPETSDQ

SEQ ID NO: 35617 - protein, 42 aa, Homo sapiens
  Payload ID: 7045
  Gene Symbol: GYPA
  Gene Name: glycophorin A (MNS blood group)
  ENSP ID: ENSP00000425719
MYGKIIFVLLLSGDGANPENSGKRGQKAEGRARAKILKQQKL

SEQ ID NO: 35618 - protein, 137 aa, Homo sapiens
  Payload ID: 7045
  Gene Symbol: GYPA
  Gene Name: glycophorin A (MNS blood group)
  ENSP ID: ENSP00000426130
MYGKIIFVLLLSEIVSISALSTTEVAMHTSTSSSVTKSYISSQTNDTHKRDTYAATPRAHEVSEISVRTVYPPEEETEITLIIFGVMAGVIGTILLISYGIRRLIKKSPSDVKPLPSPDTDVPLSSVEIENPETSDQ

SEQ ID NO: 35619 - protein, 148 aa, Homo sapiens
  Payload ID: 7045
  Gene Symbol: GYPA
  Gene Name: glycophorin A (MNS blood group)
  ENSP ID: ENSP00000445398
MLDTSFITPQEIVSISALSTTEVAMHTSTSSSVTKSYISSQTNDTHKRDTYAATPRAHEVSEISVRTVYPPEEETGERVQLAHHFSEPEITLIIFGVMAGVIGTILLISYGIRRLIKKSPSDVKPLPSPDTDVPLSSVEIENPETSDQ

SEQ ID NO: 35620 - protein, 148 aa, Homo sapiens; identical to SEQ ID NO: 35619
  Payload ID: 7045
  Gene Symbol: GYPA
  Gene Name: glycophorin A (MNS blood group)
  ENSP ID: ENSP00000478329

SEQ ID NO: 35621 - protein, 62 aa, Homo sapiens
  Payload ID: 7046
  Gene Symbol: GYPB
  Gene Name: glycophorin B (MNS blood group)
  ENSP ID: ENSP00000394200
MYGKIIFVLLLSEIVSISALSTTEVAMHTSTSSSVTKSYISSQTNGETGQLVHRFTVPVFAD

SEQ ID NO: 35622 - protein, 45 aa, Homo sapiens
  Payload ID: 7046
  Gene Symbol: GYPB
  Gene Name: glycophorin B (MNS blood group)
  ENSP ID: ENSP00000421974
MYGKIIFVLLLSGNFEHSAEGPSWLPLRRSPSTSTPLHLGAIPLI

SEQ ID NO: 35623 - protein, 42 aa, Homo sapiens
  Payload ID: 7046
  Gene Symbol: GYPB
  Gene Name: glycophorin B (MNS blood group)
  ENSP ID: ENSP00000422726
MYGKIIFVLLLSGDGANPENSGRRGQKAEGRARAKILKQEKL

SEQ ID NO: 35624 - protein, 45 aa, Homo sapiens; identical to SEQ ID NO: 35622
  Payload ID: 7046
  Gene Symbol: GYPB
  Gene Name: glycophorin B (MNS blood group)
  ENSP ID: ENSP00000423025

SEQ ID NO: 35625 - protein, 45 aa, Homo sapiens; identical to SEQ ID NO: 35622
  Payload ID: 7046
  Gene Symbol: GYPB
  Gene Name: glycophorin B (MNS blood group)
  ENSP ID: ENSP00000423055

SEQ ID NO: 35626 - protein, 19 aa, Homo sapiens
  Payload ID: 7046
  Gene Symbol: GYPB
  Gene Name: glycophorin B (MNS blood group)
  ENSP ID: ENSP00000424025
MYGKIIFVLLLSGHPTMLC

SEQ ID NO: 35627 - protein, 58 aa, Homo sapiens
  Payload ID: 7046
  Gene Symbol: GYPB
  Gene Name: glycophorin B (MNS blood group)
  Uniprot ID: P06028
  ENSP ID: ENSP00000425244
MYGKIIFVLLLSGETGQLVHRFTVPAPVVIILIILCVMAGIIGTILLISYSIRRLIKA

SEQ ID NO: 35628 - protein, 91 aa, Homo sapiens
  Payload ID: 7046
  Gene Symbol: GYPB
  Gene Name: glycophorin B (MNS blood group)
  Uniprot ID: P06028
  ENSP ID: ENSP00000427690
MYGKIIFVLLLSEIVSISALSTTEVAMHTSTSSSVTKSYISSQTNGETGQLVHRFTVPAPVVIILIILCVMAGIIGTILLISYSIRRLIKA

SEQ ID NO: 35629 - protein, 128 aa, Homo sapiens
  Payload ID: 7047
  Gene Symbol: GYPC
  Gene Name: glycophorin C (Gerbich blood group)
  Uniprot ID: P04921
  ENSP ID: ENSP00000259254
MWSTRSPNSTAWPLSLEPDPGMASASTTMHTTTIAEPDPGMSGWPDGRMETSTPTIMDIVVIAGVIAAVAIVLVSLLFVMLRYMYRHKGTYHTNEAKGTEFAESADAALQGDPALQDAGDSSRKEYFI

SEQ ID NO: 35630 - protein, 107 aa, Homo sapiens
  Payload ID: 7047
  Gene Symbol: GYPC
  Gene Name: glycophorin C (Gerbich blood group)
  Uniprot ID: P04921
  ENSP ID: ENSP00000349354
MASASTTMHTTTIAEPDPGMSGWPDGRMETSTPTIMDIVVIAGVIAAVAIVLVSLLFVMLRYMYRHKGTYHTNEAKGTEFAESADAALQGDPALQDAGDSSRKEYFI

SEQ ID NO: 35631 - protein, 109 aa, Homo sapiens
  Payload ID: 7047
  Gene Symbol: GYPC
  Gene Name: glycophorin C (Gerbich blood group)
  Uniprot ID: P04921
  ENSP ID: ENSP00000386904
MWSTRSPNSTAWPLSLEPDPGMSGWPDGRMETSTPTIMDIVVIAGVIAAVAIVLVSLLFVMLRYMYRHKGTYHTNEAKGTEFAESADAALQGDPALQDAGDSSRKEYFI

SEQ ID NO: 35632 - protein, 78 aa, Homo sapiens
  Payload ID: 7048
  Gene Symbol: GYPE
  Gene Name: glycophorin E (MNS blood group)
  Uniprot ID: P15421
  ENSP ID: ENSP00000351430
MYGKIIFVLLLSGIVSISASSTTGVAMHTSTSSSVTKSYISSQTNGITLINWWAMARVIFEVMLVVVGMIILISYCIR

SEQ ID NO: 35633 - protein, 78 aa, Homo sapiens; identical to SEQ ID NO: 35632
  Payload ID: 7048
  Gene Symbol: GYPE
  Gene Name: glycophorin E (MNS blood group)
  Uniprot ID: P15421
  ENSP ID: ENSP00000400698

SEQ ID NO: 35634 - protein, 59 aa, Homo sapiens
  Payload ID: 7048
  Gene Symbol: GYPE
  Gene Name: glycophorin E (MNS blood group)
  ENSP ID: ENSP00000426746
MYGKIIFVLLLSGIVSISASSTTGVAMHTSTSSSVTKSYISSQTNGCVIGNIICSDKSK

SEQ ID NO: 35635 - protein, 560 aa, Homo sapiens
  Payload ID: 7049
  Gene Symbol: GPNMB
  Gene Name: glycoprotein (transmembrane) nmb
  Uniprot ID: Q14956
  ENSP ID: ENSP00000258733
MECLYYFLGFLLLAARLPLDAAKRFHDVLGNERPSAYMREHNQLNGWSSDENDWNEKLYPVWKRGDMRWKNSWKGGRVQAVLTSDSPALVGSNITFAVNLIFPRCQKEDANGNIVYEKNCRNEAGLSADPYVYNWTAWSEDSDGENGTGQSHHNVFPDGKPFPHHPGWRRWNFIYVFHTLGQYFQKLGRCSVRVSVNTANVTLGPQLMEVTVYRRHGRAYVPIAQVKDVYVVTDQIPVFVTMFQKNDRNSSDETFLKDLPIMFDVLIHDPSHFLNYSTINYKWSFGDNTGLFVSTNHTVNHTYVLNGTFSLNLTVKAAAPGPCPPPPPPPRPSKPTPSLGPAGDNPLELSRIPDENCQINRYGHFQATITIVEGILEVNIIQMTDVLMPVPWPESSLIDFVVTCQGSIPTEVCTIISDPTCEITQNTVCSPVDVDEMCLLTVRRTFNGSGTYCVNLTLGDDTSLALTSTLISVPDRDPASPLRMANSALISVGCLAIFVTVISLLVYKKHKEYNPIENSPGNVVRSKGLSVFLNRAKAVFFPGNQEKDPLLKNQEFKGVS

SEQ ID NO: 35636 - protein, 572 aa, Homo sapiens
  Payload ID: 7049
  Gene Symbol: GPNMB
  Gene Name: glycoprotein (transmembrane) nmb
  Uniprot ID: Q14956
  ENSP ID: ENSP00000371420
MECLYYFLGFLLLAARLPLDAAKRFHDVLGNERPSAYMREHNQLNGWSSDENDWNEKLYPVWKRGDMRWKNSWKGGRVQAVLTSDSPALVGSNITFAVNLIFPRCQKEDANGNIVYEKNCRNEAGLSADPYVYNWTAWSEDSDGENGTGQSHHNVFPDGKPFPHHPGWRRWNFIYVFHTLGQYFQKLGRCSVRVSVNTANVTLGPQLMEVTVYRRHGRAYVPIAQVKDVYVVTDQIPVFVTMFQKNDRNSSDETFLKDLPIMFDVLIHDPSHFLNYSTINYKWSFGDNTGLFVSTNHTVNHTYVLNGTFSLNLTVKAAAPGPCPPPPPPPRPSKPTPSLATTLKSYDSNTPGPAGDNPLELSRIPDENCQINRYGHFQATITIVEGILEVNIIQMTDVLMPVPWPESSLIDFVVTCQGSIPTEVCTIISDPTCEITQNTVCSPVDVDEMCLLTVRRTFNGSGTYCVNLTLGDDTSLALTSTLISVPDRDPASPLRMANSALISVGCLAIFVTVISLLVYKKHKEYNPIENSPGNVVRSKGLSVFLNRAKAVFFPGNQEKDPLLKNQEFKGVS

SEQ ID NO: 35637 - protein, 206 aa, Homo sapiens
  Payload ID: 7049
  Gene Symbol: GPNMB
  Gene Name: glycoprotein (transmembrane) nmb
  ENSP ID: ENSP00000386476
MECLYYFLGFLLLAARLPLDAAKRFHDVLGNERPSAYMREHNQLNGWSSDENDWNEKLYPVWKRGDMRWKNSWKGGRVQAVLTSDSPALVGSNITFAVNLIFPRCQKEDANGNIVYEKNCRNEAGLSADPYVYNWTAWSEDSDGENGTGQSHHNVFPDGKPFPHHPGWRRWNFIYVFHTLGWLLQTPKLLLYLSLKFQPSLFLLYN

SEQ ID NO: 35638 - protein, 534 aa, Homo sapiens
  Payload ID: 7050
  Gene Symbol: GP2
  Gene Name: glycoprotein 2 (zymogen granule membrane)
  Uniprot ID: P55259
  ENSP ID: ENSP00000304044
MPHLMERMVGSGLLWLALVSCILTQASAVQRGYGNPIEASSYGLDLDCGAPGTPEAHVCFDPCQNYTLLDEPFRSTENSAGSQGCDKNMSGWYRFVGEGGVRMSETCVQVHRCQTDAPMWLNGTHPALGDGITNHTACAHWSGNCCFWKTEVLVKACPGGYHVYRLEGTPWCNLRYCTDPSTVEDKCEKACRPEEECLALNSTWGCFCRQDLNSSDVHSLQPQLDCGPREIKVKVDKCLLGGLGLGEEVIAYLRDPNCSSILQTEERNWVSVTSPVQASACRNILERNQTHAIYKNTLSLVNDFIIRDTILNINFQCAYPLDMKVSLQAALQPIVSSLNVSVDGNGEFIVRMALFQDQNYTNPYEGDAVELSVESVLYVGAILEQGDTSRFNLVLRNCYATPTEDKADLVKYFIIRNSCSNQRDSTIHVEENGQSSESRFSVQMFMFAGHYDLVFLHCEIHLCDSLNEQCQPSCSRSQVRSEVPAIDLARVLDLGPITRRGAQSPGVMNGTPSTAGFLVAWPMVLLTVLLAWLF

SEQ ID NO: 35639 - protein, 387 aa, Homo sapiens
  Payload ID: 7050
  Gene Symbol: GP2
  Gene Name: glycoprotein 2 (zymogen granule membrane)
  Uniprot ID: P55259
  ENSP ID: ENSP00000343861
MPHLMERMVGSGLLWLALVSCILTQASAVQRDPSTVEDKCEKACRPEEECLALNSTWGCFCRQDLNSSDVHSLQPQLDCGPREIKVKVDKCLLGGLGLGEEVIAYLRDPNCSSILQTEERNWVSVTSPVQASACRNILERNQTHAIYKNTLSLVNDFIIRDTILNINFQCAYPLDMKVSLQAALQPIVSSLNVSVDGNGEFIVRMALFQDQNYTNPYEGDAVELSVESVLYVGAILEQGDTSRFNLVLRNCYATPTEDKADLVKYFIIRNSCSNQRDSTIHVEENGQSSESRFSVQMFMFAGHYDLVFLHCEIHLCDSLNEQCQPSCSRSQVRSEVPAIDLARVLDLGPITRRGAQSPGVMNGTPSTAGFLVAWPMVLLTVLLAWLF

SEQ ID NO: 35640 - protein, 390 aa, Homo sapiens
  Payload ID: 7050
  Gene Symbol: GP2
  Gene Name: glycoprotein 2 (zymogen granule membrane)
  Uniprot ID: P55259
  ENSP ID: ENSP00000370765
MPHLMERMVGSGLLWLALVSCILTQASAVQRVPRDPSTVEDKCEKACRPEEECLALNSTWGCFCRQDLNSSDVHSLQPQLDCGPREIKVKVDKCLLGGLGLGEEVIAYLRDPNCSSILQTEERNWVSVTSPVQASACRNILERNQTHAIYKNTLSLVNDFIIRDTILNINFQCAYPLDMKVSLQAALQPIVSSLNVSVDGNGEFIVRMALFQDQNYTNPYEGDAVELSVESVLYVGAILEQGDTSRFNLVLRNCYATPTEDKADLVKYFIIRNSCSNQRDSTIHVEENGQSSESRFSVQMFMFAGHYDLVFLHCEIHLCDSLNEQCQPSCSRSQVRSEVPAIDLARVLDLGPITRRGAQSPGVMNGTPSTAGFLVAWPMVLLTVLLAWLF

SEQ ID NO: 35641 - protein, 537 aa, Homo sapiens
  Payload ID: 7050
  Gene Symbol: GP2
  Gene Name: glycoprotein 2 (zymogen granule membrane)
  Uniprot ID: P55259
  ENSP ID: ENSP00000370767
MPHLMERMVGSGLLWLALVSCILTQASAVQRGYGNPIEASSYGLDLDCGAPGTPEAHVCFDPCQNYTLLDEPFRSTENSAGSQGCDKNMSGWYRFVGEGGVRMSETCVQVHRCQTDAPMWLNGTHPALGDGITNHTACAHWSGNCCFWKTEVLVKACPGGYHVYRLEGTPWCNLRYCTVPRDPSTVEDKCEKACRPEEECLALNSTWGCFCRQDLNSSDVHSLQPQLDCGPREIKVKVDKCLLGGLGLGEEVIAYLRDPNCSSILQTEERNWVSVTSPVQASACRNILERNQTHAIYKNTLSLVNDFIIRDTILNINFQCAYPLDMKVSLQAALQPIVSSLNVSVDGNGEFIVRMALFQDQNYTNPYEGDAVELSVESVLYVGAILEQGDTSRFNLVLRNCYATPTEDKADLVKYFIIRNSCSNQRDSTIHVEENGQSSESRFSVQMFMFAGHYDLVFLHCEIHLCDSLNEQCQPSCSRSQVRSEVPAIDLARVLDLGPITRRGAQSPGVMNGTPSTAGFLVAWPMVLLTVLLAWLF

SEQ ID NO: 35642 - protein, 128 aa, Homo sapiens
  Payload ID: 7050
  Gene Symbol: GP2
  Gene Name: glycoprotein 2 (zymogen granule membrane)
  ENSP ID: ENSP00000460059
MPHLMERMVGSGLLWLALVSCILTQASAVQRGYGNPIEASSYGLDLDCGAPGTPEAHVCFDPCQNYTLLDEPFRSTENSAGSQGCDKNMSGWYRFVGEGGVRMSETCVQVHRCQTDAPMWLNGTHPAL

SEQ ID NO: 35643 - protein, 42 aa, Homo sapiens
  Payload ID: 7050
  Gene Symbol: GP2
  Gene Name: glycoprotein 2 (zymogen granule membrane)
  ENSP ID: ENSP00000460124
  MOD_RES (1)..(1): Any amino acid
XERMVGSGLLWLALVSCILTQASAVQRGKYSAHLASQMSRKT

SEQ ID NO: 35644 - protein, 145 aa, Homo sapiens
  Payload ID: 7050
  Gene Symbol: GP2
  Gene Name: glycoprotein 2 (zymogen granule membrane)
  ENSP ID: ENSP00000460466
MPHLMERMVGSGLLWLALVSCILTQASAVQRDPSTVEDKCEKACRPEEECLALNSTWGCFCRQDLNSSDVHSLQPQLDCGPREIKVKVDKCLLGGLGLGEEVIAYLRDPNCSSILQTEERNWVSVTSPVQASACRNILERNQTHA

SEQ ID NO: 35645 - protein, 163 aa, Homo sapiens
  Payload ID: 7050
  Gene Symbol: GP2
  Gene Name: glycoprotein 2 (zymogen granule membrane)
  ENSP ID: ENSP00000461061
MPHLMERMVGSGLLWLALVSCILTQASAVQRGEGGVRMSETCVQVHRCQTDAPMWLNGTHPALGDGITNHTACAHWSGNCCFWKTEVLVKACPGGYHVYRLEGTPWCNLRYCTDPSTVEDKCEKACRPEEECLALNSTWGCFCRQDLNSSDVHSLQPQLDCGP

SEQ ID NO: 35646 - protein, 141 aa, Homo sapiens
  Payload ID: 7050
  Gene Symbol: GP2
  Gene Name: glycoprotein 2 (zymogen granule membrane)
  ENSP ID: ENSP00000461632
MSGWYRFVGEGGVRMSETCVQVHRCQTDAPMWLNGTHPALGDGITNHTACAHWSGNCCFWKTEVLVKACPGGYHVYRLEGTPWCNLRYCTDPSTVEDKCEKACRPEEECLALNSTWGCFCRQDLNSSDVHSLQPQLDCGPR

SEQ ID NO: 35647 - protein, 319 aa, Homo sapiens
  Payload ID: 7051
  Gene Symbol: GPA33
  Gene Name: glycoprotein A33 (transmembrane)
  Uniprot ID: Q99795
  ENSP ID: ENSP00000356842
MVGKMWPVLWTLCAVRVTVDAISVETPQDVLRASQGKSVTLPCTYHTSTSSREGLIQWDKLLLTHTERVVIWPFSNKNYIHGELYKNRVSISNNAEQSDASITIDQLTMADNGTYECSVSLMSDLEGNTKSRVRLLVLVPPSKPECGIEGETIIGNNIQLTCQSKEGSPTPQYSWKRYNILNQEQPLAQPASGQPVSLKNISTDTSGYYICTSSNEEGTQFCNITVAVRSPSMNVALYVGIAVGVVAALIIIGIIIYCCCCRGKDDNTEDKEDARPNREAYEEPPEQLRELSREREEEDDYRQEEQRSTGRESPDHLDQ

SEQ ID NO: 35648 - protein, 81 aa, Homo sapiens
  Payload ID: 7051
  Gene Symbol: GPA33
  Gene Name: glycoprotein A33 (transmembrane)
  ENSP ID: ENSP00000431195
MVGKMWPVLWTLCAEHLGNKSTHRRNLRLPHDLRIHSQGDRRCHLCGNSAGRSSGFAGKECHPALHLPHFHLQSRGTYSMG

SEQ ID NO: 35649 - protein, 66 aa, Homo sapiens
  Payload ID: 7051
  Gene Symbol: GPA33
  Gene Name: glycoprotein A33 (transmembrane)
  ENSP ID: ENSP00000488407
MADNGTYECSVSLMSDLEGNTKSRVRLLVLVPPSKPECGIEGETIIGNNIQLTCQSKEGSPTPQYS

SEQ ID NO: 35650 - protein, 129 aa, Homo sapiens
  Payload ID: 7052
  Gene Symbol: GPHA2
  Gene Name: glycoprotein hormone alpha 2
  Uniprot ID: Q96T91
  ENSP ID: ENSP00000279168
MPMASPQTLVLYLLVLAVTEAWGQEAVIPGCHLHPFNVTVRSDRQGTCQGSHVAQACVGHCESSAFPSRYSVLVASGYRHNITSVSQCCTISGLKKVKVQLQCVGSRREELEIFTARACQCDMCRLSRY

SEQ ID NO: 35651 - protein, 118 aa, Homo sapiens
  Payload ID: 7052
  Gene Symbol: GPHA2
  Gene Name: glycoprotein hormone alpha 2
  ENSP ID: ENSP00000431352
MPMASPQTLVLYLLVLAVTEAWGQEAVIPGCHLHPFNVTVRSDRQGTCQGSHVAQACVGHCESSAFPSRYSVLVASGYRHNITSVSQCCTISGLKKVRRARARWMDAGVAGRPERWRS

SEQ ID NO: 35652 - protein, 129 aa, Homo sapiens; identical to SEQ ID NO: 35650
  Payload ID: 7052
  Gene Symbol: GPHA2
  Gene Name: glycoprotein hormone alpha 2
  Uniprot ID: Q96T91
  ENSP ID: ENSP00000432918

SEQ ID NO: 35653 - protein, 130 aa, Homo sapiens
  Payload ID: 7053
  Gene Symbol: GPHB5
  Gene Name: glycoprotein hormone beta 5
  Uniprot ID: Q86YW7
  ENSP ID: ENSP00000478993
MKLAFLFLGPMALLLLAGYGCVLGASSGNLRTFVGCAVREFTFLAKKPGCRGLRITTDACWGRCETWEKPILEPPYIEAHHRVCTYNETKQVTVKLPNCAPGVDPFYTYPVAIRCDCGACSTATTECETI

SEQ ID NO: 35654 - protein, 130 aa, Homo sapiens; identical to SEQ ID NO: 35653
  Payload ID: 7053
  Gene Symbol: GPHB5
  Gene Name: glycoprotein hormone beta 5
  Uniprot ID: Q86YW7
  ENSP ID: ENSP00000479431

SEQ ID NO: 35655 - protein, 116 aa, Homo sapiens
  Payload ID: 7054
  Gene Symbol: CGA
  Gene Name: glycoprotein hormones, alpha polypeptide
  ENSP ID: ENSP00000358595
MQLSFWSHCRCFCMFSIPLLMCRVRDQICDCPECTLQENPFFSQPGAPILQCMGCCFSRAYPTPLRSKKTMLVQKNVTSESTCCVAKSYNRVTVMGGFKVENHTACHCSTCYYHKS

SEQ ID NO: 35656 - protein, 147 aa, Homo sapiens
  Payload ID: 7054
  Gene Symbol: CGA
  Gene Name: glycoprotein hormones, alpha polypeptide
  ENSP ID: ENSP00000482232
MDYYRKYAAIFLVTLSVFLHVLHSAPDVQETGFHHVAQAALKLLSSSNPPTKASQSARITDCPECTLQENPFFSQPGAPILQCMGCCFSRAYPTPLRSKKTMLVQKNVTSESTCCVAKSYNRVTVMGGFKVENHTACHCSTCYYHKS

SEQ ID NO: 35657 - protein, 116 aa, Homo sapiens
  Payload ID: 7054
  Gene Symbol: CGA
  Gene Name: glycoprotein hormones, alpha polypeptide
  Uniprot ID: P01215
  ENSP ID: ENSP00000486024
MDYYRKYAAIFLVTLSVFLHVLHSAPDVQDCPECTLQENPFFSQPGAPILQCMGCCFSRAYPTPLRSKKTMLVQKNVTSESTCCVAKSYNRVTVMGGFKVENHTACHCSTCYYHKS

SEQ ID NO: 35658 - protein, 62 aa, Homo sapiens
  Payload ID: 7054
  Gene Symbol: CGA
  Gene Name: glycoprotein hormones, alpha polypeptide
  ENSP ID: ENSP00000486666
MDYYRKYAAIFLVTLSVFLHVLHSAPDVQDCPECTLQENPFFSQPGAPILQCMGCCFSRAYP

SEQ ID NO: 35659 - protein, 101 aa, Homo sapiens
  Payload ID: 7054
  Gene Symbol: CGA
  Gene Name: glycoprotein hormones, alpha polypeptide
  ENSP ID: ENSP00000487300
MDYYRKYAAIFLVTLSVFLHVLHSAPDVQDCPECTLQENPFFSQPGAPILQCMGCCFSRAYPTPLRSKKTMLVQKNVTSESTCCVAKSYNRVRTSRSPEAF

SEQ ID NO: 35660 - protein, 652 aa, Homo sapiens
  Payload ID: 7055
  Gene Symbol: GP1BA
  Gene Name: glycoprotein Ib (platelet), alpha polypeptide
  Uniprot ID: P07359
  ENSP ID: ENSP00000329380
MPLLLLLLLLPSPLHPHPICEVSKVASHLEVNCDKRNLTALPPDLPKDTTILHLSENLLYTFSLATLMPYTRLTQLNLDRCELTKLQVDGTLPVLGTLDLSHNQLQSLPLLGQTLPALTVLDVSFNRLTSLPLGALRGLGELQELYLKGNELKTLPPGLLTPTPKLEKLSLANNNLTELPAGLLNGLENLDTLLLQENSLYTIPKGFFGSHLLPFAFLHGNPWLCNCEILYFRRWLQDNAENVYVWKQGVDVKAMTSNVASVQCDNSDKFPVYKYPGKGCPTLGDEGDTDLYDYYPEEDTEGDKVRATRTVVKFPTKAHTTPWGLFYSWSTASLDSQMPSSLHPTQESTKEQTTFPPRWTPNFTLHMESITFSKTPKSTTEPTPSPTTSEPVPEPAPNMTTLEPTPSPTTPEPTSEPAPSPTTPEPTSEPAPSPTTPEPTSEPAPSPTTPEPTPIPTIATSPTILVSATSLITPKSTFLTTTKPVSLLESTKKTIPELDQPPKLRGVLQGHLESSRNDPFLHPDFCCLLPLGFYVLGLFWLLFASVVLILLLSWVGHVKPQALDSGQGAALTTATQTTHLELQRGRQVTVPRAWLLFLRGSLPTFRSSLFLWVRPNGRVGPLVAGRRPSALSQGRGQDLLSTVSIRYSGHSL

SEQ ID NO: 35661 - protein, 626 aa, Homo sapiens
  Payload ID: 7055
  Gene Symbol: GP1BA
  Gene Name: glycoprotein Ib (platelet), alpha polypeptide
  ENSP ID: ENSP00000484439
MPLLLLLLLLPSPLHPHPICEVSKVASHLEVNCDKRNLTALPPDLPKDTTILHLSENLLYTFSLATLMPYTRLTQLNLDRCELTKLQVDGTLPVLGTLDLSHNQLQSLPLLGQTLPALTVLDVSFNRLTSLPLGALRGLGELQELYLKGNELKTLPPGLLTPTPKLEKLSLANNNLTELPAGLLNGLENLDTLLLQENSLYTIPKGFFGSHLLPFAFLHGNPWLCNCEILYFRRWLQDNAENVYVWKQGVDVKAMTSNVASVQCDNSDKFPVYKYPGKGCPTLGDEGDTDLYDYYPEEDTEGDKVRATRTVVKFPTKAHTTPWGLFYSWSTASLDSQMPSSLHPTQESTKEQTTFPPRWTPNFTLHMESITFSKTPKSTTEPTPSPTTSEPVPEPAPNMTTLEPTPSPTTPEPTSEPAPSPTTPEPTPIPTIATSPTILVSATSLITPKSTFLTTTKPVSLLESTKKTIPELDQPPKLRGVLQGHLESSRNDPFLHPDFCCLLPLGFYVLGLFWLLFASVVLILLLSWVGHVKPQALDSGQGAALTTATQTTHLELQRGRQVTVPRAWLLFLRGSLPTFRSSLFLWVRPNGRVGPLVAGRRPSALSQGRGQDLLSTVSIRYSGHSL

SEQ ID NO: 35662 - protein, 206 aa, Homo sapiens
  Payload ID: 7056
  Gene Symbol: GP1BB
  Gene Name: glycoprotein Ib (platelet), beta polypeptide
  Uniprot ID: P13224
  ENSP ID: ENSP00000383382
MGSGPRGALSLLLLLLAPPSRPAAGCPAPCSCAGTLVDCGRRGLTWASLPTAFPVDTTELVLTGNNLTALPPGLLDALPALRTAHLGANPWRCDCRLVPLRAWLAGRPERAPYRDLRCVAPPALRGRLLPYLAEDELRAACAPGPLCWGALAAQLALLGLGLLHALLLVLLLCRLRRLRARARARAAARLSLTDPLVAERAGTDES

SEQ ID NO: 35663 - protein, 330 aa, Homo sapiens
  Payload ID: 7057
  Gene Symbol: GINM1
  Gene Name: glycoprotein integral membrane 1
  Uniprot ID: Q9NU53
  ENSP ID: ENSP00000356389
MEGAPPGSLALRLLLFVALPASGWLTTGAPEPPPLSGAPQDGIRINVTTLKDDGDISKQQVVLNITYESGQVYVNDLPVNSGVTRISCQTLIVKNENLENLEEKEYFGIVSVRILVHEWPMTSGSSLQLIVIQEEVVEIDGKQVQQKDVTEIDILVKNRGVLRHSNYTLPLEESMLYSISRDSDILFTLPNLSKKESVSSLQTTSQYLIRNVETTVDEDVLPGKLPETPLRAEPPSSYKVMCQWMEKFRKDLCRFWSNVFPVFFQFLNIMVVGITGAAVVITILKVFFPVSEYKGILQLDKVDVIPVTAINLYPDGPEKRAENLEDKTCI

SEQ ID NO: 35664 - protein, 125 aa, Homo sapiens
  Payload ID: 7057
  Gene Symbol: GINM1
  Gene Name: glycoprotein integral membrane 1
  ENSP ID: ENSP00000407343
LQLIVIQEEVVEIDGKQVQQKDVTEIDILVKNRGVLRHSNYTLPLEESMLYSISRDSDILFTLPNLSKKESVSSLQTTSQYLIRNVETTVDEDVLPGKLPETPLRAEPPSSYKVLETVDSAPFRL

SEQ ID NO: 35665 - protein, 177 aa, Homo sapiens
  Payload ID: 7058
  Gene Symbol: GP9
  Gene Name: glycoprotein IX (platelet)
  Uniprot ID: P14770
  ENSP ID: ENSP00000303942
MPAWGALFLLWATAEATKDCPSPCTCRALETMGLWVDCRGHGLTALPALPARTRHLLLANNSLQSVPPGAFDHLPQLQTLDVTQNPWHCDCSLTYLRLWLEDRTPEALLQVRCASPSLAAHGPLGRLTGYQLGSCGWQLQASWVRPGVLWDVALVAVAALGLALLAGLLCATTEALD

SEQ ID NO: 35666 - protein, 278 aa, Homo sapiens
  Payload ID: 7059
  Gene Symbol: GPM6A
  Gene Name: glycoprotein M6A
  Uniprot ID: P51674
  ENSP ID: ENSP00000280187
MEENMEEGQTQKGCFECCIKCLGGIPYASLIATILLYAGVALFCGCGHEALSGTVNILQTYFEMARTAGDTLDVFTMIDIFKYVIYGIAAAFFVYGILLMVEGFFTTGAIKDLYGDFKITTCGRCVSAWFIMLTYLFMLAWLGVTAFTSLPVYMYFNLWTICRNTTLVEGANLCLDLRQFGIVTIGEEKKICTVSENFLRMCESTELNMTFHLFIVALAGAGAAVIAMVHYLMVLSANWAYVKDACRMQKYEDIKSKEEQELHDIHSTRSKERLNAYT

SEQ ID NO: 35667 - protein, 278 aa, Homo sapiens; identical to SEQ ID NO: 35666
  Payload ID: 7059
  Gene Symbol: GPM6A
  Gene Name: glycoprotein M6A
  Uniprot ID: P51674
  ENSP ID: ENSP00000377268

SEQ ID NO: 35668 - protein, 98 aa, Homo sapiens
  Payload ID: 7059
  Gene Symbol: GPM6A
  Gene Name: glycoprotein M6A
  ENSP ID: ENSP00000421373
MARTAGDTLDVFTMIDIFKYVIYGIAAAFFVYGILLMVEGFFTTGAIKDLYGDFKITTCGRCVSAWFIMLTYLFMLAWLGVTAFTSLPVYMYFNLWTI

SEQ ID NO: 35669 - protein, 41 aa, Homo sapiens
  Payload ID: 7059
  Gene Symbol: GPM6A
  Gene Name: glycoprotein M6A
  ENSP ID: ENSP00000421407
MARTAGDTLDVFTMIDIFKYVIYGIAAAFFVYGILLMVEGF

SEQ ID NO: 35670 - protein, 267 aa, Homo sapiens
  Payload ID: 7059
  Gene Symbol: GPM6A
  Gene Name: glycoprotein M6A
  Uniprot ID: P51674
  ENSP ID: ENSP00000421578
MGCFECCIKCLGGIPYASLIATILLYAGVALFCGCGHEALSGTVNILQTYFEMARTAGDTLDVFTMIDIFKYVIYGIAAAFFVYGILLMVEGFFTTGAIKDLYGDFKITTCGRCVSAWFIMLTYLFMLAWLGVTAFTSLPVYMYFNLWTICRNTTLVEGANLCLDLRQFGIVTIGEEKKICTVSENFLRMCESTELNMTFHLFIVALAGAGAAVIAMVHYLMVLSANWAYVKDACRMQKYEDIKSKEEQELHDIHSTRSKERLNAYT

SEQ ID NO: 35671 - protein, 49 aa, Homo sapiens
  Payload ID: 7059
  Gene Symbol: GPM6A
  Gene Name: glycoprotein M6A
  ENSP ID: ENSP00000422712
MARTAGDTLDVFTMIDIFKYVIYGIAAAFFVYGILLMVEGFFTTGAIKD

SEQ ID NO: 35672 - protein, 218 aa, Homo sapiens
  Payload ID: 7059
  Gene Symbol: GPM6A
  Gene Name: glycoprotein M6A
  ENSP ID: ENSP00000422959
MPTLGCFECCIKCLGGIPYASLIATILLYAGVALFCGCGHEALSGTVNILQTYFEMARTAGDTLDVFTMIDIFKYVIYGIAAAFFVYGILLMVEGFFTTGAIKDLYGDFKITTCGRCVSAWFIMLTYLFMLAWLGVTAFTSLPVYMYFNLWTICRNTTLVEGANLCLDLRQFGIVTIGEEKKICTVSENFLRMCESTELNMTFHLFIVALAGAGAAVI

SEQ ID NO: 35673 - protein, 129 aa, Homo sapiens
  Payload ID: 7059
  Gene Symbol: GPM6A
  Gene Name: glycoprotein M6A
  ENSP ID: ENSP00000423122
MEENMEEGQTQKGCFECCIKCLGGIPYASLIATILLYAGVALFCGCGHEALSGTVNILQTYFEMARTAGDTLDVFTMIDIFKYVIYGIAAAFFVYGILLMVEGFFTTGAIKDLYGDFKITTCGRCVSAW

SEQ ID NO: 35674 - protein, 271 aa, Homo sapiens
  Payload ID: 7059
  Gene Symbol: GPM6A
  Gene Name: glycoprotein M6A
  Uniprot ID: P51674
  ENSP ID: ENSP00000423984
MTDLEGCFECCIKCLGGIPYASLIATILLYAGVALFCGCGHEALSGTVNILQTYFEMARTAGDTLDVFTMIDIFKYVIYGIAAAFFVYGILLMVEGFFTTGAIKDLYGDFKITTCGRCVSAWFIMLTYLFMLAWLGVTAFTSLPVYMYFNLWTICRNTTLVEGANLCLDLRQFGIVTIGEEKKICTVSENFLRMCESTELNMTFHLFIVALAGAGAAVIAMVHYLMVLSANWAYVKDACRMQKYEDIKSKEEQELHDIHSTRSKERLNAYT

SEQ ID NO: 35675 - protein, 105 aa, Homo sapiens
  Payload ID: 7059
  Gene Symbol: GPM6A
  Gene Name: glycoprotein M6A
  ENSP ID: ENSP00000424075
MARTAGDTLDVFTMIDIFKYVIYGIAAAFFVYGILLMVEGFFTTGAIKDLYGDFKITTCGRCVSAWFIMLTYLFMLAWLGVTAFTSLPVYMYFNLWTICRNTTLV

SEQ ID NO: 35676 - protein, 82 aa, Homo sapiens
  Payload ID: 7059
  Gene Symbol: GPM6A
  Gene Name: glycoprotein M6A
  ENSP ID: ENSP00000424125
MARTAGDTLDVFTMIDIFKYVIYGIAAAFFVYGILLMVEGFFTTGAIKDLYGDFKITTCGRCVSAWFIMLTYLFMLAWLGVT

SEQ ID NO: 35677 - protein, 87 aa, Homo sapiens
  Payload ID: 7059
  Gene Symbol: GPM6A
  Gene Name: glycoprotein M6A
  ENSP ID: ENSP00000424443
MARTAGDTLDVFTMIDIFKYVIYGIAAAFFVYGILLMVEGFFTTGAIKDLYGDFKITTCGRCFIMLTYLFMLAWLGVTAFTSLPVYM

SEQ ID NO: 35678 - protein, 89 aa, Homo sapiens
  Payload ID: 7059
  Gene Symbol: GPM6A
  Gene Name: glycoprotein M6A
  ENSP ID: ENSP00000425409
MARTAGDTLDVFTMIDIFKYVIYGIAAAFFVYGILLMVEGFFTTGAIKDLYGDFKITTCGRCVSAWFIMLTYLFMLAWLGVTAFTSLPV

SEQ ID NO: 35679 - protein, 66 aa, Homo sapiens
  Payload ID: 7059
  Gene Symbol: GPM6A
  Gene Name: glycoprotein M6A
  ENSP ID: ENSP00000425463
MTDLEGCFECCIKCLGGIPYASLIATILLYAGVALFCGCGHEALSGTVNILQTYFEMARTAGDTLD

SEQ ID NO: 35680 - protein, 43 aa, Homo sapiens
  Payload ID: 7059
  Gene Symbol: GPM6A
  Gene Name: glycoprotein M6A
  ENSP ID: ENSP00000425925
MARTAGDTLDVFTMIDIFKYVIYGIAAAFFVYGILLMVEGFFT

SEQ ID NO: 35681 - protein, 10 aa, Homo sapiens
  Payload ID: 7059
  Gene Symbol: GPM6A
  Gene Name: glycoprotein M6A
  ENSP ID: ENSP00000426352
MEENMEEGQT

SEQ ID NO: 35682 - protein, 117 aa, Homo sapiens
  Payload ID: 7059
  Gene Symbol: GPM6A
  Gene Name: glycoprotein M6A
  ENSP ID: ENSP00000426821
MARTAGDTLDVFTMIDIFKYVIYGIAAAFFVYGILLMVEGFFTTGAIKDLYGDFKITTCGRCVSAWFIMLTYLFMLAWLGVTAFTSLPVYMYFNLWTICRNTTLVEGANLCLDLRQF

SEQ ID NO: 35683 - protein, 119 aa, Homo sapiens
  Payload ID: 7059
  Gene Symbol: GPM6A
  Gene Name: glycoprotein M6A
  ENSP ID: ENSP00000426984
MARTAGDTLDVFTMIDIFKYVIYGIAAAFFVYGILLMVEGFFTTGAIKDLYGDFKITTCGRCVSAWFIMLTYLFMLAWLGVTAFTSLPVYMYFNLWTICRNTTLVEGANLCLDLRQFGK

SEQ ID NO: 35684 - protein, 328 aa, Homo sapiens
  Payload ID: 7060
  Gene Symbol: GPM6B
  Gene Name: glycoprotein M6B
  Uniprot ID: Q13491
  ENSP ID: ENSP00000316861
MKPAMETAAEENTEQSQERKVNSRAEMEIGRYHWMYPGSKNHQYHPVPTLGDRASPLSSPGCFECCIKCLGGVPYASLVATILCFSGVALFCGCGHVALAGTVAILEQHFSTNASDHALLSEVIQLMQYVIYGIASFFFLYGIILLAEGFYTTSAVKELHGEFKTTACGRCISGMFVFLTYVLGVAWLGVFGFSAVPVFMFYNIWSTCEVIKSPQTNGTTGVEQICVDIRQYGIIPWNAFPGKICGSALENICNTNEFYMSYHLFIVACAGAGATVIALIHFLMILSSNWAYLKDASKMQAYQDIKAKEEQELQDIQSRSKEQLNSYT

SEQ ID NO: 35685 - protein, 305 aa, Homo sapiens
  Payload ID: 7060
  Gene Symbol: GPM6B
  Gene Name: glycoprotein M6B
  Uniprot ID: Q13491
  ENSP ID: ENSP00000347258
MKPAMETAAEENTEQSQERKVNSRAEMEIGRYHWMYPGSKNHQYHPVPTLGDRASPLSSPGCFECCIKCLGGVPYASLVATILCFSGVALFCGCGHVALAGTVAILEQHFSTNASDHALLSEVIQLMQYVIYGIASFFFLYGIILLAEGFYTTSAVKELHGEFKTTACGRCISGMFVFLTYVLGVAWLGVFGFSAVPVFMFYNIWSTCEVIKSPQTNGTTGVEQICVDIRQYGIIPWNAFPGKICGSALENICNTNEFYMSYHLFIVACAGAGATVIALLIYMMATTYNYAVLKFKSREDCCTKF

SEQ ID NO: 35686 - protein, 265 aa, Homo sapiens
  Payload ID: 7060
  Gene Symbol: GPM6B
  Gene Name: glycoprotein M6B
  Uniprot ID: Q13491
  ENSP ID: ENSP00000349420
MKPAMETAAEENTEQSQERKGCFECCIKCLGGVPYASLVATILCFSGVALFCGCGHVALAGTVAILEQHFSTNASDHALLSEVIQLMQYVIYGIASFFFLYGIILLAEGFYTTSAVKELHGEFKTTACGRCISGMFVFLTYVLGVAWLGVFGFSAVPVFMFYNIWSTCEVIKSPQTNGTTGVEQICVDIRQYGIIPWNAFPGKICGSALENICNTNEFYMSYHLFIVACAGAGATVIALLIYMMATTYNYAVLKFKSREDCCTKF

SEQ ID NO: 35687 - protein, 179 aa, Homo sapiens
  Payload ID: 7060
  Gene Symbol: GPM6B
  Gene Name: glycoprotein M6B
  ENSP ID: ENSP00000381402
MQYVIYGIASFFFLYGIILLAEGFYTTSAVKELHGEFKTTACGRCISGMFVFLTYVLGVAWLGVFGFSAVPVFMFYNIWSTCEVIKSPQTNGTTGVEQICVDIRQYGIIPWNAFPGKICGSALENICNTNEFYMSYHLFIVACAGAGATVIALLIYMMATTYNYAVLKFKSREDCCTKF

SEQ ID NO: 35688 - protein, 246 aa, Homo sapiens
  Payload ID: 7060
  Gene Symbol: GPM6B
  Gene Name: glycoprotein M6B
  Uniprot ID: Q13491
  ENSP ID: ENSP00000389915
MGCFECCIKCLGGVPYASLVATILCFSGVALFCGCGHVALAGTVAILEQHFSTNASDHALLSEVIQLMQYVIYGIASFFFLYGIILLAEGFYTTSAVKELHGEFKTTACGRCISGMFVFLTYVLGVAWLGVFGFSAVPVFMFYNIWSTCEVIKSPQTNGTTGVEQICVDIRQYGIIPWNAFPGKICGSALENICNTNEFYMSYHLFIVACAGAGATVIALLIYMMATTYNYAVLKFKSREDCCTKF

SEQ ID NO: 35689 - protein, 94 aa, Homo sapiens
  Payload ID: 7060
  Gene Symbol: GPM6B
  Gene Name: glycoprotein M6B
  ENSP ID: ENSP00000418199
MQYVIYGIASFFFLYGIILLAEGFYTTSAVKELHGEFKTTACGRCISGMFVFLTYVLGVAWLGVFGFSAVPVFMFYNIWSTCEVIKSPQTNGTT

SEQ ID NO: 35690 - protein, 107 aa, Homo sapiens
  Payload ID: 7060
  Gene Symbol: GPM6B
  Gene Name: glycoprotein M6B
  ENSP ID: ENSP00000418594
MKPAMETAAEENTEQSQERKGCFECCIKCLGGVPYASLVATILCFSGVALFCGCGHVALAGTVAILEQHFSTNASDHALLSEVIQLMQYVIYGIASFFFLYGIILLA

SEQ ID NO: 35691 - protein, 76 aa, Homo sapiens
  Payload ID: 7060
  Gene Symbol: GPM6B
  Gene Name: glycoprotein M6B
  ENSP ID: ENSP00000419779
MQYVIYGIASFFFLYGIILLAEGFYTTSAVKELHGEFKTTACGRCISGMFVFLTYVLGVAWLGVFGFSAVPVFMFY

SEQ ID NO: 35692 - protein, 302 aa, Homo sapiens
  Payload ID: 7060
  Gene Symbol: GPM6B
  Gene Name: glycoprotein M6B
  ENSP ID: ENSP00000419904
MEIGRYHWMYPGSKNHQYHPVPTLGDRASPLSSPGCFECCIKCLGGVPYASLVATILCFSGVALFCGCGHVALAGTVAILEQHFSTNASDHALLSEVIQLMQYVIYGIASFFFLYGIILLAEGFYTTSAVKELHGEFKTTACGRCISGMFVFLTYVLGVAWLGVFGFSAVPVFMFYNIWSTCEVIKSPQTNGTTGVEQICVDIRQYGIIPWNAFPGKICGSALENICNTNEFYMSYHLFIVACAGAGATVIALIHFLMILSSNWAYLKDASKMQAYQDIKAKEEQELQDIQSRSKEQLNSYT

SEQ ID NO: 35693 - protein, 560 aa, Homo sapiens
  Payload ID: 7061
  Gene Symbol: GP5
  Gene Name: glycoprotein V (platelet)
  Uniprot ID: P40197
  ENSP ID: ENSP00000383931
MLRGTLLCAVLGLLRAQPFPCPPACKCVFRDAAQCSGGDVARISALGLPTNLTHILLFGMGRGVLQSQSFSGMTVLQRLMISDSHISAVAPGTFSDLIKLKTLRLSRNKITHLPGALLDKMVLLEQLFLDHNALRGIDQNMFQKLVNLQELALNQNQLDFLPASLFTNLENLKLLDLSGNNLTHLPKGLLGAQAKLERLLLHSNRLVSLDSGLLNSLGALTELQFHRNHIRSIAPGAFDRLPNLSSLTLSRNHLAFLPSALFLHSHNLTLLTLFENPLAELPGVLFGEMGGLQELWLNRTQLRTLPAAAFRNLSRLRYLGVTLSPRLSALPQGAFQGLGELQVLALHSNGLTALPDGLLRGLGKLRQVSLRRNRLRALPRALFRNLSSLESVQLDHNQLETLPGDVFGALPRLTEVLLGHNSWRCDCGLGPFLGWLRQHLGLVGGEEPPRCAGPGAHAGLPLWALPGGDAECPGPRGPPPRPAADSSSEAPVHPALAPNSSEPWVWAQPVTTGKGQDHSPFWGFYFLLLAVQAMITVIIVFAMIKIGQLFRKLIRERALG

SEQ ID NO: 35694 - protein, 620 aa, Homo sapiens
  Payload ID: 7062
  Gene Symbol: GP6
  Gene Name: glycoprotein VI (platelet)
  Uniprot ID: Q9HCN6
  ENSP ID: ENSP00000308782
MSPSPTALFCLGLCLGRVPAQSGPLPKPSLQALPSSLVPLEKPVTLRCQGPPGVDLYRLEKLSSSRYQDQAVLFIPAMKRSLAGRYRCSYQNGSLWSLPSDQLELVATGVFAKPSLSAQPGPAVSSGGDVTLQCQTRYGFDQFALYKEGDPAPYKNPERWYRASFPIITVTAAHSGTYRCYSFSSRDPYLWSAPSDPLELVVTGTSVTPSRLPTEPPSPVAEFSEATAELTVSFTNEVFTTETSRSITASPKESDSPAGESCPPVLHQGQPGPDMPRGCDPNNPGGVSGRGLAQPEEAPAAQGQGCAEAASAPPAPPADPEIKRGSGWRPTGCSQPRVMFMTAEPQARSYPREGSWHGRRLKDWRVWSVEAGGQRLQLWKRGHAASSWCSIREPFGQCLSVCLPLCLRAPSIWDGRNLWRPHPPPCTLWMTWYPGWTTYWPLSSTSLIWAPDGSLRFPALRVDSVPSSVQNPPVLPFGPLCSCLVFPRNSHPHSISHCGLTNLLSSLRTGLAGSLGMSFIFLSVKLARCPLPFTLENKISLCNMVKPHLYQQNKKTQKLARCGGASLYSQQLRGLRWENGLSLGGRGCSELRSHHCTLARVTKPDFVSKNTGMNMSITLI

SEQ ID NO: 35695 - protein, 321 aa, Homo sapiens
  Payload ID: 7062
  Gene Symbol: GP6
  Gene Name: glycoprotein VI (platelet)
  Uniprot ID: Q9HCN6
  ENSP ID: ENSP00000334552
MSPSPTALFCLGLCLGRVPAQSGPLPKPSLQALPSSLVPLEKPVTLRCQGPPGVDLYRLEKLSSSRYQDQAVLFIPAMKRSLAGRYRCSYQNGSLWSLPSDQLELVATGVFAKPSLSAQPGPAVSSGGDVTLQCQTRYGFDQFALYKEGDPAPYKNPERWYRASFPIITVTAAHSGTYRCYSFSSRDPYLWSAPSDPLELVVTEFSEATAELTVSFTNEVFTTETSRSITASPKESDSPAGPARQYYTKGNLVRICLGAVILIILAGFLAEDWHSRRKRLRHRGRAVQRPLPPLPPLPLTRKSNGGQDGGRQDVHSRGLCS

SEQ ID NO: 35696 - protein, 339 aa, Homo sapiens
  Payload ID: 7062
  Gene Symbol: GP6
  Gene Name: glycoprotein VI (platelet)
  Uniprot ID: Q9HCN6
  ENSP ID: ENSP00000394922
MSPSPTALFCLGLCLGRVPAQSGPLPKPSLQALPSSLVPLEKPVTLRCQGPPGVDLYRLEKLSSSRYQDQAVLFIPAMKRSLAGRYRCSYQNGSLWSLPSDQLELVATGVFAKPSLSAQPGPAVSSGGDVTLQCQTRYGFDQFALYKEGDPAPYKNPERWYRASFPIITVTAAHSGTYRCYSFSSRDPYLWSAPSDPLELVVTGTSVTPSRLPTEPPSPVAEFSEATAELTVSFTNEVFTTETSRSITASPKESDSPAGPARQYYTKGNLVRICLGAVILIILAGFLAEDWHSRRKRLRHRGRAVQRPLPPLPPLPLTRKSNGGQDGGRQDVHSRGLCS

SEQ ID NO: 35697 - protein, 117 aa, Homo sapiens
  Payload ID: 7062
  Gene Symbol: GP6
  Gene Name: glycoprotein VI (platelet)
  ENSP ID: ENSP00000464922
MKRSLAGRYRCSYQNGSLWSLPSDQLELVATGVFAKPSLSAQPGPAVSSGGDVTLQCQTRYGFDQFALYKEGDPAPYKNPERWYRASFPIITVTAAHSGTYRCYSFSSRDPYLWSAP

SEQ ID NO: 35698 - protein, 620 aa, Homo sapiens; identical to SEQ ID NO: 35694
  Payload ID: 7062
  Gene Symbol: GP6
  Gene Name: glycoprotein VI (platelet)
  ENSP ID: ENSP00000478025

SEQ ID NO: 35699 - protein, 321 aa, Homo sapiens; identical to SEQ ID NO: 35695
  Payload ID: 7062
  Gene Symbol: GP6
  Gene Name: glycoprotein VI (platelet)
  Uniprot ID: Q9HCN6
  ENSP ID: ENSP00000478674

SEQ ID NO: 35700 - protein, 321 aa, Homo sapiens; identical to SEQ ID NO: 35695
  Payload ID: 7062
  Gene Symbol: GP6
  Gene Name: glycoprotein VI (platelet)
  Uniprot ID: Q9HCN6
  ENSP ID: ENSP00000478709

SEQ ID NO: 35701 - protein, 321 aa, Homo sapiens; identical to SEQ ID NO: 35695
  Payload ID: 7062
  Gene Symbol: GP6
  Gene Name: glycoprotein VI (platelet)
  Uniprot ID: Q9HCN6
  ENSP ID: ENSP00000478918

SEQ ID NO: 35702 - protein, 620 aa, Homo sapiens; identical to SEQ ID NO: 35694
  Payload ID: 7062
  Gene Symbol: GP6
  Gene Name: glycoprotein VI (platelet)
  ENSP ID: ENSP00000479034

SEQ ID NO: 35703 - protein, 321 aa, Homo sapiens; identical to SEQ ID NO: 35695
  Payload ID: 7062
  Gene Symbol: GP6
  Gene Name: glycoprotein VI (platelet)
  ENSP ID: ENSP00000479513

SEQ ID NO: 35704 - protein, 620 aa, Homo sapiens; identical to SEQ ID NO: 35694
  Payload ID: 7062
  Gene Symbol: GP6
  Gene Name: glycoprotein VI (platelet)
  Uniprot ID: Q9HCN6
  ENSP ID: ENSP00000479668

SEQ ID NO: 35705 - protein, 321 aa, Homo sapiens; identical to SEQ ID NO: 35695
  Payload ID: 7062
  Gene Symbol: GP6
  Gene Name: glycoprotein VI (platelet)
  Uniprot ID: Q9HCN6
  ENSP ID: ENSP00000479873

SEQ ID NO: 35706 - protein, 620 aa, Homo sapiens; identical to SEQ ID NO: 35694
  Payload ID: 7062
  Gene Symbol: GP6
  Gene Name: glycoprotein VI (platelet)
  ENSP ID: ENSP00000479975

SEQ ID NO: 35707 - protein, 321 aa, Homo sapiens; identical to SEQ ID NO: 35695
  Payload ID: 7062
  Gene Symbol: GP6
  Gene Name: glycoprotein VI (platelet)
  ENSP ID: ENSP00000480178

SEQ ID NO: 35708 - protein, 620 aa, Homo sapiens; identical to SEQ ID NO: 35694
  Payload ID: 7062
  Gene Symbol: GP6
  Gene Name: glycoprotein VI (platelet)
  ENSP ID: ENSP00000480243

SEQ ID NO: 35709 - protein, 620 aa, Homo sapiens; identical to SEQ ID NO: 35694
  Payload ID: 7062
  Gene Symbol: GP6
  Gene Name: glycoprotein VI (platelet)
  ENSP ID: ENSP00000481075

SEQ ID NO: 35710 - protein, 321 aa, Homo sapiens; identical to SEQ ID NO: 35695
  Payload ID: 7062
  Gene Symbol: GP6
  Gene Name: glycoprotein VI (platelet)
  ENSP ID: ENSP00000481125

SEQ ID NO: 35711 - protein, 620 aa, Homo sapiens; identical to SEQ ID NO: 35694
  Payload ID: 7062
  Gene Symbol: GP6
  Gene Name: glycoprotein VI (platelet)
  Uniprot ID: Q9HCN6
  ENSP ID: ENSP00000481524

SEQ ID NO: 35712 - protein, 321 aa, Homo sapiens; identical to SEQ ID NO: 35695
  Payload ID: 7062
  Gene Symbol: GP6
  Gene Name: glycoprotein VI (platelet)
  ENSP ID: ENSP00000481583

SEQ ID NO: 35713 - protein, 620 aa, Homo sapiens; identical to SEQ ID NO: 35694
  Payload ID: 7062
  Gene Symbol: GP6
  Gene Name: glycoprotein VI (platelet)
  Uniprot ID: Q9HCN6
  ENSP ID: ENSP00000482601

SEQ ID NO: 35714 - protein, 339 aa, Homo sapiens; identical to SEQ ID NO: 35696
  Payload ID: 7062
  Gene Symbol: GP6
  Gene Name: glycoprotein VI (platelet)
  Uniprot ID: Q9HCN6
  ENSP ID: ENSP00000483314

SEQ ID NO: 35715 - protein, 321 aa, Homo sapiens; identical to SEQ ID NO: 35695
  Payload ID: 7062
  Gene Symbol: GP6
  Gene Name: glycoprotein VI (platelet)
  ENSP ID: ENSP00000483612

SEQ ID NO: 35716 - protein, 117 aa, Homo sapiens; identical to SEQ ID NO: 35697
  Payload ID: 7062
  Gene Symbol: GP6
  Gene Name: glycoprotein VI (platelet)
  ENSP ID: ENSP00000483807

SEQ ID NO: 35717 - protein, 620 aa, Homo sapiens; identical to SEQ ID NO: 35694
  Payload ID: 7062
  Gene Symbol: GP6
  Gene Name: glycoprotein VI (platelet)
  Uniprot ID: Q9HCN6
  ENSP ID: ENSP00000484029

SEQ ID NO: 35718 - protein, 406 aa, Homo sapiens
  Payload ID: 7063
  Gene Symbol: GLMP
  Gene Name: glycosylated lysosomal membrane protein
  Uniprot ID: Q8WWB7
  ENSP ID: ENSP00000354553
MRGSVECTWGWGHCAPSPLLLWTLLLFAAPFGLLGEKTRQVSLEVIPNWLGPLQNLLHIRAVGTNSTLHYVWSSLGPLAVVMVATNTPHSTLSVNWSLLLSPEPDGGLMVLPKDSIQFSSALVFTRLLEFDSTNVSDTAAKPLGRPYPPYSLADFSWNNITDSLDPATLSATFQGHPMNDPTRTFANGSLAFRVQAFSRSSRPAQPPRLLHTADTCQLEVALIGASPRGNRSLFGLEVATLGQGPDCPSMQEQHSIDDEYAPAVFQLDQLLWGSLPSGFAQWRPVAYSQKPGGRESALPCQASPLHPALAYSLPQSPIVRAFFGSQNNFCAFNLTFGASTGPGYWDQHYLSWSMLLGVGFPPVDGLSPLVLGIMAVALGAPGLMLLGGGLVLLLHHKKYSEYQSIN

SEQ ID NO: 35719 - protein, 183 aa, Homo sapiens [sequence omitted]

SEQ ID NO: 35720 - protein, 75 aa, Homo sapiens
  Payload ID: 7063
  Gene Symbol: GLMP
  Gene Name: glycosylated lysosomal membrane protein
  ENSP ID: ENSP00000476260
FNLTFGASTGPGYWDQHYLSWSMLLGVGFPPVDGLSPLVLGIMAVALGAPGLMLLGGGLVLLLHHKKYSEYQSIN

SEQ ID NO: 35721 - protein, 130 aa, Homo sapiens
  Payload ID: 7063
  Gene Symbol: GLMP
  Gene Name: glycosylated lysosomal membrane protein
  ENSP ID: ENSP00000477180
MRGSVECTWGWGHCAPSPLLLWTLLLFAAPFGLLGEKTRQVSLEVIPNWLGPLQNLLHIRAVGTNSTLHYVWSSLGPLAVVMVATNTPHSTLSVNWSLLLSPEPDGGLMVLPKDSIQFSSALVFTRGSCC

SEQ ID NO: 35722 - protein, 111 aa, Homo sapiens
  Payload ID: 7063
  Gene Symbol: GLMP
  Gene Name: glycosylated lysosomal membrane protein
  ENSP ID: ENSP00000477187
  MOD_RES (1)..(1): Any amino acid
XPSMQEQHSIDDEYAPAVFQSPIVRAFFGSQNNFCAFNLTFGASTGPGYWDQHYLSWSMLLGVGFPPVDGLSPLVLGIMAVALGAPGLMLLGGGLVLLLHHKKYSEYQSIN

SEQ ID NO: 35723 - protein, 89 aa, Homo sapiens
  Payload ID: 7063
  Gene Symbol: GLMP
  Gene Name: glycosylated lysosomal membrane protein
  ENSP ID: ENSP00000477253
MRGSVECTWGWGHCAPSPLLLWTLLLFAAPFGLLGEKTRQVRRLGENQGEECRGESSSQLEGGTKDWGKAFGKTISSILLGRFLLEQHH

SEQ ID NO: 35724 - protein, 320 aa, Homo sapiens
  Payload ID: 7063
  Gene Symbol: GLMP
  Gene Name: glycosylated lysosomal membrane protein
  ENSP ID: ENSP00000479149
MRGSVECTWGWGHCAPSPLLLWTLLLFAAPFGLLGEKTRQLLEFDSTNVSDTAAKPLGRPYPPYSLADFSWNNITDSLDPATLSATFQGHPMNDPTRTFANGSLAFRVQAFSRSSRPAQPPRLLHTADTCQLEVALIGASPRGNRSLFGLEVATLGQGPDCPSMQEQHSIDDEYAPAVFQLDQLLWGSLPSGFAQWRPVAYSQKPGGRESALPCQASPLHPALAYSLPQSPIVRAFFGSQNNFCAFNLTFGASTGPGYWDQHYLSWSMLLGVGFPPVDGLSPLVLGIMAVALGAPGLMLLGGGLVLLLHHKKYSEYQSIN

SEQ ID NO: 35725 - protein, 325 aa, Homo sapiens
  Payload ID: 7063
  Gene Symbol: GLMP
  Gene Name: glycosylated lysosomal membrane protein
  Uniprot ID: Q8WWB7
  ENSP ID: ENSP00000480936
MVATNTPHSTLSVNWSLLLSPEPDGGLMVLPKDSIQFSSALVFTRLLEFDSTNVSDTAAKPLGRPYPPYSLADFSWNNITDSLDPATLSATFQGHPMNDPTRTFANGSLAFRVQAFSRSSRPAQPPRLLHTADTCQLEVALIGASPRGNRSLFGLEVATLGQGPDCPSMQEQHSIDDEYAPAVFQLDQLLWGSLPSGFAQWRPVAYSQKPGGRESALPCQASPLHPALAYSLPQSPIVRAFFGSQNNFCAFNLTFGASTGPGYWDQHYLSWSMLLGVGFPPVDGLSPLVLGIMAVALGAPGLMLLGGGLVLLLHHKKYSEYQSIN

SEQ ID NO: 35726 - protein, 331 aa, Homo sapiens
  Payload ID: 7063
  Gene Symbol: GLMP
  Gene Name: glycosylated lysosomal membrane protein
  ENSP ID: ENSP00000483691
MRGSVECTWGWGHCAPSPLLLWTLLLFAAPFGLLGEKTRQVSLEVIPNWLGPLQNLLHIRAVGTNSTLHYVWSSLGPLAVVMVATNTPHSTLSVNWSLLLSPEPDGGLMVLPKDSIQFSSALVFTRLLEFDSTNVSDTAAKPLGRPYPPYSLADFSWNNITDSLDPATLSATFQGHPMNDPTRTFANGSLAFRVQAFSRSSRPAQPPRLLHTADTCQLEVALIGASPRGNRSLFGLEVATLGQGPDCPSMQEQHSIDDEYAPAVFQVDAPGCGLPSSGRLVPTSPGHHGSGPGCPRAHAARGRLGSAAAPQEVLRVPVHKLRPALWREGHY

SEQ ID NO: 35727 - protein, 621 aa, Homo sapiens
  Payload ID: 7064
  Gene Symbol: GPAA1
  Gene Name: glycosylphosphatidylinositol anchor attachment 1
  Uniprot ID: O43292
  ENSP ID: ENSP00000347206
MGLLSDPVRRRALARLVLRLNAPLCVLSYVAGIAWFLALVFPPLTQRTYMSENAMGSTMVEEQFAGGDRARAFARDFAAHRKKSGALPVAWLERTMRSVGLEVYTQSFSRKLPFPDETHERYMVSGTNVYGILRAPRAASTESLVLTVPCGSDSTNSQAVGLLLALAAHFRGQIYWAKDIVFLVTEHDLLGTEAWLEAYHDVNVTGMQSSPLQGRAGAIQAAVALELSSDVVTSLDVAVEGLNGQLPNLDLLNLFQTFCQKGGLLCTLQGKLQPEDWTSLDGPLQGLQTLLLMVLRQASGRPHGSHGLFLRYRVEALTLRGINSFRQYKYDLVAVGKALEGMFRKLNHLLERLHQSFFLYLLPGLSRFVSIGLYMPAVGFLLLVLGLKALELWMQLHEAGMGLEEPGGAPGPSVPLPPSQGVGLASLVAPLLISQAMGLALYVLPVLGQHVATQHFPVAEAEAVVLTLLAIYAAGLALPHNTHRVVSTQAPDRGWMALKLVALIYLALQLGCIALTNFSLGFLLATTMVPTAALAKPHGPRTLYAALLVLTSPAATLLGSLFLWRELQEAPLSLAEGWQLFLAALAQGVLEHHTYGALLFPLLSLGLYPCWLLFWNVLFWK

SEQ ID NO: 35728 - protein, 561 aa, Homo sapiens
  Payload ID: 7064
  Gene Symbol: GPAA1
  Gene Name: glycosylphosphatidylinositol anchor attachment 1
  Uniprot ID: O43292
  ENSP ID: ENSP00000354316
MGLLSDPVRRRALARLVLRLNAPLWALPVAWLERTMRSVGLEVYTQSFSRKLPFPDETHERYMVSGTNVYGILRAPRAASTESLVLTVPCGSDSTNSQAVGLLLALAAHFRGQIYWAKDIVFLVTEHDLLGTEAWLEAYHDVNVTGMQSSPLQGRAGAIQAAVALELSSDVVTSLDVAVEGLNGQLPNLDLLNLFQTFCQKGGLLCTLQGKLQPEDWTSLDGPLQGLQTLLLMVLRQASGRPHGSHGLFLRYRVEALTLRGINSFRQYKYDLVAVGKALEGMFRKLNHLLERLHQSFFLYLLPGLSRFVSIGLYMPAVGFLLLVLGLKALELWMQLHEAGMGLEEPGGAPGPSVPLPPSQGVGLASLVAPLLISQAMGLALYVLPVLGQHVATQHFPVAEAEAVVLTLLAIYAAGLALPHNTHRVVSTQAPDRGWMALKLVALIYLALQLGCIALTNFSLGFLLATTMVPTAALAKPHGPRTLYAALLVLTSPAATLLGSLFLWRELQEAPLSLAEGWQLFLAALAQGVLEHHTYGALLFPLLSLGLYPCWLLFWNVLFWK

SEQ ID NO: 35729 - protein, 98 aa, Homo sapiens
  Payload ID: 7064
  Gene Symbol: GPAA1
  Gene Name: glycosylphosphatidylinositol anchor attachment 1
  ENSP ID: ENSP00000431233
MGLLSDPVRRRALARLVLRLNAPLWALPVAWLERTMRWCRAPTCTASCGPRVLPAPSRLCSPCPVALTLPTARLWGCCWHWLPTSGGRFIGPKISSSW

SEQ ID NO: 35730 - protein, 273 aa, Homo sapiens
  Payload ID: 7064
  Gene Symbol: GPAA1
  Gene Name: glycosylphosphatidylinositol anchor attachment 1
  ENSP ID: ENSP00000434485
MGLLSDPVRRRALARLVLRLNAPLCVLSYVAGIAWFLALVFPPLTQRTYMSENAMGSTMVEEQFAGGDRARAFARDFAAHRKKSGQAVGLLLALAAHFRGQIYWAKDIVFLVTEHDLLGTEAWLEAYHDVNVTGMQSSPLQGRAGAIQAAVALELSSDVVTSLDVAVEGLNGQLPNLDLLNLFQTFCQKGGLLCTLQGKLQPEDWTSLDGPLQGLQTLLLMVLRQASGRPHGSHGLFLRYRVEALTLRGINSFRQYKYDLVAVGKALEGMFRK

SEQ ID NO: 35731 - protein, 260 aa, Homo sapiens [sequence omitted]

SEQ ID NO: 35732 - protein, 158 aa, Homo sapiens
  Payload ID: 7064
  Gene Symbol: GPAA1
  Gene Name: glycosylphosphatidylinositol anchor attachment 1
  ENSP ID: ENSP00000435024
MGLLSDPVRRRALARLVLRLNAPLCVLSYVAGIAWFLALVFPPLTQRTYMSENAMGSTMVEEQFAGGDRARAFARDFAAHRKKSGALPVAWLERTMRWCRAPTCTASCGPRVLPAPSRLCSPCPVALTLPTARLWGCCWHWLPTSGGRFIGPKISSSW

SEQ ID NO: 35733 - protein, 234 aa, Homo sapiens
  Payload ID: 7064
  Gene Symbol: GPAA1
  Gene Name: glycosylphosphatidylinositol anchor attachment 1
  ENSP ID: ENSP00000435119
MGLLSDPVRRRALARLVLRLNAPLCVLSYVAGIAWFLALVFPPLTQRTYMSENAMGSTMVEEQFAGGDRARAFARDFAAHRKKSGALPVAWLERTMRSVGLEVYTQSFSRKLPFPDETHERYMVSGTNVYGILRAPRAASTESLVLTVPCGSDSTNSQAVGLLLALAAHFRGQIYWAKDIVFLVTEHDLLGTEAWLEAYHDVNVTALIHLLLQACSRLPCRAELGPFRQPWPWS

SEQ ID NO: 35734 - protein, 81 aa, Homo sapiens
  Payload ID: 7064
  Gene Symbol: GPAA1
  Gene Name: glycosylphosphatidylinositol anchor attachment 1
  ENSP ID: ENSP00000435132
MSENAMGSTMVEEQFAGGDRARAFARDFAAHRKKSGALPVAWLERTMRSVGLEVYTQSFSRKLPFPDETHERYMVSGTNVY

SEQ ID NO: 35735 - protein, 184 aa, Homo sapiens
  Payload ID: 7065
  Gene Symbol: GPIHBP1
  Gene Name: glycosylphosphatidylinositol anchored high density lipoprotein binding protein 1
  Uniprot ID: Q8IV16
  ENSP ID: ENSP00000480053
MKALGAVLLALLLFGRPGRGQTQQEEEEEDEDHGPDDYDEEDEDEVEEEETNRLPGGRSRVLLRCYTCKSLPRDERCNLTQNCSHGQTCTTLIAHGNTESGLLTTHSTWCTDSCQPITKTVEGTQVTMTCCQSSLCNVPPWQSSRVQDPTGKGAGGPRGSSETVGAALLLNLLAGLGAMGARRP

SEQ ID NO: 35736 - protein, 158 aa, Homo sapiens
  Payload ID: 7066
  Gene Symbol: GML
  Gene Name: glycosylphosphatidylinositol anchored molecule like
  Uniprot ID: Q99445
  ENSP ID: ENSP00000220940
MLLFALLLAMELPLVAASATMRAQWTYSLRCHDCAVINDFNCPNIRVCPYHIRRCMTISIRINSRELLVYKNCTNNCTFVYAAEQPPEAPGKIFKTNSFYWVCCCNSMVCNAGGPTNLERDMLPDEVTEEELPEGTVRLGVSKLLLSFASIIVSNILP

SEQ ID NO: 35737 - protein, 118 aa, Homo sapiens
  Payload ID: 7066
  Gene Symbol: GML
  Gene Name: glycosylphosphatidylinositol anchored molecule like
  ENSP ID: ENSP00000430799
MLLFALLLAMELPLVAASATMRAQWTYSLRCHDCAVINDFNCPNIRVCPYHIRRCMTISIQLSSGDRAAVCPGPHPTFFQPGAWIPTQVTDSKHQPLPAHLTRRHPLHGPGNILPSAI

SEQ ID NO: 35738 - protein, 840 aa, Homo sapiens
  Payload ID: 7067
  Gene Symbol: GPLD1
  Gene Name: glycosylphosphatidylinositol specific phospholipase D1
  Uniprot ID: P80108
  ENSP ID: ENSP00000230036
MSAFRLWPGLLIMLGSLCHRGSPCGLSTHVEIGHRALEFLQLHNGRVNYRELLLEHQDAYQAGIVFPDCFYPSICKGGKFHDVSESTHWTPFLNASVHYIRENYPLPWEKDTEKLVAFLFGITSHMAADVSWHSLGLEQGFLRTMGAIDFHGSYSEAHSAGDFGGDVLSQFEFNFNYLARRWYVPVKDLLGIYEKLYGRKVITENVIVDCSHIQFLEMYGEMLAVSKLYPTYSTKSPFLVEQFQEYFLGGLDDMAFWSTNIYHLTSFMLENGTSDCNLPENPLFIACGGQQNHTQGSKMQKNDFHRNLTTSLTESVDRNINYTERGVFFSVNSWTPDSMSFIYKALERNIRTMFIGGSQLSQKHVSSPLASYFLSFPYARLGWAMTSADLNQDGHGDLVVGAPGYSRPGHIHIGRVYLIYGNDLGLPPVDLDLDKEAHRILEGFQPSGRFGSALAVLDFNVDGVPDLAVGAPSVGSEQLTYKGAVYVYFGSKQGGMSSSPNITISCQDIYCNLGWTLLAADVNGDSEPDLVIGSPFAPGGGKQKGIVAAFYSGPSLSDKEKLNVEAANWTVRGEEDFSWFGYSLHGVTVDNRTLLLVGSPTWKNASRLGHLLHIRDEKKSLGRVYGYFPPNGQSWFTISGDKAMGKLGTSLSSGHVLMNGTLKQVLLVGAPTYDDVSKVAFLTVTLHQGGATRMYALTSDAQPLLLSTFSGDRRFSRFGGVLHLSDLDDDGLDEIIMAAPLRIADVTSGLIGGEDGRVYVYNGKETTLGDMTGKCKSWITPCPEEKAQYVLISPEASSRFGSSLITVRSKAKNQVVIAAGRSSLGARLSGALHVYSLGSD

SEQ ID NO: 35739 - protein, 266 aa, Homo sapiens
  Payload ID: 7068
  Gene Symbol: GLT1D1
  Gene Name: glycosyltransferase 1 domain containing 1
  Uniprot ID: Q96MS3
  ENSP ID: ENSP00000281703
MRLLFLAVLRPHTGNAVTAQRVRAHLEAAGHVCVLKDAFDFESRSEIANLILAENCEAALALHLYRGGRLLQGHRIPFGVIFGGTDVNEDANQAEKNTVMGRVLEEARFAVAFTESMKEMAQAQWVDPVFTREVKAKVKRAAGVRLIGEMPQEDLHAVVKNCFAVVNSSVSEGMSAAILEAMDLEVPVLARNIPGNAAVVKHEVTGLLFSNPQEFVHLAKRLVSDPALEKEIVVNGREYVRMYHSWQVERDTYQQLIRKLEGSTED

SEQ ID NO: 35740 - protein, 346 aa, Homo sapiens
  Payload ID: 7068
  Gene Symbol: GLT1D1
  Gene Name: glycosyltransferase 1 domain containing 1
  Uniprot ID: Q96MS3
  ENSP ID: ENSP00000394692
MRLLFLAVLRPHTGNAVTAQRVRAHLEAAGHVCVLKDAFDFESRSEIANLILAENCEAALALHLYRGGRLLQGHRIPFGVIFGGTDVNEDANQAEKNTVMGRVLEEARFAVAFTESMKEMAQAQWPHAKGKVYVQSQGIATTPNAAFNWNTFLQRSEINQSADNLHIFLLICGLRQVKDPLYLVDAFSAWHQEEPNVHLVIVGPEVDPVFTREVKAKVKRAAGVRLIGEMPQEDLHAVVKNCFAVVNSSVSEGMSAAILEAMDLEVPVLARNIPGNAAVVKHEVTGLLFSNPQEFVHLAKRLVSDPALEKEIVVNGREYVRMYHSWQVERDTYQQLIRKLEGSTED

SEQ ID NO: 35741 - protein, 120 aa, Homo sapiens
  Payload ID: 7068
  Gene Symbol: GLT1D1
  Gene Name: glycosyltransferase 1 domain containing 1
  ENSP ID: ENSP00000399374
VLRPHTGNAVTAQRVRAHLEAAGHVCVLKDAFDFESRSEIANLILAENCEAALALHLYRGGRLLQGHRIPFGVIFGGTDVNEDANQAEKNTVMGRVLEEARFAVAFTESMKEMAQAQWVC

SEQ ID NO: 35742 - protein, 152 aa, Homo sapiens
  Payload ID: 7068
  Gene Symbol: GLT1D1
  Gene Name: glycosyltransferase 1 domain containing 1
  Uniprot ID: Q96MS3
  ENSP ID: ENSP00000411992
MRLLFLAVLRPHTGNAVTAQRVRAHLEAAGHVCVLKDAFDFESRSEIANLILAENCEAALALHLYRGGRLLQGHRIPFGVIFGGTDVNEDANQAEKNTVMGRVLEEASRMLRVRSMSRVKELQQHQTPLLTGIPFFNALRLTKVLIICTYFF

SEQ ID NO: 35743 - protein, 351 aa, Homo sapiens
  Payload ID: 7068
  Gene Symbol: GLT1D1
  Gene Name: glycosyltransferase 1 domain containing 1
  ENSP ID: ENSP00000438158
MLTARCLSDDTLAHLEAAGHVCVLKDAFDFESRSEIANLILAENCEAALALHLYRGGRLLQGHRIPFGVIFGGTDVNEDANQAEKNTVMGRVLEEARFAVAFTESMKEMAQAQWKARQISLAVTSAVPVQPHAKGKVYVQSQGIATTPNAAFNWNTFLQRSEINQSADNLHIFLLICGLRQVKDPLYLVDAFSAWHQEEPNVHLVIVGPEVDPVFTREVKAKVKRAAGVRLIGEMPQEDLHAVVKNCFAVVNSSVSEGMSAAILEAMDLEVPVLARNIPGNAAVVKHEVTGLLFSNPQEFVHLAKRLVSDPALEKEIVVNGREYVRMYHSWQVERDTYQQLIRKLEGSTED

SEQ ID NO: 35744 - protein, 152 aa, Homo sapiens; identical to SEQ ID NO: 35742
  Payload ID: 7068
  Gene Symbol: GLT1D1
  Gene Name: glycosyltransferase 1 domain containing 1
  Uniprot ID: Q96MS3
  ENSP ID: ENSP00000445064

SEQ ID NO: 35745 - protein, 276 aa, Homo sapiens
  Payload ID: 7069
  Gene Symbol: GLT6D1
  Gene Name: glycosyltransferase 6 domain containing 1
  Uniprot ID: Q7Z4J2
  ENSP ID: ENSP00000360829
MNSKRMLLLVLFAFSLMLVERYFRNHQVEELRLSDWFHPRKRPDVITKTDWLAPVLWEGTFDRRVLEKHYRRRNITVGLAVFATGRFAEEYLRPFLHSANKHFMTGYRVIFYIMVDAFFKLPDIEPSPLRTFKAFKVGTERWWLDGPLVHVKSLGEHIASHIQDEVDFLFSMAANQVFQNEFGVETLGPLVAQLHAWWYFRNTKNFPYERRPTSAACIPFGQGDFYYGNLMVGGTPHNILDFIKEYLNGVIHDIKNGLNSTYEKHLNKYFYLNKPT

SEQ ID NO: 35746 - protein, 307 aa, Homo sapiens
  Payload ID: 7069
  Gene Symbol: GLT6D1
  Gene Name: glycosyltransferase 6 domain containing 1
  ENSP ID: ENSP00000483037
MNSKRMLLLVLFAFSLMLVERYFRNHQVEELRLSDWFHPRKRPDVITKTDWLAPVLWEGTFDRRVLEKHYRRRNITVGLAVFATGRFAEEYLRPFLHSANKHFMTGYRVIFYIMVDAFFKLPDIEPSPLRTFKAFKVGTERWWLDGPLVHVKSLGEHIASHIQDEVDFLFSMAANQVFQNEFGVETLGPLVAQLHAWWYFRNTKNFPYERRPTSAACIPFGQGDFYYGNLMVGGTPHNILDFIKEYLNGVIHDIKNGLNSTYEKHLNKYFYLNKPTLLSPAYSWDLAFSPPPQIQYVKVAHDSQRKL

SEQ ID NO: 35747 - protein, 371 aa, Homo sapiens
  Payload ID: 7070
  Gene Symbol: GLT8D1
  Gene Name: glycosyltransferase 8 domain containing 1
  Uniprot ID: Q68CQ7
  ENSP ID: ENSP00000266014
MSFRKVNIIILVLAVALFLLVLHHNFLSLSSLLRNEVTDSGIVGPQPIDFVPNALRHAVDGRQEEIPVVIAASEDRLGGAIAAINSIQHNTRSNVIFYIVTLNNTADHLRSWLNSDSLKSIRYKIVNFDPKLLEGKVKEDPDQGESMKPLTFARFYLPILVPSAKKAIYMDDDVIVQGDILALYNTALKPGHAAAFSEDCDSASTKVVIRGAGNQYNYIGYLDYKKERIRKLSMKASTCSFNPGVFVANLTEWKRQNITNQLEKWMKLNVEEGLYSRTLAGSITTPPLLIVFYQQHSTIDPMWNVRHLGSSAGKRYSPQFVKAAKLLHWNGHLKPWGRTASYTDVWEKWYIPDPTGKFNLIRRYTEISNIK

SEQ ID NO: 35748 - protein, 371 aa, Homo sapiens; identical to SEQ ID NO: 35747
  Payload ID: 7070
  Gene Symbol: GLT8D1
  Gene Name: glycosyltransferase 8 domain containing 1
  Uniprot ID: Q68CQ7
  ENSP ID: ENSP00000378263

SEQ ID NO: 35749 - protein, 226 aa, Homo sapiens
  Payload ID: 7070
  Gene Symbol: GLT8D1
  Gene Name: glycosyltransferase 8 domain containing 1
  ENSP ID: ENSP00000385730
MDDDVIVQGDILALYNTALKPGHAAAFSEDCDSASTKVVIRGAGNQYNYIGYLDYKKERIRKLSMKASTCSFNPGVFVANLTEWKRQNITNQLEKWMKLNVEEGLYSRTLAGSITTPPLLIVFYQQHSTIDPMWNPPPWFQCWKTIFTSVCKGCQVTHWNGHLKPWGRTASYTCLGKMVYSRPNRQIQPNPKIYRDLKHKVKQNLNCKQAFLRKSWKIACVGSNSC

SEQ ID NO: 35750 - protein, 116 aa, Homo sapiens
  Payload ID: 7070
  Gene Symbol: GLT8D1
  Gene Name: glycosyltransferase 8 domain containing 1
  ENSP ID: ENSP00000417551
MSFRKVNIIILVLAVALFLLVLHHNFLSLSSLLRNEVTDSGIVGPQPIDFVPNALRHAVDGRQEEIPVVIAASEDRLGGAIAAINSIQHNTRSNVIFYIVTLNNTADHLRSWLNSD

SEQ ID NO: 35751 - protein, 174 aa, Homo sapiens
  Payload ID: 7070
  Gene Symbol: GLT8D1
  Gene Name: glycosyltransferase 8 domain containing 1
  ENSP ID: ENSP00000417713
MSFRKVNIIILVLAVALFLLVLHHNFLSLSSLLRNEVTDSGIVGPQPIDFVPNALRHAVDGRQEEIPVVIAASEDRLGGAIAAINSIQHNTRSNVIFYIVTLNNTADHLRSWLNSDSLKSIRYKIVNFDPKLLEGKVKEDPDQGESMKPLTFARFYLPILVPSAKKAIYMDDDV

SEQ ID NO: 35752 - protein, 30 aa, Homo sapiens
  Payload ID: 7070
  Gene Symbol: GLT8D1
  Gene Name: glycosyltransferase 8 domain containing 1
  ENSP ID: ENSP00000417858
MSFRKVNIIILVLAVALFLLVLHHNFLSLS

SEQ ID NO: 35753 - protein, 23 aa, Homo sapiens
  Payload ID: 7070
  Gene Symbol: GLT8D1
  Gene Name: glycosyltransferase 8 domain containing 1
  ENSP ID: ENSP00000418300
VKEDPDQGESMKPVIFLPFTIQH

SEQ ID NO: 35754 - protein, 371 aa, Homo sapiens; identical to SEQ ID NO: 35747
  Payload ID: 7070
  Gene Symbol: GLT8D1
  Gene Name: glycosyltransferase 8 domain containing 1
  Uniprot ID: Q68CQ7
  ENSP ID: ENSP00000418853

SEQ ID NO: 35755 - protein, 63 aa, Homo sapiens
  Payload ID: 7070
  Gene Symbol: GLT8D1
  Gene Name: glycosyltransferase 8 domain containing 1
  ENSP ID: ENSP00000419094
MSFRKVNIIILVLAVALFLLVLHHNFLSLSSLLRNEVTDSGIVGPQPIDFVPNALRHAVDGRQ

SEQ ID NO: 35756 - protein, 371 aa, Homo sapiens; identical to SEQ ID NO: 35747
  Payload ID: 7070
  Gene Symbol: GLT8D1
  Gene Name: glycosyltransferase 8 domain containing 1
  Uniprot ID: Q68CQ7
  ENSP ID: ENSP00000419612

SEQ ID NO: 35757 - protein, 89 aa, Homo sapiens
  Payload ID: 7070
  Gene Symbol: GLT8D1
  Gene Name: glycosyltransferase 8 domain containing 1
  ENSP ID: ENSP00000420286
MSFRKVNIIILVLAVALFLLVLHHNFLSLSSLLRNEVTDSGIVGPQPIDFVPNALRHAVDGRQEEIPVVIAASEDRLGGAIAAINSIQH

SEQ ID NO: 35758 - protein, 62 aa, Homo sapiens
  Payload ID: 7070
  Gene Symbol: GLT8D1
  Gene Name: glycosyltransferase 8 domain containing 1
  ENSP ID: ENSP00000420462
MSFRKVNIIILVLAVALFLLVLHHNFLSLSSLLRNEVTDSGIVGPQPIDFVPNALRHAVDGR

SEQ ID NO: 35759 - protein, 349 aa, Homo sapiens
  Payload ID: 7071
  Gene Symbol: GLT8D2
  Gene Name: glycosyltransferase 8 domain containing 2
  Uniprot ID: Q9H1C3
  ENSP ID: ENSP00000354053
MALLRKINQVLLFLLIVTLCVILYKKVHKGTVPKNDADDESETPEELEEEIPVVICAAAGRMGATMAAINSIYSNTDANILFYVVGLRNTLTRIRKWIEHSKLREINFKIVEFNPMVLKGKIRPDSSRPELLQPLNFVRFYLPLLIHQHEKVIYLDDDVIVQGDIQELYDTTLALGHAAAFSDDCDLPSAQDINRLVGLQNTYMGYLDYRKKAIKDLGISPSTCSFNPGVIVANMTEWKHQRITKQLEKWMQKNVEENLYSSSLGGGVATSPMLIVFHGKYSTINPLWHIRHLGWNPDARYSEHFLQEAKLLHWNGRHKPWDFPSVHNDLWESWFVPDPAGIFKLNHHS

SEQ ID NO: 35760 - protein, 66 aa, Homo sapiens
  Payload ID: 7071
  Gene Symbol: GLT8D2
  Gene Name: glycosyltransferase 8 domain containing 2
  ENSP ID: ENSP00000446810
MGATMAAINSIYSNTDANILFYVVGLRNTLTRIRKWIEHSKLREINFKIVEFNPMVLKGKIRPDSS

SEQ ID NO: 35761 - protein, 349 aa, Homo sapiens; identical to SEQ ID NO: 35759
  Payload ID: 7071
  Gene Symbol: GLT8D2
  Gene Name: glycosyltransferase 8 domain containing 2
  Uniprot ID: Q9H1C3
  ENSP ID: ENSP00000447450

SEQ ID NO: 35762 - protein, 83 aa, Homo sapiens
  Payload ID: 7071
  Gene Symbol: GLT8D2
  Gene Name: glycosyltransferase 8 domain containing 2
  ENSP ID: ENSP00000448065
MALLRKINQVLLFLLIVTLCVILYKKVHKGTVPKNDAESHSVAPAQIQWHNSSSLQPRPPGLKQSSGLSTPGSWNYRIPVLLG

SEQ ID NO: 35763 - protein, 349 aa, Homo sapiens; identical to SEQ ID NO: 35759
  Payload ID: 7071
  Gene Symbol: GLT8D2
  Gene Name: glycosyltransferase 8 domain containing 2
  Uniprot ID: Q9H1C3
  ENSP ID: ENSP00000449750

SEQ ID NO: 35764 - protein, 721 aa, Homo sapiens
  Payload ID: 7072
  Gene Symbol: GYLTL1B
  Gene Name: glycosyltransferase-like 1B
  Uniprot ID: Q8N3Y3
  ENSP ID: ENSP00000324570
MLPRGRPRALGAAALLLLLLLLGFLLFGGDLGCERREPGGRAGAPGCFPGPLMPRVPPDGRLRRAAALDGDPGAGPGDHNRSDCGPQPPPPPKCELLHVAIVCAGHNSSRDVITLVKSMLFYRKNPLHLHLVTDAVARNILETLFHTWMVPAVRVSFYHADQLKPQVSWIPNKHYSGLYGLMKLVLPSALPAELARVIVLDTDVTFASDISELWALFAHFSDTQAIGLVENQSDWYLGNLWKNHRPWPALGRGFNTGVILLRLDRLRQAGWEQMWRLTARRELLSLPATSLADQDIFNAVIKEHPGLVQRLPCVWNVQLSDHTLAERCYSEASDLKVIHWNSPKKLRVKNKHVEFFRNFYLTFLEYDGNLLRRELFVCPSQPPPGAEQLQQALAQLDEEDPCFEFRQQQLTVHRVHVTFLPHEPPPPRPHDVTLVAQLSMDRLQMLEALCRHWPGPMSLALYLTDAEAQQFLHFVEASPVLAARQDVAYHVVYREGPLYPVNQLRNVALAQALTPYVFLSDIDFLPAYSLYDYLRASIEQLGLGSRRKAALVVPAFETLRYRFSFPHSKVELLALLDAGTLYTFRYHEWPRGHAPTDYARWREAQAPYRVQWAANYEPYVVVPRDCPRYDPRFVGFGWNKVAHIVELDAQEYELLVLPEAFTIHLPHAPSLDISRFRSSPTYRDCLQALKDEFHQDLSRHHGAAALKYLPALQQPQSPARG

SEQ ID NO: 35765 - protein, 721 aa, Homo sapiens; identical to SEQ ID NO: 35764
  Payload ID: 7072
  Gene Symbol: GYLTL1B
  Gene Name: glycosyltransferase-like 1B
  Uniprot ID: Q8N3Y3
  ENSP ID: ENSP00000385235

SEQ ID NO: 35766 - protein, 690 aa, Homo sapiens
  Payload ID: 7072
  Gene Symbol: GYLTL1B
  Gene Name: glycosyltransferase-like 1B
  ENSP ID: ENSP00000431932
MLPRGRPRALGAAALLLLLLLLGFLLFDGRLRRAAALDGDPGAGPGDHNRSDCGPQPPPPPKCELLHVAIVCAGHNSSRDVITLVKSMLFYRKNPLHLHLVTDAVARNILETLFHTWMVPAVRVSFYHADQLKPQVSWIPNKHYSGLYGLMKLVLPSALPAELARVIVLDTDVTFASDISELWALFAHFSDTQAIGLVENQSDWYLGNLWKNHRPWPALGRGFNTGVILLRLDRLRQAGWEQMWRLTARRELLSLPATSLADQDIFNAVIKEHPGLVQRLPCVWNVQLSDHTLAERCYSEASDLKVIHWNSPKKLRVKNKHVEFFRNFYLTFLEYDGNLLRRELFVCPSQPPPGAEQLQQALAQLDEEDPCFEFRQQQLTVHRVHVTFLPHEPPPPRPHDVTLVAQLSMDRLQMLEALCRHWPGPMSLALYLTDAEAQQFLHFVEASPVLAARQDVAYHVVYREGPLYPVNQLRNVALAQALTPYVFLSDIDFLPAYSLYDYLRASIEQLGLGSRRKAALVVPAFETLRYRFSFPHSKVELLALLDAGTLYTFRYHEWPRGHAPTDYARWREAQAPYRVQWAANYEPYVVVPRDCPRYDPRFVGFGWNKVAHIVELDAQEYELLVLPEAFTIHLPHAPSLDISRFRSSPTYRDCLQALKDEFHQDLSRHHGAAALKYLPALQQPQSPARG

SEQ ID NO: 35767 - protein, 721 aa, Homo sapiens; identical to SEQ ID NO: 35764
  Payload ID: 7072
  Gene Symbol: GYLTL1B
  Gene Name: glycosyltransferase-like 1B
  Uniprot ID: Q8N3Y3
  ENSP ID: ENSP00000432869

SEQ ID NO: 35768 - protein, 158 aa, Homo sapiens
  Payload ID: 7072
  Gene Symbol: GYLTL1B
  Gene Name: glycosyltransferase-like 1B
  ENSP ID: ENSP00000433328
WNSPKKLRVKNKHVEFFRNFYLTFLEYDGNLLRRELFVCPSQPPPGAEQLQQALAQLDEEDPCFEFRQQQLTVHRVHVTFLPHEPPPPRPHDVTLVAQLSMDRTWPTMWCTVRGPYTPSTSFATWPWPRPSRLTSSSVTLTSCLPILSTTTSGPPLSS

SEQ ID NO: 35769 - protein, 109 aa, Homo sapiens
  Payload ID: 7072
  Gene Symbol: GYLTL1B
  Gene Name: glycosyltransferase-like 1B
  ENSP ID: ENSP00000434325
  MOD_RES (1)..(1): Any amino acid
XLLDAGTLYTFRNMSSWCCPRPSPSICPTLQAWTSPASAPAPPIVTASRPSRTNSTRTCPATMGLLPSNTSQPCSSPRALPEAEAGPALPLILALGRHQGNLPSAIPAI

SEQ ID NO: 35770 - protein, 257 aa, Homo sapiens
  Payload ID: 7072
  Gene Symbol: GYLTL1B
  Gene Name: glycosyltransferase-like 1B
  ENSP ID: ENSP00000445044
MWCTVRAPIPRQPASQRGLGQALTPYVFLSDIDFLPAYSLYDYLRASIEQLGLGSRRKAALVVPAFETLRYRFSFPHSKVELLALLDAGTLYTFRYHEWPRGHAPTDYARWREAQAPYRVQWAANYEPYVVVPRDCPRYDPRFVGFGWNKVAHIVELDAQEYELLVLPEAFTIHLPHAPSLDISASAPAPPIVTASRPSRTNSTRTCPATMGLLPSNTSQPCSSPRALPEAEAGPALPLILALGRHQGNLPSAIPAI

SEQ ID NO: 35771 - protein, 376 aa, Homo sapiens
  Payload ID: 7073
  Gene Symbol: GTDC1
  Gene Name: glycosyltransferase-like domain containing 1
  Uniprot ID: Q4AE62
  ENSP ID: ENSP00000241391
MSILIIEAFYGGSHKQLVDLLQEELGDCVVYTLPAKKWHWRARTSALYFSQTIPISEHYRTLFASSVLNLTELAALRPDLGKLKKILYFHENQLIYPVKKCQERDFQYGYNQILSCLVADVVVFNSVFNMESFLTSMGKFMKLIPDHRPKDLESIIRPKCQVIYFPIRFPDVSRFMPKHKTTHLKKMLGLKGNGGAVLSMALPFQPEQRDSEDLLKNFNSECDTHCGLDTARQEYLGNSLRQESDLKKSTSSDNSSSHHGENKQNLTVDPCDILGGVDNQQRLLHIVWPHRWEHDKDPESFFKVLMHLKDLGLNFHVSVLGETFTDVPGWKLCTVGVTHFVLKIWFIPKYFQLNICILHLNSFQKGSRISARDQIL

SEQ ID NO: 35772 - protein, 458 aa, Homo sapiens
  Payload ID: 7073
  Gene Symbol: GTDC1
  Gene Name: glycosyltransferase-like domain containing 1
  Uniprot ID: Q4AE62
  ENSP ID: ENSP00000339750
MSILIIEAFYGGSHKQLVDLLQEELGDCVVYTLPAKKWHWRARTSALYFSQTIPISEHYRTLFASSVLNLTELAALRPDLGKLKKILYFHENQLIYPVKKCQERDFQYGYNQILSCLVADVVVFNSVFNMESFLTSMGKFMKLIPDHRPKDLESIIRPKCQVIYFPIRFPDVSRFMPKHKTTHLKKMLGLKGNGGAVLSMALPFQPEQRDSEDLLKNFNSECDTHCGLDTARQEYLGNSLRQESDLKKSTSSDNSSSHHGENKQNLTVDPCDILGGVDNQQRLLHIVWPHRWEHDKDPESFFKVLMHLKDLGLNFHVSVLGETFTDVPDIFSEAKKALGSSVLHWGYLPSKDDYFQVLCMADVVISTAKHEFFGVAMLEAVYCGCYPLCPKDLVYPEIFPAEYLYSTPEQLSKRLQNFCKRPDIIRKHLYKGEIAPFSWAALHGKFRSLLTTEPREDL

SEQ ID NO: 35773 - protein, 373 aa, Homo sapiens
  Payload ID: 7073
  Gene Symbol: GTDC1
  Gene Name: glycosyltransferase-like domain containing 1
  Uniprot ID: Q4AE62
  ENSP ID: ENSP00000376606
MSILIIEAFYGGSHKQLVDLLQEELGDCVVYTLPAKKWHWRARTSALYFSQTIPISEHYRTLFASSVLNLTELAALRPDLGKLKKILYFHENQLIYPVKKCQERDFQYGYNQILSCLVADVVVFNSVFNMESFLTSMGKFMKLIPDHRPKDLESIIRPKCQVIYFPIRFPDVSRFMPKHKTTHLKKMLGLKGNGGAVLSMALPFQPEQRDSEDLLKNFNSECDTHCGLDTARQEYLGNSLRQESDLKKSTSSDNSSSHHGENKQNLTVDPCDILGGVDNQQRLLHIVWPHRWLEAVYCGCYPLCPKDLVYPEIFPAEYLYSTPEQLSKRLQNFCKRPDIIRKHLYKGEIAPFSWAALHGKFRSLLTTEPREDL

SEQ ID NO: 35774 - protein, 458 aa, Homo sapiens; identical to SEQ ID NO: 35772
  Payload ID: 7073
  Gene Symbol: GTDC1
  Gene Name: glycosyltransferase-like domain containing 1
  Uniprot ID: Q4AE62
  ENSP ID: ENSP00000376608

SEQ ID NO: 35775 - protein, 376 aa, Homo sapiens; identical to SEQ ID NO: 35771
  Payload ID: 7073
  Gene Symbol: GTDC1
  Gene Name: glycosyltransferase-like domain containing 1
  Uniprot ID: Q4AE62
  ENSP ID: ENSP00000376610

SEQ ID NO: 35776 - protein, 458 aa, Homo sapiens; identical to SEQ ID NO: 35772
  Payload ID: 7073
  Gene Symbol: GTDC1
  Gene Name: glycosyltransferase-like domain containing 1
  Uniprot ID: Q4AE62
  ENSP ID: ENSP00000386581

SEQ ID NO: 35777 - protein, 340 aa, Homo sapiens
  Payload ID: 7073
  Gene Symbol: GTDC1
  Gene Name: glycosyltransferase-like domain containing 1
  ENSP ID: ENSP00000386691
MSILIIEAFYGGSHKQLVDLLQEELGDCVVYTLPAKKWHWRARTSALYFSQTIPISEHYRTLFASSVLNLTELAALRPDLGKLKKILYFHENQLIYPVKKCQERDFQYGYNQILSCLVADVVVFNSVFNMESFLTSMGKFMKLIPDHRPKDLESIIRPKCQVIYFPIRFPDVSREHDKDPESFFKVLMHLKDLGLNFHVSVLGETFTDVPDIFSEAKKALGSSVLHWGYLPSKDDYFQVLCMADVVISTAKHEFFGVAMLEAVYCGCYPLCPKDLVYPEIFPAEYLYSTPEQLSKRLQNFCKRPDIIRKHLYKGEIAPFSWAALHGKFRSLLTTEPREDL

SEQ ID NO: 35778 - protein, 66 aa, Homo sapiens
  Payload ID: 7073
  Gene Symbol: GTDC1
  Gene Name: glycosyltransferase-like domain containing 1
  ENSP ID: ENSP00000395932
MSILIIEAFYGGSHKQLVDLLQEELGDCVVYTLPAKKWHWRARTSALYFSQTIPISEHYRQSEITN

SEQ ID NO: 35779 - protein, 99 aa, Homo sapiens
  Payload ID: 7073
  Gene Symbol: GTDC1
  Gene Name: glycosyltransferase-like domain containing 1
  ENSP ID: ENSP00000400661
MSILIIEAFYGGSHKQLVDLLQEELGDCVVYTLPAKKWHWRARTSALYFSQTIPISEHYRTLFASSVLNLTELAALRPDLGKLKKILYFHENQLIYPVK

SEQ ID NO: 35780 - protein, 66 aa, Homo sapiens; identical to SEQ ID NO: 35778
  Payload ID: 7073
  Gene Symbol: GTDC1
  Gene Name: glycosyltransferase-like domain containing 1
  ENSP ID: ENSP00000401137

SEQ ID NO: 35781 - protein, 173 aa, Homo sapiens
  Payload ID: 7073
  Gene Symbol: GTDC1
  Gene Name: glycosyltransferase-like domain containing 1
  ENSP ID: ENSP00000403869
MSILIIEAFYGGSHKQLVDLLQEELGDCVVYTLPAKKWHWRARTSALYFSQTIPISEHYRTLFASSVLNLTELAALRPDLGKLKKILYFHENQLIYPVKKCQERDFQYGYNQILSCLVADVVVFNSVFNMESFLTSMGKFMKLIPDHRPKDLESIIRPKCQVIYFPIRFPDVS

SEQ ID NO: 35782 - protein, 329 aa, Homo sapiens
  Payload ID: 7073
  Gene Symbol: GTDC1
  Gene Name: glycosyltransferase-like domain containing 1
  Uniprot ID: Q4AE62
  ENSP ID: ENSP00000437964
MESFLTSMGKFMKLIPDHRPKDLESIIRPKCQVIYFPIRFPDVSRFMPKHKTTHLKKMLGLKGNGGAVLSMALPFQPEQRDSEDLLKNFNSECDTHCGLDTARQEYLGNSLRQESDLKKSTSSDNSSSHHGENKQNLTVDPCDILGGVDNQQRLLHIVWPHRWEHDKDPESFFKVLMHLKDLGLNFHVSVLGETFTDVPDIFSEAKKALGSSVLHWGYLPSKDDYFQVLCMADVVISTAKHEFFGVAMLEAVYCGCYPLCPKDLVYPEIFPAEYLYSTPEQLSKRLQNFCKRPDIIRKHLYKGEIAPFSWAALHGKFRSLLTTEPREDL

SEQ ID NO: 35783 - protein, 458 aa, Homo sapiens; identical to SEQ ID NO: 35772
  Payload ID: 7073
  Gene Symbol: GTDC1
  Gene Name: glycosyltransferase-like domain containing 1
  Uniprot ID: Q4AE62
  ENSP ID: ENSP00000438323

SEQ ID NO: 35784 - protein, 426 aa, Homo sapiens
  Payload ID: 7073
  Gene Symbol: GTDC1
  Gene Name: glycosyltransferase-like domain containing 1
  Uniprot ID: Q4AE62
  ENSP ID: ENSP00000484990
MLTLHVWIWFGFMPCPNLMQNYNHQCCRTLFASSVLNLTELAALRPDLGKLKKILYFHENQLIYPVKKCQERDFQYGYNQILSCLVADVVVFNSVFNMESFLTSMGKFMKLIPDHRPKDLESIIRPKCQVIYFPIRFPDVSRFMPKHKTTHLKKMLGLKGNGGAVLSMALPFQPEQRDSEDLLKNFNSECDTHCGLDTARQEYLGNSLRQESDLKKSTSSDNSSSHHGENKQNLTVDPCDILGGVDNQQRLLHIVWPHRWEHDKDPESFFKVLMHLKDLGLNFHVSVLGETFTDVPDIFSEAKKALGSSVLHWGYLPSKDDYFQVLCMADVVISTAKHEFFGVAMLEAVYCGCYPLCPKDLVYPEIFPAEYLYSTPEQLSKRLQNFCKRPDIIRKHLYKGEIAPFSWAALHGKFRSLLTTEPREDL

SEQ ID NO: 35785 - protein, 739 aa, Homo sapiens
  Payload ID: 7074
  Gene Symbol: GARS
  Gene Name: glycyl-tRNA synthetase
  Uniprot ID: P41250
  ENSP ID: ENSP00000373918
MPSPRPVLLRGARAALLLLLPPRLLARPSLLLRRSLSAASCPPISLPAAASRSSMDGAGAEEVLAPLRLAVRQQGDLVRKLKEDKAPQVDVDKAVAELKARKRVLEAKELALQPKDDIVDRAKMEDTLKRRFFYDQAFAIYGGVSGLYDFGPVGCALKNNIIQTWRQHFIQEEQILEIDCTMLTPEPVLKTSGHVDKFADFMVKDVKNGECFRADHLLKAHLQKLMSDKKCSVEKKSEMESVLAQLDNYGQQELADLFVNYNVKSPITGNDLSPPVSFNLMFKTFIGPGGNMPGYLRPETAQGIFLNFKRLLEFNQGKLPFAAAQIGNSFRNEISPRSGLIRVREFTMAEIEHFVDPSEKDHPKFQNVADLHLYLYSAKAQVSGQSARKMRLGDAVEQGVINNTVLGYFIGRIYLYLTKVGISPDKLRFRQHMENEMAHYACDCWDAESKTSYGWIEIVGCADRSCYDLSCHARATKVPLVAEKPLKEPKTVNVVQFEPSKGAIGKAYKKDAKLVMEYLAICDECYITEMEMLLNEKGEFTIETEGKTFQLTKDMINVKRFQKTLYVEEVVPNVIEPSFGLGRIMYTVFEHTFHVREGDEQRTFFSFPAVVAPFKCSVLPLSQNQEFMPFVKELSEALTRHGVSHKVDDSSGSIGRRYARTDEIGVAFGVTIDFDTVNKTPHTATLRDRDSMRQIRAEISELPSIVQDLANGNITWADVEARYPLFEGQETGKKETIEE

SEQ ID NO: 35786 - protein, 79 aa, Homo sapiens
  Payload ID: 7074
  Gene Symbol: GARS
  Gene Name: glycyl-tRNA synthetase
  ENSP ID: ENSP00000392677
MPSPRPVLLRGARAALLLLLPPRLLARPSLLLRRSLSAASCPPISLPAAASRSSMDGAGAEEVLAPLRLAVRQQAVWNQ

SEQ ID NO: 35787 - protein, 77 aa, Homo sapiens
  Payload ID: 7074
  Gene Symbol: GARS
  Gene Name: glycyl-tRNA synthetase
  ENSP ID: ENSP00000415447
VVQFEPSKGAIGKAYKKDAKLVMEYLAICDECYITEMEMLLNEKGEFTIETEGKTFQLTKDMINVKRFQKTLYEQIL

SEQ ID NO: 35788 - protein, 79 aa, Homo sapiens; identical to SEQ ID NO: 35786
  Payload ID: 7074
  Gene Symbol: GARS
  Gene Name: glycyl-tRNA synthetase
  ENSP ID: ENSP00000485931

SEQ ID NO: 35789 - protein, 313 aa, Homo sapiens
  Payload ID: 7075
  Gene Symbol: GLOD4
  Gene Name: glyoxalase domain containing 4
  Uniprot ID: Q9HC38
  ENSP ID: ENSP00000301328
MAARRALHFVFKVGNRFQTARFYRDVLGMKVESCSVARLECSGAISAHCSDYTRITEDSFSKPYDGKWSKTMVGFGPEDDHFVAELTYNYGVGDYKLGNDFMGITLASSQAVSNARKLEWPLTEVAEGVFETEAPGGYKFYLQNRSLPQSDPVLKVTLAVSDLQKSLNYWCNLLGMKIYEKDEEKQRALLGYADNQCKLELQGVKGGVDHAAAFGRIAFSCPQKELPDLEDLMKRENQKILTPLVSLDTPGKATVQVVILADPDGHEICFVGDEAFRELSKMDPEGSKLLDDAMAADKSDEWFAKHNKPKASG

SEQ ID NO: 35790 - protein, 298 aa, Homo sapiens
  Payload ID: 7075
  Gene Symbol: GLOD4
  Gene Name: glyoxalase domain containing 4
  Uniprot ID: Q9HC38
  ENSP ID: ENSP00000301329
MAARRALHFVFKVGNRFQTARFYRDVLGMKVLRHEEFEEGCKAACNGPYDGKWSKTMVGFGPEDDHFVAELTYNYGVGDYKLGNDFMGITLASSQAVSNARKLEWPLTEVAEGVFETEAPGGYKFYLQNRSLPQSDPVLKVTLAVSDLQKSLNYWCNLLGMKIYEKDEEKQRALLGYADNQCKLELQGVKGGVDHAAAFGRIAFSCPQKELPDLEDLMKRENQKILTPLVSLDTPGKATVQVVILADPDGHEICFVGDEAFRELSKMDPEGSKLLDDAMAADKSDEWFAKHNKPKASG

SEQ ID NO: 35791 - protein, 502 aa, Homo sapiens [sequence omitted]

SEQ ID NO: 35792 - protein, 59 aa, Homo sapiens
  Payload ID: 7075
  Gene Symbol: GLOD4
  Gene Name: glyoxalase domain containing 4
  ENSP ID: ENSP00000458796
MAARRALHFVFKVGNRFQTARFYRDVLGMKVLRHEEFEEGCKAACNGYDTLFLKISFRL

SEQ ID NO: 35793 - protein, 115 aa, Homo sapiens
  Payload ID: 7075
  Gene Symbol: GLOD4
  Gene Name: glyoxalase domain containing 4
  ENSP ID: ENSP00000458849
  MOD_RES (1)..(1): Any amino acid
XCNLLGMKIYEKDEEKQRALLGYADNQLPDLEDLMKRENQKILTPLVSLDTPGKATVQVVILADPDGHEICFVGDEAFRELSKMDPEGSKLLDDAMAADKSDEWFAKHNKPKASG

SEQ ID NO: 35794 - protein, 76 aa, Homo sapiens
  Payload ID: 7075
  Gene Symbol: GLOD4
  Gene Name: glyoxalase domain containing 4
  ENSP ID: ENSP00000459446
MAARRALHFVFKVGNRFQTARFYRDVLGMKALRGVQLQERGELPLGIIGLGEGPNTISPRGVPTHVLSFKPLVNVY

SEQ ID NO: 35795 - protein, 52 aa, Homo sapiens
  Payload ID: 7075
  Gene Symbol: GLOD4
  Gene Name: glyoxalase domain containing 4
  ENSP ID: ENSP00000459557
MAARRALHFVFKVGNRFQTARFYRDVLGMKVESCSVARLECSGAISAHCSAA

SEQ ID NO: 35796 - protein, 58 aa, Homo sapiens
  Payload ID: 7075
  Gene Symbol: GLOD4
  Gene Name: glyoxalase domain containing 4
  ENSP ID: ENSP00000460423
  MOD_RES (1)..(1): Any amino acid
XMKKMKKSKGLCWAMLITSVSWSYRASRVGWTMQQLLEELPSLAPRKRTDEGRVLSSV

SEQ ID NO: 35797 - protein, 227 aa, Homo sapiens
  Payload ID: 7075
  Gene Symbol: GLOD4
  Gene Name: glyoxalase domain containing 4
  ENSP ID: ENSP00000460634
MAARRALHFVFKVGNRFQTARFYRDVLGMKVLRHEEFEEGCKAACNGPYDGKWSKTMVGFGPEDDHFVAELTYNYGVGDYKLGNDFMGITLASSQAVSNARKLEWPLTEVAEGVFETEAPGGYKFYLQNRSLPQSDPVLKVTLAVSDLQKSLNYWCNLLGMKIYEKDEEKQRALLGYADNQCKLELQGVKGGVDHAAAFGRIAFSCPQKEAMAADKSDEWFAKHNKP

SEQ ID NO: 35798 - protein, 36 aa, Homo sapiens
  Payload ID: 7075
  Gene Symbol: GLOD4
  Gene Name: glyoxalase domain containing 4
  ENSP ID: ENSP00000461829
MAARRALHFVFKVGNRFQTARFYRDVLGMKSVLKTL

SEQ ID NO: 35799 - protein, 36 aa, Homo sapiens
  Payload ID: 7075
  Gene Symbol: GLOD4
  Gene Name: glyoxalase domain containing 4
  ENSP ID: ENSP00000461837
MAARRALHFVFKVGNRFQTARFYRDVLGMKALTTPG

SEQ ID NO: 35800 - protein, 68 aa, Homo sapiens
  Payload ID: 7075
  Gene Symbol: GLOD4
  Gene Name: glyoxalase domain containing 4
  ENSP ID: ENSP00000466922
  MOD_RES (1)..(1): Any amino acid
XFYRDVLGMKVQAGADRGWRARLEPAPEPALAEGGENGCVVNLSRRVSDLRPCAVFSFRSVASCRWGS

SEQ ID NO: 35801 - protein, 36 aa, Homo sapiens; identical to SEQ ID NO: 35799
  Payload ID: 7075
  Gene Symbol: GLOD4
  Gene Name: glyoxalase domain containing 4
  ENSP ID: ENSP00000486254

SEQ ID NO: 35802 - protein, 36 aa, Homo sapiens; identical to SEQ ID NO: 35798
  Payload ID: 7075
  Gene Symbol: GLOD4
  Gene Name: glyoxalase domain containing 4
  ENSP ID: ENSP00000486778

SEQ ID NO: 35803 - protein, 160 aa, Homo sapiens
  Payload ID: 7076
  Gene Symbol: GLOD5
  Gene Name: glyoxalase domain containing 5
  Uniprot ID: A6NK44
  ENSP ID: ENSP00000302552
MLRHLPSRLPVKMWGRTLEKQSWRDSSQTPPPCLIRRLDHIVMTVKSIKDTTMFYSKILGMEVMTFKEDRKALCFGDQKFNLHEVGKEFEPKAAHPVPGSLDICLITEVPLEEMIQHLKACDVPIEEGPVPRTGAKGPIMSIYFRDPDRNLIEVSNYISS

SEQ ID NO: 35804 - protein, 127 aa, Homo sapiens
  Payload ID: 7076
  Gene Symbol: GLOD5
  Gene Name: glyoxalase domain containing 5
  ENSP ID: ENSP00000409523
  MOD_RES (1)..(1): Any amino acid
XIRRLDHIVMTVKSIKDTTMFYSKILGMEVMTFKEDRKALCFGDQKFNLHEVGKEFEPKAAHPVPGSLDICLITEVPLEEMIQHLKACDVPIEEGPVPRTGAKGPIMSIYFRDPDRNLIEVSNYISS

SEQ ID NO: 35805 - protein, 184 aa, Homo sapiens
  Payload ID: 7077
  Gene Symbol: GLO1
  Gene Name: glyoxalase I
  Uniprot ID: Q04760
  ENSP ID: ENSP00000362463
MAEPQPPSGGLTDEAALSCCSDADPSTKDFLLQQTMLRVKDPKKSLDFYTRVLGMTLIQKCDFPIMKFSLYFLAYEDKNDIPKEKDEKIAWALSRKATLELTHNWGTEDDETQSYHNGNSDPRGFGHIGIAVPDVYSACKRFEELGVKFVKKPDDGKMKGLAFIQDPDGYWIEILNPNKMATLM

SEQ ID NO: 35806 - protein, 553 aa, Homo sapiens
  Payload ID: 7078
  Gene Symbol: GLYR1
  Gene Name: glyoxylate reductase 1 homolog (Arabidopsis)
  Uniprot ID: Q49A26
  ENSP ID: ENSP00000322716
MAAVSLRLGDLVWGKLGRYPPWPGKIVNPPKDLKKPRGKKCFFVKFFGTEDHAWIKVEQLKPYHAHKEEMIKINKGKRFQQAVDAVEEFLRRAKGKDQTSSHNSSDDKNRRNSSEERSRPNSGDEKRKLSLSEGKVKKNMGEGKKRVSSGSSERGSKSPLKRAQEQSPRKRGRPPKDEKDLTIPESSTVKGMMAGPMAAFKWQPTASEPVKDADPHFHHFLLSQTEKPAVCYQAITKKLKICEEETGSTSIQAADSTAVNGSITPTDKKIGFLGLGLMGSGIVSNLLKMGHTVTVWNRTAEKCDLFIQEGARLGRTPAEVVSTCDITFACVSDPKAAKDLVLGPSGVLQGIRPGKCYVDMSTVDADTVTELAQVIVSRGGRFLEAPVSGNQQLSNDGMLVILAAGDRGLYEDCSSCFQAMGKTSFFLGEVGNAAKMMLIVNMVQGSFMATIAEGLTLAQVTGQSQQTLLDILNQGQLASIFLDQKCQNILQGNFKPDFYLKYIQKDLRLAIALGDAVNHPTPMAAAANEVYKRAKALDQSDNDMSAVYRAYIH

SEQ ID NO: 35807 - protein, 472 aa, Homo sapiens
  Payload ID: 7078
  Gene Symbol: GLYR1
  Gene Name: glyoxylate reductase 1 homolog (Arabidopsis)
  Uniprot ID: Q49A26
  ENSP ID: ENSP00000390276
MAAVSLRLGDLVWGKLGRYPPWPGKIVNPPKDLKKPRGKKCFFVKFFGTEDHAWIKVEQLKPYHAHKEEMIKINKGKRFQQAVDAVEEFLRRAKGKDQDLTIPESSTVKGMMAGPMAAFKWQPTASEPVKDADPHFHHFLLSQTEKPAVCYQAITKKLKICEEETGSTSIQAADSTAVNGSITPTDKKIGFLGLGLMGSGIVSNLLKMGHTVTVWNRTAEKCDLFIQEGARLGRTPAEVVSTCDITFACVSDPKAAKDLVLGPSGVLQGIRPGKCYVDMSTVDADTVTELAQVIVSRGGRFLEAPVSGNQQLSNDGMLVILAAGDRGLYEDCSSCFQAMGKTSFFLGEVGNAAKMMLIVNMVQGSFMATIAEGLTLAQVTGQSQQTLLDILNQGQLASIFLDQKCQNILQGNFKPDFYLKYIQKDLRLAIALGDAVNHPTPMAAAANEVYKRAKALDQSDNDMSAVYRAYIH

SEQ ID NO: 35808 - protein, 37 aa, Homo sapiens
  Payload ID: 7078
  Gene Symbol: GLYR1
  Gene Name: glyoxylate reductase 1 homolog (Arabidopsis)
  ENSP ID: ENSP00000465490
EGARLGRTPAEVVSTCDITFACVSDPKAAKDLIEIRK

SEQ ID NO: 35809 - protein, 52 aa, Homo sapiens
  Payload ID: 7078
  Gene Symbol: GLYR1
  Gene Name: glyoxylate reductase 1 homolog (Arabidopsis)
  ENSP ID: ENSP00000466127
MAAVSLRLGDLVWGKLGRYPPWPGKIVNPPKDLKKPRGKKCFFVKFFGTEDQ

SEQ ID NO: 35810 - protein, 524 aa, Homo sapiens
  Payload ID: 7078
  Gene Symbol: GLYR1
  Gene Name: glyoxylate reductase 1 homolog (Arabidopsis)
  ENSP ID: ENSP00000466570
  MOD_RES (1)..(1): Any amino acid
XGKLGRYPPWPGKIVNPPKDLKKPRGKKCFFVKFFGTEDHAWIKVEQLKPYHAHKEEMIKINKGKRFQQAVDAVEEFLRRAKGKDQTSSHNSSDDKNRRNSSEERSRPNSGDEKRKLSLSEGKVKKNMGEGKKRVSSGSSERGSKSPLKRAQEQSPRKRGRPPKDEKDLTIPESSTVKGMMAGPMAAFKWQPTASEPVKDADPHFHHFLLSQTEKETGSTSIQAADSTAVNGSITPTDKKIGFLGLGLMGSGIVSNLLKMGHTVTVWNRTAEKCDLFIQEGARLGRTPAEVVSTCDITFACVSDPKAAKDLVLGPSGVLQGIRPGKCYVDMSTVDADTVTELAQVIVSRGGRFLEAPVSGNQQLSNDGMLVILAAGDRGLYEDCSSCFQAMGKTSFFLGEVGNAAKMMLIVNMVQGSFMATIAEGLTLAQVTGQSQQTLLDILNQGQLASIFLDQKCQNILQGNFKPDFYLKYIQKDLRLAIALGDAVNHPTPMAAAANEVYKRAKALDQSDNDMSAVYRAYIH

SEQ ID NO: 35811 - protein, 171 aa, Homo sapiens
  Payload ID: 7078
  Gene Symbol: GLYR1
  Gene Name: glyoxylate reductase 1 homolog (Arabidopsis)
  ENSP ID: ENSP00000467541
TSSHNSSDDKNRRNSSEERSRPNSGDEKRKLSLSEGKVKKNMGEGKKRVSSGSSERGSKSPLKRAQEQSPRKRGRPPKDEKDLTIPESSTVKGMMAGPMAAFKWQPTASEPVKDADPHFHHFLLSQTEKPAVCYQAITKKLKICEEETGSTSIQAADSTAVNGSITPTDKK

SEQ ID NO: 35812 - protein, 185 aa, Homo sapiens
  Payload ID: 7078
  Gene Symbol: GLYR1
  Gene Name: glyoxylate reductase 1 homolog (Arabidopsis)
  ENSP ID: ENSP00000467751
MAAVSLRLGDLVWGKLGRYPPWPGKIVNPPKDLKKPRGKKCFFVKFFGTEDHAWIKVEQLKPYHAHKEEMIKINKGKRFQQAVDAVEEFLRRAKGKDQDLTIPESSTVKGMMAGPMAAFKWQPTASEPVKDADPHFHHFLLSQTEKETGSTSIQAADSTAVNGSITPTDKKIGFLGLGLMGSGIV

SEQ ID NO: 35813 - protein, 547 aa, Homo sapiens
  Payload ID: 7078
  Gene Symbol: GLYR1
  Gene Name: glyoxylate reductase 1 homolog (Arabidopsis)
  Uniprot ID: Q49A26
  ENSP ID: ENSP00000468328
MAAVSLRLGDLVWGKLGRYPPWPGKIVNPPKDLKKPRGKKCFFVKFFGTEDHAWIKVEQLKPYHAHKEEMIKINKGKRFQQAVDAVEEFLRRAKGKDQTSSHNSSDDKNRRNSSEERSRPNSGDEKRKLSLSEGKVKKNMGEGKKRVSSGSSERGSKSPLKRAQEQSPRKRGRPPKDEKDLTIPESSTVKGMMAGPMAAFKWQPTASEPVKDADPHFHHFLLSQTEKPAVCYQAITKKLKICEEETGSTSIQAADSTAVNGSITPTDKKIGFLGLGLMGSGIVSNLLKMGHTVTVWNRTAEKEGARLGRTPAEVVSTCDITFACVSDPKAAKDLVLGPSGVLQGIRPGKCYVDMSTVDADTVTELAQVIVSRGGRFLEAPVSGNQQLSNDGMLVILAAGDRGLYEDCSSCFQAMGKTSFFLGEVGNAAKMMLIVNMVQGSFMATIAEGLTLAQVTGQSQQTLLDILNQGQLASIFLDQKCQNILQGNFKPDFYLKYIQKDLRLAIALGDAVNHPTPMAAAANEVYKRAKALDQSDNDMSAVYRAYIH

SEQ ID NO: 35814 - protein, 328 aa, Homo sapiens
  Payload ID: 7079
  Gene Symbol: GRHPR
  Gene Name: glyoxylate reductase/hydroxypyruvate reductase
  Uniprot ID: Q9UBQ7
  ENSP ID: ENSP00000313432
MRPVRLMKVFVTRRIPAEGRVALARAADCEVEQWDSDEPIPAKELERGVAGAHGLLCLLSDHVDKRILDAAGANLKVISTMSVGIDHLALDEIKKRGIRVGYTPDVLTDTTAELAVSLLLTTCRRLPEAIEEVKNGGWTSWKPLWLCGYGLTQSTVGIIGLGRIGQAIARRLKPFGVQRFLYTGRQPRPEEAAEFQAEFVSTPELAAQSDFIVVACSLTPATEGLCNKDFFQKMKETAVFINISRGDVVNQDDLYQALASGKIAAAGLDVTSPEPLPTNHPLLTLKNCVILPHIGSATHRTRNTMSLLAANNLLAGLRGEPMPSELKL

SEQ ID NO: 35815 - protein, 252 aa, Homo sapiens
  Payload ID: 7079
  Gene Symbol: GRHPR
  Gene Name: glyoxylate reductase/hydroxypyruvate reductase
  Uniprot ID: Q9UBQ7
  ENSP ID: ENSP00000432021
MLGGVPTLCGTGNETWTLLALGQAIARRLKPFGVQRFLYTGRQPRPEEAAEFQAEFVSTPELAAQSDFIVVACSLTPATEGLCNKDFFQKMKETAVFINISRYPRATLPSKPGEEPSPLLPSGDFLPRGLLVRPQAELAGFHKPNNQLRNSWEYTRPPYREEEPSEWAWPVCFSAVAPTRRGLAHSSVASGSVPREPLQAHYPPPQRAGLEDLKGPLEAASHTAEPGFVWLWFSDTLNLMLLGGQTLKLTWS

SEQ ID NO: 35816 - protein, 358 aa, Homo sapiens
  Payload ID: 7079
  Gene Symbol: GRHPR
  Gene Name: glyoxylate reductase/hydroxypyruvate reductase
  ENSP ID: ENSP00000475569
MRPVRLMKVFVTRRIPAEGRVALARAADCEVEQWDSDEPIPAKELERGVAGAHGLLCLLSDHVDKRILDAAGANLKVISTMSVGIDHLALDEIKKRGIRVGYTPDVLTDTTAELAVSLLLTTCRRLPEAIEEVKNGGWTSWKPLWLCGYGLTQSTVGIIGLGRIGQAIARRLKPFGVQRFLYTGRQPRPEEAAEFQAEFVSTPELAAQSDFIVVACSLTPATEGLCNKDFFQKMKETAVFINISRGDVVNQDDLYQALASGKIAAAGLDVTSPEPLPTNHPLLTLKNCGPGIQLTAWGLLQKAGLGLRRGQSGHEAAAATAASTKSKHWAAAMSYCQQEGKDAIICDVKRPCSSKQHS

SEQ ID NO: 35817 - protein, 558 aa, Homo sapiens
  Payload ID: 7080
  Gene Symbol: GPC1
  Gene Name: glypican 1
  Uniprot ID: P35052
  ENSP ID: ENSP00000264039
MELRARGWWLLCAAAALVACARGDPASKSRSCGEVRQIYGAKGFSLSDVPQAEISGEHLRICPQGYTCCTSEMEENLANRSHAELETALRDSSRVLQAMLATQLRSFDDHFQHLLNDSERTLQATFPGAFGELYTQNARAFRDLYSELRLYYRGANLHLEETLAEFWARLLERLFKQLHPQLLLPDDYLDCLGKQAEALRPFGEAPRELRLRATRAFVAARSFVQGLGVASDVVRKVAQVPLGPECSRAVMKLVYCAHCLGVPGARPCPDYCRNVLKGCLANQADLDAEWRNLLDSMVLITDKFWGTSGVESVIGSVHTWLAEAINALQDNRDTLTAKVIQGCGNPKVNPQGPGPEEKRRRGKLAPRERPPSGTLEKLVSEAKAQLRDVQDFWISLPGTLCSEKMALSTASDDRCWNGMARGRYLPEVMGDGLANQINNPEVEVDITKPDMTIRQQIMQLKIMTNRLRSAYNGNDVDFQDASDDGSGSGSGDGCLDDLCSRKVSRKSSSSRTPLTHALPGLSEQEGQKTSAASCPQPPTFLLPLLLFLALTVARPRWR

SEQ ID NO: 35818 - protein, 162 aa, Homo sapiens
  Payload ID: 7080
  Gene Symbol: GPC1
  Gene Name: glypican 1
  ENSP ID: ENSP00000389276
MEENLANRSHAELETALRDSSRVLQAMLATQLRSFDDHFQHLLNDSERTLQATFPGAFGELYTQNARAFRDLYSELRLYYRGANLHLEETLAEFWARLLERLFKQLHPQLLLPDDYLDCLGKQAEALRPFGEAPRELRLRATRAFVAARSFVQGLGVASDVV

SEQ ID NO: 35819 - protein, 281 aa, Homo sapiens
  Payload ID: 7080
  Gene Symbol: GPC1
  Gene Name: glypican 1
  ENSP ID: ENSP00000390242
  MOD_RES (1)..(1): Any amino acid
XAHCLGVPGARPCPDYCRNVLKGCLANQADLDAEWRNLLDSMVLITDKFWGTSGVESVIGSVHTWLAEAINALQDNRDTLTAKDPAVSLQVIQGCGNPKVNPQGPGPEEKRRRGKLAPRERPPSGTLEKLVSEAKAQLRDVQDFWISLPGTLCSEKMALSTASDDRCWNGMARGRYLPEVMGDGLANQINNPEVEVDITKPDMTIRQQIMQLKIMTNRLRSAYNGNDVDFQDASDDGSGSGSGDGCLDDLCSRKVSRKSSSSRTPLTHALPGLSEQEGQKT

SEQ ID NO: 35820 - protein, 294 aa, Homo sapiens
  Payload ID: 7080
  Gene Symbol: GPC1
  Gene Name: glypican 1
  ENSP ID: ENSP00000392629
MEENLANRSHAELETALRDSSRVLQAMLATQLRSFDDHFQHLLNDSERTLQATFPGAFGELYTQNARAFRDLYSELRLYYRGANLHLEETLAEFWARLLERLFKQLHPQLLLPDDYLDCLGKQAEALRPFGEAPRELRLRATRAFVAARSFVQGLGVASDVVRKVAQVPLGPECSRAVMKLVYCAHCLGVPGARPCPDYCRNVLKGCLANQADLDAEWRNLLDSMVLITDKFWGTSGVESVIGSVHTWLAEAINALQDNRDTLTAKVIQGCGNPKVNPQGPGPEEKRRRGKLAP

SEQ ID NO: 35821 - protein, 156 aa, Homo sapiens
  Payload ID: 7080
  Gene Symbol: GPC1
  Gene Name: glypican 1
  ENSP ID: ENSP00000410251
MHDLKGEHLRICPQGYTCCTSEMEENLANRSHAELETALRDSSRVLQAMLATQLRSFDDHFQHLLNDSERTLQATFPGAFGELYTQNARAFRDLYSELRLYYRGANLHLEETLAEFWARLLERLFKQLHPQLLLPDDYLDCLGKQAEALRPFGEAP

SEQ ID NO: 35822 - protein, 486 aa, Homo sapiens
  Payload ID: 7080
  Gene Symbol: GPC1
  Gene Name: glypican 1
  ENSP ID: ENSP00000415077
MEENLANRSHAELETALRDSSRVLQAMLATQLRSFDDHFQHLLNDSERTLQATFPGAFGELYTQNARAFRDLYSELRLYYRGANLHLEETLAEFWARLLERLFKQLHPQLLLPDDYLDCLGKQAEALRPFGEAPRELRLRATRAFVAARSFVQGLGVASDVVRKVAQVPLGPECSRAVMKLVYCAHCLGVPGARPCPDYCRNVLKGCLANQADLDAEWRNLLDSMVLITDKFWGTSGVESVIGSVHTWLAEAINALQDNRDTLTAKVIQGCGNPKVNPQGPGPEEKRRRGKLAPRERPPSGTLEKLVSEAKAQLRDVQDFWISLPGTLCSEKMALSTASDDRCWNGMARGRYLPEVMGDGLANQINNPEVEVDITKPDMTIRQQIMQLKIMTNRLRSAYNGNDVDFQDASDDGSGSGSGDGCLDDLCSRKVSRKSSSSRTPLTHALPGLSEQEGQKTSAASCPQPPTFLLPLLLFLALTVARPRWR

SEQ ID NO: 35823 - protein, 579 aa, Homo sapiens
  Payload ID: 7081
  Gene Symbol: GPC2
  Gene Name: glypican 2
  Uniprot ID: Q8N158
  ENSP ID: ENSP00000292377
MSALRPLLLLLLPLCPGPGPGPGSEAKVTRSCAETRQVLGARGYSLNLIPPALISGEHLRVCPQEYTCCSSETEQRLIRETEATFRGLVEDSGSFLVHTLAARHRKFDEFFLEMLSVAQHSLTQLFSHSYGRLYAQHALIFNGLFSRLRDFYGESGEGLDDTLADFWAQLLERVFPLLHPQYSFPPDYLLCLSRLASSTDGSLQPFGDSPRRLRLQITRTLVAARAFVQGLETGRNVVSEALKVPVSEGCSQALMRLIGCPLCRGVPSLMPCQGFCLNVVRGCLSSRGLEPDWGNYLDGLLILADKLQGPFSFELTAESIGVKISEGLMYLQENSAKVSAQVFQECGPPDPVPARNRRAPPPREEAGRLWSMVTEEERPTTAAGTNLHRLVWELRERLARMRGFWARLSLTVCGDSRMAADASLEAAPCWTGAGRGRYLPPVVGGSPAEQVNNPELKVDASGPDVPTRRRRLQLRAATARMKTAALGHDLDGQDADEDASGSGGGQQYADDWMAGAVAPPARPPRPPYPPRRDGSGGKGGGGSARYNQGRSRSGGASIGFHTQTILILSLSALALLGPR

SEQ ID NO: 35824 - protein, 134 aa, Homo sapiens
  Payload ID: 7081
  Gene Symbol: GPC2
  Gene Name: glypican 2
  ENSP ID: ENSP00000488396
MSALRPLLLLLLPLCPGPGPGPGSEAKVTRSCAETRQVLGARGYSLNLIPPALISGEHLRVCPQEYTCCSSETEQRLIRETEATFRGLVEDSGSFLVHTLAARHRKFDDNPDPGGCPSLCAGPGDWKKCGQRSA

SEQ ID NO: 35825 - protein, 580 aa, Homo sapiens
  Payload ID: 7082
  Gene Symbol: GPC3
  Gene Name: glypican 3
  Uniprot ID: P51654
  ENSP ID: ENSP00000359854
MAGTVRTACLVVAMLLSLDFPGQAQPPPPPPDATCHQVRSFFQRLQPGLKWVPETPVPGSDLQVCLPKGPTCCSRKMEEKYQLTARLNMEQLLQSASMELKFLIIQNAAVFQEAFEIVVRHAKNYTNAMFKNNYPSLTPQAFEFVGEFFTDVSLYILGSDINVDDMVNELFDSLFPVIYTQLMNPGLPDSALDINECLRGARRDLKVFGNFPKLIMTQVSKSLQVTRIFLQALNLGIEVINTTDHLKFSKDCGRMLTRMWYCSYCQGLMMVKPCGGYCNVVMQGCMAGVVEIDKYWREYILSLEELVNGMYRIYDMENVLLGLFSTIHDSIQYVQKNAGKLTTTIGKLCAHSQQRQYRSAYYPEDLFIDKKVLKVAHVEHEETLSSRRRELIQKLKSFISFYSALPGYICSHSPVAENDTLCWNGQELVERYSQKAARNGMKNQFNLHELKMKGPEPVVSQIIDKLKHINQLLRTMSMPKGRVLDKNLDEEGFESGDCGDDEDECIGGSGDGMIKVKNQLRFLAELAYDLDVDDAPGNSQQATPKDNEISTFHNLGNVHSPLKLLTSMAISVVCFFFLVH

SEQ ID NO: 35826 - protein, 603 aa, Homo sapiens
  Payload ID: 7082
  Gene Symbol: GPC3
  Gene Name: glypican 3
  Uniprot ID: P51654
  ENSP ID: ENSP00000377836
MAGTVRTACLVVAMLLSLDFPGQAQPPPPPPDATCHQVRSFFQRLQPGLKWVPETPVPGSDLQVCLPKGPTCCSRKMEEKYQLTARLNMEQLLQSASMELKFLIIQNAAVFQEAFEIVVRHAKNYTNAMFKNNYPSLTPQAFEFVGEFFTDVSLYILGSDINVDDMVNELFDSLFPVIYTQLMNPGLPDSALDINECLRGARRDLKVFGNFPKLIMTQVSKSLQVTRIFLQALNLGIEVINTTDHLKFSKDCGRMLTRMWYCSYCQGLMMVKPCGGYCNVVMQGCMAGVVEIDKYWREYILSLEELVNGMYRIYDMENVLLGLFSTIHDSIQYVQKNAGKLTTTETEKKIWHFKYPIFFLCIGLDLQIGKLCAHSQQRQYRSAYYPEDLFIDKKVLKVAHVEHEETLSSRRRELIQKLKSFISFYSALPGYICSHSPVAENDTLCWNGQELVERYSQKAARNGMKNQFNLHELKMKGPEPVVSQIIDKLKHINQLLRTMSMPKGRVLDKNLDEEGFESGDCGDDEDECIGGSGDGMIKVKNQLRFLAELAYDLDVDDAPGNSQQATPKDNEISTFHNLGNVHSPLKLLTSMAISVVCFFFLVH

SEQ ID NO: 35827 - protein, 256 aa, Homo sapiens
  Payload ID: 7082
  Gene Symbol: GPC3
  Gene Name: glypican 3
  ENSP ID: ENSP00000385307
  MOD_RES (1)..(1): Any amino acid
XKPCGGYCNVVMQGCMAGVVEIDKYWREYILSLEELVNGMYRIYDMENVLLGLFSTIHDSIQYVQKNAGKLTTTIGKLCAHSQQRQYRSAYYPEDLFIDKKVLKVAHVEHEETLSSRRRELIQKLKSFISFYSALPGYICSHSPVAENDTLCWNGQELVERYSQKAARNGMKNQFNLHELKMKGPEPVVSQIIDKLKHINQLLRTMSMPKGRVLDKNLDEEGFESGDCGDDEDECIGGSGDGMIKVKNQLRFLAGN

SEQ ID NO: 35828 - protein, 526 aa, Homo sapiens
  Payload ID: 7082
  Gene Symbol: GPC3
  Gene Name: glypican 3
  Uniprot ID: P51654
  ENSP ID: ENSP00000486325
MAGTVRTACLVVAMLLSLDFPGQAQPPPPPPDATCHQVRSFFQRLQPGLKWVPETPVPEAFEIVVRHAKNYTNAMFKNNYPSLTPQAFEFVGEFFTDVSLYILGSDINVDDMVNELFDSLFPVIYTQLMNPGLPDSALDINECLRGARRDLKVFGNFPKLIMTQVSKSLQVTRIFLQALNLGIEVINTTDHLKFSKDCGRMLTRMWYCSYCQGLMMVKPCGGYCNVVMQGCMAGVVEIDKYWREYILSLEELVNGMYRIYDMENVLLGLFSTIHDSIQYVQKNAGKLTTTIGKLCAHSQQRQYRSAYYPEDLFIDKKVLKVAHVEHEETLSSRRRELIQKLKSFISFYSALPGYICSHSPVAENDTLCWNGQELVERYSQKAARNGMKNQFNLHELKMKGPEPVVSQIIDKLKHINQLLRTMSMPKGRVLDKNLDEEGFESGDCGDDEDECIGGSGDGMIKVKNQLRFLAELAYDLDVDDAPGNSQQATPKDNEISTFHNLGNVHSPLKLLTSMAISVVCFFFLVH

SEQ ID NO: 35829 - protein, 556 aa, Homo sapiens
  Payload ID: 7083
  Gene Symbol: GPC4
  Gene Name: glypican 4
  Uniprot ID: O75487
  ENSP ID: ENSP00000359864
MARFGLPALLCTLAVLSAALLAAELKSKSCSEVRRLYVSKGFNKNDAPLHEINGDHLKICPQGSTCCSQEMEEKYSLQSKDDFKSVVSEQCNHLQAVFASRYKKFDEFFKELLENAEKSLNDMFVKTYGHLYMQNSELFKDLFVELKRYYVVGNVNLEEMLNDFWARLLERMFRLVNSQYHFTDEYLECVSKYTEQLKPFGDVPRKLKLQVTRAFVAARTFAQGLAVAGDVVSKVSVVNPTAQCTHALLKMIYCSHCRGLVTVKPCYNYCSNIMRGCLANQGDLDFEWNNFIDAMLMVAERLEGPFNIESVMDPIDVKISDAIMNMQDNSVQVSQKVFQGCGPPKPLPAGRISRSISESAFSARFRPHHPEERPTTAAGTSLDRLVTDVKEKLKQAKKFWSSLPSNVCNDERMAAGNGNEDDCWNGKGKSRYLFAVTGNGLANQGNNPEVQVDTSKPDILILRQIMALRVMTSKMKNAYNGNDVDFFDISDESSGEGSGSGCEYQQCPSEFDYNATDHAGKSANEKADSAGVRPGAQAYLLTVFCILFLVMQREWR

SEQ ID NO: 35830 - protein, 572 aa, Homo sapiens
  Payload ID: 7084
  Gene Symbol: GPC5
  Gene Name: glypican 5
  Uniprot ID: P78333
  ENSP ID: ENSP00000366267
MDAQTWPVGFRCLLLLALVGSARSEGVQTCEEVRKLFQWRLLGAVRGLPDSPRAGPDLQVCISKKPTCCTRKMEERYQIAARQDMQQFLQTSSSTLKFLISRNAAAFQETLETLIKQAENYTSILFCSTYRNMALEAAASVQEFFTDVGLYLFGADVNPEEFVNRFFDSLFPLVYNHLINPGVTDSSLEYSECIRMARRDVSPFGNIPQRVMGQMGRSLLPSRTFLQALNLGIEVINTTDYLHFSKECSRALLKMQYCPHCQGLALTKPCMGYCLNVMRGCLAHMAELNPHWHAYIRSLEELSDAMHGTYDIGHVLLNFHLLVNDAVLQAHLNGQKLLEQVNRICGRPVRTPTQSPRCSFDQSKEKHGMKTTTRNSEETLANRRKEFINSLRLYRSFYGGLADQLCANELAAADGLPCWNGEDIVKSYTQRVVGNGIKAQSGNPEVKVKGIDPVINQIIDKLKHVVQLLQGRSPKPDKWELLQLGSGGGMVEQVSGDCDDEDGCGGSGSGEVKRTLKITDWMPDDMNFSDVKQIHQTDTGSTLDTTGAGCAVATESMTFTLISVVMLLPGIW

SEQ ID NO: 35831 - protein, 51 aa, Homo sapiens
  Payload ID: 7084
  Gene Symbol: GPC5
  Gene Name: glypican 5
  ENSP ID: ENSP00000480653
  MOD_RES (1)..(1): Any amino acid
XMPDDMNFSDVKQIHQTDTGSTLDTTGAGCAVATESMTFTLISVVMLLPGI

SEQ ID NO: 35832 - protein, 320 aa, Homo sapiens [sequence omitted]

SEQ ID NO: 35833 - protein, 555 aa, Homo sapiens
  Payload ID: 7085
  Gene Symbol: GPC6
  Gene Name: glypican 6
  Uniprot ID: Q9Y625
  ENSP ID: ENSP00000366246
MPSWIGAVILPLLGLLLSLPAGADVKARSCGEVRQAYGAKGFSLADIPYQEIAGEHLRICPQEYTCCTTEMEDKLSQQSKLEFENLVEETSHFVRTTFVSRHKKFDEFFRELLENAEKSLNDMFVRTYGMLYMQNSEVFQDLFTELKRYYTGGNVNLEEMLNDFWARLLERMFQLINPQYHFSEDYLECVSKYTDQLKPFGDVPRKLKIQVTRAFIAARTFVQGLTVGREVANRVSKVSPTPGCIRALMKMLYCPYCRGLPTVRPCNNYCLNVMKGCLANQADLDTEWNLFIDAMLLVAERLEGPFNIESVMDPIDVKISEAIMNMQENSMQVSAKVFQGCGQPKPAPALRSARSAPENFNTRFRPYNPEERPTTAAGTSLDRLVTDIKEKLKLSKKVWSALPYTICKDESVTAGTSNEEECWNGHSKARYLPEIMNDGLTNQINNPEVDVDITRPDTFIRQQIMALRVMTNKLKNAYNGNDVNFQDTSDESSGSGSGSGCMDDVCPTEFEFVTTEAPAVDPDRREVDSSAAQRGHSLLSWSLTCIVLALQRLCR

SEQ ID NO: 35834 - protein, 263 aa, Homo sapiens
  Payload ID: 7085
  Gene Symbol: GPC6
  Gene Name: glypican 6
  ENSP ID: ENSP00000477667
DAMLLVAERLEGPFNIESVMDPIDVKISEAIMNMQENSMQVSAKVFQGCGQPKPAPALRSARSAPENFNTRFRPYNPEERPTTAAGTSLDRLVTDIKEKLKLSKKVWSALPYTICKDESVTAGTSNEEECWNGHSKARYLPEIMNDGLTNQINNPEVDVDITRPDTFIRQQIMALRVMTNKLKNAYNGNDVNFQDTSDESSGSGSGSGCMDDVCPTEFEFVTTEAPAVDPDRREVDSSAAQRGHSLLSWSLTCIVLALQRLCR

SEQ ID NO: 35835 - protein, 193 aa, Homo sapiens
  Payload ID: 7086
  Gene Symbol: GM2A
  Gene Name: GM2 ganglioside activator
  Uniprot ID: P17900
  ENSP ID: ENSP00000349687
MQSLMQAPLLIALGLLLAAPAQAHLKKPSQLSSFSWDNCDEGKDPAVIRSLTLEPDPIIVPGNVTLSVMGSTSVPLSSPLKVDLVLEKEVAGLWIKIPCTDYIGSCTFEHFCDVLDMLIPTGEPCPEPLRTYGLPCHCPFKEGTYSLPKSEFVVPDLELPSWLTTGNYRIESVLSSSGKRLGCIKIAASLKGI

SEQ ID NO: 35836 - protein, 146 aa, Homo sapiens
  Payload ID: 7086
  Gene Symbol: GM2A
  Gene Name: GM2 ganglioside activator
  ENSP ID: ENSP00000429100
MSWVEAAGVSSTALEDRIVAKHEEVPEVSVQYEEKFQNHHKLPSQLSSFSWDNCDEGKDPAVIRSLTLEPDPIIVPGNVTLSVMGSTSVPLSSPLKVDLVLEKEVAGLWIKIPCTDYIGSCTFEHFCDVLDMLIPTGEPCPEPLRT

SEQ ID NO: 35837 - protein, 104 aa, Homo sapiens
  Payload ID: 7086
  Gene Symbol: GM2A
  Gene Name: GM2 ganglioside activator
  ENSP ID: ENSP00000430541
  MOD_RES (1)..(1): Any amino acid
XKDPAVIRSLTLEPDPIIVPGNVTLSVMGSTSVPLSSPLKVDLVLEKEVAGLWIKIPCTDYIGSCTFEHFCDVLDMLIPTGEPCPEPLRTYGLPCHCPFKEVST

SEQ ID NO: 35838 - protein, 379 aa, Homo sapiens
  Payload ID: 7087
  Gene Symbol: GNAS
  Gene Name: GNAS complex locus
  Uniprot ID: P63092
  ENSP ID: ENSP00000265620
MGCLGNSKTEDQRNEEKAQREANKKIEKQLQKDKQVYRATHRLLLLGAGESGKSTIVKQMRILHVNGFNGDEKATKVQDIKNNLKEAIETIVAAMSNLVPPVELANPENQFRVDYILSVMNVPDFDFPPEFYEHAKALWEDEGVRACYERSNEYQLIDCAQYFLDKIDVIKQADYVPSDQDLLRCRVLTSGIFETKFQVDKVNFHMFDVGGQRDERRKWIQCFNDVTAIIFVVASSSYNMVIREDNQTNRLQEALNLFKSIWNNRWLRTISVILFLNKQDLLAEKVLAGKSKIEDYFPEFARYTTPEDATPEPGEDPRVTRAKYFIRDEFLRISTASGDGRHYCYPHFTCAVDTENIRRVFNDCRDIIQRMHLRQYELL

SEQ ID NO: 35839 - protein, 193 aa, Homo sapiens
  Payload ID: 7087
  Gene Symbol: GNAS
  Gene Name: GNAS complex locus
  ENSP ID: ENSP00000265621
PKASRSLKVKKVPLAEKRRQMRKEALEKRAQKRAEKKRSKLIDKQLQDEKMGYMCTHRLLLLGAGESGKSTIVKQMRILHVNGFNGEGGEEDPQAARSNSDGSEKATKVQDIKNNLKEAIETIVAAMSNLVPPVELANPENQFRVDYILSVMNVPDFDFPPEFYEHAKALWEDEGVRACYERSNEYQLIDCAQ

SEQ ID NO: 35840 - protein, 625 aa, Homo sapiens
  Payload ID: 7087
  Gene Symbol: GNAS
  Gene Name: GNAS complex locus
  Uniprot ID: P84996
  ENSP ID: ENSP00000302237
MARPVDPQRSPDPTFRSSTRHSGKLEPMEATAHLLRKQCPSRLNSPAWEASGLHWSSLDSPVGSMQALRPSAQHSWSPEPSVVPDQAWEDTALHQKKLCPLSLTSLPREAAVNFSYRSQTLLQEAQVLQGSPELLPRSPKPSGLQRLAPEEATALPLRRLCHLSLMEKDLGTTAHPRGFPELSHKSTAAASSRQSRPRVRSASLPPRTRLPSGSQAPSAAHPKRLSDLLLTSRAAAPGWRSPDPRSRLAAPPLGSTTLPSTWTAPQSRLTARPSRSPEPQIRESEQRDPQLRRKQQRWKEPLMPRREEKYPLRGTDPLPPGQPQRIPLPGQPLQPQPILTPGQPQKIPTPGQHQPILTPGHSQPIPTPGQPLPPQPIPTPGRPLTPQPIPTPGRPLTPQPIQMPGRPLRLPPPLRLLRPGQPMSPQLRQTQGLPLPQPLLPPGQPKSAGRPLQPLPPGPDARSISDPPAPRSRLPIRLLRGLLARLPGGASPRAAAAAACTTMKGWPAATMTPAETSPTMGPPDASAGFSIGEIAAAESPSATYSATFSCKPSGAASVDLRVPSPKPRALSRSRRYPWRRSADRCAKKPWRSGPRSAQRRNAVSSSTNNSRTKRWATCVRTACCF

SEQ ID NO: 35841 - protein, 158 aa, Homo sapiens
  Payload ID: 7087
  Gene Symbol: GNAS
  Gene Name: GNAS complex locus
  ENSP ID: ENSP00000304472
MGCLGNSKTEDQRNEEKAQREANKKIEKQLQEALNLFKSIWNNRWLRTISVILFLNKQDLLAEKVLAGKSKIEDYFPEFARYTTPEDATPEPGEDPRVTRAKYFIRDEFLRISTASGDGRHYCYPHFTCAVDTENIRRVFNDCRDIIQRMHLRQYELL

SEQ ID NO: 35842 - protein, 245 aa, Homo sapiens
  Payload ID: 7087
  Gene Symbol: GNAS
  Gene Name: GNAS complex locus
  Uniprot ID: O95467
  ENSP ID: ENSP00000323571
MDRRSRAQQWRRARHNYNDLCPPIGRRAATALLWLSCSIALLRALATSNARAQQRAAAQQRRSFLNAHHRSGAQVFPESPESESDHEHEEADLELSLPECLEYEEEFDYETESETESEIESETDFETEPETAPTTEPETEPEDDRGPVVPKHSTFGQSLTQRLHALKLRSPDASPSRAPPSTQEPQSPREGEELKPEDKDPRDPEESKEPKEEKQRRRCKPKKPTRRDASPESPSKKGPIPIRRH

SEQ ID NO: 35843 - protein, 61 aa, Homo sapiens
  Payload ID: 7087
  Gene Symbol: GNAS
  Gene Name: GNAS complex locus
  ENSP ID: ENSP00000345971
QRNEEKAQREANKKIEKQLQKDKQVYRATHRLLLLGAGESGKSTIVKQMRILHVNGFNGEI

SEQ ID NO: 35844 - protein, 395 aa, Homo sapiens
  Payload ID: 7087
  Gene Symbol: GNAS
  Gene Name: GNAS complex locus
  Uniprot ID: P63092
  ENSP ID: ENSP00000346328
MGCLGNSKTEDQRNEEKAQREANKKIEKQLQKDKQVYRATHRLLLLGAGESGKSTIVKQMRILHVNGFNGEGGEEDPQAARSNSDGSEKATKVQDIKNNLKEAIETIVAAMSNLVPPVELANPENQFRVDYILSVMNVPDFDFPPEFYEHAKALWEDEGVRACYERSNEYQLIDCAQYFLDKIDVIKQADYVPSDQDLLRCRVLTSGIFETKFQVDKVNFHMFDVGGQRDERRKWIQCFNDVTAIIFVVASSSYNMVIREDNQTNRLQEALNLFKSIWNNRWLRTISVILFLNKQDLLAEKVLAGKSKIEDYFPEFARYTTPEDATPEPGEDPRVTRAKYFIRDEFLRISTASGDGRHYCYPHFTCAVDTENIRRVFNDCRDIIQRMHLRQYELL

SEQ ID NO: 35845 - protein, 245 aa, Homo sapiens; identical to SEQ ID NO: 35842
  Payload ID: 7087
  Gene Symbol: GNAS
  Gene Name: GNAS complex locus
  Uniprot ID: O95467
  ENSP ID: ENSP00000360115

SEQ ID NO: 35846 - protein, 87 aa, Homo sapiens
  Payload ID: 7087
  Gene Symbol: GNAS
  Gene Name: GNAS complex locus
  ENSP ID: ENSP00000360122
MGCLGNSKTEDQRNEEKAQREANKKIEKQLQKDKQVYRATHRLLLLGAGESGKSTIVKQMRILHVNGFNGEGGEEDPQAARSNSDGI

SEQ ID NO: 35847 - protein, 394 aa, Homo sapiens
  Payload ID: 7087
  Gene Symbol: GNAS
  Gene Name: GNAS complex locus
  Uniprot ID: P63092
  ENSP ID: ENSP00000360126
MGCLGNSKTEDQRNEEKAQREANKKIEKQLQKDKQVYRATHRLLLLGAGESGKSTIVKQMRILHVNGFNGEGGEEDPQAARSNSDGEKATKVQDIKNNLKEAIETIVAAMSNLVPPVELANPENQFRVDYILSVMNVPDFDFPPEFYEHAKALWEDEGVRACYERSNEYQLIDCAQYFLDKIDVIKQADYVPSDQDLLRCRVLTSGIFETKFQVDKVNFHMFDVGGQRDERRKWIQCFNDVTAIIFVVASSSYNMVIREDNQTNRLQEALNLFKSIWNNRWLRTISVILFLNKQDLLAEKVLAGKSKIEDYFPEFARYTTPEDATPEPGEDPRVTRAKYFIRDEFLRISTASGDGRHYCYPHFTCAVDTENIRRVFNDCRDIIQRMHLRQYELL

SEQ ID NO: 35848 - protein, 380 aa, Homo sapiens
  Payload ID: 7087
  Gene Symbol: GNAS
  Gene Name: GNAS complex locus
  Uniprot ID: P63092
  ENSP ID: ENSP00000360136
MGCLGNSKTEDQRNEEKAQREANKKIEKQLQKDKQVYRATHRLLLLGAGESGKSTIVKQMRILHVNGFNGDSEKATKVQDIKNNLKEAIETIVAAMSNLVPPVELANPENQFRVDYILSVMNVPDFDFPPEFYEHAKALWEDEGVRACYERSNEYQLIDCAQYFLDKIDVIKQADYVPSDQDLLRCRVLTSGIFETKFQVDKVNFHMFDVGGQRDERRKWIQCFNDVTAIIFVVASSSYNMVIREDNQTNRLQEALNLFKSIWNNRWLRTISVILFLNKQDLLAEKVLAGKSKIEDYFPEFARYTTPEDATPEPGEDPRVTRAKYFIRDEFLRISTASGDGRHYCYPHFTCAVDTENIRRVFNDCRDIIQRMHLRQYELL

SEQ ID NO: 35849 - protein, 245 aa, Homo sapiens; identical to SEQ ID NO: 35842
  Payload ID: 7087
  Gene Symbol: GNAS
  Gene Name: GNAS complex locus
  Uniprot ID: O95467
  ENSP ID: ENSP00000360139

SEQ ID NO: 35850 - protein, 720 aa, Homo sapiens [sequence omitted]

SEQ ID NO: 35851 - protein, 1037 aa, Homo sapiens
  Payload ID: 7087
  Gene Symbol: GNAS
  Gene Name: GNAS complex locus
  Uniprot ID: Q5JWF2
  ENSP ID: ENSP00000360141
MGVRNCLYGNNMSGQRDIPPEIGEQPEQPPLEAPGAAAPGAGPSPAEEMETEPPHNEPIPVENDGEACGPPEVSRPNFQVLNPAFREAGAHGSYSPPPEEAMPFEAEQPSLGGFWPTLEQPGFPSGVHAGLEAFGPALMEPGAFSGARPGLGGYSPPPEEAMPFEFDQPAQRGCSQLLLQVPDLAPGGPGAAGVPGAPPEEPQALRPAKAGSRGGYSPPPEETMPFELDGEGFGDDSPPPGLSRVIAQVDGSSQFAAVAASSAVRLTPAANAPPLWVPGAIGSPSQEAVRPPSNFTGSSPWMEISGPPFEIGSAPAGVDDTPVNMDSPPIALDGPPIKVSGAPDKRERAERPPVEEEAAEMEGAADAAEGGKVPSPGYGSPAAGAASADTAARAAPAAPADPDSGATPEDPDSGTAPADPDSGAFAADPDSGAAPAAPADPDSGAAPDAPADPDSGAAPDAPADPDAGAAPEAPAAPAAAETRAAHVAPAAPDAGAPTAPAASATRAAQVRRAASAAPASGARRKIHLRPPSPEIQAADPPTPRPTRASAWRGKSESSRGRRVYYDEGVASSDDDSSGDESDDGTSGCLRWFQHRRNRRRRKPQRNLLRNFLVQAFGGCFGRSESPQPKASRSLKVKKVPLAEKRRQMRKEALEKRAQKRAEKKRSKLIDKQLQDEKMGYMCTHRLLLLGAGESGKSTIVKQMRILHVNGFNGEGGEEDPQAARSNSDGEKATKVQDIKNNLKEAIETIVAAMSNLVPPVELANPENQFRVDYILSVMNVPDFDFPPEFYEHAKALWEDEGVRACYERSNEYQLIDCAQYFLDKIDVIKQADYVPSDQDLLRCRVLTSGIFETKFQVDKVNFHMFDVGGQRDERRKWIQCFNDVTAIIFVVASSSYNMVIREDNQTNRLQEALNLFKSIWNNRWLRTISVILFLNKQDLLAEKVLAGKSKIEDYFPEFARYTTPEDATPEPGEDPRVTRAKYFIRDEFLRISTASGDGRHYCYPHFTCAVDTENIRRVFNDCRDIIQRMHLRQYELL

SEQ ID NO: 35852 - protein, 1023 aa, Homo sapiens
  Payload ID: 7087
  Gene Symbol: GNAS
  Gene Name: GNAS complex locus
  Uniprot ID: Q5JWF2
  ENSP ID: ENSP00000360143
MGVRNCLYGNNMSGQRDIPPEIGEQPEQPPLEAPGAAAPGAGPSPAEEMETEPPHNEPIPVENDGEACGPPEVSRPNFQVLNPAFREAGAHGSYSPPPEEAMPFEAEQPSLGGFWPTLEQPGFPSGVHAGLEAFGPALMEPGAFSGARPGLGGYSPPPEEAMPFEFDQPAQRGCSQLLLQVPDLAPGGPGAAGVPGAPPEEPQALRPAKAGSRGGYSPPPEETMPFELDGEGFGDDSPPPGLSRVIAQVDGSSQFAAVAASSAVRLTPAANAPPLWVPGAIGSPSQEAVRPPSNFTGSSPWMEISGPPFEIGSAPAGVDDTPVNMDSPPIALDGPPIKVSGAPDKRERAERPPVEEEAAEMEGAADAAEGGKVPSPGYGSPAAGAASADTAARAAPAAPADPDSGATPEDPDSGTAPADPDSGAFAADPDSGAAPAAPADPDSGAAPDAPADPDSGAAPDAPADPDAGAAPEAPAAPAAAETRAAHVAPAAPDAGAPTAPAASATRAAQVRRAASAAPASGARRKIHLRPPSPEIQAADPPTPRPTRASAWRGKSESSRGRRVYYDEGVASSDDDSSGDESDDGTSGCLRWFQHRRNRRRRKPQRNLLRNFLVQAFGGCFGRSESPQPKASRSLKVKKVPLAEKRRQMRKEALEKRAQKRAEKKRSKLIDKQLQDEKMGYMCTHRLLLLGAGESGKSTIVKQMRILHVNGFNGDSEKATKVQDIKNNLKEAIETIVAAMSNLVPPVELANPENQFRVDYILSVMNVPDFDFPPEFYEHAKALWEDEGVRACYERSNEYQLIDCAQYFLDKIDVIKQADYVPSDQDLLRCRVLTSGIFETKFQVDKVNFHMFDVGGQRDERRKWIQCFNDVTAIIFVVASSSYNMVIREDNQTNRLQEALNLFKSIWNNRWLRTISVILFLNKQDLLAEKVLAGKSKIEDYFPEFARYTTPEDATPEPGEDPRVTRAKYFIRDEFLRISTASGDGRHYCYPHFTCAVDTENIRRVFNDCRDIIQRMHLRQYELL

SEQ ID NO: 35853 - protein, 166 aa, Homo sapiens
  Payload ID: 7087
  Gene Symbol: GNAS
  Gene Name: GNAS complex locus
  ENSP ID: ENSP00000392000
PESESDHEHEEADLELSLPECLEYEEEFDYETESETESEIESETDFETEPETAPTTEPETEPEDDRGPVVPKHSTFGQSLTQRLHALKLRSPDASPSRAPPSTQEPQSPREGEELKPEDKDPRDPEESKEPKEEKQRRRCKPKKPTRRDASPESPSKKGPIPIRRH

SEQ ID NO: 35854 - protein, 93 aa, Homo sapiens
  Payload ID: 7087
  Gene Symbol: GNAS
  Gene Name: GNAS complex locus
  ENSP ID: ENSP00000412356
  MOD_RES (1)..(1): Any amino acid
XVPLAEKRRQMRKEALEKRAQKRAEKKRSKLIDKQLQDEKMGYMCTHRLLLLGAGESGKSTIVKQMRILHVNGFNGEGGEEDPQAARSNSDGI

SEQ ID NO: 35855 - protein, 199 aa, Homo sapiens
  Payload ID: 7087
  Gene Symbol: GNAS
  Gene Name: GNAS complex locus
  ENSP ID: ENSP00000412424
  MOD_RES (1)..(1): Any amino acid
XAFGGCFGRSESPQPKASRSLKVKKVPLAEKRRQMRKEALEKRAQKRAEKKRSKLIDKQLQDEKMGYMCTHRLLLLGAGESGKSTIVKQMRILHVNGFNGDEKATKVQDIKNNLKEAIETIVAAMSNLVPPVELANPENQFRVDYILSVMNVPDFDFPPEFYEHAKALWEDEGVRACYERSNEYQLIDCAQYFLDKIDV

SEQ ID NO: 35856 - protein, 113 aa, Homo sapiens
  Payload ID: 7087
  Gene Symbol: GNAS
  Gene Name: GNAS complex locus
  ENSP ID: ENSP00000416234
  MOD_RES (1)..(1): Any amino acid
XTTEPETEPEDDRGPVVPKHSTFGQSLTQRLHALKLRSPDASPSRAPPSTQEPQSPREGEELKPEDKDPRDPEESKEPKEEKQRRRCKPKKPTRRDASPESPSKKGPIPIRRH

SEQ ID NO: 35857 - protein, 160 aa, Homo sapiens
  Payload ID: 7087
  Gene Symbol: GNAS
  Gene Name: GNAS complex locus
  ENSP ID: ENSP00000474219
MRILHVNGFNGEGGEEDPQAARSNSDGEKATKVQDIKNNLKEAIETIVAAMSNLVPPVELANPENQFRVDYILSVMNVPDFDFPPEFYEHAKALWEDEGVRACYERSNEYQLIDCAQYFLDKIDVIKQADYVPSDQDLLRCRVLTSGIFETKFQVDKVNF

SEQ ID NO: 35858 - protein, 120 aa, Homo sapiens
  Payload ID: 7087
  Gene Symbol: GNAS
  Gene Name: GNAS complex locus
  ENSP ID: ENSP00000474802
MRILHVNGFNGEGGEEDPQAARSNSDGEKATKVQDIKNNLKEAIETIVAAMSNLVPPVELANPENQFRVDYILSVMNVPDFDFPPEFYEHAKALWEDEGVRACYERSNEYQLIDCAQYFL

SEQ ID NO: 35859 - protein, 75 aa, Homo sapiens
  Payload ID: 7088
  Gene Symbol:
  Gene Name: GNG4
  ENSP ID: ENSP00000489027
MKEGMSNNSTTSISQARKAVEQLKMEACMDRVKVSQAAADLLAYCEAHVREDPLIIPVPASENPFREKKFFCTIL

SEQ ID NO: 35860 - protein, 75 aa, Homo sapiens; identical to SEQ ID NO: 35859
  Payload ID: 7088
  Gene Symbol:
  Gene Name: GNG4
  ENSP ID: ENSP00000489194

SEQ ID NO: 35861 - protein, 75 aa, Homo sapiens; identical to SEQ ID NO: 35859
  Payload ID: 7088
  Gene Symbol:
  Gene Name: GNG4
  ENSP ID: ENSP00000489228

SEQ ID NO: 35862 - protein, 75 aa, Homo sapiens; identical to SEQ ID NO: 35859
  Payload ID: 7088
  Gene Symbol:
  Gene Name: GNG4
  ENSP ID: ENSP00000489307

SEQ ID NO: 35863 - protein, 75 aa, Homo sapiens; identical to SEQ ID NO: 35859
  Payload ID: 7088
  Gene Symbol:
  Gene Name: GNG4
  ENSP ID: ENSP00000489454

SEQ ID NO: 35864 - protein, 1859 aa, Homo sapiens
  Payload ID: 7089
  Gene Symbol: GBF1
  Gene Name: golgi brefeldin A resistant guanine nucleotide exchange factor 1
  Uniprot ID: Q92538
  ENSP ID: ENSP00000359000
MVDKNIYIIQGEINIVVGAIKRNARWSTHTPLDEERDPLLHSFGHLKEVLNSITELSEIEPNVFLRPFLEVIRSEDTTGPITGLALTSVNKFLSYALIDPTHEGTAEGMENMADAVTHARFVGTDPASDEVVLMKILQVLRTLLLTPVGAHLTNESVCEIMQSCFRICFEMRLSELLRKSAEHTLVDMVQLLFTRLPQFKEEPKNYVGTNMKKLKMRAGGMSDSSKWKKQKRSPRPPRHMTKVTPGSELPTPNGTTLSSNLTGGMPFIDVPTPISSASSEAASAVVSPSTDSGLEFSSQTTSKEDLTDLEQPGSPGYSTATEPGSSELGVPEQPDLQEGTHVEKSQSASVESIPEVLEECTSPADHSDSASVHDMDYVNPRGVRFTQSSQKEGTALVPYGLPCIRELFRFLISLTNPHDRHNSEVMIHMGLHLLTVALESAPVAQCQTLLGLIKDEMCRHLFQLLSIERLNLYAASLRVCFLLFESMREHLKFQMEMYIKKLMEIITVENPKMPYEMKEMALEAIVQLWRIPSFVTELYINYDCDYYCSNLFEELTKLLSKNAFPVSGQLYTTHLLSLDALLTVIDSTEAHCQAKVLNSLTQQEKKETARPSCEIVDGTREASNTERTASDGKAVGMASDIPGLHLPGGGRLPPEHGKSGCSDLEEAVDSGADKKFARKPPRFSCLLPDPRELIEIKNKKKLLITGTEQFNQKPKKGIQFLQEKGLLTIPMDNTEVAQWLRENPRLDKKMIGEFVSDRKNIDLLESFVSTFSFQGLRLDEALRLYLEAFRLPGEAPVIQRLLEAFTERWMNCNGSPFANSDACFSLAYAVIMLNTDQHNHNVRKQNAPMTLEEFRKNLKGVNGGKDFEQDILEDMYHAIKNEEIVMPEEQTGLVRENYVWNVLLHRGATPEGIFLRVPTASYDLDLFTMTWGPTIAALSYVFDKSLEETIIQKAISGFRKCAMISAHYGLSDVFDNLIISLCKFTALSSESIENLPSVFGSNPKAHIAAKTVFHLAHRHGDILREGWKNIMEAMLQLFRAQLLPKAMIEVEDFVDPNGKISLQREETPSNRGESTVLSFVSWLTLSGPEQSSVRGPSTENQEAKRVALECIKQCDPEKMITESKFLQLESLQELMKALVSVTPDEETYDEEDAAFCLEMLLRIVLENRDRVGCVWQTVRDHLYHLCVQAQDFCFLVERAVVGLLRLAIRLLRREEISAQVLLSLRILLLMKPSVLSRVSHQVAYGLHELLKTNAANIHSGDDWATLFTLLECIGSGVKPPAALQATARADAPDAGAQSDSELPSYHQNDVSLDRGYTSDSEVYTDHGRPGKIHRSATDADVVNSGWLVVGKDDVDNSKPGPSRPGPSPLINQYSLTVGLDLGPHDTKSLLKCVESLSFIVRDAAHITPDNFELCVKTLRIFVEASLNGGCKSQEKRGKSHKYDSKGNRFKKKSKEGSMLRRPRTSSQHASRGGQSDDDEDEGVPASYHTVSLQVSQDLLDLMHTLHTRAASIYSSWAEEQRHLETGGQKIEADSRTLWAHCWCPLLQGIACLCCDARRQVRMQALTYLQRALLVHDLQKLDALEWESCFNKVLFPLLTKLLENISPADVGGMEETRMRASTLLSKVFLQHLSPLLSLSTFAALWLTILDFMDKYMHAGSSDLLSEAIPESLKNMLLVMDTAEIFHSADARGGGPSALWEITWERIDCFLPHLRDELFKQTVIQDPMPMEPQGQKPLASAHLTSAAGDTRTPGHPPPPEIPSELGACDFEKPESPRAASSSSPGSPVASSPSRLSPTPDGPPPLAQPPLILQPLASPLQVGVPPMTLPIILNPALIEATSPVPLLATPRPTDPIPTSEVN

SEQ ID NO: 35865 - protein, 1203 aa, Homo sapiens
  Payload ID: 7090
  Gene Symbol: GLG1
  Gene Name: golgi glycoprotein 1
  Uniprot ID: Q92896
  ENSP ID: ENSP00000205061
MAACGRVRRMFRLSAALHLLLLFAAGAEKLPGQGVHSQGQGPGANFVSFVGQAGGGGPAGQQLPQLPQSSQLQQQQQQQQQQQQPQPPQPPFPAGGPPARRGGAGAGGGWKLAEEESCREDVTRVCPKHTWSNNLAVLECLQDVREPENEISSDCNHLLWNYKLNLTTDPKFESVAREVCKSTITEIKECADEPVGKGYMVSCLVDHRGNITEYQCHQYITKMTAIIFSDYRLICGFMDDCKNDINILKCGSIRLGEKDAHSQGEVVSCLEKGLVKEAEEREPKIQVSELCKKAILRVAELSSDDFHLDRHLYFACRDDRERFCENTQAGEGRVYKCLFNHKFEESMSEKCREALTTRQKLIAQDYKVSYSLAKSCKSDLKKYRCNVENLPRSREARLSYLLMCLESAVHRGRQVSSECQGEMLDYRRMLMEDFSLSPEIILSCRGEIEHHCSGLHRKGRTLHCLMKVVRGEKGNLGMNCQQALQTLIQETDPGADYRIDRALNEACESVIQTACKHIRSGDPMILSCLMEHLYTEKMVEDCEHRLLELQYFISRDWKLDPVLYRKCQGDASRLCHTHGWNETSEFMPQGAVFSCLYRHAYRTEEQGRRLSRECRAEVQRILHQRAMDVKLDPALQDKCLIDLGKWCSEKTETGQELECLQDHLDDLVVECRDIVGNLTELESEDIQIEALLMRACEPIIQNFCHDVADNQIDSGDLMECLIQNKHQKDMNEKCAIGVTHFQLVQMKDFRFSYKFKMACKEDVLKLCPNIKKKVDVVICLSTTVRNDTLQEAKEHRVSLKCRRQLRVEELEMTEDIRLEPDLYEACKSDIKNFCSAVQYGNAQIIECLKENKKQLSTRCHQKVFKLQETEMMDPELDYTLMRVCKQMIKRFCPEADSKTMLQCLKQNKNSELMDPKCKQMITKRQITQNTDYRLNPMLRKACKADIPKFCHGILTKAKDDSELEGQVISCLKLRYADQRLSSDCEDQIRIIIQESALDYRLDPQLQLHCSDEISSLCAEEAAAQEQTGQVEECLKVNLLKIKTELCKKEVLNMLKESKADIFVDPVLHTACALDIKHHCAAITPGRGRQMSCLMEALEDKRVRLQPECKKRLNDRIEMWSYAAKVAPADGFSDLAMQVMTSPSKNYILSVISGSICILFLIGLMCGRITKRVTRELKDRLQYRSETMAYKGLVWSQDVTGSPA

SEQ ID NO: 35866 - protein, 1179 aa, Homo sapiens
  Payload ID: 7090
  Gene Symbol: GLG1
  Gene Name: golgi glycoprotein 1
  Uniprot ID: Q92896
  ENSP ID: ENSP00000405984
MAACGRVRRMFRLSAALHLLLLFAAGAEKLPGQGVHSQGQGPGANFVSFVGQAGGGGPAGQQLPQLPQSSQLQQQQQQQQQQQQPQPPQPPFPAGGPPARRGGAGAGGGWKLAEEESCREDVTRVCPKHTWSNNLAVLECLQDVREPENEISSDCNHLLWNYKLNLTTDPKFESVAREVCKSTITEIKECADEPVGKGYMVSCLVDHRGNITEYQCHQYITKMTAIIFSDYRLICGFMDDCKNDINILKCGSIRLGEKDAHSQGEVVSCLEKGLVKEAEEREPKIQVSELCKKAILRVAELSSDDFHLDRHLYFACRDDRERFCENTQAGEGRVYKCLFNHKFEESMSEKCREALTTRQKLIAQDYKVSYSLAKSCKSDLKKYRCNVENLPRSREARLSYLLMCLESAVHRGRQVSSECQGEMLDYRRMLMEDFSLSPEIILSCRGEIEHHCSGLHRKGRTLHCLMKVVRGEKGNLGMNCQQALQTLIQETDPGADYRIDRALNEACESVIQTACKHIRSGDPMILSCLMEHLYTEKMVEDCEHRLLELQYFISRDWKLDPVLYRKCQGDASRLCHTHGWNETSEFMPQGAVFSCLYRHAYRTEEQGRRLSRECRAEVQRILHQRAMDVKLDPALQDKCLIDLGKWCSEKTETGQELECLQDHLDDLVVECRDIVGNLTELESEDIQIEALLMRACEPIIQNFCHDVADNQIDSGDLMECLIQNKHQKDMNEKCAIGVTHFQLVQMKDFRFSYKFKMACKEDVLKLCPNIKKKVDVVICLSTTVRNDTLQEAKEHRVSLKCRRQLRVEELEMTEDIRLEPDLYEACKSDIKNFCSAVQYGNAQIIECLKENKKQLSTRCHQKVFKLQETEMMDPELDYTLMRVCKQMIKRFCPEADSKTMLQCLKQNKNSELMDPKCKQMITKRQITQNTDYRLNPMLRKACKADIPKFCHGILTKAKDDSELEGQVISCLKLRYADQRLSSDCEDQIRIIIQESALDYRLDPQLQLHCSDEISSLCAEEAAAQEQTGQVEECLKVNLLKIKTELCKKEVLNMLKESKADIFVDPVLHTACALDIKHHCAAITPGRGRQMSCLMEALEDKRVRLQPECKKRLNDRIEMWSYAAKVAPADGFSDLAMQVMTSPSKNYILSVISGSICILFLIGLMCGRITKRVTRELKDR

SEQ ID NO: 35867 - protein, 1192 aa, Homo sapiens
  Payload ID: 7090
  Gene Symbol: GLG1
  Gene Name: golgi glycoprotein 1
  Uniprot ID: Q92896
  ENSP ID: ENSP00000406946
MAACGRVRRMFRLSAALHLLLLFAAGAEKLPGQGVHSQGQGPGANFVSFVGQAGGGGPAGQQLPQLPQSSQLQQQQQQQQQQQQPQPPQPPFPAGGPPARRGGAGAGGGWKLAEEESCREDVTRVCPKHTWSNNLAVLECLQDVRELLWNYKLNLTTDPKFESVAREVCKSTITEIKECADEPVGKGYMVSCLVDHRGNITEYQCHQYITKMTAIIFSDYRLICGFMDDCKNDINILKCGSIRLGEKDAHSQGEVVSCLEKGLVKEAEEREPKIQVSELCKKAILRVAELSSDDFHLDRHLYFACRDDRERFCENTQAGEGRVYKCLFNHKFEESMSEKCREALTTRQKLIAQDYKVSYSLAKSCKSDLKKYRCNVENLPRSREARLSYLLMCLESAVHRGRQVSSECQGEMLDYRRMLMEDFSLSPEIILSCRGEIEHHCSGLHRKGRTLHCLMKVVRGEKGNLGMNCQQALQTLIQETDPGADYRIDRALNEACESVIQTACKHIRSGDPMILSCLMEHLYTEKMVEDCEHRLLELQYFISRDWKLDPVLYRKCQGDASRLCHTHGWNETSEFMPQGAVFSCLYRHAYRTEEQGRRLSRECRAEVQRILHQRAMDVKLDPALQDKCLIDLGKWCSEKTETGQELECLQDHLDDLVVECRDIVGNLTELESEDIQIEALLMRACEPIIQNFCHDVADNQIDSGDLMECLIQNKHQKDMNEKCAIGVTHFQLVQMKDFRFSYKFKMACKEDVLKLCPNIKKKVDVVICLSTTVRNDTLQEAKEHRVSLKCRRQLRVEELEMTEDIRLEPDLYEACKSDIKNFCSAVQYGNAQIIECLKENKKQLSTRCHQKVFKLQETEMMDPELDYTLMRVCKQMIKRFCPEADSKTMLQCLKQNKNSELMDPKCKQMITKRQITQNTDYRLNPMLRKACKADIPKFCHGILTKAKDDSELEGQVISCLKLRYADQRLSSDCEDQIRIIIQESALDYRLDPQLQLHCSDEISSLCAEEAAAQEQTGQVEECLKVNLLKIKTELCKKEVLNMLKESKADIFVDPVLHTACALDIKHHCAAITPGRGRQMSCLMEALEDKRVRLQPECKKRLNDRIEMWSYAAKVAPADGFSDLAMQVMTSPSKNYILSVISGSICILFLIGLMCGRITKRVTRELKDRLQYRSETMAYKGLVWSQDVTGSPA

SEQ ID NO: 35868 - protein, 698 aa, Homo sapiens
  Payload ID: 7090
  Gene Symbol: GLG1
  Gene Name: golgi glycoprotein 1
  ENSP ID: ENSP00000454218
MAACGRVRRMFRLSAALHLLLLFAAGAEKLPGQGVHSQGQGPGANFVSFVGQAGGGGPAGQQLPQLPQSSQLQQQQQQQQQQQQPQPPQPPFPAGGPPARRGGAGAGGGWKLAEEESCREDVTRVCPKHTWSNNLAVLECLQDVREPENEISSDCNHLLWNYKLNLTTDPKFESVAREVCKSTITEIKECADEPVGKGYMVSCLVDHRGNITEYQCHQYITKMTAIIFSDYRLICGFMDDCKNDINILKCGSIRLGEKDAHSQGEVVSCLEKGLVKEAEEREPKIQVSELCKKAILRVAELSSDDFHLDRHLYFACRDDRERFCENTQAGEGRVYKCLFNHKFEESMSEKCREALTTRQKLIAQDYKVSYSLAKSCKSDLKKYRCNVENLPRSREARLSYLLMCLESAVHRGRQVSSECQGEMLDYRRMLMEDFSLSPEIILSCRGEIEHHCSGLHRKGRTLHCLMKVVRGEKGNLGMNCQQALQTLIQETDPGADYRIDRALNEACESVIQTACKHIRSGDPMILSCLMEHLYTEKMVEDCEHRLLELQYFISRDWKLDPVLYRKCQGDASRLCHTHGWNETSEFMPQGAVFSCLYRHAYRTEEQGRRLSRECRAEVQRILHQRAMDVKLDPALQDKCLIDLGKWCSEKTETGQELECLQDHLDDLVVECRDIVGNLTELESEAEREYVFKNLPFKV

SEQ ID NO: 35869 - protein, 74 aa, Homo sapiens
  Payload ID: 7090
  Gene Symbol: GLG1
  Gene Name: golgi glycoprotein 1
  ENSP ID: ENSP00000455927
MVSCLVDHRGNITEYQCHQYITKMTAIIFSDYRLICGFMDDCKNDINILKCGSIRLGEKDAHSQGEVVSCLEKG

SEQ ID NO: 35870 - protein, 305 aa, Homo sapiens
  Payload ID: 7090
  Gene Symbol: GLG1
  Gene Name: golgi glycoprotein 1
  ENSP ID: ENSP00000455950
MAACGRVRRMFRLSAALHLLLLFAAGAEKLPGQGVHSQGQGPGANFVSFVGQAGGGGPAGQQLPQLPQSSQLQQQQQQQQQQQQPQPPQPPFPAGGPPARRGGAGAGGGWKLAEEESCREDVTRVCPKHTWSNNLAVLECLQDVREPENEISSDCNHLLWNYKLNLTTDPKFESVAREVCKSTITEIKECADEPVGKGYMVSCLVDHRGNITEYQCHQYITKMTAIIFSDYRLICGFMDDCKNDINILKCGSIRLGEKDAHSQDTPTALRNREGGSHGSAELKSKGSYTSVPWMSSWILPSRISA

SEQ ID NO: 35871 - protein, 152 aa, Homo sapiens
  Payload ID: 7090
  Gene Symbol: GLG1
  Gene Name: golgi glycoprotein 1
  ENSP ID: ENSP00000456195
MAACGRVRRMFRLSAALHLLLLFAAGAEKLPGQGVHSQGQGPGANFVSFVGQPPFPAGGPPARRGGAGAGGGWKLAEEESCREDVTRVCPKHTWSNNLAVLECLQDVREPENEISSDCNHLLWNYKLNLTTDPKFESVAREVCKSTITEIKE

SEQ ID NO: 35872 - protein, 698 aa, Homo sapiens; identical to SEQ ID NO: 35868
  Payload ID: 7090
  Gene Symbol: GLG1
  Gene Name: golgi glycoprotein 1
  ENSP ID: ENSP00000487234

SEQ ID NO: 35873 - protein, 668 aa, Homo sapiens
  Payload ID: 7091
  Gene Symbol: GOLIM4
  Gene Name: golgi integral membrane protein 4
  ENSP ID: ENSP00000309893
MGNGMCSRKQKRIFQTLLLLTVVFGFLYGAMLYYELQTQLRKAEAVALKYQQHQESLSAQLQVVYEHRSRLEKSLQKERLEHKKAKEDFLVYKLEAQETLNKGRQDSNSRYSALNVQHQMLKSQHEELKKQHSDLEEEHRKQGEDFSRTFNDHKQKYLQLQQEKEQELSKLKETVYNLREENRQLRKAHQDIHTQLQDVKTQVAEYKQLKDTLNRIPSLRKPDPAEQQNVTQVAHSPQGYNTAREKPTREVQEVSRNNDVWQNHEAVPGRAEDTKLYAPTHKEAEFQAPPEPIQQEVERREPEEHQVEEEHRKALEEEEMEQVGQAEHLEEEHDPSPEEQDREWKEQHEQREAANLLEGHARAEVYPSAKPMIKFQSPYEEQLEQQRLAVQQVEEAQQLREHQEALHQQRLQGHLLRQQEQQQQQVAREMALQRQAELEEGRPQHQEQLRQQAHYDAMDNDIVQGAEDQGIQGEEGAYERDNQHQDEAEGDPGNRHEPREQGPREADPESEADRAAVEDINPADDPNNQGEDEFEEAEQVREENLPDENEEQKQSNQKQENTEVEEHLVMAGNPDQQEDNVDEQYQEEAEEEVQEDLTEEKKRELEHNAEETYGENDENTDDKNNDGEEQEVRDDNRPKGREEHYEEEEEEEEDGAAVAEKSHRRAEM

SEQ ID NO: 35874 - protein, 696 aa, Homo sapiens
  Payload ID: 7091
  Gene Symbol: GOLIM4
  Gene Name: golgi integral membrane protein 4
  Uniprot ID: O00461
  ENSP ID: ENSP00000417354
MGNGMCSRKQKRIFQTLLLLTVVFGFLYGAMLYYELQTQLRKAEAVALKYQQHQESLSAQLQVVYEHRSRLEKSLQKERLEHKKAKEDFLVYKLEAQETLNKGRQDSNSRYSALNVQHQMLKSQHEELKKQHSDLEEEHRKQGEDFSRTFNDHKQKYLQLQQEKEQELSKLKETVYNLREENRQLRKAHQDIHTQLQDVKQQHKNLLSEHEQLVVTLEDHKSALAAAQTQVAEYKQLKDTLNRIPSLRKPDPAEQQNVTQVAHSPQGYNTAREKPTREVQEVSRNNDVWQNHEAVPGRAEDTKLYAPTHKEAEFQAPPEPIQQEVERREPEEHQVEEEHRKALEEEEMEQVGQAEHLEEEHDPSPEEQDREWKEQHEQREAANLLEGHARAEVYPSAKPMIKFQSPYEEQLEQQRLAVQQVEEAQQLREHQEALHQQRLQGHLLRQQEQQQQQVAREMALQRQAELEEGRPQHQEQLRQQAHYDAMDNDIVQGAEDQGIQGEEGAYERDNQHQDEAEGDPGNRHEPREQGPREADPESEADRAAVEDINPADDPNNQGEDEFEEAEQVREENLPDENEEQKQSNQKQENTEVEEHLVMAGNPDQQEDNVDEQYQEEAEEEVQEDLTEEKKRELEHNAEETYGENDENTDDKNNDGEEQEVRDDNRPKGREEHYEEEEEEEEDGAAVAEKSHRRAEM

SEQ ID NO: 35875 - protein, 401 aa, Homo sapiens
  Payload ID: 7092
  Gene Symbol: GOLM1
  Gene Name: golgi membrane protein 1
  Uniprot ID: Q8NBJ4
  ENSP ID: ENSP00000373363
MMGLGNGRRSMKSPPLVLAALVACIIVLGFNYWIASSRSVDLQTRIMELEGRVRRAAAERGAVELKKNEFQGELEKQREQLDKIQSSHNFQLESVNKLYQDEKAVLVNNITTGERLIRVLQDQLKTLQRNYGRLQQDVLQFQKNQTNLERKFSYDLSQCINQMKEVKEQCEERIEEVTKKGNEAVASRDLSENNDQRQQLQALSEPQPRLQAAGLPHTEVPQGKGNVLGNSKSQTPAPSSEVVLDSKRQVEKEETNEIQVVNEEPQRDRLPQEPGREQVVEDRPVGGRGFGGAGELGQTPQVQAALSVSQENPEMEGPERDQLVIPDGQEEEQEAAGEGRNQQKLRGEDDYNMDENEAESETDKQAALAGNDRNIDVFNVEDQKRDTINLLDQREKRNHTL

SEQ ID NO: 35876 - protein, 401 aa, Homo sapiens; identical to SEQ ID NO: 35875
  Payload ID: 7092
  Gene Symbol: GOLM1
  Gene Name: golgi membrane protein 1
  Uniprot ID: Q8NBJ4
  ENSP ID: ENSP00000373364

SEQ ID NO: 35877 - protein, 105 aa, Homo sapiens
  Payload ID: 7092
  Gene Symbol: GOLM1
  Gene Name: golgi membrane protein 1
  ENSP ID: ENSP00000417504
MMGLGNGRRSMKSPPLVLAALVACIIVLGFNYWIASSRSVDLQTRIMELEGRVRRAAAERGAVELKKNEFQGELEKQREQLDKIQSSHNFQLESVNKLYQDEKTS

SEQ ID NO: 35878 - protein, 80 aa, Homo sapiens
  Payload ID: 7092
  Gene Symbol: GOLM1
  Gene Name: golgi membrane protein 1
  ENSP ID: ENSP00000418155
MMGLGNGRRSMKSPPLVLAALVACIIVLGFNYWIASSRSVDLQTRIMELEGRVRRAAAERGAVELKKNEFQGELEKQREQ

SEQ ID NO: 35879 - protein, 121 aa, Homo sapiens
  Payload ID: 7092
  Gene Symbol: GOLM1
  Gene Name: golgi membrane protein 1
  ENSP ID: ENSP00000419076
MMGLGNGRRSMKSPPLVLAALVACIIVLGFNYWIASSRSVDLQTRIMELEGRVRRAAAERGAVELKKNEFQGELEKQREQLDKIQSSHNFQLESVNKLYQDEKAVLVNNITTGERLIRVLQ

SEQ ID NO: 35880 - protein, 298 aa, Homo sapiens
  Payload ID: 7093
  Gene Symbol: GOLPH3
  Gene Name: golgi phosphoprotein 3 (coat-protein)
  Uniprot ID: Q9H4A6
  ENSP ID: ENSP00000265070
MTSLTQRSSGLVQRRTEASRNAADKERAAGGGAGSSEDDAQSRRDEQDDDDKGDSKETRLTLMEEVLLLGLKDREGYTSFWNDCISSGLRGCMLIELALRGRLQLEACGMRRKSLLTRKVICKSDAPTGDVLLDEALKHVKETQPPETVQNWIELLSGETWNPLKLHYQLRNVRERLAKNLVEKGVLTTEKQNFLLFDMTTHPLTNNNIKQRLIKKVQEAVLDKWVNDPHRMDRRLLALIYLAHASDVLENAFAPLLDEQYDLATKRVRQLLDLDPEVECLKANTNEVLWAVVAAFTK

SEQ ID NO: 35881 - protein, 93 aa, Homo sapiens
  Payload ID: 7093
  Gene Symbol: GOLPH3
  Gene Name: golgi phosphoprotein 3 (coat-protein)
  ENSP ID: ENSP00000426752
MTSLTQRSSGLVQRRTEASRNAADKERAAGGGAGSSEDDAQSRRDEQDDDDKGDSKETRLTLMEEVLLLGLKDREVRARRAGRGAAARGPGAR

SEQ ID NO: 35882 - protein, 285 aa, Homo sapiens
  Payload ID: 7094
  Gene Symbol: GOLPH3L
  Gene Name: golgi phosphoprotein 3-like
  Uniprot ID: Q9H4A5
  ENSP ID: ENSP00000271732
MTTLTHRARRTEISKNSEKKMESEEDSNWEKSPDNEDSGDSKDIRLTLMEEVLLLGLKDKEGYTSFWNDCISSGLRGGILIELAMRGRIYLEPPTMRKKRLLDRKVLLKSDSPTGDVLLDETLKHIKATEPTETVQTWIELLTGETWNPFKLQYQLRNVRERIAKNLVEKGILTTEKQNFLLFDMTTHPVTNTTEKQRLVKKLQDSVLERWVNDPQRMDKRTLALLVLAHSSDVLENVFSSLTDDKYDVAMNRAKDLVELDPEVEGTKPSATEMIWAVLAAFNKS

SEQ ID NO: 35883 - protein, 269 aa, Homo sapiens
  Payload ID: 7094
  Gene Symbol: GOLPH3L
  Gene Name: golgi phosphoprotein 3-like
  ENSP ID: ENSP00000410476
MTTLTHRARRTEISKNSEKKMESEEDSNWEKSPDNEDSGDSKDIRLTLMEEVLLLGLKDKEANINSWITRWLTPVIPALWGAEGYTSFWNDCISSGLRGGILIELAMRGRIYLEPPTMRKKRLLDRKVLLKSDSPTGDVLLDETLKHIKATEPTETVQTWIELLTGETWNPFKLQYQLRNVRERIAKNLVEKGILTTEKQNFLLFDMTTHPVTNTTEKQRLVKKLQDSVLERWVNDPQRMDKRTLALLVLAHSSDVLENVFSSLTDDKY

SEQ ID NO: 35884 - protein, 440 aa, Homo sapiens
  Payload ID: 7095
  Gene Symbol: GORASP1
  Gene Name: golgi reassembly stacking protein 1, 65kDa
  Uniprot ID: Q9BQQ3
  ENSP ID: ENSP00000313869
MGLGVSAEQPAGGAEGFHLHGVQENSPAQQAGLEPYFDFIITIGHSRLNKENDTLKALLKANVEKPVKLEVFNMKTMRVREVEVVPSNMWGGQGLLGASVRFCSFRRASEQVWHVLDVEPSSPAALAGLRPYTDYVVGSDQILQESEDFFTLIESHEGKPLKLMVYNSKSDSCREVTVTPNAAWGGEGSLGCGIGYGYLHRIPTQPPSYHKKPPGTPPPSALPLGAPPPDALPPGPTPEDSPSLETGSRQSDYMEALLQAPGSSMEDPLPGPGSPSHSAPDPDGLPHFMETPLQPPPPVQRVMDPGFLDVSGISLLDNSNASVWPSLPSSTELTTTAVSTSGPEDICSSSSSHERGGEATWSGSEFEVSFLDSPGAQAQADHLPQLTLPDSLTSAASPEDGLSAELLEAQAEEEPASTEGLDTGTEAEGLDSQAQISTTE

SEQ ID NO: 35885 - protein, 316 aa, Homo sapiens
  Payload ID: 7095
  Gene Symbol: GORASP1
  Gene Name: golgi reassembly stacking protein 1, 65kDa
  ENSP ID: ENSP00000392020
MGLGVSAEQPAGGAEGFHLHGVQENSPAQQAGLEPYFDFIITIGHSRLNKENDTLKALLKANVEKPVKLEVFNMKTMRVREVEVVPSNMWGGQGLLGASVRFCSFRRASEQVWHVLDVEPSSPAALAGLRPYTDYVVGSDQILQESEDFFTLIESHEGKPLKLMVYNSKSDSCREVTVTPNAAWGGEGSPPATTRSHLAPHHLLLYHLVPHHLMLYHLDPPPRTLLPWRQVPGRVTTWRPCCRHLAPPWRIPFLGLGVPATVLQTLMDFPISWRLLFSPHLQCSELWTQASWTCREFLSWTTAMPVCGPACPLPQN

SEQ ID NO: 35886 - protein, 193 aa, Homo sapiens
  Payload ID: 7095
  Gene Symbol: GORASP1
  Gene Name: golgi reassembly stacking protein 1, 65kDa
  ENSP ID: ENSP00000392993
MHHYQSGRTRALSTHLRSPAAGRSPCWAWEESQPRRGQSRGPGLTEWTQLRGSPSARVLPVVQENSPAQQAGLEPYFDFIITIGHSRLNKENDTLKALLKANVEKPVKLEVFNMKTMRVREVEVVPSNMWGGQGLLGASVRFCSFRRASEQVWHVLDVEPSSPAALAGLRPYTDYVVGSDQILQESEDFFTLI

SEQ ID NO: 35887 - protein, 141 aa, Homo sapiens
  Payload ID: 7095
  Gene Symbol: GORASP1
  Gene Name: golgi reassembly stacking protein 1, 65kDa
  ENSP ID: ENSP00000395241
YFDFIITIGHSRLNKENDTLKALLKANVEKPVKLEVFNMKTMRVREVEVVPSNMWGGQGLLGASVRFCSFRRASEQVWHVLESLATCLQQKQQCSGCSCSQGCGTIFTCCPCRPAPLHRLCGWFGPDSPGVRGLLYAHRVS

SEQ ID NO: 35888 - protein, 285 aa, Homo sapiens
  Payload ID: 7095
  Gene Symbol: GORASP1
  Gene Name: golgi reassembly stacking protein 1, 65kDa
  ENSP ID: ENSP00000395709
MGLGVSAEQPAGGAEGFHLHGDVEPSSPAALAGLRPYTDYVVGSDQILQEPPSYHKKPPGTPPPSALPLGAPPPDALPPGPTPEDSPSLETGSRQSDYMEALLQAPGSSMEDPLPGPGSPSHSAPDPDGLPHFMETPLQPPPPVQRVMDPGFLDVSGISLLDNSNASVWPSLPSSTELTTTAVSTSGPEDICSSSSSHERGGEATWSGSEFEVSFLDSPGAQAQADHLPQLTLPDSLTSAASPEDGLSAELLEAQAEEEPASTEGLDTGTEAEGLDSQAQISTTE

SEQ ID NO: 35889 - protein, 215 aa, Homo sapiens
  Payload ID: 7095
  Gene Symbol: GORASP1
  Gene Name: golgi reassembly stacking protein 1, 65kDa
  Uniprot ID: Q9BQQ3
  ENSP ID: ENSP00000403167
MGLGVSAEQPAGGAEGFHLHGVQENSPAQQAGLEPYFDFIITIGHSRLNKENDTLKALLKANVEKPVKLEVFNMKTMRVREVEVVPSNMWGGQGLLGASVRFCSFRRASEQVWHVLDVEPSSPAALAGLRPYTDYVVGSDQILQESEDFFTLIESHEGKPLKLMVYNSKSDSCRESGMWHWLWVSTPDPNSAPQLPQEATWHPTTFCSTTWCPTT

SEQ ID NO: 35890 - protein, 246 aa, Homo sapiens
  Payload ID: 7095
  Gene Symbol: GORASP1
  Gene Name: golgi reassembly stacking protein 1, 65kDa
  Uniprot ID: Q9BQQ3
  ENSP ID: ENSP00000403552
MKTMRVREVEVVPSNMWGGQGLLGASVRFCSFRRASEQVWHVLDVEPSSPAALAGLRPYTDYVVGSDQILQESEDFFTLIESHEGKPLKLMVYNSKSDSCREVTVTPNAAWGGEGSLGCGIGYGYLHRIPTQPPSYHKKPPGTPPPSALPLGAPPPDALPPGPTPEDSPSLETGSRQSDYMEALLQAPGSSMEDPLPGPGSPSHSAPDPDGLPHFMETPLQPPPPVQRVMDPAMPVCGPACPLPQN

SEQ ID NO: 35891 - protein, 69 aa, Homo sapiens
  Payload ID: 7095
  Gene Symbol: GORASP1
  Gene Name: golgi reassembly stacking protein 1, 65kDa
  ENSP ID: ENSP00000405976
MKTMRVREVEVVPSNMWGGQGLLGASVRFCSFRRASEQVWHVLDVEPSSPAALAGLRPYTDYVVGSDQI

SEQ ID NO: 35892 - protein, 88 aa, Homo sapiens
  Payload ID: 7095
  Gene Symbol: GORASP1
  Gene Name: golgi reassembly stacking protein 1, 65kDa
  ENSP ID: ENSP00000411104
MGLGVSAEQPAGGAEGFHLHGENSPAQQAGLEPYFDFIITIGHSRLNKENDTLKALLKANVEKPVKLEVFNMKTMRVREVEVVPSNMW

SEQ ID NO: 35893 - protein, 345 aa, Homo sapiens
  Payload ID: 7095
  Gene Symbol: GORASP1
  Gene Name: golgi reassembly stacking protein 1, 65kDa
  ENSP ID: ENSP00000419123
MGLGVSAEQPAGGAEGFHLHGDVEPSSPAALAGLRPYTDYVVGSDQILQESEDFFTLIESHEGKPLKLMVYNSKSDSCREVTVTPNAAWGGEGSLGCGIGYGYLHRIPTQPPSYHKKPPGTPPPSALPLGAPPPDALPPGPTPEDSPSLETGSRQSDYMEALLQAPGSSMEDPLPGPGSPSHSAPDPDGLPHFMETPLQPPPPVQRVMDPGFLDVSGISLLDNSNASVWPSLPSSTELTTTAVSTSGPEDICSSSSSHERGGEATWSGSEFEVSFLDSPGAQAQADHLPQLTLPDSLTSAASPEDGLSAELLEAQAEEEPASTEGLDTGTEAEGLDSQAQISTTE

SEQ ID NO: 35894 - protein, 452 aa, Homo sapiens
  Payload ID: 7096
  Gene Symbol: GORASP2
  Gene Name: golgi reassembly stacking protein 2, 55kDa
  Uniprot ID: Q9H8Y8
  ENSP ID: ENSP00000234160
MGSSQSVEIPGGGTEGYHVLRVQENSPGHRAGLEPFFDFIVSINGSRLNKDNDTLKDLLKANVEKPVKMLIYSSKTLELRETSVTPSNLWGGQGLLGVSIRFCSFDGANENVWHVLEVESNSPAALAGLRPHSDYIIGADTVMNESEDLFSLIETHEAKPLKLYVYNTDTDNCREVIITPNSAWGGEGSLGCGIGYGYLHRIPTRPFEEGKKISLPGQMAGTPITPLKDGFTEVQLSSVNPPSLSPPGTTGIEQSLTGLSISSTPPAVSSVLSTGVPTVPLLPPQVNQSLTSVPPMNPATTLPGLMPLPAGLPNLPNLNLNLPAPHIMPGVGLPELVNPGLPPLPSMPPRNLPGIAPLPLPSEFLPSFPLVPESSSAASSGELLSSLPPTSNAPSDPATTTAKADAASSLTVDVTPPTAKAPTTVEDRVGDSTPVSEKPVSAAVDANASESP

SEQ ID NO: 35895 - protein, 73 aa, Homo sapiens
  Payload ID: 7096
  Gene Symbol: GORASP2
  Gene Name: golgi reassembly stacking protein 2, 55kDa
  ENSP ID: ENSP00000398191
MGSSQSVEIPGGGTEGYHVLRLPKLGRARRQRLQSGDCEGSLCAFLGEGSGPAVRRRGLRRQVLNHLGAGRVA

SEQ ID NO: 35896 - protein, 23 aa, Homo sapiens
  Payload ID: 7096
  Gene Symbol: GORASP2
  Gene Name: golgi reassembly stacking protein 2, 55kDa
  ENSP ID: ENSP00000399889
MGSSQSVEIPGGGTEGYHVLRHQ

SEQ ID NO: 35897 - protein, 38 aa, Homo sapiens
  Payload ID: 7096
  Gene Symbol: GORASP2
  Gene Name: golgi reassembly stacking protein 2, 55kDa
  ENSP ID: ENSP00000401808
MGSSQSVEIPGGGTEGYHVLRERDPDPQSGGGACGGRC

SEQ ID NO: 35898 - protein, 32 aa, Homo sapiens
  Payload ID: 7096
  Gene Symbol: GORASP2
  Gene Name: golgi reassembly stacking protein 2, 55kDa
  ENSP ID: ENSP00000413945
MGSSQSVEIPGGGTEGYHVLRVQENSPGHRAE

SEQ ID NO: 35899 - protein, 250 aa, Homo sapiens
  Payload ID: 7097
  Gene Symbol: GOSR1
  Gene Name: golgi SNAP receptor complex member 1
  Uniprot ID: O95249
  ENSP ID: ENSP00000225724
MAAGTSSYWEDLRKQARQLENELDLKLVSFSKLCTSYSHSSTRDGRRDRYSSDTTPLLNGSSQDRMFETMAIEIEQLLARLTGVNDKMAEYTNSAGVPSLNAALMHTLQRHRDILQDYTHEFHKTKANFMAIRERENLMGSVRKDIESYKSGSGVNNRRTELFLKEHDHLRNSDRLIEETISIAMATKENMTSQRGMLKSIHSKMNTLANRFPAVNSLIQRINLRKRRDSLILGGVIGICTILLLLYAFH

SEQ ID NO: 35900 - protein, 174 aa, Homo sapiens
  Payload ID: 7097
  Gene Symbol: GOSR1
  Gene Name: golgi SNAP receptor complex member 1
  ENSP ID: ENSP00000396977
MAAGTSSYWEDLRKQARQLENELDLKLVSFSKLCTSYSHSSTRDGRRDSSDTTPLLNGSSQDRMFETMAIEIEQLLARLTGVNDKMAEYTNSAGVPSLNAALMHTLQRHRDILQDYTHEFHKTKANFMAIRERENLMGSVRKDIESYKSGSGVNNRRTELFLKEHDHLRKGFQW

SEQ ID NO: 35901 - protein, 248 aa, Homo sapiens
  Payload ID: 7097
  Gene Symbol: GOSR1
  Gene Name: golgi SNAP receptor complex member 1
  ENSP ID: ENSP00000414441
MAAGTSSYWEDLRKQARQLENELDLKLVSFSKLCTSYSHSSTRDGRRDSSDTTPLLNGSSQDRMFETMAIEIEQLLARLTGVNDKMAEYTNSAGVPSLNAALMHTLQRHRDILQDYTHEFHKTKANFMAIRERENLMGSVRKDIESYKSGSGVNNRRTELFLKEHDHLRNSDRLIEETISIAMATKENMTSQRGMLKSIHSKMNTLANRFPAVNSLIQRINLRKRRDSLILGGVIGICTILLLLYAFH

SEQ ID NO: 35902 - protein, 255 aa, Homo sapiens
  Payload ID: 7097
  Gene Symbol: GOSR1
  Gene Name: golgi SNAP receptor complex member 1
  ENSP ID: ENSP00000414956
  MOD_RES (1)..(1): Any amino acid
XGPAVTGKVRARRPPDLRKQARQLENELDLKLVSFSKLCTSYSHSSTRDGRRDRYSSDTTPLLNGSSQDRMFETMAIEIEQLLARLTGVNDKMAEYTNSAGVPSLNAALMHTLQRHRDILQDYTHEFHKTKANFMAIRERENLMGSVRKDIESYKSGSGVNNRRTELFLKEHDHLRNSDRLIEETISIAMATKENMTSQRGMLKSIHSKMNTLANRFPAVNSLIQRINLRKRRDSLILGGVIGICTILLLLYAFH

SEQ ID NO: 35903 - protein, 81 aa, Homo sapiens
  Payload ID: 7097
  Gene Symbol: GOSR1
  Gene Name: golgi SNAP receptor complex member 1
  ENSP ID: ENSP00000438330
MAAGTSSYWEDLRKQARQLENELDLKLVSFSKLCTSYSHSSTRDGRRDRYRKNYLENISQEILPQTETGFVELLQPNSPSK

SEQ ID NO: 35904 - protein, 185 aa, Homo sapiens
  Payload ID: 7097
  Gene Symbol: GOSR1
  Gene Name: golgi SNAP receptor complex member 1
  Uniprot ID: O95249
  ENSP ID: ENSP00000462638
MFETMAIEIEQLLARLTGVNDKMAEYTNSAGVPSLNAALMHTLQRHRDILQDYTHEFHKTKANFMAIRERENLMGSVRKDIESYKSGSGVNNRRTELFLKEHDHLRNSDRLIEETISIAMATKENMTSQRGMLKSIHSKMNTLANRFPAVNSLIQRINLRKRRDSLILGGVIGICTILLLLYAFH

SEQ ID NO: 35905 - protein, 236 aa, Homo sapiens
  Payload ID: 7097
  Gene Symbol: GOSR1
  Gene Name: golgi SNAP receptor complex member 1
  ENSP ID: ENSP00000465115
MAAGTSSYWEDLRKQARQLENELDLKLVSFSKLCTSYSHSSTRDGRRDRYSSDTTPLLNGSSQDRMFETMAIEIEQLLARLTGVNDKMAEYTNSAGVPSLNAALMHTLQRHRDILQDYTHEFHKTKANFMAIRERENLMGSVRKDIDGSGVNNRRTELFLKEHDHLRNIAMATKENMTSQRGMLKSIHSKMNTLANRFPAVNSLIQRINLRKRRDSLILGGVIGICTILLLLYAFH

SEQ ID NO: 35906 - protein, 175 aa, Homo sapiens
  Payload ID: 7097
  Gene Symbol: GOSR1
  Gene Name: golgi SNAP receptor complex member 1
  ENSP ID: ENSP00000479971
MAAGTSSYWEDLRKQARQLENELDLKLVSFSKLCTSYSHSSTRDGRRDRYSSDTTPLLNGSSQDRMFETMAIEIEQLLARLTGVNDKMAEYTNSAGVPSLNAALMHTLQRHRDILQVIYWARDVFIITGVWVFFFNPCIGYVHIYLKGQREKSEKINAMLKGLVLLFFGVTIIKF

SEQ ID NO: 35907 - protein, 255 aa, Homo sapiens
  Payload ID: 7097
  Gene Symbol: GOSR1
  Gene Name: golgi SNAP receptor complex member 1
  ENSP ID: ENSP00000482171
MAAGTSSYWEGEARRPPDLRKQARQLENELDLKLVSFSKLCTSYSHSSTRDGRRDSSDTTPLLNGSSQDRMFETMAIEIEQLLARLTGVNDKMAEYTNSAGVPSLNAALMHTLQRHRDILQDYTHEFHKTKANFMAIRERENLMGSVRKDIESYKSGSGVNNRRTELFLKEHDHLRNSDRLIEETISIAMATKENMTSQRGMLKSIHSKMNTLANRFPAVNSLIQRINLRKRRDSLILGGVIGICTILLLLYAFH

SEQ ID NO: 35908 - protein, 213 aa, Homo sapiens
  Payload ID: 7098
  Gene Symbol: GOSR2
  Gene Name: golgi SNAP receptor complex member 2
  Uniprot ID: O14653
  ENSP ID: ENSP00000225567
MDPLFQQTHKQVHEIQSCMGRLETADKQSVHIVENEIQASIDQIFSRLERLEILSSKEPPNKRQNARLRVDQLKYDVQHLQTALRNFQHRRHAREQQERQREELLSRTFTTNDSDTTIPMDESLQFNSSLQKVHNGMDDLILDGHNILDGLRTQRLTLKGTQKKILDIANMLGLSNTVMRLIEKRAFQDKYFMIGTQGSCQTAHFGGRSAGSS

SEQ ID NO: 35909 - protein, 212 aa, Homo sapiens
  Payload ID: 7098
  Gene Symbol: GOSR2
  Gene Name: golgi SNAP receptor complex member 2
  Uniprot ID: O14653
  ENSP ID: ENSP00000377101
MDPLFQQTHKQVHEIQSCMGRLETADKQSVHIVENEIQASIDQIFSRLERLEILSSKEPPNKRQNARLRVDQLKYDVQHLQTALRNFQHRRHAREQQERQREELLSRTFTTNDSDTTIPMDESLQFNSSLQKVHNGMDDLILDGHNILDGLRTQRLTLKGTQKKILDIANMLGLSNTVMRLIEKRAFQDKYFMIGGMLLTCVVMFLVVQYLT

SEQ ID NO: 35910 - protein, 195 aa, Homo sapiens
  Payload ID: 7098
  Gene Symbol: GOSR2
  Gene Name: golgi SNAP receptor complex member 2
  Uniprot ID: O14653
  ENSP ID: ENSP00000394559
MDPLFQQTHKQVHEIQSCMGRLETADKQSVHIVENEIQASIDQIFSRLERLEILSSKEPPNKRQNARLRVDQLKYDVQHLQTALRNFQHRRHAREQQERQREELLSRTFTTNDSDTTIPMDESLQFNSSLQKVHNGMDDLILDGHNILDGLRTQRLTLKVGSLLGDREKASCFSLIQQFSNCVYILITCPQIVIF

SEQ ID NO: 35911 - protein, 199 aa, Homo sapiens
  Payload ID: 7098
  Gene Symbol: GOSR2
  Gene Name: golgi SNAP receptor complex member 2
  ENSP ID: ENSP00000458154
  MOD_RES (1)..(1): Any amino acid
XPLFQQTHKQVHEIQSCMGRLETADKQSVHIENEIQASIDQIFSRLERLEILSSKEPPNKRQNARLRVDQLKYDVQHLQTALRNFQHRRHAREQQERQREELLSRTFTTNDSDTTIPMDESLQFNSSLQKVHNGMDDLILDGHNILDGLRTQRLTLKGTQKKILDIANMLGLSNTVMRLIEKRAFQDKYFMIGGMLLTC

SEQ ID NO: 35912 - protein, 143 aa, Homo sapiens
  Payload ID: 7098
  Gene Symbol: GOSR2
  Gene Name: golgi SNAP receptor complex member 2
  ENSP ID: ENSP00000458911
MDPLFQQTHKQVHEIQSCMGRLETADKQSVHIVENEIQASIDQIFSRLERLEILSSKEPPNKRQNARLRVDQLKYDVQHLQTALRNFQHRRHAREQQERQREELLSRTFTTNVSQARGEGRPALDRSWGLEFRSLSAICFGGV

SEQ ID NO: 35913 - protein, 149 aa, Homo sapiens
  Payload ID: 7098
  Gene Symbol: GOSR2
  Gene Name: golgi SNAP receptor complex member 2
  ENSP ID: ENSP00000460760
MGRLETADKQSVHIVENEIQASIDQIFSRLERLEILSSKEPPNKRQNARLRVDQLKYDVQHLQTALRNFQHRRHAREQQERQREELLSRTFTTNGTQKKILDIANMLGLSNTVMRLIEKRAFQDKYFMIDKEHMFLTRECALFPTHSHH

SEQ ID NO: 35914 - protein, 165 aa, Homo sapiens
  Payload ID: 7098
  Gene Symbol: GOSR2
  Gene Name: golgi SNAP receptor complex member 2
  ENSP ID: ENSP00000461673
MDPLFQQTHKQVHEIQSCMGRLETADKQSVHIVENEIQASIDQIFSRLERLEILSSKEPPNKRQNARLRVDQLKYDVQHLQTALRNFQHRRHAREQQERQREELLSRTFTTNGTQKKILDIANMLGLSNTVMRLIEKRAFQDKYFMIGGMLLTCVVMFLVVQYLT

SEQ ID NO: 35915 - protein, 98 aa, Homo sapiens
  Payload ID: 7098
  Gene Symbol: GOSR2
  Gene Name: golgi SNAP receptor complex member 2
  ENSP ID: ENSP00000461784
GTQKKILDIANMLGLSNTVMRLIEKRAFQDKYFMIETRSHHVAQNGPELLSSRDPPASASRSAGIIGMSHHPDLQIPFELRLGFELWFYQLLAVISDQ

SEQ ID NO: 35916 - protein, 327 aa, Homo sapiens
  Payload ID: 7099
  Gene Symbol: GET4
  Gene Name: golgi to ER traffic protein 4
  Uniprot ID: Q7L5D6
  ENSP ID: ENSP00000265857
MAAAAAMAEQESARNGGRNRGGVQRVEGKLRASVEKGDYYEAHQMYRTLFFRYMSQSKHTEARELMYSGALLFFSHGQQNSAADLSMLVLESLEKAEVEVADELLENLAKVFSLMDPNSPERVTFVSRALKWSSGGSGKLGHPRLHQLLALTLWKEQNYCESRYHFLHSADGEGCANMLVEYSTSRGFRSEVDMFVAQAVLQFLCLKNKSSASVVFTTYTQKHPSIEDGPPFVEPLLNFIWFLLLAVDGGKLTVFTVLCEQYQPSLRRDPMYNEYLDRIGQLFFGVPPKQTSSYGGLLGNLLTSLMGSSEQEDGEESPSDGSPIELD

SEQ ID NO: 35917 - protein, 274 aa, Homo sapiens
  Payload ID: 7099
  Gene Symbol: GET4
  Gene Name: golgi to ER traffic protein 4
  Uniprot ID: Q7L5D6
  ENSP ID: ENSP00000385646
MSQSKHTEARELMYSGALLFFSHGQQNSAADLSMLVLESLEKAEVEVADELLENLAKVFSLMDPNSPERVTFVSRALKWSSGGSGKLGHPRLHQLLALTLWKEQNYCESRYHFLHSADGEGCANMLVEYSTSRGFRSEVDMFVAQAVLQFLCLKNKSSASVVFTTYTQKHPSIEDGPPFVEPLLNFIWFLLLAVDGGKLTVFTVLCEQYQPSLRRDPMYNEYLDRIGQLFFGVPPKQTSSYGGLLGNLLTSLMGSSEQEDGEESPSDGSPIELD

SEQ ID NO: 35918 - protein, 167 aa, Homo sapiens
  Payload ID: 7099
  Gene Symbol: GET4
  Gene Name: golgi to ER traffic protein 4
  ENSP ID: ENSP00000390288
MRFCPWPHWRHREARRVWELVFPECPVPDGSRPPLSQSCPCRTGTRTAGHRVSGPVEAPAVVLGYMSQSKHTEARELMYSGALLFFSHGQQNSAADLSMLVLESLEKAEVEVADELLENLAKVFSLMDPNSPERVTFVSRALKWSSGGSGKLGHPRLHQLLALTLWK

SEQ ID NO: 35919 - protein, 158 aa, Homo sapiens
  Payload ID: 7099
  Gene Symbol: GET4
  Gene Name: golgi to ER traffic protein 4
  ENSP ID: ENSP00000407113
MPRARARYPERPQLFLDSSSPRHLPQPPPRPGRPSFLPRCALGHMALELRWAAQCGGPRLTQGRPAENLAKVFSLMDPNSPERVTFVSRALKWSSGGSGKLGHPRLHQLLALTLWKEQNYCESRYHFLHSADGEGCANMLVEYSTSRGFRSEVDMFVA

SEQ ID NO: 35920 - protein, 148 aa, Homo sapiens
  Payload ID: 7099
  Gene Symbol: GET4
  Gene Name: golgi to ER traffic protein 4
  ENSP ID: ENSP00000414097
MSQSKHTEARELMYSGALLFFSHGQQNSAADLSMLVLESLEKAEVEVADELLENLAKVFSLMDPNSPERVTFVSRALKWSSGGSGKLGHPRLHQLLALTLWKEQNYCESRYHFLHSADGEGCANMLVEYSTSRGFRSEVDMFVAQAVL

SEQ ID NO: 35921 - protein, 132 aa, Homo sapiens
  Payload ID: 7100
  Gene Symbol: GOLT1A
  Gene Name: golgi transport 1A
  Uniprot ID: Q6ZVE7
  ENSP ID: ENSP00000308535
MISITEWQKIGVGITGFGIFFILFGTLLYFDSVLLAFGNLLFLTGLSLIIGLRKTFWFFFQRHKLKGTSFLLGGVVIVLLRWPLLGMFLETYGFFSLFKGFFPVAFGFLGNVCNIPFLGALFRRLQGTSSMV

SEQ ID NO: 35922 - protein, 138 aa, Homo sapiens
  Payload ID: 7101
  Gene Symbol: GOLT1B
  Gene Name: golgi transport 1B
  Uniprot ID: Q9Y3E0
  ENSP ID: ENSP00000229314
MISLTDTQKIGMGLTGFGVFFLFFGMILFFDKALLAIGNVLFVAGLAFVIGLERTFRFFFQKHKMKATGFFLGGVFVVLIGWPLIGMIFEIYGFFLLFRGFFPVVVGFIRRVPVLGSLLNLPGIRSFVDKVGESNNMV

SEQ ID NO: 35923 - protein, 128 aa, Homo sapiens
  Payload ID: 7101
  Gene Symbol: GOLT1B
  Gene Name: golgi transport 1B
  ENSP ID: ENSP00000437351
MISLTDTQKIGMGLTGFGVFFLFFGMILFFDKALLAIGNVLFVAGLAFVIGLERTFRFFFQKHKMKATGFFLGGVFVVLIGWPLIGMIFEIYGFFLLFRGFFPVVVGFIRRVPVLGSLLNLPGIRSTT

SEQ ID NO: 35924 - protein, 42 aa, Homo sapiens
  Payload ID: 7101
  Gene Symbol: GOLT1B
  Gene Name: golgi transport 1B
  ENSP ID: ENSP00000440666
MISLTDTQKIGMGLTGFGVFFLFFGMILFFDKALLAIGNKLL

SEQ ID NO: 35925 - protein, 40 aa, Homo sapiens
  Payload ID: 7101
  Gene Symbol: GOLT1B
  Gene Name: golgi transport 1B
  ENSP ID: ENSP00000441878
MISLTDTQKIGMGLTGFGVFFLFFGMILFFDKALLAIGNE

SEQ ID NO: 35926 - protein, 74 aa, Homo sapiens
  Payload ID: 7101
  Gene Symbol: GOLT1B
  Gene Name: golgi transport 1B
  ENSP ID: ENSP00000446231
MKATGFFLGGVFVVLIGWPLIGMIFEIYGFFLLFRGFFPVVVGFIRRVPVLGSLLNLPGIRSFVDKVGESNNMV

SEQ ID NO: 35927 - protein, 42 aa, Homo sapiens; identical to SEQ ID NO: 35924
  Payload ID: 7101
  Gene Symbol: GOLT1B
  Gene Name: golgi transport 1B
  ENSP ID: ENSP00000446405

SEQ ID NO: 35928 - protein, 42 aa, Homo sapiens; identical to SEQ ID NO: 35924
  Payload ID: 7101
  Gene Symbol: GOLT1B
  Gene Name: golgi transport 1B
  ENSP ID: ENSP00000486919

SEQ ID NO: 35929 - protein, 454 aa, Homo sapiens
  Payload ID: 7102
  Gene Symbol: GOPC
  Gene Name: golgi-associated PDZ and coiled-coil motif containing
  Uniprot ID: Q9HD26
  ENSP ID: ENSP00000052569
MSAGGPCPAAAGGGPGGASCSVGAPGGVSMFRWLEVLEKEFDKAFVDVDLLLGEIDPDQADITYEGRQKMTSLSSCFAQLCHKAQSVSQINHKLEAQLVDLKSELTETQAEKVVLEKEVHDQLLQLHSIQLQLHAKTGQSADSGTIKAKLERELEANKKEKMKEAQLEAEVKLLRKENEALRRHIAVLQAEVYGARLAAKYLDKELAGRVQQIQLLGRDMKGPAHDKLWNQLEAEIHLHRHKTVIRACRGRNDLKRPMQAPPGHDQDSLKKSQGVGPIRKVLLLKEDHEGLGISITGGKEHGVPILISEIHPGQPADRCGGLHVGDAILAVNGVNLRDTKHKEAVTILSQQRGEIEFEVVYVAPEVDSDDENVEYEDESGHRYRLYLDELEGGGNPGASCKDTSGEIKVLQGFNKKAVTDTHENGDLGTASETPLDDGASKLDDLHTLYHKKSY

SEQ ID NO: 35930 - protein, 462 aa, Homo sapiens
  Payload ID: 7102
  Gene Symbol: GOPC
  Gene Name: golgi-associated PDZ and coiled-coil motif containing
  Uniprot ID: Q9HD26
  ENSP ID: ENSP00000357484
MSAGGPCPAAAGGGPGGASCSVGAPGGVSMFRWLEVLEKEFDKAFVDVDLLLGEIDPDQADITYEGRQKMTSLSSCFAQLCHKAQSVSQINHKLEAQLVDLKSELTETQAEKVVLEKEVHDQLLQLHSIQLQLHAKTGQSADSGTIKAKLSGPSVEELERELEANKKEKMKEAQLEAEVKLLRKENEALRRHIAVLQAEVYGARLAAKYLDKELAGRVQQIQLLGRDMKGPAHDKLWNQLEAEIHLHRHKTVIRACRGRNDLKRPMQAPPGHDQDSLKKSQGVGPIRKVLLLKEDHEGLGISITGGKEHGVPILISEIHPGQPADRCGGLHVGDAILAVNGVNLRDTKHKEAVTILSQQRGEIEFEVVYVAPEVDSDDENVEYEDESGHRYRLYLDELEGGGNPGASCKDTSGEIKVLQGFNKKAVTDTHENGDLGTASETPLDDGASKLDDLHTLYHKKSY

SEQ ID NO: 35931 - protein, 407 aa, Homo sapiens
  Payload ID: 7102
  Gene Symbol: GOPC
  Gene Name: golgi-associated PDZ and coiled-coil motif containing
  ENSP ID: ENSP00000445690
MSAGGPCPAAAGGGPGGASCSVGAPGGVSMFRWLEVLEKEFDKAFVDVDLLLGEIDPDQADITYEGRQKMTSLSSCFAQLCHKAQSVSQINHKLEAQLVDLKSELTETQAEKVVLEKEVHDQLLQLHSIQLQLHAKTGQSADSGTIKAKLSGPSVEELERELEANKKEKMKEAQLEAEVKLLRKENEALRRHIAVLQAEVYGARLAAKYLDKELAGRVQQIQLLGRDMKGPAHDKLWNQLEAEIHLHRHKTVIRACRGRNDLKRPMQAPPGHDQDSLKKSQGVGPIRKVLLLKEDHEGLGISITRGEIEFEVVYVAPEVDSDDENVEYEDESGHRYRLYLDELEGGGNPGASCKDTSGEIKVLQGFNKKAVTDTHENGDLGTASETPLDDGASKLDDLHTLYHKKSY

SEQ ID NO: 35932 - protein, 552 aa, Homo sapiens
  Payload ID: 7103
  Gene Symbol: GGA1
  Gene Name: golgi-associated, gamma adaptin ear containing, ARF binding protein 1
  Uniprot ID: Q9UJY5
  ENSP ID: ENSP00000321288
MEPAMEPETLEARINRATNPLNKELDWASINGFCEQLNEDFEGPPLATRLLAHKIQSPQEWEAIQALTVLETCMKSCGKRFHDEVGKFRFLNELIKVVSPKYLGSRTSEKVKNKILELLYSWTVGLPEEVKIAEAYQMLKKQGIVKSDPKLPDDTTFPLPPPRPKNVIFEDEEKSKMLARLLKSSHPEDLRAANKLIKEMVQEDQKRMEKISKRVNAIEEVNNNVKLLTEMVMSHSQGGAAAGSSEDLMKELYQRCERMRPTLFRLASDTEDNDEALGLSDPTPPSGPSLDGTGWNSFQSSDATEPPAPALAQAPSMESRPPAQTSLPASSGLDDLDLLGKTLLQQSLPPESQQVRWEKQQPTPRLTLRDLQNKSSSCSSPSSSATSLLHTVSPEPPRPPQQPVPTELSLASITVPLESIKPSNILPVTVYDQHGFRILFHFARDPLPGRSDVLVVVVSMLSTAPQPIRNIVFQSAVPKVMKVKLQPPSGTELPAFNPIVHPSAITQVLLLANPQKEKVRLRYKLTFTMGDQTYNEMGDVDQFPPPETWGSL

SEQ ID NO: 35933 - protein, 639 aa, Homo sapiens
  Payload ID: 7103
  Gene Symbol: GGA1
  Gene Name: golgi-associated, gamma adaptin ear containing, ARF binding protein 1
  Uniprot ID: Q9UJY5
  ENSP ID: ENSP00000341344
MEPAMEPETLEARINRATNPLNKELDWASINGFCEQLNEDFEGPPLATRLLAHKIQSPQEWEAIQALTVLETCMKSCGKRFHDEVGKFRFLNELIKVVSPKYLGSRTSEKVKNKILELLYSWTVGLPEEVKIAEAYQMLKKQGIVKSDPKLPDDTTFPLPPPRPKNVIFEDEEKSKMLARLLKSSHPEDLRAANKLIKEMVQEDQKRMEKISKRVNAIEEVNNNVKLLTEMVMSHSQGGAAAGSSEDLMKELYQRCERMRPTLFRLASDTEDNDEALAEILQANDNLTQVINLYKQLVRGEEVNGDATAGSIPGSTSALLDLSGLDLPPAGTTYPAMPTRPGEQASPEQPSASVSLLDDELMSLGLSDPTPPSGPSLDGTGWNSFQSSDATEPPAPALAQAPSMESRPPAQTSLPASSGLDDLDLLGKTLLQQSLPPESQQVRWEKQQPTPRLTLRDLQNKSSSCSSPSSSATSLLHTVSPEPPRPPQQPVPTELSLASITVPLESIKPSNILPVTVYDQHGFRILFHFARDPLPGRSDVLVVVVSMLSTAPQPIRNIVFQSAVPKVMKVKLQPPSGTELPAFNPIVHPSAITQVLLLANPQKEKVRLRYKLTFTMGDQTYNEMGDVDQFPPPETWGSL

SEQ ID NO: 35934 - protein, 656 aa, Homo sapiens
  Payload ID: 7103
  Gene Symbol: GGA1
  Gene Name: golgi-associated, gamma adaptin ear containing, ARF binding protein 1
  Uniprot ID: Q9UJY5
  ENSP ID: ENSP00000371175
MEPAMEPETLEARINRATNPLNKELDWASINGFCEQLNEDFEGPPLATRLLAHKIQSPQEWEAIQALTVRRGEATIRPPPCDDTKVLETCMKSCGKRFHDEVGKFRFLNELIKVVSPKYLGSRTSEKVKNKILELLYSWTVGLPEEVKIAEAYQMLKKQGIVKSDPKLPDDTTFPLPPPRPKNVIFEDEEKSKMLARLLKSSHPEDLRAANKLIKEMVQEDQKRMEKISKRVNAIEEVNNNVKLLTEMVMSHSQGGAAAGSSEDLMKELYQRCERMRPTLFRLASDTEDNDEALAEILQANDNLTQVINLYKQLVRGEEVNGDATAGSIPGSTSALLDLSGLDLPPAGTTYPAMPTRPGEQASPEQPSASVSLLDDELMSLGLSDPTPPSGPSLDGTGWNSFQSSDATEPPAPALAQAPSMESRPPAQTSLPASSGLDDLDLLGKTLLQQSLPPESQQVRWEKQQPTPRLTLRDLQNKSSSCSSPSSSATSLLHTVSPEPPRPPQQPVPTELSLASITVPLESIKPSNILPVTVYDQHGFRILFHFARDPLPGRSDVLVVVVSMLSTAPQPIRNIVFQSAVPKVMKVKLQPPSGTELPAFNPIVHPSAITQVLLLANPQKEKVRLRYKLTFTMGDQTYNEMGDVDQFPPPETWGSL

SEQ ID NO: 35935 - protein, 105 aa, Homo sapiens
  Payload ID: 7103
  Gene Symbol: GGA1
  Gene Name: golgi-associated, gamma adaptin ear containing, ARF binding protein 1
  ENSP ID: ENSP00000384030
MEPAMEPETLEARINRATNPLNKELDWASINGFCEQLNEDFEGPPLATRLLAHKIQSPQEWEAIQALTVLETCMKSCGKRFHDEVGKFRFLNELIKVVSPKGTLL

SEQ ID NO: 35936 - protein, 566 aa, Homo sapiens
  Payload ID: 7103
  Gene Symbol: GGA1
  Gene Name: golgi-associated, gamma adaptin ear containing, ARF binding protein 1
  Uniprot ID: Q9UJY5
  ENSP ID: ENSP00000385287
MKSCGKRFHDEVGKFRFLNELIKVVSPKYLGSRTSEKVKNKILELLYSWTVGLPEEVKIAEAYQMLKKQGIVKSDPKLPDDTTFPLPPPRPKNVIFEDEEKSKMLARLLKSSHPEDLRAANKLIKEMVQEDQKRMEKISKRVNAIEEVNNNVKLLTEMVMSHSQGGAAAGSSEDLMKELYQRCERMRPTLFRLASDTEDNDEALAEILQANDNLTQVINLYKQLVRGEEVNGDATAGSIPGSTSALLDLSGLDLPPAGTTYPAMPTRPGEQASPEQPSASVSLLDDELMSLGLSDPTPPSGPSLDGTGWNSFQSSDATEPPAPALAQAPSMESRPPAQTSLPASSGLDDLDLLGKTLLQQSLPPESQQVRWEKQQPTPRLTLRDLQNKSSSCSSPSSSATSLLHTVSPEPPRPPQQPVPTELSLASITVPLESIKPSNILPVTVYDQHGFRILFHFARDPLPGRSDVLVVVVSMLSTAPQPIRNIVFQSAVPKVMKVKLQPPSGTELPAFNPIVHPSAITQVLLLANPQKEKVRLRYKLTFTMGDQTYNEMGDVDQFPPPETWGSL

SEQ ID NO: 35937 - protein, 246 aa, Homo sapiens
  Payload ID: 7103
  Gene Symbol: GGA1
  Gene Name: golgi-associated, gamma adaptin ear containing, ARF binding protein 1
  ENSP ID: ENSP00000390416
MTPGTANRATNPLNKELDWASINGFCEQLNEDFEGPPLATRLLAHKIQSPQEWEAIQALTVLETCMKSCGKRFHDEVGKFRFLNELIKVVSPKYLGSRTSEKVKNKILELLYSWTVGLPEEVKIAEAYQMLKKQGIVKSDPKLPDDTTFPLPPPRPKNVIFEDEEKSKMLARLLKSSHPEDLRAANKLIKEMVQEDQKRMEKISKRVNAIEEVNNNVKLLTEMVMSHSQGGAAAGSSEDLMKELYQ

SEQ ID NO: 35938 - protein, 17 aa, Homo sapiens
  Payload ID: 7103
  Gene Symbol: GGA1
  Gene Name: golgi-associated, gamma adaptin ear containing, ARF binding protein 1
  ENSP ID: ENSP00000395901
MKSCGKRFHDEVGKFRF

SEQ ID NO: 35939 - protein, 40 aa, Homo sapiens
  Payload ID: 7103
  Gene Symbol: GGA1
  Gene Name: golgi-associated, gamma adaptin ear containing, ARF binding protein 1
  ENSP ID: ENSP00000400159
MKSCGKRFHDEVGKFRFLNELIKVVSPKYLGSRTSEKVKN

SEQ ID NO: 35940 - protein, 38 aa, Homo sapiens
  Payload ID: 7103
  Gene Symbol: GGA1
  Gene Name: golgi-associated, gamma adaptin ear containing, ARF binding protein 1
  ENSP ID: ENSP00000402930
MKSCGKRFHDEVGKFRFLNELIKVVSPKYLGSRTSEKV

SEQ ID NO: 35941 - protein, 108 aa, Homo sapiens
  Payload ID: 7103
  Gene Symbol: GGA1
  Gene Name: golgi-associated, gamma adaptin ear containing, ARF binding protein 1
  ENSP ID: ENSP00000403534
MKSCGKRFHDEVGKFRFLNELIKVVSPKYLGSRTSEKVKNKILELLYSWTVGLPEEVKIAEAYQMLKKQGIVKSDPKLPDDTTFPLPPPRPKNVIFEDEEKSKMLARL

SEQ ID NO: 35942 - protein, 59 aa, Homo sapiens
  Payload ID: 7103
  Gene Symbol: GGA1
  Gene Name: golgi-associated, gamma adaptin ear containing, ARF binding protein 1
  ENSP ID: ENSP00000404453
MKSCGKRFHDEVGKFRFLNELIKVVSPKYLGSRTSEKVKNKILELLYSWTVGLPEEVKI

SEQ ID NO: 35943 - protein, 108 aa, Homo sapiens; identical to SEQ ID NO: 35941
  Payload ID: 7103
  Gene Symbol: GGA1
  Gene Name: golgi-associated, gamma adaptin ear containing, ARF binding protein 1
  ENSP ID: ENSP00000411373

SEQ ID NO: 35944 - protein, 28 aa, Homo sapiens
  Payload ID: 7103
  Gene Symbol: GGA1
  Gene Name: golgi-associated, gamma adaptin ear containing, ARF binding protein 1
  ENSP ID: ENSP00000411727
MKSCGKRFHDEVGKFRFLNELIKVVSPK

SEQ ID NO: 35945 - protein, 108 aa, Homo sapiens; identical to SEQ ID NO: 35941
  Payload ID: 7103
  Gene Symbol: GGA1
  Gene Name: golgi-associated, gamma adaptin ear containing, ARF binding protein 1
  ENSP ID: ENSP00000414413

SEQ ID NO: 35946 - protein, 70 aa, Homo sapiens
  Payload ID: 7103
  Gene Symbol: GGA1
  Gene Name: golgi-associated, gamma adaptin ear containing, ARF binding protein 1
  ENSP ID: ENSP00000416153
MKSCGKRFHDEVGKFRFLNELIKVVSPKYLGSRTSEKVKNKILELLYSWTVGLPEEVKIAEAYQMLKKQG

SEQ ID NO: 35947 - protein, 613 aa, Homo sapiens
  Payload ID: 7104
  Gene Symbol: GGA2
  Gene Name: golgi-associated, gamma adaptin ear containing, ARF binding protein 2
  Uniprot ID: Q9UJY4
  ENSP ID: ENSP00000311962
MAATAVAAAVAGTESAQGPPGPAASLELWLNKATDPSMSEQDWSAIQNFCEQVNTDPNGPTHAPWLLAHKIQSPQEKEALYALTVLEMCMNHCGEKFHSEVAKFRFLNELIKVLSPKYLGSWATGKVKGRVIEILFSWTVWFPEDIKIRDAYQMLKKQGIIKQDPKLPVDKILPPPSPWPKSSIFDADEEKSKLLTRLLKSNHPEDLQAANRLIKNLVKEEQEKSEKVSKRVSAVEEVRSHVKVLQEMLSMYRRPGQAPPDQEALQVVYERCEKLRPTLFRLASDTTDDDDALAEILQANDLLTQGVLLYKQVMEGRVTFGNRVTSSLGDIPVSRVFQNPAGCMKTCPLIDLEVDNGPAQMGTVVPSLLHQDLAALGISDAPVTGMVSGQNCCEEKRNPSSSTLPGGGVQNPSADRNLLDLLSAQPAPCPLNYVSQKSVPKEVPPGTKSSPGWSWEAGPLAPSPSSQNTPLAQVFVPLESVKPSSLPPLIVYDRNGFRILLHFSQTGAPGHPEVQVLLLTMMSTAPQPVWDIMFQVAVPKSMRVKLQPASSSKLPAFSPLMPPAVISQMLLLDNPHKEPIRLRYKLTFNQGGQPFSEVGEVKDFPDLAVLGAA

SEQ ID NO: 35948 - protein, 223 aa, Homo sapiens
  Payload ID: 7104
  Gene Symbol: GGA2
  Gene Name: golgi-associated, gamma adaptin ear containing, ARF binding protein 2
  ENSP ID: ENSP00000454455
MAATAVAAAVAGTESAQGPPGPAASLELWLNKATDPSMSEQDWSAIQNFCEQVNTDPNGPTHAPWLLAHKIQSPQEKEALYALTVLEMCMNHCGEKFHSEVAKFRFLNELIKVLSPKYLGSWATGKVKGRVIEILFSWTVWFPEDIKIRDAYQMLKKQGIIKQDPKLPVDKILPPPSPWPKSSIFDADEEKSKLLTRLLKSNHPEDLQAAVLKVAVVYGITPF

SEQ ID NO: 35949 - protein, 59 aa, Homo sapiens
  Payload ID: 7104
  Gene Symbol: GGA2
  Gene Name: golgi-associated, gamma adaptin ear containing, ARF binding protein 2
  ENSP ID: ENSP00000454469
MAATAVAAAVAGTESAQGPPGPAASLELWLNKATDPSMSEQDWSAIQNFCEQVNTDPNG

SEQ ID NO: 35950 - protein, 49 aa, Homo sapiens
  Payload ID: 7104
  Gene Symbol: GGA2
  Gene Name: golgi-associated, gamma adaptin ear containing, ARF binding protein 2
  ENSP ID: ENSP00000455293
MAATAVAAAVAGTESAQGPPGPAASLELWLSDHRPKHVGTGLVSYPEFL

SEQ ID NO: 35951 - protein, 125 aa, Homo sapiens
  Payload ID: 7104
  Gene Symbol: GGA2
  Gene Name: golgi-associated, gamma adaptin ear containing, ARF binding protein 2
  ENSP ID: ENSP00000455331
MVKLPFSLSLQLANSCPSPEDKATDPSMSEQDWSAIQNFCEQVNTDPNGPTHAPWLLAHKIQSPQEKEALYALTVLEMCMNHCGEKFHSEVAKFRFLNELIKVLSPKYLGSWATGKVKGRVIEIL

SEQ ID NO: 35952 - protein, 59 aa, Homo sapiens; identical to SEQ ID NO: 35949
  Payload ID: 7104
  Gene Symbol: GGA2
  Gene Name: golgi-associated, gamma adaptin ear containing, ARF binding protein 2
  ENSP ID: ENSP00000456247

SEQ ID NO: 35953 - protein, 129 aa, Homo sapiens
  Payload ID: 7104
  Gene Symbol: GGA2
  Gene Name: golgi-associated, gamma adaptin ear containing, ARF binding protein 2
  ENSP ID: ENSP00000459414
  MOD_RES (1)..(1): Any amino acid
XAVAGTESAQGPPGPAASLELWLNKATDPSMSEQDWSAIQNFCEQVNTDPNGPTHAPWLLAHKIQSPQEKEALYALTCPHRLEAGLALVPAQSPASDYQPGGEPGTTGFPPSPGGPVSVQVLEMCMNHC

SEQ ID NO: 35954 - protein, 117 aa, Homo sapiens
  Payload ID: 7104
  Gene Symbol: GGA2
  Gene Name: golgi-associated, gamma adaptin ear containing, ARF binding protein 2
  ENSP ID: ENSP00000459560
MAATAVAAAVAGTESAQGPPGPAASLELWLNKATDPSMSEQDWSAIQNFCEQVNTDPNGPTHAPWLLAHKIQSPQEKEALYALTPGGEPGTTGFPPSPGGPVSVQVLEMCMNHCGEK

SEQ ID NO: 35955 - protein, 59 aa, Homo sapiens; identical to SEQ ID NO: 35949
  Payload ID: 7104
  Gene Symbol: GGA2
  Gene Name: golgi-associated, gamma adaptin ear containing, ARF binding protein 2
  ENSP ID: ENSP00000460975

SEQ ID NO: 35956 - protein, 723 aa, Homo sapiens
  Payload ID: 7105
  Gene Symbol: GGA3
  Gene Name: golgi-associated, gamma adaptin ear containing, ARF binding protein 3
  Uniprot ID: Q9NZ52
  ENSP ID: ENSP00000438085
MAEAEGESLESWLNKATNPSNRQEDWEYIIGFCDQINKELEGPQIAVRLLAHKIQSPQEWEALQALTVLEACMKNCGRRFHNEVGKFRFLNELIKVVSPKYLGDRVSEKVKTKVIELLYSWTMALPEEAKIKDAYHMLKRQGIVQSDPPIPVDRTLIPSPPPRPKNPVFDDEEKSKLLAKLLKSKNPDDLQEANKLIKSMVKEDEARIQKVTKRLHTLEEVNNNVRLLSEMLLHYSQEDSSDGDRELMKELFDQCENKRRTLFKLASETEDNDNSLGDILQASDNLSRVINSYKTIIEGQVINGEVATLTLPDSEGNSQCSNQGTLIDLAELDTTNSLSSVLAPAPTPPSSGIPILPPPPQASGPPRSRSSSQAEATLGPSSTSNALSWLDEELLCLGLADPAPNVPPKESAGNSQWHLLQREQSDLDFFSPRPGTAACGASDAPLLQPSAPSSSSSQAPLPPPFPAPVVPASVPAPSAGSSLFSTGVAPALAPKVEPAVPGHHGLALGNSALHHLDALDQLLEEAKVTSGLVKPTTSPLIPTTTPARPLLPFSTGPGSPLFQPLSFQSQGSPPKGPELSLASIHVPLESIKPSSALPVTAYDKNGFRILFHFAKECPPGRPDVLVVVVSMLNTAPLPVKSIVLQAAVPKSMKVKLQPPSGTELSPFSPIQPPAAITQVMLLANPLKEKVRLRYKLTFALGEQLSTEVGEVDQFPPVEQWGNL

SEQ ID NO: 35957 - protein, 690 aa, Homo sapiens
  Payload ID: 7105
  Gene Symbol: GGA3
  Gene Name: golgi-associated, gamma adaptin ear containing, ARF binding protein 3
  Uniprot ID: Q9NZ52
  ENSP ID: ENSP00000446421
MAEAEGESLESWLNKATNPSNRQEDWEYIIGFCDQINKELEGPQIAVRLLAHKIQSPQEWEALQALTYLGDRVSEKVKTKVIELLYSWTMALPEEAKIKDAYHMLKRQGIVQSDPPIPVDRTLIPSPPPRPKNPVFDDEEKSKLLAKLLKSKNPDDLQEANKLIKSMVKEDEARIQKVTKRLHTLEEVNNNVRLLSEMLLHYSQEDSSDGDRELMKELFDQCENKRRTLFKLASETEDNDNSLGDILQASDNLSRVINSYKTIIEGQVINGEVATLTLPDSEGNSQCSNQGTLIDLAELDTTNSLSSVLAPAPTPPSSGIPILPPPPQASGPPRSRSSSQAEATLGPSSTSNALSWLDEELLCLGLADPAPNVPPKESAGNSQWHLLQREQSDLDFFSPRPGTAACGASDAPLLQPSAPSSSSSQAPLPPPFPAPVVPASVPAPSAGSSLFSTGVAPALAPKVEPAVPGHHGLALGNSALHHLDALDQLLEEAKVTSGLVKPTTSPLIPTTTPARPLLPFSTGPGSPLFQPLSFQSQGSPPKGPELSLASIHVPLESIKPSSALPVTAYDKNGFRILFHFAKECPPGRPDVLVVVVSMLNTAPLPVKSIVLQAAVPKSMKVKLQPPSGTELSPFSPIQPPAAITQVMLLANPLKEKVRLRYKLTFALGEQLSTEVGEVDQFPPVEQWGNL

SEQ ID NO: 35958 - protein, 69 aa, Homo sapiens
  Payload ID: 7105
  Gene Symbol: GGA3
  Gene Name: golgi-associated, gamma adaptin ear containing, ARF binding protein 3
  ENSP ID: ENSP00000461963
MAEAEGESLESWLTTTETLPGRPSPDLGSRVIHWVPRAFPLPGSCRYSDPCSPVASEGAGVSVMMCSSS

SEQ ID NO: 35959 - protein, 651 aa, Homo sapiens
  Payload ID: 7105
  Gene Symbol: GGA3
  Gene Name: golgi-associated, gamma adaptin ear containing, ARF binding protein 3
  Uniprot ID: Q9NZ52
  ENSP ID: ENSP00000462081
MKNCGRRFHNEVGKFRFLNELIKVVSPKYLGDRVSEKVKTKVIELLYSWTMALPEEAKIKDAYHMLKRQGIVQSDPPIPVDRTLIPSPPPRPKNPVFDDEEKSKLLAKLLKSKNPDDLQEANKLIKSMVKEDEARIQKVTKRLHTLEEVNNNVRLLSEMLLHYSQEDSSDGDRELMKELFDQCENKRRTLFKLASETEDNDNSLGDILQASDNLSRVINSYKTIIEGQVINGEVATLTLPDSEGNSQCSNQGTLIDLAELDTTNSLSSVLAPAPTPPSSGIPILPPPPQASGPPRSRSSSQAEATLGPSSTSNALSWLDEELLCLGLADPAPNVPPKESAGNSQWHLLQREQSDLDFFSPRPGTAACGASDAPLLQPSAPSSSSSQAPLPPPFPAPVVPASVPAPSAGSSLFSTGVAPALAPKVEPAVPGHHGLALGNSALHHLDALDQLLEEAKVTSGLVKPTTSPLIPTTTPARPLLPFSTGPGSPLFQPLSFQSQGSPPKGPELSLASIHVPLESIKPSSALPVTAYDKNGFRILFHFAKECPPGRPDVLVVVVSMLNTAPLPVKSIVLQAAVPKSMKVKLQPPSGTELSPFSPIQPPAAITQVMLLANPLKEKVRLRYKLTFALGEQLSTEVGEVDQFPPVEQWGNL

SEQ ID NO: 35960 - protein, 64 aa, Homo sapiens
  Payload ID: 7105
  Gene Symbol: GGA3
  Gene Name: golgi-associated, gamma adaptin ear containing, ARF binding protein 3
  ENSP ID: ENSP00000462279
  MOD_RES (1)..(1): Any amino acid
XSPLIPTTTPARPLLPFSTGPGSPLFQPLSFQSQGSPPKGPELSLASIHVPLESIKPRVSPRTT

SEQ ID NO: 35961 - protein, 136 aa, Homo sapiens
  Payload ID: 7105
  Gene Symbol: GGA3
  Gene Name: golgi-associated, gamma adaptin ear containing, ARF binding protein 3
  ENSP ID: ENSP00000462473
MALPEEAKIKDAYHMLKRQGIVQSDPPIPVDRTLIPSPPPRPKNPVFDDEEKSKLLAKLLKSKNPDDLQEANKLIKSMVKEDEARIQKVTKRLHTLEEVNNNVRLLSEMLLHYSQEDSSDGDRELMKELFDQCENK

SEQ ID NO: 35962 - protein, 632 aa, Homo sapiens
  Payload ID: 7105
  Gene Symbol: GGA3
  Gene Name: golgi-associated, gamma adaptin ear containing, ARF binding protein 3
  ENSP ID: ENSP00000462629
MKNCGRRFHNEVGKFRFLNELIKVVSPKYLGDRVSEKVKTKVIELLYSWTMALPEEAKIKDAYHMLKRQGIVQSDPPIPVDRTLIPSPPPRPKNPVFDDEEKSKLLAKLLKSKNPDDLQEANKLIKSMVKEDEARIQKVTKRLHTLEEVNNNVRLLSEMLLHYSQEDSSDGDRELMKELFDQCENKRRTLFKLASETEDNDNSLGDILQASDNLSRVINSYKTIIEGQVINGEVATLTLPDSEGNSQCSNQGTLIDLAELDTTNSLSSVLAPAPTPPSSGIPILPPPPQASGPPRSRSSSQAEATLGPSSTSNALSWLDEELLCLGLADPAPNVPPKESAGNSQWHLLQREQSDLDFFSPRPGTAACGASDAPLLQPSAPSSSSSQAPLPPPFPAPVVPASVPAPSAGSSLFSTGVAPALAPKVEPAVPGHHGLALGNSALHHLDALDQLLEEAKVTSGLVKPTTSPLIPTTTPARPLLPFSTGPGSPLFQPLSFQSQGSPPKGPELSLASIHVPLESIKPSSALPVTAYDKNGFRILFHFAKECPPGRPDVLVVVVSMLNTAPLPVKSIVLQAAVPKSMKVKLQPPSGTELSPFSPIQPPAAITQVMLLANPLKWQAVSYGHLGRTWNLAS

SEQ ID NO: 35963 - protein, 110 aa, Homo sapiens
  Payload ID: 7105
  Gene Symbol: GGA3
  Gene Name: golgi-associated, gamma adaptin ear containing, ARF binding protein 3
  ENSP ID: ENSP00000463115
SALPVTAYDKNGFRILFHFAKECPPGRPDVLVVVVSMLNTAPLPVKSIVLQAAVPKSMKVKLQPPSGTELSPFSPIQPPAAITQVMLLANPLKLLLPSPGRWPRKVPGPE

SEQ ID NO: 35964 - protein, 592 aa, Homo sapiens
  Payload ID: 7105
  Gene Symbol: GGA3
  Gene Name: golgi-associated, gamma adaptin ear containing, ARF binding protein 3
  Uniprot ID: Q9NZ52
  ENSP ID: ENSP00000463288
MALPEEAKIKDAYHMLKRQGIVQSDPPIPVDRTLIPSPPPRPKNPVFDDEEKSKLLAKLLKSKNPDDLQEANKLIKSMVKEDEARIQKVTKRLHTLEEVNNNVRLLSEMLLHYSQEDSSDGDRELMKELFDQCENKRRTLFKLASETEDNDNSLGDILQASDNLSRVINSYKTIIEGQVINGEVATLTLPDSEGNSQCSNQGTLIDLAELDTTNSLSSVLAPAPTPPSSGIPILPPPPQASGPPRSRSSSQAEATLGPSSTSNALSWLDEELLCLGLADPAPNVPPKESAGNSQWHLLQREQSDLDFFSPRPGTAACGASDAPLLQPSAPSSSSSQAPLPPPFPAPVVPASVPAPSAGSSLFSTGVAPALAPKVEPAVPGHHGLALGNSALHHLDALDQLLEEAKVTSGLVKPTTSPLIPTTTPARPLLPFSTGPGSPLFQPLSFQSQGSPPKGPELSLASIHVPLESIKPSSALPVTAYDKNGFRILFHFAKECPPGRPDVLVVVVSMLNTAPLPVKSIVLQAAVPKSMKVKLQPPSGTELSPFSPIQPPAAITQVMLLANPLKKQVLSFLGKACLQPWGQAILLTTSCLA

SEQ ID NO: 35965 - protein, 76 aa, Homo sapiens
  Payload ID: 7105
  Gene Symbol: GGA3
  Gene Name: golgi-associated, gamma adaptin ear containing, ARF binding protein 3
  ENSP ID: ENSP00000464268
  MOD_RES (1)..(1): Any amino acid
XTTSPLIPTTTPARPLLPFSTGPGSPLFQPLSFQSQGSPPKGPELSLASIHVPLESIKPINESEVAATFWDRTLSI

SEQ ID NO: 35966 - protein, 152 aa, Homo sapiens
  Payload ID: 7105
  Gene Symbol: GGA3
  Gene Name: golgi-associated, gamma adaptin ear containing, ARF binding protein 3
  ENSP ID: ENSP00000464318
  MOD_RES (1)..(1): Any amino acid
XAEAEGESLESWLNKATNPSNRQEDWEYIIGFCDQINKELEGPQIAVRLLAHKIQSPQEWEALQALTVLEACMKNCGRRFHNEVGKFRFLNELIKVVSPKYLGDRVSEKVKTKVIELLYSWTMALPEEAKIKDAYHMLKRQGLDHRDVALGV

SEQ ID NO: 35967 - protein, 106 aa, Homo sapiens
  Payload ID: 7105
  Gene Symbol: GGA3
  Gene Name: golgi-associated, gamma adaptin ear containing, ARF binding protein 3
  ENSP ID: ENSP00000464365
MAEAEGESLESWLNKATNPSNRQEDWEYIIGFCDQINKELEGPQIAVRLLAHKIQSPQEWEALQALTVLEACMKNCGRRFHNEVGKFRFLNELIKVVSPKRARPWR

SEQ ID NO: 35968 - protein, 158 aa, Homo sapiens
  Payload ID: 7105
  Gene Symbol: GGA3
  Gene Name: golgi-associated, gamma adaptin ear containing, ARF binding protein 3
  ENSP ID: ENSP00000464574
  MOD_RES (1)..(1): Any amino acid
XLIPTTTPARPLLPFSTGPGSPLFQPLSFQSQGSPPKGPELSLASIHVPLESIKPSSALPVTAYDKNGFRILFHFAKECPPGRPDVLVVVVSMLNTAPLPVKSIVLQAAVPKSMKVKLQPPSGTELSPFSPIQPPAAITQVMLLANPLKDLFLSTCVT

SEQ ID NO: 35969 - protein, 69 aa, Homo sapiens; identical to SEQ ID NO: 35958
  Payload ID: 7105
  Gene Symbol: GGA3
  Gene Name: golgi-associated, gamma adaptin ear containing, ARF binding protein 3
  ENSP ID: ENSP00000479464

SEQ ID NO: 35970 - protein, 46 aa, Homo sapiens
  Payload ID: 7105
  Gene Symbol: GGA3
  Gene Name: golgi-associated, gamma adaptin ear containing, ARF binding protein 3
  ENSP ID: ENSP00000481953
MKNCGRRFHNEVGKFRFLNELIKVVSPKYLGDRVSEKVKTKVIELL

SEQ ID NO: 35971 - protein, 153 aa, Homo sapiens
  Payload ID: 7105
  Gene Symbol: GGA3
  Gene Name: golgi-associated, gamma adaptin ear containing, ARF binding protein 3
  ENSP ID: ENSP00000484733
MAEAEGESLESWLNKATNPSNRQEDWEYIIGFCDQINKELEGPQIAVRLLAHKIQSPQEWEALQALTVLEACMKNCGRRFHNEVGKFRFLNELIKVVSPKYLGDRVSEKVKTKVIELLYSWTMALPEEAKIKDAYHMLKRQAFSQAAEKQKPR

SEQ ID NO: 35972 - protein, 518 aa, Homo sapiens
  Payload ID: 7106
  Gene Symbol: GFY
  Gene Name: golgi-associated, olfactory signaling regulator
  Uniprot ID: I3L273
  ENSP ID: ENSP00000459439
MKSFSRILFLVFLLAGLRSKAAPSAPLPLGCGFPDMAHPSETSPLKGASENSKRDRLNPEFPGTPYPEPSKLPHTVSLETFPLDFTEPLNPDLRETPHPESPETPKADSLTTSISESLDMPKTNLSKMAHPESSETPTPGPTEMPHPGSPETPKPNFSKTSRPEFPETPNTDLMQTTPQESPEILQLNATEVSQAELPETSNTNPTKTPDPKSPEKHDLNSTETPNSEFLQALHPDPSKTPHPESHVTHNPSPTEISQTEFPTTYYQNATDVPRTSDPQISTSLYPETPVPFKDDATALNELSLNPKPGTPAAIQPDSPKLPTSDSPGMVELKAPQNSGPKESNVPPPSARIAGPPALPGRPSQLAPATLRAPQRHSRGEGVNTIIVVERVKETGVTLVGRPRGAAGGALCLFFAGTALLIGIFVLLWCLYRRAARQRPFAHHRLPDDGDEPVLHLDAPKDPYDLYFYAPDTWVPSHIATKQPPPTPPLPPKLPPPPRGGRPQRLEALSPATLPNNFV

SEQ ID NO: 35973 - protein, 518 aa, Homo sapiens; identical to SEQ ID NO: 35972
  Payload ID: 7106
  Gene Symbol: GFY
  Gene Name: golgi-associated, olfactory signaling regulator
  Uniprot ID: I3L273
  ENSP ID: ENSP00000478493

SEQ ID NO: 35974 - protein, 767 aa, Homo sapiens
  Payload ID: 7107
  Gene Symbol: GOLGA1
  Gene Name: golgin A1
  Uniprot ID: Q92805
  ENSP ID: ENSP00000362656
MFAKLKKKIAEETAVAQRPGGATRIPRSVSKESVASMGADSGDDFASDGSSSREDLSSQLLRRNEQIRKLEARLSDYAEQVRNLQKIKEKLEIALEKHQDSSMRKFQEQNETFQANRAKMAEGLALALARKDQEWSEKMDQLEKEKNILTAQLQEMKNQSMNLFQRRDEMDELEGFQQQELSKIKHMLLKKEESLGKMEQELEARTRELSRTQEELMNSNQMSSDLSQKLEELQRHYSTLEEQRDHVIASKTGAESKITALEQKEQELQALIQQLSIDLQKVTAETQEKEDVITHLQEKVASLEKRLEQNLSGEEHLQELLKEKTLAEQNLEDTRQQLLAARSSQAKAINTLETRVRELEQTLQASEEQLQQSKGIVAAQETQIQELAAANQESSHVQQQALALEQQFLERTQALEAQIVALERTRAADQTTAEQGMRQLEQENAALKECRNEYERSLQNHQFELKKLKEEWSQREIVSVAMAQALEEVRKQREEFQQQAANLTAIIDEKEQNLREKTEVLLQKEQEILQLERGHNSALLQIHQLQAELEALRTLKAEEAAVVAEQEDLLRLRGPLQAEALSVNESHVTSRAMQDPVFQLPTAGRTPNGEVGAMDLTQLQKEKQDLEQQLLEKNKTIKQMQQRMLELRKTLQKELKIRPDNELFEVREKPGPEMANMAPSVTNNTDLTDAREINFEYLKHVVLKFMSCRESEAFHLIKAVSVLLNFSQEEENMLKETLEYKMSWFGSKPAPKGSIRPSISNPRIPWS

SEQ ID NO: 35975 - protein, 112 aa, Homo sapiens
  Payload ID: 7107
  Gene Symbol: GOLGA1
  Gene Name: golgin A1
  ENSP ID: ENSP00000396966
MFAKLKKKIAEETAVAQRPGGATRIPRSVSKESVASMGADSGDDFASDGSSSREDLSSQLLRRNEQIRKLEARLSDYAEQVRNLQKIKEKLEIALEKHQDSSMRKFQEQNET

SEQ ID NO: 35976 - protein, 151 aa, Homo sapiens
  Payload ID: 7107
  Gene Symbol: GOLGA1
  Gene Name: golgin A1
  ENSP ID: ENSP00000435006
DLSQKLEELQRHYSTLEEQRDHVIASKTGAESKITALEQKEQELQALIQQLSIDLQKVTAETQEKEDVITHLQEKVASLEKRLEQNLSGEEHLQELLKEKTLAEQNLEDTRQQLLAARSSQAKAINTLETRVRELEQTLLWSSSSWSAPRR

SEQ ID NO: 35977 - protein, 168 aa, Homo sapiens
  Payload ID: 7107
  Gene Symbol: GOLGA1
  Gene Name: golgin A1
  ENSP ID: ENSP00000473648
  MOD_RES (1)..(1): Any amino acid
XLQKIKEKLEIALEKHQDSSMRKFQEQNETFQANRAKMAEGLALALARKDQEWSEKMDQLEKEKNILTAQLQEMKNQSMNLFQRRDEMDELEGFQQQELSKIKHMLLKKEESLGKMEQELEARTRELSRTQEELMNSNQMSSDLSQKLEELQRHYSTLEEQRFLLGHC

SEQ ID NO: 35978 - protein, 473 aa, Homo sapiens
  Payload ID: 7108
  Gene Symbol: GOLGA2
  Gene Name: golgin A2
  ENSP ID: ENSP00000409271
MWPQPRLPPRPAMSEETRQSKLAAAKKKLREYQQRNSPGVPTGAKKKKKIKNGSNPETTTSGGCHSPEDIQDILKVLVSDLNRSNGVALPPLDKWKTPKDNAATLQPSDDTVLPGGVPSPGASLTSMAASQNHDADNVPNLMDETKTFSSTESLRQLSQQLNGLVCESATCVNGEGPASSANLKDLESRYQQLAVALDSSYVTNKQLNITIEKLKQQNQEITDQLEEEKKECHQKQGALREQLQVHIQTIGILVSEKAELQTALAHTQHAARQKEGESEDLASRLQYSRRRVGELERALSAVSTQQKKADRYNKELTKERDALRLELYKNTQSNEDLKQEKSELEEKLRVLVTEKAGMQLNLEELQKKLEMTELLLQQFSSRCEAPDANQQLQQAMEERAQLEAHLGQVMESVRQLQMERDKYAENLKGESAMWRQRMQQMSEQVHTLREEKECSMSRVQELETSLAELRNQM

SEQ ID NO: 35979 - protein, 234 aa, Homo sapiens
  Payload ID: 7108
  Gene Symbol: GOLGA2
  Gene Name: golgin A2
  ENSP ID: ENSP00000411598
IQDILKVLVSDLNRSNGVALPPLDKWKTPKDNAATLQPSDDTVLPGGVPSPGASLTSMAASQNHDADNVPNLMDETKTFSSTESLRQLSQQLNGLVCESATCVNGEGPASSANLKDLEKQQNQEITDQLEEEKKECHQKQGALREQLQVHIQTIGILVSEKAELQTALAHTQHAARQKEGESEDLASRLQYSRRRVGELERALSAVSTQQKKADRYNKELTKERDALRLELYKN

SEQ ID NO: 35980 - protein, 1002 aa, Homo sapiens
  Payload ID: 7108
  Gene Symbol: GOLGA2
  Gene Name: golgin A2
  Uniprot ID: Q08379
  ENSP ID: ENSP00000416097
MWPQPRLPPRPAMSEETRQSKLAAAKKKLREYQQRNSPGVPTGAKKKKKIKNGSNPETTTSGGCHSPEDTPKDNAATLQPSDDTVLPGGVPSPGASLTSMAASQNHDADNVPNLMDETKTFSSTESLRQLSQQLNGLVCESATCVNGEGPASSANLKDLESRYQQLAVALDSSYVTNKQLNITIEKLKQQNQEITDQLEEEKKECHQKQGALREQLQVHIQTIGILVSEKAELQTALAHTQHAARQKEGESEDLASRLQYSRRRVGELERALSAVSTQQKKADRYNKELTKERDALRLELYKNTQSNEDLKQEKSELEEKLRVLVTEKAGMQLNLEELQKKLEMTELLLQQFSSRCEAPDANQQLQQAMEERAQLEAHLGQVMESVRQLQMERDKYAENLKGESAMWRQRMQQMSEQVHTLREEKECSMSRVQELETSLAELRNQMAEPPPPEPPAGPSEVEQQLQAEAEHLRKELEGLAGQLQAQVQDNEGLSRLNREQEERLLELERAAELWGEQAEARRQILETMQNDRTTISRALSQNRELKEQLAELQSGFVKLTNENMEITSALQSEQHVKRELGKKLGELQEKLSELKETVELKSQEAQSLQQQRDQYLGHLQQYVAAYQQLTSEKEVLHNQLLLQTQLVDQLQQQEAQGKAVAEMARQELQETQERLEAATQQNQQLRAQLSLMAHPGEGDGLDREEEEDEEEEEEEAVAVPQPMPSIPEDLESREAMVAFFNSAVASAEEEQARLRGQLKEQRVRCRRLAHLLASAQKEPEAAAPAPGTGGDSVCGETHRALQGAMEKLQSRFMELMQEKADLKERVEELEHRCIQLSGETDTIGEYIALYQSQRAVLKERHREKEEYISRLAQDKEEMKVKLLELQELVLRLVGDRNEWHGRFLAAAQNPADEPTSGAPAPQELGAANQQGDLCEVSLAGSVEPAQGEAREGSPRDNPTAQQIMQLLREMQNPRERPGLGSNPCIPFFYRADENDEVKITVI

SEQ ID NO: 35981 - protein, 99 aa, Homo sapiens
  Payload ID: 7108
  Gene Symbol: GOLGA2
  Gene Name: golgin A2
  ENSP ID: ENSP00000473603
MWPQPRLPPRPAMSEETRQSKLAAAKKKLREYQQRNSPGVPTGAKKKKKIKNGSNPETTTSGGCHSPEDVSLGWPGSWGQGAQGAVEGNCYDCGRTVGY

SEQ ID NO: 35982 - protein, 990 aa, Homo sapiens
  Payload ID: 7108
  Gene Symbol: GOLGA2
  Gene Name: golgin A2
  ENSP ID: ENSP00000476265
MSEETRQSKLAAAKKKLREYQQRNSPGVPTGAKKKKKIKNGSNPETTTSGGCHSPEDTPKDNAATLQPSDDTVLPGGVPSPGASLTSMAASQNHDADNVPNLMDETKTFSSTESLRQLSQQLNGLVCESATCVNGEGPASSANLKDLESRYQQLAVALDSSYVTNKQLNITIEKLKQQNQEITDQLEEEKKECHQKQGALREQLQVHIQTIGILVSEKAELQTALAHTQHAARQKEGESEDLASRLQYSRRRVGELERALSAVSTQQKKADRYNKELTKERDALRLELYKNTQSNEDLKQEKSELEEKLRVLVTEKAGMQLNLEELQKKLEMTELLLQQFSSRCEAPDANQQLQQAMEERAQLEAHLGQVMESVRQLQMERDKYAENLKGESAMWRQRMQQMSEQVHTLREEKECSMSRVQELETSLAELRNQMAEPPPPEPPAGPSEVEQQLQAEAEHLRKELEGLAGQLQAQVQDNEGLSRLNREQEERLLELERAAELWGEQAEARRQILETMQNDRTTISRALSQNRELKEQLAELQSGFVKLTNENMEITSALQSEQHVKRELGKKLGELQEKLSELKETVELKSQEAQSLQQQRDQYLGHLQQYVAAYQQLTSEKEVLHNQLLLQTQLVDQLQQQEAQGKAVAEMARQELQETQERLEAATQQNQQLRAQLSLMAHPGEGDGLDREEEEDEEEEEEEAVAVPQPMPSIPEDLESREAMVAFFNSAVASAEEEQARLRGQLKEQRVRCRRLAHLLASAQKEPEAAAPAPGTGGDSVCGETHRALQGAMEKLQSRFMELMQEKADLKERVEELEHRCIQLSGETDTIGEYIALYQSQRAVLKERHREKEEYISRLAQDKEEMKVKLLELQELVLRLVGDRNEWHGRFLAAAQNPADEPTSGAPAPQELGAANQQGDLCEVSLAGSVEPAQGEAREGSPRDNPTAQQIMQLLREMQNPRERPGLGSNPCIPFFYRADENDEVKITVI

SEQ ID NO: 35983 - protein, 1002 aa, Homo sapiens; identical to SEQ ID NO: 35980
  Payload ID: 7108
  Gene Symbol: GOLGA2
  Gene Name: golgin A2
  Uniprot ID: Q08379
  ENSP ID: ENSP00000478799

SEQ ID NO: 35984 - protein, 286 aa, Homo sapiens
  Payload ID: 7108
  Gene Symbol: GOLGA2
  Gene Name: golgin A2
  ENSP ID: ENSP00000481685
MAVPQPMPSIPEDLESREAMVAFFNSAVASAEEEQARLRGQLKEQRVRCRRLAHLLASAQKEPEAAAPAPGTGGDSVCGETHRALQGAMEKLQSRFMELMQEKADLKERVEELEHRCIQLSGETDTIGEYIALYQSQRAVLKERHREKEEYISRLAQDKEEMKVKLLELQELVLRLVGDRNEWHGRFLAAAQNPADEPTSGAPAPQELGAANQQGDLCEVSLAGSVEPAQGEAREGSPRDNPTAQQIMQLLREMQNPRERPGLGSNPCIPFFYRADENDEVKITVI

SEQ ID NO: 35985 - protein, 1498 aa, Homo sapiens
  Payload ID: 7109
  Gene Symbol: GOLGA3
  Gene Name: golgin A3
  Uniprot ID: Q08378
  ENSP ID: ENSP00000204726
MDGASAEQDGLQEDRSHSGPSSLPEAPLKPPGPLVPPDQQDKVQCAEVNRASTEGESPDGPGQGGLCQNGPTPPFPDPPSSLDPTTSPVGPDASPGVAGFHDNLRKSQGTSAEGSVRKEALQSLRLSLPMQETQLCSTDSPLPLEKEEQVRLQARKWLEEQLKQYRVKRQQERSSQPATKTRLFSTLDPELMLNPENLPRASTLAMTKEYSFLRTSVPRGPKVGSLGLPAHPREKKTSKSSKIRSLADYRTEDSNAGNSGGNVPAPDSTKGSLKQNRSSAASVVSEISLSPDTDDRLENTSLAGDSVSEVDGNDSDSSSYSSASTRGTYGILSKTVGTQDTPYMVNGQEIPADTLGQFPSIKDVLQAAAAEHQDQGQEVNGEVRSRRDSICSSVSLESSAAETQEEMLQVLKEKMRLEGQLEALSLEASQALKEKAELQAQLAALSTKLQAQVECSHSSQQRQDSLSSEVDTLKQSCWDLERAMTDLQNMLEAKNASLASSNNDLQVAEEQYQRLMAKVEDMQRSMLSKDNTVHDLRQQMTALQSQLQQVQLERTTLTSKLKASQAEISSLQSVRQWYQQQLALAQEARVRLQGEMAHIQVGQMTQAGLLEHLKLENVSLSQQLTETQHRSMKEKGRIAAQLQGIEADMLDQEAAFMQIQEAKTMVEEDLQRRLEEFEGERERLQRMADSAASLEQQLEQVKLTLLQRDQQLEALQQEHLDLMKQLTLTQEALQSREQSLDALQTHYDELQARLGELQGEAASREDTICLLQNEKIILEAALQAAKSGKEELDRGARRLEEGTEETSETLEKLREELAIKSGQVEHLQQETAALKKQMQKIKEQFLQQKVMVEAYRRDATSKDQLISELKATRKRLDSELKELRQELMQVHGEKRTAEAELSRLHREVAQVRQHMADLEGHLQSAQKERDEMETHLQSLQFDKEQMVAVTEANEALKKQIEELQQEARKAITEQKQKMRRLGSDLTSAQKEMKTKHKAYENAVGILSRRLQEALAAKEAADAELGQLRAQGGSSDSSLALHERIQALEAELQAVSHSKTLLEKELQEVIALTSQELEESREKVLELEDELQESRGFRKKIKRLEESNKKLALELEHEKGKLTGLGQSNAALREHNSILETALAKREADLVQLNLQVQAVLQRKEEEDRQMKHLVQALQASLEKEKEKVNSLKEQVAAAKVEAGHNRRHFKAASLELSEVKKELQAKEHLVQKLQAEADDLQIREGKHSQEIAQFQAELAEARAQLQLLQKQLDEQLSKQPVGNQEMENLKWEVDQKEREIQSLKQQLDLTEQQGRKELEGLQQLLQNVKSELEMAQEDLSMTQKDKFMLQAKVSELKNNMKTLLQQNQQLKLDLRRGAAKTRKEPKGEASSSNPATPIKIPDCPVPASLLEELLRPPPAVSKEPLKNLNSCLQQLKQEMDSLQRQMEEHALTVHESLSSWTPLEPATASPVPPGGHAGPRGDPQRHSQSRASKEGPGE

SEQ ID NO: 35986 - protein, 1390 aa, Homo sapiens
  Payload ID: 7109
  Gene Symbol: GOLGA3
  Gene Name: golgin A3
  Uniprot ID: Q08378
  ENSP ID: ENSP00000409303
MDGASAEQDGLQEDRSHSGPSSLPEAPLKPPGPLVPPDQQDKVQCAEVNRASTEGESPDGPGQGGLCQNGPTPPFPDPPSSLDPTTSPVGPDASPGVAGFHDNLRKSQGTSAEGSVRKEALQSLRLSLPMQETQLCSTDSPLPLEKEEQVRLQARKWLEEQLKQYRVKRQQERSSQPATKTRLFSTLDPELMLNPENLPRASTLAMTKEYSFLRTSVPRGPKVGSLGLPAHPREKKTSKSSKIRSLADYRTEDSNAGNSGGNVPAPDSTKGSLKQNRSSAASVVSEISLSPDTDDRLENTSLAGDSVSEVDGNDSDSSSYSSASTRGTYGILSKTVGTQDTPYMVNGQEIPADTLGQFPSIKDVLQAAAAEHQDQGQEVNGEVRSRRDSICSSVSLESSAAETQEEMLQVLKEKMRLEGQLEALSLEASQALKEKAELQAQLAALSTKLQAQVECSHSSQQRQDSLSSEVDTLKQSCWDLERAMTDLQNMLEAKNASLASSNNDLQVAEEQYQRLMAKVEDMQRSMLSKDNTVHDLRQQMTALQSQLQQVQLERTTLTSKLKASQAEISSLQSVRQWYQQQLALAQEARVRLQGEMAHIQVGQMTQAGLLEHLKLENVSLSQQLTETQHRSMKEKGRIAAQLQGIEADMLDQEAAFMQIQEAKTMVEEDLQRRLEEFEGERERLQRMADSAASLEQQLEQVKLTLLQRDQQLEALQQEHLDLMKQLTLTQEALQSREQSLDALQTHYDELQARLGELQGEAASREDTICLLQNEKIILEAALQAAKSGKEELDRGARRLEEGTEETSETLEKLREELAIKSGQVEHLQQETAALKKQMQKIKEQFLQQKVMVEAYRRDATSKDQLISELKATRKRLDSELKELRQELMQVHGEKRTAEAELSRLHREVAQVRQHMADLEGHLQSAQKERDEMETHLQSLQFDKEQMVAVTEANEALKKQIEELQQEARKAITEQKQKMRRLGSDLTSAQKEMKTKHKAYENAVGILSRRLQEALAAKEAADAELGQLRAQGGSSDSSLALHERIQALEAELQAVSHSKTLLEKELQEVIALTSQELEESREKVLELEDELQESRGFRKKIKRLEESNKKLALELEHEKGKLTGLGQSNAALREHNSILETALAKREADLVQLNLQVQAVLQRKEEEDRQMKHLVQALQASLEKEKEKVNSLKEQVAAAKVEAGHNRRHFKAASLELSEVKKELQAKEHLVQKLQAEADDLQIREGKHSQEIAQFQAELAEARAQLQLLQKQLDEQLSKQPVGNQEMENLKWEVDQKEREIQSLKQQLDLTEQQGRKELEGLQQLLQNVKSELEMAQEDLSMTQKDKFMLQAKVSELKNNMKTLLQQNQQLKLDLRRGAAKTVLRPASLPG

SEQ ID NO: 35987 - protein, 1498 aa, Homo sapiens; identical to SEQ ID NO: 35985
  Payload ID: 7109
  Gene Symbol: GOLGA3
  Gene Name: golgin A3
  Uniprot ID: Q08378
  ENSP ID: ENSP00000410378

SEQ ID NO: 35988 - protein, 1134 aa, Homo sapiens
  Payload ID: 7109
  Gene Symbol: GOLGA3
  Gene Name: golgin A3
  Uniprot ID: Q08378
  ENSP ID: ENSP00000442603
MDGASAEQDGLQEDRSHSGPSSLPEAPLKPPGPLVPPDQQDKVQCAEVNRASTEGESPDGPGQGGLCQNGPTPPFPDPPSSLDPTTSPVGPDASPGVAGFHDNLRKSQGTSAEGSVRKEALQSLRLSLPMQETQLCSTDSPLPLEKEEQVRLQARKWLEEQLKQYRVKRQQERSSQPATKTRLFSTLDPELMLNPENLPRASTLAMTKEYSFLRTSVPRGPKVGSLGLPAHPREKKTSKSSKIRSLADYRTEDSNAGNSGGNVPAPDSTKGSLKQNRSSAASVVSEISLSPDTDDRLENTSLAGDSVSEVDGNDSDSSSYSSASTRGTYGILSKTVGTQDTPYMVNGQEIPADTLGQFPSIKDVLQAAAAEHQDQGQEVNGEVRSRRDSICSSVSLESSAAETQEEMLQVLKEKMRLEGQLEALSLEASQALKEKAELQAQLAALSTKLQAQVECSHSSQQRQDSLSSEVDTLKQSCWDLERAMTDLQNMLEAKNASLASSNNDLQVAEEQYQRLMAKVEDMQRSMLSKDNTVHDLRQQMTALQSQLQQVQLERTTLTSKLKASQAEISSLQSVRQWYQQQLALAQEARVRLQGEMAHIQVGQMTQAGLLEHLKLENVSLSQQLTETQHRSMKEKGRIAAQLQGIEADMLDQEAAFMQIQEAKTMVEEDLQRRLEEFEGERERLQRMADSAASLEQQLEQVKLTLLQRDQQLEALQQEHLDLMKQLTLTQEALQSREQSLDALQTHYDELQARLGELQGEAASREDTICLLQNEKIILEAALQAAKSGKEELDRGARRLEEGTEETSETLEKLREELAIKSGQVEHLQQETAALKKQMQKIKEQFLQQKVMVEAYRRDATSKDQLISELKATRKRLDSELKELRQELMQVHGEKRTAEAELSRLHREVAQVRQHMADLEGHLQSAQKERDEMETHLQSLQFDKEQMVAVTEANEALKKQIEELQQEARKAITEQKQKMRRLGSDLTSAQKEMKTKHKAYENAVGILSRRLQEALAAKEAADAELGQLRAQGGSSDSSLALHERIQALEAELQAVSHSKTLLEKELQEVIALTSQELEESREKVLELEDEVRPGHLLWRQRGAGHVSPGHAATRETRRTKLHRVPSVATFGVATF

SEQ ID NO: 35989 - protein, 84 aa, Homo sapiens
  Payload ID: 7109
  Gene Symbol: GOLGA3
  Gene Name: golgin A3
  ENSP ID: ENSP00000479170
  MOD_RES (1)..(1): Any amino acid
XDLTEQQGRKELEGLQQLLQNVKSELEMAQEDLSMTQKDKFMLQAKVSELKNNMKTLLQQNQQLKLDLRRGAAKTVLRPASLPG

SEQ ID NO: 35990 - protein, 2243 aa, Homo sapiens
  Payload ID: 7110
  Gene Symbol: GOLGA4
  Gene Name: golgin A4
  Uniprot ID: Q13439
  ENSP ID: ENSP00000349305
MFKKLKQKISEEQQQLQQALAPAQASSNSSTPTRMRSRTSSFTEQLDEGTPNRENASTHASKSPDSVNGSEPSIPQSGDTQSFAQKLQLRVPSVESLFRSPIKESLFRSSSKESLVRTSSRESLNRLDLDSSTASFDPPSDMDSEAEDLVGNSDSLNKEQLIQRLRRMERSLSSYRGKYSELVTAYQMLQREKKKLQGILSQSQDKSLRRIAELREELQMDQQAKKHLQEEFDASLEEKDQYISVLQTQVSLLKQRLRNGPMNVDVLKPLPQLEPQAEVFTKEENPESDGEPVVEDGTSVKTLETLQQRVKRQENLLKRCKETIQSHKEQCTLLTSEKEALQEQLDERLQELEKIKDLHMAEKTKLITQLRDAKNLIEQLEQDKGMVIAETKRQMHETLEMKEEEIAQLRSRIKQMTTQGEELREQKEKSERAAFEELEKALSTAQKTEEARRKLKAEMDEQIKTIEKTSEEERISLQQELSRVKQEVVDVMKKSSEEQIAKLQKLHEKELARKEQELTKKLQTREREFQEQMKVALEKSQSEYLKISQEKEQQESLALEELELQKKAILTESENKLRDLQQEAETYRTRILELESSLEKSLQENKNQSKDLAVHLEAEKNKHNKEITVMVEKHKTELESLKHQQDALWTEKLQVLKQQYQTEMEKLREKCEQEKETLLKDKEIIFQAHIEEMNEKTLEKLDVKQTELESLSSELSEVLKARHKLEEELSVLKDQTDKMKQELEAKMDEQKNHHQQQVDSIIKEHEVSIQRTEKALKDQINQLELLLKERDKHLKEHQAHVENLEADIKRSEGELQQASAKLDVFQSYQSATHEQTKAYEEQLAQLQQKLLDLETERILLTKQVAEVEAQKKDVCTELDAHKIQVQDLMQQLEKQNSEMEQKVKSLTQVYESKLEDGNKEQEQTKQILVEKENMILQMREGQKKEIEILTQKLSAKEDSIHILNEEYETKFKNQEKKMEKVKQKAKEMQETLKKKLLDQEAKLKKELENTALELSQKEKQFNAKMLEMAQANSAGISDAVSRLETNQKEQIESLTEVHRRELNDVISIWEKKLNQQAEELQEIHEIQLQEKEQEVAELKQKILLFGCEKEEMNKEITWLKEEGVKQDTTLNELQEQLKQKSAHVNSLAQDETKLKAHLEKLEVDLNKSLKENTFLQEQLVELKMLAEEDKRKVSELTSKLKTTDEEFQSLKSSHEKSNKSLEDKSLEFKKLSEELAIQLDICCKKTEALLEAKTNELINISSSKTNAILSRISHCQHRTTKVKEALLIKTCTVSELEAQLRQLTEEQNTLNISFQQATHQLEEKENQIKSMKADIESLVTEKEALQKEGGNQQQAASEKESCITQLKKELSENINAVTLMKEELKEKKVEISSLSKQLTDLNVQLQNSISLSEKEAAISSLRKQYDEEKCELLDQVQDLSFKVDTLSKEKISALEQVDDWSNKFSEWKKKAQSRFTQHQNTVKELQIQLELKSKEAYEKDEQINLLKEELDQQNKRFDCLKGEMEDDKSKMEKKESNLETELKSQTARIMELEDHITQKTIEIESLNEVLKNYNQQKDIEHKELVQKLQHFQELGEEKDNRVKEAEEKILTLENQVYSMKAELETKKKELEHVNLSVKSKEEELKALEDRLESESAAKLAELKRKAEQKIAAIKKQLLSQMEEKEEQYKKGTESHLSELNTKLQEREREVHILEEKLKSVESSQSETLIVPRSAKNVAAYTEQEEADSQGCVQKTYEEKISVLQRNLTEKEKLLQRVGQEKEETVSSHFEMRCQYQERLIKLEHAEAKQHEDQSMIGHLQEELEEKNKKYSLIVAQHVEKEGGKNNIQAKQNLENVFDDVQKTLQEKELTCQILEQKIKELDSCLVRQKEVHRVEMEELTSKYEKLQALQQMDGRNKPTELLEENTEEKSKSHLVQPKLLSNMEAQHNDLEFKLAGAEREKQKLGKEIVRLQKDLRMLRKEHQQELEILKKEYDQEREEKIKQEQEDLELKHNSTLKQLMREFNTQLAQKEQELEMTIKETINKAQEVEAELLESHQEETNQLLKKIAEKDDDLKRTAKRYEEILDAREEEMTAKVRDLQTQLEELQKKYQQKLEQEENPGNDNTQLAQKTTLISDSKLKEQEFREQIHNLEDRLKKYEKNVYATTVGTPYKGGNLYHTDVSLFGEPTEFEYLRKVLFEYMMGRETKTMAKVITTVLKFPDDQTQKILEREDARLMSWLRSSS

SEQ ID NO: 35991 - protein, 2230 aa, Homo sapiens
  Payload ID: 7110
  Gene Symbol: GOLGA4
  Gene Name: golgin A4
  Uniprot ID: Q13439
  ENSP ID: ENSP00000354486
MFKKLKQKISEEQQQLQQALAPAQASSNSSTPTRMRSRTSSFTEQLDEGTPNRESGDTQSFAQKLQLRVPSVESLFRSPIKESLFRSSSKESLVRTSSRESLNRLDLDSSTASFDPPSDMDSEAEDLVGNSDSLNKEQLIQRLRRMERSLSSYRGKYSELVTAYQMLQREKKKLQGILSQSQDKSLRRIAELREELQMDQQAKKHLQEEFDASLEEKDQYISVLQTQVSLLKQRLRNGPMNVDVLKPLPQLEPQAEVFTKEENPESDGEPVVEDGTSVKTLETLQQRVKRQENLLKRCKETIQSHKEQCTLLTSEKEALQEQLDERLQELEKIKDLHMAEKTKLITQLRDAKNLIEQLEQDKGMVIAETKRQMHETLEMKEEEIAQLRSRIKQMTTQGEELREQKEKSERAAFEELEKALSTAQKTEEARRKLKAEMDEQIKTIEKTSEEERISLQQELSRVKQEVVDVMKKSSEEQIAKLQKLHEKELARKEQELTKKLQTREREFQEQMKVALEKSQSEYLKISQEKEQQESLALEELELQKKAILTESENKLRDLQQEAETYRTRILELESSLEKSLQENKNQSKDLAVHLEAEKNKHNKEITVMVEKHKTELESLKHQQDALWTEKLQVLKQQYQTEMEKLREKCEQEKETLLKDKEIIFQAHIEEMNEKTLEKLDVKQTELESLSSELSEVLKARHKLEEELSVLKDQTDKMKQELEAKMDEQKNHHQQQVDSIIKEHEVSIQRTEKALKDQINQLELLLKERDKHLKEHQAHVENLEADIKRSEGELQQASAKLDVFQSYQSATHEQTKAYEEQLAQLQQKLLDLETERILLTKQVAEVEAQKKDVCTELDAHKIQVQDLMQQLEKQNSEMEQKVKSLTQVYESKLEDGNKEQEQTKQILVEKENMILQMREGQKKEIEILTQKLSAKEDSIHILNEEYETKFKNQEKKMEKVKQKAKEMQETLKKKLLDQEAKLKKELENTALELSQKEKQFNAKMLEMAQANSAGISDAVSRLETNQKEQIESLTEVHRRELNDVISIWEKKLNQQAEELQEIHEIQLQEKEQEVAELKQKILLFGCEKEEMNKEITWLKEEGVKQDTTLNELQEQLKQKSAHVNSLAQDETKLKAHLEKLEVDLNKSLKENTFLQEQLVELKMLAEEDKRKVSELTSKLKTTDEEFQSLKSSHEKSNKSLEDKSLEFKKLSEELAIQLDICCKKTEALLEAKTNELINISSSKTNAILSRISHCQHRTTKVKEALLIKTCTVSELEAQLRQLTEEQNTLNISFQQATHQLEEKENQIKSMKADIESLVTEKEALQKEGGNQQQAASEKESCITQLKKELSENINAVTLMKEELKEKKVEISSLSKQLTDLNVQLQNSISLSEKEAAISSLRKQYDEEKCELLDQVQDLSFKVDTLSKEKISALEQVDDWSNKFSEWKKKAQSRFTQHQNTVKELQIQLELKSKEAYEKDEQINLLKEELDQQNKRFDCLKGEMEDDKSKMEKKESNLETELKSQTARIMELEDHITQKTIEIESLNEVLKNYNQQKDIEHKELVQKLQHFQELGEEKDNRVKEAEEKILTLENQVYSMKAELETKKKELEHVNLSVKSKEEELKALEDRLESESAAKLAELKRKAEQKIAAIKKQLLSQMEEKEEQYKKGTESHLSELNTKLQEREREVHILEEKLKSVESSQSETLIVPRSAKNVAAYTEQEEADSQGCVQKTYEEKISVLQRNLTEKEKLLQRVGQEKEETVSSHFEMRCQYQERLIKLEHAEAKQHEDQSMIGHLQEELEEKNKKYSLIVAQHVEKEGGKNNIQAKQNLENVFDDVQKTLQEKELTCQILEQKIKELDSCLVRQKEVHRVEMEELTSKYEKLQALQQMDGRNKPTELLEENTEEKSKSHLVQPKLLSNMEAQHNDLEFKLAGAEREKQKLGKEIVRLQKDLRMLRKEHQQELEILKKEYDQEREEKIKQEQEDLELKHNSTLKQLMREFNTQLAQKEQELEMTIKETINKAQEVEAELLESHQEETNQLLKKIAEKDDDLKRTAKRYEEILDAREEEMTAKVRDLQTQLEELQKKYQQKLEQEENPGNDNVTIMELQTQLAQKTTLISDSKLKEQEFREQIHNLEDRLKKYEKNVYATTVGTPYKGGNLYHTDVSLFGEPTEFEYLRKVLFEYMMGRETKTMAKVITTVLKFPDDQTQKILEREDARLMFTSPRSGIF

SEQ ID NO: 35992 - protein, 445 aa, Homo sapiens
  Payload ID: 7110
  Gene Symbol: GOLGA4
  Gene Name: golgin A4
  ENSP ID: ENSP00000387633
MFKKLKQKISEEQQQLQQALAPAQASSNSSTPTRMRSRTSSFTEQLDEGTPNRENASTHASKSPDSVNGSEPSIPQSGDTQSFAQKLQLRVPSVESLFRSPIKESLFRSSSKESLVRTSSRESLNRLDLDSSTASFDPPSDMDSEAEDLVGNSDSLNKEQLIQRLRRMERSLSSYRGKYSEGILSQSQDKSLRRIAELRELQMDQQAKKHLQEEFDASLEEKDQYISVLQTQVSLLKQRLRNGPMNVDVLKPLPQLEPQAEVFTKEENPESDGEPVVEDGTSVKTLETLQQRVKRQENLLKRCKETIQSHKEQCTLLTSEKEALQEQLDERLQELEKIKDLHMAEKTKLITQLRDAKNLIEQLEQDKGMVIAETKRQMHETLEMKEEEIAQLRSRIKQMTTQGEELREQKEKSERAAFEELEKALSTAQKTEEARRKLKAEMDEQ

SEQ ID NO: 35993 - protein, 118 aa, Homo sapiens
  Payload ID: 7110
  Gene Symbol: GOLGA4
  Gene Name: golgin A4
  ENSP ID: ENSP00000392907
MFKKLKQKISEEQQQLQQALAPAQASSNSSTPTRMRSRTSSFTEQLDEGTPNRELLAGMIAEPAFLSEYTIFALDSSKHPKTQSDSVNASTHASKSPDSVNGSEPSIPQSGDTQSFAQ

SEQ ID NO: 35994 - protein, 585 aa, Homo sapiens
  Payload ID: 7110
  Gene Symbol: GOLGA4
  Gene Name: golgin A4
  ENSP ID: ENSP00000403009
MFKKLKQKISEEQQQLQQALAPAQASSNSSTPTRMRSRTSSFTEQLDEGTPNRENASTHASKSPDSVNGSEPSIPQEKSQSEYLKISQEKEQQESLALEELELQKKAILTESENKLRDLQQEAETYRTRILELESSLEKSLQENKNQSKDLAVHLEAEKNKHNKEITVMVEKHKTELESLKHQQDALWTEKLQVLKQQYQTEMEKLREKCEQEKETLLKDKEIIFQAHIEEMNEKTLEKLDVKQTELESLSSELSEVLKARHKLEEELSVLKDQTDKMKQELEAKMDEQKNHHQQQVDSIIKEHEVSIQRTEKALKDQINQLELLLKERDKHLKEHQAHVENLEADIKRSEGELQQASAKLDVFQSYQSATHEQTKAYEEQLAQLQQKLLDLETERILLTKQVAEVEAQKKDVCTELDAHKIQVQDLMQQLEKQNSEMEQKVKSLTQVYESKLEDGNKEQEQTKQILVEKENMILQMREGQKKEIEILTQKLSAKEDSIHILNEEYETKFKNQEKKMEKVKQKAKEMQETLKKKLLDQEAKLKKELENTALELSQKEKQFNAKMLEMAQANSAGISDAVSRLETN

SEQ ID NO: 35995 - protein, 2099 aa, Homo sapiens [sequence omitted]

SEQ ID NO: 35996 - protein, 166 aa, Homo sapiens
  Payload ID: 7110
  Gene Symbol: GOLGA4
  Gene Name: golgin A4
  ENSP ID: ENSP00000406894
MFKKLKQKISEEQQQLQQALAPAQASSNSSTPTRMRSRTSSFTEQLDEGTPNRESGDTQSFAQKLQLRVPSVESLFRSPIKESLFRSSSKESLVRTSSRESLNRLDLDSSTASFDPPSDMDSEAEDLVGNSDSLNKEQLIQRLRRMERSLSSYRGKYSESWLRSSS

SEQ ID NO: 35997 - protein, 218 aa, Homo sapiens [sequence omitted]

SEQ ID NO: 35998 - protein, 731 aa, Homo sapiens
  Payload ID: 7111
  Gene Symbol: GOLGA5
  Gene Name: golgin A5
  Uniprot ID: Q8TBA6
  ENSP ID: ENSP00000163416
MSWFVDLAGKAEDLLNRVDQGAATALSRKDNASNIYSKNTDYTELHQQNTDLIYQTGPKSTYISSAADNIRNQKATILAGTANVKVGSRTPVEASHPVENASVPRPSSHFVRRKKSEPDDELLFDFLNSSQKEPTGRVEIRKEKGKTPVFQSSQTSSVSSVNPSVTTIKTIEENSFGSQTHEAASNSDSSHEGQEESSKENVSSNAACPDHTPTPNDDGKSHELSNLRLENQLLRNEVQSLNQEMASLLQRSKETQEELNKARARVEKWNADHSKSDRMTRGLRAQVDDLTEAVAAKDSQLAVLKVRLQEADQLLSTRTEALEALQSEKSRIMQDQSEGNSLQNQALQTFQERLHEADATLKREQESYKQMQSEFAARLNKVEMERQNLAEAITLAERKYSDEKKRVDELQQQVKLYKLNLESSKQELIDYKQKATRILQSKEKLINSLKEGSGFEGLDSSTASSMELEELRHEKEMQREEIQKLMGQIHQLRSELQDMEAQQVNEAESAREQLQDLHDQIAGQKASKQELETELERLKQEFHYIEEDLYRTKNTLQSRIKDRDEEIQKLRNQLTNKTLSNSSQSELENRLHQLTETLIQKQTMLESLSTEKNSLVFQLERLEQQMNSASGSSSNGSSINMSGIDNGEGTRLRNVPVLFNDTETNLAGMYGKVRKAASSIDQFSIRLGIFLRRYPIARVFVIIYMALLHLWVMIVLLTYTPEMHHDQPYGK

SEQ ID NO: 35999 - protein, 117 aa, Homo sapiens
  Payload ID: 7111
  Gene Symbol: GOLGA5
  Gene Name: golgin A5
  ENSP ID: ENSP00000452601
  MOD_RES (1)..(1): Any amino acid
XNKTLSNSSQSELENRLHQLTETLIQKQTMLESLSTEKNSLVFQLERLEQQMNSASGSSSNGSSINMSGIDNGEGTRLRNVPVLFNDTETNLAGMYGKVRKAASSIDQFRLCFTSGS

SEQ ID NO: 36000 - protein, 693 aa, Homo sapiens
  Payload ID: 7112
  Gene Symbol: GOLGA6A
  Gene Name: golgin A6 family, member A
  Uniprot ID: Q9NYA3
  ENSP ID: ENSP00000290438
MWPQPYLPPHPMMLEESRQNKLAAAKKKLKEYQQRKSPGIPAGAKTKKKKTDSSPETTTSGGCHSPGDSQYQELAVALESSSVTISQLNENIESLKQQKKQVEHQLEEAKKTNNEIHKAQMERLETINILTLEKADLKTTLYHTKRAARHFEEESKDLAGRLQYSLQRIQELERALCAVSTQQQEEDRSSSCREAVLQRWLQQTIKERALLNAHVTQVTESLKQVQLERDEYAKHIKGERARWQERMWKMSVEARTLKEEKKRDIHRIQELERSLSELKNQMAEPPSLAPPAVTSVVEQLQDEAKHLRQEVEGLEGKLQSQVENNQALSLLSKEQKQRLQEQEEMLREQEAQRVREQERLCEQNERLREQQKTLQEQGERLRKQEQRLRKQEERLRKEEERLQKQEKRLWDQEERLWKKEERLQKQEERLALSQNHKLDKQLAEPQCSFEDLNNEKKSALQLEQQVKELQEKLDEEHLEAASHQNQQLETQLSLVALPGEGDGGQHLDSEEEEAPRPTPNIPEDLESREATSSFMDLPKEKADGTEQVERRELGFVQPSGVTDGMRESFTVYESQGAVPNTRHQEMEDVIRLAQKEEEMKVKLLELQELVLPLVGNHEGHGKFLIAAQNPADEPTPGAPAPQELGAAGEQDVFYEVSLDNNVEPAPGAAREGSPHDNPTVQQIVQLSPVMQDT

SEQ ID NO: 36001 - protein, 693 aa, Homo sapiens
  Payload ID: 7113
  Gene Symbol: GOLGA6B
  Gene Name: golgin A6 family, member B
  Uniprot ID: A6NDN3
  ENSP ID: ENSP00000408132
MWPQPYLPPHPMMLEESRQNKLAAAKKKLKEYQQRKSPGIPAGAKTKKKKTDSSPETTTSGGGHSPGDSQYQELAVALESSSVTISQLNENIESLKQQKKQVEHQLEEAKKTNNEIHKAQMERLETINILTLEKADLKTTLYHTKRAARHFEEESKDLAGRLQYSLQRIQELERALCAVSTQQQEEDRSSSCREAVLHRRLQQTIKERALLNAHVTQVTESLKQVQLERDEYAKHIKGERARWQERMWKMSVEARTLKEEKKRDIHRIQELERSLSELKNQMAKPPSLAPPAVTSVVEQLQDEAKHLRQEVEGLEGKLQSQVENNQALSLLSKEQKQRLQEQEEMLREQEVQRVREQERLCEQNERLREQQKTLQEQGERLRKQEQRLRKQEERLRKEEERLQKQEKRLWDQEERLWKKEERLQKQEERLALSQNHKLDKQLAEPQCSFEDLNNEKKSALQLEQQVKELQEKLDEEHLEAASQQNQQLETQLSLVALPGEGDGGQHLDSEEEEAPRPTPNIPEDLESREATSSFMDLPKEKADGTEQVERRELGFVQPSGVTDGMRESFTVYESQGAVPNTRHQEMEDVIRLAQKEEEMKVKLLELQELVLPLVGNHEGHGKFLIAAQNPADEPTPGAPAPQELGAAGEQDDFYEVSLDNNVEPAPGAAREGSPHDNPTVQQIVQLSPVMQDT

SEQ ID NO: 36002 - protein, 693 aa, Homo sapiens
  Payload ID: 7114
  Gene Symbol: GOLGA6C
  Gene Name: golgin A6 family, member C
  Uniprot ID: A6NDK9
  ENSP ID: ENSP00000300576
MWPQPYLPPHPMMLEESRQNKLAAAKKKLKEYQQRKSPGIPAGAKTKKKKTDSSPETTTSGGGHSPGDSQYQELAVALESSSVTINQLNENIESLKQQKKQVEHQLEEAKKTNNEIHKAQMEQLETINILTLEKADLKTTLYHTKRAARHFEEESKDLAGRLQYSLQRIQELERALSAVSTQQQEEDRSSSCREAVLQRRLQQTIKERALLNAHVTQVTESLKQVQLERDEYAKHIKGERARWQERMWKMSVEARTLKEEKKRDIHRIQELERSLSELKNQMAEPPSLAPPAVTSVVEQLQDEAKHLRQEVEGLEGKLQSQVENNQALSLLSKEQKQRLQEQEEMLREQEAQRVREQERLCEQNERLREQQKTLQEQGERLRKQEQRLRKQEERLRKEEERLQKQEKRLWDQEERLWKKEERLQKQEERLALSQNHKLDKQLAEPQCSFEDLNNEKKSALQLEQQVKELQEKLDEEHLEAASQRNQQLETQLSLVALPGEGDGGQHLDSEEEEAPRPTPNIPEDLESREATSSFMDLPKEKADGTEQVERRELGFVQPSGVTDGMRESFTVYESQGAVPNTRHQEMEDVIRLAQKEEEMKVKLLELQELVLPLVGNHEGHGKFLIAAQNPADEPTPGAPAPQELGAAGEQDDFYEVSLDNNVEPAPGAAREGSPHDNPPVQQIVQLSPVMQDT

SEQ ID NO: 36003 - protein, 693 aa, Homo sapiens
  Payload ID: 7115
  Gene Symbol: GOLGA6D
  Gene Name: golgin A6 family, member D
  Uniprot ID: P0CG33
  ENSP ID: ENSP00000391085
MWPQPYLPPHPMMLEESRQNKLAAAKKKLKEYQQRKSPGIPAGAKTKKKKTDSSPETTTSGGGHSPGDSQYQELAVALESSSVTINQLNENIESLKQQKKQVEHQLEEAKKTNNEIHKAQMEQLETINILTLEKADLKTTLYHTKRAARHFEEESKDLAGRLQYSLQHIQELERALCAVSTQQQEEDRSSSCREAVLQRRLQQTIKERALLNAHVTQVTESLKQVQLERDEYAKHIKGERARWQERMWKMSVEARTLKEEKKRDIHRIQELERSLSELKNQMAEPPSLAPPAVTSVVEQLQDEAKHLRQEVEGLEGKLQSQVENNQALSLLSKEQKQRLQEQEEMLREQEAQRVREQERLCEQNERLREQQKTLQEQGERLRKQEQRLRKQEERLRKEEERLQKQEKRLWDQEERLWKKEERLQKQEERLALSQNHKLDKQLAEPQCSFEDLNNEKKSALQLEQQVKELQEKLDEEHLEAASQRNQQLETQLSLVALPGEGDGGQHLDSEEEEAPRPTPNIPEDLESREATSSFMDLPKEKADGTEQVERRELGFVQPSGVTDGMRESFTVYESQGAVPNTRHQEMEDVIRLAQKEEEMKVKLLELQELVLPLVGNHEGHGKFLIAAQNPADEPTPGAPAPQELGAAGEQDVFYEVSLDNNVEPAPGVAREGSPHNNPTVQQIVQLSPVMQDT

SEQ ID NO: 36004 - protein, 693 aa, Homo sapiens [sequence omitted]

SEQ ID NO: 36005 - protein, 668 aa, Homo sapiens
  Payload ID: 7116
  Gene Symbol: GOLGA6L1
  Gene Name: golgin A6 family-like 1
  ENSP ID: ENSP00000478478
MLMWPQPHLPTHPHLPTHPHLPTHPHLPTHPHLPTHPHLPTHPHLPTHPMMSKETRQSKLAEAKEQLTDHHPQTNPSVGTAASDTKKKKINNGTNPETTTSGGCHSPEDEQKASHQHQEALRRELEAQVHTIRILTCQKTELQMALYYSQHAVKQLEGEARDLISRLHDSWKFAGELEQALSAVATQKKKADRYIEELTKERDALSLELYRNTITDEELKEKNAKLQEKLQLVESEKSEIQLNVKELKRKLERAKLLLPQQQLQAEADHLGKELQSVSAKLQAQVEENELWNRLNQQQEEKMWRQEEKIQEWEEKIQEQEEKIREQEEKIREQEEKMRRQEEMMWEKEEKMRRQEEMMWEKEEKMRRLEEMMWEKEEKIRELEEKMHEQEKIREQEEKRQEEEKIREQEKRQEQEAKMWRQEEKIREQEEKIREQEKKMWRQEEKIHEQEKIREEEKRQEQEEMWRQEEKIREQEEIWRQKEKMHEQEKIRKQEEKVWRQEEKMHDQEEKIREQEEKMWRQEEKIREQEEKIREQEEKIREQEEMMQEQEEKMGEQEEKMQEQEKMRRQEEKIREQEEKIREQKEKIREQEEKIWEQEEKIREQEEMMQEQEEKMWEQEEKMCEQEEKMQEQEEKMRRQEEKMWEQEVRLRQQEEKMQEHQEHLEAAI

SEQ ID NO: 36006 - protein, 668 aa, Homo sapiens; identical to SEQ ID NO: 36005
  Payload ID: 7116
  Gene Symbol: GOLGA6L1
  Gene Name: golgin A6 family-like 1
  ENSP ID: ENSP00000482864

SEQ ID NO: 36007 - protein, 668 aa, Homo sapiens; identical to SEQ ID NO: 36005
  Payload ID: 7116
  Gene Symbol: GOLGA6L1
  Gene Name: golgin A6 family-like 1
  ENSP ID: ENSP00000483916

SEQ ID NO: 36008 - protein, 474 aa, Homo sapiens
  Payload ID: 7117
  Gene Symbol: GOLGA6L10
  Gene Name: golgin A6 family-like 10
  ENSP ID: ENSP00000478445
MWPQPRLPPHPAMSEKTQQGKLAAAKKKLKAYWQRKSPGIPAGANRKKKVNGSSPDTATSGGYHSPGDSATGVYGEGRASSTTLQDLESQYQELAVALDSSSAIISQLTENINSLVRTSKEEKKHEIHLVQKLGRSLFKLKNQTAEPLAPEPPAGPSKVEQLQDETNHLRKELESVGRQLQAEVENNQMLSLLNRRQEERLREQEERLHEQEERLHEQEERLLREQEERLCEQEERLREQEERLCEQEERLCEQEERLCEQEERLCEQEERLCEQEKLPGQERLLEEVEKLLEQERRQEEQERLLERERLLDEVEELLEQERLRQQDERLWQQETLRELERLRELERLRELERMLELGWEALYEQRAEPRSGFEELNNENKSTLQLEQQVKELEKSGGAEEPRGSESAAAARPVPGAPVPQGAWMCGQAGWTPQEHPGLSGEAVGTGEAAGGAEEAACHSFRAAENRELNITII

SEQ ID NO: 36009 - protein, 522 aa, Homo sapiens
  Payload ID: 7117
  Gene Symbol: GOLGA6L10
  Gene Name: golgin A6 family-like 10
  Uniprot ID: A6NI86
  ENSP ID: ENSP00000479362
MWPQPRLPPHPAMSEKTQQGKLAAAKKKLKAYWQRKSPGIPAGANRKKKVNGSSPDTATSGGYHSPGDSATGIYGEGRASSTTLQDLESQYQELAVALDSSSAIISQLTENINSLVRTSKEEKKHEIHLVQKLGRSLFKLKNQTAEPLAPEPPAGPSKVEQLQDETNHLRKELESVGRQLQAEVENNQMLSLLNRRQEERLREQEERLHEQEERLHEQEERLCEQEERLREQEERLCEQEERLREQEERLCEQEERLREQEERLCEQEERLREQEERLREQEERLCEQEERLCEQEERLREQEERLCEQEERLCEQEERLCEQEKLPGQERLLEEVEKLLEQERRQEEQERLLERERLLDEVEELLEQERLRQQDERLWQQETLRELERLRELERLRELERMLELGWEALYEQRAEPRSGFEELNNENKSTLQLEQQVKELEKSGGAEEPRGSESAAAARPVPGAPVPQGAWMCGQAGWTPQEHPGLSGEAVGTGEAAGGAEEAACHSFRAAENRELNITII

SEQ ID NO: 36010 - protein, 474 aa, Homo sapiens
  Payload ID: 7117
  Gene Symbol: GOLGA6L10
  Gene Name: golgin A6 family-like 10
  ENSP ID: ENSP00000481389
MWPQPRLPPHPAMSEKTQQGKLAAAKKKLKAYWQRKSPGIPAGANRKKKVNGSSPDTATSGGYHSPGDSATGIYGEGRASSTTLQDLESQYQELAVALDSSSAIISQLTENINSLVRTSKEEKKHEIHLVQKLGRSLFKLKNQTAEPLAPEPPAGPSKVEQLQDETNHLRKELESVGRQLQAEVENNQMLSLLNRRQEERLREQEERLHEQEERLHEQEERLLREQEERLCEQEERLREQEERLCEQEERLREQEERLCEQEERLCEQEERLCEQEKLPGQERLLEEVEKLLEQERRQEEQERLLERERLLDEVEELLEQERLRQQDERLWQQETLRELERLRELERLRELERMLELGWEALYEQRAEPRSGFEELNNENKSTLQLEQQVKELEKSGGAEEPRGSESAAAARPVPGAPVPQGAWMCGQAGWTPQEHPGLSGEAVGTGEAAGGAEEAACHSFRAAENRELNITII

SEQ ID NO: 36011 - protein, 475 aa, Homo sapiens
  Payload ID: 7117
  Gene Symbol: GOLGA6L10
  Gene Name: golgin A6 family-like 10
  ENSP ID: ENSP00000483647
MWPQPRLPPHPAMSEKTQQGKLAAAKKKLKAYWQRKSPGIPAGANRKKKVNGSSPDTATSGGYHSPGDSATGIYGEGRASSTTLQDLESQYQELAVALDSSSAIISQLTENINSLVRTSKEEKKHEIHLVQKLGRSLFKLKNQTAEPLAPEPPAGPSKVEQLQDETNHLRKELESVGRQLQAEVENNQMLSLLNRRQEERLREQEERLHEQEERLHEQEERLCEQEEERLCEQEERLREQEERLREQEEERLREQEERLCEQEERLCEQEERLCEQEKLPGQERLLEEVEKLLEQERRQEEQERLLERERLLDEVEELLEQERLRQQDERLWQQETLRELERLRELERLRELERMLELGWEALYEQRAEPRSGFEELNNENKSTLQLEQQVKELEKSGGAEEPRGSESAAAARPVPGAPVPQGAWMCGQAGWTPQEHPGLSGEAVGTGEAAGGAEEAACHSFRAAENRELNITII

SEQ ID NO: 36012 - protein, 439 aa, Homo sapiens
  Payload ID: 7117
  Gene Symbol: GOLGA6L10
  Gene Name: golgin A6 family-like 10
  ENSP ID: ENSP00000484254
MWPQPRLPPHPAMSEKTQQGKLAAAKKKLKAYWQRKSPGIPAGANRKKKVNGSSPDTATSGGYHSPGDSATGIYGEGRASSTTLQDLESQYQELAVALDSSSAIISQLTENINSLVRTSKEEKKHEIHLVQKLGRSLFKLKNQTAEPLAPEPPAGPSKVEQLQDETNHLRKELESVGRQLQAEVENNQMLSLLNRRQEERLREQEERLHEQEERLHEQEERLCEQEERLREQEERLLCEQEKLPGQERLLEEVEKLLEQERRQEEQERLLERERLLDEVEELLEQERLRQQDERLWQQETLRELERLRELERLRELERMLELGWEALYEQRAEPRSGFEELNNENKSTLQLEQQVKELEKSGGAEEPRGSESAAAARPVPGAPVPQGAWMCGQAGWTPQEHPGLSGEAVGTGEAAGGAEEAACHSFRAAENRELNITII

SEQ ID NO: 36013 - protein, 522 aa, Homo sapiens
  Payload ID: 7117
  Gene Symbol: GOLGA6L10
  Gene Name: golgin A6 family-like 10
  ENSP ID: ENSP00000487759
MWPQPRLPPHPAMSEKTQQGKLAAAKKKLKAYWQRKSPGIPAGANRKKKVNGSSPDTATSGGYHSPGDSATGVYGEGRASSTTLQDLESQYQELAVALDSSSAIISQLTENINSLVRTSKEEKKHEIHLVQKLGRSLFKLKNQTAEPLAPEPPAGPSKVEQLQDETNHLRKELESVGRQLQAEVENNQMLSLLNRRQEERLREQEERLHEQEERLHEQEERLCEQEERLREQEERLCEQEERLREQEERLCEQEERLREQEERLCEQEERLREQEERLCEQEERLREQEERLCEQEERLREQEERLCEQEERLCEQEERLCEQEKLPGQERLLEEVEKLLEQERRQEEQERLLERERLLDEVEELLEQERLRQQDERLWQQETLRELERLRELERLRELERMLELGWEALYEQRAEPRSGFEELNNENKSTLQLEQQVKELEKSGGAEEPRGSESAAAARPVPGAPVPQGAWMCGQAGWTPQEHPGLSGEAVGTGEAAGGAEEAACHSFRAAENRELNITII

SEQ ID NO: 36014 - protein, 536 aa, Homo sapiens
  Payload ID: 7117
  Gene Symbol: GOLGA6L10
  Gene Name: golgin A6 family-like 10
  ENSP ID: ENSP00000488730
MWPQPRLPPHPAMSEKTQQGKLAAAKKKLKAYWQRKSPGIPAGANRKKKVNGSSPDTATSGGYHSPGDSATGIYGEGRASSTTLQDLESQYQELAVALDSSSAIISQLTENINSLVRTSKEEKKHEIHLVQKLGRSLFKLKNQTAEPLAPEPPAGPSKVEQLQDETNHLRKELESVGRQLQAEVENNQMLSLLNRRQEERLREQEERLHEQEERLHEQEERLCEQEERLREQEERLCEQEERLREQEERLREQEERLREQEERLHEQEERLHEQEERLCEQEERLREQEERLCEQEERLREQEERLCEQEERLREQEERLCEQEERLCEQEERLCEQEKLPGQERLLEEVEKLLEQERRQEEQERLLERERLLDEVEELLEQERLRQQDERLWQQETLRELERLRELERLRELERMLELGWEALYEQRAEPRSGFEELNNENKSTLQLEQQVKELEKSGGAEEPRGSESAAAARPVPGAPVPQGAWMCGQAGWTPQEHPGLSGEAVGTGEAAGGAEEAACHSFRAAENRELNITII

SEQ ID NO: 36015 - protein, 414 aa, Homo sapiens
  Payload ID: 7118
  Gene Symbol: GOLGA6L2
  Gene Name: golgin A6 family-like 2
  Uniprot ID: Q8N9W4
  ENSP ID: ENSP00000307928
MSEKTRQNKLAEAKKKFTDYRQWNIAGVGTRATDTKKKKINNGTNPETTTSEGCHSPEDTQQNRAQLKEEKKASHQHQEALRREIEAQDHTIRILTCQKTELETALYYSQDAARKFEDGNLGTPSSFNLALSQAFRGSPLGCVSTSLIPGESKDLAGRLHHSWHFAGELQRALSAVSTWHKKADRYIEELTKERDALSLELYRNTITNEELKKKNAELQEKLRLAESEKSEIQLNVKELKRKLERAKFLLPQVQTNTLQEEMWRQEEELREQEKKIRKQEEKMWRQEERLREQEGKMREQEEKMRRQEEMREKEERIRDQKEKMQERLPEHEERCSEPCLPPSKVLCNMSHTGSVEPAGGEAGEGSPQDNPTAQEIMQLFCGMKNAQQCPGLGSTSCIPFFYRGDKRKMKIINI

SEQ ID NO: 36016 - protein, 314 aa, Homo sapiens
  Payload ID: 7118
  Gene Symbol: GOLGA6L2
  Gene Name: golgin A6 family-like 2
  ENSP ID: ENSP00000344626
MWRQEEELREQEKKIRKQEEKMWRQEERLREQEGKMREQEEKMRRQEKRLREQEKELREQEKELREQKKLREQEEQMQEQEEKMWEQEEKMREQEEKMWRQEERLWEQEKQMREQEQKMRDQEERMWEQDERLREKEERMREQEKMWEQVEKMREEKKMQEQEKKTRDQEEKMQEEERIREREKKMREEEETMREQEEKMQKQEENMWEQEEKEWQQQRLPEQKEKLWEQEKMQEQEEKIWEQEEKIRDQEEMWGQEKKMWRQEKMREQEDVGAGGDAREGGEDTRSEREDAGEAARARGAVLRALPPSLQSSL

SEQ ID NO: 36017 - protein, 909 aa, Homo sapiens
  Payload ID: 7118
  Gene Symbol: GOLGA6L2
  Gene Name: golgin A6 family-like 2
  ENSP ID: ENSP00000454407
MWPQPHLPPHPMMSEKTRQNKLAEAKKKFTDYRQWNIAGVGTRATDTKKKKINNGTNPETTTSEGCHSPEDTQQNRAQLKEEKKASHQHQEALRREIEAQDHTIRILTCQKTELETALYYSQDAARKFEDGNLGTPSSFNLALSQAFRGSPLGCVSTSLIPGESKDLAGRLHHSWHFAGELQRALSAVSTWHKKADRYIEELTKERDALSLELYRNTITNEELKKKNAELQEKLRLAESEKSEIQLNVKELKRKLERAKFLLPQVQTNTLQEEMWRQEEELREQEKKIRKQEEKMWRQEERLREQEGKMREQEEKMRRQEKRLREQEKELREQEKELREQKKLREQEEQMQEQEEKMWEQEEKMREQEEKMWRQEERLWEQEKQMREQEQKMRDQEERMWEQDERLREKEERMREQEKMWEQVEKMREEKKMQEQEKKTRDQEEKMQEEERIREREKKMREEEETMREQEEKMQKQEENMWEQEEKEWQQQRLPEQKEKLWEQEKMQEQEEKIWEQEEKIRDQEEMWGQEKKMWRQEKMREQEDVETGGEAAGAGEADVGAGGEDAGSGAEDVGPGGEDVGAGREAAGEGGENAGAEEDVAAGGEDAGGEEDAGAGEEDMGPGGEDARGGEDAGAGEEDAGGGGDDAGAGGEDAGAGREDAGAGGEDVGAGREDAGAGGEDVGAGGEDVGAGRRRCGSSRGCRNRRRSCGNTRRCRSRRSGAEDVGPEGEDVGAGREAAGEGGENAGAEDVAAGGEDAGEEEDAGGEDAGAAREDAGAGGDDVGAGREDAGAGGEDVGAGGEDAGAGGEDAGAGGEDAGPGGEDAGAGGEDAGPGGEDAGAGGEDAGPGGEDVGPGGEDVGAGGEDVGAGGDAREGGEDTRSEREDAGEAARARGAVLRALPPSLQSSL

SEQ ID NO: 36018 - protein, 208 aa, Homo sapiens
  Payload ID: 7118
  Gene Symbol: GOLGA6L2
  Gene Name: golgin A6 family-like 2
  ENSP ID: ENSP00000456523
MWPQPHLPPHPMMSEKTRQNKLAEAKKKFTDYRQWNIAGVGTRATDTKKKKINNGTNPETTTSEGCHSPEDEKKASHQHQEALRREIEAQDHTIRILTCQKTELETALYYSQDAARKFEDGNLGTPSSFNLALSQAFRGSPLGCVSTSLIPGESKDLAGRLHHSWHFAGELQRALSAVSTWHKKADRYIEELTKERDALSLELYRNTI

SEQ ID NO: 36019 - protein, 659 aa, Homo sapiens
  Payload ID: 7119
  Gene Symbol: GOLGA6L22
  Gene Name: golgin A6 family-like 22
  ENSP ID: ENSP00000482663
MLMWPQPHLPTHPHLPTHPHLPTHPPMMSKETRQSKLAEAKEQLTDHHPQTNPSVGTAASDTKKKKINNGTNPETTTSGGCHSPEDEQKASHQHQEALRRELEAQVHTIRILTCQKTELQMALYYSQHAVKQLEGEARDLISRLHDSWKFAGELEQALSAVATQKKKADRYIEELTKERDALSLELYRNTITDEELKEKNAKLQEKLQLVESEKSEIQLNVKELKRKLERAKLLLPQQQLQAEADHLGKELQSVSAKLQAQVEENELWNRLNQQQEEKMWRQEEKIQEWEEKIQEQEEKIREQEEKIREQEEKMRRQEEMMWEKEEKMRRQEEMMWEKEEKMRRQEEMMWEKEEKMRRLEEMMWEKEEKIRELEEKMHEQEKIREQEEKRQEEEKIREQEKRQEQEAKMWRQEEKIREQEEKIREQEKKMWRQEEKIHEQEKIREEEKRQEQEEMWRQEEKIREQEEIWRQKEKMHEQEKIRKQEEKVWRQEEKMHDQEEKIREQEEKMWRQEEKIREQEEKIREQEEKIREQEEMMQEQEEKMGEQEEKMQEQEKMRRQEEKIREQEEKIREQKEKIREQEEKIWEQEEKIREQEEMMQEQEEKMWEQEEKMCEQEEKMQEQEEKMRRQEEKMWEQEVRLRQQEEKMQEHQEHLEAAI

SEQ ID NO: 36020 - protein, 810 aa, Homo sapiens [sequence omitted]

SEQ ID NO: 36021 - protein, 716 aa, Homo sapiens
  Payload ID: 7119
  Gene Symbol: GOLGA6L22
  Gene Name: golgin A6 family-like 22
  ENSP ID: ENSP00000484257
MLMWPQPHLPTHPHLPTHPHLPTHPHLPTHPHLPTHPHLPTHPMMSKETRQSKLAEAKEQLTDHHPQTNPSVGTAASDTKKKKINNGTSPETTTSGGCHSPEDEQKASHQHQEALRRELEAQVHTIRILTCQKTELQMALYYSQHAVKQLEGEARDLISRLHDSWKFAGELEQALSAVTTQKKKADRYIEELTKERDALSLELYRNTITDEELKEKNAKLQEKLQLVESEKSEIQLNVKELKRKLERAKLLLPQQQLQAEADHLGKELQSVSAKLQAQVEENELWNRLNQQQEEKMWRQEEKIQEWEEKIQEQEEKIREQEEKIREQEEKMRRQEEMMWEKEEKMRRQEEMMWEKEEKIRELEEKMHEQEKIREQEEKRQEEEKIREQEKRQEQEAKMWRQEEKIREQEEKIREQEKKMWRQEEKIHEQEKIREEEKRQEQEEMWRQEEKIREQEEIWRQKEKMHEQEEKIRKQEEKVWRQEEKMHDQEEKIREQEEKVWRQEEKIREQEEMWREEEKMHEQEKIWEEEKRQEQEDKMWRQEEKIREQEEKVWRQEEKIREQEEKRQEQEEKMWKQEEKIREQEEKIREQEEKIREQEEKIREQEEMMQEQEEKMGEQEEKMGEQEEKMQEQEEKMRRQEEKIREQEKKIREQEEKIREQEEMMQEQEEKMWEQEEKMCEQEEKMQEQEEKMRRQEEKMWEQEVRLRQQEEKMQEH

SEQ ID NO: 36022 - protein, 632 aa, Homo sapiens
  Payload ID: 7119
  Gene Symbol: GOLGA6L22
  Gene Name: golgin A6 family-like 22
  ENSP ID: ENSP00000486963
MMSKETRQSKLAEAKEQLTDHHPQTNPSVGTAASDTKKKKINNGTNPETTTSGGCHSPEDEQKASHQHQEALRRELEAQVHTIRILTCQKTELQMALYYSQHAVKQLEGEARDLISRLHDSWKFAGELEQALSAVATQKKKADRYIEELTKERDALSLELYRNTITDEELKEKNAKLQEKLQLVESEKSEIQLNVKELKRKLERAKLLLPQQLQAEADHLGKELQSVSAKLQAQVEENELWNRLNQQQEEKMWRQEEKIQEWEEKIQEQEEKIREQEEKIREQEEKMRRQEEMMWEKEEKMRRQEEMMWEKEEKMRRQEEMMWEKEEKMRRLEEMMWEKEEKIRELEEKMHEQEKIREQEEKRQEEEKIREQEKRQEQEAKMWRQEEKIREQEEKIREQEKKMWRQEEKIHEQEKIREEEKRQEQEEMWRQEEKIREQEEIWRQKEKMHEQEKIRKQEEKVWRQEEKMHDQEEKIREQEEKMWRQEEKIREQEEKIREQEEKIREQEEMMQEQEEKMGEQEEKMQEQEKMRRQEEKIREQEEKIREQKEKIREQEEKIWEQEEKIREQEEMMQEQEEKMWEQEEKMCEQEEKMQEQEEKMRRQEEKMWEQEVRLRQQEEKMQEHQEHLEAAI

SEQ ID NO: 36023 - protein, 438 aa, Homo sapiens
  Payload ID: 7120
  Gene Symbol: GOLGA6L4
  Gene Name: golgin A6 family-like 4
  ENSP ID: ENSP00000389305
MWPQPRFPPHPAMSEKTQQGKLAAAKKKLKAYWQRKSPGIPAGANRKKKINGSSPDTATSGGYHSPGDSATGIYGEGRASSTTLEDLESQYQELAVALDSSSAIISQLTENINSLVRTSKEEKKHEIHLVQKLGRSLFKLKNQTAEPLAPEPPAGPSKVEQLQDETNHLRKELESVGRQLQAEVENNQMLSLLNRRQEERLREQEERLREQEERLREQEERLCEQEERLREQEERLCEQEKLPGQERLLEEVEKLLEQERRQEEQERLLERERLLEEVEELLEQERLRQQDERLWQQETLQELERLRELERLRELERMLELGWEALYEQRAEPRSGFEELNNENKSTLQLEQQVKELKKSGGAEEPRGSESAAAARPVAGAPVPQGAWMCGQAGWTPQEHPGLSGEAVGTGEAAGGAGEAACHSFRAAENRELNITII

SEQ ID NO: 36024 - protein, 574 aa, Homo sapiens
  Payload ID: 7120
  Gene Symbol: GOLGA6L4
  Gene Name: golgin A6 family-like 4
  Uniprot ID: A6NEF3
  ENSP ID: ENSP00000421586
MWPQPRFPPHPAMSEKTQQGKLAAAKKKLKAYWQRKSPGIPAGANRKKKINGSSPDTATSGGYHSPGDSATGIYGEGRASSTTLEDLESQYQELAVALDSSSAIISQLTENINSLVRTSKEEKKHEIHLVQKLGRSLFKLKNQTAEPLAPEPPAGPSKVEQLQDETNHLRKELESVGRQLQAEVENNQMLSLLNRRQEERLREQEERLREQEERLREQEDRLHEQEERLREQEERLCEQEERLREHEERLCEQEERLCEQEERLREQEERLHEQEERLREQEERLCEQEERLREQEERLCEQEERLREQEERLCEQEKLPGQERLLEEVEKLLEQERRQEEQERLLERERLLEEVEKLLEQERQQEEQERLLERERLLEEVEKLLEQERRQEEQERLLERERLLDEVEELLDEVEELLEQERLRQQDERLWQQETLQELERLRELERLRELERMLELGWEALYEQRAEPRSGFEELNNENKSTLQLEQQVKELKKSGGAEEPRGSESAAAARPVAGAPVPQGAWMCGQAGWTPQEHPGLSGEAVGTGEAAGGAGEAACHSFRAAENRELNITII

SEQ ID NO: 36025 - protein, 194 aa, Homo sapiens
  Payload ID: 7120
  Gene Symbol: GOLGA6L4
  Gene Name: golgin A6 family-like 4
  ENSP ID: ENSP00000426395
LKAYWQRKSPGIPAGANRKKKINGSSPDTATSGGYHSPGDSATGIYGEGRASSTTLEDLESQYQELAVALDSSSAIISQLTENINSLVRTSKEEKKHEIHLVQKLGRSLFKLKNQTGGAEEPRGSESAAAARPVAGAPVPQGAWMCGQAGWTPQEHPGLSGEAVGTGEAAGGAGEAACHSFRAAENRELNITII

SEQ ID NO: 36026 - protein, 724 aa, Homo sapiens
  Payload ID: 7121
  Gene Symbol: GOLGA6L6
  Gene Name: golgin A6 family-like 6
  ENSP ID: ENSP00000480376
MLMWPQPHLPTHPHLPTHPHLPTHPHLPTHPHLPTHPMMSKETRQSKLAEAKEQLTDHHPQTNPSVGTAASDTKKKKINNGTNPETTTSGGCHSPEDEQKASHQHQEALRRELEAQVHTIRILTCQKTELQMALYYSQHAVKQLEGEARDLISRLHDSWKFAGELEQALSAVATQKKKADRYIEELTKERDALSLELYRNTITDEELKEKNAELQEKLQLVESEKSEIQLNVKELKRKLERAKLLLPQQQLQAEADHLGKELQSVSAKLQAQVEENELWNRLNQQQEEKMWRQEEKIQEWEEKIQEQEEKIREQEEKIREQEEKMRRQEEMMWEKEEKMRRQEEMMWEKEEKMRRQEEMMWEKEEKIRELEEKMHEQEKIREQEEKRQEEEKIREQEKRQEQEAKMWRQEEKIREQEEKIREQEKKMWRQEEKIHEQEKIREEEKRQEQEEMWRQEEKIREQEEIWRQKEKMHEQEEKIRKQEEKVWRQEEKIREQEEKIREQEEKMWRQEEKIREQEEMWREEEKMHEQEKIWEEEKRQEQEDKMWRQEEKIREQEEKVWRQEEKIREQEEKRQEQEEKMWKQEEKIREQEEKIREQEEKIREQEEKIREQEEMTQEQEEKMGEQEEKMCEQEEKMQEQEETMWRQEEKIREQEKKIREQEEKIREQEEMMQEQEEKMWEQEEKMCEQEEKMQEQEEKMRRQEEKMWEQEVRLRQQEEKMQEH

SEQ ID NO: 36027 - protein, 432 aa, Homo sapiens
  Payload ID: 7122
  Gene Symbol: GOLGA6L9
  Gene Name: golgin A6 family-like 9
  Uniprot ID: A6NEM1
  ENSP ID: ENSP00000479589
MWPQPRLPPHPAMSEKTQQGKLAAAKKKLKAYWQRKSPGIPAGANRKKKVNGSSPDTATSGGYHSPGDSATGIYGEGRASSTTLQDLESQYQELAVALDSSSAIISQLTENINSLVRTSKEEKKHEIHLVQKLGRSLFKLKNQTAEPLAPQPPAGPSKVEQLQDETNHLRKELESVGRQLQAEVENNQMLSLLNRRQEERLREQEERLREQEERLCEQEERLCEQEERLREQEERLCEQEKLPGQERLLEEVEKLLKQERRQEEQERLLERERLLDEVEELLEQERLRQQDERLWQQETLRELERLRELERMLELGWEALYEQRAEPRSGFEELNNENKSTLQLEQQVKELEKSGGAEEPRGSESAAAARPVPGAPVPQGAWMCGQAGWTPQEHPGLSGEAVGTGEAAGGAGEAACHSFRAAENRELNITII

SEQ ID NO: 36028 - protein, 432 aa, Homo sapiens
  Payload ID: 7122
  Gene Symbol: GOLGA6L9
  Gene Name: golgin A6 family-like 9
  Uniprot ID: A6NEM1
  ENSP ID: ENSP00000481078
MWPQPRLPPHPAMSEKTQQGKLAAAKKKLKAYWQRKSPGIPAGANRKKKINGSSPDTFTSGGYHSPGDSATGIYGEGRASSTTLQDLESQYQELAVALDSSSAIISQLTENINSLVRTSKEEKKHEIHLVQKLGRSLFKLKNQTAEPLAPQPPAGPSKMEQLQDETNHLRKELESVGRQLQAEVENNQMLSLLNRRQEERLREQEERLREQEERLCEQEERLCEQEERLREQEERLCEQEKLPGQERLLEEVEKLLEQERRQEEQERLLERERLLDEVEELLEQERLRQQDERLWQQETLRELERLRELERMLELGWEALYEQRAEPRSGFEELNNENKSTLQLEQQVKELEKSGGAEEPRGSESAAAARPVAGAPVPQGAWMCGQAGWTPQEHPGLSGEAVGTGEAAGGAGEAACHSFRAAENRELNITII

SEQ ID NO: 36029 - protein, 137 aa, Homo sapiens
  Payload ID: 7123
  Gene Symbol: GOLGA7
  Gene Name: golgin A7
  Uniprot ID: Q7Z5G4
  ENSP ID: ENSP00000350378
MRPQQAPVSGKVFIQRDYSSGTRCQFQTKFPAELENRIDRQQFEETVRTLNNLYAEAEKLGGQSYLEGCLACLTAYTIFLCMETHYEKVLKKVSKYIQEQNEKIYAPQGLLLTDPIERGLRVIEITIYEDRGMSSGR

SEQ ID NO: 36030 - protein, 134 aa, Homo sapiens
  Payload ID: 7123
  Gene Symbol: GOLGA7
  Gene Name: golgin A7
  Uniprot ID: Q7Z5G4
  ENSP ID: ENSP00000386030
MRPQQAPVSGKVFIQRDYSSGTRCQFQTKFPAELENRIDRQQFEETVRTLNNLYAEAEKLGGQSYLEGCLACLTAYTIFLCMETHYEKVLKKVSKYIQEQNEKIYAPQGLLLTDPIERGLRVFRLKLPFMKTEA

SEQ ID NO: 36031 - protein, 137 aa, Homo sapiens; identical to SEQ ID NO: 36029
  Payload ID: 7123
  Gene Symbol: GOLGA7
  Gene Name: golgin A7
  Uniprot ID: Q7Z5G4
  ENSP ID: ENSP00000429329

SEQ ID NO: 36032 - protein, 137 aa, Homo sapiens; identical to SEQ ID NO: 36029
  Payload ID: 7123
  Gene Symbol: GOLGA7
  Gene Name: golgin A7
  Uniprot ID: Q7Z5G4
  ENSP ID: ENSP00000429480

SEQ ID NO: 36033 - protein, 167 aa, Homo sapiens
  Payload ID: 7124
  Gene Symbol: GOLGA7B
  Gene Name: golgin A7 family, member B
  Uniprot ID: Q2TAP0
  ENSP ID: ENSP00000359634
MATEVHNLQELRRSASLATKVFIQRDYSDGTICQFQTKFPPELDSRIERQLFEETVKTLNGFYAEAEKIGGSSYLEGCLACATAYFIFLCMETHYEKVLKKISRYIQEQNEKIFAPRGLLLTDPVERGMRVIEISIYEDRCSSGSSSSGSSSGSGSSSGGGGGAGAR

SEQ ID NO: 36034 - protein, 166 aa, Homo sapiens
  Payload ID: 7124
  Gene Symbol: GOLGA7B
  Gene Name: golgin A7 family, member B
  ENSP ID: ENSP00000471396
SPQVHNLQELRRSASLATKVFIQRDYSDGTICQFQTKFPPELDSRIERQLFEETVKTLNGFYAEAEKIGGSSYLEGCLACATAYFIFLCMETHYEKVLKKISRYIQEQNEKIFAPRGLLLTDPVERGMRVIEISIYEDRCSSGSSSSGSSSGSGSSSGGGGGAGAR

SEQ ID NO: 36035 - protein, 632 aa, Homo sapiens
  Payload ID: 7125
  Gene Symbol: GOLGA8O
  Gene Name: Golgin A8 family member O
  ENSP ID: ENSP00000488291
MAEETQHNKLAAAKKKLKEYWQKNRPRVPAGVNRNRKTNGSIPETATSGGCQPPGDSATGFHREGPTSSATLKDLESPCQERAVVLDSTSVKISRLKNTIKSLKQQKKQVEHQLEEEKKANNERQKAERELEVQIQTLIIQKEELNTDLYHMERSLRYFEEESKDLAVRLQHSLQCKGELERALSAVIATEKKKANQLSSCSKAHTEWELEQSLQDQALLKAQLTQLKESFQQLQLERDECAEHIEGERARWHQRMSKMLQEICTLKKEKQQDMRRVEELERSLSKLKNQMAEPLPPEPPAVPSEVELQHLRKELERVAGELQSQVKNNQHISLLNRRQEERIREQEERLRKQEERLQEQHEKLRQLAKPQSVFEELNNENKSTLQLEQQVKELQEKLGEEHLEAASQQNQQLTAQLNLMALPGEGHGGEHLDSEGEEAPQPMPSVPEDPESREAMSSFMDHLKEKADLSELVKKQELRFIQYWQERCHQKIHHLLSEPGGRAKDAALGGGHHQAGAQGGDEGEAAGAAADGIAAYSNYNNGHRKFLAAAHNSADEPGPGAPAPQELGAADKHGDLREVTLTSSAQGEAREDPLLDKPTAQPIVQDHQEHPGLGSNCCVPLFCWAWLPRRRR

SEQ ID NO: 36036 - protein, 603 aa, Homo sapiens
  Payload ID: 7126
  Gene Symbol: GOLGA8A
  Gene Name: golgin A8 family, member A
  Uniprot ID: A7E2F4
  ENSP ID: ENSP00000352111
MAEETGQSKLAAAKKKFKEYWQRNRPGVPAAAKRNTKANGSSPETAASGGCHSSEASSSASSSLHARQSPCQEQAAVLNSRSIKISRLNDTIKSLKQQKKQVEHQLEEEKKANNEKQKAERELEGQIQRLNTEKKKLNTDLYHMKHSLRYFEEESKDLAGRLQRSSQRIGELEWSLCAVAATQKKKPDGFSSRSKALLKRQLEQSIREQILLKGHVTQLKESLKEVQLERDQYAEQIKGERAQWQQRMRKMSQEVCTLKEEKKHDTHRVEELERSLSRLKNQMAEPLPPDAPAVSSEVELQDLRKELERVAGELQAQVENNQCISLLNRGQKERLREQEERLQEQQERLREREKRLQQLAEPQSDLEELKHENKSALQLEQQVKELQEKLGQVMETLTSAEKEPEAAVPASGTGGESSGLMDLLEEKADLREHVEKLELGFIQYRRERCHQKVHRLLTEPGDSAKDASPGGGHHQAGPGQGGEEGEAAGAAGDGVAACGSYSEGHGKFLAAARNPAAEPSPGAPAPQELGAADKHGDLCEASLTNSVEPAQGEAREGSSQDNPTAQPVVQLLGEMQDHQEHPGLGSNCCVPCFCWAWLPRRRR

SEQ ID NO: 36037 - protein, 631 aa, Homo sapiens
  Payload ID: 7126
  Gene Symbol: GOLGA8A
  Gene Name: golgin A8 family, member A
  Uniprot ID: A7E2F4
  ENSP ID: ENSP00000402791
MLPVDGEERKSEGSDTEGDRTSPCAVSSATLKDLEVGGSGRRCSDPAGQPSNLLPQRGLGAPLPAETAHTQPSPNDRSLYLSPKSSSASSSLHARQSPCQEQAAVLNSRSIKISRLNDTIKSLKQQKKQVEHQLEEEKKANNEKQKAERELEGQIQRLNTEKKKLNTDLYHMKHSLRYFEEESKDLAGRLQRSSQRIGELEWSLCAVAATQKKKPDGFSSRSKALLKRQLEQSIREQILLKGHVTQLKESLKEVQLERDQYAEQIKGERAQWQQRMRKMSQEVCTLKEEKKHDTHRVEELERSLSRLKNQMAEPLPPDAPAVSSEVELQDLRKELERVAGELQAQVENNQCISLLNRGQKERLREQEERLQEQQERLREREKRLQQLAEPQSDLEELKHENKSALQLEQQVKELQEKLGQVMETLTSAEKEPEAAVPASGTGGESSGLMDLLEEKADLREHVEKLELGFIQYRRERCHQKVHRLLTEPGDSAKDASPGGGHHQAGPGQGGEEGEAAGAAGDGVAACGSYSEGHGKFLAAARNPAAEPSPGAPAPQELGAADKHGDLCEASLTNSVEPAQGEAREGSSQDNPTAQPVVQLLGEMQDHQEHPGLGSNCCVPCFCWAWLPRRRR

SEQ ID NO: 36038 - protein, 603 aa, Homo sapiens
  Payload ID: 7127
  Gene Symbol: GOLGA8B
  Gene Name: golgin A8 family, member B
  Uniprot ID: A8MQT2
  ENSP ID: ENSP00000343064
MAEETGQSKLAAAKKKFKEYWQRNRPGVPAAAKRNTKANGSSPETAASGGCHSSEASSSASSSLHARQSPCQEQAAVLNSRSIKISRLNDTIKSLKQQKKQVEHQLEEEKKANNEKQKAERELEGQIQRLNTEKKKLNTDLYHMKHSLRYFEEESKDLAGRLQRSSQRIGELEWSLCAVAATQKKKPDGFSSRSKALLKRQLEQSIREQILLKGHVTQLKESLKEVQLERDQYAEQIKGERAQWQQRMRKMSQEVCTLKEEKKHDTHRVEELERSLSRLKNQMAEPLPPDAPAVSSEVELQDLRKELERVAGELQAQVENNQCISLLNRGQKERLREQEERLQEQQERLREREKRLQQLAEPQSDLEELKHENKSALQLEQQVKELQEKLGQVMETLTSAEKEPEAAVPASGTGGESSGLMDLLEEKADLREHVEKLELGFIQYRRERCHQKVHRLLTEPGDSAKDASPGGGHHQAGPGQGGEEGEAAGAAGDGVAACGSYSEGHGKFLAAARNPAAEPSPGAPAPQELGAADKHGDLCEASLTNSVEPAQGEAREGSSQDNPTAQPVLQLLGEMQDHQEHPGLGSNCCVPCFCWAWLPRRRR

SEQ ID NO: 36039 - protein, 633 aa, Homo sapiens
  Payload ID: 7127
  Gene Symbol: GOLGA8B
  Gene Name: golgin A8 family, member B
  ENSP ID: ENSP00000400063
MLPVDGEERKSEGSDTEGDRTSPCAGPTSSATLKDLEVGGSGWRCSDPAGQPSNLLPQRGLGAPLPAETAHTQPSPNDRSLYLSPKSSSASSSLHARQSPCQEQAAVLNSRSIKISRLNDTIKSLKQQKKQVEHQLEEEKKANNEKQKAERELEGQIQRLNTEKKKLNTDLYHMKHSLRYFEEESKDLAGRLQRSSQRIGELEWSLCAVAATQKKKPDGFSSRSKALLKRQLEQSIREQILLKGHVTQLKESLKEVQLERDQYAEQIKGERAQWQQRMRKMSQEVCTLKEEKKHDTHRVEELERSLSRLKNQMAEPLPPDAPAVSSEVELQDLRKELERVAGELQAQVENNQCISLLNRGQKERLREQEERLQEQQERLREREKRLQQLAEPQSDLEELKHENKSALQLEQQVKELQEKLGQVMETLTSAEKEPEAAVPASGTGGESSGLMDLLEEKADLREHVEKLELGFIQYRRERCHQKVHRLLTEPGDSAKDASPGGGHHQAGPGQGGEEGEAAGAAGDGVAACGSYSEGHGKFLAAARNPAAEPSPGAPAPQELGAADKHGDLCEASLTNSVEPAQGEAREGSSQDNPTAQPVLQLLGEMQDHQEHPGLGSNCCVPCFCWAWLPRRRR

SEQ ID NO: 36040 - protein, 648 aa, Homo sapiens
  Payload ID: 7128
  Gene Symbol: GOLGA8F
  Gene Name: golgin A8 family, member F
  ENSP ID: ENSP00000454322
MWPQARLPPHPAMAEETRQSKLAAAKRKLKEYWQRNSPGVPAGAKRNRKTNGSIHETATSGGCHSPGDSATGIHGESPTSSATLKDLESPCQELAVVPDSRSVKVSQLKNTIKSLKQQNKQVEHQLEEEKKANNEKQKAERELEVQIQRLNIQKGKLNTDLYHTKRSLRYFEEESKDLAVRLQHSLQRKGELERALSAVTATQKKKAERQFSSRSKARMEWKLEQSMREQALLKAQLTQLKESLKEVQLERDEYAEHLKGERARWQQRMRKMSQEVCSLKKEKKHDKYRVEKLERSLSKLKHQMAEPLPPEPPAVPSEVELQHLRKELERVAGELQAQVEYNQRISLLNEGQKERLREQEERLQEQQERLPEQEERLQQLAEPQNSFKELNNENKSVLQLEQQVKELQEKLGKERLEAASQQKQQLTAQLSLMALPGEGDGGGHLDSEGEEAPRPIPSIPQDLESREAMSGFMDHLEEKADLSELVEKEELGFFQYYRERCHQKVYHPITKPGGSAKDAAPGGGHHQAGPGQGGDEGEAAGAAGDGVAAGGDYKGHSKFLVTAQNPAHEPSPGAPAPQELGAAHKHGDLCEVSLTDSVEPVQGEAREGSPHDNPTAQPIVQDHQEHPGLGSNCCVPFFCWAWLPRRRR

SEQ ID NO: 36041 - protein, 430 aa, Homo sapiens
  Payload ID: 7128
  Gene Symbol: GOLGA8F
  Gene Name: golgin A8 family, member F
  Uniprot ID: Q08AF8
  ENSP ID: ENSP00000456138
MEWKLEQSMREQALLKAQLTQLKESLKEVQLERDEYAEHLKGERARWQQRMRKMSQEVCSLKKEKKHDKYRVEKLERSLSKLKHQMAEPLPPEPPAVPSEVELQHLRKELERVAGELQAQVEYNQRISLLNEGQKERLREQEERLQEQQERLPEQEERLQQLAEPQNSFKELNNENKSVLQLEQQVKELQEKLGKERLEAASQQKQQLTAQLSLMALPGEGDGGGHLDSEGEEAPRPIPSIPQDLESREAMSGFMDHLEEKADLSELVEKEELGFFQYYRERCHQKVYHPITKPGGSAKDAAPGGGHHQAGPGQGGDEGEAAGAAGDGVAAGGDYKGHSKFLVTAQNPAHEPSPGAPAPQELGAAHKHGDLCEVSLTDSVEPVQGEAREGSPHDNPTAQPIVQDHQEHPGLGSNCCVPFFCWAWLPRRRR

SEQ ID NO: 36042 - protein, 430 aa, Homo sapiens
  Payload ID: 7128
  Gene Symbol: GOLGA8F
  Gene Name: golgin A8 family, member F
  ENSP ID: ENSP00000483042
MEWKLEQSMREQALLKAQLTQLKESLKEVQLERDEYAEHLKGERARWQQRMRKMSQEVCSLKKEKKHDKYRVEKLERSLSKLKHQMAEPLPPEPPAVPSEVELQHLRKELERVAGELQAQVEYNQRISLLNEGQKERLREQEERLQEQQERLPEQEERLQQLAEPQNSFKELNNENKSVLQLEQQVKELQEKLGKERLEAASQQNQQLTAQLSLMALPGEGDGGGHLDSEGEEAPRPIPSIPQDLESREAMSGFMDHLEEKADLSELVEKEELGFFQYYRERCHQKVYHPITKPGGSAKDAAPGGGHHQAGPGQGGDEGEAAGAAGDGVAAGGDYKGHSKFLVTAQNPAHEPSPGAPAPQELGAAHKHGDLCEVSLTDSVEPVQGEAREGSPHDNPTAQPIVQDHQEHPGLGSNCCVPFFCWAWLPRRRR

SEQ ID NO: 36043 - protein, 648 aa, Homo sapiens
  Payload ID: 7128
  Gene Symbol: GOLGA8F
  Gene Name: golgin A8 family, member F
  ENSP ID: ENSP00000483530
MWPQARLPPHPAMAEETRQSKLAAAKRKLKEYWQRNSPGVPAGAKRNRKTNGSIHETATSGGCHSPGDSATGIHGESPTSSATLKDLESPCQELAVVPDSRSVKVSQLKNTIKSLKQQNKQVEHQLEEEKKANNEKQKAERELEVQIQRLNIQKGKLNTDLYHTKRSLRYFEEESKDLAVRLQHSLQRKGELERALSAVTATQKKKAERQFSSRSKARMEWKLEQSMREQALLKAQLTQLKESLKEVQLERDEYAEHLKGERARWQQRMRKMSQEVCSLKKEKKHDKYRVEKLERSLSKLKHQMAEPLPPEPPAVPSEVELQHLRKELERVAGELQAQVEYNQRISLLNEGQKERLREQEERLQEQQERLPEQEERLQQLAEPQNSFKELNNENKSVLQLEQQVKELQEKLGKERLEAASQQNQQLTAQLSLMALPGEGDGGGHLDSEGEEAPRPIPSIPQDLESREAMSGFMDHLEEKADLSELVEKEELGFFQYYRERCHQKVYHPITKPGGSAKDAAPGGGHHQAGPGQGGDEGEAAGAAGDGVAAGGDYKGHSKFLVTAQNPAHEPSPGAPAPQELGAAHKHGDLCEVSLTDSVEPVQGEAREGSPHDNPTAQPIVQDHQEHPGLGSNCCVPFFCWAWLPRRRR

SEQ ID NO: 36044 - protein, 648 aa, Homo sapiens; identical to SEQ ID NO: 36040
  Payload ID: 7129
  Gene Symbol: GOLGA8G
  Gene Name: golgin A8 family, member G
  ENSP ID: ENSP00000458130

SEQ ID NO: 36045 - protein, 648 aa, Homo sapiens; identical to SEQ ID NO: 36040
  Payload ID: 7129
  Gene Symbol: GOLGA8G
  Gene Name: golgin A8 family, member G
  Uniprot ID: Q08AF8
  ENSP ID: ENSP00000481013

SEQ ID NO: 36046 - protein, 648 aa, Homo sapiens; identical to SEQ ID NO: 36040
  Payload ID: 7129
  Gene Symbol: GOLGA8G
  Gene Name: golgin A8 family, member G
  ENSP ID: ENSP00000482881

SEQ ID NO: 36047 - protein, 632 aa, Homo sapiens
  Payload ID: 7130
  Gene Symbol: GOLGA8H
  Gene Name: golgin A8 family, member H
  Uniprot ID: P0CJ92
  ENSP ID: ENSP00000456894
MAEETQHNKLAAAKKKLKEYWQKNSPRVPAGANRNRKTNGSVPEKATSGGCQPPGDSATGFHREGPTSSATLKDLESPCQERAVVLDSRSVEISQLKNTIKSLKQQKKQVEHQLEEEKKANNKKQKAKRVLEVQIQTLNIQKGKLNTDLYHMKRSLRYFEEKSKDLAVCLQHSLQRKGELESVLSNVMATQKKKANQLSSRSKARTEWKLEQSMREEALLKVQLTQLKESFQQVQLERDECAEHLKGERARWQQRMRKMSQEICTLKKEKQQDMRRVEKLERSLSKLKNQMAEPLPPEPPAVPSEVELQHLRKELERVAGELQAQVKKNQRISLLNQRQEERIQEQEERLRKQEERIQEQHKSLQQLAKPQSVFEEPNNENKNALQLEQQVKELQEKLGEEHLEAASQQNQQLTAQLSLMALPGEGHGGEHLDSEGEEAPRPMPSVPEDPESREAMSSFMDHLEEKADLSELVKKKELCFIHHWRDRCHQKTHHLLSEPGGRAKDAALGGGHHQAGAQGGDEGEAAGAAADGIAAYSNYNNGHRKFLAAAHNSADEPGPGAPAPQELGAADKHGDLCEVSLTSSAQGEAREDPLLDKPTAQPIVQDHQEHPGLGSNCCVPLLCWAWLPRRRR

SEQ ID NO: 36048 - protein, 632 aa, Homo sapiens
  Payload ID: 7131
  Gene Symbol: GOLGA8J
  Gene Name: golgin A8 family, member J
  Uniprot ID: A6NMD2
  ENSP ID: ENSP00000456401
MAEETQHNKLAAAKKKLKEYWQKNSPRVPAGANRNRKTNGSIPEKATSGGCQPPRDSATGFHREGPTSSATLKDLESPCQERAVVLDSRSVEISQLKNTIKSLKQQKKQVEHQLEEEKKANNKKQKAKRVLEVQIQTLNIQKEELNTDLYHMKRSLRYFEEKSKDLAVRLQHSLQRKGELESVLSNVMATQKKKANQLSSRSKARTEWKLEQSMREEALLKVQLTQFKESFQQVQLERDEYSEHLKGERARWQQRMRKMSQEICTLKKEKQQDMRRVEKLERSLSKLKNQMAEPLPPEPPAVPSEVELQHLRKELERVAGELQAQVKNNQRISLLNQRQEERIREQEERLRKQEERIQEQHKSLQQLAKPQSVFKEPNNENKNALQLEQQVKELQEKLGEEHLEAASQQNQQLTAQLSLMALPGEGHGGEHLDSEGEEAPRPMPSVPEDPESREAMSSFMDHLEEKADLSELVKKKELCFIHHWRERCHQKTHHLLSEPGGRAKDAALGGGHHQAGAQGGDEGEAAGAAADGIAAYSNYNNGHRKFLAAAHNSADEPGPGAPAPQELGAADKHGHLCEVSLTSSAQGEAREDPLLDKPTAQPIVQDHQEHPGLGSNCCVPFLCWAWLPRRRR

SEQ ID NO: 36049 - protein, 632 aa, Homo sapiens; identical to SEQ ID NO: 36048
  Payload ID: 7131
  Gene Symbol: GOLGA8J
  Gene Name: golgin A8 family, member J
  Uniprot ID: A6NMD2
  ENSP ID: ENSP00000480494

SEQ ID NO: 36050 - protein, 630 aa, Homo sapiens
  Payload ID: 7132
  Gene Symbol: GOLGA8K
  Gene Name: golgin A8 family, member K
  Uniprot ID: D6RF30
  ENSP ID: ENSP00000426691
MAEETQHNKLAAAKKKLKEYWQKNSPRVPAGANRNRKTNGSIPEKATSGGCQPPRDSATGFHREGPTSSATLKDLESPCQERAVVLDSRSVEISQLKNTIKSLKQQKKQVEHQLEEEKKANNKKQKAKRVLEVQIQTLNIQKEELNTDLYHMKRSLRYFEEKSKDLAVRLQHSLQRKGELESVLSNVMATQKKKANQLSSRSKARTEWKLEQSMREEALLKVQLTQLKESFQQVQLERDEYSEHLKGERARWQQRMRKMSQEICTLKKEKQQDMRRVEKLERSLSKLKNQMAEPLPPEPPAVPSEVELQHLRKELERVAGELQAQVKKNQRISLLNQRQEERIQEQEERLRKQEERIQEQHKSLQQLAKPQSVFEEPNNENKNALQLEQQVKELQEKLGEEHLEAASQQNQQLTAQLSLMALPGEGHGEHLDSEGEEAPQPMPSVPEDLESREAMSSFMDHLKEKADLSELVKKELCFIHHWRDRRHQKTHHLLSEPGGCAKDAALGGGHHQAGAQGGDEGEAAGAAADGIAAYSNYNNGHRKFLAAAHNPADEPGPGAPAPQELGAADKHGDLREVSLTSSAQGEAREDPLLDKPTAQPIVQDHKEHPGLGSNCCVPLFCWAWLPRRRR

SEQ ID NO: 36051 - protein, 632 aa, Homo sapiens
  Payload ID: 7133
  Gene Symbol: GOLGA8M
  Gene Name: golgin A8 family, member M
  Uniprot ID: H3BSY2
  ENSP ID: ENSP00000456927
MAEETQHNKLAAAKKKLKEYWQKNSPRVPAGANRNRKTNGSIPQTATSGGCQPPGDSATGFHREGPTSSATLKDLESPCQERAVVLDSRSVEISQLKNTIKSLKQQKKQVEHQLEEEKKANNKKQKAKRVLEVQLQTLNIQKEELNTDLYHMKRSLRYFEEKSKDLAVRLQHSLQRKGELESVLSDVMATQKKKANQLSSPSKAGTEWKLEQSMREEALLKVQLTQLKESFQQVQLERDEYSEHLKGERARWQQRMRKMSQEICTLKKEKQQDMRRVEKLERSLSKLKNQMAEPLPPEPPAVPSEVELQHLRKELERVAGELQAQVKNNQRISLLNQRQEERIREQEERLRKQEERIQEQHKSLQQLAKPQSVFEEPNNENKSTLQLEQQVKELQEKLGEEHLEAASQQNQQLTAQLSLMALPGEGHGGEHLDSEGEEAPQPMPSVPEDPESREAMSSFMDHLEEKADLSELVKKQELRFIQYWQERCHQKIHHLLSEPGGRAKDAALGGGHHQAGAQGGDEGEAAGAAADGIAAYSNYNNGHRKFLAAAHNSADEPGPGAPAPQELGAADKHGDLCEVSLTSSAQGEAREDPLLDKPTAQPIVQDHQEHPGLGSNCCVPFFCWAWLPRRRR

SEQ ID NO: 36052 - protein, 632 aa, Homo sapiens
  Payload ID: 7134
  Gene Symbol: GOLGA8N
  Gene Name: golgin A8 family, member N
  Uniprot ID: F8WBI6
  ENSP ID: ENSP00000398454
MAEETQHNKLAAAKKKLKEYWQKNRPRVPAGVNRNRKTNGSIPETATSGGCQPPGDSATGFHREGPTSSATLKDLESPCQERAVVLDSTSVKISRLKNTIKSLKQQKKQVEHQLEEEKKANNERQKAERELEVQIQTLIIQKEELNTDLYHMERSLRYFEEESKDLAVRLQHSLQCKGELESALSAVIATEKKKANQLSSCSKAHTEWELEQSLQDQALLKAQLTQLKESFQQLQLERDECAEHIEGERARWHQRMSKMSQEICTLKKEKQQDMRRVEELERSLSKLKNQMAEPLPPEPPAVPSEVELQHLRKELERVAGELQSQVKNNQHISLLNRRQEERIREQEERLRKQEERLQEQHEKLRQLAKPQSVFEELNNENKSTLQLEQQVKELQEKLGEEHLEAASQQNQQLTAQLSLMALPGEGHGGEHLDSEGEEAPQPMPSVPEDLESREAMSSFMDHLKEKADLSELVKKQELRFIQYWQERCHQKIHHLLSEPGGRAKDAALGGGHHQAGAQGGDEGEAAGAAADGIAAYSNYNNGHRKFLAAAHNSADEPGPGAPAPQELGAADKHGDLREVTLTSSAQGEAREDPLLDKPTAQPIVQDHQEHPGLGSNCCVPLFCWAWLPRRRR

SEQ ID NO: 36053 - protein, 596 aa, Homo sapiens
  Payload ID: 7134
  Gene Symbol: GOLGA8N
  Gene Name: golgin A8 family, member N
  ENSP ID: ENSP00000454473
MAEETQHNKLAAAKKKLKEYWQKNRPRVPAGVNRNRKTNGSIPETATSGGCQPPGDSATGFHREGPTSSATLKDLESPCQERAVVLDSTSVKISRLKNTIKSLKQQKKQVEHQLEEEKKANNERQKAERELEVQIQTLIIQKEELNTDLYHMERSLRYFEEESKDLAVRLQHSLQCKGELESALSAVIATEKKKANQLSSCSKAHTEWELEQSLQDQALLKAQLTQICTLKKEKQQDMRRVEELERSLSKLKNQMAEPLPPEPPAVPSEVELQHLRKELERVAGELQSQVKNNQHISLLNRRQEERIREQEERLRKQEERLQEQHEKLRQLAKPQSVFEELNNENKSTLQLEQQVKELQEKLGEEHLEAASQQNQQLTAQLSLMALPGEGHGGEHLDSEGEEAPQPMPSVPEDLESREAMSSFMDHLKEKADLSELVKKQELRFIQYWQERCHQKIHHLLSEPGGRAKDAALGGGHHQAGAQGGDEGEAAGAAADGIAAYSNYNNGHRKFLAAAHNSADEPGPGAPAPQELGAADKHGDLREVTLTSSAQGEAREDPLLDKPTAQPIVQDHQEHPGLGSNCCVPLFCWAWLPRRRR

SEQ ID NO: 36054 - protein, 131 aa, Homo sapiens
  Payload ID: 7134
  Gene Symbol: GOLGA8N
  Gene Name: golgin A8 family, member N
  ENSP ID: ENSP00000482461
MLTLKEYWQKNRPRVPAGVNRNRKTNGSIPETATSGGCQPPGDSATGFHREGPTSSATLKDLESPCQERAVVLDSTSVKISRLKNTIKSLKQQKKQVEHQLEEEKKANNERQKAERELEVQIQTLIIQKEE

SEQ ID NO: 36055 - protein, 632 aa, Homo sapiens
  Payload ID: 7135
  Gene Symbol: GOLGA8O
  Gene Name: golgin A8 family, member O
  Uniprot ID: A6NCC3
  ENSP ID: ENSP00000423159
MAEETQHNKLAAAKKKLKEYWQKNRPRVPAGVNRNRKTNGSIPETATSGGCQPPGDSATGFHREGPTSSATLKDLESPCQERAVVLDSTSVKISRLKNTIKSLKQQKKQVEHQLEEEKKANNERQKAERELEVQIQTLIIQKEELNTDLYHMERSLRYFEEESKDLAVRLQHSLQCKGELESALSAVIATEKKKANQLSSCSKAHTEWELEQSLQDQALLKAQLTQLKESFQQLQLERDECAEHIEGERARWHQRMSKMSQEICTLKKEKQQDMRRVEELERSLSKLKNQMAEPLPPEPPAVPSEVELQHLRKELERVAGELQSQVKNNQHISLLNRRQEERIREQEERLRKQEERLQEQHEKLRQLAKPQSVFEELNNENKSTLQLEQQVKELQEKLGEEHLEAASQQNQQLTAQLSLMALPGEGHGGEHLDSEGEEAPRPMPSVPEDPESREAMSSFMDHLKEKADLSELVKKQELRFIQYWQERCHQKIHHLLSEPGGRAKDAALGGGHHQAGAQGGDEGEAAGAAADGIAAYSNYNNGHRKFLAAAHNSADEPGPGAPAPQELGAADKHGDLREVTLTSSAQGEAREDPLLDKPTAQPIVQDHQEHPGLGSNCCVPLFCWAWLPRRRR

SEQ ID NO: 36056 - protein, 131 aa, Homo sapiens; identical to SEQ ID NO: 36054
  Payload ID: 7135
  Gene Symbol: GOLGA8O
  Gene Name: golgin A8 family, member O
  ENSP ID: ENSP00000456713

SEQ ID NO: 36057 - protein, 632 aa, Homo sapiens
  Payload ID: 7136
  Gene Symbol: GOLGA8Q
  Gene Name: golgin A8 family, member Q
  ENSP ID: ENSP00000457904
MAEETQHNKLAAAKKKLKEYWQKNRPRVPAGVNRNRKTNGSIPETATSGGCQPPGDSATGFHREGPTSSATLKDLESPCQERAVVLDSTSVKISRLKNTIKSLKQQKKQVEHQLEEEKKANNERQKAERELEVQIQTLIIQKEELNTDLYHMERSLRYFEEESKDLAVRLQHSLQCKGELERALSAVIATEKKKANQLSSCSKAHTEWELEQSLQDQALLKAQLTQLKESFQQLQLERDECAEHIEGERARWHQRMSKMLQEICTLKKEKQQDMRRVEELERSLSKLKNQMAEPLPPEPPAVPSEVELQHLRKELERVAGELQSQVKNNQHISLLNRRQEERIREQEERLRKQEERLQEQHEKLRQLAKPQSVFEELNNENKSTLQLEQQVKELQEKLGEEHLEAASQQNQQLTAQLNLMALPGEGHGGEHLDSEGEEAPQPMPSVPEDLESREAMSSFMDHLKEKADLSELVKKQELRFIQYWQERCHQKIHHLLSEPGGRAKDAALGGGHHQAGAQGGDEGEAAGAAADGIAAYSNYNNGHRKFLAAAHNSADEPGPGAPAPQELGAADKHGDLREVTLTSSAQGEAREDPLLDKPTAQPIVQDHQEHPGLGSNCCVPLFCWAWLPRRRR

SEQ ID NO: 36058 - protein, 631 aa, Homo sapiens
  Payload ID: 7137
  Gene Symbol: GOLGA8R
  Gene Name: golgin A8 family, member R
  Uniprot ID: I6L899
  ENSP ID: ENSP00000323217
MAEETQHNKLAAAKKKLKEYWQKNRPRVPAGVNRNRKTNGSIPETATSGGCQPPGDSATGFHREGPTSSATLKDLESPCQERAVVLDSTSVKISRLKNTIKSLKQQKKQVEHQLEEEKKANNERQKAERVLEVQIQTLIIQKEELNTDLYHMERSLRYFEEESKDLAVRLQHSLQCKGELERALSAVIATEKKKANQLSSCSKAHTEWELEQSLQDQALLKAQLTQLKESFQQLQLERDECAEHIEGERARWHQRMSKMSQEICTLKKEKQDMRWVEQLEWSLSKLKNQTAEPLPPEPPAVPSEVELQHLRKELERVAGELQSQVKNNQHISLLNRRQEERIREQEERLRKQEERLQEQHEKLRQLAKPQSVFEELNNENKSTLQLEQQVKELQEKLGEEHLEVASQQNQQLTAQLSLMALPGEGHGGEHLDSEGEEAPQPMPSVPEDPESREAMSSFMDHLKEKADLSELLKKQELRFIQYWQERCHQKIHHLLSEPGGRAKDAALGGGHHQAGAQGGDEGEAAGAAADGIAAYSNYNNGHRKFLAAAHNSADEPGPGAPAPQELGAADKHGDLREVTLTSSAQGEAREDPLLDKPTAQPIVQDHQEHPGLGSNCCVPLFCWAWLPRRRR

SEQ ID NO: 36059 - protein, 625 aa, Homo sapiens
  Payload ID: 7138
  Gene Symbol: GOLGA8S
  Gene Name: golgin A8 family, member S
  ENSP ID: ENSP00000455298
MAEETRQSKLAAAKRKLKEYWQRNSPGVPAGAKRNRKTNGSIHETATSGGCHSPGDSATGIHGESPTSSATLKDLESPCQELAVVPDSRSVKVSQLKNTIKSLKQQKKQVVHQLEEEKKANNEKQKAERELEVQIQRLNIQKGKLNTDLYHTKRSLRYFEEESKDLAVRLQHSLQRKGELERALSAVTATQKKKAERFSSRSKARTEWKLEQSMREQALLKAQLTQLKESLKEVQLERDEYAEHLKGERARWQQRMRKMSQEVCSLKKEKKHDKYRVETLERSLSKLKNQMAEPLPPEPPAVPSEAELQHLRKELERVAGALQAQVEYNQRISLLNEGQKERLREQQERLPEQEERLQQLAEPQNSFKELNNENKSVLQLEQQVKELQEKLGKERLEAASQQKQQLTAQLSLMALPGEGDGGGHLDSEGEEAPRPIPSIPQDLESREAMSSFMDHLEEKADLSELVKKQELRFIQYWQERCHQKIHHLLSEPGGRAKDAALGGGHHQAGAQGGDEDEAAGAAADGIAAYSNYNNGHRKFLAAAHNPADEPGPGAPAPQELGAADKHGDLCEVSLTSSAQGEAREDPLLDKPTAQPIVQDHQEHPGLGNNCCVPFFCWAWLPRRRR

SEQ ID NO: 36060 - protein, 631 aa, Homo sapiens
  Payload ID: 7139
  Gene Symbol: GOLGA8T
  Gene Name: golgin A8 family, member T
  ENSP ID: ENSP00000455826
MAEETQHNKLAAAKKKLKEYWQKNSPRVPAGANRNRKTNGSIPEKATSGGCQPPRDSATGFHREGPTSSATLKDLESPCQERAVVLDSRSVEISQLKNTIKSLKQQKKQVEHQLEEEKKANNKKQKAKRVLEVQIQTLNIQKEELNTDLYHMKRSLRYFEEKSKDLAVRLQHSLQRKGELESVLSNVMATQKKKANQLSSRSKARTEWKLEQSMREETLLKVQLTQLKESFQQVQLERDEYSEHLKGERARWQQRMRKMSQEICTLKKEKQQDMRRVEELERSLSKLKNQMAEPLPPEPPAVPSEVELQHLRKELERVAGELQAQVKKNQRISLLNQRQEERIQEQEERLRKQEERIQEQHKSLQQLAKPQSVFEEPNNENKNALQLEQQVKELQEKLGEEHLEAASQQNQQLTAQLSLMALPGEGHGGEHLDSEGEEAPQPMPSVPEDLESREAMSSFMDHLKEKADLSELVKKELCFIHHWRDRRHQKTHHLLSEPGGCAKDAALGGGHHQAGAQGGDEGEAAGAAADGIAAYSNYNNGHRKFLAAAHNPADEPGPGAPAPQELGAADKHGDLREVSLTSSAQGEAREDPLLDKPTAQPIVQDHQEHPGLGSNCCVPFLCWAWLPRRRR

SEQ ID NO: 36061 - protein, 3259 aa, Homo sapiens
  Payload ID: 7140
  Gene Symbol: GOLGB1
  Gene Name: golgin B1
  Uniprot ID: Q14789
  ENSP ID: ENSP00000341848
MLSRLSGLANVVLHELSGDDDTDQNMRAPLDPELHQESDMEFNNTTQEDVQERLAYAEQLVVELKDIIRQKDVQLQQKDEALQEERKAADNKIKKLKLHAKAKLTSLNKYIEEMKAQGGTVLPTEPQSEEQLSKHDKSSTEEEMEIEKIKHKLQEKEELISTLQAQLTQAQAEQPAQSSTEMEEFVMMKQQLQEKEEFISTLQAQLSQTQAEQAAQQVVREKDARFETQVRLHEDELLQLVTQADVETEMQQKLRVLQRKLEEHEESLVGRAQVVDLLQQELTAAEQRNQILSQQLQQMEAEHNTLRNTVETEREESKILLEKMELEVAERKLSFHNLQEEMHHLLEQFEQAGQAQAELESRYSALEQKHKAEMEEKTSHILSLQKTGQELQSACDALKDQNSKLLQDKNEQAVQSAQTIQQLEDQLQQKSKEISQFLNRLPLQQHETASQTSFPDVYNEGTQAVTEENIASLQKRVVELENEKGALLLSSIELEELKAENEKLSSQITLLEAQNRTGEADREVSEISIVDIANKRSSSAEESGQDVLENTFSQKHKELSVLLLEMKEAQEEIAFLKLQLQGKRAEEADHEVLDQKEMKQMEGEGIAPIKMKVFLEDTGQDFPLMPNEESSLPAVEKEQASTEHQSRTSEEISLNDAGVELKSTKQDGDKSLSAVPDIGQCHQDELERLKSQILELELNFHKAQEIYEKNLDEKAKEISNLNQLIEEFKKNADNNSSAFTALSEERDQLLSQVKELSMVTELRAQVKQLEMNLAEAERQRRLDYESQTAHDNLLTEQIHSLSIEAKSKDVKIEVLQNELDDVQLQFSEQSTLIRSLQSQLQNKESEVLEGAERVRHISSKVEELSQALSQKELEITKMDQLLLEKKRDVETLQQTIEEKDQQVTEISFSMTEKMVQLNEEKFSLGVEIKTLKEQLNLLSRAEEAKKEQVEEDNEVSSGLKQNYDEMSPAGQISKEELQHEFDLLKKENEQRKRKLQAALINRKELLQRVSRLEEELANLKDESKKEIPLSETERGEVEEDKENKEYSEKCVTSKCQEIEIYLKQTISEKEVELQHIRKDLEEKLAAEEQFQALVKQMNQTLQDKTNQIDLLQAEISENQAIIQKLITSNTDASDGDSVALVKETVVISPPCTGSSEHWKPELEEKILALEKEKEQLQKKLQEALTSRKAILKKAQEKERHLREELKQQKDDYNRLQEQFDEQSKENENIGDQLRQLQIQVRESIDGKLPSTDQQESCSSTPGLEEPLFKATEQHHTQPVLESNLCPDWPSHSEDASALQGGTSVAQIKAQLKEIEAEKVELELKVSSTTSELTKKSEEVFQLQEQINKQGLEIESLKTVSHEAEVHAESLQQKLESSQLQIAGLEHLRELQPKLDELQKLISKKEEDVSYLSGQLSEKEAALTKIQTEIIEQEDLIKALHTQLEMQAKEHDERIKQLQVELCEMKQKPEEIGEESRAKQQIQRKLQAALISRKEALKENKSLQEELSLARGTIERLTKSLADVESQVSAQNKEKDTVLGRLALLQEERDKLITEMDRSLLENQSLSSSCESLKLALEGLTEDKEKLVKEIESLKSSKIAESTEWQEKHKELQKEYEILLQSYENVSNEAERIQHVVEAVRQEKQELYGKLRSTEANKKETEKQLQEAEQEMEEMKEKMRKFAKSKQQKILELEEENDRLRAEVHPAGDTAKECMETLLSSNASMKEELERVKMEYETLSKKFQSLMSEKDSLSEEVQDLKHQIEGNVSKQANLEATEKHDNQTNVTEEGTQSIPGETEEQDSLSMSTRPTCSESVPSAKSANPAVSKDFSSHDEINNYLQQIDQLKERIAGLEEEKQKNKEFSQTLENEKNTLLSQISTKDGELKMLQEEVTKMNLLNQQIQEELSRVTKLKETAEEEKDDLEERLMNQLAELNGSIGNYCQDVTDAQIKNELLESEMKNLKKCVSELEEEKQQLVKEKTKVESEIRKEYLEKIQGAQKEPGNKSHAKELQELLKEKQQEVKQLQKDCIRYQEKISALERTVKALEFVQTESQKDLEITKENLAQAVEHRKKAQAELASFKVLLDDTQSEAARVLADNLKLKKELQSNKESVKSQMKQKDEDLERRLEQAEEKHLKEKKNMQEKLDALRREKVHLEETIGEIQVTLNKKDKEVQQLQENLDSTVTQLAAFTKSMSSLQDDRDRVIDEAKKWERKFSDAIQSKEEEIRLKEDNCSVLKDQLRQMSIHMEELKINISRLEHDKQIWESKAQTEVQLQQKVCDTLQGENKELLSQLEETRHLYHSSQNELAKLESELKSLKDQLTDLSNSLEKCKEQKGNLEGIIRQQEADIQNSKFSYEQLETDLQASRELTSRLHEEINMKEQKIISLLSGKEEAIQVAIAELRQQHDKEIKELENLLSQEEEENIVLEEENKKAVDKTNQLMETLKTIKKENIQQKAQLDSFVKSMSSLQNDRDRIVGDYQQLEERHLSIILEKDQLIQEAAAENNKLKEEIRGLRSHMDDLNSENAKLDAELIQYREDLNQVITIKDSQQKQLLEVQLQQNKELENKYAKLEEKLKESEEANEDLRRSFNALQEEKQDLSKEIESLKVSISQLTRQVTALQEEGTLGLYHAQLKVKEEEVHRLSALFSSSQKRIAELEEELVCVQKEAAKKVGEIEDKLKKELKHLHHDAGIMRNETETAEERVAELARDLVEMEQKLLMVTKENKGLTAQIQSFGRSMSSLQNSRDHANEELDELKRKYDASLKELAQLKEQGLLNRERDALLSETAFSMNSTEENSLSHLEKLNQQLLSKDEQLLHLSSQLEDSYNQVQSFSKAMASLQNERDHLWNELEKFRKSEEGKQRSAAQPSTSPAEVQSLKKAMSSLQNDRDRLLKELKNLQQQYLQINQEITELHPLKAQLQEYQDKTKAFQIMQEELRQENLSWQHELHQLRMEKSSWEIHERRMKEQYLMAISDKDQQLSHLQNLIRELRSSSSQTQPLKVQYQRQASPETSASPDGSQNLVYETELLRTQLNDSLKEIHQKELRIQQLNSNFSQLLEEKNTLSIQLCDTSQSLRENQQHYGDLLNHCAVLEKQVQELQAGPLNIDVAPGAPQEKNGVHRKSDPEELREPQQSFSEAQQQLCNTRQEVNELRKLLEEERDQRVAAENALSVAEEQIRRLEHSEWDSSRTPIIGSCGTQEQALLIDLTSNSCRRTRSGVGWKRVLRSLCHSRTRVPLLAAIYFLMIHVLLILCFTGHL

SEQ ID NO: 36062 - protein, 3269 aa, Homo sapiens
  Payload ID: 7140
  Gene Symbol: GOLGB1
  Gene Name: golgin B1
  Uniprot ID: Q14789
  ENSP ID: ENSP00000377275
MLSRLSGLANVVLHELSGDDDTDQNMRAPLDPELHQESDMEFNNTTQEDVQERLAYAEQLVVELKDIIRQKDVQLQQKDEALQEERKAADNKIKKLKLHAKAKLTSLNKYIEEMKAQGGTVLPTEPQSEEQLSKHDKSSTEEEMEIEKIKHKLQEKEELISTLQAQLTQAQAEQPAQSSTEMEEFVMMKQQLQEKEEFISTLQAQLSQTQAEQAAQLSSMQQVVREKDARFETQVRLHEDELLQLVTQADVETEMQQKLRVLQRKLEEHEESLVGRAQVVDLLQQELTAAEQRNQILSQQLQQMEAEHNTLRNTVETEREESKILLEKMELEVAERKLSFHNLQEEMHHLLEQFEQAGQAQAELESRYSALEQKHKAEMEEKTSHILSLQKTGQELQSACDALKDQNSKLLQDKNEQAVQSAQTIQQLEDQLQQKSKEISQFLNRLPLQQHETASQTSFPDVYNEGTQAVTEENIASLQKRVVELENEKGALLLSSIELEELKAENEKLSSQITLLEAQNRTGEADREVSEISIVDIANKRSSSAEESGQDVLENTFSQKHKELSVLLLEMKEAQEEIAFLKLQLQGKRAEEADHEVLDQKEMKQMEGEGIAPIKMKVFLEDTGQDFPLMPNEESSLPAVEKEQASTEHQSRTSEEISLNDAGVELKSTKQDGDKSLSAVPDIGQCHQDELERLKSQILELELNFHKAQEIYEKNLDEKAKEISNLNQLIEEFKKNADNNSSAFTALSEERDQLLSQVKELSMVTELRAQVKQLEMNLAEAERQRRLDYESQTAHDNLLTEQIHSLSIEAKSKDVKIEVLQNELDDVQLQFSEQSTLIRSLQSQLQNKESEVLEGAERVRHISSKVEELSQALSQKELEITKMDQLLLEKKRDVETLQQTIEEKDQQVTEISFSMTEKMVQLNEEKFSLGVEIKTLKEQLNLLSRAEEAKKEQVEEDNEVSSGLKQNYDEMSPAGQISKEELQHEFDLLKKENEQRKRKLQAALINRKELLQRVSRLEEELANLKDESKKEIPLSETERGEVEEDKENKEYSEKCVTSKCQEIEIYLKQTISEKEVELQHIRKDLEEKLAAEEQFQALVKQMNQTLQDKTNQIDLLQAEISENQAIIQKLITSNTDASDGDSVALVKETVVISPPCTGSSEHWKPELEEKILALEKEKEQLQKKLQEALTSRKAILKKAQEKERHLREELKQQKDDYNRLQEQFDEQSKENENIGDQLRQLQIQVRESIDGKLPSTDQQESCSSTPGLEEPLFKATEQHHTQPVLESNLCPDWPSHSEDASALQGGTSVAQIKAQLKEIEAEKVELELKVSSTTSELTKKSEEVFQLQEQINKQGLEIESLKTVSHEAEVHAESLQQKLESSQLQIAGLEHLRELQPKLDELQKLISKKEEDVSYLSGQLSEKEAALTKIQTEIIEQEDLIKALHTQLEMQAKEHDERIKQLQVELCEMKQKPEEIGEESRAKQQIQRKLQAALISRKEALKENKSLQEELSLARGTIERLTKSLADVESQVSAQNKEKDTVLGRLALLQEERDKLITEMDRSLLENQSLSSSCESLKLALEGLTEDKEKLVKEIESLKSSKIAESTEWQEKHKELQKEYEILLQSYENVSNEAERIQHVVEAVRQEKQELYGKLRSTEANKKETEKQLQEAEQEMEEMKEKMRKFAKSKQQKILELEEENDRLRAEVHPAGDTAKECMETLLSSNASMKEELERVKMEYETLSKKFQSLMSEKDSLSEEVQDLKHQIEGNVSKQANLEATEKHDNQTNVTEEGTQSIPGETEEQDSLSMSTRPTCSESVPSAKSANPAVSKDFSSHDEINNYLQQIDQLKERIAGLEEEKQKNKEFSQTLENEKNTLLSQISTKDGELKMLQEEVTKMNLLNQQIQEELSRVTKLKETAEEEKDDLEERLMNQLAELNGSIGNYCQDVTDAQIKNELLESEMKNLKKCVSELEEEKQQLVKEKTKVESEIRKEYLEKIQGAQKEPGNKSHAKELQELLKEKQQEVKQLQKDCIRYQEKISALERTVKALEFVQTESQKDLEITKENLAQAVEHRKKAQAELASFKVLLDDTQSEAARVLADNLKLKKELQSNKESVKSQMKQKDEDLERRLEQAEEKHLKEKKNMQEKLDALRREKVHLEETIGEIQVTLNKKDKEVQQLQENLDSTVTQLAAFTKSMSSLQDDRDRVIDEAKKWERKFSDAIQSKEEEIRLKEDNCSVLKDQLRQMSIHMEELKINISRLEHDKQIWESKAQTEVQLQQKVCDTLQGENKELLSQLEETRHLYHSSQNELAKLESELKSLKDQLTDLSNSLEKCKEQKGNLEGIIRQQEADIQNSKFSYEQLETDLQASRELTSRLHEEINMKEQKIISLLSGKEEAIQVAIAELRQQHDKEIKELENLLSQEEEENIVLEEENKKAVDKTNQLMETLKTIKKENIQQKAQLDSFVKSMSSLQNDRDRIVGDYQQLEERHLSIILEKDQLIQEAAAENNKLKEEIRGLRSHMDDLNSENAKLDAELIQYREDLNQVITIKDSQQKQLLEVQLQQNKELENKYAKLEEKLKESEEANEDLRRSFNALQEEKQDLSKEIESLKVSISQLTRQVTALQEEGTLGLYHAQLKVKEEEVHRLSALFSSSQKRIAELEEELVCVQKEAAKKVGEIEDKLKKELKHLHHDAGIMRNETETAEERVAELARDLVEMEQKLLMVTKENKGLTAQIQSFGRSMSSLQNSRDHANEELDELKRKYDASLKELAQLKEQGLLNRERDALLSETAFSMNSTEENSLSHLEKLNQQLLSKDEQLLHLSSQLEDSYNQVQSFSKAMASLQNERDHLWNELEKFRKSEEGKQRSAAQPSTSPAEVQSLKKAMSSLQNDRDRLLKELKNLQQQYLQINQEITELHPLKAQLQEYQDKTKAFQIMQEELRQENLSWQHELHQLRMEKSSWEIHERRMKEQYLMAISDKDQQLSHLQNLIRELRSSSSQTQPLKVQYQRQASPETSASPDGSQNLVYETELLRTQLNDSLKEIHQKELRIQQLNSNFSQLLEEKNTLSIQLCDTSQSLRENQQHYGDLLNHCAVLEKQVQELQAVSKEKGPLNIDVAPGAPQEKNGVHRKSDPEELREPQQSFSEAQQQLCNTRQEVNELRKLLEEERDQRVAAENALSVAEEQIRRLEHSEWDSSRTPIIGSCGTQEQALLIDLTSNSCRRTRSGVGWKRVLRSLCHSRTRVPLLAAIYFLMIHVLLILCFTGHL

SEQ ID NO: 36063 - protein, 41 aa, Homo sapiens
  Payload ID: 7140
  Gene Symbol: GOLGB1
  Gene Name: golgin B1
  ENSP ID: ENSP00000417695
MLSRLSGLANVVLHELSGDDDTDQNMRAPLDPELHQESDME

SEQ ID NO: 36064 - protein, 1031 aa, Homo sapiens
  Payload ID: 7140
  Gene Symbol: GOLGB1
  Gene Name: golgin B1
  ENSP ID: ENSP00000417767
  MOD_RES (1)..(1): Any amino acid
XYAEQLVVELKDIIRQKDVQLQQKDEALQEERKAADNKIKKLKLHAKAKLTSLNKYIEEMKAQGGTVLPTEPQSEEQLSKHDKSSTEEEMEIEKIKHKLQEKEELISTLQAQLTQAQAEQPAQKLRVLQRKLEEHEESLVGRAQVVDLLQQELTAAEQRNQILSQQLQQMEAEHNTLRNTVETEREESKILLEKMELEVAERKLSFHNLQEEMHHLLEQFEQAGQAQAELESRYSALEQKHKAEMEEKTSHILSLQKTGQELQSACDALKDQNSKLLQDKNEQAVQSAQTIQQLEDQLQQKSKEISQFLNRLPLQQHETASQTSFPDVYNEGTQAVTEENIASLQKRVVELENEKGALLLSSIELEELKAENEKLSSQITLLEAQNRTGEADREVSEISIVDIANKRSSSAEESGQDVLENTFSQKHKELSVLLLEMKEAQEEIAFLKLQLQGKRAEEADHEVLDQKEMKQMEGEGIAPIKMKVFLEDTGQDFPLMPNEESSLPAVEKEQASTEHQSRTSEEISLNDAGVELKSTKQDGDKSLSAVPDIGQCHQDELERLKSQILELELNFHKAQEIYEKNLDEKAKEISNLNQLIEEFKKNADNNSSAFTALSEERDQLLSQVKELSMVTELRAQVKQLEMNLAEAERQRRLDYESQTAHDNLLTEQIHSLSIEAKSKDVKIEVLQNELDDVQLQFSEQSTLIRSLQSQLQNKESEVLEGAERVRHISSKVEELSQALSQKELEITKMDQLLLEKKRDVETLQQTIEEKDQQVTEISFSMTEKMVQLNEEKFSLGVEIKTLKEQLNLLSRAEEAKKEQVEEDNEVSSGLKQNYDEMSPAGQISKEELQHEFDLLKKENEQRKRKLQAALINRKELLQRVSRLEEELANLKDESKKEIPLSETERGEVEEDKENKEYSEKCVTSKCQEIEIYLKQTISEKEVELQHIRKDLEEKLAAEEQFQALVKQMNQTLQDKTNQIDLLQAEISENQAIIQKLITSNTDASDGDSVALVKETVVISPPCTGSSEHWKP

SEQ ID NO: 36065 - protein, 1640 aa, Homo sapiens
  Payload ID: 7140
  Gene Symbol: GOLGB1
  Gene Name: golgin B1
  ENSP ID: ENSP00000418231
MLSRLSGLANVVLHELSGDDDTDQNMRAPLDPELHQESDMEFNNTTQEDVQERLAYAEQLVVELKDIIRQKDVQLQQKDEALQEERKAADNKIKKLKLHAKAKLTSLNKYIEEMKAQGGTVLPTEPQSEEQLSKHDKSSTEEEMEIEKIKHKLQEKEELISTLQAQLTQAQAEQPAQSSTEMEEFVMMKQQLQEKEEFISTLQAQLSQTQAEQAAQKLRVLQRKLEEHEESLVGRAQVVDLLQQELTAAEQRNQILSQQLQQMEAEHNTLRNTVETEREESKILLEKMELEVAERKLSFHNLQEEMHHLLEQFEQAGQAQAELESRYSALEQKHKAEMEEKTSHILSLQKTGQELQSACDALKDQNSKLLQDKNEQAVQSAQTIQQLEDQLQQKSKEISQFLNRLPLQQHETASQTSFPDVYNEGTQAVTEENIASLQKRVVELENEKGALLLSSIELEELKAENEKLSSQITLLEAQNRTGEADREVSEISIVDIANKRSSSAEESGQDVLENTFSQKHKELSVLLLEMKEAQEEIAFLKLQLQGKRAEEADHEVLDQKEMKQMEGEGIAPIKMKVFLEDTGQDFPLMPNEESSLPAVEKEQASTEHQSRTSEEISLNDAGVELKSTKQDGDKSLSAVPDIGQCHQDELERLKSQILELELNFHKAQEIYEKNLDEKAKEISNLNQLIEEFKKNADNNSSAFTALSEERDQLLSQVKELSMVTELRAQVKQLEMNLAEAERQRRLDYESQTAHDNLLTEQIHSLSIEAKSKDVKIEVLQNELDDVQLQFSEQSTLIRSLQSQLQNKESEVLEGAERVRHISSKVEELSQALSQKELEITKMDQLLLEKKRDVETLQQTIEEKDQQVTEISFSMTEKMVQLNEEKFSLGVEIKTLKEQLNLLSRAEEAKKEQVEEDNEVSSGLKQNYDEMSPAGQISKEELQHEFDLLKKENEQRKRKLQAALINRKELLQRVSRLEEELANLKDESKKEIPLSETERGEVEEDKENKEYSEKCVTSKCQEIEIYLKQTISEKEVELQHIRKDLEEKLAAEEQFQALVKQMNQTLQDKTNQIDLLQAEISENQAIIQKLITSNTDASDGDSVALVKETVVISPPCTGSSEHWKPELEEKILALEKEKEQLQKKLQEALTSRKAILKKAQEKERHLREELKQQKDDYNRLQEQFDEQSKENENIGDQLRQLQIQVRESIDGKLPSTDQQESCSSTPGLEEPLFKATEQHHTQPVLESNLCPDWPSHSEDASALQGGTSVAQIKAQLKEIEAEKVELELKVSSTTSELTKKSEEVFQLQEQINKQGLEIESLKTVSHEAEVHAESLQQKLESSQLQIAGLEHLRELQPKLDELQKLISKKEEDVSYLSGQLSEKEAALTKIQTEIIEQEDLIKALHTQLEMQAKEHDERIKQLQVELCEMKQKPEEIGEESRAKQQIQRKLQAALISRKEALKENKSLQEELSLARGTIERLTKSLADVESQVSAQNKEKDTVLGRLALLQEERDKLITEMDRSLLENQSLSSSCESLKLALEGLTEDKEKLVKEIESLKSSKIAESTEWQEKHKELQKEYEILLQSYENVSNEAERIQHVVEAVRQEKQELYGKLRSTEANKKETEKQLQEAEQEMEEMKE

SEQ ID NO: 36066 - protein, 39 aa, Homo sapiens
  Payload ID: 7140
  Gene Symbol: GOLGB1
  Gene Name: golgin B1
  ENSP ID: ENSP00000419519
MLSRLSGLANVVLHELSGDDDTDQNMRAPLDPVSSSVLI

SEQ ID NO: 36067 - protein, 109 aa, Homo sapiens
  Payload ID: 7140
  Gene Symbol: GOLGB1
  Gene Name: golgin B1
  ENSP ID: ENSP00000420027
ASPETSASPDGSQNLVYETELLRTQLNDSLKEIHQKELRIQQLNSNFSQLLEEKNTLSIQLCDTSQSLRENQQHYGDLLNHCAVLEKQVQELQAWRQGFTILARLVLNS

SEQ ID NO: 36068 - protein, 3184 aa, Homo sapiens
  Payload ID: 7140
  Gene Symbol: GOLGB1
  Gene Name: golgin B1
  Uniprot ID: Q14789
  ENSP ID: ENSP00000484083
MEFNNTTQEDVQERLAYAEQLVVELKDIIRQKDVQLQQKDEALQEERKAADNKIKKLKLHAKAKLTSLNKYIEEMKAQGGTVLPTEPQSEEQLSKHDKSSTEEEMEIEKIKHKLQEKEELISTLQAQLTQAQAEQPAQSSTEMEEFVMMKQQLQEKEEFISTLQAQLSQTQAEQAAQKLRVLQRKLEEHEESLVGRAQVVDLLQQELTAAEQRNQILSQQLQQMEAEHNTLRNTVETEREESKILLEKMELEVAERKLSFHNLQEEMHHLLEQFEQAGQAQAELESRYSALEQKHKAEMEEKTSHILSLQKTGQELQSACDALKDQNSKLLQDKNEQAVQSAQTIQQLEDQLQQKSKEISQFLNRLPLQQHETASQTSFPDVYNEGTQAVTEENIASLQKRVVELENEKGALLLSSIELEELKAENEKLSSQITLLEAQNRTGEADREVSEISIVDIANKRSSSAEESGQDVLENTFSQKHKELSVLLLEMKEAQEEIAFLKLQLQGKRAEEADHEVLDQKEMKQMEGEGIAPIKMKVFLEDTGQDFPLMPNEESSLPAVEKEQASTEHQSRTSEEISLNDAGVELKSTKQDGDKSLSAVPDIGQCHQDELERLKSQILELELNFHKAQEIYEKNLDEKAKEISNLNQLIEEFKKNADNNSSAFTALSEERDQLLSQVKELSMVTELRAQVKQLEMNLAEAERQRRLDYESQTAHDNLLTEQIHSLSIEAKSKDVKIEVLQNELDDVQLQFSEQSTLIRSLQSQLQNKESEVLEGAERVRHISSKVEELSQALSQKELEITKMDQLLLEKKRDVETLQQTIEEKDQQVTEISFSMTEKMVQLNEEKFSLGVEIKTLKEQLNLLSRAEEAKKEQVEEDNEVSSGLKQNYDEMSPAGQISKEELQHEFDLLKKENEQRKRKLQAALINRKELLQRVSRLEEELANLKDESKKEIPLSETERGEVEEDKENKEYSEKCVTSKCQEIEIYLKQTISEKEVELQHIRKDLEEKLAAEEQFQALVKQMNQTLQDKTNQIDLLQAEISENQAIIQKLITSNTDASDGDSVALVKETVVISPPCTGSSEHWKPELEEKILALEKEKEQLQKKLQEALTSRKAILKKAQEKERHLREELKQQKDDYNRLQEQFDEQSKENENIGDQLRQLQIQVRESIDGKLPSTDQQESCSSTPGLEEPLFKATEQHHTQPVLESNLCPDWPSHSEDASALQGGTSVAQIKAQLKEIEAEKVELELKVSSTTSELTKKSEEVFQLQEQINKQGLEIESLKTVSHEAEVHAESLQQKLESSQLQIAGLEHLRELQPKLDELQKLISKKEEDVSYLSGQLSEKEAALTKIQTEIIEQEDLIKALHTQLEMQAKEHDERIKQLQVELCEMKQKPEEIGEESRAKQQIQRKLQAALISRKEALKENKSLQEELSLARGTIERLTKSLADVESQVSAQNKEKDTVLGRLALLQEERDKLITEMDRSLLENQSLSSSCESLKLALEGLTEDKEKLVKEIESLKSSKIAESTEWQEKHKELQKEYEILLQSYENVSNEAERIQHVVEAVRQEKQELYGKLRSTEANKKETEKQLQEAEQEMEEMKEKMRKFAKSKQQKILELEEENDRLRAEVHPAGDTAKECMETLLSSNASMKEELERVKMEYETLSKKFQSLMSEKDSLSEEVQDLKHQIEGNVSKQANLEATEKHDNQTNVTEEGTQSIPGETEEQDSLSMSTRPTCSESVPSAKSANPAVSKDFSSHDEINNYLQQIDQLKERIAGLEEEKQKNKEFSQTLENEKNTLLSQISTKDGELKMLQEEVTKMNLLNQQIQEELSRVTKLKETAEEEKDDLEERLMNQLAELNGSIGNYCQDVTDAQIKNELLESEMKNLKKCVSELEEEKQQLVKEKTKVESEIRKEYLEKIQGAQKEPGNKSHAKELQELLKEKQQEVKQLQKDCIRYQEKISALERTVKALEFVQTESQKDLEITKENLAQAVEHRKKAQAELASFKVLLDDTQSEAARVLADNLKLKKELQSNKESVKSQMKQKDEDLERRLEQAEEKHLKEKKNMQEKLDALRREKVHLEETIGEIQVTLNKKDKEVQQLQENLDSTVTQLAAFTKSMSSLQDDRDRVIDEAKKWERKFSDAIQSKEEEIRLKEDNCSVLKDQLRQMSIHMEELKINISRLEHDKQIWESKAQTEVQLQQKVCDTLQGENKELLSQLEETRHLYHSSQNELAKLESELKSLKDQLTDLSNSLEKCKEQKGNLEGIIRQQEADIQNSKFSYEQLETDLQASRELTSRLHEEINMKEQKIISLLSGKEEAIQVAIAELRQQHDKEIKELENLLSQEEEENIVLEEENKKAVDKTNQLMETLKTIKKENIQQKAQLDSFVKSMSSLQNDRDRIVGDYQQLEERHLSIILEKDQLIQEAAAENNKLKEEIRGLRSHMDDLNSENAKLDAELIQYREDLNQVITIKDSQQKQLLEVQLQQNKELENKYAKLEEKLKESEEANEDLRRSFNALQEEKQDLSKEIESLKVSISQLTRQVTALQEEGTLGLYHAQLKVKEEEVHRLSALFSSSQKRIAELEEELVCVQKEAAKKVGEIEDKLKKELKHLHHDAGIMRNETETAEERVAELARDLVEMEQKLLMVTKENKGLTAQIQSFGRSMSSLQNSRDHANEELDELKRKYDASLKELAQLKEQGLLNRERDALLSETAFSMNSTEENSLSHLEKLNQQLLSKDEQLLHLSSQLEDSYNQVQSFSKAMASLQNERDHLWNELEKFRKSEEGKQRSAAQPSTSPAEVQSLKKAMSSLQNDRDRLLKELKNLQQQYLQINQEITELHPLKAQLQEYQDKTKAFQIMQEELRQENLSWQHELHQLRMEKSSWEIHERRMKEQYLMAISDKDQQLSHLQNLIRELRSSSSQTQPLKVQYQRQASPETSASPDGSQNLVYETELLRTQLNDSLKEIHQKELRIQQLNSNFSQLLEEKNTLSIQLCDTSQSLRENQQHYGDLLNHCAVLEKQVQELQAGPLNIDVAPGAPQEKNGVHRKSDPEELREPQQSFSEAQQQLCNTRQEVNELRKLLEEERDQRVAAENALSVAEEQIRRLEHSEWDSSRTPIIGSCGTQEQALLIDLTSNSCRRTRSGVGWKRVLRSLCHSRTRVPLLAAIYFLMIHVLLILCFTGHL

SEQ ID NO: 36069 - protein, 246 aa, Homo sapiens
  Payload ID: 7141
  Gene Symbol: GORAB
  Gene Name: golgin, RAB6-interacting
  Uniprot ID: Q5T7V8
  ENSP ID: ENSP00000356736
MSWAAVLAVAAARFGHFWGCRWPGPMAQGWAGFSEEELRRLKQTKDPFEPQRRLPAKKSRQQLQREKALVEQSQKLGLQDGSTSLLPEQLLSAPKQRVNVQKPPFSSPTLPSHFTLTSPVGDGQPQGIESQPKELGLENSHDGHNNVEILPPKPDCKLEKKKVELQEKSRWEVLQQEQRLMEEKNKRKKALLAKAIAERSKRTQAETMKLKRIQKELQALDDMVSADIGILRNRIDQASLDYSYAR

SEQ ID NO: 36070 - protein, 394 aa, Homo sapiens
  Payload ID: 7141
  Gene Symbol: GORAB
  Gene Name: golgin, RAB6-interacting
  Uniprot ID: Q5T7V8
  ENSP ID: ENSP00000356737
MSWAAVLAVAAARFGHFWGCRWPGPMAQGWAGFSEEELRRLKQTKDPFEPQRRLPAKKSRQQLQREKALVEQSQKLGLQDGSTSLLPEQLLSAPKQRVNVQKPPFSSPTLPSHFTLTSPVGDGQPQGIESQPKELGLENSHDGHNNVEILPPKPDCKLEKKKVELQEKSRWEVLQQEQRLMEEKNKRKKALLAKAIAERSKRTQAETMKLKRIQKELQALDDMVSADIGILRNRIDQASLDYSYARKRFDRAEAEYIAAKLDIQRKTEIKEQLTEHLCTIIQQNELRKAKKLEELMQQLDVEADEETLELEVEVERLLHEQEVESRRPVVRLERPFQPAEESVTLEFAKENRKCQEQAVSPKVDDQCGNSSSIPFLSPNCPNQEGNDISAALAT

SEQ ID NO: 36071 - protein, 126 aa, Homo sapiens
  Payload ID: 7141
  Gene Symbol: GORAB
  Gene Name: golgin, RAB6-interacting
  ENSP ID: ENSP00000473336
  MOD_RES (1)..(1): Any amino acid
XSWAAVLAVAAARFGHFWGCRWPGPMAQGWAGFSEEELRRLKQTKGYKCPGLWSDSSRLMRRQTTKLCDSRYCKNLLQRQEEPHSAGDWMELGKISQSLCVSRGAFSRTKEKSTKDMNRYFLEKEI

SEQ ID NO: 36072 - protein, 2240 aa, Homo sapiens
  Payload ID: 7142
  Gene Symbol: GON4L
  Gene Name: gon-4-like (C. elegans)
  Uniprot ID: Q3T8J9
  ENSP ID: ENSP00000271883
MLPCKKRRTTVTESLQHKGNQEENNVDLESAVKPESDQVKDLSSVSLSWDPSHGRVAGFEVQSLQDAGNQLGMEDTSLSSGMLTQNTNVPILEGVDVAISQGITLPSLESFHPLNIHIGKGKLHATGSKRGKKMTLRPGPVTQEDRCDHLTLKEPFSGEPSEEVKEEGGKPQMNSEGEIPSLPSGSQSAKPVSQPRKSTQPDVCASPQEKPLRTLFHQPEEEIEDGGLFIPMEEQDNEESEKRRKKKKGTKRKRDGRGQEGTLAYDLKLDDMLDRTLEDGAKQHNLTAVNVRNILHEVITNEHVVAMMKAAISETEDMPMFEPKMTRSKLKEVVEKGVVIPTWNISPIKKANEIKPPQFVDIHLEEDDSSDEEYQPDDEEEDETAEESLLESDVESTASSPRGAKKSRLRQSSEMTETDEESGILSEAEKVTTPAIRHISAEVVPMGPPPPPKPKQTRDSTFMEKLHAVDEELASSPVCMDSFQPMDDSLIAFRTRSKMPLKDVPLGQLEAELQAPDITPDMYDPNTADDEDWKMWLGGLMNDDVGNEDEADDDDDPEYNFLEDLDEPDTEDFRTDRAVRITKKEVNELMEELFETFQDEMGFSNMEDDGPEEEECVAEPRPNFNTPQALRFEEPLANLLNEQHRTVKELFEQLKMKKSSAKQLQEVEKVKPQSEKVHQTLILDPAQRKRLQQQMQQHVQLLTQIHLLATCNPNLNPEATTTRIFLKELGTFAQSSIALHHQYNPKFQTLFQPCNLMGAMQLIEDFSTHVSIDCSPHKTVKKTANEFPCLPKQVAWILATSKVFMYPELLPVCSLKAKNPQDKIVFTKAEDNLLALGLKHFEGTEFPNPLISKYLLTCKTAHQLTVRIKNLNMNRAPDNIIKFYKKTKQLPVLGKCCEEIQPHQWKPPIEREEHRLPFWLKASLPSIQEELRHMADGAREVGNMTGTTEINSDRSLEKDNLELGSESRYPLLLPKGVVLKLKPVATRFPRKAWRQKRSSVLKPLLIQPSPSLQPSFNPGKTPARSTHSEAPPSKMVLRIPHPIQPATVLQTVPGVPPLGVSGGESFESPAALPAVPPEARTSFPLSESQTLLSSAPVPKVMLPSLAPSKFRKPYVRRRPSKRRGVKASPCMKPAPVIHHPASVIFTVPATTVKIVSLGGGCNMIQPVNAAVAQSPQTIPITTLLVNPTSFPCPLNQSLVASSVSPLIVSGNSVNLPIPSTPEDKAHVNVDIACAVADGENAFQGLEPKLEPQELSPLSATVFPKVEHSPGPPLADAECQEGLSENSACRWTVVKTEEGRQALEPLPQGIQESLNNPTPGDLEEIVKMEPEEAREEISGSPERDICDDIKVEHAVELDTGAPSEELSSAGEVTKQTVLQKEEERSQPTKTPSSSQEPPDEGTSGTDVNKGSSKNALSSMDPEVRLSSPPGKPEDSSSVDGQSVGTPVGPETGGEKNGPEEEEEEDFDDLTQDEEDEMSSASEESVLSVPELQETMEKLTWLASERRMSQEGESEEENSQEENSEPEEEEEEEAEGMESLQKEDEMTDEAVGDSAEKPPTFASPETAPEVETSRTPPGESIKAAGKGRNNHRARNKRGSRARASKDTSKLLLLYDEDILERDPLREQKDLAFAQAYLTRVREALQHIPGKYEDFLQVIYEFESSTQRRTAVDLYKSLQILLQDWPQLLKDFAAFLLPEQALACGLFEEQQAFEKSRKFLRQLEICFAENPSHHQKIIKVLQGCADCLPQEITELKTQMWQLLKGHDHLQDEFSIFFDHLRPAASRMGDFEEINWTEEKEYEFDGFEEVALPDVEEEEEPPKIPTASKNKRKKEIGVQNHDKETEWPDGAKDCACSCHEGGPDSKLKKSKRRSCSHCSSKVCDSKSYKSKEPHELVGSSPHREASPMPGAKEAGQGKDMMEEEAPEERESTEATQSRTVRTTRKGEMPVSGLAVGSTLPSPREVTVTERLLLDGPPPHSPETPQFPPTTGAVLYTVKRNQVGPEVRSCPKASPRLQKEREGQKAVSESEALMLVWDASETEKLPGTVEPPASFLSPVSSKTRDAGRRHVSGKPDTQERWLPSSRARVKTRDRTCPVHESPSGIDTSETSPKAPRGGLAKDSGTQAKGPEGEQQPKAAEATVCANNSKVSSTGEKVVLWTREADRVILTMCQEQGAQPQTFNIISQQLGNKTPAEVSHRFRELMQLFHTACEASSEDEDDATSTSNADQLSDHGDLLSEEELDE

SEQ ID NO: 36073 - protein, 1529 aa, Homo sapiens
  Payload ID: 7142
  Gene Symbol: GON4L
  Gene Name: gon-4-like (C. elegans)
  Uniprot ID: Q3T8J9
  ENSP ID: ENSP00000354322
MLPCKKRRTTVTESLQHKGNQEENNVDLESAVKPESDQVKDLSSVSLSWDPSHGRVAGFEVQSLQDAGNQLGMEDTSLSSGMLTQNTNVPILEGVDVAISQGITLPSLESFHPLNIHIGKGKLHATGSKRGKKMTLRPGPVTQEDRCDHLTLKEPFSGEPSEEVKEEGGKPQMNSEGEIPSLPSGSQSAKPVSQPRKSTQPDVCASPQEKPLRTLFHQPEEEIEDGGLFIPMEEQDNEESEKRRKKKKGTKRKRDGRGQEGTLAYDLKLDDMLDRTLEDGAKQHNLTAVNVRNILHEVITNEHVVAMMKAAISETEDMPMFEPKMTRSKLKEVVEKGVVIPTWNISPIKKANEIKPPQFVDIHLEEDDSSDEEYQPDDEEEDETAEESLLESDVESTASSPRGAKKSRLRQSSEMTETDEESGILSEAEKVTTPAIRHISAEVVPMGPPPPPKPKQTRDSTFMEKLHAVDEELASSPVCMDSFQPMDDSLIAFRTRSKMPLKDVPLGQLEAELQAPDITPDMYDPNTADDEDWKMWLGGLMNDDVGNEDEADDDDDPEYNFLEDLDEPDTEDFRTDRAVRITKKEVNELMEELFETFQDEMGFSNMEDDGPEEEECVAEPRPNFNTPQALRFEEPLANLLNEQHRTVKELFEQLKMKKSSAKQLQEVEKVKPQSEKVHQTLILDPAQRKRLQQQMQQHVQLLTQIHLLATCNPNLNPEATTTRIFLKELGTFAQSSIALHHQYNPKFQTLFQPCNLMGAMQLIEDFSTHVSIDCSPHKTVKKTANEFPCLPKQVAWILATSKVFMYPELLPVCSLKAKNPQDKIVFTKAEDNLLALGLKHFEGTEFPNPLISKYLLTCKTAHQLTVRIKNLNMNRAPDNIIKFYKKTKQLPVLGKCCEEIQPHQWKPPIEREEHRLPFWLKASLPSIQEELRHMADGAREVGNMTGTTEINSDRSLEKDNLELGSESRYPLLLPKGVVLKLKPVATRFPRKAWRQKRSSVLKPLLIQPSPSLQPSFNPGKTPARSTHSEAPPSKMVLRIPHPIQPATVLQTVPGVPPLGVSGGESFESPAALPAVPPEARTSFPLSESQTLLSSAPVPKVMLPSLAPSKFRKPYVRRRPSKRRGVKASPCMKPAPVIHHPASVIFTVPATTVKIVSLGGGCNMIQPVNAAVAQSPQTIPITTLLVNPTSFPCPLNQSLVASSVSPLIVSGNSVNLPIPSTPEDKAHVNVDIACAVADGENAFQGLEPKLEPQELSPLSATVFPKVEHSPGPPLADAECQEGLSENSACRWTVVKTEEGRQALEPLPQGIQESLNNPTPGDLEEIVKMEPEEAREEISGSPERDICDDIKVEHAVELDTGAPSEELSSAGEVTKQTVLQKEEERSQPTKTPSSSQEPPDEGTSGTDVNKGSSKNALSSMDPEVRLSSPPGKPEDSSSVDGQSVGTPVGPETGGEKNGPEEEEEEDFDDLTQDEEDEMSSASEESVLSVPELQVRAGEYSQVFRGLSNMYHLLICHLLACCTMDSPKIICI

SEQ ID NO: 36074 - protein, 2241 aa, Homo sapiens
  Payload ID: 7142
  Gene Symbol: GON4L
  Gene Name: gon-4-like (C. elegans)
  Uniprot ID: Q3T8J9
  ENSP ID: ENSP00000357315
MLPCKKRRTTVTESLQHKGNQEENNVDLESAVKPESDQVKDLSSVSLSWDPSHGRVAGFEVQSLQDAGNQLGMEDTSLSSGMLTQNTNVPILEGVDVAISQGITLPSLESFHPLNIHIGKGKLHATGSKRGKKMTLRPGPVTQEDRCDHLTLKEPFSGEPSEEVKEEGGKPQMNSEGEIPSLPSGSQSAKPVSQPRKSTQPDVCASPQEKPLRTLFHQPEEEIEDGGLFIPMEEQDNEESEKRRKKKKGTKRKRDGRGQEGTLAYDLKLDDMLDRTLEDGAKQHNLTAVNVRNILHEVITNEHVVAMMKAAISETEDMPMFEPKMTRSKLKEVVEKGVVIPTWNISPIKKANEIKPPQFVDIHLEEDDSSDEEYQPDDEEEDETAEESLLESDVESTASSPRGAKKSRLRQSSEMTETDEESGILSEAEKVTTPAIRHISAEVVPMGPPPPPKPKQTRDSTFMEKLHAVDEELASSPVCMDSFQPMDDSLIAFRTRSKMPLKDVPLGQLEAELQAPDITPDMYDPNTADDEDWKMWLGGLMNDDVGNEDEADDDDDPEYNFLEDLDEPDTEDFRTDRAVRITKKEVNELMEELFETFQDEMGFSNMEDDGPEEEECVAEPRPNFNTPQALRFEEPLANLLNEQHRTVKELFEQLKMKKSSAKQLQEVEKVKPQSEKVHQTLILDPAQRKRLQQQMQQHVQLLTQIHLLATCNPNLNPEATTTRIFLKELGTFAQSSIALHHQYNPKFQTLFQPCNLMGAMQLIEDFSTHVSIDCSPHKTVKKTANEFPCLPKQVAWILATSKVFMYPELLPVCSLKAKNPQDKIVFTKAEDNLLALGLKHFEGTEFPNPLISKYLLTCKTAHQLTVRIKNLNMNRAPDNIIKFYKKTKQLPVLGKCCEEIQPHQWKPPIEREEHRLPFWLKASLPSIQEELRHMADGAREVGNMTGTTEINSDRSLEKDNLELGSESRYPLLLPKGVVLKLKPVATRFPRKAWRQKRSSVLKPLLIQPSPSLQPSFNPGKTPARSTHSEAPPSKMVLRIPHPIQPATVLQTVPGVPPLGVSGGESFESPAALPAVPPEARTSFPLSESQTLLSSAPVPKVMLPSLAPSKFRKPYVRRRPSKRRGVKASPCMKPAPVIHHPASVIFTVPATTVKIVSLGGGCNMIQPVNAAVAQSPQTIPITTLLVNPTSFPCPLNQSLVASSVSPLIVSGNSVNLPIPSTPEDKAHVNVDIACAVADGENAFQGLEPKLEPQELSPLSATVFPKVEHSPGPPLADAECQEGLSENSACRWTVVKTEEGRQALEPLPQGIQESLNNPTPGDLEEIVKMEPEEAREEISGSPERDICDDIKVEHAVELDTGAPSEELSSAGEVTKQTVLQKEEERSQPTKTPSSSQEPPDEGTSGTDVNKGSSKNALSSMDPEVRLSSPPGKPEDSSSVDGQSVGTPVGPETGGEKNGPEEEEEEDFDDLTQDEEDEMSSASEESVLSVPELQETMEKLTWLASERRMSQEGESEEENSQEENSEPEEEEEEEAEGMESLQKEDEMTDEAVGDSAEKPPTFASPETAPEVETSRTPPGESIKAAGKGRNNHRARNKRGSRARASKDTSKLLLLYDEDILERDPLREQKDLAFAQAYLTRVREALQHIPGKYEDFLQVIYEFESSTQRRTAVDLYKSLQILLQDWPQLLKDFAAFLLPEQALACGLFEEQQAFEKSRKFLRQLEICFAENPSHHQKIIKVLQGCADCLPQEITELKTQMWQLLKGHDHLQDEFSIFFDHLRPAASRMGDFEEINWTEEKEYEFDGFEEVALPDVEEEEEPPKIPTASKNKRKKEIGVQNHDKETEWPDGAKDCACSCHEGGPDSKLKKSKRRSCSHCSSKVCDSKSYKSKEPHELVGSSPHREASPMPGAKEAGQGKDMMEEEAPEERESTEATQSRTVRTTRKGEMPVSAGLAVGSTLPSPREVTVTERLLLDGPPPHSPETPQFPPTTGAVLYTVKRNQVGPEVRSCPKASPRLQKEREGQKAVSESEALMLVWDASETEKLPGTVEPPASFLSPVSSKTRDAGRRHVSGKPDTQERWLPSSRARVKTRDRTCPVHESPSGIDTSETSPKAPRGGLAKDSGTQAKGPEGEQQPKAAEATVCANNSKVSSTGEKVVLWTREADRVILTMCQEQGAQPQTFNIISQQLGNKTPAEVSHRFRELMQLFHTACEASSEDEDDATSTSNADQLSDHGDLLSEEELDE

SEQ ID NO: 36075 - protein, 2240 aa, Homo sapiens; identical to SEQ ID NO: 36072
  Payload ID: 7142
  Gene Symbol: GON4L
  Gene Name: gon-4-like (C. elegans)
  Uniprot ID: Q3T8J9
  ENSP ID: ENSP00000396117

SEQ ID NO: 36076 - protein, 1542 aa, Homo sapiens
  Payload ID: 7142
  Gene Symbol: GON4L
  Gene Name: gon-4-like (C. elegans)
  ENSP ID: ENSP00000478593
MLPCKKRRTTVTESLQHKGNQEENNVDLESAVKPESDQVKDLSSVSLSWDPSHGRVAGFEVQSLQDAGNQLGMEDTSLSSGMLTQNTNVPILEGVDVAISQGITLPSLESFHPLNIHIGKGKLHATGSKRGKKMTLRPGPVTQEDRCDHLTLKEPFSGEPSEEVKEEGGKPQMNSEGEIPSLPSGSQSAKPVSQPRKSTQPDVCASPQEKPLRTLFHQPEEEIEDGGLFIPMEEQDNEESEKRRKKKKGTKRKRDGRGQEGTLAYDLKLDDMLDRTLEDGAKQHNLTAVNVRNILHEVITNEHVVAMMKAAISETEDMPMFEPKMTRSKLKEVVEKGVVIPTWNISPIKKANEIKPPQFVDIHLEEDDSSDEEYQPDDEEEDETAEESLLESDVESTASSPRGAKKSRLRQSSEMTETDEESGILSEAEKVTTPAIRHISAEVVPMGPPPPPKPKQTRDSTFMEKLHAVDEELASSPVCMDSFQPMDDSLIAFRTRSKMPLKDVPLGQLEAELQAPDITPDMYDPNTADDEDWKMWLGGLMNDDVGNEDEADDDDDPEYNFLEDLDEPDTEDFRTDRAVRITKKEVNELMEELFETFQDEMGFSNMEDDGPEEEECVAEPRPNFNTPQALRFEEPLANLLNEQHRTVKELFEQLKMKKSSAKQLQEVEKVKPQSEKVHQTLILDPAQRKRLQQQMQQHVQLLTQIHLLATCNPNLNPEATTTRIFLKELGTFAQSSIALHHQYNPKFQTLFQPCNLMGAMQLIEDFSTHVSIDCSPHKTVKKTANEFPCLPKQVAWILATSKVFMYPELLPVCSLKAKNPQDKIVFTKAEDNLLALGLKHFEGTEFPNPLISKYLLTCKTAHQLTVRIKNLNMNRAPDNIIKFYKKTKQLPVLGKCCEEIQPHQWKPPIEREEHRLPFWLKASLPSIQEELRHMADGAREVGNMTGTTEINSDRSLEKDNLELGSESRYPLLLPKGVVLKLKPVATRFPRKAWRQKRSSVLKPLLIQPSPSLQPSFNPGKTPARSTHSEAPPSKMVLRIPHPIQPATVLQTVPGVPPLGVSGGESFESPAALPAVPPEARTSFPLSESQTLLSSAPVPKVMLPSLAPSKFRKPYVRRRPSKRRGVKASPCMKPAPVIHHPASVIFTVPATTVKIVSLGGGCNMIQPVNAAVAQSPQTIPITTLLVNPTSFPCPLNQSLVASSVSPLIVSGNSVNLPIPSTPEDKAHVNVDIACAVADGENAFQGLEPKLEPQELSPLSATVFPKVEHSPGPPLADAECQEGLSENSACRWTVVKTEEGRQALEPLPQGIQESLNNPTPGDLEEIVKMEPEEAREEISGSPERDICDDIKVEHAVELDTGAPSEELSSAGEVTKQTVLQKEEERSQPTKTPSSSQEPPDEGTSGTDVNKGSSKNALSSMDPEVRLSSPPGKPEDSSSVDGQSVGTPVGPETGGEKNGPEEEEEEDFDDLTQDEEDEMSSASEESVLSVPELQVRAGEYSQVFRGLSNMYHLLICHLLACCTMDSPKIICIFVNALWDMIVELR

SEQ ID NO: 36077 - protein, 970 aa, Homo sapiens
  Payload ID: 7142
  Gene Symbol: GON4L
  Gene Name: gon-4-like (C. elegans)
  ENSP ID: ENSP00000481460
MLPCKKRRTTVTESLQHKGNQEENNVDLESAVKPESDQVKDLSSVSLSWDPSHGRVAGFEVQSLQDAGNQLGMEDTSLSSGMLTQNTNVPILEGVDVAISQGITLPSLESFHPLNIHIGKGKLHATGSKRGKKMTLRPGPVTQEDRCDHLTLKEPFSGEPSEEVKEEGGKPQMNSEGEIPSLPSGSQSAKPVSQPRKSTQPDVCASPQEKPLRTLFHQPEEEIEDGGLFIPMEEQDNEESEKRRKKKKGTKRKRDGRGQEGTLAYDLKLDDMLDRTLEDGAKQHNLTAVNVRNILHEVITNEHVVAMMKAAISETEDMPMFEPKMTRSKLKEVVEKGVVIPTWNISPIKKANEIKPPQFVDIHLEEDDSSDEEYQPDDEEEDETAEESLLESDVESTASSPRGAKKSRLRQSSEMTETDEESGILSEAEKVTTPAIRHISAEVVPMGPPPPPKPKQTRDSTFMEKLHAVDEELASSPVCMDSFQPMDDSLIAFRTRSKMPLKDVPLGQLEAELQAPDITPDMYDPNTADDEDWKMWLGGLMNDDVGNEDEADDDDDPEYNFLEDLDEPDTEDFRTDRAVRITKKEVNELMEELFETFQDEMGFSNMEDDGPEEEECVAEPRPNFNTPQALRFEEPLANLLNEQHRTVKELFEQLKMKKSSAKQLQEVEKVKPQSEKVHQTLILDPAQRKRLQQQMQQHVQLLTQIHLLATCNPNLNPEATTTRIFLKELGTFAQSSIALHHQYNPKFQTLFQPCNLMGAMQLIEDFSTHVSIDCSPHKTVKKTANEFPCLPKQVAWILATSKVFMYPELLPVCSLKAKNPQDKIVFTKAEDNLLALGLKHFEGTEFPNPLISKYLLTCKTAHQLTVRIKNLNMNRAPDNIIKFYKKTKQLPVLGKCCEEIQPHQWKPPIEREEHRLPFWLKASLPSIQEELRHMADGARQSYRRKRRGVSQLKPLHLLKSPLMKEPQGQM

SEQ ID NO: 36078 - protein, 2241 aa, Homo sapiens; identical to SEQ ID NO: 36074
  Payload ID: 7142
  Gene Symbol: GON4L
  Gene Name: gon-4-like (C. elegans)
  Uniprot ID: Q3T8J9
  ENSP ID: ENSP00000483100

SEQ ID NO: 36079 - protein, 92 aa, Homo sapiens
  Payload ID: 7143
  Gene Symbol: GNRH1
  Gene Name: gonadotropin-releasing hormone 1 (luteinizing-releasing hormone)
  Uniprot ID: P01148
  ENSP ID: ENSP00000276414
MKPIQKLLAGLILLTWCVEGCSSQHWSYGLRPGGKRDAENLIDSFQEIVKEVGQLAETQRFECTTHQPRSPLRDLKGALESLIEEETGQKKI

SEQ ID NO: 36080 - protein, 92 aa, Homo sapiens; identical to SEQ ID NO: 36079
  Payload ID: 7143
  Gene Symbol: GNRH1
  Gene Name: gonadotropin-releasing hormone 1 (luteinizing-releasing hormone)
  Uniprot ID: P01148
  ENSP ID: ENSP00000391280

SEQ ID NO: 36081 - protein, 120 aa, Homo sapiens
  Payload ID: 7144
  Gene Symbol: GNRH2
  Gene Name: gonadotropin-releasing hormone 2
  Uniprot ID: O43555
  ENSP ID: ENSP00000245983
MASSRRGLLLLLLLTAHLGPSEAQHWSHGWYPGGKRALSSAQDPQNALRPPGRALDTAAGSPVQTAHGLPSDALAPLDDSMPWEGRTTAQWSLHRKRHLARTLLTAAREPRPAPPSSNKV

SEQ ID NO: 36082 - protein, 113 aa, Homo sapiens
  Payload ID: 7144
  Gene Symbol: GNRH2
  Gene Name: gonadotropin-releasing hormone 2
  Uniprot ID: O43555
  ENSP ID: ENSP00000352003
MASSRRGLLLLLLLTAHLGPSEAQHWSHGWYPGGKRALSSAQDPQNALRPPAGSPVQTAHGLPSDALAPLDDSMPWEGRTTAQWSLHRKRHLARTLLTAAREPRPAPPSSNKV

SEQ ID NO: 36083 - protein, 112 aa, Homo sapiens
  Payload ID: 7144
  Gene Symbol: GNRH2
  Gene Name: gonadotropin-releasing hormone 2
  Uniprot ID: O43555
  ENSP ID: ENSP00000369704
MASSRRGLLLLLLLTAHLGPSEAQHWSHGWYPGGKRALSSAQDPQNALRPPGSPVQTAHGLPSDALAPLDDSMPWEGRTTAQWSLHRKRHLARTLLTAAREPRPAPPSSNKV

SEQ ID NO: 36084 - protein, 113 aa, Homo sapiens; identical to SEQ ID NO: 36082
  Payload ID: 7144
  Gene Symbol: GNRH2
  Gene Name: gonadotropin-releasing hormone 2
  Uniprot ID: O43555
  ENSP ID: ENSP00000369705

SEQ ID NO: 36085 - protein, 328 aa, Homo sapiens
  Payload ID: 7145
  Gene Symbol: GNRHR
  Gene Name: gonadotropin-releasing hormone receptor
  Uniprot ID: P30968
  ENSP ID: ENSP00000226413
MANSASPEQNQNHCSAINNSIPLMQGNLPTLTLSGKIRVTVTFFLFLLSATFNASFLLKLQKWTQKKEKGKKLSRMKLLLKHLTLANLLETLIVMPLDGMWNITVQWYAGELLCKVLSYLKLFSMYAPAFMMVVISLDRSLAITRPLALKSNSKVGQSMVGLAWILSSVFAGPQLYIFRMIHLADSSGQTKVFSQCVTHCSFSQWWHQAFYNFFTFSCLFIIPLFIMLICNAKIIFTLTRVLHQDPHELQLNQSKNNIPRARLKTLKMTVAFATSFTVCWTPYYVLGIWYWFDPEMLNRLSDPVNHFFFLFAFLNPCFDPLIYGYFSL

SEQ ID NO: 36086 - protein, 249 aa, Homo sapiens
  Payload ID: 7145
  Gene Symbol: GNRHR
  Gene Name: gonadotropin-releasing hormone receptor
  Uniprot ID: P30968
  ENSP ID: ENSP00000397561
MANSASPEQNQNHCSAINNSIPLMQGNLPTLTLSGKIRVTVTFFLFLLSATFNASFLLKLQKWTQKKEKGKKLSRMKLLLKHLTLANLLETLIVMPLDGMWNITVQWYAGELLCKVLSYLKLFSMYAPAFMMVVISLDRSLAITRPLALKSNSKVGQSMVGLAWILSSVFAGPQLPLHHPSFHHADLQCKNHLHPDTGPSSGPPRTTTESVQEQYTKSTAEDSKNDGCICHFIYCLLDSLLCPRNLVLV

SEQ ID NO: 36087 - protein, 257 aa, Homo sapiens
  Payload ID: 7146
  Gene Symbol: GSC
  Gene Name: goosecoid homeobox
  Uniprot ID: P56915
  ENSP ID: ENSP00000238558
MPASMFSIDNILAARPRCKDSVLPVAHSAAAPVVFPALHGDSLYGASGGASSDYGAFYPRPVAPGGAGLPAAVSGSRLGYNNYFYGQLHVQAAPVGPACCGAVPPLGAQQCSCVPTPPGYEGPGSVLVSPVPHQMLPYMNVGTLSRTELQLLNQLHCRRKRRHRTIFTDEQLEALENLFQETKYPDVGTREQLARKVHLREEKVEVWFKNRRAKWRRQKRSSSEESENAEKWNKTSSSKASPEKREEEGKSDLDSDS

SEQ ID NO: 36088 - protein, 205 aa, Homo sapiens
  Payload ID: 7147
  Gene Symbol: GSC2
  Gene Name: goosecoid homeobox 2
  Uniprot ID: O15499
  ENSP ID: ENSP00000086933
MAAAAGGAASRRGAGRPCPFSIEHILSSLPERSLPARAACPPQPAGRQSPAKPEEPGAPEAAPCACCCCCGPRAAPCGPPEAAAGLGARLAWPLRLGPAVPLSLGAPAGGSGALPGAVGPGSQRRTRRHRTIFSEEQLQALEALFVQNQYPDVSTRERLAGRIRLREERVEVWFKNRRAKWRHQKRASASARLLPGVKKSPKGSC

SEQ ID NO: 36089 - protein, 170 aa, Homo sapiens
  Payload ID: 7148
  Gene Symbol: GPALPP1
  Gene Name: GPALPP motifs containing 1
  Uniprot ID: Q8IXQ4
  ENSP ID: ENSP00000350145
MKEKLTKGDDDSSKPIVRESWMTELPPEMKDFGLGPRTFKRRADDTSGDRSIWTDTPADRERKAKETQEARKSSSKKDEEHILSGRDKRLAEQVSSYNESKRSESLMDIHHKKLKSKAAEDKNKPQERIPFDRDKDLKVNRFDEAQKKALIKKSRELNTRFSHGKGNMFL

SEQ ID NO: 36090 - protein, 338 aa, Homo sapiens
  Payload ID: 7148
  Gene Symbol: GPALPP1
  Gene Name: GPALPP motifs containing 1
  ENSP ID: ENSP00000355211
MARDLIGPALPPGFKARGTAEDEERDPSPGPALPPNYKSSSSDSSDSDEDSSSLYEEGNQESEEDDSGPTARKQRKNQDDDDDDDDGFFGPALPPGFKKQDDSPPRPIIGPALPPGFIKSTQKSDKGRDDPGQQETDSSEDEDIIGPMPAKGPVNYNVTTEFEKRAQRMKEKLTKGDDDSSKPIVRESWMTELPPEMKDFGLGPRTFKRRADDTSGDRSIWTDTPADRERKAKETQEARKSSSKKDEEHILSGRDKRLAEQVSSYNESKRSESLMDIHHKKLKSKAAEDKNKPQERIPFDRDKDLKVNRFDEAQKKALIKKSRELNTRFSHGKGNMFL

SEQ ID NO: 36091 - protein, 340 aa, Homo sapiens
  Payload ID: 7148
  Gene Symbol: GPALPP1
  Gene Name: GPALPP motifs containing 1
  Uniprot ID: Q8IXQ4
  ENSP ID: ENSP00000368447
MARDLIGPALPPGFKARGTAEDEERDPSPVAGPALPPNYKSSSSDSSDSDEDSSSLYEEGNQESEEDDSGPTARKQRKNQDDDDDDDDGFFGPALPPGFKKQDDSPPRPIIGPALPPGFIKSTQKSDKGRDDPGQQETDSSEDEDIIGPMPAKGPVNYNVTTEFEKRAQRMKEKLTKGDDDSSKPIVRESWMTELPPEMKDFGLGPRTFKRRADDTSGDRSIWTDTPADRERKAKETQEARKSSSKKDEEHILSGRDKRLAEQVSSYNESKRSESLMDIHHKKLKSKAAEDKNKPQERIPFDRDKDLKVNRFDEAQKKALIKKSRELNTRFSHGKGNMFL

SEQ ID NO: 36092 - protein, 340 aa, Homo sapiens; identical to SEQ ID NO: 36091
  Payload ID: 7148
  Gene Symbol: GPALPP1
  Gene Name: GPALPP motifs containing 1
  Uniprot ID: Q8IXQ4
  ENSP ID: ENSP00000432500

SEQ ID NO: 36093 - protein, 100 aa, Homo sapiens
  Payload ID: 7148
  Gene Symbol: GPALPP1
  Gene Name: GPALPP motifs containing 1
  ENSP ID: ENSP00000480028
MARDLIGPALPPGFKARGTAEDEERDPSPGKRRRLRCPPGPSTHSLAGPCSLKKVGGLGGRRSGEWARPDPRELFSSQTVAGGRRLGDPPRNELWRGLAS

SEQ ID NO: 36094 - protein, 388 aa, Homo sapiens
  Payload ID: 7149
  Gene Symbol: GPN1
  Gene Name: GPN-loop GTPase 1
  Uniprot ID: Q9HCN4
  ENSP ID: ENSP00000264718
MRCLYGRVGGARRKMAASAAAAELQASGGPRHPVCLLVLGMAGSGKTTFVQRLTGHLHAQGTPPYVINLDPAVHEVPFPANIDIRDTVKYKEVMKQYGLGPNGGIVTSLNLFATRFDQVMKFIEKAQNMSKYVLIDTPGQIEVFTWSASGTIITEALASSFPTVVIYVMDTSRSTNPVTFMSNMLYACSILYKTKLPFIVVMNKTDIIDHSFAVEWMQDFEAFQDALNQETTYVSNLTRSMSLVLDEFYSSLRVVGVSAVLGTGLDELFVQVTSAAEEYEREYRPEYERLKKSLANAESQQQREQLERLRKDMGSVALDAGTAKDSLSPVLHPSDLILTRGTLDEEDEEADSDTDDIDHRVTEESHEEPAFQNFMQESMAQYWKRNNK

SEQ ID NO: 36095 - protein, 362 aa, Homo sapiens
  Payload ID: 7149
  Gene Symbol: GPN1
  Gene Name: GPN-loop GTPase 1
  Uniprot ID: Q9HCN4
  ENSP ID: ENSP00000384255
MTGHTRSSLPRCTGIVLLIKLRFSERLTGHLHAQGTPPYVINLDPAVHEVPFPANIDIRDTVKYKEVMKQYGLGPNGGIVTSLNLFATRFDQVMKFIEKAQNMSKYVLIDTPGQIEVFTWSASGTIITEALASSFPTVVIYVMDTSRSTNPVTFMSNMLYACSILYKTKLPFIVVMNKTDIIDHSFAVEWMQDFEAFQDALNQETTYVSNLTRSMSLVLDEFYSSLRVVGVSAVLGTGLDELFVQVTSAAEEYEREYRPEYERLKKSLANAESQQQREQLERLRKDMGSVALDAGTAKDSLSPVLHPSDLILTRGTLDEEDEEADSDTDDIDHRVTEESHEEPAFQNFMQESMAQYWKRNNK

SEQ ID NO: 36096 - protein, 73 aa, Homo sapiens
  Payload ID: 7149
  Gene Symbol: GPN1
  Gene Name: GPN-loop GTPase 1
  ENSP ID: ENSP00000395981
MAASAAAAELQASGGPRHPVCLLVLGMAGSGKTTFVQRLTGHLHAQGTPPYVINLDPAVHEVPFPANIGDEIY

SEQ ID NO: 36097 - protein, 295 aa, Homo sapiens
  Payload ID: 7149
  Gene Symbol: GPN1
  Gene Name: GPN-loop GTPase 1
  Uniprot ID: Q9HCN4
  ENSP ID: ENSP00000398115
MKQYGLGPNGGIVTSLNLFATRFDQVMKFIEKAQNMSKYVLIDTPGQIEVFTWSASGTIITEALASSFPTVVIYVMDTSRSTNPVTFMSNMLYACSILYKTKLPFIVVMNKTDIIDHSFAVEWMQDFEAFQDALNQETTYVSNLTRSMSLVLDEFYSSLRVVGVSAVLGTGLDELFVQVTSAAEEYEREYRPEYERLKKSLANAESQQQREQLERLRKDMGSVALDAGTAKDSLSPVLHPSDLILTRGTLDEEDEEADSDTDDIDHRVTEESHEEPAFQNFMQESMAQYWKRNNK

SEQ ID NO: 36098 - protein, 279 aa, Homo sapiens
  Payload ID: 7149
  Gene Symbol: GPN1
  Gene Name: GPN-loop GTPase 1
  Uniprot ID: Q9HCN4
  ENSP ID: ENSP00000412170
MKFPFLPILVMKFIEKAQNMSKYVLIDTPGQIEVFTWSASGTIITEALASSFPTVVIYVMDTSRSTNPVTFMSNMLYACSILYKTKLPFIVVMNKTDIIDHSFAVEWMQDFEAFQDALNQETTYVSNLTRSMSLVLDEFYSSLRVVGVSAVLGTGLDELFVQVTSAAEEYEREYRPEYERLKKSLANAESQQQREQLERLRKDMGSVALDAGTAKDSLSPVLHPSDLILTRGTLDEEDEEADSDTDDIDHRVTEESHEEPAFQNFMQESMAQYWKRNNK

SEQ ID NO: 36099 - protein, 295 aa, Homo sapiens; identical to SEQ ID NO: 36097
  Payload ID: 7149
  Gene Symbol: GPN1
  Gene Name: GPN-loop GTPase 1
  Uniprot ID: Q9HCN4
  ENSP ID: ENSP00000424678

SEQ ID NO: 36100 - protein, 279 aa, Homo sapiens; identical to SEQ ID NO: 36098
  Payload ID: 7149
  Gene Symbol: GPN1
  Gene Name: GPN-loop GTPase 1
  Uniprot ID: Q9HCN4
  ENSP ID: ENSP00000427269

SEQ ID NO: 36101 - protein, 374 aa, Homo sapiens
  Payload ID: 7149
  Gene Symbol: GPN1
  Gene Name: GPN-loop GTPase 1
  Uniprot ID: Q9HCN4
  ENSP ID: ENSP00000476446
MAASAAAAELQASGGPRHPVCLLVLGMAGSGKTTFVQRLTGHLHAQGTPPYVINLDPAVHEVPFPANIDIRDTVKYKEVMKQYGLGPNGGIVTSLNLFATRFDQVMKFIEKAQNMSKYVLIDTPGQIEVFTWSASGTIITEALASSFPTVVIYVMDTSRSTNPVTFMSNMLYACSILYKTKLPFIVVMNKTDIIDHSFAVEWMQDFEAFQDALNQETTYVSNLTRSMSLVLDEFYSSLRVVGVSAVLGTGLDELFVQVTSAAEEYEREYRPEYERLKKSLANAESQQQREQLERLRKDMGSVALDAGTAKDSLSPVLHPSDLILTRGTLDEEDEEADSDTDDIDHRVTEESHEEPAFQNFMQESMAQYWKRNNK

SEQ ID NO: 36102 - protein, 388 aa, Homo sapiens; identical to SEQ ID NO: 36094
  Payload ID: 7149
  Gene Symbol: GPN1
  Gene Name: GPN-loop GTPase 1
  Uniprot ID: Q9HCN4
  ENSP ID: ENSP00000484680

SEQ ID NO: 36103 - protein, 131 aa, Homo sapiens
  Payload ID: 7150
  Gene Symbol: GPN2
  Gene Name: GPN-loop GTPase 2
  ENSP ID: ENSP00000363248
MLAGLELLTSAFNLDYYTEVLDLSYLLDHLASDPFFRHYRQLNEKLVQLIEDYSLVSFIPLNIQDKESIQRVLQAVDKANGYCFRAQEQRSLEAMMSAAMGADFHFSSTLGIQEKYLAPSNQSVEQEAMQL

SEQ ID NO: 36104 - protein, 310 aa, Homo sapiens
  Payload ID: 7150
  Gene Symbol: GPN2
  Gene Name: GPN-loop GTPase 2
  Uniprot ID: Q9H9Y4
  ENSP ID: ENSP00000363250
MAGAAPTTAFGQAVIGPPGSGKTTYCLGMSEFLRALGRRVAVVNLDPANEGLPYECAVDVGELVGLGDVMDALRLGPNGGLLYCMEYLEANLDWLRAKLDPLRGHYFLFDCPGQVELCTHHGALRSIFSQMAQWDLRLTAVHLVDSHYCTDPAKFISVLCTSLATMLHVELPHINLLSKMDLIEHYGKLAFNLDYYTEVLDLSYLLDHLASDPFFRHYRQLNEKLVQLIEDYSLVSFIPLNIQDKESIQRVLQAVDKANGYCFRAQEQRSLEAMMSAAMGADFHFSSTLGIQEKYLAPSNQSVEQEAMQL

SEQ ID NO: 36105 - protein, 112 aa, Homo sapiens
  Payload ID: 7150
  Gene Symbol: GPN2
  Gene Name: GPN-loop GTPase 2
  ENSP ID: ENSP00000408257
MAGAAPTTAFGQAVIGPPGSGKTTYCLGMSEFLRALGRRVAVVNLDPANEGRLAQHLLPNGAVGPQADCRPPRGFSLLHRPCQVHFSTVYLPGHHAARGTAPHQPPFQDGPH

SEQ ID NO: 36106 - protein, 284 aa, Homo sapiens
  Payload ID: 7151
  Gene Symbol: GPN3
  Gene Name: GPN-loop GTPase 3
  Uniprot ID: Q9UHW5
  ENSP ID: ENSP00000228827
MPRYAQLVMGPAGSGKSTYCATMVQHCEALNRSVQVVNLDPAAEHFNYSVMADIRELIEVDDVMEDDSLRFGPNGGLVFCMEYFANNFDWLENCLGHVEDDYILFDCPGQIELYTHLPVMKQLVQQLEQWEFRVCGVFLVDSQFMVESFKFISGILAALSAMISLEIPQVNIMTKMDLLSKKAKKEIEKFLDPDMYSLLEDSTSDLRSKKFKKLTKAICGLIDDYSMVRFLPYDQSDEESMNIVLQHIDFAIQYGEDLEFKEPKEREDESSSMFDEYFQECQDE

SEQ ID NO: 36107 - protein, 323 aa, Homo sapiens
  Payload ID: 7151
  Gene Symbol: GPN3
  Gene Name: GPN-loop GTPase 3
  Uniprot ID: Q9UHW5
  ENSP ID: ENSP00000442770
MLPKTRGAFHFSIPDPQHICKSRGSPYRSNVCTQTTDRSTWRKDAELYLLSVITQSTYCATMVQHCEALNRSVQVVNLDPAAEHFNYSVMADIRELIEVDDVMEDDSLRFGPNGGLVFCMEYFANNFDWLENCLGHVEDDYILFDCPGQIELYTHLPVMKQLVQQLEQWEFRVCGVFLVDSQFMVESFKFISGILAALSAMISLEIPQVNIMTKMDLLSKKAKKEIEKFLDPDMYSLLEDSTSDLRSKKFKKLTKAICGLIDDYSMVRFLPYDQSDEESMNIVLQHIDFAIQYGEDLEFKEPKEREDESSSMFDEYFQECQDE

SEQ ID NO: 36108 - protein, 294 aa, Homo sapiens
  Payload ID: 7151
  Gene Symbol: GPN3
  Gene Name: GPN-loop GTPase 3
  Uniprot ID: Q9UHW5
  ENSP ID: ENSP00000443068
MPRYAQLVMGPAGSGKVRICGDKERKSTYCATMVQHCEALNRSVQVVNLDPAAEHFNYSVMADIRELIEVDDVMEDDSLRFGPNGGLVFCMEYFANNFDWLENCLGHVEDDYILFDCPGQIELYTHLPVMKQLVQQLEQWEFRVCGVFLVDSQFMVESFKFISGILAALSAMISLEIPQVNIMTKMDLLSKKAKKEIEKFLDPDMYSLLEDSTSDLRSKKFKKLTKAICGLIDDYSMVRFLPYDQSDEESMNIVLQHIDFAIQYGEDLEFKEPKEREDESSSMFDEYFQECQDE

SEQ ID NO: 36109 - protein, 159 aa, Homo sapiens
  Payload ID: 7151
  Gene Symbol: GPN3
  Gene Name: GPN-loop GTPase 3
  ENSP ID: ENSP00000447480
MVQHCEALNRSVQVVNLDPAAEHFNYSVMADIRELIEVDDVMEDDSLRFGPNGGLVFCMEYFANNFDWLENCLGHVEDDYILFDCPGQIELYTHLPVMKQLVQQLEQWEFRVCGVFLVDSQFMVESFKFISGILAALSAMISLEIPQVNIMTKMDLLSK

SEQ ID NO: 36110 - protein, 120 aa, Homo sapiens
  Payload ID: 7151
  Gene Symbol: GPN3
  Gene Name: GPN-loop GTPase 3
  ENSP ID: ENSP00000448159
FISGILAALSAMISLEIPQVNIMTKMDLLSKKAKKEIEKFLDPDMYSLLEDSTSDLRSKKFKKLTKAICGLSDEESMNIVLQHIDFAIQYGEDLEFKEPKEREDESSSMFDEYFQECQDE

SEQ ID NO: 36111 - protein, 118 aa, Homo sapiens
  Payload ID: 7151
  Gene Symbol: GPN3
  Gene Name: GPN-loop GTPase 3
  ENSP ID: ENSP00000448335
  MOD_RES (1)..(1): Any amino acid
XIRELIEVDDVMEDDSLRFGPNGGLVFCMEYFANNFDWLENCLGHVEDDYILFDCPGQIELYTHLPVMKQLVQQLEQWEFRVCGVFLVDSQFMVESFKIDDYSMVRFLPYDQSDEESM

SEQ ID NO: 36112 - protein, 25 aa, Homo sapiens
  Payload ID: 7151
  Gene Symbol: GPN3
  Gene Name: GPN-loop GTPase 3
  ENSP ID: ENSP00000474521
MPRYAQLVMGPAGSGKSTYCATMVQ

SEQ ID NO: 36113 - protein, 556 aa, Homo sapiens
  Payload ID: 7152
  Gene Symbol: GPR75-ASB3
  Gene Name: GPR75-ASB3 readthrough
  ENSP ID: ENSP00000385085
MAMMPLVLHHPERQAELGSGLRDGGGAALRPPGRLVKQMDFTEAYADTCSTVGLAAREGNVKVLRKLLKKGRSVDVADNRGWMPIHEAAYHNSVECLQMLINADSSENYIKMKTFEGFCALHLAASQGHWKIVQILLEAGADPNATTLEETTPLFLAVENGQIDVLRLLLQHGANVNGSHSMCGWNSLHQASFQENAEIIKLLLRKGANKECQDDFGITPLFVAAQYGKLESLSILISSGANVNCQALDKATPLFIAAQEGHTKCVELLLSSGADPDLYCNEDSWQLPIHAAAQMGHTKILDLLIPLTNRACDTGLNKVSPVYSAVFGGHEDCLEILLRNGYSPDAQACLVFGFSSPVCMAFQKDCEFFGIVNILLKYGAQINELHLAYCLKYEKFSIFRYFLRKGCSLGPWNHIYEFVNHAIKAQAKYKEWLPHLLVAGFDPLILLCNSWIDSVSIDTLIFTLEFTNWKTLAPAVERMLSARASNAWILQQHIATVPSLTHLCRLEIRSSLKSERLRSDSYISQLPLPRSLHNYLLYEDVLRMYEVPELAAIQDG

SEQ ID NO: 36114 - protein, 776 aa, Homo sapiens
  Payload ID: 7153
  Gene Symbol: GPRIN3
  Gene Name: GPRIN family member 3
  Uniprot ID: Q6ZVF9
  ENSP ID: ENSP00000328672
MGTVPDPLRSAKTSLIAASGKEDDLGEPQAASPRHRPALLCKNANGFSGAPAEPDLSPRAAAEALMQVCEHETTQPDMSSPGVFNEVQKAPATFNSPGNPQLPGSSQPAASAPSSAAGRDLIHTPLTMPANQHTCQSIPGDQPNAITSSMPEDSLMRSQRTSNREQPEKPSCPVGGVLSSSKDQVSCEFPSPETIQGTVQTPVTAARVVSHSSSPVGGPEGERQGAICDSEMRSCKPLTRESGCSENKQPSVTASGPQGTTSVTPQPTPLTSEPSACPPGPEKVPLPAQRQMSRFKEASTMTNQAESEIKEVPSRAWQDAEVQAVASVESRSVSTSPSILTAFLKESRAPEHFEQEQLRVICHSSGSHTLELSDSTLAPQESSQCPGIMPQVHIQAAAAESTAFQRENKLASLPGGVLKTSSINLVSSNAQHTCKEDGRLAGMTPVREESTAKKLAGTNSSSLKATAIDQISISACSQAETSYGLGKFETRPSEFAEKTTNGHKTDPDCKLSDSCGSISKADHSGSLDPTNKGDAREKKPASPQVVKEKESTGTDTSDAKTLLLNPKSQESGGTESAANPTPSPIRKNQESTLEENRQTKTATSLSLPSDPMGDSSPGSGKKTPSRSVKASPRRPSRVSEFLKEQKLNVTAAAAQVGLTPGDKKKQLGADSKLQLKQSKRVRDVVWDEQGMTWEVYGASLDAESLGIAIQNHLQRQIREHEKLIKTQNSQTRRSISSDTSSNKKLRGRQHSVFQSMLQNFRRPNCCVRPAPSSVLD

SEQ ID NO: 36115 - protein, 776 aa, Homo sapiens; identical to SEQ ID NO: 36114
  Payload ID: 7153
  Gene Symbol: GPRIN3
  Gene Name: GPRIN family member 3
  Uniprot ID: Q6ZVF9
  ENSP ID: ENSP00000476603

SEQ ID NO: 36116 - protein, 166 aa, Homo sapiens
  Payload ID: 7154
  Gene Symbol: GPSM1
  Gene Name: G-protein signaling modulator 1
  Uniprot ID: Q86YR5
  ENSP ID: ENSP00000291775
MDDQRCPLDDGQAGAAEATAAPTLEDRIAQPSMTASPQTEEFFDLIASSQSRRLDDQRASVGSLPGLRITHSNAGHLRGHGEPQEPGDDFFNMLIKYQSSRIDDQRCPPPDVLPRGPTMPDEDFFSLIQRVQAKRMDEQRVDLAGGPEQGAGGPPEPQQQCQPGAS

SEQ ID NO: 36117 - protein, 653 aa, Homo sapiens
  Payload ID: 7154
  Gene Symbol: GPSM1
  Gene Name: G-protein signaling modulator 1
  ENSP ID: ENSP00000346797
  MOD_RES (1)..(1): Any amino acid
XMEASCLELALEGERLCKAGDFKTGVAFFEAAVQVGTEDLKTLSAIYSQLGNAYFYLKEHGRALEYHKHDLLLARTIGDRMGEAKASGNLGNTLKVLGRFDEAAVCCQRHLSIAQEQGDKVGEARALYNIGNVYHAKGKQLSWNAANATQDPGHLPPDVRETLCKASEFYERNLSLVKELGDRAAQGRAYGNLGNTHYLLGNFTEATTFHKERLAIAKEFGDKAAERRAYSNLGNAHVFLGRFDVAAEYYKKTLQLSRQLRDQAVEAQACYSLGNTYTLLQDYERAAEYHLRHLLIAQELADRVGEGRACWSLGNAYVSMGRPAQALTFAKKHLQISQEIGDRHGELTARMNVAQLQLVLGRLTSPAASEKPDLAGYEAQGARPKRTQRLSAETWDLLRLPLEREQNGDSHHSGDWRGPSRDSLPLPVRSRKYQEGPDAERRPREGSHSPLDSADVRVHVPRTSIPRAPSSDEECFFDLLTKFQSSRMDDQRCPLDDGQAGAAEATAAPTLEDRIAQPSMTASPQTEEFFDLIASSQSRRLDDQRASVGSLPGLRITHSNAGHLRGHGEPQEPGDDFFNMLIKYQSSRIDDQRCPPPDVLPRGPTMPDEDFFSLIQRVQAKRMDEQRVDLAGGPEQGAGGPPEPQQQCQPGAS

SEQ ID NO: 36118 - protein, 166 aa, Homo sapiens; identical to SEQ ID NO: 36116
  Payload ID: 7154
  Gene Symbol: GPSM1
  Gene Name: G-protein signaling modulator 1
  Uniprot ID: Q86YR5
  ENSP ID: ENSP00000376673

SEQ ID NO: 36119 - protein, 166 aa, Homo sapiens; identical to SEQ ID NO: 36116
  Payload ID: 7154
  Gene Symbol: GPSM1
  Gene Name: G-protein signaling modulator 1
  Uniprot ID: Q86YR5
  ENSP ID: ENSP00000390705

SEQ ID NO: 36120 - protein, 675 aa, Homo sapiens
  Payload ID: 7154
  Gene Symbol: GPSM1
  Gene Name: G-protein signaling modulator 1
  ENSP ID: ENSP00000392828
MAGPAPPAADELPGPAARRLYSRMEASCLELALEGERLCKAGDFKTGVAFFEAAVQVGTEDLKTLSAIYSQLGNAYFYLKEHGRALEYHKHDLLLARTIGDRMGEAKASGNLGNTLKVLGRFDEAAVCCQRHLSIAQEQGDKVGEARALYNIGNVYHAKGKQLSWNAANATQDPGHLPPDVRETLCKASEFYERNLSLVKELGDRAAQGRAYGNLGNTHYLLGNFTEATTFHKERLAIAKEFGDKAAERRAYSNLGNAHVFLGRFDVAAEYYKKTLQLSRQLRDQAVEAQACYSLGNTYTLLQDYERAAEYHLRHLLIAQELADRVGEGRACWSLGNAYVSMGRPAQALTFAKKHLQISQEIGDRHGELTARMNVAQLQLVLGRLTSPAASEKPDLAGYEAQGARPKRTQRLSAETWDLLRLPLEREQNGDSHHSGDWRGPSRDSLPLPVRSRKYQEGPDAERRPREGSHSPLDSADVRVHVPRTSIPRAPSSDEECFFDLLTKFQSSRMDDQRCPLDDGQAGAAEATAAPTLEDRIAQPSMTASPQTEEFFDLIASSQSRRLDDQRASVGSLPGLRITHSNAGHLRGHGEPQEPGDDFFNMLIKYQSSRIDDQRCPPPDVLPRGPTMPDEDFFSLIQRVQAKRMDEQRVDLAGGPEQGAGGPPEPQQQCQPGAS

SEQ ID NO: 36121 - protein, 457 aa, Homo sapiens
  Payload ID: 7154
  Gene Symbol: GPSM1
  Gene Name: G-protein signaling modulator 1
  ENSP ID: ENSP00000479405
MAGPAPPAADELPGPAARRLYSRMEASCLELALEGERLCKAGDFKTGVAFFEAAVQVGTEDLKTLSAIYSQLGNAYFYLKEHGRALEYHKHDLLLARTIGDRMGEAKASGNLGNTLKVLGRFDEAAVCCQRHLSIAQEQGDKVGEARALYNIGNVYHAKGKQLSWNAANATQDPGHLPPDVRETLCKASEFYERNLSLVKELGDRAAQGRAYGNLGNTHYLLGNFTEATTFHKERLAIAKEFGDKAAERRAYSNLGNAHVFLGRFDVAAEYYKKTLQLSRQLRDQAVEAQACYSLGNTYTLLQDYERAAEYHLRHLLIAQELADRVGEGRACWSLGNAYVSMGRPAQALTFAKKHLQISQEIGDRHGELTARMNVAQLQLVLGRLTSPAASEKPDLAGYEAQGEFQGCGGVLLPTGTDRIRSCGGVGSRPGQHGGGGSRQKMAPTSQFFLASGTAQA

SEQ ID NO: 36122 - protein, 684 aa, Homo sapiens
  Payload ID: 7155
  Gene Symbol: GPSM2
  Gene Name: G-protein signaling modulator 2
  Uniprot ID: P81274
  ENSP ID: ENSP00000264126
MEENLISMREDHSFHVRYRMEASCLELALEGERLCKSGDCRAGVSFFEAAVQVGTEDLKTLSAIYSQLGNAYFYLHDYAKALEYHHHDLTLARTIGDQLGEAKASGNLGNTLKVLGNFDEAIVCCQRHLDISRELNDKVGEARALYNLGNVYHAKGKSFGCPGPQDVGEFPEEVRDALQAAVDFYEENLSLVTALGDRAAQGRAFGNLGNTHYLLGNFRDAVIAHEQRLLIAKEFGDKAAERRAYSNLGNAYIFLGEFETASEYYKKTLLLARQLKDRAVEAQSCYSLGNTYTLLQDYEKAIDYHLKHLAIAQELNDRIGEGRACWSLGNAYTALGNHDQAMHFAEKHLEISREVGDKSGELTARLNLSDLQMVLGLSYSTNNSIMSENTEIDSSLNGVRPKLGRRHSMENMELMKLTPEKVQNWNSEILAKQKPLIAKPSAKLLFVNRLKGKKYKTNSSTKVLQDASNSIDHRIPNSQRKISADTIGDEGFFDLLSRFQSNRMDDQRCCLQEKNCHTASTTTSSTPPKMMLKTSSVPVVSPNTDEFLDLLASSQSRRLDDQRASFSNLPGLRLTQNSQSVLSHLMTNDNKEADEDFFDILVKCQGSRLDDQRCAPPPATTKGPTVPDEDFFSLILRSQGKRMDEQRVLLQRDQNRDTDFGLKDFLQNNALLEFKNSGKKSADH

SEQ ID NO: 36123 - protein, 684 aa, Homo sapiens; identical to SEQ ID NO: 36122
  Payload ID: 7155
  Gene Symbol: GPSM2
  Gene Name: G-protein signaling modulator 2
  Uniprot ID: P81274
  ENSP ID: ENSP00000385510

SEQ ID NO: 36124 - protein, 217 aa, Homo sapiens
  Payload ID: 7155
  Gene Symbol: GPSM2
  Gene Name: G-protein signaling modulator 2
  ENSP ID: ENSP00000390629
  MOD_RES (1)..(1): Any amino acid
XMELMKLTPEKVQNWNSEILAKQKPLIAKPSAKLLFVNRLKGKKYKTNSSTKVLQDASNSIDHRIPNSQRKISADTIGDEGFFDLLSRFQSNRMDDQRCCLQEKNCHTASTTTSSTPPKMMLKTSSVPVVSPNTDEFLDLLASSQSRRLDDQRASFSNLPGLRLTQNSQSVLSHLMTNDNKEADEDFFDILVKCQVCLYIFFVLHTAQIPLKTLVVL

SEQ ID NO: 36125 - protein, 52 aa, Homo sapiens
  Payload ID: 7155
  Gene Symbol: GPSM2
  Gene Name: G-protein signaling modulator 2
  ENSP ID: ENSP00000392138
MEENLISMREDHSFHVRYRMEASCLELALEGERLCKSGDCRAGVSFFEAAVQ

SEQ ID NO: 36126 - protein, 75 aa, Homo sapiens
  Payload ID: 7155
  Gene Symbol: GPSM2
  Gene Name: G-protein signaling modulator 2
  ENSP ID: ENSP00000401948
MEENLISMREDHSFHVRYRMEASCLELALEGERLCKSGDCRAGVSFFEAAVQVGTEDLKTLSAIYSQLGNAYFYL

SEQ ID NO: 36127 - protein, 213 aa, Homo sapiens
  Payload ID: 7155
  Gene Symbol: GPSM2
  Gene Name: G-protein signaling modulator 2
  ENSP ID: ENSP00000408664
MEENLISMREDHSFHVRYRMEASCLELALEGERLCKSGDCRAGVSFFEAAVQVGTEDLKTLSAIYSQLGNAYFYLHDYAKALEYHHHDLTLARTIGDQLGEAKASGNLGNTLKVLGNFDEAIVCCQRHLDISRELNDKVGEARALYNLGNVYHAKGKSFGCPGPQDVGEFPEEVRDALQAAVDFYEENLSLVTALGDRAAQGRAFGNLGNTHY

SEQ ID NO: 36128 - protein, 160 aa, Homo sapiens
  Payload ID: 7156
  Gene Symbol: GPSM3
  Gene Name: G-protein signaling modulator 3
  Uniprot ID: Q9Y4H4
  ENSP ID: ENSP00000364180
MEAERPQEEEDGEQGPPQDEEGWPPPNSTTRPWRSAPPSPPPPGTRHTALGPRSASLLSLQTELLLDLVAEAQSRRLEEQRATFYTPQNPSSLAPAPLRPLEDREQLYSTILSHQCQRMEAQRSEPPLPPGGQELLELLLRVQGGGRMEEQRSRPPTHTC

SEQ ID NO: 36129 - protein, 160 aa, Homo sapiens; identical to SEQ ID NO: 36128
  Payload ID: 7156
  Gene Symbol: GPSM3
  Gene Name: G-protein signaling modulator 3
  Uniprot ID: Q9Y4H4
  ENSP ID: ENSP00000364183

SEQ ID NO: 36130 - protein, 160 aa, Homo sapiens; identical to SEQ ID NO: 36128
  Payload ID: 7156
  Gene Symbol: GPSM3
  Gene Name: G-protein signaling modulator 3
  Uniprot ID: Q9Y4H4
  ENSP ID: ENSP00000372752

SEQ ID NO: 36131 - protein, 160 aa, Homo sapiens; identical to SEQ ID NO: 36128
  Payload ID: 7156
  Gene Symbol: GPSM3
  Gene Name: G-protein signaling modulator 3
  Uniprot ID: Q9Y4H4
  ENSP ID: ENSP00000372756

SEQ ID NO: 36132 - protein, 160 aa, Homo sapiens; identical to SEQ ID NO: 36128
  Payload ID: 7156
  Gene Symbol: GPSM3
  Gene Name: G-protein signaling modulator 3
  Uniprot ID: Q9Y4H4
  ENSP ID: ENSP00000392487

SEQ ID NO: 36133 - protein, 160 aa, Homo sapiens; identical to SEQ ID NO: 36128
  Payload ID: 7156
  Gene Symbol: GPSM3
  Gene Name: G-protein signaling modulator 3
  Uniprot ID: Q9Y4H4
  ENSP ID: ENSP00000396786

SEQ ID NO: 36134 - protein, 160 aa, Homo sapiens; identical to SEQ ID NO: 36128
  Payload ID: 7156
  Gene Symbol: GPSM3
  Gene Name: G-protein signaling modulator 3
  Uniprot ID: Q9Y4H4
  ENSP ID: ENSP00000403132

SEQ ID NO: 36135 - protein, 160 aa, Homo sapiens; identical to SEQ ID NO: 36128
  Payload ID: 7156
  Gene Symbol: GPSM3
  Gene Name: G-protein signaling modulator 3
  Uniprot ID: Q9Y4H4
  ENSP ID: ENSP00000405026

SEQ ID NO: 36136 - protein, 160 aa, Homo sapiens; identical to SEQ ID NO: 36128
  Payload ID: 7156
  Gene Symbol: GPSM3
  Gene Name: G-protein signaling modulator 3
  Uniprot ID: Q9Y4H4
  ENSP ID: ENSP00000407538

SEQ ID NO: 36137 - protein, 160 aa, Homo sapiens; identical to SEQ ID NO: 36128
  Payload ID: 7156
  Gene Symbol: GPSM3
  Gene Name: G-protein signaling modulator 3
  Uniprot ID: Q9Y4H4
  ENSP ID: ENSP00000410087

SEQ ID NO: 36138 - protein, 160 aa, Homo sapiens; identical to SEQ ID NO: 36128
  Payload ID: 7156
  Gene Symbol: GPSM3
  Gene Name: G-protein signaling modulator 3
  Uniprot ID: Q9Y4H4
  ENSP ID: ENSP00000413430

SEQ ID NO: 36139 - protein, 160 aa, Homo sapiens; identical to SEQ ID NO: 36128
  Payload ID: 7156
  Gene Symbol: GPSM3
  Gene Name: G-protein signaling modulator 3
  Uniprot ID: Q9Y4H4
  ENSP ID: ENSP00000413975

SEQ ID NO: 36140 - protein, 160 aa, Homo sapiens; identical to SEQ ID NO: 36128
  Payload ID: 7156
  Gene Symbol: GPSM3
  Gene Name: G-protein signaling modulator 3
  Uniprot ID: Q9Y4H4
  ENSP ID: ENSP00000414024

SEQ ID NO: 36141 - protein, 160 aa, Homo sapiens; identical to SEQ ID NO: 36128
  Payload ID: 7156
  Gene Symbol: GPSM3
  Gene Name: G-protein signaling modulator 3
  Uniprot ID: Q9Y4H4
  ENSP ID: ENSP00000414939

SEQ ID NO: 36142 - protein, 157 aa, Homo sapiens
  Payload ID: 7156
  Gene Symbol: GPSM3
  Gene Name: G-protein signaling modulator 3
  ENSP ID: ENSP00000431348
MVSRMDIFWHQGPPQDEEGWPPPNSTTRPWRSAPPSPPPPGTRHTALGPRSASLLSLQTELLLDLVAEAQSRRLEEQRATFYTPQNPSSLAPAPLRPLEDREQLYSTILSHQCQRMEAQRSEPPLPPGGQELLELLLRVQGGGRMEEQRSRPPTHTC

SEQ ID NO: 36143 - protein, 49 aa, Homo sapiens
  Payload ID: 7156
  Gene Symbol: GPSM3
  Gene Name: G-protein signaling modulator 3
  ENSP ID: ENSP00000432037
MEAERPQEEEDGEQGPPQDEEGWPPPNSTTRPWRSAPPSPPPPGTRHTD

SEQ ID NO: 36144 - protein, 49 aa, Homo sapiens; identical to SEQ ID NO: 36143
  Payload ID: 7156
  Gene Symbol: GPSM3
  Gene Name: G-protein signaling modulator 3
  ENSP ID: ENSP00000432714

SEQ ID NO: 36145 - protein, 157 aa, Homo sapiens; identical to SEQ ID NO: 36142
  Payload ID: 7156
  Gene Symbol: GPSM3
  Gene Name: G-protein signaling modulator 3
  ENSP ID: ENSP00000433153

SEQ ID NO: 36146 - protein, 49 aa, Homo sapiens; identical to SEQ ID NO: 36143
  Payload ID: 7156
  Gene Symbol: GPSM3
  Gene Name: G-protein signaling modulator 3
  ENSP ID: ENSP00000433356

SEQ ID NO: 36147 - protein, 49 aa, Homo sapiens; identical to SEQ ID NO: 36143
  Payload ID: 7156
  Gene Symbol: GPSM3
  Gene Name: G-protein signaling modulator 3
  ENSP ID: ENSP00000434464

SEQ ID NO: 36148 - protein, 157 aa, Homo sapiens; identical to SEQ ID NO: 36142
  Payload ID: 7156
  Gene Symbol: GPSM3
  Gene Name: G-protein signaling modulator 3
  ENSP ID: ENSP00000434769

SEQ ID NO: 36149 - protein, 49 aa, Homo sapiens; identical to SEQ ID NO: 36143
  Payload ID: 7156
  Gene Symbol: GPSM3
  Gene Name: G-protein signaling modulator 3
  ENSP ID: ENSP00000434899

SEQ ID NO: 36150 - protein, 157 aa, Homo sapiens; identical to SEQ ID NO: 36142
  Payload ID: 7156
  Gene Symbol: GPSM3
  Gene Name: G-protein signaling modulator 3
  ENSP ID: ENSP00000435410

SEQ ID NO: 36151 - protein, 157 aa, Homo sapiens; identical to SEQ ID NO: 36142
  Payload ID: 7156
  Gene Symbol: GPSM3
  Gene Name: G-protein signaling modulator 3
  ENSP ID: ENSP00000435723

SEQ ID NO: 36152 - protein, 49 aa, Homo sapiens; identical to SEQ ID NO: 36143
  Payload ID: 7156
  Gene Symbol: GPSM3
  Gene Name: G-protein signaling modulator 3
  ENSP ID: ENSP00000436125

SEQ ID NO: 36153 - protein, 157 aa, Homo sapiens; identical to SEQ ID NO: 36142
  Payload ID: 7156
  Gene Symbol: GPSM3
  Gene Name: G-protein signaling modulator 3
  ENSP ID: ENSP00000436358

SEQ ID NO: 36154 - protein, 49 aa, Homo sapiens; identical to SEQ ID NO: 36143
  Payload ID: 7156
  Gene Symbol: GPSM3
  Gene Name: G-protein signaling modulator 3
  ENSP ID: ENSP00000437307

SEQ ID NO: 36155 - protein, 124 aa, Homo sapiens
  Payload ID: 7156
  Gene Symbol: GPSM3
  Gene Name: G-protein signaling modulator 3
  ENSP ID: ENSP00000478357
MYIFESSTSLDLNPPLPTGTMPLPVPFLPSRGWRLRDPRKKRMVSRAPLRMRKAGPLQTPPLGLGDLLLHPLLLQGPATQPWDPARPPCSPCRLNSFWTWWLKPSPAAWRSRGPPSTPPKTPQA

SEQ ID NO: 36156 - protein, 124 aa, Homo sapiens; identical to SEQ ID NO: 36155
  Payload ID: 7156
  Gene Symbol: GPSM3
  Gene Name: G-protein signaling modulator 3
  ENSP ID: ENSP00000479164

SEQ ID NO: 36157 - protein, 124 aa, Homo sapiens; identical to SEQ ID NO: 36155
  Payload ID: 7156
  Gene Symbol: GPSM3
  Gene Name: G-protein signaling modulator 3
  ENSP ID: ENSP00000479690

SEQ ID NO: 36158 - protein, 124 aa, Homo sapiens; identical to SEQ ID NO: 36155
  Payload ID: 7156
  Gene Symbol: GPSM3
  Gene Name: G-protein signaling modulator 3
  ENSP ID: ENSP00000480670

SEQ ID NO: 36159 - protein, 124 aa, Homo sapiens; identical to SEQ ID NO: 36155
  Payload ID: 7156
  Gene Symbol: GPSM3
  Gene Name: G-protein signaling modulator 3
  ENSP ID: ENSP00000480790

SEQ ID NO: 36160 - protein, 124 aa, Homo sapiens; identical to SEQ ID NO: 36155
  Payload ID: 7156
  Gene Symbol: GPSM3
  Gene Name: G-protein signaling modulator 3
  ENSP ID: ENSP00000485009

SEQ ID NO: 36161 - protein, 618 aa, Homo sapiens
  Payload ID: 7157
  Gene Symbol: GRHL1
  Gene Name: grainyhead-like transcription factor 1
  Uniprot ID: Q9NZI5
  ENSP ID: ENSP00000324693
MTQEYDNKRPVLVLQNEALYPQRRSYTSEDEAWKSFLENPLTAATKAMMSINGDEDSAAALGLLYDYYKVPRERRSSTAKPEVEHPEPDHSKRNSIPIVTEQPLISAGENRVQVLKNVPFNIVLPHGNQLGIDKRGHLTAPDTTVTVSIATMPTHSIKTETQPHGFAVGIPPAVYHPEPTERVVVFDRNLNTDQFSSGAQAPNAQRRTPDSTFSETFKEGVQEVFFPSDLSLRMPGMNSEDYVFDSVSGNNFEYTLEASKSLRQKPGDSTMTYLNKGQFYPITLKEVSSSEGIHHPISKVRSVIMVVFAEDKSREDQLRHWKYWHSRQHTAKQRCIDIADYKESFNTISNIEEIAYNAISFTWDINDEAKVFISVNCLSTDFSSQKGVKGLPLNIQVDTYSYNNRSNKPVHRAYCQIKVFCDKGAERKIRDEERKQSKRKVSDVKVPLLPSHKRMDITVFKPFIDLDTQPVLFIPDVHFANLQRGTHVLPIASEELEGEGSVLKRGPYGTEDDFAVPPSTKLARIEEPKRVLLYVRKESEEVFDALMLKTPSLKGLMEAISDKYDVPHDKIGKIFKKCKKGILVNMDDNIVKHYSNEDTFQLQIEEAGGSYKLTLTEI

SEQ ID NO: 36162 - protein, 429 aa, Homo sapiens
  Payload ID: 7157
  Gene Symbol: GRHL1
  Gene Name: grainyhead-like transcription factor 1
  Uniprot ID: Q9NZI5
  ENSP ID: ENSP00000384209
MASLWESPQQCIILSPLSGWWFSIGISILTSSALVLKPQMLKGELQTRPSQRPSRKAFRRNNFEYTLEASKSLRQKPGDSTMTYLNKGQFYPITLKEVSSSEGIHHPISKVRSVIMVVFAEDKSREDQLRHWKYWHSRQHTAKQRCIDIADYKESFNTISNIEEIAYNAISFTWDINDEAKVFISVNCLSTDFSSQKGVKGLPLNIQVDTYSYNNRSNKPVHRAYCQIKVFCDKGAERKIRDEERKQSKRKVSDVKVPLLPSHKRMDITVFKPFIDLDTQPVLFIPDVHFANLQRGTHVLPIASEELEGEGSVLKRGPYGTEDDFAVPPSTKLARIEEPKRVLLYVRKESEEVFDALMLKTPSLKGLMEAISDKYDVPHDKIGKIFKKCKKGILVNMDDNIVKHYSNEDTFQLQIEEAGGSYKLTLTEI

SEQ ID NO: 36163 - protein, 93 aa, Homo sapiens
  Payload ID: 7157
  Gene Symbol: GRHL1
  Gene Name: grainyhead-like transcription factor 1
  ENSP ID: ENSP00000387521
MTQEYDNKRPVLVLQNEALYPQRRSYTSEDEAWKSFLENPLTAATKAMMSINGDEDSAAALGLLYDYYKVPRERRSSTAKPEVEHPEPDHSKR

SEQ ID NO: 36164 - protein, 511 aa, Homo sapiens
  Payload ID: 7157
  Gene Symbol: GRHL1
  Gene Name: grainyhead-like transcription factor 1
  Uniprot ID: Q9NZI5
  ENSP ID: ENSP00000418275
MTQEYDNKRPVLVLQNEALYPQRRSYTSEDEAWKSFLENPLTAATKAMMSINGDEDSAAALGLLYDYYKVPRERRSSTAKPEVEHPEPDHSKRNSIPIVTEQPLISAGENRVQVLKNVPFNIVLPHGNQLGIDKRGHLTAPDTTVTVSIATMPTHSIKTETQPHGFAVGIPPAVYHPEPTERVVVFDRNLNTDQFSSGAQAPNAQRRTPDSTFSETFKEGVQEVFFPSDLSLRMPGMNSEDYVFDSVSGNNFEYTLEASKSLRQKPGDSTMTYLNKGQFYPITLKEVSSSEGIHHPISKVRSVIMVVFAEDKSREDQLRHWKYWHSRQHTAKQRCIDIADYKESFNTISNIEEIAYNAISFTWDINDEAKVFISVNCLSTDFSSQKGVKGLPLNIQVDTYSYNNRSNKPVHRAYCQIKVFCDKGAERKIRDEERKQSKRKGKCPDPSSQFLMLKCHCFPLTSEWISQFSNPSLISILSLSSSFLTCTLPTCSGALMSFPLPLKNWRVKALS

SEQ ID NO: 36165 - protein, 72 aa, Homo sapiens
  Payload ID: 7157
  Gene Symbol: GRHL1
  Gene Name: grainyhead-like transcription factor 1
  ENSP ID: ENSP00000419831
MLKTPSLKGLMEAISDKYDVPHDKIGKIFKKCKKGILVNMDDNIVKHYSNEDTFQLQIEEAGGSYKLTLTEI

SEQ ID NO: 36166 - protein, 229 aa, Homo sapiens
  Payload ID: 7157
  Gene Symbol: GRHL1
  Gene Name: grainyhead-like transcription factor 1
  ENSP ID: ENSP00000420654
MRKWTKKGNCKRPVLVLQNEALYPQRRSYTSEDEAWKSFLENPLTAATKAMMSINGDEDSAAALGLLYDYYKVPRERRSSTAKPEVEHPEPDHSKRNSIPIVTEQPLISAGENRVQVLKNVPFNIVLPHGNQLGIDKRGHLTAPDTTVTVSIATMPTHSIKTETQPHGFAVGIPPAVYHPEPTERVVVFDRNLNTDQFSSGAQAPNAQRRTPDSTFSETFKEGVQEEQL

SEQ ID NO: 36167 - protein, 625 aa, Homo sapiens
  Payload ID: 7158
  Gene Symbol: GRHL2
  Gene Name: grainyhead-like transcription factor 2
  Uniprot ID: Q6ISB3
  ENSP ID: ENSP00000251808
MSQESDNNKRLVALVPMPSDPPFNTRRAYTSEDEAWKSYLENPLTAATKAMMSINGDEDSAAALGLLYDYYKVPRDKRLLSVSKASDSQEDQEKRNCLGTSEAQSNLSGGENRVQVLKTVPVNLSLNQDHLENSKREQYSISFPESSAIIPVSGITVVKAEDFTPVFMAPPVHYPRGDGEEQRVVIFEQTQYDVPSLATHSAYLKDDQRSTPDSTYSESFKDAATEKFRSASVGAEEYMYDQTSSGTFQYTLEATKSLRQKQGEGPMTYLNKGQFYAITLSETGDNKCFRHPISKVRSVVMVVFSEDKNRDEQLKYWKYWHSRQHTAKQRVLDIADYKESFNTIGNIEEIAYNAVSFTWDVNEEAKIFITVNCLSTDFSSQKGVKGLPLMIQIDTYSYNNRSNKPIHRAYCQIKVFCDKGAERKIRDEERKQNRKKGKGQASQTQCNSSSDGKLAAIPLQKKSDITYFKTMPDLHSQPVLFIPDVHFANLQRTGQVYYNTDDEREGGSVLVKRMFRPMEEEFGPVPSKQMKEEGTKRVLLYVRKETDDVFDALMLKSPTVKGLMEAISEKYGLPVEKIAKLYKKSKKGILVNMDDNIIEHYSNEDTFILNMESMVEGFKVTLMEI

SEQ ID NO: 36168 - protein, 609 aa, Homo sapiens
  Payload ID: 7158
  Gene Symbol: GRHL2
  Gene Name: grainyhead-like transcription factor 2
  Uniprot ID: Q6ISB3
  ENSP ID: ENSP00000379260
MPSDPPFNTRRAYTSEDEAWKSYLENPLTAATKAMMSINGDEDSAAALGLLYDYYKVPRDKRLLSVSKASDSQEDQEKRNCLGTSEAQSNLSGGENRVQVLKTVPVNLSLNQDHLENSKREQYSISFPESSAIIPVSGITVVKAEDFTPVFMAPPVHYPRGDGEEQRVVIFEQTQYDVPSLATHSAYLKDDQRSTPDSTYSESFKDAATEKFRSASVGAEEYMYDQTSSGTFQYTLEATKSLRQKQGEGPMTYLNKGQFYAITLSETGDNKCFRHPISKVRSVVMVVFSEDKNRDEQLKYWKYWHSRQHTAKQRVLDIADYKESFNTIGNIEEIAYNAVSFTWDVNEEAKIFITVNCLSTDFSSQKGVKGLPLMIQIDTYSYNNRSNKPIHRAYCQIKVFCDKGAERKIRDEERKQNRKKGKGQASQTQCNSSSDGKLAAIPLQKKSDITYFKTMPDLHSQPVLFIPDVHFANLQRTGQVYYNTDDEREGGSVLVKRMFRPMEEEFGPVPSKQMKEEGTKRVLLYVRKETDDVFDALMLKSPTVKGLMEAISEKYGLPVEKIAKLYKKSKKGILVNMDDNIIEHYSNEDTFILNMESMVEGFKVTLMEI

SEQ ID NO: 36169 - protein, 6 aa, Homo sapiens
  Payload ID: 7158
  Gene Symbol: GRHL2
  Gene Name: grainyhead-like transcription factor 2
  ENSP ID: ENSP00000430473
MSQESD

SEQ ID NO: 36170 - protein, 607 aa, Homo sapiens
  Payload ID: 7159
  Gene Symbol: GRHL3
  Gene Name: grainyhead-like transcription factor 3
  Uniprot ID: Q8TE85
  ENSP ID: ENSP00000236255
MWMNSILPIFLFRSVRLLKNDPVNLQKFSYTSEDEAWKTYLENPLTAATKAMMRVNGDDDSVAALSFLYDYYMGPKEKRILSSSTGGRNDQGKRYYHGMEYETDLTPLESPTHLMKFLTENVSGTPEYPDLLKKNNLMSLEGALPTPGKAAPLPAGPSKLEAGSVDSYLLPTTDMYDNGSLNSLFESIHGVPPTQRWQPDSTFKDDPQESMLFPDILKTSPEPPCPEDYPSLKSDFEYTLGSPKAIHIKSGESPMAYLNKGQFYPVTLRTPAGGKGLALSSNKVKSVVMVVFDNEKVPVEQLRFWKHWHSRQPTAKQRVIDVADCKENFNTVEHIEEVAYNALSFVWNVNEEAKVFIGVNCLSTDFSSQKGVKGVPLNLQIDTYDCGLGTERLVHRAVCQIKIFCDKGAERKMRDDERKQFRRKVKCPDSSNSGVKGCLLSGFRGNETTYLRPETDLETPPVLFIPNVHFSSLQRSGGAAPSAGPSSSNRLPLKRTCSPFTEEFEPLPSKQAKEGDLQRVLLYVRRETEEVFDALMLKTPDLKGLRNAISEKYGFPEENIYKVYKKCKRGILVNMDNNIIQHYSNHVAFLLDMGELDGKIQIILKEL

SEQ ID NO: 36171 - protein, 626 aa, Homo sapiens
  Payload ID: 7159
  Gene Symbol: GRHL3
  Gene Name: grainyhead-like transcription factor 3
  Uniprot ID: Q8TE85
  ENSP ID: ENSP00000288955
MSNELDFRSVRLLKNDPVNLQKFSYTSEDEAWKTYLENPLTAATKAMMRVNGDDDSVAALSFLYDYYMGPKEKRILSSSTGGRNDQGKRYYHGMEYETDLTPLESPTHLMKFLTENVSGTPEYPDLLKKNNLMSLEGALPTPGKAAPLPAGPSKLEAGSVDSYLLPTTDMYDNGSLNSLFESIHGVPPTQRWQPDSTFKDDPQESMLFPDILKTSPEPPCPEDYPSLKSDFEYTLGSPKAIHIKSGESPMAYLNKGQFYPVTLRTPAGGKGLALSSNKVKSVVMVVFDNEKVPVEQLRFWKHWHSRQPTAKQRVIDVADCKENFNTVEHIEEVAYNALSFVWNVNEEAKVFIGVNCLSTDFSSQKGVKGVPLNLQIDTYDCGLGTERLVHRAVCQIKIFCDKGAERKMRDDERKQFRRKVKCPDSSNSGVKGCLLSGFRGNETTYLRPETDLETPPVLFIPNVHFSSLQRSGGAAPSAGPSSSNRLPLKRTCSPFTEEFEPLPSKQAKEGDLQRVLLYVRRETEEVFDALMLKTPDLKGLRNAISEKYGFPEENIYKVYKKCKRGETSLLHPRLSRHPPPDCLECSHPVTQVRNMGFGDGFWRQRDLDSNPSPTTVNSLHFTVNSE

SEQ ID NO: 36172 - protein, 556 aa, Homo sapiens
  Payload ID: 7159
  Gene Symbol: GRHL3
  Gene Name: grainyhead-like transcription factor 3
  Uniprot ID: Q8TE85
  ENSP ID: ENSP00000348333
MMRVNGDDDSVAALSFLYDYYMGPKEKRILSSSTGGRNDQGKRYYHGMEYETDLTPLESPTHLMKFLTENVSGTPEYPDLLKKNNLMSLEGALPTPGKAAPLPAGPSKLEAGSVDSYLLPTTDMYDNGSLNSLFESIHGVPPTQRWQPDSTFKDDPQESMLFPDILKTSPEPPCPEDYPSLKSDFEYTLGSPKAIHIKSGESPMAYLNKGQFYPVTLRTPAGGKGLALSSNKVKSVVMVVFDNEKVPVEQLRFWKHWHSRQPTAKQRVIDVADCKENFNTVEHIEEVAYNALSFVWNVNEEAKVFIGVNCLSTDFSSQKGVKGVPLNLQIDTYDCGLGTERLVHRAVCQIKIFCDKGAERKMRDDERKQFRRKVKCPDSSNSGVKGCLLSGFRGNETTYLRPETDLETPPVLFIPNVHFSSLQRSGGAAPSAGPSSSNRLPLKRTCSPFTEEFEPLPSKQAKEGDLQRVLLYVRRETEEVFDALMLKTPDLKGLRNAISEKYGFPEENIYKVYKKCKRGILVNMDNNIIQHYSNHVAFLLDMGELDGKIQIILKEL

SEQ ID NO: 36173 - protein, 602 aa, Homo sapiens
  Payload ID: 7159
  Gene Symbol: GRHL3
  Gene Name: grainyhead-like transcription factor 3
  Uniprot ID: Q8TE85
  ENSP ID: ENSP00000354943
MSNELDFRSVRLLKNDPVNLQKFSYTSEDEAWKTYLENPLTAATKAMMRVNGDDDSVAALSFLYDYYMGPKEKRILSSSTGGRNDQGKRYYHGMEYETDLTPLESPTHLMKFLTENVSGTPEYPDLLKKNNLMSLEGALPTPGKAAPLPAGPSKLEAGSVDSYLLPTTDMYDNGSLNSLFESIHGVPPTQRWQPDSTFKDDPQESMLFPDILKTSPEPPCPEDYPSLKSDFEYTLGSPKAIHIKSGESPMAYLNKGQFYPVTLRTPAGGKGLALSSNKVKSVVMVVFDNEKVPVEQLRFWKHWHSRQPTAKQRVIDVADCKENFNTVEHIEEVAYNALSFVWNVNEEAKVFIGVNCLSTDFSSQKGVKGVPLNLQIDTYDCGLGTERLVHRAVCQIKIFCDKGAERKMRDDERKQFRRKVKCPDSSNSGVKGCLLSGFRGNETTYLRPETDLETPPVLFIPNVHFSSLQRSGGAAPSAGPSSSNRLPLKRTCSPFTEEFEPLPSKQAKEGDLQRVLLYVRRETEEVFDALMLKTPDLKGLRNAISEKYGFPEENIYKVYKKCKRGILVNMDNNIIQHYSNHVAFLLDMGELDGKIQIILKEL

SEQ ID NO: 36174 - protein, 81 aa, Homo sapiens
  Payload ID: 7159
  Gene Symbol: GRHL3
  Gene Name: grainyhead-like transcription factor 3
  ENSP ID: ENSP00000431290
MMRVNGDDDSVAALSFLYDYYMGPKEKRILSSSTGGRNDQGKRYYHGMEYETDLTPLESPTHLMKFLTENVSGTPEYPDLL

SEQ ID NO: 36175 - protein, 52 aa, Homo sapiens
  Payload ID: 7159
  Gene Symbol: GRHL3
  Gene Name: grainyhead-like transcription factor 3
  ENSP ID: ENSP00000435130
MWMNSILPIFLVPRRSGYCPPALGAGMTKERGTTMAWNMRRTSLPLKAPHTS

SEQ ID NO: 36176 - protein, 713 aa, Homo sapiens
  Payload ID: 7160
  Gene Symbol: GRAMD1A
  Gene Name: GRAM domain containing 1A
  Uniprot ID: Q96CP6
  ENSP ID: ENSP00000439267
MFDTTPHSGRSTPSSSPSLRKRLQLLPPSRPPPEPEPGTMVEKGSDSSSEKGGVPGTPSTQSLGSRNFIRNSKMLSPTYKQRNEDFRKLFSKLPEAERLIVDYSCALQREILLQGRLYLSENWICFYSNIFRWETTISIQLKEVTCLKKEKTAKLIPNAIQICTESEKHFFTSFGARDRCFLLIFRLWQNALLEKTLSPRELWHLVHQCYGSELGLTSEDEDYVSPLQLNGLGTPKEVGDVIALSDITSSGAADRSQEPSPVGSRRGHVTPNLSRASSDADHGAEEDKEEQVDSQPDASSSQTVTPVAEPPSTEPTQPDGPTTLGPLDLLPSEELLTDTSNSSSSTGEEADLAALLPDLSGRLLINSVFHVGAERLQQMLFSDSPFLQGFLQQCKFTDVTLSPWSGDSKCHQRRVLTYTIPISNPLGPKSASVVETQTLFRRGPQAGGCVVDSEVLTQGIPYQDYFYTAHRYCILGLARNKARLRVSSEIRYRKQPWSLVKSLIEKNSWSGIEDYFHHLERELAKAEKLSLEEGGKDARGLLSGLRRRKRPLSWRAHGDGPQHPDPDPCARAGIHTSGSLSSRFSEPSVDQGPGAGIPSALVLISIVLIILIALNVLLFYRLWSLERTAHTFESWHSLALAKGKFPQTATEWAEILALQKQFHSVEVHKWRQILRASVELLDEMKFSLEKLHQGITVSDPPFDTQPRPDDSFS

SEQ ID NO: 36177 - protein, 724 aa, Homo sapiens
  Payload ID: 7160
  Gene Symbol: GRAMD1A
  Gene Name: GRAM domain containing 1A
  Uniprot ID: Q96CP6
  ENSP ID: ENSP00000441032
MFDTTPHSGRSTPSSSPSLRKRLQLLPPSRPPPEPEPGTMVEKGSDSSSEKGGVPGTPSTQSLGSRNFIRNSKKMQSWYSMLSPTYKQRNEDFRKLFSKLPEAERLIVDYSCALQREILLQGRLYLSENWICFYSNIFRWETTISIQLKEVTCLKKEKTAKLIPNAIQICTESEKHFFTSFGARDRCFLLIFRLWQNALLEKTLSPRELWHLVHQCYGSELGLTSEDEDYVSPLQLNGLGTPKEVGDVIALSDITSSGAADRSQEPSPVGSRRGHVTPNLSRASSDADHGAEEDKEEQVDSQPDASSSQTVTPVAEPPSTEPTQPDGPTTLGPLDLLPSEELLTDTSNSSSSTGEEADLAALLPDLSGRLLINSVFHVGAERLQQMLFSDSPFLQGFLQQCKFTDVTLSPWSGDSKCHQRRVLTYTIPISNPLGPKSASVVETQTLFRRGPQAGGCVVDSEVLTQGIPYQDYFYTAHRYCILGLARNKARLRVSSEIRYRKQPWSLVKSLIEKNSWSGIEDYFHHLERELAKAEKLSLEEGGKDARGLLSGLRRRKRPLSWRAHGDGPQHPDPDPCARAGIHTSGSLSSRFSEPSVDQGPGAGIPSALVLISIVICVSLIILIALNVLLFYRLWSLERTAHTFESWHSLALAKGKFPQTATEWAEILALQKQFHSVEVHKWRQILRASVELLDEMKFSLEKLHQGITVSDPPFDTQPRPDDSFS

SEQ ID NO: 36178 - protein, 807 aa, Homo sapiens
  Payload ID: 7160
  Gene Symbol: GRAMD1A
  Gene Name: GRAM domain containing 1A
  ENSP ID: ENSP00000470220
MDDVLPLMPWETLLAQGSPQGSPDLPAGQRKQQPQGDRAQGLASESWKLLEVPIIHITPSSDGESPACTPTPRRRQQQRMPDPQSLSQDSTTPHSGRSTPSSSPSLRKRLQLLPPSRPPPEPEPGTMVEKGSDSSSEKGGVPGTPSTQSLGSRNFIRNSKKMQSWYSMLSPTYKQRNEDFRKLFSKLPEAERLIVDYSCALQREILLQGRLYLSENWICFYSNIFRWETTISIQLKEVTCLKKEKTAKLIPNAIQICTESEKHFFTSFGARDRCFLLIFRLWQNALLEKTLSPRELWHLVHQCYGSELGLTSEDEDYVSPLQLNGLGTPKEVGDVIALSDITSSGAADRSQEPSPVGSRRGHVTPNLSRASSDADHGAEEDKEEQVDSQPDASSSQTVTPVAEPPSTEPTQPDGPTTLGPLDLLPSEELLTDTSNSSSSTGEEADLAALLPDLSGRLLINSVFHVGAERLQQMLFSDSPFLQGFLQQCKFTDVTLSPWSGDSKCHQRRVLTYTIPISNPLGPKSASVVETQTLFRRGPQAGGCVVDSEVLTQGIPYQDYFYTAHRYCILGLARNKARLRVSSEIRYRKQPWSLVKSLIEKNSWSGIEDYFHHLERELAKAEKLSLEEGGKDARGLLSGLRRRKRPLSWRAHGDGPQHPDPDPCARAGIHTSGSLSSRFSEPSVDQGPGAGIPSALVLISIVLIILIALNVLLFYRLWSLERTAHTFESWHSLALAKGKFPQTATEWAEILALQKQFHSVEVHKWRQILRASVELLDEMKFSLEKLHQGITVSDPPFDTQPRPDDSFS

SEQ ID NO: 36179 - protein, 222 aa, Homo sapiens
  Payload ID: 7160
  Gene Symbol: GRAMD1A
  Gene Name: GRAM domain containing 1A
  ENSP ID: ENSP00000471290
MFDTTPHSGRSTPSSSPSLRKRLQLLPPSRPPPEPEPGTMVEKGSDSSSEKGGVPGTPSTQSLGSRNFIRNSKKMQSWYSMLSPTYKQRNEDFRKLFSKLPEAERLIVDYSCALQREILLQGRLYLSENWICFYSNIFRWETTISIQLKEVTCLKKEKTAKLIPNAIQICTESEKHFFTSFGARDRCFLLIFRLWQNALLEKDPQGSGRCDRPERHHLLGGS

SEQ ID NO: 36180 - protein, 205 aa, Homo sapiens
  Payload ID: 7160
  Gene Symbol: GRAMD1A
  Gene Name: GRAM domain containing 1A
  ENSP ID: ENSP00000474401
MFDTTPHSGRSTPSSSPSLRKRLQLLPPSRPPPEPEPGTMVEKGSDSSSEKGGVPGTPSTQSLGSRNFIRNSKKMQSWYSMLSPTYKQRNEDFRKLFSKLPEAERLIVDYSCALQREILLQGRLYLSENWICFYSNIFRWETTISIQLKEVTCLKKEKTAKLIPNAIQICTESEKVTEDPVTGPRGPPLSRPPPPNMQSPICSAP

SEQ ID NO: 36181 - protein, 738 aa, Homo sapiens [sequence omitted]

SEQ ID NO: 36182 - protein, 425 aa, Homo sapiens
  Payload ID: 7161
  Gene Symbol: GRAMD1B
  Gene Name: GRAM domain containing 1B
  Uniprot ID: Q3KR37
  ENSP ID: ENSP00000388458
MPTSSAVLLRVLSIPLLTVLILARDLSALGGCPWGPLPLRCHCLLPDPLFCAGEVQAFYEDLSGRQYVNEVFNFSVDKLYDLLFTNSPFQRDFMEQRRFSDIIFHPWKKEENGNQSRVILYTITLTNPLAPKTATVRETQTMYKASQESECYVIDAEVLTHDVPYHDYFYTINRYTLTRVARNKSRLRVSTELRYRKQPWGLVKTFIEKNFWSGLEDYFRHLESELAKTESTYLAEMHRQSPKEKASKTTTVRRRKRPHAHLRVPHLEEVMSPVTTPTDEDVGHRIKHVAGSTQTRHIPEDTPNGFHLQSVSKLLLVISCVLVLLVILNMMLFYKLWMLEYTTQTLTAWQGLRLQERLPQSQTEWAQLLESQQKYHDTELQKWREIIKSSVMLLDQMKDSLINLQNGIRSRDYTSESEEKRNRYH

SEQ ID NO: 36183 - protein, 745 aa, Homo sapiens
  Payload ID: 7161
  Gene Symbol: GRAMD1B
  Gene Name: GRAM domain containing 1B
  Uniprot ID: Q3KR37
  ENSP ID: ENSP00000402457
MKGFKLSCTASNSNRSTPACSPILRKRSRSPTPQNQDGDTMVEKGSDHSSDKSPSTPEQGVQRSCSSQSGRSGGKNSKSHKRLSKKSQSWYNVLSPTYKQRNEDFRKLFKQLPDTERLIVDYSCALQRDILLQGRLYLSENWICFYSNIFRWETLLTVRLKDICSMTKEKTARLIPNAIQVCTDSEKHFFTSFGARDRTYMMMFRLWQNALLEKPLCPKELWHFVHQCYGNELGLTSDDEDYVPPDDDFNTMGYCEEIPVEENEVNDSSSKSSIETKPDASPQLPKKSITNSTLTSTGSSEAPVSFDGLPLEEEALEGDGSLEKELAIDNIMGEKIEMIAPVNSPSLDFNDNEDIPTELSDSSDTHDEGEVQAFYEDLSGRQYVNEVFNFSVDKLYDLLFTNSPFQRDFMEQRRFSDIIFHPWKKEENGNQSRVILYTITLTNPLAPKTATVRETQTMYKASQESECYVIDAEVLTHDVPYHDYFYTINRYTLTRVARNKSRLRVSTELRYRKQPWGLVKTFIEKNFWSGLEDYFRHLESELAKTESTYLAEMHRQSPKEKASKTTTVRRRKRPHAHLRVPHLEEVMSPVTTPTDEDVGHRIKHVAGSTQTRHIPEDTPNGFHLQSVSKLLLVISCVICFSLVLLVILNMMLFYKLWMLEYTTQTLTAWQGLRLQERLPQSQTEWAQLLESQQKYHDTELQKWREIIKSSVMLLDQMKDSLINLQNGIRSRDYTSESEEKRNRYH

SEQ ID NO: 36184 - protein, 698 aa, Homo sapiens
  Payload ID: 7161
  Gene Symbol: GRAMD1B
  Gene Name: GRAM domain containing 1B
  Uniprot ID: Q3KR37
  ENSP ID: ENSP00000432987
MVEKGSDHSSDKSPSTPEQGVQRSCSSQSGRSGGKNSKKSQSWYNVLSPTYKQRNEDFRKLFKQLPDTERLIVDYSCALQRDILLQGRLYLSENWICFYSNIFRWETLLTVRLKDICSMTKEKTARLIPNAIQVCTDSEKHFFTSFGARDRTYMMMFRLWQNALLEKPLCPKELWHFVHQCYGNELGLTSDDEDYVPPDDDFNTMGYCEEIPVEENEVNDSSSKSSIETKPDASPQLPKKSITNSTLTSTGSSEAPVSFDGLPLEEEALEGDGSLEKELAIDNIMGEKIEMIAPVNSPSLDFNDNEDIPTELSDSSDTHDEGEVQAFYEDLSGRQYVNEVFNFSVDKLYDLLFTNSPFQRDFMEQRRFSDIIFHPWKKEENGNQSRVILYTITLTNPLAPKTATVRETQTMYKASQESECYVIDAEVLTHDVPYHDYFYTINRYTLTRVARNKSRLRVSTELRYRKQPWGLVKTFIEKNFWSGLEDYFRHLESELAKTESTYLAEMHRQSPKEKASKTTTVRRRKRPHAHLRVPHLEEVMSPVTTPTDEDVGHRIKHVAGSTQTRHIPEDTPNGFHLQSVSKLLLVISCVICFSLVLLVILNMMLFYKLWMLEYTTQTLTAWQGLRLQERLPQSQTEWAQLLESQQKYHDTELQKWREIIKSSVMLLDQMKDSLINLQNGIRSRDYTSESEEKRNRYH

SEQ ID NO: 36185 - protein, 441 aa, Homo sapiens
  Payload ID: 7161
  Gene Symbol: GRAMD1B
  Gene Name: GRAM domain containing 1B
  ENSP ID: ENSP00000434214
MASSTASNSNRSTPACSPILRKRSRSPTPQNQDGDTMVEKGSDHSSDKSPSTPEQGVQRSCSSQSGRSGGKNSKKSQSWYNVLSPTYKQRNEDFRKLFKQLPDTERLIVDYSCALQRDILLQGRLYLSENWICFYSNIFRWETLLTVRLKDICSMTKEKTARLIPNAIQVCTDSEKHFFTSFGARDRTYMMMFRLWQNALLEKPLCPKELWHFVHQCYGNELGLTSDDEDYVPPDDDFNTMGYCEEIPVEENEVNDSSSKSSIETKPDASPQLPKKSITNSTLTSTGSSEAPVSFDGLPLEEEALEGDGSLEKELAIDNIMGEKIEMIAPVNSPSLDFNDNEDIPTELSDSSDTHDEGEVQAFYEDLSGRQYVNEVFNFSVDKLYDLLFTNSPFQRDFMEQRRFSDIIFHPWKKEENGNQSRVILYTITLTNPLAPKTATV

SEQ ID NO: 36186 - protein, 738 aa, Homo sapiens
  Payload ID: 7161
  Gene Symbol: GRAMD1B
  Gene Name: GRAM domain containing 1B
  Uniprot ID: Q3KR37
  ENSP ID: ENSP00000436500
MKGFKLSCTASNSNRSTPACSPILRKRSRSPTPQNQDGDTMVEKGSDHSSDKSPSTPEQGVQRSCSSQSGRSGGKNSKKSQSWYNVLSPTYKQRNEDFRKLFKQLPDTERLIVDYSCALQRDILLQGRLYLSENWICFYSNIFRWETLLTVRLKDICSMTKEKTARLIPNAIQVCTDSEKHFFTSFGARDRTYMMMFRLWQNALLEKPLCPKELWHFVHQCYGNELGLTSDDEDYVPPDDDFNTMGYCEEIPVEENEVNDSSSKSSIETKPDASPQLPKKSITNSTLTSTGSSEAPVSFDGLPLEEEALEGDGSLEKELAIDNIMGEKIEMIAPVNSPSLDFNDNEDIPTELSDSSDTHDEGEVQAFYEDLSGRQYVNEVFNFSVDKLYDLLFTNSPFQRDFMEQRRFSDIIFHPWKKEENGNQSRVILYTITLTNPLAPKTATVRETQTMYKASQESECYVIDAEVLTHDVPYHDYFYTINRYTLTRVARNKSRLRVSTELRYRKQPWGLVKTFIEKNFWSGLEDYFRHLESELAKTESTYLAEMHRQSPKEKASKTTTVRRRKRPHAHLRVPHLEEVMSPVTTPTDEDVGHRIKHVAGSTQTRHIPEDTPNGFHLQSVSKLLLVISCVICFSLVLLVILNMMLFYKLWMLEYTTQTLTAWQGLRLQERLPQSQTEWAQLLESQQKYHDTELQKWREIIKSSVMLLDQMKDSLINLQNGIRSRDYTSESEEKRNRYH

SEQ ID NO: 36187 - protein, 166 aa, Homo sapiens
  Payload ID: 7161
  Gene Symbol: GRAMD1B
  Gene Name: GRAM domain containing 1B
  ENSP ID: ENSP00000488382
MVEKGSDHSSDKSPSTPEQGVQRSCSSQSGRSGGKNSKKSQSWYNVLSPTYKQRNEDFRKLFKQLPDTERLIVDYSCALQRDILLQGRLYLSENWICFYSNIFRWETLLTVRLKDICSMTKEKTARLIPNAIQVCTDSEKHFFTSFGARDRTYMMMFRLWQNALLE

SEQ ID NO: 36188 - protein, 171 aa, Homo sapiens
  Payload ID: 7161
  Gene Symbol: GRAMD1B
  Gene Name: GRAM domain containing 1B
  ENSP ID: ENSP00000488613
MSFLSSQQSSQQSSHDDDSSRFLSPRAREESTASNSNRSTPACSPILRKRSRSPTPQNQDGDTMVEKGSDHSSDKSPSTPEQGVQRSCSSQSGRSGGKNSKKSQSWYNVLSPTYKQRNEDFRKLFKQLPDTERLIVDYSCALQRDILLQGRLYLSENWICFYSNIFRWETL

SEQ ID NO: 36189 - protein, 108 aa, Homo sapiens
  Payload ID: 7161
  Gene Symbol: GRAMD1B
  Gene Name: GRAM domain containing 1B
  ENSP ID: ENSP00000488714
MVEKGSDHSSDKSPSTPEQGVQRSCSSQSGRSGGKNSKKSQSWYNVLSPTYKQRNEDFRKLFKQLPDTERLIVDYSCALQRDILLQGRLYLSENWICFYSNIFRWETL

SEQ ID NO: 36190 - protein, 662 aa, Homo sapiens
  Payload ID: 7162
  Gene Symbol: GRAMD1C
  Gene Name: GRAM domain containing 1C
  Uniprot ID: Q8IYS0
  ENSP ID: ENSP00000350881
MEGAPTVRQVMNEGDSSLATDLQEDVEENPSPTVEENNVVVKKQGPNLHNWSGDWSFWISSSTYKDRNEEYRRQFTHLPDTERLIADYACALQRDILLQGRLYLSENWLCFYSNIFRWETTISIALKNITFMTKEKTARLIPNAIQIVTESEKFFFTSFGARDRSYLSIFRLWQNVLLDKSLTRQEFWQLLQQNYGTELGLNAEEMENLSLSIEDVQPRSPGRSSLDDSGERDEKLSKSISFTSESISRVSETESFDGNSSKGGLGKEESQNEKQTKKSLLPTLEKKLTRVPSKSLDLNKNEYLSLDKSSTSDSVDEENVPEKDLHGRLFINRIFHISADRMFELLFTSSRFMQKFASSRNIIDVVSTPWTAELGGDQLRTMTYTIVLNSPLTGKCTAATEKQTLYKESREARFYLVDSEVLTHDVPYHDYFYTVNRYCIIRSSKQKCRLRVSTDLKYRKQPWGLVKSLIEKNSWSSLEDYFKQLESDLLIEESVLNQAIEDPGKLTGLRRRRRTFNRTAETVPKLSSQHSSGDVGLGAKGDITGKKKEMENYNVTLIVVMSIFVLLLVLLNVTLFLKLSKIEHAAQSFYRLRLQEEKSLNLASDMVSRAETIQKNKDQAHRLKGVLRDSIVMLEQLKSSLIMLQKTFDLLNKNKTGMAVES

SEQ ID NO: 36191 - protein, 457 aa, Homo sapiens
  Payload ID: 7162
  Gene Symbol: GRAMD1C
  Gene Name: GRAM domain containing 1C
  Uniprot ID: Q8IYS0
  ENSP ID: ENSP00000408135
MENLSLSIEDVQPRSPGRSSLDDSGERDEKLSKSISFTSESISRVSETESFDGNSSKGGLGKEESQNEKQTKKSLLPTLEKKLTRVPSKSLDLNKNEYLSLDKSSTSDSVDEENVPEKDLHGRLFINRIFHISADRMFELLFTSSRFMQKFASSRNIIDVVSTPWTAELGGDQLRTMTYTIVLNSPLTGKCTAATEKQTLYKESREARFYLVDSEVLTHDVPYHDYFYTVNRYCIIRSSKQKCRLRVSTDLKYRKQPWGLVKSLIEKNSWSSLEDYFKQLESDLLIEESVLNQAIEDPGKLTGLRRRRRTFNRTAETVPKLSSQHSSGDVGLGAKGDITGKKKEMENYNVTLIVVMSIFVLLLVLLNVTLFLKLSKIEHAAQSFYRLRLQEEKSLNLASDMVSRAETIQKNKDQAHRLKGVLRDSIVMLEQLKSSLIMLQKTFDLLNKNKTGMAVES

SEQ ID NO: 36192 - protein, 206 aa, Homo sapiens
  Payload ID: 7162
  Gene Symbol: GRAMD1C
  Gene Name: GRAM domain containing 1C
  ENSP ID: ENSP00000417936
MEGAPTVRQVMNEGDSSLATDLQEDVEENPSPTVEENNVVVKKQGPNLHNWSGDWSFWISSSTYKDRNEEYRRQFTHLPDTERLIADYACALQRDILLQGRLYLSENWLCFYSNIFRWETTFFFTSFGARDRSYLSIFRLWQNVLLDKSLTRQEFWQLLQQNYGTELGLNAEEMENLSLSIEDVQPRSPKMRNRPKRVSYQLWKRS

SEQ ID NO: 36193 - protein, 380 aa, Homo sapiens
  Payload ID: 7162
  Gene Symbol: GRAMD1C
  Gene Name: GRAM domain containing 1C
  ENSP ID: ENSP00000418302
MENLSLSIEDVQPRSPGRSSLDDSGERDEKLSKSISFTSESISRVSETESFDGNSSKGGLGKEESQNEKQTKKSLLPTLEKKLTRVPSKSLDLNKNEYLSLDKSSTSDSVDEENVPEKDLHGRLFINRIFHISADRMFELLFTSSRFMQKFASSRNIIDVVSTPWTAELGGDQLRTMTYTIVLNSPLTGKCTAATEKQTLYKESREARFYLVDSEVLTHDVPYHDYFYTVNRYCIIRSSKQKCRLRVSTDLKYRKQPWGLVKSLIEKNSWSSLEDYFKQLESDLLIEESVLNQAIEDPGKLTGLRRRRRTFNRTAETVPKLSSQHSSGDVGLGAKGDITGKKKEMENYNVTLIVVMSIFVLLLVLLNVTLFLKLSKIEHA

SEQ ID NO: 36194 - protein, 89 aa, Homo sapiens
  Payload ID: 7162
  Gene Symbol: GRAMD1C
  Gene Name: GRAM domain containing 1C
  ENSP ID: ENSP00000418501
MEGAPTVRQVMNEGDSSLATDLQEDVEENPSPTVEENNVVVKKQGPNLHNWSGDWSFWISSSTYKDRNEEYRRQFTHLPDTERLIAEPD

SEQ ID NO: 36195 - protein, 495 aa, Homo sapiens
  Payload ID: 7162
  Gene Symbol: GRAMD1C
  Gene Name: GRAM domain containing 1C
  ENSP ID: ENSP00000419132
MSFQCHICAYHTHSLTRQEFWQLLQQNYGTELGLNAEEMENLSLSIEDVQPRSPGRSSLDDSGERDEKLSKSISFTSESISRVSETESFDGNSSKGGLGKEESQNEKQTKKSLLPTLEKKLTRVPSKSLDLNKNEYLSLDKSSTSDSVDEENVPEKDLHGRLFINRIFHISADRMFELLFTSSRFMQKFASSRNIIDVVSTPWTAELGGDQLRTMTYTIVLNSPLTGKCTAATEKQTLYKESREARFYLVDSEVLTHDVPYHDYFYTVNRYCIIRSSKQKCRLRVSTDLKYRKQPWGLVKSLIEKNSWSSLEDYFKQLESDLLIEESVLNQAIEDPGKLTGLRRRRRTFNRTAETVPKLSSQHSSGDVGLGAKGDITGKKKEMENYNVTLIVVMSIFVLLLVLLNVTLFLKLSKIEHAAQSFYRLRLQEEKSLNLASDMVSRAETIQKNKDQAHRLKGVLRDSIVMLEQLKSSLIMLQKTFDLLNKNKTGMAVES

SEQ ID NO: 36196 - protein, 44 aa, Homo sapiens
  Payload ID: 7162
  Gene Symbol: GRAMD1C
  Gene Name: GRAM domain containing 1C
  ENSP ID: ENSP00000419571
MNIFLWTKAALQILLMKKMFLRKIFMEDFLSTVFFISVLTECLN

SEQ ID NO: 36197 - protein, 354 aa, Homo sapiens
  Payload ID: 7163
  Gene Symbol: GRAMD2
  Gene Name: GRAM domain containing 2
  Uniprot ID: Q8IUY3
  ENSP ID: ENSP00000311657
MTALSRSEATEEGGNQQMHRKTASLNSPVSCKEKPDRVEEPPDYSLHWPEGLKGEEIKKCGREGITLNKYNQQYHKLFKDVPLEEVVLKVCSCALQRDFLLQGRLYISPNWLCFHASLFGKDIKVVIPVVSVQMIKKHKMARLLPNGLAITTNTSQKYIFVSLLSRDSVYDLLRRVCTHLQPSSKKSLSVREFSGEPESLEVLIPEMKWRKVCPSSRSLSLPDNIPCIPPSSVDSTDSFFPSRKPPMSEKSRAQVASENGGRWAWPMPGWGPACPKKMPNCSPTAKNAVYEEDELEEEPRSTGELRLWDYRLLKVFFVLICFLVMSSSYLAFRISRLEQQLCSLSWDDPVPGHR

SEQ ID NO: 36198 - protein, 145 aa, Homo sapiens
  Payload ID: 7163
  Gene Symbol: GRAMD2
  Gene Name: GRAM domain containing 2
  ENSP ID: ENSP00000457088
MSNQQMHRKTASLNSPVSCKEKPDRVEEPPDYSLHWPEGLKGEEIKKCGREGITLNKYNQQYHKLFKDVPLEEVVLKVCSCALQRDFLLQGRLYISPNWLCFHASLFGKDIKVVIPVVSVQMIKKHKMARLLPNGLAITTNTSQK

SEQ ID NO: 36199 - protein, 47 aa, Homo sapiens
  Payload ID: 7163
  Gene Symbol: GRAMD2
  Gene Name: GRAM domain containing 2
  ENSP ID: ENSP00000457155
MSNQQMHRKTASLNSPVSCKEKPDRVEEPPDYSAIPLSQCGSLSQVR

SEQ ID NO: 36200 - protein, 169 aa, Homo sapiens
  Payload ID: 7163
  Gene Symbol: GRAMD2
  Gene Name: GRAM domain containing 2
  ENSP ID: ENSP00000457383
MGLFFPSNQQMHRKTASLNSPVSCKEKPDRVEEPPDYSLHWPEGLKGEEIKKCGREGITLNKYNQQYHKLFKDVPLEEVVLKVCSCALQRDFLLQGRLYISPNWLCFHASLFGKDIKVVIPVVSVQMIKKHKMARLLPNGLAITTNTSQKYIFVSLLSRDSVYDLLRRV

SEQ ID NO: 36201 - protein, 211 aa, Homo sapiens
  Payload ID: 7163
  Gene Symbol: GRAMD2
  Gene Name: GRAM domain containing 2
  ENSP ID: ENSP00000457660
MLRGNQQMHRKTASLNSPVSCKEKPDRVEEPPDYSLHWPEGLKGEEIKKCGREGITLNKYNQQYHKLFKDVPLEEVVLKVCSCALQRDFLLQGRLYISPNWLCFHASLFGKDIKVVIPVVSVQMIKKHKMARLLPNGLAITTNTSQKYIFVSLLSRDSVYDLLRRVCTHLQPSSKKSLSVREFSGEPESLEVLIPEMKWRKVCPSSRSLSL

SEQ ID NO: 36202 - protein, 432 aa, Homo sapiens
  Payload ID: 7164
  Gene Symbol: GRAMD3
  Gene Name: GRAM domain containing 3
  Uniprot ID: Q96HH9
  ENSP ID: ENSP00000285689
MTELQQDVEDTKPAKVLGKRESKLGSAHSEAENGVEEKKKACRSPTAQSPTPSVEADSPDQKKIISLWSKSSFDGASLASDKNDCKTESKNDPKTERKKSSSSSQYKANMHFHKLFLSVPTEEPLKQSFTCALQKEILYQGKLFVSENWICFHSKVFGKDTKISIPAFSVTLIKKTKTALLVPNALIIATVTDRYIFVSLLSRDSTYKLLKSVCGHLENTSVGNSPNPSSAENSFRADRPSSLPLDFNDEFSDLDGVVQQRRQDMEGYSSSGSQTPESENSRDFHATESQTVLNVSKGEAKPTRADAHVNRVPEGKAKSLPVQGLSETVGILHKVKSQKCPMLHHILIFYAIVVCALIISTFYMRYRINTLEEQLGLLTSIVDTHNTEQAAPSGLRSQVQFNVEVLCQELTANIVKLEKIQNNLQKLLENGD

SEQ ID NO: 36203 - protein, 87 aa, Homo sapiens
  Payload ID: 7164
  Gene Symbol: GRAMD3
  Gene Name: GRAM domain containing 3
  ENSP ID: ENSP00000421494
MTELQQDVEDTKPAKVLGKRESKLGSAHSEAENGVEEKKKACRSPTAQSPTPSVEADSPDQKKIISLCPYLLSKSMLHSGPRVKIQF

SEQ ID NO: 36204 - protein, 87 aa, Homo sapiens
  Payload ID: 7164
  Gene Symbol: GRAMD3
  Gene Name: GRAM domain containing 3
  ENSP ID: ENSP00000423236
MTELQQDVEDTKPAKVLGKRESKLGSAHSEAENGVEEKKKACRSPTAQSPTPSVEADSPDQKKIISLCTRPICTFTSCFLVSQRRNH

SEQ ID NO: 36205 - protein, 288 aa, Homo sapiens
  Payload ID: 7164
  Gene Symbol: GRAMD3
  Gene Name: GRAM domain containing 3
  ENSP ID: ENSP00000424985
MVKKRLPSSDTVFRFETPGSPRKANVEASRSSTDSPSSVFLSSEAENGVEEKKKACRSPTAQSPTPSVEADSPDQKKIISLWSKSSFDGASLASDKNDCKTESKNDPKTERKKSSSSSQYKANMHFHKLFLSVPTEEPLKQSFTCALQKEILYQGKLFVSENWICFHSKVFGKDTKISIPAFSVTLIKKTKTALLVPNALIIATVTDRYIFVSLLSRDSTYKLLKSVCGHLENTSVGNSPNPSSAENSFRADRPSSLPLDFNDEFSDLDGVVQQRRQDMEGYSSSGSQ

SEQ ID NO: 36206 - protein, 416 aa, Homo sapiens
  Payload ID: 7164
  Gene Symbol: GRAMD3
  Gene Name: GRAM domain containing 3
  Uniprot ID: Q96HH9
  ENSP ID: ENSP00000426088
MSKVKRFPFFFSSEAENGVEEKKKACRSPTAQSPTPSVEADSPDQKKIISLWSKSSFDGASLASDKNDCKTESKNDPKTERKKSSSSSQYKANMHFHKLFLSVPTEEPLKQSFTCALQKEILYQGKLFVSENWICFHSKVFGKDTKISIPAFSVTLIKKTKTALLVPNALIIATVTDRYIFVSLLSRDSTYKLLKSVCGHLENTSVGNSPNPSSAENSFRADRPSSLPLDFNDEFSDLDGVVQQRRQDMEGYSSSGSQTPESENSRDFHATESQTVLNVSKGEAKPTRADAHVNRVPEGKAKSLPVQGLSETVGILHKVKSQKCPMLHHILIFYAIVVCALIISTFYMRYRINTLEEQLGLLTSIVDTHNTEQAAPSGLRSQVQFNVEVLCQELTANIVKLEKIQNNLQKLLENGD

SEQ ID NO: 36207 - protein, 447 aa, Homo sapiens
  Payload ID: 7164
  Gene Symbol: GRAMD3
  Gene Name: GRAM domain containing 3
  Uniprot ID: Q96HH9
  ENSP ID: ENSP00000426120
MTRRQQVLQAKRSIQQTFQAQLMPWKSMFHGREVKPVGPDLELSEAENGVEEKKKACRSPTAQSPTPSVEADSPDQKKIISLWSKSSFDGASLASDKNDCKTESKNDPKTERKKSSSSSQYKANMHFHKLFLSVPTEEPLKQSFTCALQKEILYQGKLFVSENWICFHSKVFGKDTKISIPAFSVTLIKKTKTALLVPNALIIATVTDRYIFVSLLSRDSTYKLLKSVCGHLENTSVGNSPNPSSAENSFRADRPSSLPLDFNDEFSDLDGVVQQRRQDMEGYSSSGSQTPESENSRDFHATESQTVLNVSKGEAKPTRADAHVNRVPEGKAKSLPVQGLSETVGILHKVKSQKCPMLHHILIFYAIVVCALIISTFYMRYRINTLEEQLGLLTSIVDTHNTEQAAPSGLRSQVQFNVEVLCQELTANIVKLEKIQNNLQKLLENGD

SEQ ID NO: 36208 - protein, 410 aa, Homo sapiens
  Payload ID: 7164
  Gene Symbol: GRAMD3
  Gene Name: GRAM domain containing 3
  ENSP ID: ENSP00000426143
MTELQQDVEDTKPAKVLGKRESKLGSAHSEAENGVEEKKKACRSPTAQSPTPSVEADSPDQKKIISLCPYLLSKSMLHSGPRYKANMHFHKLFLSVPTEEPLKQSFTCALQKEILYQGKLFVSENWICFHSKVFGKDTKISIPAFSVTLIKKTKTALLVPNALIIATVTDRYIFVSLLSRDSTYKLLKSVCGHLENTSVGNSPNPSSAENSFRADRPSSLPLDFNDEFSDLDGVVQQRRQDMEGYSSSGSQTPESENSRVDFHATESQTVLNVSKGEAKPTRADAHVNRVPEGKAKSLPVQGLSETVGILHKVKSQKCPMLHHILIFYAIVVCALIISTFYMRYRINTLEEQLGLLTSIVDTHNTEQAAPSGLRSQVQFNVEVLCQELTANIVKLEKIQNNLQKLLENGD

SEQ ID NO: 36209 - protein, 323 aa, Homo sapiens
  Payload ID: 7164
  Gene Symbol: GRAMD3
  Gene Name: GRAM domain containing 3
  ENSP ID: ENSP00000427596
MHFHKLFLSVPTEEPLKQSFTCALQKEILYQGKLFVSENWICFHSKVFGKDTKISIPAFSVTLIKKTKTALLVPNALIIATVTDRYIFVSLLSRDSTYKLLKSVCGHLENTSVGNSPNPSSAENSFRADRPSSLPLDFNDEFSDLDGVVQQRRQDMEGYSSSGSQTPESENSRDFHATESQTVLNVSKGEAKPTRADAHVNRVPEGKAKSLPVQGLSETVGILHKVKSQKCPMLHHILIFYAIVVCALIISTFYMRYRINTLEEQLGLLTSIVDTHNTEQAAPSGLRSQVQFNVEVLCQELTANIVKLEKIQNNLQKLLENGD

SEQ ID NO: 36210 - protein, 440 aa, Homo sapiens
  Payload ID: 7164
  Gene Symbol: GRAMD3
  Gene Name: GRAM domain containing 3
  Uniprot ID: Q96HH9
  ENSP ID: ENSP00000441876
MWKTQSLRKCSGRGRANLAQPTQRLRMVWRRKRKPAGRQQPNPLPHLWRRTPQTRRKSLAYAHIFSPNLCFIQDQESKSSFDGASLASDKNDCKTESKNDPKTERKKSSSSSQYKANMHFHKLFLSVPTEEPLKQSFTCALQKEILYQGKLFVSENWICFHSKVFGKDTKISIPAFSVTLIKKTKTALLVPNALIIATVTDRYIFVSLLSRDSTYKLLKSVCGHLENTSVGNSPNPSSAENSFRADRPSSLPLDFNDEFSDLDGVVQQRRQDMEGYSSSGSQTPESENSRDFHATESQTVLNVSKGEAKPTRADAHVNRVPEGKAKSLPVQGLSETVGILHKVKSQKCPMLHHILIFYAIVVCALIISTFYMRYRINTLEEQLGLLTSIVDTHNTEQAAPSGLRSQVQFNVEVLCQELTANIVKLEKIQNNLQKLLENGD

SEQ ID NO: 36211 - protein, 328 aa, Homo sapiens
  Payload ID: 7164
  Gene Symbol: GRAMD3
  Gene Name: GRAM domain containing 3
  Uniprot ID: Q96HH9
  ENSP ID: ENSP00000444049
MYKANMHFHKLFLSVPTEEPLKQSFTCALQKEILYQGKLFVSENWICFHSKVFGKDTKISIPAFSVTLIKKTKTALLVPNALIIATVTDRYIFVSLLSRDSTYKLLKSVCGHLENTSVGNSPNPSSAENSFRADRPSSLPLDFNDEFSDLDGVVQQRRQDMEGYSSSGSQTPESENSRDFHATESQTVLNVSKGEAKPTRADAHVNRVPEGKAKSLPVQGLSETVGILHKVKSQKCPMLHHILIFYAIVVCALIISTFYMRYRINTLEEQLGLLTSIVDTHNTEQAAPSGLRSQVQFNVEVLCQELTANIVKLEKIQNNLQKLLENGD

SEQ ID NO: 36212 - protein, 578 aa, Homo sapiens
  Payload ID: 7165
  Gene Symbol: GRAMD4
  Gene Name: GRAM domain containing 4
  Uniprot ID: Q6IC98
  ENSP ID: ENSP00000354313
MLRRLDKIRFRGHKRDDFLDLAESPNASDTECSDEIPLKVPRTSPRDSEELRDPAGPGTLIMATGVQDFNRTEFDRLNEIKGHLEIALLEKHFLQEELRKLREETNAEMLRQELDRERQRRMELEQKVQEVLKARTEEQMAQQPPKGQAQASNGAERRSQGLSSRLQKWFYERFGEYVEDFRFQPEENTVETEEPLSARRLTENMRRLKRGAKPVTNFVKNLSALSDWYSVYTSAIAFTVYMNAVWHGWAIPLFLFLAILRLSLNYLIARGWRIQWSIVPEVSEPVEPPKEDLTVSEKFQLVLDVAQKAQNLFGKMADILEKIKNLFMWVQPEITQKLYVALWAAFLASCFFPYRLVGLAVGLYAGIKFFLIDFIFKRCPRLRAKYDTPYIIWRSLPTDPQLKERSSAAVSRRLQTTSSRSYVPSAPAGLGKEEDAGRFHSTKKGNFHEIFNLTENERPLAVCENGWRCCLINRDRKMPTDYIRNGVLYVTENYLCFESSKSGSSKRNKVIKLVDITDIQKYKVLSVLPGSGMGIAVSTPSTQKPLVFGAMVHRDEAFETILSQYIKITSAAASGGDS

SEQ ID NO: 36213 - protein, 578 aa, Homo sapiens; identical to SEQ ID NO: 36212
  Payload ID: 7165
  Gene Symbol: GRAMD4
  Gene Name: GRAM domain containing 4
  Uniprot ID: Q6IC98
  ENSP ID: ENSP00000385689

SEQ ID NO: 36214 - protein, 101 aa, Homo sapiens
  Payload ID: 7165
  Gene Symbol: GRAMD4
  Gene Name: GRAM domain containing 4
  Uniprot ID: Q6IC98
  ENSP ID: ENSP00000385851
MPTDYIRNGVLYVTENYLCFESSKSGSSKRNKVIKLVDITDIQKYKVLSVLPGSGMGIAVSTPSTQKPLVFGAMVHRDEAFETILSQYIKITSAAASGGDS

SEQ ID NO: 36215 - protein, 223 aa, Homo sapiens
  Payload ID: 7165
  Gene Symbol: GRAMD4
  Gene Name: GRAM domain containing 4
  ENSP ID: ENSP00000397501
  MOD_RES (1)..(1): Any amino acid
XEDFRFQPEENTVETEEPLSARRLTENMRRLKRGAKPVTNFVKNLSALSDWYSVYTSAIAFTVYMNAVWHGWAIPLFLFLAILRLSLNYLIARGWRIQWSIVPEVSEPVEPPKEDLTVSEKFQLVLDVAQKAQNLFGKMADILEKIKNLFMWVQPEITQKLYVALWAAFLASCFFPYRLVGLAVVLTRDLSLEGQRLPAPSKDGPSWDLGSLELSCPSWVGHH

SEQ ID NO: 36216 - protein, 33 aa, Homo sapiens
  Payload ID: 7165
  Gene Symbol: GRAMD4
  Gene Name: GRAM domain containing 4
  ENSP ID: ENSP00000408042
MLRRLDKIRFRGHKRDDFLDLAESPNASDTECS

SEQ ID NO: 36217 - protein, 86 aa, Homo sapiens
  Payload ID: 7165
  Gene Symbol: GRAMD4
  Gene Name: GRAM domain containing 4
  ENSP ID: ENSP00000409784
MLRRLDKIRFRGHKRDDFLDLAESPNASDTECSDEIPLKVPRTSPRDSEELRDPAGPGTLIMATGVQDFNRTEFDRLNEIKGHLEI

SEQ ID NO: 36218 - protein, 198 aa, Homo sapiens
  Payload ID: 7166
  Gene Symbol: GCA
  Gene Name: grancalcin, EF-hand calcium binding protein
  ENSP ID: ENSP00000233612
MQMGQPVPETGPAILLDGYSGPAYSDTYSSAGDSVYTYFSAVAGQDGEVDAEELQRCLTQSGINGTYSPFSLETCRIMIAMLDRDHTGKMGFNAFKELWAALNAWKENFMTVDQDGSGTVEHHELRQAIGLMGYRLSPQTLTTIVKRYSKNGRIFFDDYVACCVKLRALTDFFRKRDHLQQGSANFIYDDFLQGTMAI

SEQ ID NO: 36219 - protein, 146 aa, Homo sapiens
  Payload ID: 7166
  Gene Symbol: GCA
  Gene Name: grancalcin, EF-hand calcium binding protein
  ENSP ID: ENSP00000393218
MWRRQEEVLPKINLTSCGFPNTNLFPWEFGGGFEKFGNFSIQVPGMQMGQPVPETGPAILLDGYSGPAYSDTYSSAGDSVYTYFSAVAGQDGEVDAEELQRCLTQSGINGTYSPFSLETCRIMIAMLDRDHTGKMGFNAFKELWAA

SEQ ID NO: 36220 - protein, 217 aa, Homo sapiens
  Payload ID: 7166
  Gene Symbol: GCA
  Gene Name: grancalcin, EF-hand calcium binding protein
  Uniprot ID: P28676
  ENSP ID: ENSP00000394842
MAYPGYGGGFGNFSIQVPGMQMGQPVPETGPAILLDGYSGPAYSDTYSSAGDSVYTYFSAVAGQDGEVDAEELQRCLTQSGINGTYSPFSLETCRIMIAMLDRDHTGKMGFNAFKELWAALNAWKENFMTVDQDGSGTVEHHELRQAIGLMGYRLSPQTLTTIVKRYSKNGRIFFDDYVACCVKLRALTDFFRKRDHLQQGSANFIYDDFLQGTMAI

SEQ ID NO: 36221 - protein, 132 aa, Homo sapiens
  Payload ID: 7166
  Gene Symbol: GCA
  Gene Name: grancalcin, EF-hand calcium binding protein
  ENSP ID: ENSP00000403805
MQMGQPVPETGPAILLDGYSGPAYSDTYSSAGDSVYTYFSAVAGQDGEVDAEELQRCLTQSGINGTYSPFSLETCRIMIAMLDRDHTGKMGFNAFKELWAALNAWKENFMTVDQDGSGTVEHHELRQAIGLM

SEQ ID NO: 36222 - protein, 146 aa, Homo sapiens
  Payload ID: 7166
  Gene Symbol: GCA
  Gene Name: grancalcin, EF-hand calcium binding protein
  ENSP ID: ENSP00000408620
  MOD_RES (1)..(1): Any amino acid
XFSLETCRIMIAMLDRDHTGKMGFNAFKELWAALNAWKENFMTVDQDGSGTVEHHELRQAIGLMGYRLSPQTLTTIVKRYSKNGRIFFDDYVACCVKLRALTDFFRKRDHLQQGSANFIYDDCGGMNVINFEHLDTERPESVCKSD

SEQ ID NO: 36223 - protein, 87 aa, Homo sapiens
  Payload ID: 7166
  Gene Symbol: GCA
  Gene Name: grancalcin, EF-hand calcium binding protein
  ENSP ID: ENSP00000412899
MQMGQPVPETGPAILLDGYSGPAYSDTYSSAGDSVYTYFSAVAGQDGEVDAEELQRCLTQSGINGTYSPFSLETCRIMIAMLDRKET

SEQ ID NO: 36224 - protein, 593 aa, Homo sapiens
  Payload ID: 7167
  Gene Symbol: GRN
  Gene Name: granulin
  Uniprot ID: P28799
  ENSP ID: ENSP00000053867
MWTLVSWVALTAGLVAGTRCPDGQFCPVACCLDPGGASYSCCRPLLDKWPTTLSRHLGGPCQVDAHCSAGHSCIFTVSGTSSCCPFPEAVACGDGHHCCPRGFHCSADGRSCFQRSGNNSVGAIQCPDSQFECPDFSTCCVMVDGSWGCCPMPQASCCEDRVHCCPHGAFCDLVHTRCITPTGTHPLAKKLPAQRTNRAVALSSSVMCPDARSRCPDGSTCCELPSGKYGCCPMPNATCCSDHLHCCPQDTVCDLIQSKCLSKENATTDLLTKLPAHTVGDVKCDMEVSCPDGYTCCRLQSGAWGCCPFTQAVCCEDHIHCCPAGFTCDTQKGTCEQGPHQVPWMEKAPAHLSLPDPQALKRDVPCDNVSSCPSSDTCCQLTSGEWGCCPIPEAVCCSDHQHCCPQGYTCVAEGQCQRGSEIVAGLEKMPARRASLSHPRDIGCDQHTSCPVGQTCCPSLGGSWACCQLPHAVCCEDRQHCCPAGYTCNVKARSCEKEVVSAQPATFLARSPHVGVKDVECGEGHFCHDNQTCCRDNRQGWACCPYRQGVCCADRRHCCPAGFRCAARGTKCLRREAPRWDAPLRDPALRQLL

SEQ ID NO: 36225 - protein, 163 aa, Homo sapiens
  Payload ID: 7167
  Gene Symbol: GRN
  Gene Name: granulin
  ENSP ID: ENSP00000465375
MWTLVSWVALTAGLVAGTRCPDGQFCPVACCLDPGGASYSCCRPLLDKWPTTLSRHLGGPCQVDAHCSAGHSCIFTVSGTSSCCPFPEAVACGDGHHCCPRGFHCSADGRSCFQRSGNNSVGAIQCPDSQFECPDFSTCCVMVDGSWGCCPMPQASCCEDRVH

SEQ ID NO: 36226 - protein, 136 aa, Homo sapiens
  Payload ID: 7167
  Gene Symbol: GRN
  Gene Name: granulin
  ENSP ID: ENSP00000465518
MWTLVSWVALTAGLVAGTRCPDGQFCPVACCLDPGGASYSCCRPLLDKWPTTLSRHLGGPCQVDAHCSAGHSCIFTVSGTSSCCPFPEAVACGDGHHCCPRGFHCSADGRSCFQRSGNNSVGAIQCPDSQFECPDF

SEQ ID NO: 36227 - protein, 388 aa, Homo sapiens
  Payload ID: 7167
  Gene Symbol: GRN
  Gene Name: granulin
  ENSP ID: ENSP00000465673
  MOD_RES (1)..(1): Any amino acid
XAKKLPAQRTNRAVALSSSVMCPDARSRCPDGSTCCELPSGKYGCCPMPNATCCSDHLHCCPQDTVCDLIQSKCLSKENATTDLLTKLPAHTVGDVKCDMEVSCPDGYTCCRLQSGAWGCCPFTQAVCCEDHIHCCPAGFTCDTQKGTCEQGPHQVPWMEKAPAHLSLPDPQALKRDVPCDNVSSCPSSDTCCQLTSGEWGCCPIPEAVCCSDHQHCCPQGYTCVAEGQCQRGSEIVAGLEKMPARRASLSHPRDIGCDQHTSCPVGQTCCPSLGGSWACCQLPHAVCCEDRQHCCPAGYTCNVKARSCEKEVVSAQPATFLARSPHVGVKDVECGEGHFCHDNQTCCRDNRQGWACCPYRQVSANPHPGAGYGQGPGPTSSNPLAPL

SEQ ID NO: 36228 - protein, 62 aa, Homo sapiens
  Payload ID: 7167
  Gene Symbol: GRN
  Gene Name: granulin
  ENSP ID: ENSP00000466271
MWTLVSWVALTAGLVAGTRCPDGQFCPVACCLDPGGASYSCCRPLLDKWPTTLSRHLGGPCQ

SEQ ID NO: 36229 - protein, 149 aa, Homo sapiens
  Payload ID: 7167
  Gene Symbol: GRN
  Gene Name: granulin
  ENSP ID: ENSP00000466405
MWTLVSWVALTAGLVAGTRCPDGQFCPVACCLDPGGASYSCCRPLLDKWPTTLSRHLGGPCQVDAHCSAGHSCIFTVSGTSSCCPFPEAVACGDGHHCCPRGFHCSADGRSCFQRSGNNSVGAIQCPDSQFECPDFSTCCVMVDGSWGC

SEQ ID NO: 36230 - protein, 172 aa, Homo sapiens
  Payload ID: 7167
  Gene Symbol: GRN
  Gene Name: granulin
  ENSP ID: ENSP00000466611
MWTLVSWVALTAGLVAGTRCPDGQFCPVACCLDPGGASYSCCRPLLDKWPTTLSRHLGGPCQVDAHCSAGHSCIFTVSGTSSCCPFPEASCCEDRVHCCPHGAFCDLVHTRCITPTGTHPLAKKLPAQRTNRAVALSSSVMCPDARSRCPDGSTCCELPSGKYGCCPMPNAT

SEQ ID NO: 36231 - protein, 111 aa, Homo sapiens
  Payload ID: 7167
  Gene Symbol: GRN
  Gene Name: granulin
  ENSP ID: ENSP00000466956
MWTLVSWVALTAGLVAGTRCPDGQFCPVACCLDPGGASYSCCRPLLDKWPTTLSRHLGGPCQVDAHCSAGHSCIFTVSGTSSCCPFPEAVACGDGHHCCPRGFHCSADGRS

SEQ ID NO: 36232 - protein, 135 aa, Homo sapiens
  Payload ID: 7167
  Gene Symbol: GRN
  Gene Name: granulin
  ENSP ID: ENSP00000467022
MWTLVSWVALTAGLVAGTRCPDGQFCPVACCLDPGGASYSCCRPLLDKWPTTLSRHLGGPCQVDAHCSAGHSCIFTVSGTSSCCPFPEAVACGDGHHCCPRGFHCSADGRSCFQRSGNNSVGAIQCPDSQFECPD

SEQ ID NO: 36233 - protein, 191 aa, Homo sapiens
  Payload ID: 7167
  Gene Symbol: GRN
  Gene Name: granulin
  ENSP ID: ENSP00000467431
MWTLVSWVALTAGLVAGTRCPDGQFCPVACCLDPGGASYSCCRPLLDKWPTTLSRHLGGPCQVDAHCSAGHSCIFTVSGTSSCCPFPEIKGPCQCRFLCVPQAVACGDGHHCCPRGFHCSADGRSCFQRSGNNSVGAIQCPDSQFECPDFSTCCVMVDGSWGCCPMPQASCCEDRVHCCPHGAFCDLVHTR

SEQ ID NO: 36234 - protein, 436 aa, Homo sapiens
  Payload ID: 7167
  Gene Symbol: GRN
  Gene Name: granulin
  ENSP ID: ENSP00000467616
MWTLVSWVALTAGLVAGTRCPDGQFCPVACCLDPGGASYSCCRPLLDKWPTTLSRHLGGPCQVDAHCSAGHSCIFTVSGTSSCCPFPEAVACGDGHHCCPRGFHCSADGRSCFQRSGNNSVGAIQCPDSQFECPDFSTCCVMVDGSWGCCPMPQAVCCEDHIHCCPAGFTCDTQKGTCEQGPHQVPWMEKAPAHLSLPDPQALKRDVPCDNVSSCPSSDTCCQLTSGEWGCCPIPEAVCCSDHQHCCPQGYTCVAEGQCQRGSEIVAGLEKMPARRASLSHPRDIGCDQHTSCPVGQTCCPSLGGSWACCQLPHAVCCEDRQHCCPAGYTCNVKARSCEKEVVSAQPATFLARSPHVGVKDVECGEGHFCHDNQTCCRDNRQGWACCPYRQGVCCADRRHCCPAGFRCAARGTKCLRREAPRWDAPLRDPALRQLL

SEQ ID NO: 36235 - protein, 37 aa, Homo sapiens
  Payload ID: 7167
  Gene Symbol: GRN
  Gene Name: granulin
  ENSP ID: ENSP00000467745
MWTLVSWVALTAGLVAGTRCPDGQFCPVACCLDPGGA

SEQ ID NO: 36236 - protein, 110 aa, Homo sapiens
  Payload ID: 7167
  Gene Symbol: GRN
  Gene Name: granulin
  ENSP ID: ENSP00000467837
  MOD_RES (1)..(1): Any amino acid
XCPSLGGSWACCQLPHAVCCEDRQHCCPAGYTCNVKARSCEKEVVSAQPATFLARSPHVGVKDVECGEGHFCHDNQTCCRDNRQGWACCPYRQPGVPSVCAGRPRAGTPL

SEQ ID NO: 36237 - protein, 142 aa, Homo sapiens
  Payload ID: 7167
  Gene Symbol: GRN
  Gene Name: granulin
  ENSP ID: ENSP00000467870
MWTLVSWVALTAGLVAGTRCPDGQFCPVACCLDPGGASYSCCRPLLDKWPTTLSRHLGGPCQVDAHCSAGHSCIFTVSGTSSCCPFPEAVACGDGHHCCPRGFHCSADGRSCFQRSGNNSVGAIQCPDSQFECPDFSTCCVM

SEQ ID NO: 36238 - protein, 189 aa, Homo sapiens
  Payload ID: 7167
  Gene Symbol: GRN
  Gene Name: granulin
  ENSP ID: ENSP00000468318
MWTLVSWVALTAGLVAGTRCPDGQFCPVACCLDPGGASYSCCRPLLDKWPTTLSRHLGGPCQVDAHCSAGHSCIFTVSGTSSCCPFPEAVACGDGHHCCPRGFHCSADGRSCFQRSGNNSVGAIQCPDSQFECPDFSTCCVMVDGSWGCCPMPQGALLSARCLLRPGSHPLHHTHGHPPPGKEAPCPED

SEQ ID NO: 36239 - protein, 145 aa, Homo sapiens
  Payload ID: 7168
  Gene Symbol: GNLY
  Gene Name: granulysin
  Uniprot ID: P22749
  ENSP ID: ENSP00000263863
MATWALLLLAAMLLGNPGLVFSRLSPEYYDLARAHLRDEEKSCPCLAQEGPQGDLLTKTQELGRDYRTCLTIVQKLKKMVDKPTQRSVSNAATRVCRTGRSRWRDVCRNFMRRYQSRVTQGLVAGETAQQICEDLRLCIPSTGPL

SEQ ID NO: 36240 - protein, 130 aa, Homo sapiens
  Payload ID: 7168
  Gene Symbol: GNLY
  Gene Name: granulysin
  Uniprot ID: P22749
  ENSP ID: ENSP00000387116
MEGLVFSRLSPEYYDLARAHLRDEEKSCPCLAQEGPQGDLLTKTQELGRDYRTCLTIVQKLKKMVDKPTQRSVSNAATRVCRTGRSRWRDVCRNFMRRYQSRVTQGLVAGETAQQICEDLRLCIPSTGPL

SEQ ID NO: 36241 - protein, 187 aa, Homo sapiens
  Payload ID: 7168
  Gene Symbol: GNLY
  Gene Name: granulysin
  ENSP ID: ENSP00000434467
  MOD_RES (1)..(1): Any amino acid
XHLRDEEKSCPCLAQEGPQGDLLTKTQELGRDYRTCLTIVQKLKKMVDKPTQRSVSNAATRVCRTGRSRWRDVCRNFMRRYQSRVTQGLVAGETAQQICEDLRLCIPSTGPTTCSGCRLASRMCLWVPSEPSHLVLWKKHRLLSSDPGNLSNLCRLLASSIQNPLSSLPPLTPSAVLPSHENKVSSK

SEQ ID NO: 36242 - protein, 172 aa, Homo sapiens
  Payload ID: 7168
  Gene Symbol: GNLY
  Gene Name: granulysin
  ENSP ID: ENSP00000436423
MATWALLLLAAMLLGNPGLEVSVSPKGKNTSGRESGFGWAIWMEGLVFSRLSPEYYDLARAHLRDEEKSCPCLAQEGPQGDLLTKTQELGRDYRTCLTIVQKLKKMVDKPTQRSVSNAATRVCRTGRSRWRDVCRNFMRRYQSRVTQGLVAGETAQQICEDLRLCIPSTGPL

SEQ ID NO: 36243 - protein, 262 aa, Homo sapiens
  Payload ID: 7169
  Gene Symbol: GZMA
  Gene Name: granzyme A (granzyme 1, cytotoxic T-lymphocyte-associated serine esterase 3)
  Uniprot ID: P12544
  ENSP ID: ENSP00000274306
MRNSYRFLASSLSVVVSLLLIPEDVCEKIIGGNEVTPHSRPYMVLLSLDRKTICAGALIAKDWVLTAAHCNLNKRSQVILGAHSITREEPTKQIMLVKKEFPYPCYDPATREGDLKLLQLMEKAKINKYVTILHLPKKGDDVKPGTMCQVAGWGRTHNSASWSDTLREVNITIIDRKVCNDRNHYNFNPVIGMNMVCAGSLRGGRDSCNGDSGSPLLCEGVFRGVTSFGLENKCGDPRGPGVYILLSKKHLNWIIMTIKGAV

SEQ ID NO: 36244 - protein, 247 aa, Homo sapiens
  Payload ID: 7170
  Gene Symbol: GZMB
  Gene Name: granzyme B (granzyme 2, cytotoxic T-lymphocyte-associated serine esterase 1)
  Uniprot ID: P10144
  ENSP ID: ENSP00000216341
MQPILLLLAFLLLPRADAGEIIGGHEAKPHSRPYMAYLMIWDQKSLKRCGGFLIRDDFVLTAAHCWGSSINVTLGAHNIKEQEPTQQFIPVKRPIPHPAYNPKNFSNDIMLLQLERKAKRTRAVQPLRLPSNKAQVKPGQTCSVAGWGQTAPLGKHSHTLQEVKMTVQEDRKCESDLRHYYDSTIELCVGDPEIKKTSFKGDSGGPLVCNKVAQGIVSYGRNNGMPPRACTKVSSFVHWIKKTMKRY

SEQ ID NO: 36245 - protein, 202 aa, Homo sapiens
  Payload ID: 7170
  Gene Symbol: GZMB
  Gene Name: granzyme B (granzyme 2, cytotoxic T-lymphocyte-associated serine esterase 1)
  ENSP ID: ENSP00000371980
MQPILLLLAFLLLPRADAGEIIGGHEAKPHSRPYMAYLMIWDQKSLKRCGGFLIRDDFVLTAAHCWGRLERKAKRTRAVQPLRLPSNKAQVKPGQTCSVAGWGQTAPLGKHSHTLQEVKMTVQEDRKCESDLRHYYDSTIELCVGDPEIKKTSFKGDSGGPLVCNKVAQGIVSYGRNNGMPPRACTKVSSFVHWIKKTMKRY

SEQ ID NO: 36246 - protein, 202 aa, Homo sapiens; identical to SEQ ID NO: 36245
  Payload ID: 7170
  Gene Symbol: GZMB
  Gene Name: granzyme B (granzyme 2, cytotoxic T-lymphocyte-associated serine esterase 1)
  ENSP ID: ENSP00000371982

SEQ ID NO: 36247 - protein, 235 aa, Homo sapiens
  Payload ID: 7170
  Gene Symbol: GZMB
  Gene Name: granzyme B (granzyme 2, cytotoxic T-lymphocyte-associated serine esterase 1)
  ENSP ID: ENSP00000387385
MQTFPSGEIIGGHEAKPHSRPYMAYLMIWDQKSLKRCGGFLIRDDFVLTAAHCWGSSINVTLGAHNIKEQEPTQQFIPVKRPIPHPAYNPKNFSNDIMLLQLERKAKRTRAVQPLRLPSNKAQVKPGQTCSVAGWGQTAPLGKHSHTLQEVKMTVQEDRKCESDLRHYYDSTIELCVGDPEIKKTSFKGDSGGPLVCNKVAQGIVSYGRNNGMPPRACTKVSSFVHWIKKTMKRY

SEQ ID NO: 36248 - protein, 35 aa, Homo sapiens
  Payload ID: 7170
  Gene Symbol: GZMB
  Gene Name: granzyme B (granzyme 2, cytotoxic T-lymphocyte-associated serine esterase 1)
  ENSP ID: ENSP00000432074
MQPILLLLAFLLLPRADAAGEKGQADQSCAAPQAT

SEQ ID NO: 36249 - protein, 90 aa, Homo sapiens
  Payload ID: 7170
  Gene Symbol: GZMB
  Gene Name: granzyme B (granzyme 2, cytotoxic T-lymphocyte-associated serine esterase 1)
  ENSP ID: ENSP00000434213
MQPILLLLAFLLLPRADAGEIIGGHEAKPHSRPYMAYLMIWDQKSLKRCGGFLIRDDFVLTAAHCWGSWRERPSGPELCSPSGYLATRPR

SEQ ID NO: 36250 - protein, 44 aa, Homo sapiens
  Payload ID: 7170
  Gene Symbol: GZMB
  Gene Name: granzyme B (granzyme 2, cytotoxic T-lymphocyte-associated serine esterase 1)
  ENSP ID: ENSP00000435084
MQECSELQLPFYQDPPSVMLDKLSAGMAEQQAILKKSQGDHRGT

SEQ ID NO: 36251 - protein, 90 aa, Homo sapiens; identical to SEQ ID NO: 36249
  Payload ID: 7170
  Gene Symbol: GZMB
  Gene Name: granzyme B (granzyme 2, cytotoxic T-lymphocyte-associated serine esterase 1)
  ENSP ID: ENSP00000450535

SEQ ID NO: 36252 - protein, 152 aa, Homo sapiens
  Payload ID: 7170
  Gene Symbol: GZMB
  Gene Name: granzyme B (granzyme 2, cytotoxic T-lymphocyte-associated serine esterase 1)
  ENSP ID: ENSP00000479643
MQPILLLLAFLLLPRADQLERKAKRTRAVQPLRLPSNKAQVKPGQTCSVAGWGQTAPLGKHSHTLQEVKMTVQEDRKCESDLRHYYDSTIELCVGDPEIKKTSFKGDSGGPLVCNKVAQGIVSYGRNNGMPPRACTKVSSFVHWIKKTMKRY

SEQ ID NO: 36253 - protein, 246 aa, Homo sapiens
  Payload ID: 7171
  Gene Symbol: GZMH
  Gene Name: granzyme H (cathepsin G-like 2, protein h-CCPX)
  Uniprot ID: P20718
  ENSP ID: ENSP00000216338
MQPFLLLLAFLLTPGAGTEEIIGGHEAKPHSRPYMAFVQFLQEKSRKRCGGILVRKDFVLTAAHCQGSSINVTLGAHNIKEQERTQQFIPVKRPIPHPAYNPKNFSNDIMLLQLERKAKWTTAVRPLRLPSSKAQVKPGQLCSVAGWGYVSMSTLATTLQEVLLTVQKDCQCERLFHGNYSRATEICVGDPKKTQTGFKGDSGGPLVCKDVAQGILSYGNKKGTPPGVYIKVSHFLPWIKRTMKRL

SEQ ID NO: 36254 - protein, 160 aa, Homo sapiens
  Payload ID: 7171
  Gene Symbol: GZMH
  Gene Name: granzyme H (cathepsin G-like 2, protein h-CCPX)
  Uniprot ID: P20718
  ENSP ID: ENSP00000371988
MQPFLLLLAFLLTPGAGTEEIIGGHEAKPHSRPYMAFVQFLQEKSRKRCGGILVRKDFVLTAAHCQGSSINVTLGAHNIKEQERTQQFIPVKRPIPHPAYNPKNFSNDIMLLQGDSGGPLVCKDVAQGILSYGNKKGTPPGVYIKVSHFLPWIKRTMKRL

SEQ ID NO: 36255 - protein, 115 aa, Homo sapiens
  Payload ID: 7171
  Gene Symbol: GZMH
  Gene Name: granzyme H (cathepsin G-like 2, protein h-CCPX)
  ENSP ID: ENSP00000450576
MQPFLLLLAFLLTPGAGTEEIIGGHEAKPHSRPYMAFVQFLQEKSRKRCGGILVRKDFVLTAAHCQGRGDSGGPLVCKDVAQGILSYGNKKGTPPGVYIKVSHFLPWIKRTMKRL

SEQ ID NO: 36256 - protein, 264 aa, Homo sapiens
  Payload ID: 7172
  Gene Symbol: GZMK
  Gene Name: granzyme K (granzyme 3
  tryptase II)
  Uniprot ID: P49863
  ENSP ID: ENSP00000231009
MTKFSSFSLFFLIVGAYMTHVCFNMEIIGGKEVSPHSRPFMASIQYGGHHVCGGVLIDPQWVLTAAHCQYRFTKGQSPTVVLGAHSLSKNEASKQTLEIKKFIPFSRVTSDPQSNDIMLVKLQTAAKLNKHVKMLHIRSKTSLRSGTKCKVTGWGATDPDSLRPSDTLREVTVTVLSRKLCNSQSYYNGDPFITKDMVCAGDAKGQKDSCKGDSGGPLICKGVFHAIVSGGHECGVATKPGIYTLLTKKYQTWIKSNLVPPHTN

SEQ ID NO: 36257 - protein, 257 aa, Homo sapiens
  Payload ID: 7173
  Gene Symbol: GZMM
  Gene Name: granzyme M (lymphocyte met-ase 1)
  Uniprot ID: P51124
  ENSP ID: ENSP00000264553
MEACVSSLLVLALGALSVGSSFGTQIIGGREVIPHSRPYMASLQRNGSHLCGGVLVHPKWVLTAAHCLAQRMAQLRLVLGLHTLDSPGLTFHIKAAIQHPRYKPVPALENDLALLQLDGKVKPSRTIRPLALPSKRQVVAAGTRCSMAGWGLTHQGGRLSRVLRELDLQVLDTRMCNNSRFWNGSLSPSMVCLAADSKDQAPCKGDSGGPLVCGKGRVLARVLSFSSRVCTDIFKPPVATAVAPYVSWIRKVTGRSA

SEQ ID NO: 36258 - protein, 218 aa, Homo sapiens
  Payload ID: 7173
  Gene Symbol: GZMM
  Gene Name: granzyme M (lymphocyte met-ase 1)
  ENSP ID: ENSP00000476255
MASLQRNGSHLCGGVLVHPKWVLTAAHCLAQRMAQLRLVLGLHTLDSPGLTFHIKAAIQHPRYKPVPALENDLALLQLDGKVKPSRTIRPLALPSKRQVVAAGTRCSMAGWGLTHQGGRLSRVLRELDLQVLDTRMCNNSRFWNGSLSPSMVCLAADSKDQAPCKGDSGGPLVCGKGRVLARVLSFSSRVCTDIFKPPVATAVAPYVSWIRKVTGRSA

SEQ ID NO: 36259 - protein, 1035 aa, Homo sapiens
  Payload ID: 7174
  Gene Symbol: GIGYF1
  Gene Name: GRB10 interacting GYF protein 1
  Uniprot ID: O75420
  ENSP ID: ENSP00000275732
MAAETLNFGPEWLRALSGGGSVASPPPSPAMPKYKLADYRYGREEMLALYVKENKVPEELQDKEFAAVLQDEPLQPLALEPLTEEEQRNFSLSVNSVAVLRLMGKGAGPPLAGTSRGRGSTRSRGRGRGDSCFYQRSIEEGDGAFGRSPREIQRSQSWDDRGERRFEKSARRDGARCGFEEGGAGPRKEHARSDSENWRSLREEQEEEEEGSWRLGAGPRRDGDRWRSASPDGGPRSAGWREHGERRRKFEFDLRGDRGGCGEEEGRGGGGSSHLRRCRAPEGFEEDKDGLPEWCLDDEDEEMGTFDASGAFLPLKKGPKEPIPEEQELDFQGLEEEEEPSEGLEEEGPEAGGKELTPLPPQEEKSSSPSPLPTLGPLWGTNGDGDETAEKEPPAAEDDIRGIQLSPGVGSSAGPPGDLEDDEGLKHLQQEAEKLVASLQDSSLEEEQFTAAMQTQGLRHSAAATALPLSHGAARKWFYKDPQGEIQGPFTTQEMAEWFQAGYFSMSLLVKRGCDEGFQPLGEVIKMWGRVPFAPGPSPPPLLGNMDQERLKKQQELAAAALYQQLQHQQFLQLVSSRQLPQCALREKAALGDLTPPPPPPPQQQQQQLTAFLQQLQALKPPRGGDQNLLPTMSRSLSVPDSGRLWDVHTSASSQSGGEASLWDIPINSSTQGPILEQLQLQHKFQERREVELRAKREEEERKRREEKRRQQQQEEQKRRQEEEELFRRKHVRQQELLLKLLQQQQAVPVPPAPSSPPPLWAGLAKQGLSMKTLLELQLEGERQLHKQPPPREPARAQAPNHRVQLGGLGTAPLNQWVSEAGPLWGGPDKSGGGSSGLGLWEDTPKSGGSLVRGLGLKNSRSSPSLSDSYSHLSGRPIRKKTEEEEKLLKLLQGIPRPQDGFTQWCEQMLHTLSATGSLDVPMAVAILKEVESPYDVHDYIRSCLGDTLEAKEFAKQFLERRAKQKASQQRQQQQEAWLSSASLQTAFQANHSTKLGPGEGSKAKRRALMLHSDPSILGYSLHGSSGEIESVDDY

SEQ ID NO: 36260 - protein, 1299 aa, Homo sapiens
  Payload ID: 7175
  Gene Symbol: GIGYF2
  Gene Name: GRB10 interacting GYF protein 2
  Uniprot ID: Q6Y7W6
  ENSP ID: ENSP00000362664
MAAETQTLNFGPEWLRALSSGGSITSPPLSPALPKYKLADYRYGREEMLALFLKDNKIPSDLLDKEFLPILQEEPLPPLALVPFTEEEQRNFSMSVNSAAVLRLTGRGGGGTVVGAPRGRSSSRGRGRGRGECGFYQRSFDEVEGVFGRGGGREMHRSQSWEERGDRRFEKPGRKDVGRPNFEEGGPTSVGRKHEFIRSESENWRIFREEQNGEDEDGGWRLAGSRRDGERWRPHSPDGPRSAGWREHMERRRRFEFDFRDRDDERGYRRVRSGSGSIDDDRDSLPEWCLEDAEEEMGTFDSSGAFLSLKKVQKEPIPEEQEMDFRPVDEGEECSDSEGSHNEEAKEPDKTNKKEGEKTDRVGVEASEETPQTSSSSARPGTPSDHQSQEASQFERKDEPKTEQTEKAEEETRMENSLPAKVPSRGDEMVADVQQPLSQIPSDTASPLLILPPPVPNPSPTLRPVETPVVGAPGMGSVSTEPDDEEGLKHLEQQAEKMVAYLQDSALDDERLASKLQEHRAKGVSIPLMHEAMQKWYYKDPQGEIQGPFNNQEMAEWFQAGYFTMSLLVKRACDESFQPLGDIMKMWGRVPFSPGPAPPPHMGELDQERLTRQQELTALYQMQHLQYQQFLIQQQYAQVLAQQQKAALSSQQQQQLALLLQQFQTLKMRISDQNIIPSVTRSVSVPDTGSIWELQPTASQPTVWEGGSVWDLPLDTTTPGPALEQLQQLEKAKAAKLEQERREAEMRAKREEEERKRQEELRRQQEEILRRQQEEERKRREEEELARRKQEEALRRQREQEIALRRQREEEERQQQEEALRRLEERRREEEERRKQEELLRKQEEEAAKWAREEEEAQRRLEENRLRMEEEAARLRHEEEERKRKELEVQRQKELMRQRQQQQEALRRLQQQQQQQQLAQMKLPSSSTWGQQSNTTACQSQATLSLAEIQKLEEERERQLREEQRRQQRELMKALQQQQQQQQQKLSGWGNVSKPSGTTKSLLEIQQEEARQMQKQQQQQQQHQQPNRARNNTHSNLHTSIGNSVWGSINTGPPNQWASDLVSSIWSNADTKNSNMGFWDDAVKEVGPRNSTNKNKNNASLSKSVGVSNRQNKKVEEEEKLLKLFQGVNKAQDGFTQWCEQMLHALNTANNLDVPTFVSFLKEVESPYEVHDYIRAYLGDTSEAKEFAKQFLERRAKQKANQQRQQQQLPQQQQQQPPQQPPQQPQQQDSVWGMNHSTLHSVFQTNQSNNQQSNFEAVQSGKKKKKQKMVRADPSLLGFSVNASSERLNMGEIETLDDY

SEQ ID NO: 36261 - protein, 1299 aa, Homo sapiens; identical to SEQ ID NO: 36260
  Payload ID: 7175
  Gene Symbol: GIGYF2
  Gene Name: GRB10 interacting GYF protein 2
  Uniprot ID: Q6Y7W6
  ENSP ID: ENSP00000386537

SEQ ID NO: 36262 - protein, 1321 aa, Homo sapiens
  Payload ID: 7175
  Gene Symbol: GIGYF2
  Gene Name: GRB10 interacting GYF protein 2
  ENSP ID: ENSP00000386765
MAAETQTLNFGPEWLRALSSGGSITSPPLSPALPKYKLADYRYGREEMLALFLKDNKIPSDLLDKEFLPILQEEPLPPLALVPFTEEEQRNFSMSVNSAAVLRLTGRGGGGTVVGAPRGRSSSRGRGRGRGECGFYQRSFDEVEGVFGRGGGREMHRSQSWEERGDRRFEKPGRKDVGKKNGYYCMYSPVLLLGQPLCQGRPNFEEGGPTSVGRKHEFIRSESENWRIFREEQNGEDEDGGWRLAGSRRDGERWRPHSPDGPRSAGWREHMERRRRFEFDFRDRDDERGYRRVRSGSGSIDDDRDSLPEWCLEDAEEEMGTFDSSGAFLSLKKVQKEPIPEEQEMDFRPVDEGEECSDSEGSHNEEAKEPDKTNKKEGEKTDRVGVEASEETPQTSSSSARPGTPSDHQSQEASQFERKDEPKTEQTEKAEEETRMENSLPAKVPSRGDEMVADVQQPLSQIPSDTASPLLILPPPVPNPSPTLRPVETPVVGAPGMGSVSTEPDDEEGLKHLEQQAEKMVAYLQDSALDDERLASKLQEHRAKGVSIPLMHEAMQKWYYKDPQGEIQGPFNNQEMAEWFQAGYFTMSLLVKRACDESFQPLGDIMKMWGRVPFSPGPAPPPHMGELDQERLTRQQELTALYQMQHLQYQQFLIQQQYAQVLAQQQKAALSSQQQQQLALLLQQFQTLKMRISDQNIIPSVTRSVSVPDTGSIWELQPTASQPTVWEGGSVWDLPLDTTTPGPALEQLQQLEKAKAAKLEQERREAEMRAKREEEERKRQEELRRQQEEILRRQQEEERKRREEEELARRKQEEALRRQREQEIALRRQREEEERQQQEEALRRLEERRREEEERRKQEELLRKQEEEAAKWAREEEEAQRRLEENRLRMEEEAARLRHEEEERKRKELEVQRQKELMRQRQQQQEALRRLQQQQQQQQLAQMKLPSSSTWGQQSNTTACQSQATLSLAEIQKLEEERERQLREEQRRQQRELMKALQQQQQQQQQKLSGWGNVSKPSGTTKSLLEIQQEEARQMQKQQQQQQQHQQPNRARNNTHSNLHTSIGNSVWGSINTGPPNQWASDLVSSIWSNADTKNSNMGFWDDAVKEVGPRNSTNKNKNNASLSKSVGVSNRQNKKVEEEEKLLKLFQGVNKAQDGFTQWCEQMLHALNTANNLDVPTFVSFLKEVESPYEVHDYIRAYLGDTSEAKEFAKQFLERRAKQKANQQRQQQQLPQQQQQQPPQQPPQQPQQQDSVWGMNHSTLHSVFQTNQSNNQQSNFEAVQSGKKKKKQKMVRADPSLLGFSVNASSERLNMGEIETLDDY

SEQ ID NO: 36263 - protein, 1293 aa, Homo sapiens
  Payload ID: 7175
  Gene Symbol: GIGYF2
  Gene Name: GRB10 interacting GYF protein 2
  Uniprot ID: Q6Y7W6
  ENSP ID: ENSP00000387070
MAAETQTLNFGPEWLRALSSGGSITSPPLSPALPKYKLADYRYGREEMLALFLKDNKIPSDLLDKEFLPILQEEPLPPLALVPFTEEEQRNFSMSVNSAAVLRLTGRGGGGTVVGAPRGRSSSRGRGRGRGECGFYQRSFDEVEGVFGRGGGREMHRSQSWEERGDRRFEKPGRKDVGRPNFEEGGPTSVGRKHEFIRSESENWRIFREEQNGEDEDGGWRLAGSRRDGERWRPHSPGWREHMERRRRFEFDFRDRDDERGYRRVRSGSGSIDDDRDSLPEWCLEDAEEEMGTFDSSGAFLSLKKVQKEPIPEEQEMDFRPVDEGEECSDSEGSHNEEAKEPDKTNKKEGEKTDRVGVEASEETPQTSSSSARPGTPSDHQSQEASQFERKDEPKTEQTEKAEEETRMENSLPAKVPSRGDEMVADVQQPLSQIPSDTASPLLILPPPVPNPSPTLRPVETPVVGAPGMGSVSTEPDDEEGLKHLEQQAEKMVAYLQDSALDDERLASKLQEHRAKGVSIPLMHEAMQKWYYKDPQGEIQGPFNNQEMAEWFQAGYFTMSLLVKRACDESFQPLGDIMKMWGRVPFSPGPAPPPHMGELDQERLTRQQELTALYQMQHLQYQQFLIQQQYAQVLAQQQKAALSSQQQQQLALLLQQFQTLKMRISDQNIIPSVTRSVSVPDTGSIWELQPTASQPTVWEGGSVWDLPLDTTTPGPALEQLQQLEKAKAAKLEQERREAEMRAKREEEERKRQEELRRQQEEILRRQQEEERKRREEEELARRKQEEALRRQREQEIALRRQREEEERQQQEEALRRLEERRREEEERRKQEELLRKQEEEAAKWAREEEEAQRRLEENRLRMEEEAARLRHEEEERKRKELEVQRQKELMRQRQQQQEALRRLQQQQQQQQLAQMKLPSSSTWGQQSNTTACQSQATLSLAEIQKLEEERERQLREEQRRQQRELMKALQQQQQQQQQKLSGWGNVSKPSGTTKSLLEIQQEEARQMQKQQQQQQQHQQPNRARNNTHSNLHTSIGNSVWGSINTGPPNQWASDLVSSIWSNADTKNSNMGFWDDAVKEVGPRNSTNKNKNNASLSKSVGVSNRQNKKVEEEEKLLKLFQGVNKAQDGFTQWCEQMLHALNTANNLDVPTFVSFLKEVESPYEVHDYIRAYLGDTSEAKEFAKQFLERRAKQKANQQRQQQQLPQQQQQQPPQQPPQQPQQQDSVWGMNHSTLHSVFQTNQSNNQQSNFEAVQSGKKKKKQKMVRADPSLLGFSVNASSERLNMGEIETLDDY

SEQ ID NO: 36264 - protein, 1320 aa, Homo sapiens
  Payload ID: 7175
  Gene Symbol: GIGYF2
  Gene Name: GRB10 interacting GYF protein 2
  Uniprot ID: Q6Y7W6
  ENSP ID: ENSP00000387170
MAAETQTLNFGPEWLRALSSGGSITSPPLSPALPKYKLADYRYGREEMLALFLKDNKIPSDLLDKEFLPILQEEPLPPLALVPFTEEEQRNFSMSVNSAAVLRLTGRGGGGTVVGAPRGRSSSRGRGRGRGECGFYQRSFDEVEGVFGRGGGREMHRSQSWEERGDRRFEKPGRKDVGKKNGYYCMYSPVLLLGQPLCQGRPNFEEGGPTSVGRKHEFIRSESENWRIFREEQNGEDEDGGWRLAGSRRDGERWRPHSPDGPRSAGWREHMERRRRFEFDFRDRDDERGYRRVRSGSGSIDDDRDSLPEWCLEDAEEEMGTFDSSGAFLSLKKVQKEPIPEEQEMDFRPVDEGEECSDSEGSHNEEAKEPDKTNKKEGEKTDRVGVASEETPQTSSSSARPGTPSDHQSQEASQFERKDEPKTEQTEKAEEETRMENSLPAKVPSRGDEMVADVQQPLSQIPSDTASPLLILPPPVPNPSPTLRPVETPVVGAPGMGSVSTEPDDEEGLKHLEQQAEKMVAYLQDSALDDERLASKLQEHRAKGVSIPLMHEAMQKWYYKDPQGEIQGPFNNQEMAEWFQAGYFTMSLLVKRACDESFQPLGDIMKMWGRVPFSPGPAPPPHMGELDQERLTRQQELTALYQMQHLQYQQFLIQQQYAQVLAQQQKAALSSQQQQQLALLLQQFQTLKMRISDQNIIPSVTRSVSVPDTGSIWELQPTASQPTVWEGGSVWDLPLDTTTPGPALEQLQQLEKAKAAKLEQERREAEMRAKREEEERKRQEELRRQQEEILRRQQEEERKRREEEELARRKQEEALRRQREQEIALRRQREEEERQQQEEALRRLEERRREEEERRKQEELLRKQEEEAAKWAREEEEAQRRLEENRLRMEEEAARLRHEEEERKRKELEVQRQKELMRQRQQQQEALRRLQQQQQQQQLAQMKLPSSSTWGQQSNTTACQSQATLSLAEIQKLEEERERQLREEQRRQQRELMKALQQQQQQQQQKLSGWGNVSKPSGTTKSLLEIQQEEARQMQKQQQQQQQHQQPNRARNNTHSNLHTSIGNSVWGSINTGPPNQWASDLVSSIWSNADTKNSNMGFWDDAVKEVGPRNSTNKNKNNASLSKSVGVSNRQNKKVEEEEKLLKLFQGVNKAQDGFTQWCEQMLHALNTANNLDVPTFVSFLKEVESPYEVHDYIRAYLGDTSEAKEFAKQFLERRAKQKANQQRQQQQLPQQQQQQPPQQPPQQPQQQDSVWGMNHSTLHSVFQTNQSNNQQSNFEAVQSGKKKKKQKMVRADPSLLGFSVNASSERLNMGEIETLDDY

SEQ ID NO: 36265 - protein, 176 aa, Homo sapiens
  Payload ID: 7175
  Gene Symbol: GIGYF2
  Gene Name: GRB10 interacting GYF protein 2
  ENSP ID: ENSP00000387276
MDRIWAEREKKFQLVKNKQDGPRSAGWREHMERRRRFEFDFRDRDDERGYRRVRSGSGSIDDDRDSLPEWCLEDAEEEMGTFDSSGAFLSLKKVQKEPIPEEQEMDFRPVDEGEECSDSEGSHNEEAKEPDKTNKKEGEKTDRVGVEASEETPQTSSSSARPGTPSDHQSQEASQF

SEQ ID NO: 36266 - protein, 59 aa, Homo sapiens
  Payload ID: 7175
  Gene Symbol: GIGYF2
  Gene Name: GRB10 interacting GYF protein 2
  ENSP ID: ENSP00000389322
MDRIWAEREKKFQLVKNKQDGPRSAGWREHMERRRSTERAYSRRAGDGLPACGRRGGVL

SEQ ID NO: 36267 - protein, 90 aa, Homo sapiens
  Payload ID: 7175
  Gene Symbol: GIGYF2
  Gene Name: GRB10 interacting GYF protein 2
  ENSP ID: ENSP00000390325
MISDGRPNFEEGGPTSVGRKHEFIRSESENWRIFREEQNGEDEDGGWRLAGSRRDGERWRPHSPDGPRSAGWREHMERRRRFEFDFRDRD

SEQ ID NO: 36268 - protein, 119 aa, Homo sapiens
  Payload ID: 7175
  Gene Symbol: GIGYF2
  Gene Name: GRB10 interacting GYF protein 2
  ENSP ID: ENSP00000392218
MTKLPDDPGRPNFEEGGPTSVGRKHEFIRSESENWRIFREEQNGEDEDGGWRLAGSRRDGERWRPHSPDGPRSAGWREHMERRRRFEFDFRDRDDERGYRRVRSGSGSIDDDRDSLPEW

SEQ ID NO: 36269 - protein, 106 aa, Homo sapiens
  Payload ID: 7175
  Gene Symbol: GIGYF2
  Gene Name: GRB10 interacting GYF protein 2
  ENSP ID: ENSP00000392991
MAAETQTLNFGPEWLRALSSGGSITSPPLSPALPKYKLADYRYGREEMLALFLKDNKIPSDLLDKEFLPILQEEPLPPLALVPFTEEEQRNFSMSVNSAAVLRLTG

SEQ ID NO: 36270 - protein, 62 aa, Homo sapiens
  Payload ID: 7175
  Gene Symbol: GIGYF2
  Gene Name: GRB10 interacting GYF protein 2
  ENSP ID: ENSP00000395299
MERRRRFEFDFRDRDDERGYRRVRSGSGSIDDDRDSLPEWCLEDAEEEMGTFDSSGAFLSLK

SEQ ID NO: 36271 - protein, 13 aa, Homo sapiens
  Payload ID: 7175
  Gene Symbol: GIGYF2
  Gene Name: GRB10 interacting GYF protein 2
  ENSP ID: ENSP00000396590
MAAETQTLNFGPE

SEQ ID NO: 36272 - protein, 112 aa, Homo sapiens
  Payload ID: 7175
  Gene Symbol: GIGYF2
  Gene Name: GRB10 interacting GYF protein 2
  ENSP ID: ENSP00000396958
MAAETQTLNFGPEWLRALSSGGSITSPPLSPALPKYKLADYRYGREEMLALFLKDNKIPSDLLDKEFLPILQEEPLPPLALVPFTEEEQRNFSMSVNSAAVLRLTGRGGGGT

SEQ ID NO: 36273 - protein, 143 aa, Homo sapiens
  Payload ID: 7175
  Gene Symbol: GIGYF2
  Gene Name: GRB10 interacting GYF protein 2
  ENSP ID: ENSP00000398055
MERRRRFEFDFRDRDDERGYRRVRSGSGSIDDDRDSLPEWCLEDAEEEMGTFDSSGAFLSLKKVQKEPIPEEQEMDFRPVDEGEECSDSEGSHNEEAKEPDKTNKKEGEKTDRVGVEASEETPQTSSSSARPGTPSDHQSQEA

SEQ ID NO: 36274 - protein, 92 aa, Homo sapiens
  Payload ID: 7175
  Gene Symbol: GIGYF2
  Gene Name: GRB10 interacting GYF protein 2
  ENSP ID: ENSP00000399064
MAAETQTLNFGPEWLRALSSGGSITSPPLSPALPKYKLADYRYGREEMLALFLKDNKIPSDLLDKEFLPILQEEPLPPLALVPFTEEEQRQR

SEQ ID NO: 36275 - protein, 62 aa, Homo sapiens; identical to SEQ ID NO: 36270
  Payload ID: 7175
  Gene Symbol: GIGYF2
  Gene Name: GRB10 interacting GYF protein 2
  ENSP ID: ENSP00000400076

SEQ ID NO: 36276 - protein, 71 aa, Homo sapiens
  Payload ID: 7175
  Gene Symbol: GIGYF2
  Gene Name: GRB10 interacting GYF protein 2
  ENSP ID: ENSP00000401261
MERRRRFEFDFRDRDDERGYRRVRSGSGSIDDDRDSLPEWCLEDAEEEMGTFDSSGAFLSLKKVQKEPIPE

SEQ ID NO: 36277 - protein, 93 aa, Homo sapiens
  Payload ID: 7175
  Gene Symbol: GIGYF2
  Gene Name: GRB10 interacting GYF protein 2
  ENSP ID: ENSP00000402053
MAAETQTLNFGPEWLRALSSGGSITSPPLSPALPKYKLADYRYGREEMLALFLKDNKIPSDLLDKEFLPILQEEPLPPLALVPFTEEEQRNFS

SEQ ID NO: 36278 - protein, 115 aa, Homo sapiens
  Payload ID: 7175
  Gene Symbol: GIGYF2
  Gene Name: GRB10 interacting GYF protein 2
  ENSP ID: ENSP00000402712
MAAETQTLNFGPEWLRALSSGGSITSPPLSPALPKYKLADYRYGREEMLALFLKDNKIPSDLLDKEFLPILQEEPLPPLALVPFTEEEQRNFSMSVNSAAVLRLTGRGGGGTVVG

SEQ ID NO: 36279 - protein, 720 aa, Homo sapiens
  Payload ID: 7175
  Gene Symbol: GIGYF2
  Gene Name: GRB10 interacting GYF protein 2
  ENSP ID: ENSP00000404195
MAAETQTLNFGPEWLRALSSGGSITSPPLSPALPKYKLADYRYGREEMLALFLKDNKIPSDLLDKEFLPILQEEPLPPLALVPFTEEEQRNFSMSVNSAAVLRLTGRGGGGTVVGAPRGRSSSRGRGRPNFEEGGPTSVGRKHEFIRSESENWRIFREEQNGEDEDGGWRLAGSRRDGERWRPHSPGWREHMERRRRFEFDFRDRDDERGYRRVRSGSGSIDDDRDSLPEWCLEDAEEEMGTFDSSGAFLSLKKVQKEPIPEEQEMDFRPVDEGEECSDSEGSHNEEAKEPDKTNKKEGEKTDRVGVEASEETPQTSSSSARPGTPSDHQSQEASQFERKDEPKTEQTEKAEEETRMENSLPAKVPSRGDEMVADVQQPLSQIPSDTASPLLILPPPVPNPSPTLRPVETPVVGAPGMGSVSTEPDDEEGLKHLEQQAEKMVAYLQDSALDDERLASKLQEHRAKGVSIPLMHEAMQKWYYKDPQGEIQGPFNNQEMAEWFQAGYFTMSLLVKRACDESFQPLGDIMKMWGRVPFSPGPAPPPHMGELDQERLTRQQELTALYQMQHLQYQQFLIQQQYAQVLAQQQKAALSSQQQQQLALLLQQFQTLKMRISDQNIIPSVTRSVSVPDTGSIWELQPTASQPTVWEGGSVWDLPLDTTTPGPALEQLQQLEKAKAAKLEQERREAEMRAKREEEERKRQEELRRQQEEILRRQQEEER

SEQ ID NO: 36280 - protein, 99 aa, Homo sapiens
  Payload ID: 7175
  Gene Symbol: GIGYF2
  Gene Name: GRB10 interacting GYF protein 2
  ENSP ID: ENSP00000407161
MAAETQTLNFGPEWLRALSSGGSITSPPLSPALPKYKLADYRYGREEMLALFLKDNKIPSDLLDKEFLPILQEEPLPPLALVPFTEEEQRNFSMSVNSA

SEQ ID NO: 36281 - protein, 836 aa, Homo sapiens
  Payload ID: 7175
  Gene Symbol: GIGYF2
  Gene Name: GRB10 interacting GYF protein 2
  ENSP ID: ENSP00000410297
MAAETQTLNFGPEWLRALSSGGSITSPPLSPALPKYKLADYRYGREEMLALFLKDNKIPSDLLDKEFLPILQEEPLPPLALVPFTEEEQRNFSMSVNSAAVLRLTGRGGGGTVVGAPRGRSSSRGRGRGRGECGFYQRSFDEVEGVFGRGGGREMHRSQSWEERGDRRFEKPGRKDVGRPNFEEGGPTSVGRKHEFIRSESENWRIFREEQNGEDEDGGWRLAGSRRDGERWRPHSPGWREHMERRRRFEFDFRDRDDERGYRRVRSGSGSIDDDRDSLPEWCLEDAEEEMGTFDSSGAFLSLKKVQKEPIPEEQEMDFRPVDEGEECSDSEGSHNEEAKEPDKTNKKEGEKTDRVGVEASEETPQTSSSSARPGTPSDHQSQEASQFERKDEPKTEQTEKAEEETRMENSLPAKVPSRGDEMVADVQQPLSQIPSDTASPLLILPPPVPNPSPTLRPVETPVVGAPGMGSVSTEPDDEEGLKHLEQQAEKMVAYLQDSALDDERLASKLQEHRAKGVSIPLMHEAMQKWYYKDPQGEIQGPFNNQEMAEWFQAGYFTMSLLVKRACDESFQPLGDIMKMWGRVPFSPGPAPPPHMGELDQERLTRQQELTALYQMQHLQYQQFLIQQQYAQVLAQQQKAALSSQQQQQLALLLQQFQTLKMRISDQNIIPSVTRSVSVPDTGSIWELQPTASQPTVWEGGSVWDLPLDTTTPGPALEQLQQLEKAKAAKLEQERREAEMRAKREEEERKRQEELRRQQEEILRRQQEEERKRREEEELARRKQEEALRRQREQEIALRRQREEEERQQQEEALRRLEERRREEEERRKQEELLRK

SEQ ID NO: 36282 - protein, 68 aa, Homo sapiens
  Payload ID: 7175
  Gene Symbol: GIGYF2
  Gene Name: GRB10 interacting GYF protein 2
  ENSP ID: ENSP00000413612
MAAETQTLNFGPEWLRALSSGGSITSPPLSPALPKYKLADYRYGRGECGFYQRSFDEVEGVFGRGGGR

SEQ ID NO: 36283 - protein, 149 aa, Homo sapiens
  Payload ID: 7175
  Gene Symbol: GIGYF2
  Gene Name: GRB10 interacting GYF protein 2
  ENSP ID: ENSP00000415037
MKALQQQQQQQQQKLSGWGNVSKPSGTTKSLLEIQQEEARQMQKQQQQQQQHQQPNRARNNTHSNLHTSIGNSVWGSINTGPPNQWASDLVSSIWSNADTKNSNMGFWDDAVKEVGPRNSTNKNKNNASLSKSVGVSNRQNKKVEEEEK

SEQ ID NO: 36284 - protein, 1321 aa, Homo sapiens; identical to SEQ ID NO: 36262
  Payload ID: 7175
  Gene Symbol: GIGYF2
  Gene Name: GRB10 interacting GYF protein 2
  ENSP ID: ENSP00000487548

SEQ ID NO: 36285 - protein, 876 aa, Homo sapiens
  Payload ID: 7176
  Gene Symbol: GAREM
  Gene Name: GRB2 associated, regulator of MAPK1
  Uniprot ID: Q9H706
  ENSP ID: ENSP00000269209
MDPAPSLGCSLKDVKWSSVAVPLDLLVSTYRLPQIARLDNGECVEGLRENDYLLIHSCRQWTTITAHSLEEGHYVIGPKIEIPVHYAGQFKLLEQDRDIKEPVQYFNSVEEVAKAFPERVYVMEDITFNVKVASGECNEDTEVYNITLCTGDELTLMGQAEILYAKTFKEKSRLNTIFKKIGKLNSISKLGKGKMPCLICMNHRTNESISLPFQCKGRFSTRSPLELQMQEGEHTIRNIVEKTRLPVNVTVPSPPPRNPYDLHFIREGHRYKFVNIQTKTVVVCCVLRNNKILPMHFPLHLTVPKFSLPEHLVKGESWPETLVHHWLGICQEQFDIDEYSRAVRDVKTDWNEECKSPKKGRCSGHNHVPNSLSYARDELTQSFHRLSVCVYGNNLHGNSEVNLHGCRDLGGDWAPFPHDILPYQDSGDSGSDYLFPEASEESAGIPGKSELPYEELWLEEGKPSHQPLTRSLSEKNRCDQFRGSVRSKCATSPLPIPGTLGAAVKSSDTALPPPPVPPKSEAVREECRLLNAPPVPPRSAKPLSTSPSIPPRTVKPARQQTRSPSPTLSYYSSGLHNISVTKTDTNPSESTPVSCYPCNRVKTDSVDLKSPFGSPSAEAVSSRLSWPNHYSGASESQTRSDFLLDPSRSYSYPRQKTPGTPKRNCPAPFDFDGCELLASPTSPVTAEFSSSVSGCPKSASYSLESTDVKSLAAGVTKQSTSCPALPPRAPKLVEEKVASETSPLPLKIDGAEEDPKSGSPDLSEDQYFVKKGMQDIFSASYPFSSPLHLQLAPRSCGDGSPWQPPADLSGLSIEEVSKSLRFIGLSEDVISFFVTEKIDGNLLVQLTEEILSEDFKLSKLQVKKIMQFINGWRPKI

SEQ ID NO: 36286 - protein, 875 aa, Homo sapiens
  Payload ID: 7176
  Gene Symbol: GAREM
  Gene Name: GRB2 associated, regulator of MAPK1
  Uniprot ID: Q9H706
  ENSP ID: ENSP00000382165
MDPAPSLGCSLKDVKWSSVAVPLDLLVSTYRLPQIARLDNGECVEGLRENDYLLIHSCRQWTTITAHSLEEGHYVIGPKIEIPVHYAGQFKLLEQDRDIKEPVQYFNSVEEVAKAFPERVYVMEDITFNVKVASGECNEDTEVYNITLCTGDELTLMGQAEILYAKTFKEKSRLNTIFKKIGKLNSISKLGKGKMPCLICMNHRTNESISLPFQCKGRFSTRSPLELQMQEGEHTIRNIVEKTRLPVNVTVPSPPPRNPYDLHFIREGHRYKFVNIQTKTVVVCCVLRNNKILPMHFPLHLTVPKFSLPEHLVKGESWPETLVHHWLGICQEQFDIDEYSRAVRDVKTDWNEECKSPKKGRCSGHNHVPNSLSYARDELTQSFHRLSVCVYGNNLHGNSEVNLHGCRDLGGDWAPFPHDILPYQDSGDSGSDYLFPEASEESAGIPGKSELPYEELWLEEGKPSHQPLTRSLSEKNRCDQFRGSVRSKCATSPLPIPGTLGAAVKSSDTALPPPPVPPKSEAVREECRLLNAPPVPPRSAKPLSTSPSIPPRTVKPARQQTRSPSPTLSYYSSGLHNIVTKTDTNPSESTPVSCYPCNRVKTDSVDLKSPFGSPSAEAVSSRLSWPNHYSGASESQTRSDFLLDPSRSYSYPRQKTPGTPKRNCPAPFDFDGCELLASPTSPVTAEFSSSVSGCPKSASYSLESTDVKSLAAGVTKQSTSCPALPPRAPKLVEEKVASETSPLPLKIDGAEEDPKSGSPDLSEDQYFVKKGMQDIFSASYPFSSPLHLQLAPRSCGDGSPWQPPADLSGLSIEEVSKSLRFIGLSEDVISFFVTEKIDGNLLVQLTEEILSEDFKLSKLQVKKIMQFINGWRPKI

SEQ ID NO: 36287 - protein, 36 aa, Homo sapiens
  Payload ID: 7176
  Gene Symbol: GAREM
  Gene Name: GRB2 associated, regulator of MAPK1
  ENSP ID: ENSP00000464185
  MOD_RES (1)..(1): Any amino acid
XAAVKSSDTALPPPPVPPKSEARQGFITLPRLVSKS

SEQ ID NO: 36288 - protein, 664 aa, Homo sapiens
  Payload ID: 7177
  Gene Symbol: GAREML
  Gene Name: GRB2 associated, regulator of MAPK1-like
  Uniprot ID: Q75VX8
  ENSP ID: ENSP00000384581
MHRMPDPGKFKLLEQARDVREPVRYFSSVEEVASVFPDRIFVMEAITFSVKVVSGEFSEDSEVYNFTLHAGDELTLMGQAEILCAKTTKERSRFTTLLRKLGRAGALAGVGGGGPASAGAAGGTGGGGARPVKGKMPCLICMNHRTNESLSLPFQCQGRFSTRSPLELQMQEGEHTVRAIIERVRLPVNVLVPSRPPRNPYDLHPVREGHCYKLVSIISKTVVLGLALRREGPAPLHFLLLTDTPRFALPQGLLAGDPRVERLVRDSASYCRERFDPDEYSTAVREAPAELAEDCASPRRARLCLPAPRAPGLARAPGPLAPAPAGEGDQEYVSPDWAAAPEPAAPPAEIPYEELWAHQGPEGLVRPPPGLDLISFGAAGPPRREPEAPPPPVPPKSEAVKEECRLLNAPPVPPRGGNGSGRLSSSPPVPPRFPKLQPVHSPSSSLSYYSSGLQDGAGSRSGSGSPSPDTYSLYCYPCTWGDCKEPVLEPFDPFELGQGSSPEPELLRSQEPRAVGTPGPGPRLSPLGPSKAFEPEGLVLHQVPTPLSPAALQGPEAGGALFLTQGRLEGPPASPRDGATGFGVRDASSWQPPADLSALSLEEVSRSLRFIGLSEDVVSFFARERIDGSIFVQLSEDILADDFHLTKLQVKKIMQFIKGWRPKI

SEQ ID NO: 36289 - protein, 874 aa, Homo sapiens
  Payload ID: 7177
  Gene Symbol: GAREML
  Gene Name: GRB2 associated, regulator of MAPK1-like
  Uniprot ID: Q75VX8
  ENSP ID: ENSP00000384593
MEKLAAGLAGLRWSMGAFPLDLIVSRCRLPTLACLGPGEYAEGVSERDILLIHSCRQWTTVTAHTLEEGHYVIGPKIDIPLQYPGKFKLLEQARDVREPVRYFSSVEEVASVFPDRIFVMEAITFSVKVVSGEFSEDSEVYNFTLHAGDELTLMGQAEILCAKTTKERSRFTTLLRKLGRAGALAGVGGGGPASAGAAGGTGGGGARPVKGKMPCLICMNHRTNESLSLPFQCQGRFSTRSPLELQMQEGEHTVRAIIERVRLPVNVLVPSRPPRNPYDLHPVREGHCYKLVSIISKTVVLGLALRREGPAPLHFLLLTDTPRFALPQGLLAGDPRVERLVRDSASYCRERFDPDEYSTAVREAPAELAEDCASPRRARLCLPAPRAPGLARAPGPLAPAPAGEGDQEYVSPDWAAAPEPAAPPAEIPYEELWAHQGPEGLVRPPPGLDLISFGAAGPPRREPEAPPPPVPPKSEAVKEECRLLNAPPVPPRGGNGSGRLSSSPPVPPRFPKLQPVHSPSSSLSYYSSGLQDGAGSRSGSGSPSPDTYSLYCYPCTWGDCKVGESSSRPAPGPLPSTTQPSQASRALTEPLSGRAASLLGADTPVKTYHSCPPLFKPSHPQKRFAPFGALNPFSGPAYPSGPSAALSSGPRTTSGPVATSGPAYSPGPASPGQAYSAAPPSSCAPSSSSSSEWQEPVLEPFDPFELGQGSSPEPELLRSQEPRAVGTPGPGPRLSPLGPSKAFEPEGLVLHQVPTPLSPAALQGPEAGGALFLTQGRLEGPPASPRDGATGFGVRDASSWQPPADLSALSLEEVSRSLRFIGLSEDVVSFFARERIDGSIFVQLSEDILADDFHLTKLQVKKIMQFIKGWRPKI

SEQ ID NO: 36290 - protein, 694 aa, Homo sapiens
  Payload ID: 7178
  Gene Symbol: GAB1
  Gene Name: GRB2-associated binding protein 1
  Uniprot ID: Q13480
  ENSP ID: ENSP00000262994
MSGGEVVCSGWLRKSPPEKKLKRYAWKRRWFVLRSGRLTGDPDVLEYYKNDHAKKPIRIIDLNLCQQVDAGLTFNKKEFENSYIFDINTIDRIFYLVADSEEEMNKWVRCICDICGFNPTEEDPVKPPGSSLQAPADLPLAINTAPPSTQADSSSATLPPPYQLINVPPHLETLGIQEDPQDYLLLINCQSKKPEPTRTHADSAKSTSSETDCNDNVPSHKNPASSQSKHGMNGFFQQQMIYDSPPSRAPSASVDSSLYNLPRSYSHDVLPKVSPSSTEADGELYVFNTPSGTSSVETQMRHVSISYDIPPTPGNTYQIPRTFPEGTLGQTSKLDTIPDIPPPRPPKPHPAHDRSPVETCSIPRTASDTDSSYCIPTAGMSPSRSNTISTVDLNKLRKDASSQDCYDIPRAFPSDRSSSLEGFHNHFKVKNVLTVGSVSSEELDENYVPMNPNSPPRQHSSSFTEPIQEANYVPMTPGTFDFSSFGMQVPPPAHMGFRSSPKTPPRRPVPVADCEPPPVDRNLKPDRKVKPAPLEIKPLPEWEELQAPVRSPITRSFARDSSRFPMSPRPDSVHSTTSSSDSHDSEENYVPMNPNLSSEDPNLFGSNSLDGGSSPMIKPKGDKQVEYLDLDLDSGKSTPPRKQKSSGSGSSVADERVDYVVVDQQKTLALKSTREAWTDGRQSTESETPAKSVK

SEQ ID NO: 36291 - protein, 724 aa, Homo sapiens
  Payload ID: 7178
  Gene Symbol: GAB1
  Gene Name: GRB2-associated binding protein 1
  Uniprot ID: Q13480
  ENSP ID: ENSP00000262995
MSGGEVVCSGWLRKSPPEKKLKRYAWKRRWFVLRSGRLTGDPDVLEYYKNDHAKKPIRIIDLNLCQQVDAGLTFNKKEFENSYIFDINTIDRIFYLVADSEEEMNKWVRCICDICGFNPTEEDPVKPPGSSLQAPADLPLAINTAPPSTQADSSSATLPPPYQLINVPPHLETLGIQEDPQDYLLLINCQSKKPEPTRTHADSAKSTSSETDCNDNVPSHKNPASSQSKHGMNGFFQQQMIYDSPPSRAPSASVDSSLYNLPRSYSHDVLPKVSPSSTEADGELYVFNTPSGTSSVETQMRHVSISYDIPPTPGNTYQIPRTFPEGTLGQTSKLDTIPDIPPPRPPKPHPAHDRSPVETCSIPRTASDTDSSYCIPTAGMSPSRSNTISTVDLNKLRKDASSQDCYDIPRAFPSDRSSSLEGFHNHFKVKNVLTVGSVSSEELDENYVPMNPNSPPRQHSSSFTEPIQEANYVPMTPGTFDFSSFGMQVPPPAHMGFRSSPKTPPRRPVPVADCEPPPVDRNLKPDRKGQSPKILRLKPHGLERTDSQTIGDFATRRKVKPAPLEIKPLPEWEELQAPVRSPITRSFARDSSRFPMSPRPDSVHSTTSSSDSHDSEENYVPMNPNLSSEDPNLFGSNSLDGGSSPMIKPKGDKQVEYLDLDLDSGKSTPPRKQKSSGSGSSVADERVDYVVVDQQKTLALKSTREAWTDGRQSTESETPAKSVK

SEQ ID NO: 36292 - protein, 94 aa, Homo sapiens
  Payload ID: 7178
  Gene Symbol: GAB1
  Gene Name: GRB2-associated binding protein 1
  ENSP ID: ENSP00000420867
  MOD_RES (1)..(1): Any amino acid
XGRLTGDPDVLEYYKNDHAKKPIRIIDLNLCQQVDAGLTFNKKEFENSYIFDINTIDRIFYLVADSEEEMNKWVRCICDICGFNPTEEGSHFVV

SEQ ID NO: 36293 - protein, 591 aa, Homo sapiens
  Payload ID: 7178
  Gene Symbol: GAB1
  Gene Name: GRB2-associated binding protein 1
  ENSP ID: ENSP00000424554
MNKWVRCICDICGFNPTEEDPVKPPGSSLQAPADLPLAINTAPPSTQADSSSATLPPPYQLINVPPHLETLGIQEDPQDYLLLINCQSKKPEPTRTHADSAKSTSSETDCNDNVPSHKNPASSQSKHGMNGFFQQQMIYDSPPSRAPSASVDSSLYNLPRSYSHDVLPKVSPSSTEADGELYVFNTPSGTSSVETQMRHVSISYDIPPTPGNTYQIPRTFPEGTLGQTSKLDTIPDIPPPRPPKPHPAHDRSPVETCSIPRTASDTDSSYCIPTAGMSPSRSNTISTVDLNKLRKDASSQDCYDIPRAFPSDRSSSLEGFHNHFKVKNVLTVGSVSSEELDENYVPMNPNSPPRQHSSSFTEPIQEANYVPMTPGTFDFSSFGMQVPPPAHMGFRSSPKTPPRRPVPVADCEPPPVDRNLKPDRKVKPAPLEIKPLPEWEELQAPVRSPITRSFARDSSRFPMSPRPDSVHSTTSSSDSHDSEENYVPMNPNLSSEDPNLFGSNSLDGGSSPMIKPKGDKQVEYLDLDLDSGKSTPPRKQKSSGSGSSVADERVDYVVVDQQKTLALKSTREAWTDGRQSTESETPAKSVK

SEQ ID NO: 36294 - protein, 176 aa, Homo sapiens
  Payload ID: 7178
  Gene Symbol: GAB1
  Gene Name: GRB2-associated binding protein 1
  ENSP ID: ENSP00000425921
MDEAWKRRWFVLRSGRLTGDPDVLEYYKNDHAKKPIRIIDLNLCQQVDAGLTFNKKEFENSYIFDINTIDRIFYLVADSEEEMNKWVRCICDICGFNPTEEDPVKPPGSSLQAPADLPLAINTAPPSTQADSSSATLPPPYQLINVPPHLETLGIQEDPQDYLLLINCQSKKPEPT

SEQ ID NO: 36295 - protein, 91 aa, Homo sapiens
  Payload ID: 7178
  Gene Symbol: GAB1
  Gene Name: GRB2-associated binding protein 1
  ENSP ID: ENSP00000426297
  MOD_RES (1)..(1): Any amino acid
XPVKPPGSSLQAPADLPLAINTAPPSTQADSSSATLPPPYQLINVPPHLETLGIQEDPQDYLLLINCQSKKPEPTRNASEECEMKILPCHF

SEQ ID NO: 36296 - protein, 48 aa, Homo sapiens
  Payload ID: 7178
  Gene Symbol: GAB1
  Gene Name: GRB2-associated binding protein 1
  ENSP ID: ENSP00000426668
MNKWVRCICDICGFNPTEEDPVKPPGSSLQAPADLPLAINTAPPSTQA

SEQ ID NO: 36297 - protein, 239 aa, Homo sapiens
  Payload ID: 7178
  Gene Symbol: GAB1
  Gene Name: GRB2-associated binding protein 1
  ENSP ID: ENSP00000427435
MSGGEVVCSGWLRKSPPEKKLKRYAWKRRWFVLRSGRLTGDPDVLEYYKNDHAKKPIRIIDLNLCQQVDAGLTFNKKEFENSYIFDINTIDRIFYLVADSEEEMNKWVRCICDICGFNPTEEDPVKPPGSSLQAPADLPLAINTAPPSTQADSSSATLPPPYQLINVPPHLETLGIQEDPQDYLLLINCQSKKPEPTSQGSSFVSEEGEEYLLLEDFESKTIPLQTHADSAKSTSSETD

SEQ ID NO: 36298 - protein, 638 aa, Homo sapiens
  Payload ID: 7179
  Gene Symbol: GAB2
  Gene Name: GRB2-associated binding protein 2
  Uniprot ID: Q9UQC2
  ENSP ID: ENSP00000343959
MSGDPDVLEYYKNDHSKKPLRIINLNFCEQVDAGLTFNKKELQDSFVFDIKTSERTFYLVAETEEDMNKWVQSICQICGFNQAEESTDSLRNVSSAGHGPRSSPAELSSSSQHLLRERKSSAPSHSSQPTLFTFEPPVSNHMQPTLSTSAPQEYLYLHQCISRRAENARSASFSQGTRASFLMRSDTAVQKLAQGNGHCVNGISGQVHGFYSLPKPSRHNTEFRDSTYDLPRSLASHGHTKGSLTGSETDNEDVYTFKTPSNTLCREFGDLLVDNMDVPATPLSAYQIPRTFTLDKNHNAMTVATPGDSAIAPPPRPPKPSQAETPRWGSPQQRPPISENSRSVAATIPRRNTLPAMDNSRLHRASSCETYEYPQRGGESAGRSAESMSDGVGSFLPGKMIVGRSDSTNSEDNYVPMNPGSSTLLAMERAGDNSQSVYIPMSPGAHHFDSLGYPSTTLPVHRGPSRGSEIQPPPVNRNLKPDRKAKPTPLDLRNNTVIDELPFKSPITKSWSRANHTFNSSSSQYCRPISTQSITSTDSGDSEENYVPMQNPVSASPVPSGTNSPAPKKSTGSVDYLALDFQPSSPSPHRKPSTSSVTSDEKVDYVQVDKEKTQALQNTMQEWTDVRQSSEPSKGAKL

SEQ ID NO: 36299 - protein, 676 aa, Homo sapiens
  Payload ID: 7179
  Gene Symbol: GAB2
  Gene Name: GRB2-associated binding protein 2
  Uniprot ID: Q9UQC2
  ENSP ID: ENSP00000354952
MSGGGDVVCTGWLRKSPPEKKLRRYAWKKRWFILRSGRMSGDPDVLEYYKNDHSKKPLRIINLNFCEQVDAGLTFNKKELQDSFVFDIKTSERTFYLVAETEEDMNKWVQSICQICGFNQAEESTDSLRNVSSAGHGPRSSPAELSSSSQHLLRERKSSAPSHSSQPTLFTFEPPVSNHMQPTLSTSAPQEYLYLHQCISRRAENARSASFSQGTRASFLMRSDTAVQKLAQGNGHCVNGISGQVHGFYSLPKPSRHNTEFRDSTYDLPRSLASHGHTKGSLTGSETDNEDVYTFKTPSNTLCREFGDLLVDNMDVPATPLSAYQIPRTFTLDKNHNAMTVATPGDSAIAPPPRPPKPSQAETPRWGSPQQRPPISENSRSVAATIPRRNTLPAMDNSRLHRASSCETYEYPQRGGESAGRSAESMSDGVGSFLPGKMIVGRSDSTNSEDNYVPMNPGSSTLLAMERAGDNSQSVYIPMSPGAHHFDSLGYPSTTLPVHRGPSRGSEIQPPPVNRNLKPDRKAKPTPLDLRNNTVIDELPFKSPITKSWSRANHTFNSSSSQYCRPISTQSITSTDSGDSEENYVPMQNPVSASPVPSGTNSPAPKKSTGSVDYLALDFQPSSPSPHRKPSTSSVTSDEKVDYVQVDKEKTQALQNTMQEWTDVRQSSEPSKGAKL

SEQ ID NO: 36300 - protein, 102 aa, Homo sapiens
  Payload ID: 7179
  Gene Symbol: GAB2
  Gene Name: GRB2-associated binding protein 2
  ENSP ID: ENSP00000431868
MSGDPDVLEYYKNDHSKKPLRIINLNFCEQVDAGLTFNKKELQDSFVFDIKTSERTFYLVAETEEDMNKWVQSICQICGFNQAEESTDSLRNVSSAGHGPRS

SEQ ID NO: 36301 - protein, 130 aa, Homo sapiens
  Payload ID: 7179
  Gene Symbol: GAB2
  Gene Name: GRB2-associated binding protein 2
  ENSP ID: ENSP00000433762
MSGDPDVLEYYKNDHSKKPLRIINLNFCEQVDAGLTFNKKELQDSFVFDIKTSERTFYLVAETEEDMNKWVQSICQICGFNQAEESTDSLRNVSSAGHGPRSSPAELSSSSQHLLRERKSSAPSHSSQPT

SEQ ID NO: 36302 - protein, 548 aa, Homo sapiens
  Payload ID: 7180
  Gene Symbol: GAB3
  Gene Name: GRB2-associated binding protein 3
  Uniprot ID: Q8WWW8
  ENSP ID: ENSP00000358581
MSAGDAVCTGWLVKSPPERKLQRYAWRKRWFVLRRGRMSGNPDVLEYYRNKHSSKPIRVIDLSECAVWKHVGPSFVRKEFQNNFVFIVKTTSRTFYLVAKTEQEMQVWVHSISQVCNLGHLEDGAADSMESLSYTPSSLQPSSASSLLTAHAASSSLPRDDPNTNAVATEETRSESELLFLPDYLVLSNCETGRLHHTSLPTRCDSWSNSDRSLEQASFDDVFVDCLQPLPSSHLVHPSCHGSGAQEVPSSRPQAALIWSREINGPPRDHLSSSPLLESSLSSTIQVDKNQGSLPCGAKELDIMSNTPPPRPPKPSHLSERRQEEWSTHSGSKKPECTLVPRRISLSGLDNMRTWKADVEGQSLRHRDKRLSLNLPCRFSPMYPTASASIEDSYVPMSPQAGASGLGPHCSPDDYIPMNSGSISSPLPELPANLEPPPVNRDLKPQRKSRPPPLDLRNLSIIREHASLTRTRTVPCSRTSFLSPERNGINSARFFANPVSREDEESYIEMKLLLSEEQRVDYVQVDEQKTQALQSTKQEWTDERQSKV

SEQ ID NO: 36303 - protein, 586 aa, Homo sapiens
  Payload ID: 7180
  Gene Symbol: GAB3
  Gene Name: GRB2-associated binding protein 3
  Uniprot ID: Q8WWW8
  ENSP ID: ENSP00000358588
MSAGDAVCTGWLVKSPPERKLQRYAWRKRWFVLRRGRMSGNPDVLEYYRNKHSSKPIRVIDLSECAVWKHVGPSFVRKEFQNNFVFIVKTTSRTFYLVAKTEQEMQVWVHSISQVCNLGHLEDGADSMESLSYTPSSLQPSSASSLLTAHAASSSLPRDDPNTNAVATEETRSESELLFLPDYLVLSNCETGRLHHTSLPTRCDSWSNSDRSLEQASFDDVFVDCLQPLPSSHLVHPSCHGSGAQEVPSSRPQAALIWSREINGPPRDHLSSSPLLESSLSSTIQVDKNQGSLPCGAKELDIMSNTPPPRPPKPSHLSERRQEEWSTHSGSKKPECTLVPRRISLSGLDNMRTWKADVEGQSLRHRDKRLSLNLPCRFSPMYPTASASIEDSYVPMSPQAGASGLGPHCSPDDYIPMNSGSISSPLPELPANLEPPPVNRDLKPQRKSRPPPLDLRNLSIIREHASLTRTRTVPCSRTSFLSPERNGINSARFFANPVSREDEESYIEMEEHRTASSLSSGALTWTKKFSLDYLALDFNSASPAPMQQKLLLSEEQRVDYVQVDEQKTQALQSTKQEWTDERQSKV

SEQ ID NO: 36304 - protein, 587 aa, Homo sapiens
  Payload ID: 7180
  Gene Symbol: GAB3
  Gene Name: GRB2-associated binding protein 3
  Uniprot ID: Q8WWW8
  ENSP ID: ENSP00000399588
MSAGDAVCTGWLVKSPPERKLQRYAWRKRWFVLRRGRMSGNPDVLEYYRNKHSSKPIRVIDLSECAVWKHVGPSFVRKEFQNNFVFIVKTTSRTFYLVAKTEQEMQVWVHSISQVCNLGHLEDGAADSMESLSYTPSSLQPSSASSLLTAHAASSSLPRDDPNTNAVATEETRSESELLFLPDYLVLSNCETGRLHHTSLPTRCDSWSNSDRSLEQASFDDVFVDCLQPLPSSHLVHPSCHGSGAQEVPSSRPQAALIWSREINGPPRDHLSSSPLLESSLSSTIQVDKNQGSLPCGAKELDIMSNTPPPRPPKPSHLSERRQEEWSTHSGSKKPECTLVPRRISLSGLDNMRTWKADVEGQSLRHRDKRLSLNLPCRFSPMYPTASASIEDSYVPMSPQAGASGLGPHCSPDDYIPMNSGSISSPLPELPANLEPPPVNRDLKPQRKSRPPPLDLRNLSIIREHASLTRTRTVPCSRTSFLSPERNGINSARFFANPVSREDEESYIEMEEHRTASSLSSGALTWTKKFSLDYLALDFNSASPAPMQQKLLLSEEQRVDYVQVDEQKTQALQSTKQEWTDERQSKV

SEQ ID NO: 36305 - protein, 150 aa, Homo sapiens
  Payload ID: 7180
  Gene Symbol: GAB3
  Gene Name: GRB2-associated binding protein 3
  ENSP ID: ENSP00000412258
  MOD_RES (1)..(1): Any amino acid
XSGALTWTKKFSLDYLALDFNSASPAPMQQARAFVFQVISSPGPRQEKQPPSEVCWPPGRGKREIAESQNTSFSLGLEHVTSFLLLLFCFLESRSHSVTQAGVQWHGHSSLQPRSPGLKLSSHLSLPSSWYYSCTSSPTAVFYFLIKNDL

SEQ ID NO: 36306 - protein, 574 aa, Homo sapiens
  Payload ID: 7181
  Gene Symbol: GAB4
  Gene Name: GRB2-associated binding protein family, member 4
  Uniprot ID: Q2WGN9
  ENSP ID: ENSP00000383431
MSLPSPSPSRELCPPDPAFAPLSSWPGSGPAGGSTRSGHVLYSGWLRKSPPEKKLRLFAWRKRWFILRRGQTSSDPDVLEYYKNDGSKKPLRTINLNLCEQLDVDVTLNFNKKEIQKGYMFDIKTSERTFYLVAETREDMNEWVQSICQICGFRQEESTGFLGNISSASHGLCSSPAEPSCSHQHLPQEQEPTSEPPVSHCVPPTWPIPAPPGCLRSHQHASQRAEHARSASFSQGSEAPFIMRRNTAMQNLAQHSGYSVDGVSGHIHGFHSLSKPSQHNAEFRGSTHRIPWSLASHGHTRGSLTGSEADNEASSGKYTQHGGGNASRPAESMHEGVCSFLPGRTLVGLSDSIASEGSCVPMNPGSPTLPAVKQAGDDSQGVCIPVGSCLVRFDLLGSPLTELSMHQDLSQGHEVQLPPVNRSLKPNQKANPTPPNLRNNRVINELSFKPPVTEPWSGTSHTFDSSSSQHPISTQSITNTDSEDSGERYLFPNPASAFPVSGGTSSSAPPRSTGNIHYAALDFQPSKPSIGSVTSGKKVDYVQVDLEKTQALQKTMHEQMCLRQSSEPPRGAKL

SEQ ID NO: 36307 - protein, 191 aa, Homo sapiens
  Payload ID: 7181
  Gene Symbol: GAB4
  Gene Name: GRB2-associated binding protein family, member 4
  ENSP ID: ENSP00000428584
  MOD_RES (1)..(1): Any amino acid
XVLYSGWLRKSPPEKKLRLFAWRKRWFILRRGQTSSDPDVLEYYKNDGSKKPLRTINLNLCEQLDVDVTLNFNKKEIQKGYMFDIKTSERTFYLVAETREDMNEWVQSICQICGFRQEESTAEPSCSHQHLPQEQEPTSEPPVSHCVPPTWPIPAPPGCLRSHQHASQRAEHASFLRQVHPAWWRECQPAC

SEQ ID NO: 36308 - protein, 157 aa, Homo sapiens
  Payload ID: 7182
  Gene Symbol: GAPT
  Gene Name: GRB2-binding adaptor protein, transmembrane
  Uniprot ID: Q8N292
  ENSP ID: ENSP00000323075
MSKSCGNNLAAISVGISLLLLLVVCGIGCVWHWKHRVATRFTLPRFLQRRSSRRKVCTKTFLGPRIIGLRHEISVETQDHKSAVRGNNTHDNYENVEAGPPKAKGKTDKELYENTGQSNFEEHIYGNETSSDYYNFQKPRPSEVPQDEDIYILPDSY

SEQ ID NO: 36309 - protein, 157 aa, Homo sapiens; identical to SEQ ID NO: 36308
  Payload ID: 7182
  Gene Symbol: GAPT
  Gene Name: GRB2-binding adaptor protein, transmembrane
  Uniprot ID: Q8N292
  ENSP ID: ENSP00000379997

SEQ ID NO: 36310 - protein, 69 aa, Homo sapiens
  Payload ID: 7182
  Gene Symbol: GAPT
  Gene Name: GRB2-binding adaptor protein, transmembrane
  ENSP ID: ENSP00000422645
MSKSCGNNLAAISVGISLLLLLVVCGIGCVWHWKHRVATRFTLPRFLQRRSSRRKVCTKTFLGPRIIGL

SEQ ID NO: 36311 - protein, 68 aa, Homo sapiens
  Payload ID: 7182
  Gene Symbol: GAPT
  Gene Name: GRB2-binding adaptor protein, transmembrane
  ENSP ID: ENSP00000423113
MSKSCGNNLAAISVGISLLLLLVVCGIGCVWHWKHRVATRFTLPRFLQRRSSRRKVCTKTFLGPRIIG

SEQ ID NO: 36312 - protein, 217 aa, Homo sapiens
  Payload ID: 7183
  Gene Symbol: GRAP
  Gene Name: GRB2-related adaptor protein
  Uniprot ID: Q13588
  ENSP ID: ENSP00000284154
MESVALYSFQATESDELAFNKGDTLKILNMEDDQNWYKAELRGVEGFIPKNYIRVKPHPWYSGRISRQLAEEILMKRNHLGAFLIRESESSPGEFSVSVNYGDQVQHFKVLREASGKYFLWEEKFNSLNELVDFYRTTTIAKKRQIFLRDEEPLLKSPGACFAQAQFDFSAQDPSQLSFRRGDIIEVLERPDPHWWRGRSCGRVGFFPRSYVQPVHL

SEQ ID NO: 36313 - protein, 188 aa, Homo sapiens
  Payload ID: 7183
  Gene Symbol: GRAP
  Gene Name: GRB2-related adaptor protein
  ENSP ID: ENSP00000378997
MEDDQNWYKAELRGVEGFIPKNYIRVKPHPWYSGRISRQLAEEILMKRNHLGAFLIRESESSPGEFSVSVNYGDQVQHFKVLREASGKYFLWEEKFNSLNELVDFYRTTTIAKKRQIFLRDEEPLLKSPGACFAQAQFDFSAQDPSQLSFRRGDIIEVLERPDPHWWRGRSCGRVGFFPRSYVQPVHL

SEQ ID NO: 36314 - protein, 205 aa, Homo sapiens
  Payload ID: 7183
  Gene Symbol: GRAP
  Gene Name: GRB2-related adaptor protein
  ENSP ID: ENSP00000459833
MESVALYSFQATESDELAFNKGDTLKILNMEDDQNWYKAELRGVEGFIPKNYIRVKPHPWYSGRISRQLAEEILMKRNHLGAFLIRESESSPGEFSVSVNHLGPALPRPSLTSQPRTPRSSASAVATSLRSWSAQTPTGGGAGPAGALASSHGVTCSPCTCEQPGGRSGQRAFLQELRSREDMDTPSSVRVTRGSVDGLGLNVGS

SEQ ID NO: 36315 - protein, 103 aa, Homo sapiens
  Payload ID: 7183
  Gene Symbol: GRAP
  Gene Name: GRB2-related adaptor protein
  ENSP ID: ENSP00000464328
MESVALYSFQATESDELAFNKGDTLKILNMEDDQNWYKAELRGVEGFIPKNYIRVKPHPWYSGRISRQLAEEILMKRNHLGAFLIRESESSPGEFSVSVKWAN

SEQ ID NO: 36316 - protein, 330 aa, Homo sapiens
  Payload ID: 7184
  Gene Symbol: GRAP2
  Gene Name: GRB2-related adaptor protein 2
  Uniprot ID: O75791
  ENSP ID: ENSP00000339186
MEAVAKFDFTASGEDELSFHTGDVLKILSNQEEWFKAELGSQEGYVPKNFIDIQFPKWFHEGLSRHQAENLLMGKEVGFFIIRASQSSPGDFSISVRHEDDVQHFKVMRDNKGNYFLWTEKFPSLNKLVDYYRTNSISRQKQIFLRDRTREDQGHRGNSLDRRSQGGPHLSGAVGEEIRPSMNRKLSDHPPTLPLQQHQHQPQPPQYAPAPQQLQQPPQQRYLQHHHFHQERRGGSLDINDGHCGTGLGSEMNAALMHRRHTDPVQLQAAGRVRWARALYDFEALEDDELGFHSGEVVEVLDSSNPSWWTGRLHNKLGLFPANYVAPMTR

SEQ ID NO: 36317 - protein, 330 aa, Homo sapiens; identical to SEQ ID NO: 36316
  Payload ID: 7184
  Gene Symbol: GRAP2
  Gene Name: GRB2-related adaptor protein 2
  Uniprot ID: O75791
  ENSP ID: ENSP00000385607

SEQ ID NO: 36318 - protein, 97 aa, Homo sapiens
  Payload ID: 7184
  Gene Symbol: GRAP2
  Gene Name: GRB2-related adaptor protein 2
  ENSP ID: ENSP00000396355
MEAVAKFDFTASGEDELSFHTGDVLKILSNQEEWFKAELGSQEGYVPKNFIDIQFPKWFHEGLSRHQAENLLMGKEVGFFIIRASQSSPGDFSISVR

SEQ ID NO: 36319 - protein, 118 aa, Homo sapiens
  Payload ID: 7185
  Gene Symbol: GRAPL
  Gene Name: GRB2-related adaptor protein-like
  Uniprot ID: Q8TC17
  ENSP ID: ENSP00000437409
MESVALYSFQATESDELAFNKGDTLKILNMEDDQNWYKAELRGVEGFIPKNYIRVKPHPWYSGRISRQLAEEILMKRNHLGAFLIRESESSPGEFSVSVNNRAQRGPCLGPKSHSRLG

SEQ ID NO: 36320 - protein, 65 aa, Homo sapiens
  Payload ID: 7185
  Gene Symbol: GRAPL
  Gene Name: GRB2-related adaptor protein-like
  ENSP ID: ENSP00000459618
  MOD_RES (1)..(1): Any amino acid
XIRVKPHPWYSGRISRQLAEEILMKRNHLGAFLIRESESSPGEFSVSVKAQRGPCLGPKSHSRLG

SEQ ID NO: 36321 - protein, 17 aa, Homo sapiens
  Payload ID: 7185
  Gene Symbol: GRAPL
  Gene Name: GRB2-related adaptor protein-like
  ENSP ID: ENSP00000464934
  MOD_RES (1)..(1): Any amino acid
XSESSPGEFSVSVKWAN

SEQ ID NO: 36322 - protein, 70 aa, Homo sapiens
  Payload ID: 7185
  Gene Symbol: GRAPL
  Gene Name: GRB2-related adaptor protein-like
  ENSP ID: ENSP00000465788
MEDDQNWYKAELRGVEGFIPKNYIRVKPHPWYSGRISRQLAEEILMKRNHLGAFLIRESESSPGEFSVSV

SEQ ID NO: 36323 - protein, 100 aa, Homo sapiens
  Payload ID: 7185
  Gene Symbol: GRAPL
  Gene Name: GRB2-related adaptor protein-like
  ENSP ID: ENSP00000466091
MESVALYSFQATESDELAFNKGDTLKILNMEDDQNWYKAELRGVEGFIPKNYIRVKPHPWYSGRISRQLAEEILMKRNHLGAFLIRESESSPGEFSVSVK

SEQ ID NO: 36324 - protein, 184 aa, Homo sapiens
  Payload ID: 7186
  Gene Symbol: GREM1
  Gene Name: gremlin 1, DAN family BMP antagonist
  Uniprot ID: O60565
  ENSP ID: ENSP00000300177
MSRTAYTVGALLLLLGTLLPAAEGKKKGSQGAIPPPDKAQHNDSEQTQSPQQPGSRNRGRGQGRGTAMPGEEVLESSQEALHVTERKYLKRDWCKTQPLKQTIHEEGCNSRTIINRFCYGQCNSFYIPRHIRKEEGSFQSCSFCKPKKFTTMMVTLNCPELQPPTKKKRVTRVKQCRCISIDLD

SEQ ID NO: 36325 - protein, 143 aa, Homo sapiens
  Payload ID: 7186
  Gene Symbol: GREM1
  Gene Name: gremlin 1, DAN family BMP antagonist
  Uniprot ID: O60565
  ENSP ID: ENSP00000323101
MSRTAYTVGALLLLLGTLLPAAEGKKKGSQGAIPPPDKALHVTERKYLKRDWCKTQPLKQTIHEEGCNSRTIINRFCYGQCNSFYIPRHIRKEEGSFQSCSFCKPKKFTTMMVTLNCPELQPPTKKKRVTRVKQCRCISIDLD

SEQ ID NO: 36326 - protein, 143 aa, Homo sapiens; identical to SEQ ID NO: 36325
  Payload ID: 7186
  Gene Symbol: GREM1
  Gene Name: gremlin 1, DAN family BMP antagonist
  Uniprot ID: O60565
  ENSP ID: ENSP00000453141

SEQ ID NO: 36327 - protein, 42 aa, Homo sapiens
  Payload ID: 7186
  Gene Symbol: GREM1
  Gene Name: gremlin 1, DAN family BMP antagonist
  ENSP ID: ENSP00000453387
MSRTAYTVGALLLLLGTLLPAAEGKKKGSQGAIPPPAKRPCM

SEQ ID NO: 36328 - protein, 184 aa, Homo sapiens; identical to SEQ ID NO: 36324
  Payload ID: 7186
  Gene Symbol: GREM1
  Gene Name: gremlin 1, DAN family BMP antagonist
  Uniprot ID: O60565
  ENSP ID: ENSP00000478319

SEQ ID NO: 36329 - protein, 143 aa, Homo sapiens; identical to SEQ ID NO: 36325
  Payload ID: 7186
  Gene Symbol: GREM1
  Gene Name: Gremlin 1, DAN family BMP antagonist
  ENSP ID: ENSP00000488158

SEQ ID NO: 36330 - protein, 42 aa, Homo sapiens; identical to SEQ ID NO: 36327
  Payload ID: 7186
  Gene Symbol: GREM1
  Gene Name: Gremlin 1, DAN family BMP antagonist
  ENSP ID: ENSP00000488217

SEQ ID NO: 36331 - protein, 184 aa, Homo sapiens; identical to SEQ ID NO: 36324
  Payload ID: 7186
  Gene Symbol: GREM1
  Gene Name: Gremlin 1, DAN family BMP antagonist
  ENSP ID: ENSP00000488588

SEQ ID NO: 36332 - protein, 168 aa, Homo sapiens
  Payload ID: 7187
  Gene Symbol: GREM2
  Gene Name: gremlin 2, DAN family BMP antagonist
  Uniprot ID: Q9H772
  ENSP ID: ENSP00000318650
MFWKLSLSLFLVAVLVKVAEARKNRPAGAIPSPYKDGSSNNSERWQHQIKEVLASSQEALVVTERKYLKSDWCKTQPLRQTVSEEGCRSRTILNRFCYGQCNSFYIPRHVKKEEESFQSCAFCKPQRVTSVLVELECPGLDPPFRLKKIQKVKQCRCMSVNLSDSDKQ

SEQ ID NO: 36333 - protein, 480 aa, Homo sapiens
  Payload ID: 7188
  Gene Symbol: GRSF1
  Gene Name: G-rich RNA sequence binding factor 1
  Uniprot ID: Q12849
  ENSP ID: ENSP00000254799
MAGTRWVLGALLRGCGCNCSSCRRTGAACLPFYSAAGSIPSGVSGRRRLLLLLGAAAAAASQTRGLQTGPVPPGRLAGPPAVATSAAAAAAASYSALRASLLPQSLAAAAAVPTRSYSQESKTTYLEDLPPPPEYELAPSKLEEEVDDVFLIRAQGLPWSCTMEDVLNFFSDCRIRNGENGIHFLLNRDGKRRGDALIEMESEQDVQKALEKHRMYMGQRYVEVYEINNEDVDALMKSLQVKSSPVVNDGVVRLRGLPYSCNEKDIVDFFAGLNIVDITFVMDYRGRRKTGEAYVQFEEPEMANQALLKHREEIGNRYIEIFPSRRNEVRTHVGSYKGKKIASFPTAKYITEPEMVFEEHEVNEDIQPMTAFESEKEIELPKEVPEKLPEAADFGTTSSLHFVHMRGLPFQANAQDIINFFAPLKPVRITMEYSSSGKATGEADVHFETHEDAVAAMLKDRSHVHHRYIELFLNSCPKGK

SEQ ID NO: 36334 - protein, 417 aa, Homo sapiens
  Payload ID: 7188
  Gene Symbol: GRSF1
  Gene Name: G-rich RNA sequence binding factor 1
  ENSP ID: ENSP00000421789
  MOD_RES (1)..(1): Any amino acid
XPPPSTLCSYWALEQGKLSQASGLLLVLFSPRVSGRLGSVSVAGVNVEALFPAWPMESKTTYLEDLPPPPEYELAPSKLEEEVDDVFLIRAQGLPWSCTMEDVLNFFSDCRIRNGENGIHFLLNRDGKRRGDALIEMESEQDVQKALEKHRMYMGQRYVEVYEINNEDVDALMKSLQVKSSPVVNDGVVRLRGLPYSCNEKDIVDFFAGLNIVDITFVMDYRGRRKTGEAYVQFEEPEMANQALLKHREEIGNRYIEIFPSRRNEVRTHVGSYKGKKIASFPTAKYITEPEMVFEEHEVNEDIQPMTAFESEKEIELPKEVPEKLPEAADFGTTSSLHFVHMRGLPFQANAQDIINFFAPLKPVRITMEYSSSGKATGEADVHFETHEDAVAAMLKDRSHVHHRYIELFLNSCPKGK

SEQ ID NO: 36335 - protein, 318 aa, Homo sapiens
  Payload ID: 7188
  Gene Symbol: GRSF1
  Gene Name: G-rich RNA sequence binding factor 1
  Uniprot ID: Q12849
  ENSP ID: ENSP00000425430
MEDVLNFFSDCRIRNGENGIHFLLNRDGKRRGDALIEMESEQDVQKALEKHRMYMGQRYVEVYEINNEDVDALMKSLQVKSSPVVNDGVVRLRGLPYSCNEKDIVDFFAGLNIVDITFVMDYRGRRKTGEAYVQFEEPEMANQALLKHREEIGNRYIEIFPSRRNEVRTHVGSYKGKKIASFPTAKYITEPEMVFEEHEVNEDIQPMTAFESEKEIELPKEVPEKLPEAADFGTTSSLHFVHMRGLPFQANAQDIINFFAPLKPVRITMEYSSSGKATGEADVHFETHEDAVAAMLKDRSHVHHRYIELFLNSCPKGK

SEQ ID NO: 36336 - protein, 453 aa, Homo sapiens
  Payload ID: 7188
  Gene Symbol: GRSF1
  Gene Name: G-rich RNA sequence binding factor 1
  ENSP ID: ENSP00000427354
AAAVPTRSYSQVRGRREGPGARSLPGRVHAPPRPSVPPCAPRGHARGSATLAAHPPPSTLCSYWALEQGKLSQASGLLLVLFSPRVSGRLGSESKTTYLEDLPPPPEYELAPSKLEEEVDDVFLIRAQGLPWSCTMEDVLNFFSDCRIRNGENGIHFLLNRDGKRRGDALIEMESEQDVQKALEKHRMYMGQRYVEVYEINNEDVDALMKSLQVKSSPVVNDGVVRLRGLPYSCNEKDIVDFFAGLNIVDITFVMDYRGRRKTGEAYVQFEEPEMANQALLKHREEIGNRYIEIFPSRRNEVRTHVGSYKGKKIASFPTAKYITEPEMVFEEHEVNEDIQPMTAFESEKEIELPKEVPEKLPEAADFGTTSSLHFVHMRGLPFQANAQDIINFFAPLKPVRITMEYSSSGKATGEADVHFETHEDAVAAMLKDRSHVHHRYIELFLNSCPKGK

SEQ ID NO: 36337 - protein, 114 aa, Homo sapiens
  Payload ID: 7188
  Gene Symbol: GRSF1
  Gene Name: G-rich RNA sequence binding factor 1
  ENSP ID: ENSP00000427644
KRRGDALIEMESEQDVQKALEKHRMYMGQRYVEVYEINNEDVDALMKSLQVKSSPVVNDGVVRLRGLPYSCNEKDIVDFFADTSRYFQAEGMKFEHMSVLIRERKSHLFLLLSI

SEQ ID NO: 36338 - protein, 424 aa, Homo sapiens
  Payload ID: 7188
  Gene Symbol: GRSF1
  Gene Name: G-rich RNA sequence binding factor 1
  ENSP ID: ENSP00000443380
MAGTRWVLGALLRGCGCNCSSCRRTGAACLPFYSAASYSALRASLLPQSLAAAAAVPTRSYSQESKTTYLEDLPPPPEYELAPSKLEEEVDDVFLIRAQGLPWSCTMEDVLNFFSDCRIRNGENGIHFLLNRDGKRRGDALIEMESEQDVQKALEKHRMYMGQRYVEVYEINNEDVDALMKSLQVKSSPVVNDGVVRLRGLPYSCNEKDIVDFFAGLNIVDITFVMDYRGRRKTGEAYVQFEEPEMANQALLKHREEIGNRYIEIFPSRRNEVRTHVGSYKGKKIASFPTAKYITEPEMVFEEHEVNEDIQPMTAFESEKEIELPKEVPEKLPEAADFGTTSSLHFVHMRGLPFQANAQDIINFFAPLKPVRITMEYSSSGKATGEADVHFETHEDAVAAMLKDRSHVHHRYIELFLNSCPKGK

SEQ ID NO: 36339 - protein, 445 aa, Homo sapiens
  Payload ID: 7189
  Gene Symbol: GCOM1
  Gene Name: GRINL1A complex locus 1
  ENSP ID: ENSP00000369942
MLRSTSTVTLLSGGAARTPGAPSRRANVCRLRLTVPPESPVPEQCEKKIERKEQLLDLSNGEPTRKLPQGVVYGVVRRSDQNQQKEMVVYGWSTSQLKEEMNYIKDVRATLEKVRKRMYGDYDEMRQKIRQLTQELSVSHAQQEYLENHIQTQSSALDRFNAMNSALASDSIGLQKTLVDVTLENSNIKDQIRNLQQTYEASMDKLREKQRQLEVAQVENQLLKMKVESSQEANAEVMREMTKKLYSQYEEKLQEEQRKHSAEKEALLEETNSFLKAIEEANKKMQAAEISLEEKDQRIGELDRLIERMEKERHQLQLQLLEHETEMSGELTDSDKERYQQLEEASASLRERIRHLDDMVHCQQKKVKQMVEEIESLKKKLQQKQLLILQLLEKISFLEGENNELQSRLDYLTETQAKTEVETREIGVGCDLLPRRCKQSSQRKN

SEQ ID NO: 36340 - protein, 550 aa, Homo sapiens
  Payload ID: 7189
  Gene Symbol: GCOM1
  Gene Name: GRINL1A complex locus 1
  ENSP ID: ENSP00000369943
MLRSTSTVTLLSGGAARTPGAPSRRANVCRLRLTVPPESPVPEQCEKKIERKEQLLDLSNGEPTRKLPQGVVYGVVRRSDQNQQKEMVVYGWSTSQLKEEMNYIKDVRATLEKVRKRMYGDYDEMRQKIRQLTQELSVSHAQQEYLENHIQTQSSALDRFNAMNSALASDSIGLQKTLVDVTLENSNIKDQIRNLQQTYEASMDKLREKQRQLEVAQVENQLLKMKVESSQEANAEVMREMTKKLYSQYEEKLQEEQRKHSAEKEALLEETNSFLKAIEEANKKMQAAEISLEEKDQRIGELDRLIERMEKERHQLQLQLLEHETEMSGELTDSDKERYQQLEEASASLRERIRHLDDMVHCQQKKVKQMVEEIESLKKKLQQKQLLILQLLEKISFLEGENNELQSRLDYLTETQAKTEVETREIGVGCDLLPRLPFRQNDSSSHCQKSGSPISSEERRRRDKQHLDDITAARLLPLHHMPTQLLSIEESLALQKQQKQNYEEMQAKLAAQKLAERLNIKMRSYNPEGESSGRYREVRDEDDDWSSDEF

SEQ ID NO: 36341 - protein, 466 aa, Homo sapiens
  Payload ID: 7189
  Gene Symbol: GCOM1
  Gene Name: GRINL1A complex locus 1
  ENSP ID: ENSP00000432066
MLRSTSTVTLLSGGAARTPGAPSRRANVCRLRLTVPPESPVPEQCEKKIERKEQLLDLSNGEPTRKLPQGVVYGVVRRSDQNQQKEMVVYGWSTSQLKEEMNYIKDVRATLEKVRKRMYGDYDEMRQKIRQLTQELSVSHAQQEYLENHIQTQSSALDRFNAMNSALASDSIGLQKTLVDVTLENSNIKDQIRNLQQTYEASMDKLREKQRQLEVAQVENQLLKMKVESSQEANAEVMREMTKKLYSQYEEKLQEEQRKHSAEKEALLEETNSFLKAIEEANKKMQAAEISLEEKDQRIGELDRLIERMEKERHQLQLQLLEHETEMSGELTDSDKERYQQLEEASASLRERIRHLDDMVHCQQKKVKQMVEEIESLKKKLQQKQLLILQLLEKISFLEGENNELQSRLDYLTETQAKTEVETREIGVGCDLLPSQTGRTREIVMPSRNYTPYTRVLELTMKKTLT

SEQ ID NO: 36342 - protein, 397 aa, Homo sapiens
  Payload ID: 7189
  Gene Symbol: GCOM1
  Gene Name: GRINL1A complex locus 1
  ENSP ID: ENSP00000432563
MLRSTSTVTLLSGGAARTPGAPSRRANVCRLRLTVPPESPVPEQCEKKIERKEQLLDLSNGEPTRKLPQGVVYGVVRRSDQNQQKEMVVYGWSTSQLKEEMNYIKDKTLVDVTLENSNIKDQIRNLQQTYEASMDKLREKQRQLEVAQVENQLLKMKVESSQEANAEVMREMTKKLYSQYEEKLQEEQRKHSAEKEALLEETNSFLKAIEEANKKMQAAEISLEEKDQRIGELDRLIERMEKERHQLQLQLLEHETEMSGELTDSDKERYQQLEEASASLRERIRHLDDMVHCQQKKVKQMVEEIESLKKKLQQKQLLILQLLEKISFLEGENNELQSRLDYLTETQAKTEVETREIGVGCDLLPSQTGRTREIVMPSRNYTPYTRVLELTMKKTLT

SEQ ID NO: 36343 - protein, 435 aa, Homo sapiens
  Payload ID: 7189
  Gene Symbol: GCOM1
  Gene Name: GRINL1A complex locus 1
  ENSP ID: ENSP00000433702
MLRSTSTVTLLSGGAARTPGAPSRRANVCRLRLTVPPESPVPEQCEKKIERKEQLLDLSNGEPTRKLPQGVVYGVVRRSDQNQQKEMVVYGWSTSQLKEEMNYIKDVSHAQQEYLENHIQTQSSALDRFNAMNSALASDSIGLQKTLVDVTLENSNIKDQIRNLQQTYEASMDKLREKQRQLEVAQVENQLLKMKVESSQEANAEVMREMTKKLYSQYEEKLQEEQRKHSAEKEALLEETNSFLKAIEEANKKMQAAEISLEEKDQRIGELDRLIERMEKERHQLQLQLLEHETEMSGELTDSDKERYQQLEEASASLRERIRHLDDMVHCQQKKVKQMVEEIESLKKKLQQKQLLILQLLEKISFLEGENNELQSRLDYLTETQAKTEVETREIGVGCDLLPSQTGRTREIVMPSRNYTPYTRVLELTMKKTLT

SEQ ID NO: 36344 - protein, 379 aa, Homo sapiens
  Payload ID: 7189
  Gene Symbol: GCOM1
  Gene Name: GRINL1A complex locus 1
  ENSP ID: ENSP00000434505
MLRSTSTVTLLSGGAARTPGAPSRRANVCRLRLTVPPESPVPEQCEKKIERKEQLLDLSNGEPTRKLPQGVVYGVVRRSDQNQQKEMVVYGWSTSQLKEEMNYIKDVRATLEKVRKRMYGDYDEMRQKIRQLTQELSVSHAQQEYLENHIQTQSSALDRFNAMNSALASDSIGLQKTLVDVTLENSNIKDQIRNLQQTYEASMDKLREKQRQLEVAQVENQLLKMKVESSQEANAEVMREMTKKLYSQYEEKLQEEQRKHSAEKEALLEETNSFLKAIEEANKKMQAAEISLEEKDQRIGELDRLIERMEKERHQLQLQLLEHETEMSGELTDSDKERYQQLEEASASLRERIRHLDDMVHCQQKKVKQMVEEVTFSTK

SEQ ID NO: 36345 - protein, 415 aa, Homo sapiens
  Payload ID: 7189
  Gene Symbol: GCOM1
  Gene Name: GRINL1A complex locus 1
  ENSP ID: ENSP00000434588
MLRSTSTVTLLSGGAARTPGAPSRRANVCRLRLTVPPESPVPEQCEKKIERKEQLLDLSNGEPTRKLPQGVVYGVVRRSDQNQQKEMVVYGWSTSQLKEEMNYIKDVSHAQQEYLENHIQTQSSALDRFNAMNSALASDSIGLQKTLVDVTLENSNIKDQIRNLQQTYEASMDKLREKQRQLEVAQVENQLLKMKVESSQEANAEVMREMTKKLYSQYEEKLQEEQRKHSAEKEALLEETNSFLKAIEEANKKMQAAEISLEEKDQRIGELDRLIERMEKERHQLQLQLLEHETEMSGELTDSDKERYQQLEEASASLRERIRHLDDMVHCQQKKVKQMVEENNELQSRLDYLTETQAKTEVETREIGVGCDLLPRQSRKFEKVLNEFVQLLPLPHHLLWAFGNVCWRRHFGLLQ

SEQ ID NO: 36346 - protein, 414 aa, Homo sapiens
  Payload ID: 7189
  Gene Symbol: GCOM1
  Gene Name: GRINL1A complex locus 1
  ENSP ID: ENSP00000435028
MLRSTSTVTLLSGGAARTPGAPSRRANVCRLRLTVPPESPVPEQCEKKIERKEQLLDLSNGEPTRKLPQGVVYGVVRRSDQNQQKEMVVYGWSTSQLKEEMNYIKDVRATLEKVRKRMYGDYDEMRQKIRQLTQELSVSHAQQEYLENHIQTQSSALDRFNAMNSALASDSIGLQKTLVDVTLENSNIKDQIRNLQQTYEASMDKLREKQRQLEVAQVENQLLKMKVESSQEANAEVMREMTKKLYSQYEEKLQEEQRKHSAEKEALLEETNSFLKAIEEANKKMQAAEISLEEKDQRIGELDRLIERMEKERHQLQLQLLEHETEMSGELTDSDKERYQQLEEASASLRERIRHLDDMVHCQQKKVKQMVEEIESLKKKLQQKQLLILQLLEKISFLEGEGRKGLKGRLKMSC

SEQ ID NO: 36347 - protein, 438 aa, Homo sapiens
  Payload ID: 7189
  Gene Symbol: GCOM1
  Gene Name: GRINL1A complex locus 1
  ENSP ID: ENSP00000435774
MLRSTSTVTLLSGGAARTPGAPSRRANVCRLRLTVPPESPVPEQCEKKIERKEQLLDLSNGEPTRKLPQGVVYGVVRRSDQNQQKEMVVYGWSTSQLKEEMNYIKDVRATLEKVRKRMYGDYDEMRQKIRQLTQELSVSHAQQEYLENHIQTQSSALDRFNAMNSALASDSIGLQKTLVDVTLENSNIKDQIRNLQQTYEASMDKLREKQRQLEVAQVENQLLKMKVESSQEANAEVMREMTKKLYSQYEEKLQEEQRKHSAEKEALLEETNSFLKAIEEANKKMQAAEISLEEKDQRIGELDRLIERMEKERHQLQLQLLEHETEMSGELTDSDKERYQQLEEASASLRERIRHLDDMVHCQQKKVKQMVEENNELQSRLDYLTETQAKTEVETREIGVGCDLLPSQTGRTREIVMPSRNYTPYTRVLELTMKKTLT

SEQ ID NO: 36348 - protein, 390 aa, Homo sapiens
  Payload ID: 7189
  Gene Symbol: GCOM1
  Gene Name: GRINL1A complex locus 1
  ENSP ID: ENSP00000436614
MLRSTSTVTLLSGGAARTPGAPSRRANVCRLRLTVPPESPVPEQCEKKIERKEQLLDLSNGEPTRKLPQGVVYGVVRRSDQNQQKEMVVYGWSTSQLKEEMNYIKDVRATLEKVRKRMYGDYDEMRQKIRQLTQELSVSHAQQEYLENHIQTQSSALDRFNAMNSALASDSIGLQKTLVDVTLENSNIKDQIRNLQQTYEASMDKLREKQRQLEVAQVENQLLKMKVESSQEANAEVMREMTKKLYSQYEEKLQEEQRKHSAEKEALLEETNSFLKAIEEANKKMQAAEISLEEKDQRIGELDRLIERMEKERHQLQLQLLEHETEMSGELTDSDKERYQQLEEASASLRERIRHLDDMVHCQQKKVKQMVEEIMSHELFSRFSLRLFGR

SEQ ID NO: 36349 - protein, 407 aa, Homo sapiens
  Payload ID: 7189
  Gene Symbol: GCOM1
  Gene Name: GRINL1A complex locus 1
  ENSP ID: ENSP00000436922
MLRSTSTVTLLSGGAARTPGAPSRRANVCRLRLTVPPESPVPEQCEKKIERKEQLLDLSNGEPTRKLPQGVVYGVVRRSDQNQQKEMVVYGWSTSQLKEEMNYIKDVRATLEKVRKRMYGDYDEMRQKIRQLTQELSVSHAQQEYLENHIQTQSSALDRFNAMNSALASDSIGLQKTLVDVTLENSNIKDQIRNLQQTYEASMDKLREKQRQLEVAQVENQLLKMKVESSQEANAEVMREMTKKLYSQYEEKLQEEQRKHSAEKEALLEETNSFLKAIEEANKKMQAAEISLEEKDQRIGELDRLIERMEKERHQLQLQLLEHETEMSGELTDSDKERYQQLEEASASLRERIRHLDDMVHCQQKKVKQMVEEIESLKKKLQQKQLLILQLLEKISFLEGEVTFSTK

SEQ ID NO: 36350 - protein, 765 aa, Homo sapiens
  Payload ID: 7189
  Gene Symbol: GCOM1
  Gene Name: GRINL1A complex locus 1
  ENSP ID: ENSP00000465231
MLRSTSTVTLLSGGAARTPGAPSRRANVCRLRLTVPPESPVPEQCEKKIERKEQLLDLSNGEPTRKLPQGVVYGVVRRSDQNQQKEMVVYGWSTSQLKEEMNYIKDVRATLEKVRKRMYGDYDEMRQKIRQLTQELSVSHAQQEYLENHIQTQSSALDRFNAMNSALASDSIGLQKTLVDVTLENSNIKDQIRNLQQTYEASMDKLREKQRQLEVAQVENQLLKMKVESSQEANAEVMREMTKKLYSQYEEKLQEEQRKHSAEKEALLEETNSFLKAIEEANKKMQAAEISLEEKDQRIGELDRLIERMEKERHQLQLQLLEHETEMSGELTDSDKERYQQLEEASASLRERIRHLDDMVHCQQKKVKQMVEEIESLKKKLQQKQLLILQLLEKISFLEGENNELQSRLDYLTETQAKTEVETREIGVGCDLLPRKFICKLPDKGKKIFDSFAKLKAAIAECEEVRRKSELFNPVSLDCKLRQKAIAEVDVGTDKAQNSDPILDTSSLVPGCSSVDNIKSSQTSQNQGLGRPTLEGDEETSEVEYTVNKGPASSNRDRVPPSSEASEHHPRHRVSSQAEDTSSSFDNLFIDRLQRITIADQGEQQSEENASTKNLTGLSSGTEKKPHYMEVLEMRAKNPVPQLRKFKTNVLPFRQNDSSSHCQKSGSPISSEERRRRDKQHLDDITAARLLPLHHMPTQLLSIEESLALQKQQKQNYEEMQAKLAAQKLAERLNIKMRSYNPEGESSGRYREVRDEDDDWSSDEF

SEQ ID NO: 36351 - protein, 775 aa, Homo sapiens
  Payload ID: 7190
  Gene Symbol: GCC1
  Gene Name: GRIP and coiled-coil domain containing 1
  Uniprot ID: Q96CN9
  ENSP ID: ENSP00000318821
MEKFGMNFGGGPSKKDLLETIETQKKQLLQYQARLKDVVRAYKSLLKEKEALEASIKVLSVSHEADVGLAGVQLPGLTFPDSVDDRCSTHSEDSTGTATSLDTAASLTSTKGEFGVEDDRPARGPPPPKSEEASWSESGVSSSSGDGPFAGGEVDKRLHQLKTQLATLTSSLATVTQEKSRMEASYLADKKKMKQDLEDASNKAEEERARLEGELKGLQEQIAETKARLITQQHDRAQEQSDHALMLRELQKLLQEERTQRQDLELRLEETREALAGRAYAAEQMEGFELQTKQLTREVEELKSELQAIRDEKNQPDPRLQELQEEAARLKSHFQAQLQQEMRKTALAEDQLRQQSQVEEQRVAALENQISEVSELLGTYEKAKQKDQLAIQKLKERILQLDLENKTLALAASSRSPLDSHGEESSLDVNVLKDKMEKLKRLLQVAARKSQVTLDVEKLCDLEIMPSSEAADGEKATALYYQQELKQLKEEFERYKMRAQVVLKSKNTKDGNLGKELEAAQEQLAELKEKYISLRLSCEELEHQHQQEADDWKQELARLQQLHRQELERCQLDFRDRTLKLEEELHKQRDRALAVLTEKDLELEQLRSVALASGLPGRRSPVGGGGPGDPADTSSSDSLTQALQLAAANEPTFFLYAEQLARKEVEITSLRKQKHRLEVEVHQLQDRLLEEGERHREEVAALQSHIEKNIRDQSREGANLEYLKNIIYRFLTLPDSLGRQQTLTAILTILHFSPEEKQVIMRLPTSASWWPSGKR

SEQ ID NO: 36352 - protein, 1684 aa, Homo sapiens
  Payload ID: 7191
  Gene Symbol: GCC2
  Gene Name: GRIP and coiled-coil domain containing 2
  Uniprot ID: Q8IWJ2
  ENSP ID: ENSP00000307939
MEDLVQDGVASPATPGTGKSKLETLPKEDLIKFAKKQMMLIQKAKSRCTELEKEIEELRSKPVTEGTGDIIKALTERLDALLLEKAETEQQCLSLKKENIKMKQEVEDSVTKMGDAHKELEQSHINYVKEIENLKNELMAVRSKYSEDKANLQKQLEEAMNTQLELSEQLKFQNNSEDNVKKLQEEIEKIRPGFEEQILYLQKQLDATTDEKKETVTQLQNIIEANSQHYQKNINSLQEELLQLKAIHQEEVKELMCQIEASAKEHEAEINKLNELKENLVKQCEASEKNIQKKYECELENLRKATSNANQDNQICSILLQENTFVEQVVNEKVKHLEDTLKELESQHSILKDEVTYMNNLKLKLEMDAQHIKDEFFHEREDLEFKINELLLAKEEQGCVIEKLKSELAGLNKQFCYTVEQHNREVQSLKEQHQKEISELNETFLSDSEKEKLTLMFEIQGLKEQCENLQQEKQEAILNYESLREIMEILQTELGESAGKISQEFESMKQQQASDVHELQQKLRTAFTEKDALLETVNRLQGENEKLLSQQELVPELENTIKNLQEKNGVYLLSLSQRDTMLKELEGKINSLTEEKDDFINKLKNSHEEMDNFHKKCEREERLILELGKKVEQTIQYNSELEQKVNELTGGLEETLKEKDQNDQKLEKLMVQMKVLSEDKEVLSAEVKSLYEENNKLSSEKKQLSRDLEVFLSQKEDVILKEHITQLEKKLQLMVEEQDNLNKLLENEQVQKLFVKTQLYGFLKEMGSEVSEDSEEKDVVNVLQAVGESLAKINEEKCNLAFQRDEKVLELEKEIKCLQEESVVQCEELKSLLRDYEQEKVLLRKELEEIQSEKEALQSDLLEMKNANEKTRLENQNLLIQVEEVSQTCSKSEIHNEKEKCFIKEHENLKPLLEQKELRDRRAELILLKDSLAKSPSVKNDPLSSVKELEEKIENLEKECKEKEEKINKIKLVAVKAKKELDSSRKETQTVKEELESLRSEKDQLSASMRDLIQGAESYKNLLLEYEKQSEQLDVEKERANNFEHRIEDLTRQLRNSTLQCETINSDNEDLLARIETLQSNAKLLEVQILEVQRAKAMVDKELEAEKLQKEQKIKEHATTVNELEELQVQLQKQKKQLQKTMQELELVKKDAQQTTLMNMEIADYERLMKELNQKLTNKNNKIEDLEQEIKIQKQKQETLQEEITSLQSSVQQYEEKNTKIKQLLVKTKKELADSKQAETDHLILQASLKGELEASQQQVEVYKIQLAEITSEKHKIHEHLKTSAEQHQRTLSAYQQRVTALQEECRAAKAEQATVTSEFESYKVRVHNVLKQQKNKSMSQAETEGAKQEREHLEMLIDQLKIKLQDSQNNLQINVSELQTLQSEHDTLLERHNKMLQETVSKEAELREKLCSIQSENMMMKSEHTQTVSQLTSQNEVLRNSFRDQVRHLQEEHRKTVETLQQQLSKMEAQLFQLKNEPTTRSPVSSQQSLKNLRERRNTDLPLLDMHTVTREEGEGMETTDTESVSSASTYTQSLEQLLNSPETKLEPPLWHAEFTKEELVQKLSSTTKSADHLNGLLRETEATNAILMEQIKLLKSEIRRLERNQEREKSAANLEYLKNVLLQFIFLKPGSERERLLPVINTMLQLSPEEKGKLAAVAQGEEENASRSSGWASYLHSWSGLR

SEQ ID NO: 36353 - protein, 247 aa, Homo sapiens
  Payload ID: 7191
  Gene Symbol: GCC2
  Gene Name: GRIP and coiled-coil domain containing 2
  ENSP ID: ENSP00000376996
NLLLEYEKQSEQLDVEKERANNFEHRIEDLTRQLRNSTLQCETINSDNEDLLARIETLQSNAKLLEVQILEVQRAKAMVDKELEAEKLQKEQKIKEHATTVNELEELQVQLQKQKKQLQKTMQELELVKKDAQQTTLMNMEIADYERLMKELNQKLTNKNNKIEDLEQEIKIQKQKQETLQEEITSLQSSVQQYEEKNTKIKQLLVKTKKELADSKQAETDHLILQASLKGELEASQQQVEVYKFVF

SEQ ID NO: 36354 - protein, 916 aa, Homo sapiens
  Payload ID: 7191
  Gene Symbol: GCC2
  Gene Name: GRIP and coiled-coil domain containing 2
  ENSP ID: ENSP00000386997
MMLIQKAKSRCTELEKEIEELRSKPVTEGTGDIIKALTERLDALLLEKAETEQQCLSLKKENIKMKQEVEDSVTKMGDAHKELEQSHINYVKEIENLKNELMAVRSKYSEDKANLQKQLEEAMNTQLELSEQLKFQNNSEDNVKKLQEEIEKIRPGFEEQILYLQKQLDATTDEKKETVTQLQNIIEANSQHYQKNINSLQEELLQLKAIHQEEVKELMCQIEASAKEHEAEINKLNELKENLVKQCEASEKNIQKKYECELENLRKATSNANQDNQICSILLQENTFVEQVVNEKVKHLEDTLKELESQHSILKDEVTYMNNLKLKLEMDAQHIKDEFFHEREDLEFKINELLLAKEEQGCVIEKLKSELAGLNKQFCYTVEQHNREVQSLKEQHQKEISELNETFLSDSEKEKLTLMFEIQGLKEQCENLQQEKQEAILNYESLREIMEILQTELGESAGKISQEFESMKQQQASDVHELQQKLRTAFTEKDALLETVNRLQGENEKLLSQQELVPELENTIKNLQEKNGVYLLSLSQRDTMLKELEGKINSLTEEKDDFINKLKNSHEEMDNFHKKCEREERLILELGKKVEQTIQYNSELEQKVNELTGGLEETLKEKDQNDQKLEKLMVQMKVLSEDKEVLSAEVKSLYEENNKLSSEKKQLSRDLEVFLSQKEDVILKEHITQLEKKLQLMVEEQDNLNKLLENEQVQKLFVKTQLYGFLKEMGSEVSEDSEEKDVVNVLQAVGESLAKINEEKCNLAFQRDEKVLELEKEIKCLQEESVVQCEELKSLLRDYEQEKVLLRKELEEIQSEKEALQSDLLEMKNANEKTRLENQNLLIQVEEVSQTCSKSEIHNEKEKCFIKEHENLKPLLEQKELRDRRAELILLKDSLAKSPSVKNDPLSSVKELEEKI

SEQ ID NO: 36355 - protein, 247 aa, Homo sapiens
  Payload ID: 7191
  Gene Symbol: GCC2
  Gene Name: GRIP and coiled-coil domain containing 2
  ENSP ID: ENSP00000387350
MEVTQDLVQDGVASPATPGTGKSKLETLPKEDLIKFAKKQMMLIQKAKSRCTELEKEIEELRSKPVTEGTGDIIKALTERLDALLLEKAETEQQCLSLKKENIKMKQEVEDSVTKMGDAHKELEQSHINYVKEIENLKNELMAVRSKYSEDKANLQKQLEEAMNTQLELSEQLKFQNNSEDNVKKLQEEIEKIRPGFEEQILYLQKQLDATTDEKKETVTQLQNIIEANSQHYQKNINSLQEELLQL

SEQ ID NO: 36356 - protein, 87 aa, Homo sapiens
  Payload ID: 7191
  Gene Symbol: GCC2
  Gene Name: GRIP and coiled-coil domain containing 2
  ENSP ID: ENSP00000392470
  MOD_RES (1)..(1): Any amino acid
XEEKINKIKLVAVKAKKELDSSRKETQTVKEELESLRSEKDQLSASMRDLIQGAESYKNMKSSQSNWMWKKNVLIILSIVLKTLQDN

SEQ ID NO: 36357 - protein, 45 aa, Homo sapiens
  Payload ID: 7191
  Gene Symbol: GCC2
  Gene Name: GRIP and coiled-coil domain containing 2
  Uniprot ID: Q8IWJ2
  ENSP ID: ENSP00000419969
MEDLVQDGVASPATPGTGKSKNWRKKLKNSDQNLLLKELVILLRH

SEQ ID NO: 36358 - protein, 146 aa, Homo sapiens
  Payload ID: 7191
  Gene Symbol: GCC2
  Gene Name: GRIP and coiled-coil domain containing 2
  ENSP ID: ENSP00000475234
LKSLLRDYEQEKVLLRKELEEIQSEKEALQSDLLEMKNANEKTRLENQNLLIQVEEVSQTCSKSEIHNEKEKCFIKEHENLKPLLEQKELRDRRAELILLKDSLAKSPSVKNDPLSSVKELEEKIGKNRLERGKLLLQKKEGELLL

SEQ ID NO: 36359 - protein, 127 aa, Homo sapiens
  Payload ID: 7191
  Gene Symbol: GCC2
  Gene Name: GRIP and coiled-coil domain containing 2
  ENSP ID: ENSP00000475798
  MOD_RES (1)..(1): Any amino acid
XKVLLRKELEEIQSEKEALQSDLLEMKNANEKTRLENQNLLIQVEEVSQTCSKSEIHNEKEKCFIKEHENLKPLLEQKELRDRRAELILLKDSLAKSPSVKNDPLSSVKELEEKIGNYGFADVVTIN

SEQ ID NO: 36360 - protein, 683 aa, Homo sapiens
  Payload ID: 7191
  Gene Symbol: GCC2
  Gene Name: GRIP and coiled-coil domain containing 2
  ENSP ID: ENSP00000482844
MCQIEASAKEHEAEINKLNELKENLVKQCEASEKNIQKKYECELENLRKATSNANQDNQICSILLQENTFVEQVVNEKVKHLEDTLKELESQHSILKDEVTYMNNLKLKLEMDAQHIKDEFFHEREDLEFKINELLLAKEEQGCVIEKLKSELAGLNKQFCYTVEQHNREVQSLKEQHQKEISELNETFLSDSEKEKLTLMFEIQGLKEQCENLQQEKQEAILNYESLREIMEILQTELGESAGKISQEFESMKQQQASDVHELQQKLRTAFTEKDALLETVNRLQGENEKLLSQQELVPELENTIKNLQEKNGVYLLSLSQRDTMLKELEGKINSLTEEKDDFINKLKNSHEEMDNFHKKCEREERLILELGKKVEQTIQYNSELEQKVNELTGGLEETLKEKDQNDQKLEKLMVQMKVLSEDKEVLSAEVKSLYEETINSVQKKQLSRDLEVFLSQKEDVILKEHITQLEKKLQLMVEEQDNLNKLLENEQVQKLFVKTQLYGFLKEMGSEVSEDSEEKDVVNVLQAVGESLAKINEEKCNLAFQRDEKVLELEKEIKCLQEESVVQCEELKSLLRDYEQEKVLLRKELEEIQSEKEALQSDLLEMKNANEKTRLENQNLLIQVEEVSQTCSKSEIHNEKEKCFIKEHENLKPLLEQKELRDRRAELILLKDSLAKSPSKK

SEQ ID NO: 36361 - protein, 841 aa, Homo sapiens
  Payload ID: 7192
  Gene Symbol: GRIPAP1
  Gene Name: GRIP1 associated protein 1
  Uniprot ID: Q4V328
  ENSP ID: ENSP00000365606
MAQALSEEEFQRMQAQLLELRTNNYQLSDELRKNGVELTSLRQKVAYLDKEFSKAQKALSKSKKAQEVEVLLSENEMLQAKLHSQEEDFRLQNSTLMAEFSKLCSQMEQLEQENQQLKEGAAGAGVAQAGPLVDGELLRLQAENTALQKNVAALQERYGKEAGKFSAVSEGQGDPPGGLAPTVLAPMPLAEVELKWEMEKEEKRLLWEQLQGLESSKQAETSRLQEELAKLSEKLKKKQESFCRLQTEKETLFNDSRNKIEELQQRKEADHKAQLARTQKLQQELEAANQSLAELRDQRQGERLEHAAALRALQDQVSIQSADAQEQVEGLLAENNALRTSLAALEQIQTAKTQELNMLREQTTGLAAELQQQQAEYEDLMGQKDDLNSQLQESLRANSRLLEQLQEIGQEKEQLTQELQEARKSAEKRKAMLDELAMETLQEKSQHKEELGAVRLRHEKEVLGVRARYERELRELHEDKKRQEEELRGQIREEKARTRELETLQQTVEELQAQVHSMDGAKGWFERRLKEAEESLQQQQQEQEEALKQCREQHAAELKGKEEELQDVRDQLEQAQEERDCHLKTISSLKQEVKDTVDGQRILEKKGSAALKDLKRQLHLERKRADKLQERLQDILTNSKSRSGLEELVLSEMNSPSRTQTGDSSSISSFSYREILREKESSAVPARSLSSSPQAQPPRPAELSDEEVAELFQRLAETQQEKWMLEEKVKHLEVSSASMAEDLCRKSAIIETYVMDSRIDVSVAAGHTDRSGLGSVLRDLVKPGDENLREMNKKLQNMLEEQLTKNMHLHKDMEVLSQEIVRLSKECVGPPDPDLEPGETS

SEQ ID NO: 36362 - protein, 810 aa, Homo sapiens
  Payload ID: 7192
  Gene Symbol: GRIPAP1
  Gene Name: GRIP1 associated protein 1
  ENSP ID: ENSP00000469842
MAQALSEEEFQRMQAQLLELRTNNYQLSDELRKNGVELTSLRQKVAYLDKEFSKAQKALSKSKKAQEVEVLLSENEMLQAKLHSQEEDFRLQNSTLMAEFSKLCSQMEQLEQENQQLKEGAAGAGVAQAGPLVDGELLRLQAENTALQKNVAALQERYGKEAGKFSAVSEGQGDPPGGLAPTVLAPMPLAEVELKWEMEKEEKRLLWEQLQGLESSKQAETSRLQEELAKLSEKLKKKQESFCRLQTEKETLFNDSRNKIEELQQRKEADHKAQLARTQKLQQELEAANQSLAELRDQRQGERLEHAAALRALQDQIQTAKTQELNMLREQTTGLAAELQQQQAEYEDLMGQKDDLNSQLQESLRANSRLLEQLQEIGQEKEQLTQELQEARKSAEKRKAMLDELAMETLQEKSQHKEELGAVRLRHEKEVLGVRARYERELRELHEDKKRQEEELRGQIREEKARTRELETLQQTVEELQAQVHSMDGAKGWFERRLKEAEESLQQQQQEQEEALKQCREQHAAELKGKEEELQDVRDQLEQAQEERDCHLKTISSLKQEVKDTVDGQRILEKKGSAALKDLKRQLHLERKRADKLQERLQDILTNSKSRSGLEELVLSEMNSPSRTQTGDSSSISSFSYREILREKESSAVPARSLSSSPQAQPPRPAELSDEEVAELFQRLAETQQEKWMLEEKVKHLEVSSASMAEDLCRKSAIIETYVMDSRIDVSVAAGHTDRSGLGSVLRDLVKPGDENLREMNKKLQNMLEEQLTKNMHLHKDMEVLSQEIVRLSKECVGPPDPDLEPGETS

SEQ ID NO: 36363 - protein, 796 aa, Homo sapiens
  Payload ID: 7192
  Gene Symbol: GRIPAP1
  Gene Name: GRIP1 associated protein 1
  ENSP ID: ENSP00000477574
MAQALSEEEFQRMQAQLLELRTNNYQLSDELRKNGVELTSLRQKVAYLDKEFSKAQKLCSQMEQLEQENQQLKEGAAGAGVAQAGPLVDGELLRLQAENTALQKNVAALQERYGKEAGKFSAVSEGQGDPPGGLAPTVLAPMPLAEVELKWEMEKEEKRLLWEQLQGLESSKQAETSRLQEELAKLSEKLKKKQESFCRLQTEKETLFNDSRNKIEELQQRKEADHKAQLARTQKLQQELEAANQSLAELRDQRQGERLEHAAALRALQDQVSIQSADAQEQVEGLLAENNALRTSLAALEQIQTAKTQELNMLREQTTGLAAELQQQQAEYEDLMGQKDDLNSQLQESLRANSRLLEQLQEIGQEKEQLTQELQEARKSAEKRKAMLDELAMETLQEKSQHKEELGAVRLRHEKEVLGVRARYERELRELHEDKKRQEEELRGQIREEKARTRELETLQQTVEELQAQVHSMDGAKGWFERRLKEAEESLQQQQQEQEEALKQCREQHAAELKGKEEELQDVRDQLEQAQEERDCHLKTISSLKQEVKDTVDGQRILEKKGSAALKDLKRQLHLERKRADKLQERLQDILTNSKSRSGLEELVLSEMNSPSRTQTGDSSSISSFSYREILREKESSAVPARSLSSSPQAQPPRPAELSDEEVAELFQRLAETQQEKWMLEEKVKHLEVSSASMAEDLCRKSAIIETYVMDSRIDVSVAAGHTDRSGLGSVLRDLVKPGDENLREMNKKLQNMLEEQLTKNMHLHKDMEVLSQEIVRLSKECVGPPDPDLEPGETS

SEQ ID NO: 36364 - protein, 23 aa, Homo sapiens
  Payload ID: 7192
  Gene Symbol: GRIPAP1
  Gene Name: GRIP1 associated protein 1
  ENSP ID: ENSP00000479263
MLQAKLHSQEEDFRLQNSTLMAE

SEQ ID NO: 36365 - protein, 69 aa, Homo sapiens
  Payload ID: 7192
  Gene Symbol: GRIPAP1
  Gene Name: GRIP1 associated protein 1
  ENSP ID: ENSP00000480042
MLQAKLHSQEEDFRLQNSTLMAEFSKLCSQMEQLEQENQQLKEGAAGAGVAQAGPLVDGELLRLQAENT

SEQ ID NO: 36366 - protein, 61 aa, Homo sapiens
  Payload ID: 7192
  Gene Symbol: GRIPAP1
  Gene Name: GRIP1 associated protein 1
  ENSP ID: ENSP00000480180
  MOD_RES (1)..(1): Any amino acid
XSQEEDFRLQNSTLMAEFSKPCRNAMGKKPGSSQLSVRARGIPQGAWPPPSWPPCRWQRWS

SEQ ID NO: 36367 - protein, 302 aa, Homo sapiens
  Payload ID: 7192
  Gene Symbol: GRIPAP1
  Gene Name: GRIP1 associated protein 1
  ENSP ID: ENSP00000480856
  MOD_RES (1)..(1): Any amino acid
XANSRLLEQLQEIGQEKEQLTQELQEARKSAEKRKAMLDELAMETLQEKSQHKEELGAVRLRHEKEVLGVRARYERELRELHEDKKRQEEELRGQIREEKARTRELETLQQTVEELQAQVHSMDGAKGWFERRLKEAEGKEEELQDVRDQLEQAQEERDCHLKTISSLKQEVKDTVDGQRILEKKGSAALKDLKRQLHLERKRADKLQERLQDILTNSKSRSGLEELVLSEMNSPSRTQTGDSSSISSFSYREILREKESSAVPARSLSSSPQAQPPRPAELSDEEVAELFQRLAETQQEKW

SEQ ID NO: 36368 - protein, 121 aa, Homo sapiens
  Payload ID: 7192
  Gene Symbol: GRIPAP1
  Gene Name: GRIP1 associated protein 1
  ENSP ID: ENSP00000482629
MQAQLLELRTNNYQLSDELRKNGVELTSLRQKVAYLDKEFSKAQKALSKSKKAQEVEVLLSENEMLQAKLHSQEEDFRLQNSTLMAEFSKERYGKEAGKFSAVSEGQGDPPGGLAPTVLAP

SEQ ID NO: 36369 - protein, 474 aa, Homo sapiens
  Payload ID: 7193
  Gene Symbol: GC
  Gene Name: group-specific component (vitamin D binding protein)
  Uniprot ID: P02774
  ENSP ID: ENSP00000273951
MKRVLVLLLAVAFGHALERGRDYEKNKVCKEFSHLGKEDFTSLSLVLYSRKFPSGTFEQVSQLVKEVVSLTEACCAEGADPDCYDTRTSALSAKSCESNSPFPVHPGTAECCTKEGLERKLCMAALKHQPQEFPTYVEPTNDEICEAFRKDPKEYANQFMWEYSTNYGQAPLSLLVSYTKSYLSMVGSCCTSASPTVCFLKERLQLKHLSLLTTLSNRVCSQYAAYGEKKSRLSNLIKLAQKVPTADLEDVLPLAEDITNILSKCCESASEDCMAKELPEHTVKLCDNLSTKNSKFEDCCQEKTAMDVFVCTYFMPAAQLPELPDVELPTNKDVCDPGNTKVMDKYTFELSRRTHLPEVFLSKVLEPTLKSLGECCDVEDSTTCFNAKGPLLKKELSSFIDKGQELCADYSENTFTEYKKKLAERLKAKLPDATPTELAKLVNKHSDFASNCCSINSPPLYCDSEIDAELKNIL

SEQ ID NO: 36370 - protein, 493 aa, Homo sapiens
  Payload ID: 7193
  Gene Symbol: GC
  Gene Name: group-specific component (vitamin D binding protein)
  Uniprot ID: P02774
  ENSP ID: ENSP00000421725
MLWSWSEERGGAARLSGRKMKRVLVLLLAVAFGHALERGRDYEKNKVCKEFSHLGKEDFTSLSLVLYSRKFPSGTFEQVSQLVKEVVSLTEACCAEGADPDCYDTRTSALSAKSCESNSPFPVHPGTAECCTKEGLERKLCMAALKHQPQEFPTYVEPTNDEICEAFRKDPKEYANQFMWEYSTNYGQAPLSLLVSYTKSYLSMVGSCCTSASPTVCFLKERLQLKHLSLLTTLSNRVCSQYAAYGEKKSRLSNLIKLAQKVPTADLEDVLPLAEDITNILSKCCESASEDCMAKELPEHTVKLCDNLSTKNSKFEDCCQEKTAMDVFVCTYFMPAAQLPELPDVELPTNKDVCDPGNTKVMDKYTFELSRRTHLPEVFLSKVLEPTLKSLGECCDVEDSTTCFNAKGPLLKKELSSFIDKGQELCADYSENTFTEYKKKLAERLKAKLPDATPTELAKLVNKHSDFASNCCSINSPPLYCDSEIDAELKNIL

SEQ ID NO: 36371 - protein, 348 aa, Homo sapiens
  Payload ID: 7193
  Gene Symbol: GC
  Gene Name: group-specific component (vitamin D binding protein)
  ENSP ID: ENSP00000422664
MKRVLVLLLAVAFGHALERGRDYEKNKVCKEFSHLGKEDFTSLSLVLYSRKFPSGTFEQVSQLVKEVVSLTEACCAEGADPDCYDTRTSALSAKSCESNSPFPVHPGTAECCTKEGLERKLCMAALKHQPQEFPTYVEPTNDEICEAFRKDPKEYANQFMWEYSTNYGQAPLSLLVSYTKSYLSMVGSCCTSASPTVCFLKERLQLKHLSLLTTLSNRVCSQYAAYGEKKSRLSNLIKLAQKVPTADLEDVLPLAEDITNILSKCCESASEDCMAKELPEHTVKLCDNLSTKNSKFEDCCQEKTAMDVFVCTYFMPAAQLPELPDVELPTNKDVCDPGNTKVMDKALY

SEQ ID NO: 36372 - protein, 476 aa, Homo sapiens
  Payload ID: 7193
  Gene Symbol: GC
  Gene Name: group-specific component (vitamin D binding protein)
  ENSP ID: ENSP00000426683
MKRVLVLLLAVAFGHALERGRDYEKNKVCKEFSHLGKEDFTSLSLVLYSRKFPSGTFEQVSQLVKEVVSLTEACCAEGADPDCYDTRTSALSAKSCESNSPFPVHPGTAECCTKEGLERKLCMAALKHQPQEFPTYVEPTNDEICEAFRKDPKEYANQFMWEYSTNYGQAPLSLLVSYTKSYLSMVGSCCTSASPTVCFLKERLQLKHLSLLTTLSNRVCSQYAAYGEKKSRLSNLIKLAQKVPTADLEDVLPLAEDITNILSKCCESASEDCMAKELPEHTVKLCDNLSTKNSKFEDCCQEKTAMDVFVCTYFMPAAQLPELPDVELPTNKDVCDPGNTKVMDKYTFELSRRTHLPEVFLSKVLEPTLKSLGECCDVEDSTTCFNAKGPLLKKELSSFIDKGQELCADYSENTFTEYKKKLAERLKAKLPDATPTELAKLVNKHSDFASNCCSINSPPLYCDSETRVGATQGNDL

SEQ ID NO: 36373 - protein, 145 aa, Homo sapiens
  Payload ID: 7193
  Gene Symbol: GC
  Gene Name: group-specific component (vitamin D binding protein)
  ENSP ID: ENSP00000426718
MKRVLVLLLAVAFGHALERGRDYEKNKVCKEFSHLGKEDFTSLSLVLYSRKFPSGTFEQVSQLVKEVVSLTEACCAEGADPDCYDTRTSALSAKSCESNSPFPVHPGTAECCTKEGLERKLCMAALKHQPQEFPTYVEPTNDEIC

SEQ ID NO: 36374 - protein, 131 aa, Homo sapiens
  Payload ID: 7194
  Gene Symbol: GADD45A
  Gene Name: growth arrest and DNA-damage-inducible, alpha
  Uniprot ID: P24522
  ENSP ID: ENSP00000360024
MTLEEFSAGEQKTESDPDNVVLCLLAADEDDDRDVALQIHFTLIQAFCCENDINILRVSNPGRLAELLLLETDAGPAASEGAEQPPDLHCVLVTNPHSSQWKDPALSQLICFCRESRYMDQWVPVINLPER

SEQ ID NO: 36375 - protein, 165 aa, Homo sapiens
  Payload ID: 7194
  Gene Symbol: GADD45A
  Gene Name: growth arrest and DNA-damage-inducible, alpha
  Uniprot ID: P24522
  ENSP ID: ENSP00000360025
MTLEEFSAGEQKTERMDKVGDALEEVLSKALSQRTITVGVYEAAKLLNVDPDNVVLCLLAADEDDDRDVALQIHFTLIQAFCCENDINILRVSNPGRLAELLLLETDAGPAASEGAEQPPDLHCVLVTNPHSSQWKDPALSQLICFCRESRYMDQWVPVINLPER

SEQ ID NO: 36376 - protein, 60 aa, Homo sapiens
  Payload ID: 7194
  Gene Symbol: GADD45A
  Gene Name: growth arrest and DNA-damage-inducible, alpha
  ENSP ID: ENSP00000482814
MTLEEFSAGEQKTERMDKVGDALEEVLSKALSQRTITVGVYEAAKLLNVIHIHLNGRILP

SEQ ID NO: 36377 - protein, 160 aa, Homo sapiens
  Payload ID: 7195
  Gene Symbol: GADD45B
  Gene Name: growth arrest and DNA-damage-inducible, beta
  Uniprot ID: O75293
  ENSP ID: ENSP00000215631
MTLEELVACDNAAQKMQTVTAAVEELLVAAQRQDRLTVGVYESAKLMNVDPDSVVLCLLAIDEEEEDDIALQIHFTLIQSFCCDNDINIVRVSGMQRLAQLLGEPAETQGTTEARDLHCLLVTNPHTDAWKSHGLVEVASYCEESRGNNQWVPYISLQER

SEQ ID NO: 36378 - protein, 60 aa, Homo sapiens
  Payload ID: 7195
  Gene Symbol: GADD45B
  Gene Name: growth arrest and DNA-damage-inducible, beta
  ENSP ID: ENSP00000466414
MTLEELVACDNAAQKMQTVTAAVEELLVAAQRQDRLTVGVYESAKLMNGPRQRGPLPLGH

SEQ ID NO: 36379 - protein, 176 aa, Homo sapiens
  Payload ID: 7195
  Gene Symbol: GADD45B
  Gene Name: growth arrest and DNA-damage-inducible, beta
  ENSP ID: ENSP00000467490
MTLEELVACDNAAQKMQTVTAAVEELLVAAQRQDRLTVGVYESAKLMNVDPDSVVLCLLAIDEEEEDDIALQIHFTLIQSFCCDNDINIVRVSGMQRLAQLLGEPAETQGTTEARDLHCLLVTVSRASALPRHARAPGPVFVNKVGLTGPAQLSAQPRLACPVGSRAGASSPRKLF

SEQ ID NO: 36380 - protein, 66 aa, Homo sapiens
  Payload ID: 7195
  Gene Symbol: GADD45B
  Gene Name: growth arrest and DNA-damage-inducible, beta
  ENSP ID: ENSP00000468374
MQTVTAAVEELLVAAQRQDRLTVGVYESAKLMNVDPDSVVLCLLAIDEEEEDDIALQIHFTLIQSF

SEQ ID NO: 36381 - protein, 66 aa, Homo sapiens; identical to SEQ ID NO: 36380
  Payload ID: 7195
  Gene Symbol: GADD45B
  Gene Name: growth arrest and DNA-damage-inducible, beta
  ENSP ID: ENSP00000468620

SEQ ID NO: 36382 - protein, 159 aa, Homo sapiens
  Payload ID: 7196
  Gene Symbol: GADD45G
  Gene Name: growth arrest and DNA-damage-inducible, gamma
  Uniprot ID: O95257
  ENSP ID: ENSP00000252506
MTLEEVRGQDTVPESTARMQGAGKALHELLLSAQRQGCLTAGVYESAKVLNVDPDNVTFCVLAAGEEDEGDIALQIHFTLIQAFCCENDIDIVRVGDVQRLAAIVGAGEEAGAPGDLHCILISNPNEDAWKDPALEKLSLFCEESRSVNDWVPSITLPE

SEQ ID NO: 36383 - protein, 141 aa, Homo sapiens
  Payload ID: 7196
  Gene Symbol: GADD45G
  Gene Name: growth arrest and DNA-damage-inducible, gamma
  ENSP ID: ENSP00000364924
MQGAGKALHELLLSAQRQGCLTAGVYESAKVLNVDPDNVTFCVLAAGEEDEGDIALQIHFTLIQAFCCENDIDIVRVGDVQRLAAIVGAGEEAGAPGDLHCILISNPNEDAWKDPALEKLSLFCEESRSVNDWVPSITLPE

SEQ ID NO: 36384 - protein, 222 aa, Homo sapiens
  Payload ID: 7197
  Gene Symbol: GADD45GIP1
  Gene Name: growth arrest and DNA-damage-inducible, gamma interacting protein 1
  Uniprot ID: Q8TAE8
  ENSP ID: ENSP00000323065
MAASVRQARSLLGVAATLAPGSRGYRARPPPRRRPGPRWPDPEDLLTPRWQLGPRYAAKQFARYGAASGVVPGSLWPSPEQLRELEAEEREWYPSLATMQESLRVKQLAEEQKRREREQHIAECMAKMPQMIVNWQQQQRENWEKAQADKERRARLQAEAQELLGYQVDPRSARFQELLQDLEKKERKRLKEEKQKRKKEARAAALAAAVAQDPAASGAPSS

SEQ ID NO: 36385 - protein, 345 aa, Homo sapiens
  Payload ID: 7198
  Gene Symbol: GAS1
  Gene Name: growth arrest-specific 1
  Uniprot ID: P54826
  ENSP ID: ENSP00000298743
MVAALLGGGGEARGGTVPGAWLCLMALLQLLGSAPRGSGLAHGRRLICWQALLQCQGEPECSYAYNQYAEACAPVLAQHGGGDAPGAAAAAFPASAASFSSRWRCPSHCISALIQLNHTRRGPALEDCDCAQDENCKSTKRAIEPCLPRTSGGGAGGPGAGGVMGCTEARRRCDRDSRCNLALSRYLTYCGKVFNGLRCTDECRTVIEDMLAMPKAALLNDCVCDGLERPICESVKENMARLCFGAELGNGPGSSGSDGGLDDYYDEDYDDEQRTGGAGGEQPLDDDDGVPHPPRPGSGAAASGGRGDLPYGPGRRSSGGGGRLAPRGAWTPLASILLLLLGPLF

SEQ ID NO: 36386 - protein, 313 aa, Homo sapiens
  Payload ID: 7199
  Gene Symbol: GAS2
  Gene Name: growth arrest-specific 2
  Uniprot ID: O43903
  ENSP ID: ENSP00000278187
MCTALSPKVRSGPGLSDMHQYSQWLASRHEANLLPMKEDLALWLTNLLGKEITAETFMEKLDNGALLCQLAETMQEKFKESMDANKPTKNLPLKKIPCKTSAPSGSFFARDNTANFLSWCRDLGVDETCLFESEGLVLHKQPREVCLCLLELGRIAARYGVEPPGLIKLEKEIEQEETLSAPSPSPSPSSKSSGKKSTGNLLDDAVKRISEDPPCKCPNKFCVERLSQGRYRVGEKILFIRMLHNKHVMVRVGGGWETFAGYLLKHDPCRMLQISRVDGKTSPIQSKSPTLKDMNPDNYLVVSASYKAKKEIK

SEQ ID NO: 36387 - protein, 313 aa, Homo sapiens; identical to SEQ ID NO: 36386
  Payload ID: 7199
  Gene Symbol: GAS2
  Gene Name: growth arrest-specific 2
  Uniprot ID: O43903
  ENSP ID: ENSP00000401145

SEQ ID NO: 36388 - protein, 141 aa, Homo sapiens
  Payload ID: 7199
  Gene Symbol: GAS2
  Gene Name: growth arrest-specific 2
  Uniprot ID: O43903
  ENSP ID: ENSP00000432026
MCTALSPKVRSGPGLSDMHQYSQWLASRHEANLLPMKEDLALWLTNLLGKEITAETFMEKLDNGALLCQLAETMQEKFKESMDANKPTKNLPLKKIPCKTSAPSGSFFARDNTANFLSWCRDLGVDETCLFESEGLGFGGQ

SEQ ID NO: 36389 - protein, 181 aa, Homo sapiens
  Payload ID: 7199
  Gene Symbol: GAS2
  Gene Name: growth arrest-specific 2
  ENSP ID: ENSP00000432584
MCTALSPKVRSGPGLSDMHQYSQWLASRHEANLLPMKEDLALWLTNLLGKEITAETFMEKLDNGALLCQLAETMQEKFKESMDANKPTKNLPLKKIPCKTSAPSGSFFARDNTANFLSWCRDLGVDETCLFESEGLVLHKQPREVCLCLLELGRIAARYGVEPPGLIKLEKEIEQEETLSA

SEQ ID NO: 36390 - protein, 155 aa, Homo sapiens
  Payload ID: 7199
  Gene Symbol: GAS2
  Gene Name: growth arrest-specific 2
  ENSP ID: ENSP00000433182
MCTALSPKVRSGPGLSDMHQYSQWLASRHEANLLPMKEDLALWLTNLLGKEITAETFMEKLDNGALLCQLAETMQEKFKESMDANKPTKNLPLKKIPCKTSAPSGSFFARDNTANFLSWCRDLGVDETCLFESEGLVLHKQPREVCLCLLELGRI

SEQ ID NO: 36391 - protein, 136 aa, Homo sapiens
  Payload ID: 7199
  Gene Symbol: GAS2
  Gene Name: growth arrest-specific 2
  ENSP ID: ENSP00000434478
MCTALSPKVRSGPGLSDMHQYSQWLASRHEANLLPMKEDLALWLTNLLGKEITAETFMEKLDNGALLCQLAETMQEKFKESMDANKPTKNLPLKKIPCKTSAPSGSFFARDNTANFLSWCRDLGVDETCLFESEGL

SEQ ID NO: 36392 - protein, 205 aa, Homo sapiens
  Payload ID: 7199
  Gene Symbol: GAS2
  Gene Name: growth arrest-specific 2
  ENSP ID: ENSP00000435946
MCTALSPKVRSGPGLSDMHQYSQWLASRHEANLLPMKEDLALWLTNLLGKEITAETFMEKLDNGALLCQLAETMQEKFKESMDANKPTKNLPLKKIPCKTSAPSGSFFARDNTANFLSWCRDLGVDETCLFESEGLVLHKQPREVCLCLLELGRIAARYGVEPPGLIKLEKEIEQEETLSAPSPSPSPSSKSSGKKSTGNLLDDA

SEQ ID NO: 36393 - protein, 141 aa, Homo sapiens; identical to SEQ ID NO: 36388
  Payload ID: 7199
  Gene Symbol: GAS2
  Gene Name: growth arrest-specific 2
  Uniprot ID: O43903
  ENSP ID: ENSP00000485708

SEQ ID NO: 36394 - protein, 454 aa, Homo sapiens
  Payload ID: 7200
  Gene Symbol: GAS2L1
  Gene Name: growth arrest-specific 2 like 1
  Uniprot ID: Q99501
  ENSP ID: ENSP00000383995
MADPVAGIAGSAAKSVRPFRSSEAYVEAMKEDLAEWLNALYGLGLPGGGDGFLTGLATGTTLCQHANAVTEAARALAAARPARGVAFQAHSVVPGSFMARDNVATFIGWCRVELGVPEVLMFETEDLVLRKNEKSVVLCLLEVARRGARLGLLAPRLVQFEQEIERELRAAPPAPNAPAAGEDTTETAPAPGTPARGPRMTPSDLRNLDELVREILGRCTCPDQFPMIKVSEGKYRVGDSSLLIFVRVLRSHVMVRVGGGWDTLEHYLDKHDPCRCSSTAHRPPQPRVCTFSPQRVSPTTSPRPASPVPGSERRGSRPEMTPVSLRSTKEGPETPPSSSSSSLSVLGGKCGQPGDSGRTANGLPGPRSQALSSSSDEGSPCPGMGGPLDAPGSPLACTEPSRTWARGRMDTQPDRKPSRIPTPRGPRRPSGPAELGTWHALHSVTPRAEPDSWM

SEQ ID NO: 36395 - protein, 143 aa, Homo sapiens
  Payload ID: 7200
  Gene Symbol: GAS2L1
  Gene Name: growth arrest-specific 2 like 1
  ENSP ID: ENSP00000388645
MADPVAGIAGSAAKSVRPFRSSEAYVEAMKEDLAEWLNALYGLGLPGGGDGFLTGLATGTTLCQHANAVTEAARALAAARPARGVAFQAHSVVPGSFMARDNVATFIGWCRVELGVPEVLMFETEDLVLRKNEKSVVLCLLEV

SEQ ID NO: 36396 - protein, 138 aa, Homo sapiens
  Payload ID: 7200
  Gene Symbol: GAS2L1
  Gene Name: growth arrest-specific 2 like 1
  ENSP ID: ENSP00000395988
MADPVAGIAGSAAKSVRPFRSSEAYVEAMKEDLAEWLNALYGLGLPGGGDGFLTGLATGTTLCQHANAVTEAARALAAARPARGVAFQAHSVVPGSFMARDNVATFIGWCRVELGVPEVLMFETEDLVLRKNEKSVVL

SEQ ID NO: 36397 - protein, 681 aa, Homo sapiens
  Payload ID: 7200
  Gene Symbol: GAS2L1
  Gene Name: growth arrest-specific 2 like 1
  ENSP ID: ENSP00000478343
MADPVAGIAGSAAKSVRPFRSSEAYVEAMKEDLAEWLNALYGLGLPGGGDGFLTGLATGTTLCQHANAVTEAARALAAARPARGVAFQAHSVVPGSFMARDNVATFIGWCRVELGVPEVLMFETEDLVLRKNEKSVVLCLLEVARRGARLGLLAPRLVQFEQEIERELRAAPPAPNAPAAGEDTTETAPAPGTPARGPRMTPSDLRNLDELVREILGRCTCPDQFPMIKVSEGKYRVGDSSLLIFVRVLRSHVMVRVGGGWDTLEHYLDKHDPCRCSSTAHRPPQPRVCTFSPQRVSPTTSPRPASPVPGSERRGSRPEMTPVSLRSTKEGPETPPRPRDQLPPHPRSRRYSGDSDSSASSAQSGPLGTRSDDTGTGPRRERPSRRLTTGTPASPRRPPALRSQSRDRLDRGRPRGAPGGRGAQLSVPSPARRARSQSREEQAVLLVRRDRDGQHSWVPRGRGSGGSGRSTPQTPRARSPAAPRLSRVSSPSPELGTTPASIFRTPLQLDPQQEQQLFRRLEEEFLANARALEAVASVTPTGPAPDPARAPDPPAPDSAYCSSSSSSSSLSVLGGKCGQPGDSGRTANGLPGPRSQALSSSSDEGSPCPGMGGPLDAPGSPLACTEPSRTWARGRMDTQPDRKPSRIPTPRGPRRPSGPAELGTWHALHSVTPRAEPDSWM

SEQ ID NO: 36398 - protein, 681 aa, Homo sapiens; identical to SEQ ID NO: 36397
  Payload ID: 7200
  Gene Symbol: GAS2L1
  Gene Name: growth arrest-specific 2 like 1
  ENSP ID: ENSP00000478908

SEQ ID NO: 36399 - protein, 681 aa, Homo sapiens; identical to SEQ ID NO: 36397
  Payload ID: 7200
  Gene Symbol: GAS2L1
  Gene Name: growth arrest-specific 2 like 1
  ENSP ID: ENSP00000479551

SEQ ID NO: 36400 - protein, 681 aa, Homo sapiens; identical to SEQ ID NO: 36397
  Payload ID: 7200
  Gene Symbol: GAS2L1
  Gene Name: growth arrest-specific 2 like 1
  ENSP ID: ENSP00000481012

SEQ ID NO: 36401 - protein, 337 aa, Homo sapiens
  Payload ID: 7200
  Gene Symbol: GAS2L1
  Gene Name: growth arrest-specific 2 like 1
  Uniprot ID: Q99501
  ENSP ID: ENSP00000484130
MADPVAGIAGSAAKSVRPFRSSEAYVEAMKEDLAEWLNALYGLGLPGGGDGFLTGLATGTTLCQHANAVTEAARALAAARPARGVAFQAHSVVPGSFMARDNVATFIGWCRVELGVPEVLMFETEDLVLRKNEKSVVLCLLEVARRGARLGLLAPRLVQFEQEIERELRAAPPAPNAPAAGEDTTETAPAPGTPARGPRMTPSDLRNLDELVREILGRCTCPDQFPMIKVSEGKYRVGDSSLLIFVRVLRSHVMVRVGGGWDTLEHYLDKHDPCRCSSTAHRPPQPRVCTFSPQRVSPTTSPRPASPVPGSERRGSRPEMTPVSLRSTKEGPETPPR

SEQ ID NO: 36402 - protein, 864 aa, Homo sapiens
  Payload ID: 7201
  Gene Symbol: GAS2L2
  Gene Name: growth arrest-specific 2 like 2
  ENSP ID: ENSP00000474009
MSQPAGGRRKPRTLGPPVCSIRPFKSSEQYLEAMKEDLAEWLRDLYGLDIDAANFLQVLETGLVLCQHANVVTDAALAFLAEAPAQAQKIPMPRVGVSCNGAAQPGTFQARDNVSNFIQWCRKEMGIQEVLMFETEDLVLRKNVKNVVLCLLELGRRAWRFGVAAPTLVQLEEEIEEEVRRELPCHFRNLDQMVQSLVSHCTCPVQFSMVKVSEGKYRVGDSNTLIFIRILRNHVMVRVGGGWDTLGHYLDKHDPCRCTSLSHKPGSFLKPPAPPVQHEVRVQDGPSQTQPTMTISRSQSPPPPVDWKTYTSSDRRLRPPTPSSPRPRRERGAGTGASREMAPFLRCQERSLIPSWRQPTAGDSPPSPQSSSTQKGRDPQCTSSGKREERYPPELPRGRIPTSWVHEETDSWGTDAGNPTPQRLRAIEATTKGISARGPSPLPRSFGPAECLGLRLPLRDEAKGAFFQFREPESVRSPTPVQGLTKIPIRLPPARPPTPGRSFPGATSGSPRTELGRDPIPLRAVTVDLAGSTHGDCSVEVRQEDQQLDIQVMAEARESWDLGLQEQEGRYTPLPLGGNKEQAIYCSLEEEILGNMKLLEVRSACPQGTRSGVIPRSGVYIPRLAGQWPEPGGPYDKAIQELAQGSPSLLKVDLEAWKAAPTGSPKPAVTPGPGSLKGKLGARQSGPRTKASLSAKGTHMRKVPPQGGQDCSASTVSASPEAPTPSPLDPNSDKAKACLSKGRRTLRKPKRVPSIYKLKLRPRIRPRRDHRPEKQPSRIPRPLAYVFLGPARQPPKDRLLRAVLGSKGGEASRVDGASVGEEEEEGKEEKEPAAPLESSPQPPEGLQPHWLNQAPLPPEEESWV

SEQ ID NO: 36403 - protein, 880 aa, Homo sapiens
  Payload ID: 7201
  Gene Symbol: GAS2L2
  Gene Name: growth arrest-specific 2 like 2
  Uniprot ID: Q8NHY3
  ENSP ID: ENSP00000474529
MSQPAGGRRKPRTLGPPVCSIRPFKSSEQYLEAMKEDLAEWLRDLYGLDIDAANFLQVLETGLVLCQHANVVTDAALAFLAEAPAQAQKIPMPRVGVSCNGAAQPGTFQARDNVSNFIQWCRKEMGIQEVLMFETEDLVLRKNVKNVVLCLLELGRRAWRFGVAAPTLVQLEEEIEEEVRRELALPPPDPSPPAPPRRQPCHFRNLDQMVQSLVSHCTCPVQFSMVKVSEGKYRVGDSNTLIFIRILRNHVMVRVGGGWDTLGHYLDKHDPCRCTSLSHKPGSFLKPPAPPVQHEVRVQDGPSQTQPTMTISRSQSPPPPVDWKTYTSSDRRLRPPTPSSPRPRRERGAGTGASREMAPFLRCQERSLIPSWRQPTAGDSPPSPQSSSTQKGRDPQCTSSGKREERYPPELPRGRIPTSWVHEETDSWGTDAGNPTPQRLRAIEATTKGISARGPSPLPRSFGPAECLGLRLPLRDEAKGAFFQFREPESVRSPTPVQGLTKIPIRLPPARPPTPGRSFPGATSGSPRTELGRDPIPLRAVTVDLAGSTHGDCSVEVRQEDQQLDIQVMAEARESWDLGLQEQEGRYTPLPLGGNKEQAIYCSLEEEILGNMKLLEVRSACPQGTRSGVIPRSGVYIPRLAGQWPEPGGPYDKAIQELAQGSPSLLKVDLEAWKAAPTGSPKPAVTPGPGSLKGKLGARQSGPRTKASLSAKGTHMRKVPPQGGQDCSASTVSASPEAPTPSPLDPNSDKAKACLSKGRRTLRKPKRVPSIYKLKLRPRIRPRRDHRPEKQPSRIPRPLAYVFLGPARQPPKDRLLRAVLGSKGGEASRVDGASVGEEEEEGKEEKEPAAPLESSPQPPEGLQPHWLNQAPLPPEEESWV

SEQ ID NO: 36404 - protein, 213 aa, Homo sapiens
  Payload ID: 7201
  Gene Symbol: GAS2L2
  Gene Name: growth arrest-specific 2 like 2
  ENSP ID: ENSP00000480457
MSQPAGGRRKPRTLGPPVCSIRPFKSSEQYLEAMKEDLAEWLRDLYGLDIDAANFLQVLETGLVLCQHANVVTDAALAFLAEAPAQAQKIPMPRVGVSCNGAAQPGTFQARDNVSNFIQWCRKEMGIQEVLMFETEDLVLRKNVKNVVLCLLELGRRAWRFGVAAPTLVQLEEEIEEEVRRELALPLPQPGPDGAEPCEPLHVPSAVLHGQSV

SEQ ID NO: 36405 - protein, 694 aa, Homo sapiens
  Payload ID: 7202
  Gene Symbol: GAS2L3
  Gene Name: growth arrest-specific 2 like 3
  Uniprot ID: Q86XJ1
  ENSP ID: ENSP00000266754
MQPAIQVWFGEDLPLSPRSPLTPRHGPGLANVCQYDEWIAVRHEATLLPMQEDLSIWLSGLLGIKVKAEKLLEELDNGVLLCQLIDVLQNMVKTCNSEESGNFPMRKVPCKKDAASGSFFARDNTANFLHWCRDIGVDETYLFESEGLVLHKDPRQVYLCLLEIGRIVSRYGVEPPVLVKLEKEIELEETLLNTSGPEDSISIPKSCCRHEELHEAVKHIAEDPPCSCSHRFSIEYLSEGRYRLGDKILFIRMLHGKHVMVRVGGGWDTLQGFLLKYDPCRILQFATLEQKILAFQKGVSNESVPDSPARTPQPPEMNPLSAVNMFQKQNSKPSVPVSIPKSKEKQGRPPGALVPASSLKGGNLGSMSVRSKLPNSPAASSHPKLKSSKGITKKPQAPSNNASSSLASLNPVGKNTSSPALPRTAPCISESPRKCISSPNTPKAKVIPAQNSADLPESTLLPNKCSGKTQPKYLKHNHISSRDNAVSHLAAHSNSSSKCPKLPKANIPVRPKPSFQSSAKMTKTSSKTIATGLGTQSQPSDGAPQAKPVPAQKLKSALNLNQPVSVSSVSPVKATQKSKDKNIVSATKKQPQNKSAFQKTGPSSLKSPGRTPLSIVSLPQSSTKTQTAPKSAQTVAKSQHSTKGPPRSGKTPASIRKPPSSVKDADSGDKKPTAKKKEDDDHYFVMTGSKKPRK

SEQ ID NO: 36406 - protein, 694 aa, Homo sapiens; identical to SEQ ID NO: 36405
  Payload ID: 7202
  Gene Symbol: GAS2L3
  Gene Name: growth arrest-specific 2 like 3
  Uniprot ID: Q86XJ1
  ENSP ID: ENSP00000439672

SEQ ID NO: 36407 - protein, 590 aa, Homo sapiens
  Payload ID: 7202
  Gene Symbol: GAS2L3
  Gene Name: growth arrest-specific 2 like 3
  ENSP ID: ENSP00000442406
MRKVPCKKDAASGSFFARDNTANFLHWCRDIGVDETYLFESEGLVLHKDPRQVYLCLLEIGRIVSRYGVEPPVLVKLEKEIELEETLLNTSGPEDSISIPKSCCRHEELHEAVKHIAEDPPCSCSHRFSIEYLSEGRYRLGDKILFIRMLHGKHVMVRVGGGWDTLQGFLLKYDPCRILQFATLEQKILAFQKGVSNESVPDSPARTPQPPEMNPLSAVNMFQKQNSKPSVPVSIPKSKEKQGRPPGALVPASSLKGGNLGSMSVRSKLPNSPAASSHPKLKSSKGITKKPQAPSNNASSSLASLNPVGKNTSSPALPRTAPCISESPRKCISSPNTPKAKVIPAQNSADLPESTLLPNKCSGKTQPKYLKHNHISSRDNAVSHLAAHSNSSSKCPKLPKANIPVRPKPSFQSSAKMTKTSSKTIATGLGTQSQPSDGAPQAKPVPAQKLKSALNLNQPVSVSSVSPVKATQKSKDKNIVSATKKQPQNKSAFQKTGPSSLKSPGRTPLSIVSLPQSSTKTQTAPKSAQTVAKSQHSTKGPPRSGKTPASIRKPPSSVKDADSGDKKPTAKKKEDDDHYFVMTGSKKPRK

SEQ ID NO: 36408 - protein, 49 aa, Homo sapiens
  Payload ID: 7202
  Gene Symbol: GAS2L3
  Gene Name: growth arrest-specific 2 like 3
  ENSP ID: ENSP00000448184
MQPAIQVWFGEDLPLSPRSPLTPRHGPGLANVCQYDEWIAVRHEATLLP

SEQ ID NO: 36409 - protein, 694 aa, Homo sapiens; identical to SEQ ID NO: 36405
  Payload ID: 7202
  Gene Symbol: GAS2L3
  Gene Name: growth arrest-specific 2 like 3
  Uniprot ID: Q86XJ1
  ENSP ID: ENSP00000448955

SEQ ID NO: 36410 - protein, 391 aa, Homo sapiens
  Payload ID: 7202
  Gene Symbol: GAS2L3
  Gene Name: growth arrest-specific 2 like 3
  ENSP ID: ENSP00000450107
VPDSPARTPQPPEMNPLSAVNMFQKQNSKPSVPVSIPKSKEKQGRPPGALVPASSLKGGNLGSMSVRSKLPNSPAASSHPKLKSSKGITKKPQAPSNNASSSLASLNPVGKNTSSPALPRTAPCISESPRKCISSPNTPKAKVIPAQNSADLPESTLLPNKCSGKTQPKYLKHNHISSRDNAVSHLAAHSNSSSKCPKLPKANIPVRPKPSFQSSAKMTKTSSKTIATGLGTQSQPSDGAPQAKPVPAQKLKSALNLNQPVSVSSVSPVKATQKSKDKNIVSATKKQPQNKSAFQKTGPSSLKSPGRTPLSIVSLPQSSTKTQTAPKSAQTVAKSQHSTKGPPRSGKTPASIRKPPSSVKDADSGDKKPTAKKKEDDDHYFVMTGSKKPRK

SEQ ID NO: 36411 - protein, 678 aa, Homo sapiens
  Payload ID: 7203
  Gene Symbol: GAS6
  Gene Name: growth arrest-specific 6
  Uniprot ID: Q14393
  ENSP ID: ENSP00000331831
MAPSLSPGPAALRRAPQLLLLLLAAECALAALLPAREATQFLRPRQRRAFQVFEEAKQGHLERECVEELCSREEAREVFENDPETDYFYPRYLDCINKYGSPYTKNSGFATCVQNLPDQCTPNPCDRKGTQACQDLMGNFFCLCKAGWGGRLCDKDVNECSQENGGCLQICHNKPGSFHCSCHSGFELSSDGRTCQDIDECADSEACGEARCKNLPGSYSCLCDEGFAYSSQEKACRDVDECLQGRCEQVCVNSPGSYTCHCDGRGGLKLSQDMDTCEDILPCVPFSVAKSVKSLYLGRMFSGTPVIRLRFKRLQPTRLVAEFDFRTFDPEGILLFAGGHQDSTWIVLALRAGRLELQLRYNGVGRVTSSGPVINHGMWQTISVEELARNLVIKVNRDAVMKIAVAGDLFQPERGLYHLNLTVGGIPFHEKDLVQPINPRLDGCMRSWNWLNGEDTTIQETVKVNTRMQCFSVTERGSFYPGSGFAFYSLDYMRTPLDVGTESTWEVEVVAHIRPAADTGVLFALWAPDLRAVPLSVALVDYHSTKKLKKQLVVLAVEHTALALMEIKVCDGQEHVVTVSLRDGEATLEVDGTRGQSEVSAAQLQERLAVLERHLRSPVLTFAGGLPDVPVTSAPVTAFYRGCMTLEVNRRLLDLDEAAYKHSDITAHSCPPVEPAAA

SEQ ID NO: 36412 - protein, 416 aa, Homo sapiens
  Payload ID: 7204
  Gene Symbol: GAS7
  Gene Name: growth arrest-specific 7
  Uniprot ID: O60861
  ENSP ID: ENSP00000322608
MKPGMVPPPPGEESQTVILPPGWQSYLSPQGRRYYVNTTTNETTWERPSSSPGIPASPGSHRSSLPPTVNGYHASGTPAHPPETAHMSVRKSTGDSQNLGSSSPSKKQSKENTITINCVTFPHPDTMPEQQLLKPTEWSYCDYFWADKKDPQGNGTVAGFELLLQKQLKGKQMQKEMSEFIRERIKIEEDYAKNLAKLSQNSLASQEEGSLGEAWAQVKKSLADEAEVHLKFSAKLHSEVEKPLMNFRENFKKDMKKCDHHIADLRKQLASRYASVEKARKALTERQRDLEMKTQQLEIKLSNKTEEDIKKARRKSTQAGDDLMRCVDLYNQAQSKWFEEMVTTTLELERLEVERVEMIRQHLCQYTQLRHETDMFNQSTVEPVDQLLRKVDPAKDRELWVREHKTGNIRPVDMEI

SEQ ID NO: 36413 - protein, 181 aa, Homo sapiens
  Payload ID: 7204
  Gene Symbol: GAS7
  Gene Name: growth arrest-specific 7
  ENSP ID: ENSP00000379421
MVPPPPGEESQTVILPPGWQSYLSPQGRRYYVNTTTNETTWERPSSSPGIPASPGSHRSSLPPTVNGYHASGTPAHPPETAHMSVRKSTGDSQNLGSSSPSKKQSKENTITELERLEVERVEMIRQHLCQYTQLRHETDMFNQSTVEPVDQLLRKVDPAKDRELWVREHKTGNIRPVDMEI

SEQ ID NO: 36414 - protein, 476 aa, Homo sapiens
  Payload ID: 7204
  Gene Symbol: GAS7
  Gene Name: growth arrest-specific 7
  Uniprot ID: O60861
  ENSP ID: ENSP00000407552
MSGARCRTLYPFSGERHGQGLRFAAGELITLLQVPDGGWWEGEKEDGLRGWFPASYVQLLEKPGMVPPPPGEESQTVILPPGWQSYLSPQGRRYYVNTTTNETTWERPSSSPGIPASPGSHRSSLPPTVNGYHASGTPAHPPETAHMSVRKSTGDSQNLGSSSPSKKQSKENTITINCVTFPHPDTMPEQQLLKPTEWSYCDYFWADKKDPQGNGTVAGFELLLQKQLKGKQMQKEMSEFIRERIKIEEDYAKNLAKLSQNSLASQEEGSLGEAWAQVKKSLADEAEVHLKFSAKLHSEVEKPLMNFRENFKKDMKKCDHHIADLRKQLASRYASVEKARKALTERQRDLEMKTQQLEIKLSNKTEEDIKKARRKSTQAGDDLMRCVDLYNQAQSKWFEEMVTTTLELERLEVERVEMIRQHLCQYTQLRHETDMFNQSTVEPVDQLLRKVDPAKDRELWVREHKTGNIRPVDMEI

SEQ ID NO: 36415 - protein, 412 aa, Homo sapiens
  Payload ID: 7204
  Gene Symbol: GAS7
  Gene Name: growth arrest-specific 7
  Uniprot ID: O60861
  ENSP ID: ENSP00000410108
MVPPPPGEESQTVILPPGWQSYLSPQGRRYYVNTTTNETTWERPSSSPGIPASPGSHRSSLPPTVNGYHASGTPAHPPETAHMSVRKSTGDSQNLGSSSPSKKQSKENTITINCVTFPHPDTMPEQQLLKPTEWSYCDYFWADKKDPQGNGTVAGFELLLQKQLKGKQMQKEMSEFIRERIKIEEDYAKNLAKLSQNSLASQEEGSLGEAWAQVKKSLADEAEVHLKFSAKLHSEVEKPLMNFRENFKKDMKKCDHHIADLRKQLASRYASVEKARKALTERQRDLEMKTQQLEIKLSNKTEEDIKKARRKSTQAGDDLMRCVDLYNQAQSKWFEEMVTTTLELERLEVERVEMIRQHLCQYTQLRHETDMFNQSTVEPVDQLLRKVDPAKDRELWVREHKTGNIRPVDMEI

SEQ ID NO: 36416 - protein, 412 aa, Homo sapiens; identical to SEQ ID NO: 36415
  Payload ID: 7204
  Gene Symbol: GAS7
  Gene Name: growth arrest-specific 7
  Uniprot ID: O60861
  ENSP ID: ENSP00000443265

SEQ ID NO: 36417 - protein, 179 aa, Homo sapiens
  Payload ID: 7204
  Gene Symbol: GAS7
  Gene Name: growth arrest-specific 7
  ENSP ID: ENSP00000462304
MVPPPPGEESQTVILPPGWQSYLSPQGRRYYVNTTTNETTWERPSSSPGIPASPGSHRSSLPPTVNGYHASGTPAHPPETAHMSVRKSTGDSQNLGSSSPSKKQSKENTITINCVTFPHPDTMPEQQLLKPTEWSYCDYFWADKKDPQGNGTVAGFELLLQKQLKGKQMQKEMSEFIRE

SEQ ID NO: 36418 - protein, 128 aa, Homo sapiens
  Payload ID: 7204
  Gene Symbol: GAS7
  Gene Name: growth arrest-specific 7
  ENSP ID: ENSP00000462897
MVPPPPGEESQTVILPPGWQSYLSPQGRRYYVNTTTNETTWERPSSSPGIPASPGSHRSSLPPTVNGYHASGTPAHPPETAHMSVRKSTGDSQNLGSSSPSKKQSKENTITINCVTFPHPDTMPEQQL

SEQ ID NO: 36419 - protein, 412 aa, Homo sapiens; identical to SEQ ID NO: 36415
  Payload ID: 7204
  Gene Symbol: GAS7
  Gene Name: growth arrest-specific 7
  Uniprot ID: O60861
  ENSP ID: ENSP00000463527

SEQ ID NO: 36420 - protein, 106 aa, Homo sapiens
  Payload ID: 7204
  Gene Symbol: GAS7
  Gene Name: growth arrest-specific 7
  ENSP ID: ENSP00000463551
MVPPPPGEESQTVILPPGWQSYLSPQGRRYYVNTTTNETTWERPSSSPGIPASPGSHRSSLPPTVNGYHASGTPAHPPETAHMSVRKSTGDSQNLGSSSPSKKQSK

SEQ ID NO: 36421 - protein, 336 aa, Homo sapiens
  Payload ID: 7204
  Gene Symbol: GAS7
  Gene Name: growth arrest-specific 7
  Uniprot ID: O60861
  ENSP ID: ENSP00000463873
MSNMENSFDDVSCLSPQNLGSSSPSKKQSKENTITINCVTFPHPDTMPEQQLLKPTEWSYCDYFWADKKDPQGNGTVAGFELLLQKQLKGKQMQKEMSEFIRERIKIEEDYAKNLAKLSQNSLASQEEGSLGEAWAQVKKSLADEAEVHLKFSAKLHSEVEKPLMNFRENFKKDMKKCDHHIADLRKQLASRYASVEKARKALTERQRDLEMKTQQLEIKLSNKTEEDIKKARRKSTQAGDDLMRCVDLYNQAQSKWFEEMVTTTLELERLEVERVEMIRQHLCQYTQLRHETDMFNQSTVEPVDQLLRKVDPAKDRELWVREHKTGNIRPVDMEI

SEQ ID NO: 36422 - protein, 78 aa, Homo sapiens
  Payload ID: 7204
  Gene Symbol: GAS7
  Gene Name: growth arrest-specific 7
  ENSP ID: ENSP00000464088
MSNMENSFDDVSCLSPQNLGSSSPSKKQSKENTITINCVTFPHPDTMPEQQLLKPTEWSYCDYFWAEDPLTPMLCLPL

SEQ ID NO: 36423 - protein, 416 aa, Homo sapiens; identical to SEQ ID NO: 36412
  Payload ID: 7204
  Gene Symbol: GAS7
  Gene Name: growth arrest-specific 7
  Uniprot ID: O60861
  ENSP ID: ENSP00000464240

SEQ ID NO: 36424 - protein, 141 aa, Homo sapiens
  Payload ID: 7204
  Gene Symbol: GAS7
  Gene Name: growth arrest-specific 7
  ENSP ID: ENSP00000464494
MVPPPPGEESQTVILPPGWQSYLSPQGRRYYVNTTTNETTWERPSSSPGIPASPGSHRSSLPPTVNGYHASGTPAHPPETAHMSVRKSTGDSQNLGSSSPSKKQSKENTITINCVTFPHPDTMPEQQLLKPTEWSYCDYFW

SEQ ID NO: 36425 - protein, 478 aa, Homo sapiens
  Payload ID: 7205
  Gene Symbol: GAS8
  Gene Name: growth arrest-specific 8
  Uniprot ID: O95995
  ENSP ID: ENSP00000268699
MAPKKKGKKGKAKGTPIVDGLAPEDMSKEQVEEHVSRIREELDREREERNYFQLERDKIHTFWEITRRQLEEKKAELRNKDREMEEAEERHQVEIKVYKQKVKHLLYEHQNNLTEMKAEGTVVMKLAQKEHRIQESVLRKDMRALKVELKEQELASEVVVKNLRLKHTEEITRMRNDFERQVREIEAKYDKKMKMLRDELDLRRKTELHEVEERKNGQIHTLMQRHEEAFTDIKNYYNDITLNNLALINSLKEQMEDMRKKEDHLEREMAEVSGQNKRLADPLQKAREEMSEMQKQLANYERDKQILLCTKARLKVREKELKDLQWEHEVLEQRFTKVQQERDELYRKFTAAIQEVQQKTGFKNLVLERKLQALSAAVEKKEVQFNEVLAASNLDPAALTLVSRKLEDVLESKNSTIKDLQYELAQVCKAHNDLLRTYEAKLLAFGIPLDNVGFKPLETAVIGQTLGQGPAGLVGTPT

SEQ ID NO: 36426 - protein, 453 aa, Homo sapiens
  Payload ID: 7205
  Gene Symbol: GAS8
  Gene Name: growth arrest-specific 8
  Uniprot ID: O95995
  ENSP ID: ENSP00000440977
MSKEQVEEHVSRIREELDREREERNYFQLERDKIHTFWEITRRQLEEKKAELRNKDREMEEAEERHQVEIKVYKQKVKHLLYEHQNNLTEMKAEGTVVMKLAQKEHRIQESVLRKDMRALKVELKEQELASEVVVKNLRLKHTEEITRMRNDFERQVREIEAKYDKKMKMLRDELDLRRKTELHEVEERKNGQIHTLMQRHEEAFTDIKNYYNDITLNNLALINSLKEQMEDMRKKEDHLEREMAEVSGQNKRLADPLQKAREEMSEMQKQLANYERDKQILLCTKARLKVREKELKDLQWEHEVLEQRFTKVQQERDELYRKFTAAIQEVQQKTGFKNLVLERKLQALSAAVEKKEVQFNEVLAASNLDPAALTLVSRKLEDVLESKNSTIKDLQYELAQVCKAHNDLLRTYEAKLLAFGIPLDNVGFKPLETAVIGQTLGQGPAGLVGTPT

SEQ ID NO: 36427 - protein, 35 aa, Homo sapiens
  Payload ID: 7205
  Gene Symbol: GAS8
  Gene Name: growth arrest-specific 8
  ENSP ID: ENSP00000454343
MAPKKKGKKGKAKGTPIVDGLAPEDMSKEQLFIFR

SEQ ID NO: 36428 - protein, 117 aa, Homo sapiens
  Payload ID: 7205
  Gene Symbol: GAS8
  Gene Name: growth arrest-specific 8
  ENSP ID: ENSP00000454905
MSKEQVEEHVSRIREELDREREERNYFQLERDKIHTFWEITRRQLEEKKAELRNKDREMEEAEERHQVEIKVYKQKVKHLLYEHQNNLTEMKAEGTVVMKLAQKEHRIQESVLRKDM

SEQ ID NO: 36429 - protein, 95 aa, Homo sapiens
  Payload ID: 7205
  Gene Symbol: GAS8
  Gene Name: growth arrest-specific 8
  ENSP ID: ENSP00000455172
MSKEQVEEHVSRIREELDREREERNYFQLERDKIHTFWEITRRQLEEKKAELRNKDREMEEAEERHQVEIKVYKQKVKHLLYEHQNNLTEMKAEG

SEQ ID NO: 36430 - protein, 111 aa, Homo sapiens
  Payload ID: 7205
  Gene Symbol: GAS8
  Gene Name: growth arrest-specific 8
  ENSP ID: ENSP00000455936
MAPKKKGKKGKAKGTPIVDGLAPEDMSKEQVKLSPPSFFLAFRRPHAPLPCMGPCSVPHLTHCTWPGGGACQPHPGGAGPRAGGTKLLPAGAGQDPHLLGDHTEAAGGEEG

SEQ ID NO: 36431 - protein, 60 aa, Homo sapiens
  Payload ID: 7205
  Gene Symbol: GAS8
  Gene Name: growth arrest-specific 8
  ENSP ID: ENSP00000457554
MEEAEERHQVEIKVYKQKVKHLLYEHQNNLTEMKAEGTVVMKLAQKEHRIQESVLRKDMR

SEQ ID NO: 36432 - protein, 395 aa, Homo sapiens
  Payload ID: 7205
  Gene Symbol: GAS8
  Gene Name: growth arrest-specific 8
  ENSP ID: ENSP00000482877
MEEAEERHQVEIKVYKQKVKHLLYEHQNNLTEMKAEGTVVMKLAQKEHRIQESVLRKDMRALKVELKEQELASEVVVKNLRLKHTEEITRMRNDFERQVREIEAKYDKKMKMLRDELDLRRKTELHEVEERKNGQIHTLMQRHEEAFTDIKNYYNDITLNNLALINSLKEQMEDMRKKEDHLEREMAEVSGQNKRLADPLQKAREEMSEMQKQLANYERDKQILLCTKARLKVREKELKDLQWEHEVLEQRFTKVQQERDELYRKFTAAIQEVQQKTGFKNLVLERKLQALSAAVEKKEVQFNEVLAASNLDPAALTLVSRKLEDVLESKNSTIKDLQYELAQVCKAHNDLLRTYEAKLLAFGIPLDNVGFKPLETAVIGQTLGQGPAGLVGTPT

SEQ ID NO: 36433 - protein, 238 aa, Homo sapiens
  Payload ID: 7206
  Gene Symbol: GAP43
  Gene Name: growth associated protein 43
  Uniprot ID: P17677
  ENSP ID: ENSP00000305010
MLCCMRRTKQVEKNDDDQKIEQDGIKPEDKAHKAATKIQASFRGHITRKKLKGEKKDDVQAAEAEANKKDEAPVADGVEKKGEGTTTAEAAPATGSKPDEPGKAGETPSEEKKGEGDAATEQAAPQAPASSEEKAGSAETESATKASTDNSPSSKAEDAPAKEEPKQADVPAAVTAAAATTPAAEDAAAKATAQPPTETGESSQAEENIEAVDETKPKESARQDEGKEEEPEADQEHA

SEQ ID NO: 36434 - protein, 274 aa, Homo sapiens
  Payload ID: 7206
  Gene Symbol: GAP43
  Gene Name: growth associated protein 43
  Uniprot ID: P17677
  ENSP ID: ENSP00000377372
MTKSCSELCHPALHFLPCLGGLRKNLQRAVRPSPYSLGFLTFWISRVEKNDDDQKIEQDGIKPEDKAHKAATKIQASFRGHITRKKLKGEKKDDVQAAEAEANKKDEAPVADGVEKKGEGTTTAEAAPATGSKPDEPGKAGETPSEEKKGEGDAATEQAAPQAPASSEEKAGSAETESATKASTDNSPSSKAEDAPAKEEPKQADVPAAVTAAAATTPAAEDAAAKATAQPPTETGESSQAEENIEAVDETKPKESARQDEGKEEEPEADQEHA

SEQ ID NO: 36435 - protein, 372 aa, Homo sapiens; identical to SEQ ID NO: 14250
  Payload ID: 7207
  Gene Symbol: GDF1
  Gene Name: growth differentiation factor 1
  Uniprot ID: P27539
  ENSP ID: ENSP00000247005

SEQ ID NO: 36436 - protein, 478 aa, Homo sapiens
  Payload ID: 7208
  Gene Symbol: GDF10
  Gene Name: growth differentiation factor 10
  Uniprot ID: P55107
  ENSP ID: ENSP00000464145
MAHVPARTSPGPGPQLLLLLLPLFLLLLRDVAGSHRAPAWSALPAAADGLQGDRDLQRHPGDAAATLGPSAQDMVAVHMHRLYEKYSRQGARPGGGNTVRSFRARLEVVDQKAVYFFNLTSMQDSEMILTATFHFYSEPPRWPRALEVLCKPRAKNASGRPLPLGPPTRQHLLFRSLSQNTATQGLLRGAMALAPPPRGLWQAKDISPIVKAARRDGELLLSAQLDSEERDPGVPRPSPYAPYILVYANDLAISEPNSVAVTLQRYDPFPAGDPEPRAAPNNSADPRVRRAAQATGPLQDNELPGLDERPPRAHAQHFHKHQLWPSPFRALKPRPGRKDRRKKGQEVFMAASQVLDFDEKTMQKARRKQWDEPRVCSRRYLKVDFADIGWNEWIISPKSFDAYYCAGACEFPMPKIVRPSNHATIQSIVRAVGIIPGIPEPCCVPDKMNSLGVLFLDENRNVVLKVYPNMSVDTCACR

SEQ ID NO: 36437 - protein, 407 aa, Homo sapiens
  Payload ID: 7209
  Gene Symbol: GDF11
  Gene Name: growth differentiation factor 11
  Uniprot ID: O95390
  ENSP ID: ENSP00000257868
MVLAAPLLLGFLLLALELRPRGEAAEGPAAAAAAAAAAAAAGVGGERSSRPAPSVAPEPDGCPVCVWRQHSRELRLESIKSQILSKLRLKEAPNISREVVKQLLPKAPPLQQILDLHDFQGDALQPEDFLEEDEYHATTETVISMAQETDPAVQTDGSPLCCHFHFSPKVMFTKVLKAQLWVYLRPVPRPATVYLQILRLKPLTGEGTAGGGGGGRRHIRIRSLKIELHSRSGHWQSIDFKQVLHSWFRQPQSNWGIEINAFDPSGTDLAVTSLGPGAEGLHPFMELRVLENTKRSRRNLGLDCDEHSSESRCCRYPLTVDFEAFGWDWIIAPKRYKANYCSGQCEYMFMQKYPHTHLVQQANPRGSAGPCCTPTKMSPINMLYFNDKQQIIYGKIPGMVVDRCGCS

SEQ ID NO: 36438 - protein, 380 aa, Homo sapiens
  Payload ID: 7209
  Gene Symbol: GDF11
  Gene Name: growth differentiation factor 11
  ENSP ID: ENSP00000448390
  MOD_RES (1)..(1): Any amino acid
XAAAAAAAAAAAAAGVGGERSSRPAPSVAPEPDGCPVCVWRQHSRELRLESIKSQILSKLRLKEAPNISREVVKQLLPKAPPLQQILDLHDFQGDALQPEDFLEEDEYHATTETVISMAQETDPAVQTDGSPLCCHFHFSPKVMFTKVLKAQLWVYLRPVPRPATVYLQILRLKPLTGEGTAGGGGGGRRHIRIRSLKIELHSRSGHWQSIDFKQVLHSWFRQPQSNWGIEINAFDPSGTDLAVTSLGPGAEGLHPFMELRVLENTKRSRRNLGLDCDEHSSESRCCRYPLTVDFEAFGWDWIIAPKRYKANYCSGQCEYMFMQKYPHTHLVQQANPRGSAGPCCTPTKMSPINMLYFNDKQQIIYGKIPGMVVDRCGCS

SEQ ID NO: 36439 - protein, 308 aa, Homo sapiens
  Payload ID: 7210
  Gene Symbol: GDF15
  Gene Name: growth differentiation factor 15
  Uniprot ID: Q99988
  ENSP ID: ENSP00000252809
MPGQELRTVNGSQMLLVLLVLSWLPHGGALSLAEASRASFPGPSELHSEDSRFRELRKRYEDLLTRLRANQSWEDSNTDLVPAPAVRILTPEVRLGSGGHLHLRISRAALPEGLPEASRLHRALFRLSPTASRSWDVTRPLRRQLSLARPQAPALHLRLSPPPSQSDQLLAESSSARPQLELHLRPQAARGRRRARARNGDHCPLGPGRCCRLHTVRASLEDLGWADWVLSPREVQVTMCIGACPSQFRAANMHAQIKTSLHRLKPDTVPAPCCVPASYNPMVLIQKTDTGVSLQTYDDLLAKDCHCI

SEQ ID NO: 36440 - protein, 6 aa, Homo sapiens
  Payload ID: 7210
  Gene Symbol: GDF15
  Gene Name: growth differentiation factor 15
  ENSP ID: ENSP00000469819
MPGQEL

SEQ ID NO: 36441 - protein, 113 aa, Homo sapiens
  Payload ID: 7210
  Gene Symbol: GDF15
  Gene Name: growth differentiation factor 15
  ENSP ID: ENSP00000470531
MPGQELRTVNGSQMLLVLLVLSWLPHGGALSLAEASRASFPGPSELHSEDSRFRELRKRYEDLLTRLRANQSWEDSNTDLVPAPAVRILTPEVRLGSGGHLHLRISRAALPEG

SEQ ID NO: 36442 - protein, 429 aa, Homo sapiens
  Payload ID: 7211
  Gene Symbol: GDF2
  Gene Name: growth differentiation factor 2
  Uniprot ID: Q9UK05
  ENSP ID: ENSP00000463051
MCPGALWVALPLLSLLAGSLQGKPLQSWGRGSAGGNAHSPLGVPGGGLPEHTFNLKMFLENVKVDFLRSLNLSGVPSQDKTRVEPPQYMIDLYNRYTSDKSTTPASNIVRSFSMEDAISITATEDFPFQKHILLFNISIPRHEQITRAELRLYVSCQNHVDPSHDLKGSVVIYDVLDGTDAWDSATETKTFLVSQDIQDEGWETLEVSSAVKRWVRSDSTKSKNKLEVTVESHRKGCDTLDISVPPGSRNLPFFVVFSNDHSSGTKETRLELREMISHEQESVLKKLSKDGSTEAGESSHEEDTDGHVAAGSTLARRKRSAGAGSHCQKTSLRVNFEDIGWDSWIIAPKEYEAYECKGGCFFPLADDVTPTKHAIVQTLVHLKFPTKVGKACCVPTKLSPISVLYKDDMGVPTLKYHYEGMSVAECGCR

SEQ ID NO: 36443 - protein, 364 aa, Homo sapiens
  Payload ID: 7212
  Gene Symbol: GDF3
  Gene Name: growth differentiation factor 3
  Uniprot ID: Q9NR23
  ENSP ID: ENSP00000331745
MLRFLPDLAFSFLLILALGQAVQFQEYVFLQFLGLDKAPSPQKFQPVPYILKKIFQDREAAATTGVSRDLCYVKELGVRGNVLRFLPDQGFFLYPKKISQASSCLQKLLYFNLSAIKEREQLTLAQLGLDLGPNSYYNLGPELELALFLVQEPHVWGQTTPKPGKMFVLRSVPWPQGAVHFNLLDVAKDWNDNPRKNFGLFLEILVKEDRDSGVNFQPEDTCARLRCSLHASLLVVTLNPDQCHPSRKRRAAIPVPKLSCKNLCHRHQLFINFRDLGWHKWIIAPKGFMANYCHGECPFSLTISLNSSNYAFMQALMHAVDPEIPQAVCIPTKLSPISMLYQDNNDNVILRHYEDMVVDECGCG

SEQ ID NO: 36444 - protein, 501 aa, Homo sapiens
  Payload ID: 7213
  Gene Symbol: GDF5
  Gene Name: growth differentiation factor 5
  Uniprot ID: P43026
  ENSP ID: ENSP00000363489
MRLPKLLTFLLWYLAWLDLEFICTVLGAPDLGQRPQGTRPGLAKAEAKERPPLARNVFRPGGHSYGGGATNANARAKGGTGQTGGLTQPKKDEPKKLPPRPGGPEPKPGHPPQTRQATARTVTPKGQLPGGKAPPKAGSVPSSFLLKKAREPGPPREPKEPFRPPPITPHEYMLSLYRTLSDADRKGGNSSVKLEAGLANTITSFIDKGQDDRGPVVRKQRYVFDISALEKDGLLGAELRILRKKPSDTAKPAAPGGGRAAQLKLSSCPSGRQPAALLDVRSVPGLDGSGWEVFDIWKLFRNFKNSAQLCLELEAWERGRAVDLRGLGFDRAARQVHEKALFLVFGRTKKRDLFFNEIKARSGQDDKTVYEYLFSQRRKRRAPLATRQGKRPSKNLKARCSRKALHVNFKDMGWDDWIIAPLEYEAFHCEGLCEFPLRSHLEPTNHAVIQTLMNSMDPESTPPTCCVPTRLSPISILFIDSANNVVYKQYEDMVVESCGCR

SEQ ID NO: 36445 - protein, 501 aa, Homo sapiens; identical to SEQ ID NO: 36444
  Payload ID: 7213
  Gene Symbol: GDF5
  Gene Name: growth differentiation factor 5
  Uniprot ID: P43026
  ENSP ID: ENSP00000363492

SEQ ID NO: 36446 - protein, 250 aa, Homo sapiens
  Payload ID: 7214
  Gene Symbol: GDF5OS
  Gene Name: growth differentiation factor 5 opposite strand
  Uniprot ID: Q5U4N7
  ENSP ID: ENSP00000363495
MIQSSQPMSLKLTCSAFRLQRALRFLLGRLPWRVASGARRFRRWLNRYSYTVLSSWPERALISLKNRSRFLVRPNTRNRAFSWTCRAARSKPRPRRSTALPRSQASSSRHSWAEFLKFRKSFQMSNTSQPDPSRPGTERTSSKAAGCRPLGQLDSFSWAARPPPGAAGLAVSEGFFRKIRSSAPSSPSFSRALMSNTYLCFLTTGPRSSRENTQKSFPATSPREPVTSRLRGKAPALSQSRELSFTSAPF

SEQ ID NO: 36447 - protein, 455 aa, Homo sapiens
  Payload ID: 7215
  Gene Symbol: GDF6
  Gene Name: growth differentiation factor 6
  Uniprot ID: Q6KF10
  ENSP ID: ENSP00000287020
MDTPRVLLSAVFLISFLWDLPGFQQASISSSSSSAELGSTKGMRSRKEGKMQRAPRDSDAGREGQEPQPRPQDEPRAQQPRAQEPPGRGPRVVPHEYMLSIYRTYSIAEKLGINASFFQSSKSANTITSFVDRGLDDLSHTPLRRQKYLFDVSMLSDKEELVGAELRLFRQAPSAPWGPPAGPLHVQLFPCLSPLLLDARTLDPQGAPPAGWEVFDVWQGLRHQPWKQLCLELRAAWGELDAGEAEARARGPQQPPPPDLRSLGFGRRVRPPQERALLVVFTRSQRKNLFAEMREQLGSAEAAGPGAGAEGSWPPPSGAPDARPWLPSPGRRRRRTAFASRHGKRHGKKSRLRCSKKPLHVNFKELGWDDWIIAPLEYEAYHCEGVCDFPLRSHLEPTNHAIIQTLMNSMDPGSTPPSCCVPTKLTPISILYIDAGNNVVYKQYEDMVVESCGCR

SEQ ID NO: 36448 - protein, 271 aa, Homo sapiens [sequence omitted]

SEQ ID NO: 36449 - protein, 353 aa, Homo sapiens [sequence omitted]

SEQ ID NO: 36450 - protein, 450 aa, Homo sapiens
  Payload ID: 7216
  Gene Symbol: GDF7
  Gene Name: growth differentiation factor 7
  Uniprot ID: Q7Z4P5
  ENSP ID: ENSP00000272224
MDLSAAAALCLWLLSACRPRDGLEAAAVLRAAGAGPVRSPGGGGGGGGGGRTLAQAAGAAAVPAAAVPRARAARRAAGSGFRNGSVVPHHFMMSLYRSLAGRAPAGAAAVSASGHGRADTITGFTDQATQDESAAETGQSFLFDVSSLNDADEVVGAELRVLRRGSPESGPGSWTSPPLLLLSTCPGAARAPRLLYSRAAEPLVGQRWEAFDVADAMRRHRREPRPPRAFCLLLRAVAGPVPSPLALRRLGFGWPGGGGSAAEERAVLVVSSRTQRKESLFREIRAQARALGAALASEPLPDPGTGTASPRAVIGGRRRRRTALAGTRTAQGSGGGAGRGHGRRGRSRCSRKPLHVDFKELGWDDWIIAPLDYEAYHCEGLCDFPLRSHLEPTNHAIIQTLLNSMAPDAAPASCCVPARLSPISILYIDAANNVVYKQYEDMVVEACGCR

SEQ ID NO: 36451 - protein, 366 aa, Homo sapiens
  Payload ID: 7217
  Gene Symbol: GDF9
  Gene Name: growth differentiation factor 9
  ENSP ID: ENSP00000296875
MKKLYKTYATKEGIPKSNRSHLYNTVRLFTPCTRHKQAPGDQVTGILPSVELLFNLDRITTVEHLLKSVLLYNINNSVSFSSAVKCVCNLMIKEPKSSSRTLGRAPYSFTFNSQFEFGKKHKWIQIDVTSLLQPLVASNKRSIHMSINFTCMKDQLEHPSAQNGLFNMTLVSPSLILYLNDTSAQAYHSWYSLHYKRRPSQGPDQERSLSAYPVGEEAAEDGRSSHHRHRRGQETVSSELKKPLGPASFNLSEYFRQFLLPQNECELHDFRLSFSQLKWDNWIVAPHRYNPRYCKGDCPRAVGHRYGSPVHTMVQNIIYEKLDSSVPRPSCVPAKYSPLSVLTIEPDGSIAYKEYEDMIATKCTCR

SEQ ID NO: 36452 - protein, 454 aa, Homo sapiens
  Payload ID: 7217
  Gene Symbol: GDF9
  Gene Name: growth differentiation factor 9
  Uniprot ID: O60383
  ENSP ID: ENSP00000367942
MARPNKFLLWFCCFAWLCFPISLGSQASGGEAQIAASAELESGAMPWSLLQHIDERDRAGLLPALFKVLSVGRGGSPRLQPDSRALHYMKKLYKTYATKEGIPKSNRSHLYNTVRLFTPCTRHKQAPGDQVTGILPSVELLFNLDRITTVEHLLKSVLLYNINNSVSFSSAVKCVCNLMIKEPKSSSRTLGRAPYSFTFNSQFEFGKKHKWIQIDVTSLLQPLVASNKRSIHMSINFTCMKDQLEHPSAQNGLFNMTLVSPSLILYLNDTSAQAYHSWYSLHYKRRPSQGPDQERSLSAYPVGEEAAEDGRSSHHRHRRGQETVSSELKKPLGPASFNLSEYFRQFLLPQNECELHDFRLSFSQLKWDNWIVAPHRYNPRYCKGDCPRAVGHRYGSPVHTMVQNIIYEKLDSSVPRPSCVPAKYSPLSVLTIEPDGSIAYKEYEDMIATKCTCR

SEQ ID NO: 36453 - protein, 366 aa, Homo sapiens; identical to SEQ ID NO: 36451
  Payload ID: 7217
  Gene Symbol: GDF9
  Gene Name: growth differentiation factor 9
  ENSP ID: ENSP00000484339

SEQ ID NO: 36454 - protein, 366 aa, Homo sapiens; identical to SEQ ID NO: 36451
  Payload ID: 7217
  Gene Symbol: GDF9
  Gene Name: growth differentiation factor 9
  ENSP ID: ENSP00000485037

SEQ ID NO: 36455 - protein, 366 aa, Homo sapiens; identical to SEQ ID NO: 36451
  Payload ID: 7217
  Gene Symbol: GDF9
  Gene Name: growth differentiation factor 9
  ENSP ID: ENSP00000485231

SEQ ID NO: 36456 - protein, 422 aa, Homo sapiens
  Payload ID: 7218
  Gene Symbol: GFI1
  Gene Name: growth factor independent 1 transcription repressor
  Uniprot ID: Q99684
  ENSP ID: ENSP00000294702
MPRSFLVKSKKAHSYHQPRSPGPDYSLRLENVPAPSRADSTSNAGGAKAEPRDRLSPESQLTEAPDRASASPDSCEGSVCERSSEFEDFWRPPSPSASPASEKSMCPSLDEAQPFPLPFKPYSWSGLAGSDLRHLVQSYRPCGALERGAGLGLFCEPAPEPGHPAALYGPKRAAGGAGAGAPGSCSAGAGATAGPGLGLYGDFGSAAAGLYERPTAAAGLLYPERGHGLHADKGAGVKVESELLCTRLLLGGGSYKCIKCSKVFSTPHGLEVHVRRSHSGTRPFACEMCGKTFGHAVSLEQHKAVHSQERSFDCKICGKSFKRSSTLSTHLLIHSDTRPYPCQYCGKRFHQKSDMKKHTFIHTGEKPHKCQVCGKAFSQSSNLITHSRKHTGFKPFGCDLCGKGFQRKVDLRRHRETQHGLK

SEQ ID NO: 36457 - protein, 422 aa, Homo sapiens; identical to SEQ ID NO: 36456
  Payload ID: 7218
  Gene Symbol: GFI1
  Gene Name: growth factor independent 1 transcription repressor
  Uniprot ID: Q99684
  ENSP ID: ENSP00000359357

SEQ ID NO: 36458 - protein, 422 aa, Homo sapiens; identical to SEQ ID NO: 36456
  Payload ID: 7218
  Gene Symbol: GFI1
  Gene Name: growth factor independent 1 transcription repressor
  Uniprot ID: Q99684
  ENSP ID: ENSP00000399719

SEQ ID NO: 36459 - protein, 330 aa, Homo sapiens
  Payload ID: 7219
  Gene Symbol: GFI1B
  Gene Name: growth factor independent 1B transcription repressor
  Uniprot ID: Q5VTD9
  ENSP ID: ENSP00000344782
MPRSFLVKSKKAHTYHQPRVQEDEPLWPPALTPVPRDQAPSNSPVLSTLFPNQCLDWTNLKREPELEQDQNLARMAPAPEGPIVLSRPQDGDSPLSDSPPFYKPSFSWDTLATTYGHSYRQAPSTMQSAFLEHSVSLYGSPLVPSTEPALDFSLRYSPGMDAYHCVKCNKVFSTPHGLEVHVRRSHSGTRPFACDICGKTFGHAVSLEQHTHVHSQERSFECRMCGKAFKRSSTLSTHLLIHSDTRPYPCQFCGKRFHQKSDMKKHTYIHTGEKPHKCQVCGKAFSQSSNLITHSRKHTGFKPFSCELCTKGFQRKVDLRRHRESQHNLK

SEQ ID NO: 36460 - protein, 330 aa, Homo sapiens; identical to SEQ ID NO: 36459
  Payload ID: 7219
  Gene Symbol: GFI1B
  Gene Name: growth factor independent 1B transcription repressor
  Uniprot ID: Q5VTD9
  ENSP ID: ENSP00000361195

SEQ ID NO: 36461 - protein, 284 aa, Homo sapiens
  Payload ID: 7219
  Gene Symbol: GFI1B
  Gene Name: growth factor independent 1B transcription repressor
  Uniprot ID: Q5VTD9
  ENSP ID: ENSP00000361196
MPRSFLVKSKKAHTYHQPRVQEDEPLWPPALTPVPRDQAPSNSPVLSTLFPNQCLDWTNLKREPELEQDQNLARMAPAPEGPIVLSRPQDGDSPLSDSPPFYKPSFSWDTLATTYGHSYRQAPSTMQSAFLEHSVSLYGSPLVPSTEPALDFSLRYSPGMDAYHCVKCNKERSFECRMCGKAFKRSSTLSTHLLIHSDTRPYPCQFCGKRFHQKSDMKKHTYIHTGEKPHKCQVCGKAFSQSSNLITHSRKHTGFKPFSCELCTKGFQRKVDLRRHRESQHNLK

SEQ ID NO: 36462 - protein, 536 aa, Homo sapiens
  Payload ID: 7220
  Gene Symbol: GRB10
  Gene Name: growth factor receptor-bound protein 10
  Uniprot ID: Q13322
  ENSP ID: ENSP00000338543
MNASLESLYSACSMQSDTVPLLQNGQHARSQPRASGPPRSIQPQVSPRQRVQRSQPVHILAVRRLQEEDQQFRTSSLPAIPNPFPELCGPGSPPVLTPGSLPPSQAAAKQDVKVFSEDGTSKVVEILADMTARDLCQLLVYKSHCVDDNSWTLVEHHPHLGLERCLEDHELVVQVESTMASESKFLFRKNYAKYEFFKNPMNFFPEQMVTWCQQSNGSQTQLLQNFLNSSSCPEIQGFLHVKELGKKSWKKLYVCLRRSGLYCSTKGTSKEPRHLQLLADLEDSNIFSLIAGRKQYNAPTDHGLCIKPNKVRNETKELRLLCAEDEQTRTCWMTAFRLLKYGMLLYQNYRIPQQRKALLSPFSTPVRSVSENSLVAMDFSGQTGRVIENPAEAQSAALEEGHAWRKRSTRMNILGSQSPLHPSTLSTVIHRTQHWFHGRISREESHRIIKQQGLVDGLFLLRDSQSNPKAFVLTLCHHQKIKNFQILPCEDDGQTFFSLDDGNTKFSDLIQLVDFYQLNKGVLPCKLKHHCIRVAL

SEQ ID NO: 36463 - protein, 548 aa, Homo sapiens
  Payload ID: 7220
  Gene Symbol: GRB10
  Gene Name: growth factor receptor-bound protein 10
  Uniprot ID: Q13322
  ENSP ID: ENSP00000349818
MALAGCPDSFLHHPYYQDKVEQTPRSQQDPAGPGLPAQSDRLANHQEDDVDLEALVNDMNASLESLYSACSMQSDTVPLLQNGQHARSQPRASGPPRSIQPQVSPRQRVQRSQPVHILAVRRLQEEDQQFRTSSLPAIPNPFPELCGPGSPPVLTPGSLPPSQAAAKQDVKVFSEDGTSKVVEILADMTARDLCQLLVYKSHCVDDNSWTLVEHHPHLGLERCLEDHELVVQVESTMASESKFLFRKNYAKYEFFKNPMNFFPEQMVTWCQQSNGSQTQLLQEPRHLQLLADLEDSNIFSLIAGRKQYNAPTDHGLCIKPNKVRNETKELRLLCAEDEQTRTCWMTAFRLLKYGMLLYQNYRIPQQRKALLSPFSTPVRSVSENSLVAMDFSGQTGRVIENPAEAQSAALEEGHAWRKRSTRMNILGSQSPLHPSTLSTVIHRTQHWFHGRISREESHRIIKQQGLVDGLFLLRDSQSNPKAFVLTLCHHQKIKNFQILPCEDDGQTFFSLDDGNTKFSDLIQLVDFYQLNKGVLPCKLKHHCIRVAL

SEQ ID NO: 36464 - protein, 536 aa, Homo sapiens; identical to SEQ ID NO: 36462
  Payload ID: 7220
  Gene Symbol: GRB10
  Gene Name: growth factor receptor-bound protein 10
  Uniprot ID: Q13322
  ENSP ID: ENSP00000381790

SEQ ID NO: 36465 - protein, 594 aa, Homo sapiens
  Payload ID: 7220
  Gene Symbol: GRB10
  Gene Name: growth factor receptor-bound protein 10
  Uniprot ID: Q13322
  ENSP ID: ENSP00000381793
MALAGCPDSFLHHPYYQDKVEQTPRSQQDPAGPGLPAQSDRLANHQEDDVDLEALVNDMNASLESLYSACSMQSDTVPLLQNGQHARSQPRASGPPRSIQPQVSPRQRVQRSQPVHILAVRRLQEEDQQFRTSSLPAIPNPFPELCGPGSPPVLTPGSLPPSQAAAKQDVKVFSEDGTSKVVEILADMTARDLCQLLVYKSHCVDDNSWTLVEHHPHLGLERCLEDHELVVQVESTMASESKFLFRKNYAKYEFFKNPMNFFPEQMVTWCQQSNGSQTQLLQNFLNSSSCPEIQGFLHVKELGKKSWKKLYVCLRRSGLYCSTKGTSKEPRHLQLLADLEDSNIFSLIAGRKQYNAPTDHGLCIKPNKVRNETKELRLLCAEDEQTRTCWMTAFRLLKYGMLLYQNYRIPQQRKALLSPFSTPVRSVSENSLVAMDFSGQTGRVIENPAEAQSAALEEGHAWRKRSTRMNILGSQSPLHPSTLSTVIHRTQHWFHGRISREESHRIIKQQGLVDGLFLLRDSQSNPKAFVLTLCHHQKIKNFQILPCEDDGQTFFSLDDGNTKFSDLIQLVDFYQLNKGVLPCKLKHHCIRVAL

SEQ ID NO: 36466 - protein, 536 aa, Homo sapiens; identical to SEQ ID NO: 36462
  Payload ID: 7220
  Gene Symbol: GRB10
  Gene Name: growth factor receptor-bound protein 10
  Uniprot ID: Q13322
  ENSP ID: ENSP00000385046

SEQ ID NO: 36467 - protein, 536 aa, Homo sapiens; identical to SEQ ID NO: 36462
  Payload ID: 7220
  Gene Symbol: GRB10
  Gene Name: growth factor receptor-bound protein 10
  Uniprot ID: Q13322
  ENSP ID: ENSP00000385189

SEQ ID NO: 36468 - protein, 536 aa, Homo sapiens; identical to SEQ ID NO: 36462
  Payload ID: 7220
  Gene Symbol: GRB10
  Gene Name: growth factor receptor-bound protein 10
  Uniprot ID: Q13322
  ENSP ID: ENSP00000385366

SEQ ID NO: 36469 - protein, 588 aa, Homo sapiens
  Payload ID: 7220
  Gene Symbol: GRB10
  Gene Name: growth factor receptor-bound protein 10
  Uniprot ID: Q13322
  ENSP ID: ENSP00000385544
MQAAGPLFRSKDKVEQTPRSQQDPAGPGLPAQSDRLANHQEDDVDLEALVNDMNASLESLYSACSMQSDTVPLLQNGQHARSQPRASGPPRSIQPQVSPRQRVQRSQPVHILAVRRLQEEDQQFRTSSLPAIPNPFPELCGPGSPPVLTPGSLPPSQAAAKQDVKVFSEDGTSKVVEILADMTARDLCQLLVYKSHCVDDNSWTLVEHHPHLGLERCLEDHELVVQVESTMASESKFLFRKNYAKYEFFKNPMNFFPEQMVTWCQQSNGSQTQLLQNFLNSSSCPEIQGFLHVKELGKKSWKKLYVCLRRSGLYCSTKGTSKEPRHLQLLADLEDSNIFSLIAGRKQYNAPTDHGLCIKPNKVRNETKELRLLCAEDEQTRTCWMTAFRLLKYGMLLYQNYRIPQQRKALLSPFSTPVRSVSENSLVAMDFSGQTGRVIENPAEAQSAALEEGHAWRKRSTRMNILGSQSPLHPSTLSTVIHRTQHWFHGRISREESHRIIKQQGLVDGLFLLRDSQSNPKAFVLTLCHHQKIKNFQILPCEDDGQTFFSLDDGNTKFSDLIQLVDFYQLNKGVLPCKLKHHCIRVAL

SEQ ID NO: 36470 - protein, 536 aa, Homo sapiens; identical to SEQ ID NO: 36462
  Payload ID: 7220
  Gene Symbol: GRB10
  Gene Name: growth factor receptor-bound protein 10
  Uniprot ID: Q13322
  ENSP ID: ENSP00000385748

SEQ ID NO: 36471 - protein, 594 aa, Homo sapiens; identical to SEQ ID NO: 36465
  Payload ID: 7220
  Gene Symbol: GRB10
  Gene Name: growth factor receptor-bound protein 10
  Uniprot ID: Q13322
  ENSP ID: ENSP00000385770

SEQ ID NO: 36472 - protein, 108 aa, Homo sapiens
  Payload ID: 7220
  Gene Symbol: GRB10
  Gene Name: growth factor receptor-bound protein 10
  ENSP ID: ENSP00000410920
LADMTARDLCQLLVYKSHCVDDNSWTLVEHHPHLGLERCLEDHELVVQVESTMASESKFLFRKNYAKYEFFKNPMNFFPEQMVTWCQQSNGSQTQLLQVLGHNRSLLK

SEQ ID NO: 36473 - protein, 114 aa, Homo sapiens
  Payload ID: 7220
  Gene Symbol: GRB10
  Gene Name: growth factor receptor-bound protein 10
  ENSP ID: ENSP00000413023
MQAAGPLFRSKDKVEQTPRSQQDPAGPGLPAQSDRLANHQEDDVDLEALVNDMNASLESLYSACSMQSDTVPLLQNGQHARSQPRASGPPRSIQPQVSPRQRVQRSQPVHILAV

SEQ ID NO: 36474 - protein, 540 aa, Homo sapiens
  Payload ID: 7221
  Gene Symbol: GRB14
  Gene Name: growth factor receptor-bound protein 14
  Uniprot ID: Q14449
  ENSP ID: ENSP00000263915
MTTSLQDGQSAASRAAARDSPLAAQVCGAAQGRGDAHDLAPAPWLHARALLPLPDGTRGCAADRRKKKDLDVPEMPSIPNPFPELCCSPFTSVLSADLFPKANSRKKQVIKVYSEDETSRALDVPSDITARDVCQLLILKNHYIDDHSWTLFEHLPHIGVERTIEDHELVIEVLSNWGIEEENKLYFRKNYAKYEFFKNPMYFFPEHMVSFATETNGEISPTQILQMFLSSSTYPEIHGFLHAKEQGKKSWKKIYFFLRRSGLYFSTKGTSKEPRHLQFFSEFGNSDIYVSLAGKKKHGAPTNYGFCFKPNKAGGPRDLKMLCAEEEQSRTCWVTAIRLLKYGMQLYQNYMHPYQGRSGCSSQSISPMRSISENSLVAMDFSGQKSRVIENPTEALSVAVEEGLAWRKKGCLRLGTHGSPTASSQSSATNMAIHRSQPWFHHKISRDEAQRLIIQQGLVDGVFLVRDSQSNPKTFVLSMSHGQKIKHFQIIPVEDDGEMFHTLDDGHTRFTDLIQLVEFYQLNKGVLPCKLKHYCARIAL

SEQ ID NO: 36475 - protein, 155 aa, Homo sapiens
  Payload ID: 7221
  Gene Symbol: GRB14
  Gene Name: growth factor receptor-bound protein 14
  ENSP ID: ENSP00000401702
MFSYCRRKKKDLDVPEMPSIPNPFPELCCSPFTSVLSADLFPKANSRKKQVIKVYSEDETSRALDVPSDITARDVCQLLILKNHYIDDHSWTLFEHLPHIGVERTIEDHELVIEVLSNWGIEEENKLYFRKNYAKYEFFKNPMYFFPEHMVSFAT

SEQ ID NO: 36476 - protein, 415 aa, Homo sapiens
  Payload ID: 7221
  Gene Symbol: GRB14
  Gene Name: growth factor receptor-bound protein 14
  ENSP ID: ENSP00000416786
MGRAPRAGRLPGIRRWPPRRKKKDLDVPEMPSIPNPFPELCCSPFTSVLSADLFPKANSRKKQVIKVYSEDETSRALDVPSDITARDVCQLLILKNHYIDDHSWTLFEHLPHIGVERTIEDHELVIEVLSNWGIEEENKLYFRKNYAKYEFFKNPMYFFPEHMVSFATETNGEISPTQILQMFLSSSTYPEIHGFLHAKEQGKKSWKKIYFFLRRSGLYFSTKGTSKEPRHLQFFSEFGNSDIYVSLAGKKKHGAPTNYGFCFKPNKAGGPRDLKMLCAEEEQSRTCWVTAIRLLKYGMQLYQNYMHPYQGRSGCSSQSISPMRSISENSLVAMDFSGQKSRVIENPTEALSVAVEEGLAWRKKGCLRLGTHGSPTASSQSSATNMAIHRSQPWFHHKISRDEAQRLIIQQGLVD

SEQ ID NO: 36477 - protein, 176 aa, Homo sapiens
  Payload ID: 7222
  Gene Symbol: GRB2
  Gene Name: growth factor receptor-bound protein 2
  Uniprot ID: P62993
  ENSP ID: ENSP00000317360
MEAIAKYDFKATADDELSFKRGDILKVLNEECDQNWYKAELNGKDGFIPKNYIEMKPHPFGNDVQHFKVLRDGAGKYFLWVVKFNSLNELVDYHRSTSVSRNQQIFLRDIEQVPQQPTYVQALFDFDPQEDGELGFRRGDFIHVMDNSDPNWWKGACHGQTGMFPRNYVTPVNRNV

SEQ ID NO: 36478 - protein, 217 aa, Homo sapiens [sequence omitted]

SEQ ID NO: 36479 - protein, 217 aa, Homo sapiens [sequence omitted]

SEQ ID NO: 36480 - protein, 176 aa, Homo sapiens; identical to SEQ ID NO: 36477
  Payload ID: 7222
  Gene Symbol: GRB2
  Gene Name: growth factor receptor-bound protein 2
  Uniprot ID: P62993
  ENSP ID: ENSP00000376346

SEQ ID NO: 36481 - protein, 217 aa, Homo sapiens [sequence omitted]

SEQ ID NO: 36482 - protein, 110 aa, Homo sapiens
  Payload ID: 7222
  Gene Symbol: GRB2
  Gene Name: growth factor receptor-bound protein 2
  ENSP ID: ENSP00000462785
MEAIAKYDFKATADDELSFKRGDILKVLNEECDQNWYKAELNGKDGFIPKNYIEMKPHPWFFGKIPRAKAEEMLSKQRHDGAFLIRESESAPGDFSLSVKFGNDVQHFKV

SEQ ID NO: 36483 - protein, 42 aa, Homo sapiens
  Payload ID: 7222
  Gene Symbol: GRB2
  Gene Name: growth factor receptor-bound protein 2
  ENSP ID: ENSP00000463525
  MOD_RES (1)..(1): Any amino acid
XNSLNELVDYHRSTSVSRNQQIFLRDIEQVPQIGPWLSSCVP

SEQ ID NO: 36484 - protein, 156 aa, Homo sapiens
  Payload ID: 7222
  Gene Symbol: GRB2
  Gene Name: growth factor receptor-bound protein 2
  ENSP ID: ENSP00000464279
MEAIAKYDFKATADDELSFKRGDILKVLNEECDQNWYKAELNGKDGFIPKNYIEMKPHPWFFGKIPRAKAEEMLSKQRHDGAFLIRESESAPGDFSLSVNSRHTSRPSLTLIPRRMESWASAGEILSMSWITQTPTGGKELATGRPACFPAIMSPP

SEQ ID NO: 36485 - protein, 532 aa, Homo sapiens
  Payload ID: 7223
  Gene Symbol: GRB7
  Gene Name: growth factor receptor-bound protein 7
  Uniprot ID: Q14451
  ENSP ID: ENSP00000310771
MELDLSPPHLSSSPEDLCPAPGTPPGTPRPPDTPLPEEVKRSQPLLIPTTGRKLREEERRATSLPSIPNPFPELCSPPSQSPILGGPSSARGLLPRDASRPHVVKVYSEDGACRSVEVAAGATARHVCEMLVQRAHALSDETWGLVECHPHLALERGLEDHESVVEVQAAWPVGGDSRFVFRKNFAKYELFKSSPHSLFPEKMVSSCLDAHTGISHEDLIQNFLNAGSFPEIQGFLQLRGSGRKLWKRFFCFLRRSGLYYSTKGTSKDPRHLQYVADVNESNVYVVTQGRKLYGMPTDFGFCVKPNKLRNGHKGLRIFCSEDEQSRTCWLAAFRLFKYGVQLYKNYQQAQSRHLHPSCLGSPPLRSASDNTLVAMDFSGHAGRVIENPREALSVALEEAQAWRKKTNHRLSLPMPASGTSLSAAIHRTQLWFHGRISREESQRLIGQQGLVDGLFLVRESQRNPQGFVLSLCHLQKVKHYLILPSEEEGRLYFSMDDGQTRFTDLLQLVEFHQLNRGILPCLLRHCCTRVAL

SEQ ID NO: 36486 - protein, 447 aa, Homo sapiens
  Payload ID: 7223
  Gene Symbol: GRB7
  Gene Name: growth factor receptor-bound protein 7
  Uniprot ID: Q14451
  ENSP ID: ENSP00000377754
MELDLSPPHLSSSPEDLCPAPGTPPGTPRPPDTPLPEEVKRSQPLLIPTTGRKLREEERRATSLPSIPNPFPELCSPPSQSPILGGPSSARGLLPRDASRPHVVKVYSEDGACRSVEVAAGATARHVCEMLVQRAHALSDETWGLVECHPHLALERGLEDHESVVEVQAAWPVGGDSRFVFRKNFAKYELFKSSPHSLFPEKMVSSCLDAHTGISHEDLIQNFLNAGSFPEIQGFLQLRGSGRKLWKRFFCFLRRSGLYYSTKGTSKDPRHLQYVADVNESNVYVVTQGRKLYGMPTDFGFCVKPNKLRNGHKGLRIFCSEDEQSRTCWLAAFRLFKYGVQLYKNYQQAQSRHLHPSCLGSPPLRSASDNTLVAMDFSGHAGRVIENPREALSVALEEAQAWRKKTNHRLSLPMPASGTSLSAACSWSGRVSGTPRALSSLCATCRK

SEQ ID NO: 36487 - protein, 532 aa, Homo sapiens; identical to SEQ ID NO: 36485
  Payload ID: 7223
  Gene Symbol: GRB7
  Gene Name: growth factor receptor-bound protein 7
  Uniprot ID: Q14451
  ENSP ID: ENSP00000377759

SEQ ID NO: 36488 - protein, 532 aa, Homo sapiens; identical to SEQ ID NO: 36485
  Payload ID: 7223
  Gene Symbol: GRB7
  Gene Name: growth factor receptor-bound protein 7
  Uniprot ID: Q14451
  ENSP ID: ENSP00000377761

SEQ ID NO: 36489 - protein, 555 aa, Homo sapiens
  Payload ID: 7223
  Gene Symbol: GRB7
  Gene Name: growth factor receptor-bound protein 7
  Uniprot ID: Q14451
  ENSP ID: ENSP00000403459
MGKWRPGQGHTTGSVKPLSCSDAMELDLSPPHLSSSPEDLCPAPGTPPGTPRPPDTPLPEEVKRSQPLLIPTTGRKLREEERRATSLPSIPNPFPELCSPPSQSPILGGPSSARGLLPRDASRPHVVKVYSEDGACRSVEVAAGATARHVCEMLVQRAHALSDETWGLVECHPHLALERGLEDHESVVEVQAAWPVGGDSRFVFRKNFAKYELFKSSPHSLFPEKMVSSCLDAHTGISHEDLIQNFLNAGSFPEIQGFLQLRGSGRKLWKRFFCFLRRSGLYYSTKGTSKDPRHLQYVADVNESNVYVVTQGRKLYGMPTDFGFCVKPNKLRNGHKGLRIFCSEDEQSRTCWLAAFRLFKYGVQLYKNYQQAQSRHLHPSCLGSPPLRSASDNTLVAMDFSGHAGRVIENPREALSVALEEAQAWRKKTNHRLSLPMPASGTSLSAAIHRTQLWFHGRISREESQRLIGQQGLVDGLFLVRESQRNPQGFVLSLCHLQKVKHYLILPSEEEGRLYFSMDDGQTRFTDLLQLVEFHQLNRGILPCLLRHCCTRVAL

SEQ ID NO: 36490 - protein, 52 aa, Homo sapiens
  Payload ID: 7223
  Gene Symbol: GRB7
  Gene Name: growth factor receptor-bound protein 7
  ENSP ID: ENSP00000463126
MELDLSPPHLSSSPEDLCPAPGTPPGTPRPPDTPLPEEVCGGGSRCHSSPRV

SEQ ID NO: 36491 - protein, 118 aa, Homo sapiens
  Payload ID: 7223
  Gene Symbol: GRB7
  Gene Name: growth factor receptor-bound protein 7
  ENSP ID: ENSP00000463416
MELDLSPPHLSSSPEDLCPAPGTPPGTPRPPDTPLPEEVKRSQPLLIPTTGRKLREEERRATSLPSIPNPFPELCSPPSQSPILGGPSSARGLLPRDASRPHSCAIPGAQVVKVYSED

SEQ ID NO: 36492 - protein, 205 aa, Homo sapiens
  Payload ID: 7224
  Gene Symbol: GFER
  Gene Name: growth factor, augmenter of liver regeneration
  Uniprot ID: P55789
  ENSP ID: ENSP00000248114
MAAPGERGRFHGGNLFFLPGGARSEMMDDLATDARGRGAGRRDAAASASTPAQAPTSDSPVAEDASRRRPCRACVDFKTWMRTQQKRDTKFREDCPPDREELGRHSWAVLHTLAAYYPDLPTPEQQQDMAQFIHLFSKFYPCEECAEDLRKRLCRNHPDTRTRACFTQWLCHLHNEVNRKLGKPDFDCSKVDERWRDGWKDGSCD

SEQ ID NO: 36493 - protein, 130 aa, Homo sapiens
  Payload ID: 7224
  Gene Symbol: GFER
  Gene Name: growth factor, augmenter of liver regeneration
  ENSP ID: ENSP00000455885
MNSLSVGLLPQRDTKFREDCPPDREELGRHSWAVLHTLAAYYPDLPTPEQQQDMAQFIHLFSKFYPCEECAEDLRKRLCRNHPDTRTRACFTQWLCHLHNEVNRKLGKPDFDCSKVDERWRDGWKDGSCD

SEQ ID NO: 36494 - protein, 139 aa, Homo sapiens
  Payload ID: 7224
  Gene Symbol: GFER
  Gene Name: growth factor, augmenter of liver regeneration
  ENSP ID: ENSP00000456189
NLFFLPGGARSEMMDDLATDARGRGAGRRDAAASASTPAQAPTSDSPVAEDASRRRPCRACVDFKTWMRTQQKRDTKFREDCPPDREELGRHSWAVLHTLAAYYPDLPTPEQQQDMAQFIHLFSKFYPCEECAEDLRKR

SEQ ID NO: 36495 - protein, 109 aa, Homo sapiens
  Payload ID: 7224
  Gene Symbol: GFER
  Gene Name: growth factor, augmenter of liver regeneration
  ENSP ID: ENSP00000456432
MAAPGERGRFHGGNLFFLPGGARSEMMDDLATDARGRGAGRRDAAASASTPAQAPTSDSPVAEDASRRRPCRACVDFKTWMRTQQKAVQEPPRHPHPGMLHTVAVPPAQ

SEQ ID NO: 36496 - protein, 217 aa, Homo sapiens
  Payload ID: 7225
  Gene Symbol: GH1
  Gene Name: growth hormone 1
  Uniprot ID: P01241
  ENSP ID: ENSP00000312673
MATGSRTSLLLAFGLLCLPWLQEGSAFPTIPLSRLFDNAMLRAHRLHQLAFDTYQEFEEAYIPKEQKYSFLQNPQTSLCFSESIPTPSNREETQQKSNLELLRISLLLIQSWLEPVQFLRSVFANSLVYGASDSNVYDLLKDLEEGIQTLMGRLEDGSPRTGQIFKQTYSKFDTNSHNDDALLKNYGLLYCFRKDMDKVETFLRIVQCRSVEGSCGF

SEQ ID NO: 36497 - protein, 122 aa, Homo sapiens
  Payload ID: 7225
  Gene Symbol: GH1
  Gene Name: growth hormone 1
  ENSP ID: ENSP00000339278
MATGSRTSLLLAFGLLCLPWLQEGSAFPTIPLSRLFDNAMLRAHRLHQLAFDTYQEFRLEDGSPRTGQIFKQTYSKFDTNSHNDDALLKNYGLLYCFRKDMDKVETFLRIVQCRSVEGSCGF

SEQ ID NO: 36498 - protein, 177 aa, Homo sapiens
  Payload ID: 7225
  Gene Symbol: GH1
  Gene Name: growth hormone 1
  Uniprot ID: P01241
  ENSP ID: ENSP00000343791
MATGSRTSLLLAFGLLCLPWLQEGSAFPTIPLSRLFDNAMLRAHRLHQLAFDTYQEFNLELLRISLLLIQSWLEPVQFLRSVFANSLVYGASDSNVYDLLKDLEEGIQTLMGRLEDGSPRTGQIFKQTYSKFDTNSHNDDALLKNYGLLYCFRKDMDKVETFLRIVQCRSVEGSCGF

SEQ ID NO: 36499 - protein, 202 aa, Homo sapiens
  Payload ID: 7225
  Gene Symbol: GH1
  Gene Name: growth hormone 1
  Uniprot ID: P01241
  ENSP ID: ENSP00000408486
MATGSRTSLLLAFGLLCLPWLQEGSAFPTIPLSRLFDNAMLRAHRLHQLAFDTYQEFNPQTSLCFSESIPTPSNREETQQKSNLELLRISLLLIQSWLEPVQFLRSVFANSLVYGASDSNVYDLLKDLEEGIQTLMGRLEDGSPRTGQIFKQTYSKFDTNSHNDDALLKNYGLLYCFRKDMDKVETFLRIVQCRSVEGSCGF

SEQ ID NO: 36500 - protein, 30 aa, Homo sapiens
  Payload ID: 7225
  Gene Symbol: GH1
  Gene Name: growth hormone 1
  ENSP ID: ENSP00000481276
MATEAGRWQPPDWADLQADLQQVRHKLTQR

SEQ ID NO: 36501 - protein, 256 aa, Homo sapiens
  Payload ID: 7226
  Gene Symbol: GH2
  Gene Name: growth hormone 2
  Uniprot ID: P01242
  ENSP ID: ENSP00000333157
MAAGSRTSLLLAFGLLCLSWLQEGSAFPTIPLSRLFDNAMLRARRLYQLAYDTYQEFEEAYILKEQKYSFLQNPQTSLCFSESIPTPSNRVKTQQKSNLELLRISLLLIQSWLEPVQLLRSVFANSLVYGASDSNVYRHLKDLEEGIQTLMWVRVAPGIPNPGAPLASRDWGEKHCCPLFSSQALTQENSPYSSFPLVNPPGLSLQPGGEGGKWMNERGREQCPSAWPLLLFLHFAEAGRWQPPDWADLQSVLQQV

SEQ ID NO: 36502 - protein, 245 aa, Homo sapiens
  Payload ID: 7226
  Gene Symbol: GH2
  Gene Name: growth hormone 2
  Uniprot ID: P01242
  ENSP ID: ENSP00000394122
MAAGSRTSLLLAFGLLCLSWLQEGSAFPTIPLSRLFDNAMLRARRLYQLAYDTYQEFEEAYILKEQKYSFLQNPQTSLCFSESIPTPSNRVKTQQKSNLELLRISLLLIQSWLEPVQLLRSVFANSLVYGASDSNVYRHLKDLEEGIQTLIGWKMAAPGLGRSSISPTASLTQNRTTMTHCSRTTGCSTASGRTWTRSRHSCASCSAALWRAAVASSCPGGIPVTPPQCLSWSWKVLLQCPPALS

SEQ ID NO: 36503 - protein, 217 aa, Homo sapiens
  Payload ID: 7226
  Gene Symbol: GH2
  Gene Name: growth hormone 2
  Uniprot ID: P01242
  ENSP ID: ENSP00000409294
MAAGSRTSLLLAFGLLCLSWLQEGSAFPTIPLSRLFDNAMLRARRLYQLAYDTYQEFEEAYILKEQKYSFLQNPQTSLCFSESIPTPSNRVKTQQKSNLELLRISLLLIQSWLEPVQLLRSVFANSLVYGASDSNVYRHLKDLEEGIQTLMWRLEDGSPRTGQIFNQSYSKFDTKSHNDDALLKNYGLLYCFRKDMDKVETFLRIVQCRSVEGSCGF

SEQ ID NO: 36504 - protein, 202 aa, Homo sapiens
  Payload ID: 7226
  Gene Symbol: GH2
  Gene Name: growth hormone 2
  Uniprot ID: P01242
  ENSP ID: ENSP00000410618
MAAGSRTSLLLAFGLLCLSWLQEGSAFPTIPLSRLFDNAMLRARRLYQLAYDTYQEFNPQTSLCFSESIPTPSNRVKTQQKSNLELLRISLLLIQSWLEPVQLLRSVFANSLVYGASDSNVYRHLKDLEEGIQTLMWRLEDGSPRTGQIFNQSYSKFDTKSHNDDALLKNYGLLYCFRKDMDKVETFLRIVQCRSVEGSCGF

SEQ ID NO: 36505 - protein, 177 aa, Homo sapiens
  Payload ID: 7226
  Gene Symbol: GH2
  Gene Name: growth hormone 2
  ENSP ID: ENSP00000481086
MAAGSRTSLLLAFGLLCLSWLQEGSAFPTIPLSRLFDNAMLRARRLYQLAYDTYQEFNLELLRISLLLIQSWLEPVQLLRSVFANSLVYGASDSNVYRHLKDLEEGIQTLMWRLEDGSPRTGQIFNQSYSKFDTKSHNDDALLKNYGLLYCFRKDMDKVETFLRIVQCRSVEGSCGF

SEQ ID NO: 36506 - protein, 345 aa, Homo sapiens
  Payload ID: 7227
  Gene Symbol: GHITM
  Gene Name: growth hormone inducible transmembrane protein
  Uniprot ID: Q9H3K2
  ENSP ID: ENSP00000361207
MLAARLVCLRTLPSRVFHPAFTKASPVVKNSITKNQWLLTPSREYATKTRIGIRRGRTGQELKEAALEPSMEKIFKIDQMGRWFVAGGAAVGLGALCYYGLGLSNEIGAIEKAVIWPQYVKDRIHSTYMYLAGSIGLTALSAIAISRTPVLMNFMMRGSWVTIGVTFAAMVGAGMLVRSIPYDQSPGPKHLAWLLHSGVMGAVVAPLTILGGPLLIRAAWYTAGIVGGLSTVAMCAPSEKFLNMGAPLGVGLGLVFVSSLGSMFLPPTTVAGATLYSVAMYGGLVLFSMFLLYDTQKVIKRAEVSPMYGVQKYDPINSMLSIYMDTLNIFMRVATMLATGGNRKK

SEQ ID NO: 36507 - protein, 319 aa, Homo sapiens
  Payload ID: 7227
  Gene Symbol: GHITM
  Gene Name: growth hormone inducible transmembrane protein
  ENSP ID: ENSP00000482834
MLAARLVCLRTLPSRVFHPAFTKASPVVKNSITKNQWLLTPSREYATKTRIGIRRGRTGQELKEAALEPSMEKIFKIDQMGRWFVAGGAAVGLGALCYYGLGLSNEIGAIEKAVIWPQYVKDRIHSTYMYLAGSIGLTALSAIAISRTPVLMNFMMRGSWVTIGVTFAAMVGAGMLVRSIPYDQSPGPKHLAWLLHSGVMGAVVAPLTILGGPLLIRAAWYTAGIVGGLSTVAMCAPSEKFLNMGAPLGVGLGLVFVSSLGSMFLPPTTVAGATLYSVAMYGGLVLFSMFLLYDTQKVSSVQKYHQCMEFKNMIPLTRC

SEQ ID NO: 36508 - protein, 638 aa, Homo sapiens
  Payload ID: 7228
  Gene Symbol: GHR
  Gene Name: growth hormone receptor
  Uniprot ID: P10912
  ENSP ID: ENSP00000230882
MDLWQLLLTLALAGSSDAFSGSEATAAILSRAPWSLQSVNPGLKTNSSKEPKFTKCRSPERETFSCHWTDEVHHGTKNLGPIQLFYTRRNTQEWTQEWKECPDYVSAGENSCYFNSSFTSIWIPYCIKLTSNGGTVDEKCFSVDEIVQPDPPIALNWTLLNVSLTGIHADIQVRWEAPRNADIQKGWMVLEYELQYKEVNETKWKMMDPILTTSVPVYSLKVDKEYEVRVRSKQRNSGNYGEFSEVLYVTLPQMSQFTCEEDFYFPWLLIIIFGIFGLTVMLFVFLFSKQQRIKMLILPPVPVPKIKGIDPDLLKEGKLEEVNTILAIHDSYKPEFHSDDSWVEFIELDIDEPDEKTEESDTDRLLSSDHEKSHSNLGVKDGDSGRTSCCEPDILETDFNANDIHEGTSEVAQPQRLKGEADLLCLDQKNQNNSPYHDACPATQQPSVIQAEKNKPQPLPTEGAESTHQAAHIQLSNPSSLSNIDFYAQVSDITPAGSVVLSPGQKNKAGMSQCDMHPEMVSLCQENFLMDNAYFCEADAKKCIPVAPHIKVESHIQPSLNQEDIYITTESLTTAAGRPGTGEHVPGSEMPVPDYTSIHIVQSPQGLILNATALPLPDKEFLSSCGYVSTDQLNKIMP

SEQ ID NO: 36509 - protein, 616 aa, Homo sapiens
  Payload ID: 7228
  Gene Symbol: GHR
  Gene Name: growth hormone receptor
  Uniprot ID: P10912
  ENSP ID: ENSP00000350335
MDLWQLLLTLALAGSSDAFSGSEDSSKEPKFTKCRSPERETFSCHWTDEVHHGTKNLGPIQLFYTRRNTQEWTQEWKECPDYVSAGENSCYFNSSFTSIWIPYCIKLTSNGGTVDEKCFSVDEIVQPDPPIALNWTLLNVSLTGIHADIQVRWEAPRNADIQKGWMVLEYELQYKEVNETKWKMMDPILTTSVPVYSLKVDKEYEVRVRSKQRNSGNYGEFSEVLYVTLPQMSQFTCEEDFYFPWLLIIIFGIFGLTVMLFVFLFSKQQRIKMLILPPVPVPKIKGIDPDLLKEGKLEEVNTILAIHDSYKPEFHSDDSWVEFIELDIDEPDEKTEESDTDRLLSSDHEKSHSNLGVKDGDSGRTSCCEPDILETDFNANDIHEGTSEVAQPQRLKGEADLLCLDQKNQNNSPYHDACPATQQPSVIQAEKNKPQPLPTEGAESTHQAAHIQLSNPSSLSNIDFYAQVSDITPAGSVVLSPGQKNKAGMSQCDMHPEMVSLCQENFLMDNAYFCEADAKKCIPVAPHIKVESHIQPSLNQEDIYITTESLTTAAGRPGTGEHVPGSEMPVPDYTSIHIVQSPQGLILNATALPLPDKEFLSSCGYVSTDQLNKIMP

SEQ ID NO: 36510 - protein, 85 aa, Homo sapiens
  Payload ID: 7228
  Gene Symbol: GHR
  Gene Name: growth hormone receptor
  ENSP ID: ENSP00000422333
MDLWQLLLTLALAGSSDAFSGSEATAAILSRAPWSLQSVNPGLKTRTLKNGLKNGKNALIMFLLGKTAVTLIHRLPPSGYLIVSS

SEQ ID NO: 36511 - protein, 62 aa, Homo sapiens
  Payload ID: 7228
  Gene Symbol: GHR
  Gene Name: growth hormone receptor
  ENSP ID: ENSP00000426739
MDLWQLLLTLALAGSSDAFSGSEATAAILSRAPWSLQSVNPGLKTRWGPCSHIKKMESYMQA

SEQ ID NO: 36512 - protein, 638 aa, Homo sapiens; identical to SEQ ID NO: 36508
  Payload ID: 7228
  Gene Symbol: GHR
  Gene Name: growth hormone receptor
  Uniprot ID: P10912
  ENSP ID: ENSP00000442206

SEQ ID NO: 36513 - protein, 638 aa, Homo sapiens; identical to SEQ ID NO: 36508
  Payload ID: 7228
  Gene Symbol: GHR
  Gene Name: growth hormone receptor
  Uniprot ID: P10912
  ENSP ID: ENSP00000478291

SEQ ID NO: 36514 - protein, 638 aa, Homo sapiens; identical to SEQ ID NO: 36508
  Payload ID: 7228
  Gene Symbol: GHR
  Gene Name: growth hormone receptor
  Uniprot ID: P10912
  ENSP ID: ENSP00000478332

SEQ ID NO: 36515 - protein, 638 aa, Homo sapiens; identical to SEQ ID NO: 36508
  Payload ID: 7228
  Gene Symbol: GHR
  Gene Name: growth hormone receptor
  Uniprot ID: P10912
  ENSP ID: ENSP00000479846

SEQ ID NO: 36516 - protein, 638 aa, Homo sapiens; identical to SEQ ID NO: 36508
  Payload ID: 7228
  Gene Symbol: GHR
  Gene Name: growth hormone receptor
  Uniprot ID: P10912
  ENSP ID: ENSP00000482373

SEQ ID NO: 36517 - protein, 645 aa, Homo sapiens
  Payload ID: 7228
  Gene Symbol: GHR
  Gene Name: growth hormone receptor
  ENSP ID: ENSP00000483403
MNWGPTGMDLWQLLLTLALAGSSDAFSGSEATAAILSRAPWSLQSVNPGLKTNSSKEPKFTKCRSPERETFSCHWTDEVHHGTKNLGPIQLFYTRRNTQEWTQEWKECPDYVSAGENSCYFNSSFTSIWIPYCIKLTSNGGTVDEKCFSVDEIVQPDPPIALNWTLLNVSLTGIHADIQVRWEAPRNADIQKGWMVLEYELQYKEVNETKWKMMDPILTTSVPVYSLKVDKEYEVRVRSKQRNSGNYGEFSEVLYVTLPQMSQFTCEEDFYFPWLLIIIFGIFGLTVMLFVFLFSKQQRIKMLILPPVPVPKIKGIDPDLLKEGKLEEVNTILAIHDSYKPEFHSDDSWVEFIELDIDEPDEKTEESDTDRLLSSDHEKSHSNLGVKDGDSGRTSCCEPDILETDFNANDIHEGTSEVAQPQRLKGEADLLCLDQKNQNNSPYHDACPATQQPSVIQAEKNKPQPLPTEGAESTHQAAHIQLSNPSSLSNIDFYAQVSDITPAGSVVLSPGQKNKAGMSQCDMHPEMVSLCQENFLMDNAYFCEADAKKCIPVAPHIKVESHIQPSLNQEDIYITTESLTTAAGRPGTGEHVPGSEMPVPDYTSIHIVQSPQGLILNATALPLPDKEFLSSCGYVSTDQLNKIMP

SEQ ID NO: 36518 - protein, 295 aa, Homo sapiens
  Payload ID: 7228
  Gene Symbol: GHR
  Gene Name: growth hormone receptor
  ENSP ID: ENSP00000483926
MDLWQLLLTLALAGSSDAFSGSEATAAILSRAPWSLQSVNPGLKTNSSKEPKFTKCRSPERETFSCHWTDEVHHGTKNLGPIQLFYTRRNTQEWTQEWKECPDYVSAGENSCYFNSSFTSIWIPYCIKLTSNGGTVDEKCFSVDEIVQPDPPIALNWTLLNVSLTGIHADIQVRWEAPRNADIQKGWMVLEYELQYKEVNETKWKMMDPILTTSVPVYSLKVDKEYEVRVRSKQRNSGNYGEFSEVLYVTLPQMSQFTCEEDFYFPWLLIIIFGIFGLTVMLFVFLFSKQQRKEN

SEQ ID NO: 36519 - protein, 266 aa, Homo sapiens
  Payload ID: 7229
  Gene Symbol: GRTP1
  Gene Name: growth hormone regulated TBC protein 1
  Uniprot ID: Q5TC63
  ENSP ID: ENSP00000321850
MVLSGAQAQMDQNPGYYHQLLQGERNPRLEDAIRTDLNRTFPDNVKFRKTTDPCLQRTLYNVLLAYGHHNQGVGYCQGMNFIAGYLILITNNEEESFWLLDALVGRILPDYYSPAMLGLKTDQEVLGELVRAKLPAVGALMERLGVLWTLLVSRWFICLFVDILPVETVLRIWDCLFNEGSKIIFRVALTLIKQHQELILEATSVPDICDKFKQITKGSFVMECHTFMQVCGAARGSVPSQGAPPHLQPGGCSDHPEGAQDGHQWA

SEQ ID NO: 36520 - protein, 344 aa, Homo sapiens
  Payload ID: 7229
  Gene Symbol: GRTP1
  Gene Name: growth hormone regulated TBC protein 1
  Uniprot ID: Q5TC63
  ENSP ID: ENSP00000364579
MQPAERSRVPRIDPYGFERPEDFDDAAYEKFFSSYLVTLTRRAIKWSRLLQGGGVPRSRTVKRYVRKGVPLEHRARVWMVLSGAQAQMDQNPGYYHQLLQGERNPRLEDAIRTDLNRTFPDNVKFRKTTDPCLQRTLYNVLLAYGHHNQGVGYCQGMNFIAGYLILITNNEEESFWLLDALVGRILPDYYSPAMLGLKTDQEVLGELVRAKLPAVGALMERLGVLWTLLVSRWFICLFVDILPVETVLRIWDCLFNEGSKIIFRVALTLIKQHQELILEATSVPDICDKFKQITKGSFVMECHTFMQVCGAARGSVPSQGAPPHLQPGGCSDHPEGAQDGHQWA

SEQ ID NO: 36521 - protein, 336 aa, Homo sapiens
  Payload ID: 7229
  Gene Symbol: GRTP1
  Gene Name: growth hormone regulated TBC protein 1
  Uniprot ID: Q5TC63
  ENSP ID: ENSP00000364580
MQPAERSRVPRIDPYGFERPEDFDDAAYEKFFSSYLVTLTRRAIKWSRLLQGGGVPRSRTVKRYVRKGVPLEHRARVWMVLSGAQAQMDQNPGYYHQLLQGERNPRLEDAIRTDLNRTFPDNVKFRKTTDPCLQRTLYNVLLAYGHHNQGVGYCQGMNFIAGYLILITNNEEESFWLLDALVGRILPDYYSPAMLGLKTDQEVLGELVRAKLPAVGALMERLGVLWTLLVSRWFICLFVDILPVETVLRIWDCLFNEGSKIIFRVALTLIKQHQELILEATSVPDICDKFKQITKGSFVMECHTFMQKIFSEPGSLSMATVAKLRESCRARLLAQG

SEQ ID NO: 36522 - protein, 236 aa, Homo sapiens
  Payload ID: 7229
  Gene Symbol: GRTP1
  Gene Name: growth hormone regulated TBC protein 1
  ENSP ID: ENSP00000483734
MQPAERSRVPRIDPYGFERPEDFDDAAYEKFFSSYLVTLTRRAIKWSRLLQGGGVPRSRTVKRYVRKGVPLEHRARVWMVLSGAQAQMDQNPGYYHQLLQGERNPRLEDAIRTDLNRTFPDNVKFRKTTDPCLQRTLYNVLLAYGHHNQGVGYCQGMNFIAGYLILITNNEEESFWLLDALVGRILPENIFRTWKLIHGHRRQAPRELQGPAAGTGVSVPVPCVARLYTDDAPFQS

SEQ ID NO: 36523 - protein, 108 aa, Homo sapiens
  Payload ID: 7230
  Gene Symbol: GHRH
  Gene Name: growth hormone releasing hormone
  Uniprot ID: P01286
  ENSP ID: ENSP00000237527
MPLWVFFFVILTLSNSSHCSPPPPLTLRMRRYADAIFTNSYRKVLGQLSARKLLQDIMSRQQGESNQERGARARLGRQVDSMWAEQKQMELESILVALLQKHSRNSQG

SEQ ID NO: 36524 - protein, 107 aa, Homo sapiens
  Payload ID: 7230
  Gene Symbol: GHRH
  Gene Name: growth hormone releasing hormone
  Uniprot ID: P01286
  ENSP ID: ENSP00000362713
MPLWVFFFVILTLSNSSHCSPPPPLTLRMRRYADAIFTNSYRKVLGQLSARKLLQDIMSRQQGESNQERGARARLGRQVDSMWAEQKQMELESILVALLQKHRNSQG

SEQ ID NO: 36525 - protein, 108 aa, Homo sapiens; identical to SEQ ID NO: 36523
  Payload ID: 7230
  Gene Symbol: GHRH
  Gene Name: growth hormone releasing hormone
  Uniprot ID: P01286
  ENSP ID: ENSP00000362716

SEQ ID NO: 36526 - protein, 423 aa, Homo sapiens
  Payload ID: 7231
  Gene Symbol: GHRHR
  Gene Name: growth hormone releasing hormone receptor
  Uniprot ID: Q02643
  ENSP ID: ENSP00000320180
MDRRMWGAHVFCVLSPLPTVLGHMHPECDFITQLREDESACLQAAEEMPNTTLGCPATWDGLLCWPTAGSGEWVTLPCPDFFSHFSSESGAVKRDCTITGWSEPFPPYPVACPVPLELLAEEESYFSTVKIIYTVGHSISIVALFVAITILVALRRLHCPRNYVHTQLFTTFILKAGAVFLKDAALFHSDDTDHCSFSTVLCKVSVAASHFATMTNFSWLLAEAVYLNCLLASTSPSSRRAFWWLVLAGWGLPVLFTGTWVSCKLAFEDIACWDLDDTSPYWWIIKGPIVLSVGVNFGLFLNIIRILVRKLEPAQGSLHTQSQYWRLSKSTLFLIPLFGIHYIIFNFLPDNAGLGIRLPLELGLGSFQGFIVAILYCFLNQEVRTEISRKWHGHDPELLPAWRTRAKWTTPSRSAAKVLTSMC

SEQ ID NO: 36527 - protein, 68 aa, Homo sapiens
  Payload ID: 7231
  Gene Symbol: GHRHR
  Gene Name: growth hormone releasing hormone receptor
  ENSP ID: ENSP00000338184
MVPGTPSPLLGRGKELWLESLACLPGAVKRDCTITGWSEPFPPYPVACPVPLELLAEEGCPCSSLARG

SEQ ID NO: 36528 - protein, 145 aa, Homo sapiens
  Payload ID: 7231
  Gene Symbol: GHRHR
  Gene Name: growth hormone releasing hormone receptor
  ENSP ID: ENSP00000379529
MVPGTPSPLLGRGKELWLESLACLPGAVKRDCTITGWSEPFPPYPVACPVPLELLAEEESYFSTVKIIYTVGHSISIVALFVAITILVALRRLHCPRNYVHTQLFTTFILKAGAVFLKDAALFHSDDTDHCSFSTGCPCSSLARG

SEQ ID NO: 36529 - protein, 151 aa, Homo sapiens
  Payload ID: 7231
  Gene Symbol: GHRHR
  Gene Name: growth hormone releasing hormone receptor
  ENSP ID: ENSP00000386602
MLPFSTATTLTTAASPLAARALHWHVGELQTGLRGHRVLGPGRHLPLLVDHQRAHCPLGRGELWAFSQYYPHPGEETGASSGQPPYPVSVLASLQVDTFPDPTLWNSLHHLQLPARQCWPGHPPPPGAGTGFLPGLHCCHPLLLPQPRGED

SEQ ID NO: 36530 - protein, 359 aa, Homo sapiens
  Payload ID: 7231
  Gene Symbol: GHRHR
  Gene Name: growth hormone releasing hormone receptor
  ENSP ID: ENSP00000387113
MVPGTPSPLLGRGKELWLESLACLPGAVKRDCTITGWSEPFPPYPVACPVPLELLAEEESYFSTVKIIYTVGHSISIVALFVAITILVALRRLHCPRNYVHTQLFTTFILKAGAVFLKDAALFHSDDTDHCSFSTVLCKVSVAASHFATMTNFSWLLAEAVYLNCLLASTSPSSRRAFWWLVLAGWGLPVLFTGTWVSCKLAFEDIACWDLDDTSPYWWIIKGPIVLSVGVNFGLFLNIIRILVRKLEPAQGSLHTQSQYWRLSKSTLFLIPLFGIHYIIFNFLPDNAGLGIRLPLELGLGSFQGFIVAILYCFLNQEVRTEISRKWHGHDPELLPAWRTRAKWTTPSRSAAKVLTSMC

SEQ ID NO: 36531 - protein, 207 aa, Homo sapiens
  Payload ID: 7231
  Gene Symbol: GHRHR
  Gene Name: growth hormone releasing hormone receptor
  ENSP ID: ENSP00000480159
MAMGEGAGQVGERGGSMQGLCGRLPFRHHDQLQLAVGRSRLPELPPGLHLPQLKESLLVAGSRWLGAARALHWHVGELQTGLRGHRVLGPGRHLPLLVDHQRAHCPLGRGELWAFSQYYPHPGEETGASSGQPPYPVSVLASLQVDTFPDPTLWNSLHHLQLPARQCWPGHPPPPGAGTGFLPGIRRLGLRCRFLGRSFDCQPPRGS

SEQ ID NO: 36532 - protein, 366 aa, Homo sapiens
  Payload ID: 7232
  Gene Symbol: GHSR
  Gene Name: growth hormone secretagogue receptor
  Uniprot ID: Q92847
  ENSP ID: ENSP00000241256
MWNATPSEEPGFNLTLADLDWDASPGNDSLGDELLQLFPAPLLAGVTATCVALFVVGIAGNLLTMLVVSRFRELRTTTNLYLSSMAFSDLLIFLCMPLDLVRLWQYRPWNFGDLLCKLFQFVSESCTYATVLTITALSVERYFAICFPLRAKVVVTKGRVKLVIFVIWAVAFCSAGPIFVLVGVEHENGTDPWDTNECRPTEFAVRSGLLTVMVWVSSIFFFLPVFCLTVLYSLIGRKLWRRRRGDAVVGASLRDQNHKQTVKMLAVVVFAFILCWLPFHVGRYLFSKSFEPGSLEIAQISQYCNLVSFVLFYLSAAINPILYNIMSKKYRVAVFRLLGFEPFSQRKLSTLKDESSRAWTESSINT

SEQ ID NO: 36533 - protein, 289 aa, Homo sapiens
  Payload ID: 7232
  Gene Symbol: GHSR
  Gene Name: growth hormone secretagogue receptor
  Uniprot ID: Q92847
  ENSP ID: ENSP00000395344
MWNATPSEEPGFNLTLADLDWDASPGNDSLGDELLQLFPAPLLAGVTATCVALFVVGIAGNLLTMLVVSRFRELRTTTNLYLSSMAFSDLLIFLCMPLDLVRLWQYRPWNFGDLLCKLFQFVSESCTYATVLTITALSVERYFAICFPLRAKVVVTKGRVKLVIFVIWAVAFCSAGPIFVLVGVEHENGTDPWDTNECRPTEFAVRSGLLTVMVWVSSIFFFLPVFCLTVLYSLIGRKLWRRRRGDAVVGASLRDQNHKQTVKMLGGSQRALRLSLAGPILSLCLLPSL

SEQ ID NO: 36534 - protein, 1949 aa, Homo sapiens
  Payload ID: 7233
  Gene Symbol: GREB1
  Gene Name: growth regulation by estrogen in breast cancer 1
  Uniprot ID: Q4ZG55
  ENSP ID: ENSP00000234142
MGNSYAGQLKTTRFEEVLHNSIEASLRSNNLVPRPIFSQLYLEAEQQLAALEGGSRVDNEEEEEEGEGGLETNGPPNPFQLHPLPEGCCTTDGFCQAGKDLRLVSISNEPMDVPAGFLLVGVKSPSLPDHLLVCAVDKRFLPDDNGHNALLGFSGNCVGCGKKGFCYFTEFSNHINLKLTTQPKKQKHLKYYLVRNAQGTLTKGPLICWKGSEFRSRQIPASTCSSSLFPALESTAAFPSEPVPGTNPSILMGAQQAGPASDHPSLNAAMGPAVFNGKDSPKCQQLAKNNLLALPRPSALGILSNSGPPKKRHKGWSPESPSAPDGGCPQGGGNRAKYESAGMSCVPQVGLVGPASVTFPVVASGEPVSVPDNLLKICKAKPVIFKGHGNFPYLCGNLNDVVVSPLLYTCYQNSQSVSRAYEQYGASAIQPISEEMQLLLTVYYLVQLAADQVPLMEDLEQIFLRSWRESHLTEIRQYQQAPPQPFPPAPSAAAPVTSAQLPWLASLAASSCNDSVHVIECAYSLAEGLSEMFRLLVEGKLAKTNYVVIICACRSAAIDSCIAVTGKYQARILSESLLTPAEYQKEVNYELVTGKVDSLGAFFSTLCPEGDIDILLDKFHQENQGHISSSLAASSVTKAASLDVSGTPVCTSYNLEPHSIRPFQLAVAQKLLSHVCSIADSSTQNLDLGSFEKVDFLICIPPSEVTYQQTLLHVWHSGVLLELGLKKEHMTKQRVEQYVLKLDTEAQTKFKAFLQNSFQNPHTLFVLIHDHAHWDLVSSTVHNLYSQSDPSVGLVDRLLNCREVKEAPNIVTLHVTSFPYALQTQHTLISPYNEIHWPASCSNGVDLYHENKKYFGLSEFIESTLSGHSLPLLRYDSSFEAMVTALGKRFPRLHSAVIRTFVLVQHYAAALMAVSGLPQMKNYTSVETLEITQNLLNSPKQCPCGHGLMVLLRVPCSPLAVVAYERLAHVRARLALEEHFEIILGSPSSGVTVGKHFVKQLRMWQKIEDVEWRPQTYLELEGLPCILIFSGMDPHGESLPRSLRYCDLRLINSSCLVRTALEQELGLAAYFVSNEVPLEKGARNEALESDAEKLSSTDNEDEELGTEGSTSEKRSPMKRERSRSHDSASSSLSSKASGSALGGESSAQPTALPQGEHARSPQPRGPAEEGRAPGEKQRPRASQGPPSAISRHSPGPTPQPDCSLRTGQRSVQVSVTSSCSQLSSSSGSSSSSVAPAAGTWVLQASQCSLTKACRQPPIVFLPKLVYDMVVSTDSSGLPKAASLLPSPSVMWASSFRPLLSKTMTSTEQSLYYRQWTVPRPSHMDYGNRAEGRVDGFHPRRLLLSGPPQIGKTGAYLQFLSVLSRMLVRLTEVDVYDEEEININLREESDWHYLQLSDPWPDLELFKKLPFDYIIHDPKYEDASLICSHYQGIKSEDRGMSRKPEDLYVRRQTARMRLSKYAAYNTYHHCEQCHQYMGFHPRYQLYESTLHAFAFSYSMLGEEIQLHFIIPKSKEHHFVFSQPGGQLESMRLPLVTDKSHEYIKSPTFTPTTGRHEHGLFNLYHAMDGASHLHVLVVKEYEMAIYKKYWPNHIMLVLPSIFNSAGVGAAHFLIKELSYHNLELERNRQEELGIKPQDIWPFIVISDDSCVMWNVVDVNSAGERSREFSWSERNVSLKHIMQHIEAAPDIMHYALLGLRKWSSKTRASEVQEPFSRCHVHNFIILNVDLTQNVQYNQNRFLCDDVDFNLRVHSAGLLLCRFNRFSVMKKQIVVGGHRSFHITSKVSDNSAAVVPAQYICAPDSKHTFLAAPAQLLLEKFLQHHSHLFFPLSLKNHDHPVLSVDCYLNLGSQISVCYVSSRPHSLNISCSDLLFSGLLLYLCDSFVGASFLKKFHFLKGATLCVICQDRSSLRQTVVRLELEDEWQFRLRDEFQTANAREDRPLFFLTGRHI

SEQ ID NO: 36535 - protein, 409 aa, Homo sapiens
  Payload ID: 7233
  Gene Symbol: GREB1
  Gene Name: growth regulation by estrogen in breast cancer 1
  Uniprot ID: Q4ZG55
  ENSP ID: ENSP00000263834
MGNSYAGQLKTTRFEEVLHNSIEASLRSNNLVPRPIFSQLYLEAEQQLAALEGGSRVDNEEEEEEGEGGLETNGPPNPFQLHPLPEGCCTTDGFCQAGKDLRLVSISNEPMDVPAGFLLVGVKSPSLPDHLLVCAVDKRFLPDDNGHNALLGFSGNCVGCGKKGFCYFTEFSNHINLKLTTQPKKQKHLKYYLVRNAQGTLTKGPLICWKGSEFRSRQIPASTCSSSLFPALESTAAFPSEPVPGTNPSILMGAQQAGPASDHPSLNAAMGPAVFNGKDSPKCQQLAKNNLLALPRPSALGILSNSGPPKKRHKGWSPESPSAPDGGCPQGGGNRAKYESAGMSCVPQVGLVGPASVTFPVVASGEPVSVPDNLLKICKAKPVIFKVFVNGATQMVALGPAEPASPRSL

SEQ ID NO: 36536 - protein, 457 aa, Homo sapiens
  Payload ID: 7233
  Gene Symbol: GREB1
  Gene Name: growth regulation by estrogen in breast cancer 1
  Uniprot ID: Q4ZG55
  ENSP ID: ENSP00000370892
MGNSYAGQLKTTRFEEVLHNSIEASLRSNNLVPRPIFSQLYLEAEQQLAALEGGSRVDNEEEEEEGEGGLETNGPPNPFQLHPLPEGCCTTDGFCQAGKDLRLVSISNEPMDVPAGFLLVGVKSPSLPDHLLVCAVDKRFLPDDNGHNALLGFSGNCVGCGKKGFCYFTEFSNHINLKLTTQPKKQKHLKYYLVRNAQGTLTKGPLICWKGSEFRSRQIPASTCSSSLFPALESTAAFPSEPVPGTNPSILMGAQQAGPASDHPSLNAAMGPAVFNGKDSPKCQQLAKNNLLALPRPSALGILSNSGPPKKRHKGWSPESPSAPDGGCPQGGGNRAKYESAGMSCVPQVGLVGPASVTFPVVASGEPVSVPDNLLKICKAKPVIFKGHGNFPYLCGNLNDVVVSPLLYTCYQNSQSVSRAYEQYGASAIQPISEEMQLLLTVYYLVQLAHQIRNPDV

SEQ ID NO: 36537 - protein, 1949 aa, Homo sapiens; identical to SEQ ID NO: 36534
  Payload ID: 7233
  Gene Symbol: GREB1
  Gene Name: growth regulation by estrogen in breast cancer 1
  Uniprot ID: Q4ZG55
  ENSP ID: ENSP00000370896

SEQ ID NO: 36538 - protein, 253 aa, Homo sapiens
  Payload ID: 7233
  Gene Symbol: GREB1
  Gene Name: growth regulation by estrogen in breast cancer 1
  ENSP ID: ENSP00000374475
MDVPAGFLLVGVKSPSLPDHLLVCAVDKRFLPDDNGHNALLGFSGNCVGCGKKGFCYFTEFSNHINLKLTTQPKKQKHLKYYLVRNAQGTLTKGPLICWKGSEFRSRQIPASTCSSSLFPALESTAAFPSEPVPGTNPSILMGAQQAGPASDHPSLNAAMGPAVFNGKDSPKCQQLAKNNLLALPRPSALGSSACPGRPGDPALLWAKARGGMGAAGLGPLSLLESDVASMRVRPGPQVPPESVGLGPGPGAL

SEQ ID NO: 36539 - protein, 947 aa, Homo sapiens
  Payload ID: 7233
  Gene Symbol: GREB1
  Gene Name: growth regulation by estrogen in breast cancer 1
  Uniprot ID: Q4ZG55
  ENSP ID: ENSP00000379429
MWQKIEDVEWRPQTYLELEGLPCILIFSGMDPHGESLPRSLRYCDLRLINSSCLVRTALEQELGLAAYFVSNEVPLEKGARNEALESDAEKLSSTDNEDEELGTEGSTSEKRSPMKRERSRSHDSASSSLSSKASGSALGGESSAQPTALPQGEHARSPQPRGPAEEGRAPGEKQRPRASQGPPSAISRHSPGPTPQPDCSLRTGQRSVQVSVTSSCSQLSSSSGSSSSSVAPAAGTWVLQASQCSLTKACRQPPIVFLPKLVYDMVVSTDSSGLPKAASLLPSPSVMWASSFRPLLSKTMTSTEQSLYYRQWTVPRPSHMDYGNRAEGRVDGFHPRRLLLSGPPQIGKTGAYLQFLSVLSRMLVRLTEVDVYDEEEININLREESDWHYLQLSDPWPDLELFKKLPFDYIIHDPKYEDASLICSHYQGIKSEDRGMSRKPEDLYVRRQTARMRLSKYAAYNTYHHCEQCHQYMGFHPRYQLYESTLHAFAFSYSMLGEEIQLHFIIPKSKEHHFVFSQPGGQLESMRLPLVTDKSHEYIKSPTFTPTTGRHEHGLFNLYHAMDGASHLHVLVVKEYEMAIYKKYWPNHIMLVLPSIFNSAGVGAAHFLIKELSYHNLELERNRQEELGIKPQDIWPFIVISDDSCVMWNVVDVNSAGERSREFSWSERNVSLKHIMQHIEAAPDIMHYALLGLRKWSSKTRASEVQEPFSRCHVHNFIILNVDLTQNVQYNQNRFLCDDVDFNLRVHSAGLLLCRFNRFSVMKKQIVVGGHRSFHITSKVSDNSAAVVPAQYICAPDSKHTFLAAPAQLLLEKFLQHHSHLFFPLSLKNHDHPVLSVDCYLNLGSQISVCYVSSRPHSLNISCSDLLFSGLLLYLCDSFVGASFLKKFHFLKGATLCVICQDRSSLRQTVVRLELEDEWQFRLRDEFQTANAREDRPLFFLTGRHI

SEQ ID NO: 36540 - protein, 541 aa, Homo sapiens
  Payload ID: 7233
  Gene Symbol: GREB1
  Gene Name: growth regulation by estrogen in breast cancer 1
  ENSP ID: ENSP00000403886
MYGTVSCAQDWVPSRCCSSAGHGNFPYLCGNLNDVVVSPLLYTCYQNSQSVSRAYEQYGASAIQPISEEMQLLLTVYYLVQLAADQVPLMEDLEQIFLRSWRESHLTEIRQYQQAPPQPFPPAPSAAAPVTSAQLPWLASLAASSCNDSVHVIECAYSLAEGLSEMFRLLVEGKLAKTNYVVIICACRSAAIDSCIAVTGKYQARILSESLLTPAEYQKEVNYELVTGKVDSLGAFFSTLCPEGDIDILLDKFHQENQGHISSSLAASSVTKAASLDVSGTPVCTSYNLEPHSIRPFQLAVAQKLLSHVCSIADSSTQNLDLGSFEKVDFLICIPPSEVTYQQTLLHVWHSGVLLELGLKKEHMTKQRVEQYVLKLDTEAQTKFKAFLQNSFQNPHTLFVLIHDHAHWDLVSSTVHNLYSQSDPSVGLVDRLLNCREVKEAPNIVTLHVTSFPYALQTQHTLISPYNEIHWPASCSNGVDLYHENKKYFGLSEFIESTLSGHSLPLLRYDSSFEAMVTALGKRFPRLHSAVIRTFVLVQHY

SEQ ID NO: 36541 - protein, 79 aa, Homo sapiens
  Payload ID: 7233
  Gene Symbol: GREB1
  Gene Name: growth regulation by estrogen in breast cancer 1
  ENSP ID: ENSP00000487278
MGNSYAGQLKTTRFEEVLHNSIEASLRSNNLVPRPIFSQLYLEAEQQLAALEGGSRVDNEEEEEEGEGGLETNGPPNPF

SEQ ID NO: 36542 - protein, 1814 aa, Homo sapiens
  Payload ID: 7234
  Gene Symbol: GREB1L
  Gene Name: growth regulation by estrogen in breast cancer-like
  Uniprot ID: Q9C091
  ENSP ID: ENSP00000269218
MGNSYAGQLKSARFEEALHNSIEASLRCSSVVPRPIFSQLYLDPDQHPFSSADVKPKVEDLDKDLVNRYTQNGSLDFSNNLTVNEMEDDEDDEEMSDSNSPPIPYSQKPAPEGSCTTDGFCQAGKDLRLVSLCMEQIDIPAGFLLVGAKSPNLPEHILVCAVDKRFLPDDHGKNALLGFSGNCIGCGERGFRYFTEFSNHINLKLTTQPKKQKHLKYYLVRSSQGVLSKGPLICWKECRSRQSSASCHSIKPSSSVSSTVTPENGTTNGYKSGFTQTDAANGNSSHGGKGSASSSTPAHTGNYSLSPRPSYASGDQATMFISGPPKKRHRGWYPGSPLPQPGLVVPVPTVRPLSRTEPLLSAPVPQTPLTGILQPRPIPAGETVIVPENLLSNSGVRPVILIGYGTLPYFYGNVGDIVVSPLLVNCYKIPQLENKDLEKLGLTGSQFLSVENMILLTIQYLVRLGQHQSRALAESMLTTSEFLKEISYELITGKVSFLASHFKTTSLGDDLDKLLEKMQQRRGDSVVTPFDGDLNECVSPQEAAAMIPTQNLDLDNETFHIYQPQLTVARKLLSQVCAIADSGSQSLDLGHFSKVDFIIIVPRSEVLVQQTLQRIRQSGVLVDLGLEENGTAHQRAEKYVVRLDNEIQTKFEVFMRRVKQNPYTLFVLVHDNSHVELTSVISGSLSHSEPSHGLADRVINCREVLEAFNLLVLQVSSFPYTLQTQQSRISSSNEVHWIQLDTGEDVGCEEKLYFGLSEYSKSLQWGITSPLLRCDETFEKMVNTLLERYPRLHSMVVRCYLLIQQYSEALMALTTMASLRDHSTPETLSIMDDLISSPGKNKSGRGHMLIIRVPSVQLAMLAKERLQEVRDKLGLQYRFEIILGNPATELSVATHFVARLKSWRGNEPEEWIPRTYQDLDGLPCIVILTGKDPLGETFPRSLKYCDLRLIDSSYLTRTALEQEVGLACCYVSKEVIRGPTVALDLSGKEQERAAVSENDSDELLIDLERPQSNSSAVTGTSGSIMENGVSSSSTADKSQKQSLTPSFQSPATSLGLDEGVSASSAGAGAGETLKQECDSLGPQMASSTTSKPSSSSSGPRTLPWPGQPIRGCRGPQAALPPVVILSKAAYSLLGSQKSGKLPSSSSLLPHADVAWVSSLRPLLNKDMSSEEQSLYYRQWTLARQHHADYSNQLDPASGTRNFHPRRLLLTGPPQVGKTGSYLQFLRILFRMLIRLLEVDVYDEEEINTDHNESSEVSQSEGEPWPDIESFSKMPFDVSVHDPKYSLMSLVYTEKLAGVKQEVIKESKVEEPRKRETVSIMLTKYAAYNTFHHCEQCRQYMDFTSASQMSDSTLHAFTFSSSMLGEEVQLYFIIPKSKESHFVFSKQGKHLESMRLPLVSDKNLNAVKSPIFTPSSGRHEHGLLNLFHAMEGISHLHLLVVKEYEMPLYRKYWPNHIMLVLPGMFNNAGVGAARFLIKELSYHNLELERNRLEELGIKRQCVWPFIVMMDDSCVLWNIHSVQEPSSQPMEVGVSSKNVSLKTVLQHIEATPKIVHYAILGIQKWSSKLTSQSLKAPFSRCHVHDFILLNTDLTQNVQYDFNRYFCEDADFNLRTNSSGLLICRFNNFSLMKKHVQVGGQRDFIIKPKIMVSESLAPILPLQYICAPDSEHTLLAAPAQFLLEKFLQHASYKLFPKAIHNFRSPVLAIDCYLNIGPEVAICYISSRPHSSNVNCEGVFFSGLLLYLCDSFVGADLKKFKFLKGATLCVICQDRSSLRQTIVRLELEDEWQFRLRDEFQTANSSDDKPLYFLTGRHV

SEQ ID NO: 36543 - protein, 1923 aa, Homo sapiens
  Payload ID: 7234
  Gene Symbol: GREB1L
  Gene Name: growth regulation by estrogen in breast cancer-like
  Uniprot ID: Q9C091
  ENSP ID: ENSP00000412060
MGNSYAGQLKSARFEEALHNSIEASLRCSSVVPRPIFSQLYLDPDQHPFSSADVKPKVEDLDKDLVNRYTQNGSLDFSNNLTVNEMEDDEDDEEMSDSNSPPIPYSQKPAPEGSCTTDGFCQAGKDLRLVSLCMEQIDIPAGFLLVGAKSPNLPEHILVCAVDKRFLPDDHGKNALLGFSGNCIGCGERGFRYFTEFSNHINLKLTTQPKKQKHLKYYLVRSSQGVLSKGPLICWKECRSRQSSASCHSIKPSSSVSSTVTPENGTTNGYKSGFTQTDAANGNSSHGGKGSASSSTPAHTGNYSLSPRPSYASGDQATMFISGPPKKRHRGWYPGSPLPQPGLVVPVPTVRPLSRTEPLLSAPVPQTPLTGILQPRPIPAGETVIVPENLLSNSGVRPVILIGYGTLPYFYGNVGDIVVSPLLVNCYKIPQLENKDLEKLGLTGSQFLSVENMILLTIQYLVRLGPDQVPLREEFEQIMLKAMQEFTLRERALQIGAQCVPVSPGQLPWLARLIASVSQDLVHVVVTQNSLAEGISETLRTLSEMRHYQRLPDYVVVICASKIRGNEFCVVVLGQHQSRALAESMLTTSEFLKEISYELITGKVSFLASHFKTTSLGDDLDKLLEKMQQRRGDSVVTPFDGDLNECVSPQEAAAMIPTQNLDLDNETFHIYQPQLTVARKLLSQVCAIADSGSQSLDLGHFSKVDFIIIVPRSEVLVQQTLQRIRQSGVLVDLGLEENGTAHQRAEKYVVRLDNEIQTKFEVFMRRVKQNPYTLFVLVHDNSHVELTSVISGSLSHSEPSHGLADRVINCREVLEAFNLLVLQVSSFPYTLQTQQSRISSSNEVHWIQLDTGEDVGCEEKLYFGLSEYSKSLQWGITSPLLRCDETFEKMVNTLLERYPRLHSMVVRCYLLIQQYSEALMALTTMASLRDHSTPETLSIMDDLISSPGKNKSGRGHMLIIRVPSVQLAMLAKERLQEVRDKLGLQYRFEIILGNPATELSVATHFVARLKSWRGNEPEEWIPRTYQDLDGLPCIVILTGKDPLGETFPRSLKYCDLRLIDSSYLTRTALEQEVGLACCYVSKEVIRGPTVALDLSGKEQERAAVSENDSDELLIDLERPQSNSSAVTGTSGSIMENGVSSSSTADKSQKQSLTPSFQSPATSLGLDEGVSASSAGAGAGETLKQECDSLGPQMASSTTSKPSSSSSGPRTLPWPGQPIRGCRGPQAALPPVVILSKAAYSLLGSQKSGKLPSSSSLLPHADVAWVSSLRPLLNKDMSSEEQSLYYRQWTLARQHHADYSNQLDPASGTRNFHPRRLLLTGPPQVGKTGSYLQFLRILFRMLIRLLEVDVYDEEEINTDHNESSEVSQSEGEPWPDIESFSKMPFDVSVHDPKYSLMSLVYTEKLAGVKQEVIKESKVEEPRKRETVSIMLTKYAAYNTFHHCEQCRQYMDFTSASQMSDSTLHAFTFSSSMLGEEVQLYFIIPKSKESHFVFSKQGKHLESMRLPLVSDKNLNAVKSPIFTPSSGRHEHGLLNLFHAMEGISHLHLLVVKEYEMPLYRKYWPNHIMLVLPGMFNNAGVGAARFLIKELSYHNLELERNRLEELGIKRQCVWPFIVMMDDSCVLWNIHSVQEPSSQPMEVGVSSKNVSLKTVLQHIEATPKIVHYAILGIQKWSSKLTSQSLKAPFSRCHVHDFILLNTDLTQNVQYDFNRYFCEDADFNLRTNSSGLLICRFNNFSLMKKHVQVGGQRDFIIKPKIMVSESLAPILPLQYICAPDSEHTLLAAPAQFLLEKFLQHASYKLFPKAIHNFRSPVLAIDCYLNIGPEVAICYISSRPHSSNVNCEGVFFSGLLLYLCDSFVGADLKKFKFLKGATLCVICQDRSSLRQTIVRLELEDEWQFRLRDEFQTANSSDDKPLYFLTGRHV

SEQ ID NO: 36544 - protein, 190 aa, Homo sapiens
  Payload ID: 7234
  Gene Symbol: GREB1L
  Gene Name: growth regulation by estrogen in breast cancer-like
  ENSP ID: ENSP00000462152
  MOD_RES (1)..(1): Any amino acid
XRQCVWPFIVMMDDSCVLWNIHSVQEPSSQPMEVGVSSKNVSLKTVLQHIEATPKIVHYAILGIQKWSSKLTSQSLKAPFSRCHVHDFILLNTDLTQNVQYDFNRYFCEDADFNLRTNSSGLLICRFNNFSLMKKHVQVGGQRDFIIKPKIMPSITSGVLCWPLTATLTLDQRWPYAISAPDPTPAMSTV

SEQ ID NO: 36545 - protein, 200 aa, Homo sapiens
  Payload ID: 7234
  Gene Symbol: GREB1L
  Gene Name: growth regulation by estrogen in breast cancer-like
  ENSP ID: ENSP00000463926
  MOD_RES (1)..(1): Any amino acid
XKLTTQPKKQKHLKYYLVRSSQGVLSKGPLICWKECRSRQSSASCHSIKPSSSVSSTVTPENGTTNGYKSGFTQTDSPILSPANSAINLSGAQDLTRNNNVVKPLALSLQVVGKTFAADAANGNSSHGGKGSASSSTPAHTGNYSLSPRPSYASGDQATMFISGPPKKRHRGWYPGSPLPQPGLVVPVPTVRPLSRTEPL

SEQ ID NO: 36546 - protein, 175 aa, Homo sapiens
  Payload ID: 7234
  Gene Symbol: GREB1L
  Gene Name: growth regulation by estrogen in breast cancer-like
  ENSP ID: ENSP00000463976
LPWLARLIASVSQDLVHVVVTQNSLAEGISETLRTLSEMRHYQRLPDYVVVICASKIRGNEFCVVVLGQHQSRALAESMLTTSEFLKEISYELITGKVSFLASHFKTTSLGDDLDKLLEKMQQRRGDSVVTPFDGDLNECVSPQEAAAMIPTQNLGNVISDQEEEVSPWDRHCKN

SEQ ID NO: 36547 - protein, 1923 aa, Homo sapiens; identical to SEQ ID NO: 36543
  Payload ID: 7234
  Gene Symbol: GREB1L
  Gene Name: growth regulation by estrogen in breast cancer-like
  Uniprot ID: Q9C091
  ENSP ID: ENSP00000464162

SEQ ID NO: 36548 - protein, 395 aa, Homo sapiens
  Payload ID: 7235
  Gene Symbol: GRASP
  Gene Name: GRP1 (general receptor for phosphoinositides 1)-associated scaffold protein
  Uniprot ID: Q7Z6J2
  ENSP ID: ENSP00000293662
MTLRRLRKLQQKEEAAATPDPAARTPDSEVAPAAPVPTPGPPAAAATPGPPADELYAALEDYHPAELYRALAVSGGTLPRRKGSGFRWKNLSQSPEQQRKVLTLEKEDNQTFGFEIQTYGLHHREEQRVEMVTFVCRVHESSPAQLAGLTPGDTIASVNGLNVEGIRHREIVDIIKASGNVLRLETLYGTSIRKAELEARLQYLKQTLYEKWGEYRSLMVQEQRLVHGLVVKDPSIYDTLESVRSCLYGAGLLPGSLPFGPLLAVPGRPRGGARRARGDADDAVYHTCFFGDSEPPALPPPPPPARAFGPGPAETPAVGPGPGPRAALSRSASVRCAGPGGGGGGGAPGALWTEAREQALCGPGLRKTKYRSFRRRLLKFIPGLNRSLEEEESQL

SEQ ID NO: 36549 - protein, 221 aa, Homo sapiens
  Payload ID: 7235
  Gene Symbol: GRASP
  Gene Name: GRP1 (general receptor for phosphoinositides 1)-associated scaffold protein
  ENSP ID: ENSP00000448476
MVTFVCRVHESSPAQLAGLTPGDTIASVNGLNVEGIRHREIVDIIKASGNVLRLETLYGTSIRKAELEARLQYLKQTLYEKWGEYRSLMVQEQRLVHGLVVKDPSIYDTLESVRSCLYGAGLLPGSLPFGPLLAVPGRPRGGARRARGDADDAVYHTCFFGDSEPPALPPPPPPARAFGPGPAETPAVGPGPGPRAALSRSASVRCAGPGGGGGGGAPGAL

SEQ ID NO: 36550 - protein, 252 aa, Homo sapiens
  Payload ID: 7235
  Gene Symbol: GRASP
  Gene Name: GRP1 (general receptor for phosphoinositides 1)-associated scaffold protein
  Uniprot ID: Q7Z6J2
  ENSP ID: ENSP00000449492
MTLLPSKGGDTIASVNGLNVEGIRHREIVDIIKASGNVLRLETLYGTSIRKAELEARLQYLKQTLYEKWGEYRSLMVQEQRLVHGLVVKDPSIYDTLESVRSCLYGAGLLPGSLPFGPLLAVPGRPRGGARRARGDADDAVYHTCFFGDSEPPALPPPPPPARAFGPGPAETPAVGPGPGPRAALSRSASVRCAGPGGGGGGGAPGALWTEAREQALCGPGLRKTKYRSFRRRLLKFIPGLNRSLEEEESQL

SEQ ID NO: 36551 - protein, 217 aa, Homo sapiens
  Payload ID: 7236
  Gene Symbol: GRPEL1
  Gene Name: GrpE-like 1, mitochondrial (E. coli)
  Uniprot ID: Q9HAV7
  ENSP ID: ENSP00000264954
MAAQCVRLARRSLPALALSLRPSPRLLCTATKQKNSGQNLEEDMGQSEQKADPPATEKTLLEEKVKLEEQLKETVEKYKRALADTENLRQRSQKLVEEAKLYGIQAFCKDLLEVADVLEKATQCVPKEEIKDDNPHLKNLYEGLVMTEVQIQKVFTKHGLLKLNPVGAKFDPYEHEALFHTPVEGKEPGTVALVSKVGYKLHGRTLRPALVGVVKEA

SEQ ID NO: 36552 - protein, 225 aa, Homo sapiens
  Payload ID: 7237
  Gene Symbol: GRPEL2
  Gene Name: GrpE-like 2, mitochondrial (E. coli)
  Uniprot ID: Q8TAA5
  ENSP ID: ENSP00000329558
MAVRSLWAGRLRVQRLLAWSAAWESKGWPLPFSTATQRTAGEDCRSEDPPDELGPPLAERALRVKAVKLEKEVQDLTVRYQRAIADCENIRRRTQRCVEDAKIFGIQSFCKDLVEVADILEKTTECISEESEPEDQKLTLEKVFRGLLLLEAKLKSVFAKHGLEKLTPIGDKYDPHEHELICHVPAGVGVQPGTVALVRQDGYKLHGRTIRLARVEVAVESQRRL

SEQ ID NO: 36553 - protein, 122 aa, Homo sapiens
  Payload ID: 7237
  Gene Symbol: GRPEL2
  Gene Name: GrpE-like 2, mitochondrial (E. coli)
  Uniprot ID: Q8TAA5
  ENSP ID: ENSP00000397302
MAVRSLWAGRLRVQRLLAWSAAWESKGWPLPFSTATQRTAGEDCRSEDPPDELGPPLAERALRVKAVKLEKEVQDLTESRVSVRTWWRWLTFWRRLQSAFLKNRSLRTKSSLWRRSSEGCCF

SEQ ID NO: 36554 - protein, 128 aa, Homo sapiens
  Payload ID: 7237
  Gene Symbol: GRPEL2
  Gene Name: GrpE-like 2, mitochondrial (E. coli)
  ENSP ID: ENSP00000426331
MAVRSLWAGRLRVQRLLAWSAAWESKGWPLPFSTATQRTAGEDCRSEDPPDELGPPLAERALRVKAVKLEKEVQDLTVRYQRAIADCENIRRRTQRCVEDAKIFGERFIYNKNVFGWAQWLMPVIPAL

SEQ ID NO: 36555 - protein, 264 aa, Homo sapiens
  Payload ID: 7238
  Gene Symbol: GSX1
  Gene Name: GS homeobox 1
  Uniprot ID: Q9H4S2
  ENSP ID: ENSP00000304331
MPRSFLVDSLVLREAGEKKAPEGSPPPLFPYAVPPPHALHGLSPGACHARKAGLLCVCPLCVTASQLHGPPGPPALPLLKASFPPFGSQYCHAPLGRQHSAVSPGVAHGPAAAAAAAALYQTSYPLPDPRQFHCISVDSSSNQLPSSKRMRTAFTSTQLLELEREFASNMYLSRLRRIEIATYLNLSEKQVKIWFQNRRVKHKKEGKGSNHRGGGGGGAGGGGSAPQGCKCASLSSAKCSEDDDELPMSPSSSGKDDRDLTVTP

SEQ ID NO: 36556 - protein, 304 aa, Homo sapiens
  Payload ID: 7239
  Gene Symbol: GSX2
  Gene Name: GS homeobox 2
  Uniprot ID: Q9BZM3
  ENSP ID: ENSP00000319118
MSRSFYVDSLIIKDTSRPAPSLPEPHPGPDFFIPLGMPPPLVMSVSGPGCPSRKSGAFCVCPLCVTSHLHSSRGSVGAGSGGAGAGVTGAGGSGVAGAAGALPLLKGQFSSAPGDAQFCPRVNHAHHHHHPPQHHHHHHQPQQPGSAAAAAAAAAAAAAAAALGHPQHHAPVCTATTYNVADPRRFHCLTMGGSDASQVPNGKRMRTAFTSTQLLELEREFSSNMYLSRLRRIEIATYLNLSEKQVKIWFQNRRVKHKKEGKGTQRNSHAGCKCVGSQVHYARSEDEDSLSPASANDDKEISPL

SEQ ID NO: 36557 - protein, 134 aa, Homo sapiens
  Payload ID: 7239
  Gene Symbol: GSX2
  Gene Name: GS homeobox 2
  ENSP ID: ENSP00000422213
MSRSFYVDSLIIKDTSRPAPSLPEPHPGPDFFIPLGMPPPLVMSVSGPGCPSRKSGAFCVCPLCVTSHLHSSRGSVGAGSGGAGAGVTGAGGSGVAGAAGALPLLKGQFSSAPGDAQFCPREALTPARYPMARG

SEQ ID NO: 36558 - protein, 304 aa, Homo sapiens; identical to SEQ ID NO: 36556
  Payload ID: 7239
  Gene Symbol: GSX2
  Gene Name: GS homeobox 2
  Uniprot ID: Q9BZM3
  ENSP ID: ENSP00000483522

SEQ ID NO: 36559 - protein, 11 aa, Homo sapiens
  Payload ID: 7240
  Gene Symbol:
  Gene Name: GS1-114I9.3
  ENSP ID: ENSP00000456371
  MOD_RES (1)..(1): Any amino acid
XNRSCPEHPSD

SEQ ID NO: 36560 - protein, 126 aa, Homo sapiens
  Payload ID: 7241
  Gene Symbol:
  Gene Name: GS1-259H13.13
  ENSP ID: ENSP00000401282
MEEIPAQEAAGSPRVQFQSLETQSECLSPEPQFVQDTDMEQGLTGVPRASEFLPFFISESPPLAYIGSGATCDADVRGQGHEGILLGHSPSLNLPRLPDYTGGLHLSLLGATDKRGVPRSLFQWPI

SEQ ID NO: 36561 - protein, 26 aa, Homo sapiens
  Payload ID: 7242
  Gene Symbol:
  Gene Name: GS1-393G12.13
  ENSP ID: ENSP00000436572
  MOD_RES (1)..(1): Any amino acid
XLKRAYRGLEEVQWCLEQLLTSPSPS

SEQ ID NO: 36562 - protein, 1217 aa, Homo sapiens
  Payload ID: 7243
  Gene Symbol: GSE1
  Gene Name: Gse1 coiled-coil protein
  Uniprot ID: Q14687
  ENSP ID: ENSP00000253458
MKGMSHEPKSPSLGMLSTATRTTATVNPLTPSPLNGALVPSGSPATSSALSAQAAPSSSFAAALRKLAKQAEEPRGSSLSSESSPVSSPATNHSSPASTPKRVPMGPIIVPPGGHSVPSTPPVVTIAPTKTVNGVWRSESRQDAGSRSSSGGRERLIVEPPLPQEKAGGPAIPSHLLSTPYPFGLSPSSVVQDSRFPPLNLQRPVHHVVPPSTVTEDYLRSFRPYHTTDDLRMSSLPPLGLDPATAAAYYHPSYLAPHPFPHPAFRMDDSYCLSALRSPFYPIPTPGSLPPLHPSAMHLHLSGVRYPPELSHSSLAALHSERMSGLSAERLQMDEELRREREREREREREREADREREKEREREREKEREQEKEREREKERERELERQREQRAREKELLAAKALEPSFLPVAELHGLRGHATEERGKPSEQLTPTRAEKLKDAGLQAPKPVQHPLHPVPTPHHTVPSLISNHGIFSLPSSSAATALLIQRTNEEEKWLARQRRLRQEKEDRQSQVSEFRQQVLEQHLDMGRPPVPAEAEHRPESTTRPGPNRHEPGGRDPPQHFGGPPPLISPKPQLHAAPTALWNPVSLMDNTLETRRAESHSLHSHPAAFEPSRQAAVPLVKVERVFCPEKAEEGPRKREPAPLDKYQPPPPPPREGGSLEHQPFLPGPGPFLAELEKSTQTILGQQRASLPQAATFGELSGPLKPGSPYRPPVPRAPDPAYIYDEFLQQRRRLVSKLDLEERRRREAQEKGYYYDLDDSYDESDEEEVRAHLRCVAEQPPLKLDTSSEKLEFLQLFGLTTQQQKEELVAQKRRKRRRMLRERSPSPPTIQSKRQTPSPRLALSTRYSPDEMNNSPNFEEKKKFLTIFNLTHISAEKRKDKERLVEMLRAMKQKALSAAVADSLTNSPRDSPAVSLSEPATQQASLDVEKPVGVAASLSDIPKAAEPGKLEQVRPQELSRVQELAPASGEKARLSEAPGGKKSLSMLHYIRGAAPKDIPVPLSHSTNGKSKPWEPFVAEEFAHQFHESVLQSTQKALQKHKGSVAVLSAEQNHKVDTSVHYNIPELQSSSRAPPPQHNGQQEPPTARKGPPTQELDRDSEEEEEEDDEDGEDEEEVPKRKWQGIEAVFEAYQEHIEEQNLERQVLQTQCRRLEARHYSLSLTAEQLSHSVAELRSQKQKMVSERERLQAELDHLRKCLALPAMHWPRGYLKGYPR

SEQ ID NO: 36563 - protein, 1144 aa, Homo sapiens
  Payload ID: 7243
  Gene Symbol: GSE1
  Gene Name: Gse1 coiled-coil protein
  Uniprot ID: Q14687
  ENSP ID: ENSP00000376934
MKGSSLSSESSPVSSPATNHSSPASTPKRVPMGPIIVPPGGHSVPSTPPVVTIAPTKTVNGVWRSESRQDAGSRSSSGGRERLIVEPPLPQEKAGGPAIPSHLLSTPYPFGLSPSSVVQDSRFPPLNLQRPVHHVVPPSTVTEDYLRSFRPYHTTDDLRMSSLPPLGLDPATAAAYYHPSYLAPHPFPHPAFRMDDSYCLSALRSPFYPIPTPGSLPPLHPSAMHLHLSGVRYPPELSHSSLAALHSERMSGLSAERLQMDEELRREREREREREREREADREREKEREREREKEREQEKEREREKERERELERQREQRAREKELLAAKALEPSFLPVAELHGLRGHATEERGKPSEQLTPTRAEKLKDAGLQAPKPVQHPLHPVPTPHHTVPSLISNHGIFSLPSSSAATALLIQRTNEEEKWLARQRRLRQEKEDRQSQVSEFRQQVLEQHLDMGRPPVPAEAEHRPESTTRPGPNRHEPGGRDPPQHFGGPPPLISPKPQLHAAPTALWNPVSLMDNTLETRRAESHSLHSHPAAFEPSRQAAVPLVKVERVFCPEKAEEGPRKREPAPLDKYQPPPPPPREGGSLEHQPFLPGPGPFLAELEKSTQTILGQQRASLPQAATFGELSGPLKPGSPYRPPVPRAPDPAYIYDEFLQQRRRLVSKLDLEERRRREAQEKGYYYDLDDSYDESDEEEVRAHLRCVAEQPPLKLDTSSEKLEFLQLFGLTTQQQKEELVAQKRRKRRRMLRERSPSPPTIQSKRQTPSPRLALSTRYSPDEMNNSPNFEEKKKFLTIFNLTHISAEKRKDKERLVEMLRAMKQKALSAAVADSLTNSPRDSPAVSLSEPATQQASLDVEKPVGVAASLSDIPKAAEPGKLEQVRPQELSRVQELAPASGEKARLSEAPGGKKSLSMLHYIRGAAPKDIPVPLSHSTNGKSKPWEPFVAEEFAHQFHESVLQSTQKALQKHKGSVAVLSAEQNHKVDTSVHYNIPELQSSSRAPPPQHNGQQEPPTARKGPPTQELDRDSEEEEEEDDEDGEDEEEVPKRKWQGIEAVFEAYQEHIEEQNLERQVLQTQCRRLEARHYSLSLTAEQLSHSVAELRSQKQKMVSERERLQAELDHLRKCLALPAMHWPRGYLKGYPR

SEQ ID NO: 36564 - protein, 1113 aa, Homo sapiens
  Payload ID: 7243
  Gene Symbol: GSE1
  Gene Name: Gse1 coiled-coil protein
  Uniprot ID: Q14687
  ENSP ID: ENSP00000384839
MGPIIVPPGGHSVPSTPPVVTIAPTKTVNGVWRSESRQDAGSRSSSGGRERLIVEPPLPQEKAGGPAIPSHLLSTPYPFGLSPSSVVQDSRFPPLNLQRPVHHVVPPSTVTEDYLRSFRPYHTTDDLRMSSLPPLGLDPATAAAYYHPSYLAPHPFPHPAFRMDDSYCLSALRSPFYPIPTPGSLPPLHPSAMHLHLSGVRYPPELSHSSLAALHSERMSGLSAERLQMDEELRREREREREREREREADREREKEREREREKEREQEKEREREKERERELERQREQRAREKELLAAKALEPSFLPVAELHGLRGHATEERGKPSEQLTPTRAEKLKDAGLQAPKPVQHPLHPVPTPHHTVPSLISNHGIFSLPSSSAATALLIQRTNEEEKWLARQRRLRQEKEDRQSQVSEFRQQVLEQHLDMGRPPVPAEAEHRPESTTRPGPNRHEPGGRDPPQHFGGPPPLISPKPQLHAAPTALWNPVSLMDNTLETRRAESHSLHSHPAAFEPSRQAAVPLVKVERVFCPEKAEEGPRKREPAPLDKYQPPPPPPREGGSLEHQPFLPGPGPFLAELEKSTQTILGQQRASLPQAATFGELSGPLKPGSPYRPPVPRAPDPAYIYDEFLQQRRRLVSKLDLEERRRREAQEKGYYYDLDDSYDESDEEEVRAHLRCVAEQPPLKLDTSSEKLEFLQLFGLTTQQQKEELVAQKRRKRRRMLRERSPSPPTIQSKRQTPSPRLALSTRYSPDEMNNSPNFEEKKKFLTIFNLTHISAEKRKDKERLVEMLRAMKQKALSAAVADSLTNSPRDSPAVSLSEPATQQASLDVEKPVGVAASLSDIPKAAEPGKLEQVRPQELSRVQELAPASGEKARLSEAPGGKKSLSMLHYIRGAAPKDIPVPLSHSTNGKSKPWEPFVAEEFAHQFHESVLQSTQKALQKHKGSVAVLSAEQNHKVDTSVHYNIPELQSSSRAPPPQHNGQQEPPTARKGPPTQELDRDSEEEEEEDDEDGEDEEEVPKRKWQGIEAVFEAYQEHIEEQNLERQVLQTQCRRLEARHYSLSLTAEQLSHSVAELRSQKQKMVSERERLQAELDHLRKCLALPAMHWPRGYLKGYPR

SEQ ID NO: 36565 - protein, 986 aa, Homo sapiens
  Payload ID: 7243
  Gene Symbol: GSE1
  Gene Name: Gse1 coiled-coil protein
  ENSP ID: ENSP00000402367
  MOD_RES (1)..(1): Any amino acid
XRFPPLNLQRPVHHVVPPSTVTEDYLRSFRPYHTTDDLRMSSLPPLGLDPATAAAYYHPSYLAPHPFPHPAFRMDDSYCLSALRSPFYPIPTPGSLPPLHPSAMHLHLSGVRYPPELSHSSLAALHSERMSGLSAERLQMDEELRREREREREREREREADREREKEREREREKEREQEKEREREKERERELERQREQRAREKELLAAKALEPSFLPVAELHGLRGHATEERGKPSEQLTPTRAEKLKDAGLQAPKPVQHPLHPVPTPHHTVPSLISNHGIFSLPSSSAATALLIQRTNEEEKWLARQRRLRQEKEDRQSQVSEFRQQVLEQHLDMGRPPVPAEAEHRPESTTRPGPNRHEPGGRDPPQHFGGPPPLISPKPQLHAAPTALWNPVSLMDNTLETRRAESHSLHSHPAAFEPSRQAAVPLVKVERVFCPEKAEEGPRKREPAPLDKYQPPPPPPREGGSLEHQPFLPGPGPFLAELEKSTQTILGQQRASLPQAATFGELSGPLKPGSPYRPPVPRAPDPAYIYDEFLQQRRRLVSKLDLEERRRREAQEKGYYYDLDDSYDESDEEEVRAHLRCVAEQPPLKLDTSSEKLEFLQLFGLTTQQQKEELVAQKRRKRRRMLRERSPSPPTIQSKRQTPSPRLALSTRYSPDEMNNSPNFEEKKKFLTIFNLTHISAEKRKEPATQQASLDVEKPVGVAASLSDIPKAAEPGKLEQVRPQELSRVQELAPASGEKARLSEAPGGKKSLSMLHYIRGAAPKDIPVPLSHSTNGKSKPWEPFVAEEFAHQFHESVLQSTQKALQKHKGSVAVLSAEQNHKVDTSVHYNIPELQSSSRAPPPQHNGQQEPPTARKGPPTQELDRDSEEEEEEDDEDGEDEEEVPKRKWQGIEAVFEAYQEHIEEQNLERQVLQTQCRRLEARHYSLSLTAEQLSHSVAELRSQKQKMVSERERLQAELDHLRKCLALPAMHWPRGYLKGYPR

SEQ ID NO: 36566 - protein, 210 aa, Homo sapiens
  Payload ID: 7243
  Gene Symbol: GSE1
  Gene Name: Gse1 coiled-coil protein
  ENSP ID: ENSP00000409006
MGPIIVPPGGHSVPSTPPVVTIAPTKTVNGVWRSESRQDAGSRSSSGGRERLIVEPPLPQEKAGGPAIPSHLLSTPYPFGLSPSSVVQDSRFPPLNLQRPVHHVVPPSTVTEDYLRSFRPYHTTDDLRMSSLPPLGLDPATAAAYYHPSYLAPHPFPHPAFRMDDSYCLSALRSPFYPIPTPGSLPPLHPSAMHLHLSGVRYPPELSHSS

SEQ ID NO: 36567 - protein, 419 aa, Homo sapiens
  Payload ID: 7243
  Gene Symbol: GSE1
  Gene Name: Gse1 coiled-coil protein
  ENSP ID: ENSP00000410812
  MOD_RES (1)..(1): Any amino acid
XGLTTQQQKEELVAQKRRKRRRMLRERSPSPPTIQSKRQTPSPRLALSTRYSPDEMNNSPNFEEKKKFLTIFNLTHISAEKRKDKERLVEMLRAMKQKALSAAVADSLTNSPRDSPAVSLSEPATQQASLDVEKPVGVAASLSDIPKAAEPGKLEQVRPQELSRVQELAPASGEKARLSEAPGGKKSLSMLHYIRGAAPKDIPVPLSHSTNGKSKPWEPFVAEEFAHQFHESVLQSTQKALQKHKGSVAVLSAEQNHKVDTSVHYNIPELQSSSRAPPPQHNGQQEPPTARKGPPTQELDRDSEEEEEEDDEDGEDEEEVPKRKWQGIEAVFEAYQEHIEEQNLERQVLQTQCRRLEARHYSLSLTAEQLSHSVAMGFPHVGQAGLELLTTGDLPASTSKSAGITGVSHHARPGHFQMS

SEQ ID NO: 36568 - protein, 176 aa, Homo sapiens
  Payload ID: 7244
  Gene Symbol: GSG1L
  Gene Name: GSG1-like
  Uniprot ID: Q6UXU4
  ENSP ID: ENSP00000370282
MCLELFHSSNVIDGLKLNAFAAVFTVLSGLLGMVAHMMYTQVFQVTVSLGPEDWRPHSWDYGWSFCLAWGSFTCCMAASVTTLNSYTKTVIEFRHKRKVFEQGYREEPTFIDPEAIKYFRERMEKRDGSEEDFHLDCRHERYPARHQPHMADSWPRSSAQEAPELNRQCWVLGHWV

SEQ ID NO: 36569 - protein, 280 aa, Homo sapiens
  Payload ID: 7244
  Gene Symbol: GSG1L
  Gene Name: GSG1-like
  Uniprot ID: Q6UXU4
  ENSP ID: ENSP00000379074
MKTSRRGRALLAVALNLLALLFATTAFLTTHWCQGTQRVPKPGCGQGGRANCPNSGANATANGTAAPAAAAAAATASGNGPPGGALYSWETGDDRFLFRNFHTGIWYSCEEELSGLGEKCRSFIDLAPASEKGLLGMVAHMMYTQVFQVTVSLGPEDWRPHSWDYGWSFCLAWGSFTCCMAASVTTLNSYTKTVIEFRHKRKVFEQGYREEPTFIDPEAIKYFRERMEKRDGSEEDFHLDCRHERYPARHQPHMADSWPRSSAQEAPELNRQCWVLGHWV

SEQ ID NO: 36570 - protein, 331 aa, Homo sapiens
  Payload ID: 7244
  Gene Symbol: GSG1L
  Gene Name: GSG1-like
  Uniprot ID: Q6UXU4
  ENSP ID: ENSP00000394954
MKTSRRGRALLAVALNLLALLFATTAFLTTHWCQGTQRVPKPGCGQGGRANCPNSGANATANGTAAPAAAAAAATASGNGPPGGALYSWETGDDRFLFRNFHTGIWYSCEEELSGLGEKCRSFIDLAPASEKGVLWLSVVSEVLYILLLVVGFSLMCLELFHSSNVIDGLKLNAFAAVFTVLSGLLGMVAHMMYTQVFQVTVSLGPEDWRPHSWDYGWSFCLAWGSFTCCMAASVTTLNSYTKTVIEFRHKRKVFEQGYREEPTFIDPEAIKYFRERMEKRDGSEEDFHLDCRHERYPARHQPHMADSWPRSSAQEAPELNRQCWVLGHWV

SEQ ID NO: 36571 - protein, 194 aa, Homo sapiens
  Payload ID: 7244
  Gene Symbol: GSG1L
  Gene Name: GSG1-like
  Uniprot ID: Q6UXU4
  ENSP ID: ENSP00000454880
MCLELFHSSNVIDGLKLNAFAAVFTVLSGLLGMVAHMMYTQVFQVTVSLGPEDWRPHSWDYGWSFCLAWGSFTCCMAASVTTLNSYTKTVIEFRHKRKVFEQGYREEPTFIDPEAIKYFRERWQIEAQRGRATCPRSHSWMEKRDGSEEDFHLDCRHERYPARHQPHMADSWPRSSAQEAPELNRQCWVLGHWV

SEQ ID NO: 36572 - protein, 176 aa, Homo sapiens
  Payload ID: 7244
  Gene Symbol: GSG1L
  Gene Name: GSG1-like
  ENSP ID: ENSP00000454942
  MOD_RES (1)..(1): Any amino acid
XGPPGGALYSWETGDDRFLFRNFHTGIWYSCEEELSGLGEKCRSFIDLAPASEKGVLWLSVVSEVLYILLLVVGFSLMCLELFHSSNVIDGLKLNAFAAVFTVLSVEDSTLVFPQPPWPLCLSFLCWSLLLCLISDVGFILGPFSLLFLQSLSRPPGNGRPHDVHAGVPGHREPRS

SEQ ID NO: 36573 - protein, 293 aa, Homo sapiens
  Payload ID: 7245
  Gene Symbol: GSG1L2
  Gene Name: GSG1-like 2
  Uniprot ID: A8MUP6
  ENSP ID: ENSP00000465978
MDRAKQQQALLLLPVCLALTFSLTAVVSSHWCEGTRRVVKPLCQDQPGGQHCIHFKRDNSSNGRMDNNSQAVLYIWELGDDKFIQRGFHVGLWQSCEESLNGEDEKCRSFRSVVPAEEQGVLWLSIGGEVLDIVLILTSAILLGSRVSCRSPGFHWLRVDALVAIFMVLAGLLGMVAHMMYTTIFQITVNLGPEDWKPQTWDYGWSYCLAWGSFALCLAVSVSAMSRFTAARLEFTEKQQAQNGSRHSQHSFLEPEASESIWKTGAAPCPAEQAFRNVSGHLPPGAPGKVSIC

SEQ ID NO: 36574 - protein, 139 aa, Homo sapiens
  Payload ID: 7246
  Gene Symbol: GSKIP
  Gene Name: GSK3B interacting protein
  Uniprot ID: Q9P0R6
  ENSP ID: ENSP00000412315
METDCNPMELSSMSGFEEGSELNGFEGTDMKDMRLEAEAVVNDVLFAVNNMFVSKSLRCADDVAYINVETKERNRYCLELTEAGLKVVGYAFDQVDDHLQTPYHETVYSLLDTLSPAYREAFGNALLQRLEALKRDGQS

SEQ ID NO: 36575 - protein, 139 aa, Homo sapiens; identical to SEQ ID NO: 36574
  Payload ID: 7246
  Gene Symbol: GSKIP
  Gene Name: GSK3B interacting protein
  Uniprot ID: Q9P0R6
  ENSP ID: ENSP00000450420

SEQ ID NO: 36576 - protein, 78 aa, Homo sapiens
  Payload ID: 7246
  Gene Symbol: GSKIP
  Gene Name: GSK3B interacting protein
  ENSP ID: ENSP00000451072
METDCNPMELSSMSGFEEGSELNGFEGTDMKDMRLEAEAVVNDVLFAVNNMFVSKSLRCADDVAYINVETKERNRYCL

SEQ ID NO: 36577 - protein, 139 aa, Homo sapiens; identical to SEQ ID NO: 36574
  Payload ID: 7246
  Gene Symbol: GSKIP
  Gene Name: GSK3B interacting protein
  Uniprot ID: Q9P0R6
  ENSP ID: ENSP00000451188

SEQ ID NO: 36578 - protein, 139 aa, Homo sapiens; identical to SEQ ID NO: 36574
  Payload ID: 7246
  Gene Symbol: GSKIP
  Gene Name: GSK3B interacting protein
  Uniprot ID: Q9P0R6
  ENSP ID: ENSP00000451384

SEQ ID NO: 36579 - protein, 109 aa, Homo sapiens
  Payload ID: 7246
  Gene Symbol: GSKIP
  Gene Name: GSK3B interacting protein
  ENSP ID: ENSP00000451820
METDCNPMELSSMSGFEEGSELNGFEGTDMKDMRLEAEAVVNDVLFAVNNMFVSKSLRCADDVAYINVETKERNRYCLELTEAGLKVVGYAFDQVDDHLQTPYHETVYS

SEQ ID NO: 36580 - protein, 395 aa, Homo sapiens
  Payload ID: 7247
  Gene Symbol: GTF2H2C
  Gene Name: GTF2H2 family member C
  Uniprot ID: Q6P1K8
  ENSP ID: ENSP00000370105
MDEEPERTKRWEGGYERTWEILKEDESGSLKATIEDILFKAKRKRVFEHHGQVRLGMMRHLYVVVDGSRTMEDQDLKPNRLTCTLKLLEYFVEEYFDQNPISQIGIIVTKSKRAEKLTELSGNPRKHITSLKEAVDMTCHGEPSLYNSLSMAMQTLKHMPGHTSREVLIIFSSLTTCDPSNIYDLIKTLKAAKIRVSVIGLSAEVRVCTVLARETGGTYHVILDESHYKELLTHHLSPPPASSSSECSLIRMGFPQHTIASLSDQDAKPSFSMAHLDGNTEPGLTLGGYFCPQCRAKYCELPVECKICGLTLVSAPHLARSYHHLFPLDAFQEIPLEEYNGERFCYGCQGELKDQHVYVCAVCQNVFCVDCDVFVHDSLHCCPGCIHKIPAPSGV

SEQ ID NO: 36581 - protein, 51 aa, Homo sapiens; identical to SEQ ID NO: 34427
  Payload ID: 7247
  Gene Symbol: GTF2H2C
  Gene Name: GTF2H2 family member C
  ENSP ID: ENSP00000403328

SEQ ID NO: 36582 - protein, 123 aa, Homo sapiens; identical to SEQ ID NO: 34429
  Payload ID: 7247
  Gene Symbol: GTF2H2C
  Gene Name: GTF2H2 family member C
  ENSP ID: ENSP00000421312

SEQ ID NO: 36583 - protein, 395 aa, Homo sapiens; identical to SEQ ID NO: 36580
  Payload ID: 7247
  Gene Symbol: GTF2H2C
  Gene Name: GTF2H2 family member C
  Uniprot ID: Q6P1K8
  ENSP ID: ENSP00000422907

SEQ ID NO: 36584 - protein, 51 aa, Homo sapiens; identical to SEQ ID NO: 34427
  Payload ID: 7247
  Gene Symbol: GTF2H2C
  Gene Name: GTF2H2 family member C
  ENSP ID: ENSP00000426434

SEQ ID NO: 36585 - protein, 165 aa, Homo sapiens
  Payload ID: 7247
  Gene Symbol: GTF2H2C
  Gene Name: GTF2H2 family member C
  ENSP ID: ENSP00000427224
MDEEPERTKRWEGGYERTWEILKEDESGSLKATIEDILFKAKRKRVFEHHGQVRLGMMRHLYVVVDGSRTMEDQDLKPNRLTCTLKLLEYFVEEYFDQNPISQIGIIVTKSKRAEKLTELSGNPRKHITSLKEAVDMTCHGEPSLYNSLSMAMQTLKLVLYIMYN

SEQ ID NO: 36586 - protein, 92 aa, Homo sapiens
  Payload ID: 7247
  Gene Symbol: GTF2H2C
  Gene Name: GTF2H2 family member C
  ENSP ID: ENSP00000427393
MDEEPERTKRWEGGYERTWEILKEDESGSLKATIEDILFKAKRKRVFEHHGQVRLGMMRHLYVVVDGSRTMEDQDLKPNRLTCTLKETQENI

SEQ ID NO: 36587 - protein, 253 aa, Homo sapiens
  Payload ID: 7247
  Gene Symbol: GTF2H2C
  Gene Name: GTF2H2 family member C
  ENSP ID: ENSP00000427456
MDEEPERTKRWEGGYERTWEILKEDESGSLKATIEDILFKAKRKRVFEHHGQVRLGMMRHLYVVVDGSRTMEDQDLKPNRLTCTLKIGIIVTKSKRAEKLTELSGNPRKHITSLKEAVDMTCHGEPSLYNSLSMAMQTLKHMPGHTSREVLIIFSSLTTCDPSNIYDLIKTLKAAKIRVSVIGLSAEVRVCTVLARETGGTYHVILDESHYKELLTHHLSPPPASSSSECSLIRMGFPQHTIASLSDQDAKPS

SEQ ID NO: 36588 - protein, 51 aa, Homo sapiens; identical to SEQ ID NO: 34427
  Payload ID: 7247
  Gene Symbol: GTF2H2C
  Gene Name: GTF2H2 family member C
  ENSP ID: ENSP00000427486

SEQ ID NO: 36589 - protein, 395 aa, Homo sapiens; identical to SEQ ID NO: 36580
  Payload ID: 7248
  Gene Symbol: GTF2H2C_2
  Gene Name: GTF2H2 family member C, copy 2
  Uniprot ID: Q6P1K8
  ENSP ID: ENSP00000480471

SEQ ID NO: 36590 - protein, 165 aa, Homo sapiens; identical to SEQ ID NO: 36585
  Payload ID: 7248
  Gene Symbol: GTF2H2C_2
  Gene Name: GTF2H2 family member C, copy 2
  ENSP ID: ENSP00000481241

SEQ ID NO: 36591 - protein, 51 aa, Homo sapiens; identical to SEQ ID NO: 34427
  Payload ID: 7248
  Gene Symbol: GTF2H2C_2
  Gene Name: GTF2H2 family member C, copy 2
  ENSP ID: ENSP00000481828

SEQ ID NO: 36592 - protein, 51 aa, Homo sapiens; identical to SEQ ID NO: 34427
  Payload ID: 7248
  Gene Symbol: GTF2H2C_2
  Gene Name: GTF2H2 family member C, copy 2
  ENSP ID: ENSP00000483026

SEQ ID NO: 36593 - protein, 395 aa, Homo sapiens; identical to SEQ ID NO: 36580
  Payload ID: 7248
  Gene Symbol: GTF2H2C_2
  Gene Name: GTF2H2 family member C, copy 2
  Uniprot ID: Q6P1K8
  ENSP ID: ENSP00000483148

SEQ ID NO: 36594 - protein, 959 aa, Homo sapiens
  Payload ID: 7249
  Gene Symbol: GTF2IRD1
  Gene Name: GTF2I repeat domain containing 1
  Uniprot ID: Q9UHL9
  ENSP ID: ENSP00000265755
MALLGKRCDVPTNGCGPDRWNSAFTRKDEIITSLVSALDSMCSALSKLNAEVACVAVHDESAFVVGTEKGRMFLNARKELQSDFLRFCRGPPWKDPEAEHPKKVQRGEGGGRSLPRSSLEHGSDVYLLRKMVEEVFDVLYSEALGRASVVPLPYERLLREPGLLAVQGLPEGLAFRRPAEYDPKALMAILEHSHRIRFKLKRPLEDGGRDSKALVELNGVSLIPKGSRDCGLHGQAPKVPPQDLPPTATSSSMASFLYSTALPNHAIRELKQEAPSCPLAPSDLGLSRPMPEPKATGAQDFSDCCGQKPTGPGGPLIQNVHASKRILFSIVHDKSEKWDAFIKETEDINTLRECVQILFNSRYAEALGLDHMVPVPYRKIACDPEAVEIVGIPDKIPFKRPCTYGVPKLKRILEERHSIHFIIKRMFDERIFTGNKFTKDTTKLEPASPPEDTSAEVSRATVLDLAGNARSDKGSMSEDCGPGTSGELGGLRPIKIEPEDLDIIQVTVPDPSPTSEEMTDSMPGHLPSEDSGYGMEMLTDKGLSEDARPEERPVEDSHGDVIRPLRKQVELLFNTRYAKAIGISEPVKVPYSKFLMHPEELFVVGLPEGISLRRPNCFGIAKLRKILEASNSIQFVIKRPELLTEGVKEPIMDSQGTASSLGFSPPALPPERDSGDPLVDESLKRQGFQENYDARLSRIDIANTLREQVQDLFNKKYGEALGIKYPVQVPYKRIKSNPGSVIIEGLPPGIPFRKPCTFGSQNLERILAVADKIKFTVTRPFQGLIPKPDEDDANRLGEKVILREQVKELFNEKYGEALGLNRPVLVPYKLIRDSPDAVEVTGLPDDIPFRNPNTYDIHRLEKILKAREHVRMVIINQLQPFAEICNDAKVPAKDSSIPKRKRKRVSEGNSVSSSSSSSSSSSSNPDSVASANQISLVQWPMYMVDYAGLNVQLPGPLNY

SEQ ID NO: 36595 - protein, 976 aa, Homo sapiens
  Payload ID: 7249
  Gene Symbol: GTF2IRD1
  Gene Name: GTF2I repeat domain containing 1
  Uniprot ID: Q9UHL9
  ENSP ID: ENSP00000397566
MALLGKRCDVPTNGCGPDRWNSAFTRKDEIITSLVSALDSMCSALSKLNAEVACVAVHDESAFVVGTEKGRMFLNARKELQSDFLRFCLSAAQHRAATSQLEGRVVRRVLTVASRALCPTGGPPWKDPEAEHPKKVQRGEGGGRSLPRSSLEHGSDVYLLRKMVEEVFDVLYSEALGRASVVPLPYERLLREPGLLAVQGLPEGLAFRRPAEYDPKALMAILEHSHRIRFKLKRPLEDGGRDSKALVELNGVSLIPKGSRDCGLHGQAPKVPPQDLPPTATSSSMASFLYSTALPNHAIRELKQEAPSCPLAPSDLGLSRPMPEPKATGAQDFSDCCGQKPTGPGGPLIQNVHASKRILFSIVHDKSEKWDAFIKETEDINTLRECVQILFNSRYAEALGLDHMVPVPYRKIACDPEAVEIVGIPDKIPFKRPCTYGVPKLKRILEERHSIHFIIKRMFDERIFTGNKFTKDTTKLEPASPPEDTSAEVSRATVLDLAGNARSDKGSMSEDCGPGTSGELGGLRPIKIEPEDLDIIQVTVPDPSPTSEEMTDSMPGHLPSEDSGYGMEMLTDKGLSEDARPEERPVEDSHGDVIRPLRKQVELLFNTRYAKAIGISEPVKVPYSKFLMHPEELFVVGLPEGISLRRPNCFGIAKLRKILEASNSIQFVIKRPELLTEGVKEPIMDSQERDSGDPLVDESLKRQGFQENYDARLSRIDIANTLREQVQDLFNKKYGEALGIKYPVQVPYKRIKSNPGSVIIEGLPPGIPFRKPCTFGSQNLERILAVADKIKFTVTRPFQGLIPKPDEDDANRLGEKVILREQVKELFNEKYGEALGLNRPVLVPYKLIRDSPDAVEVTGLPDDIPFRNPNTYDIHRLEKILKAREHVRMVIINQLQPFAEICNDAKVPAKDSSIPKRKRKRVSEGNSVSSSSSSSSSSSSNPDSVASANQISLVQWPMYMVDYAGLNVQLPGPLNY

SEQ ID NO: 36596 - protein, 944 aa, Homo sapiens
  Payload ID: 7249
  Gene Symbol: GTF2IRD1
  Gene Name: GTF2I repeat domain containing 1
  Uniprot ID: Q9UHL9
  ENSP ID: ENSP00000408477
MALLGKRCDVPTNGCGPDRWNSAFTRKDEIITSLVSALDSMCSALSKLNAEVACVAVHDESAFVVGTEKGRMFLNARKELQSDFLRFCRGPPWKDPEAEHPKKVQRGEGGGRSLPRSSLEHGSDVYLLRKMVEEVFDVLYSEALGRASVVPLPYERLLREPGLLAVQGLPEGLAFRRPAEYDPKALMAILEHSHRIRFKLKRPLEDGGRDSKALVELNGVSLIPKGSRDCGLHGQAPKVPPQDLPPTATSSSMASFLYSTALPNHAIRELKQEAPSCPLAPSDLGLSRPMPEPKATGAQDFSDCCGQKPTGPGGPLIQNVHASKRILFSIVHDKSEKWDAFIKETEDINTLRECVQILFNSRYAEALGLDHMVPVPYRKIACDPEAVEIVGIPDKIPFKRPCTYGVPKLKRILEERHSIHFIIKRMFDERIFTGNKFTKDTTKLEPASPPEDTSAEVSRATVLDLAGNARSDKGSMSEDCGPGTSGELGGLRPIKIEPEDLDIIQVTVPDPSPTSEEMTDSMPGHLPSEDSGYGMEMLTDKGLSEDARPEERPVEDSHGDVIRPLRKQVELLFNTRYAKAIGISEPVKVPYSKFLMHPEELFVVGLPEGISLRRPNCFGIAKLRKILEASNSIQFVIKRPELLTEGVKEPIMDSQERDSGDPLVDESLKRQGFQENYDARLSRIDIANTLREQVQDLFNKKYGEALGIKYPVQVPYKRIKSNPGSVIIEGLPPGIPFRKPCTFGSQNLERILAVADKIKFTVTRPFQGLIPKPDEDDANRLGEKVILREQVKELFNEKYGEALGLNRPVLVPYKLIRDSPDAVEVTGLPDDIPFRNPNTYDIHRLEKILKAREHVRMVIINQLQPFAEICNDAKVPAKDSSIPKRKRKRVSEGNSVSSSSSSSSSSSSNPDSVASANQISLVQWPMYMVDYAGLNVQLPGPLNY

SEQ ID NO: 36597 - protein, 275 aa, Homo sapiens
  Payload ID: 7249
  Gene Symbol: GTF2IRD1
  Gene Name: GTF2I repeat domain containing 1
  ENSP ID: ENSP00000417909
  MOD_RES (1)..(1): Any amino acid
XPAPAEAGGAALQHTIRPELLTEGVKEPIMDSQERDSGDPLVDESLKRQGFQENYDARLSRIDIANTLREQVQDLFNKKYGEALGIKYPVQVPYKRIKSNPGSVIIEGLPPGIPFRKPCTFGSQNLERILAVADKIKFTVTRPFQGLIPKPDEDDANRLGEKVILREQVKELFNEKYGEALGLNRPVLVPYKLIRDSPDAVEVTGLPDDIPFRNPNTYDIHRLEKILKAREHVRMVIINQLQPFAEICNDAKVPAKDSSIPKRKRKRVSEGNSVS

SEQ ID NO: 36598 - protein, 960 aa, Homo sapiens
  Payload ID: 7249
  Gene Symbol: GTF2IRD1
  Gene Name: GTF2I repeat domain containing 1
  ENSP ID: ENSP00000418383
MALLGKRCDVPTNGCGPDRWNSAFTRKDEIITSLVSALDSMCSALSKLNAEVACVAVHDESAFVVGTEKGRMFLNARKELQSDFLRFCRGPPWKDPEAEHPKKVQRGEGGGRSLPRSSLEHGSDVYLLRKMVEEVFDVLYSEALGRASVVPLPYERLLREPGLLAVQGLPEGLAFRRPAEYDPKALMAILEHSHRIRFKLKRPLEDGGRDSKALVELNGVSLIPKGSRDCGLHGQAPKVPPQDLPPTATSSSMASFLYSTALPNHAIRELKQEAPSCPLAPSDLGLSRPMPEPKATGAQDFSDCCGQKPTGPGGPLIQNVHASKRILFSIVHDKSEKWDAFIKETEDINTLRECVQILFNSRYAEALGLDHMVPVPYRKIACDPEAVEIVGIPDKIPFKRPCTYGVPKLKRILEERHSIHFIIKRMFDERIFTGNKFTKDTTKLEPASPPEDTSAEVSRATVLDLAGNARSDKGSMSEDCGPGTSGELGGLRPIKIEPEDLDIIQVTVPDPSPTSEEMTDSMPGHLPSEDSGYGMEMLTDKGLSEDARPEERPVEDSHGDVIRPLRKQVELLFNTRYAKAIGISEPVKVPYSKFLMHPEELFVVGLPEGISLRRPNCFGIAKLRKILEASNSIQFVIKRPELLTEGVKEPIMDSQERDSGDPLVDESLKRQGFQENYDARLSRIDIANTLREQVQDLFNKKYGEALGIKYPVQVPYKRIKSNPGSVIIEGLPPGIPFRKPCTFGSQNLERILAVADKIKFTVTRPFQGLIPKPDEDDANRLGEKVILREQVKELFNEKYGEALGLNRPVLVPYKLIRDSPDAVEVTGLPDDIPFRNPNTYDIHRLEKILKAREHVRMVIINQLQPFAEICNDAKVPAKDSSIPKRKRKRVSEGNSVSSSSSSSSSSSSNPDSVASANQISLVVKLHRFGLRHSSLWPSPLCLAGPSTLGCGPRGRGGTGL

SEQ ID NO: 36599 - protein, 949 aa, Homo sapiens
  Payload ID: 7250
  Gene Symbol: GTF2IRD2
  Gene Name: GTF2I repeat domain containing 2
  ENSP ID: ENSP00000406723
MAQVAVSTLPVEEESSSETRMVVTFLVSALESMCKELAKSKAEVACIAVYETDVFVVGTERGCAFVNARTDFQKDFAKYCVAEGLCEVKPPCPVNGMQVHSGETEILRKAVEDYFCFCYGKALGTTVMVPVPYEKMLRDQSAVVVQGLPEGVAFQHPENYDLATLKWILENKAGISFIINRPFLGPESQLGGPGMVTDAERSIVSPSESCGPINVKTEPMEDSGISLKAEAVSVKKESEDPNYYQYNMQGSHPSSTSNEVIEMELPMEDSTPLVPSEEPNEDPEAEVKIEGNTNSSSVTNSAAGVEDLNIVQVTVPDNEKERLSSIEKIKQLREQVNDLFSRKFGEAIGVDFPVKVPYRKITFNPGCVVIDGMPPGVVFKAPGYLEISSMRRILEAAEFIKFTVIRPLPGLELSNVGKRKIDQEGRVFQEKWERAYFFVEVQNIPTCLICKQSMSVSKEYNLRRHYQTNHSKHYDQYMERMRDEKLHELKKGLRKYLLGSSDTECPEQKQVFANPSPTQKSPVQPVEDLAGNLWEKLREKIRSFVAYSIAIDEITDINNTTQLAIFIRGVDENFDVSEELLDTVPMTGTKSGNEIFSRVEKSLKNFCIDWSKLVSVASTGTPAMVDANNGLVTKLKSRVATFCKGAELKSICCIIHPESLCAQKLKMDHVMDVVVKSVNWICSRGLNHSEFTTLLYELDSQYGSLLYYTEIKWLSRGLVLKRFFESLEEIDSFMSSRGKPLPQLSSIDWIRDLAFLVDMTMHLNALNISLQGHSQIVTQMYDLIRAFLAKLCLWETHLTRNNLAHFPTLKLASRNESDGLNYIPKIAELQTEFQKRLSDFKLYESELTLFSSPFSTKIDSVHEELQMEVIDLQCNTVLKTKYDKVGIPEFYKYLWGSYPKYKHHCAKILSMFGSTYICEQLFSIMKLSKTKYCSQLKDSQWDSVLHIAT

SEQ ID NO: 36600 - protein, 108 aa, Homo sapiens
  Payload ID: 7250
  Gene Symbol: GTF2IRD2
  Gene Name: GTF2I repeat domain containing 2
  Uniprot ID: Q86UP8
  ENSP ID: ENSP00000481017
MAQVAVSTLPVEEESSSETRMVVTFLVSALESMCKELAKSKAEVACIAVYETDVFVVGTERGCAFVNARTDFQKDFAKYCRCFNFILCIPNLKRIAGKTSTVFSSKLS

SEQ ID NO: 36601 - protein, 497 aa, Homo sapiens
  Payload ID: 7250
  Gene Symbol: GTF2IRD2
  Gene Name: GTF2I repeat domain containing 2
  ENSP ID: ENSP00000486581
MAQVAVSTLPVEEESSSETRMVVTFLVSALESMCKELAKSKAEVACIAVYETDVFVVGTERGCAFVNARTDFQKDFAKYCVAEGLCEVKPPCPVNGMQVHSGETEILRKAVEDYFCFCYGKALGTTVMVPVPYEKMLRDQSAVVVQGLPEGVAFQHPENYDLATLKWILENKAGISFIINRPFLGPESQLGGPGMVTDAERSIVSPSESCGPINVKTEPMEDSGISLKAEAVSVKKESEDPNYYQYNMQGSHPSSTSNEVIEMELPMEDSTPLVPSEEPNEDPEAEVKIEGNTNSSSVTNSAAGVEDLNIVQVTVPDNEKERLSSIEKIKQLREQVNDLFSRKFGEAIGVDFPVKVPYRKITFNPGCVVIDGMPPGVVFKAPGYLEISSMRRILEAAEFIKFTVIRPLPGLELSNGLLEAKARGLLEARSLRPAWATQDPISTKNLKISWKQWLTPVAPATWQAKAGGSLKLRSLRQQRTIIAILHSSLGDRTRPCL

SEQ ID NO: 36602 - protein, 226 aa, Homo sapiens
  Payload ID: 7251
  Gene Symbol: GTF2IRD2B
  Gene Name: GTF2I repeat domain containing 2B
  Uniprot ID: Q6EKJ0
  ENSP ID: ENSP00000411454
MAQVAVSTLPVEEESSSETRMVVTFLVSALESMCKELAKSKAEVACIAVYETDVFVVGTERGCAFVNARTDFQKDFAKYCVAEGLCEVKPPCPVNGMQVHSGETEILRKAVEDYFCFCYGKALGTTVMVPVPYEKMLRDQSAVVVQGLPEGVAFQHPENYDLATLKWILENKAGISFIINRPFLGPESQLGGPGMVTDAERSIVSPSERHFTESRSCLSQERIRRS

SEQ ID NO: 36603 - protein, 437 aa, Homo sapiens
  Payload ID: 7251
  Gene Symbol: GTF2IRD2B
  Gene Name: GTF2I repeat domain containing 2B
  ENSP ID: ENSP00000480037
MAQVAVSTLPVEEESSSETRMVVTFLVSALESMCKELAKSKAEVACIAVYETDVFVVGTERGCAFVNARTDFQKDFAKYCVAEGLCEVKPPCPVNGMQVHSGETEILRKAVEDYFCFCYGKALGTTVMVPVPYEKMLRDQSAVVVQGLPEGVAFQHPENYDLATLKWILENKAGISFIINRPFLGPESQLGGPGMVTDAERSIVSPSESCGPINVKTEPMEDSGISLKAEAVSVKKESEDPNYYQYNMQGSHPSSTSNEVIEMELPMEDSTPLVPSEEPNEDPEAEVKIEGNTNSSSVTNSAAGVEDLNIVQVTVPDNEKERLSSIEKIKQLREQVNDLFSRKFGEAIGVDFPVKVPYRKITFNPGCVVIDGMPPGVVFKAPGYLEISSMRRILEAAEFIKFTVIRPLPGLELSNGLLEAKARGLLEARSLRPAWAT

SEQ ID NO: 36604 - protein, 949 aa, Homo sapiens
  Payload ID: 7251
  Gene Symbol: GTF2IRD2B
  Gene Name: GTF2I repeat domain containing 2B
  Uniprot ID: Q6EKJ0
  ENSP ID: ENSP00000480524
MAQVAVSTLPVEEESSSETRMVVTFLVSALESMCKELAKSKAEVACIAVYETDVFVVGTERGCAFVNARTDFQKDFAKYCVAEGLCEVKPPCPVNGMQVHSGETEILRKAVEDYFCFCYGKALGTTVMVPVPYEKMLRDQSAVVVQGLPEGVAFQHPENYDLATLKWILENKAGISFIINRPFLGPESQLGGPGMVTDAERSIVSPSESCGPINVKTEPMEDSGISLKAEAVSVKKESEDPNYYQYNMQGSHPSSTSNEVIEMELPMEDSTPLVPSEEPNEDPEAEVKIEGNTNSSSVTNSAAGVEDLNIVQVTVPDNEKERLSSIEKIKQLREQVNDLFSRKFGEAIGVDFPVKVPYRKITFNPGCVVIDGMPPGVVFKAPGYLEISSMRRILEAAEFIKFTVIRPLPGLELSNVGKRKIDQEGRVFQEKWERAYFFVEVQNIPTCLICKQSMSVSKEYNLRRHYQTNHSKHYDQYTERMRDEKLHELKKGLRKYLLGSSDTECPEQKQVFANPSPTQKSPVQPVEDLAGNLWEKLREKIRSFVAYSIAIDEITDINNTTQLAIFIRGVDENFDVSEELLDTVPMTGTKSGNEIFLRVEKSLKKFCINWSRLVSVASTGTPAMVDANNGLVTKLKSRVATFCKGAELKSICCIIHPESLCAQKLKMDHVMDVVVKSVNWICSRGLNHSEFTTLLYELDSQYGSLLYYTEIKWLSRGLVLKRFFESLEEIDSFMSSRGKPLPQLSSIDWIRDLAFLVDMTMHLNALNISLQGHSQIVTQMYDLIRAFLAKLCLWETHLTRNNLAHFPTLKLVSRNESDGLNYIPKIAELKTEFQKRLSDFKLYESELTLFSSPFSTKIDSVHEELQMEVIDLQCNTVLKTKYDKVGIPEFYKYLWGSYPKYKHHCAKILSMFGSTYICEQLFSIMKLSKTKYCSQLKDSQWDSVLHIAT

SEQ ID NO: 36605 - protein, 108 aa, Homo sapiens; identical to SEQ ID NO: 36600
  Payload ID: 7251
  Gene Symbol: GTF2IRD2B
  Gene Name: GTF2I repeat domain containing 2B
  ENSP ID: ENSP00000481706

SEQ ID NO: 36606 - protein, 497 aa, Homo sapiens; identical to SEQ ID NO: 36601
  Payload ID: 7251
  Gene Symbol: GTF2IRD2B
  Gene Name: GTF2I repeat domain containing 2B
  ENSP ID: ENSP00000486360

SEQ ID NO: 36607 - protein, 669 aa, Homo sapiens
  Payload ID: 7252
  Gene Symbol: GTPBP1
  Gene Name: GTP binding protein 1
  Uniprot ID: O00178
  ENSP ID: ENSP00000216044
MATERSRSAMDSPVPASMFAPEPSSPGAARAAAAAARLHGGFDSDCSEDGEALNGEPELDLTSKLVLVSPTSEQYDSLLRQMWERMDEGCGETIYVIGQGSDGTEYGLSEADMEASYATVKSMAEQIEADVILLRERQEAGGRVRDYLVRKRVGDNDFLEVRVAVVGNVDAGKSTLLGVLTHGELDNGRGFARQKLFRHKHEIESGRTSSVGNDILGFDSEGNVVNKPDSHGGSLEWTKICEKSTKVITFIDLAGHEKYLKTTVFGMTGHLPDFCMLMVGSNAGIVGMTKEHLGLALALNVPVFVVVTKIDMCPANILQETLKLLQRLLKSPGCRKIPVLVQSKDDVIVTASNFSSERMCPIFQISNVTGENLDLLKMFLNLLSPRTSYREEEPAEFQIDDTYSVPGVGTVVSGTTLRGLIKLNDTLLLGPDPLGNFLSIAVKSIHRKRMPVKEVRGGQTASFALKKIKRSSIRKGMVMVSPRLNPQASWEFEAEILVLHHPTTISPRYQAMVHCGSIRQTATILSMDKDCLRTGDKATVHFRFIKTPEYLHIDQRLVFREGRTKAVGTITKLLQTTNNSPMNSKPQQIKMQSTKKGPLTKRDEGGPSGGPAVGAPPPGDEASSVGAGQPAASSNLQPQPKPSSGGRRRGGQRHKVKSQGACVTPASGC

SEQ ID NO: 36608 - protein, 349 aa, Homo sapiens
  Payload ID: 7252
  Gene Symbol: GTPBP1
  Gene Name: GTP binding protein 1
  ENSP ID: ENSP00000388147
LNDTLLLGPDPLGNFLSIAVKSIHRKRMPVKEVRGGQTASFALKKIKRSSIRKGMVMVSPRLNPQASWEFEAEILVLHHPTTISPRYQAMVHCGSIRQTATILSMDKDCLRTGDKATVHFRFIKTPEYLHIDQRLVFREGRTKAVGTITKLLQTTNNSPMNSKPQQIKMQSTKKGPLTKRDEGGPSGGPAVGAPPPGDEASSVGAGQPAASSNLQPQPKPSSGGRRRGGQRHKSQVQGANSEFPWRRITALQVDVAGRMGSRRHGHRGKEEGSCWSLLTASSHLLLRRPCPSFSSAWGHRLLSCAPRSQSAEQACGGSGGVLFTHSQMAGSRHQKLPSCCPSGRCLPLC

SEQ ID NO: 36609 - protein, 70 aa, Homo sapiens
  Payload ID: 7252
  Gene Symbol: GTPBP1
  Gene Name: GTP binding protein 1
  ENSP ID: ENSP00000397891
MATERSRSAMDSPVPASMFAPEPSSPGAARAAAAAARLHGGFDSDCSEDGEALNGEPELDLTSKMGLSMG

SEQ ID NO: 36610 - protein, 40 aa, Homo sapiens
  Payload ID: 7252
  Gene Symbol: GTPBP1
  Gene Name: GTP binding protein 1
  ENSP ID: ENSP00000437430
  MOD_RES (1)..(1): Any amino acid
XQVQGANSEFPWRRITALQVDVAGRKLPSCCPSGRCLPLC

SEQ ID NO: 36611 - protein, 86 aa, Homo sapiens
  Payload ID: 7252
  Gene Symbol: GTPBP1
  Gene Name: GTP binding protein 1
  ENSP ID: ENSP00000439505
MWERMDEGCGETIYVIGQGSDGTEYGLSEADMEASYATVKSMAEQIEADVILLRERQEAGGRVRDYLVRKRVGDNDFLEVRVAVVG

SEQ ID NO: 36612 - protein, 30 aa, Homo sapiens
  Payload ID: 7252
  Gene Symbol: GTPBP1
  Gene Name: GTP binding protein 1
  ENSP ID: ENSP00000442394
  MOD_RES (1)..(1): Any amino acid
XKPSSGGRRRGGQRHKVKSQGACVTPASGC

SEQ ID NO: 36613 - protein, 39 aa, Homo sapiens
  Payload ID: 7252
  Gene Symbol: GTPBP1
  Gene Name: GTP binding protein 1
  ENSP ID: ENSP00000442628
MWERMDEGCGETIYVIGQGSDGTEYGLSEADMEASYATV

SEQ ID NO: 36614 - protein, 152 aa, Homo sapiens
  Payload ID: 7252
  Gene Symbol: GTPBP1
  Gene Name: GTP binding protein 1
  ENSP ID: ENSP00000442881
MWERMDEGCGETIYVIGQGSDGTEYGLSEADMEASYATVKSMAEQIEADVILLRERQEAGGRVRDYLVRKRVGDNDFLEVRVAVVGNVDAGKSTLLGVLTHGELDNGRGFARQKLFRHKHEIESGRTSSVGNDILGFDSEGNVVNKPDSHGG

SEQ ID NO: 36615 - protein, 90 aa, Homo sapiens
  Payload ID: 7252
  Gene Symbol: GTPBP1
  Gene Name: GTP binding protein 1
  ENSP ID: ENSP00000445610
SQVQGANSEFPWRRITALQVDVAGRVTSASLFPQPPPTAPQRTNQKGDYLNKSCKSPRGQPERTTPTSGPGWEADATGTEGRKKGAAGAC

SEQ ID NO: 36616 - protein, 602 aa, Homo sapiens
  Payload ID: 7253
  Gene Symbol: GTPBP2
  Gene Name: GTP binding protein 2
  Uniprot ID: Q9BX10
  ENSP ID: ENSP00000303997
MDSRVSELFGGCCRPGGGPAVGGTLKARGAGSSSGCGGPKGKKKNGRNRGGKANNPPYLPPEAEDGNIEYKLKLVNPSQYRFEHLVTQMKWRLQEGRGEAVYQIGVEDNGLLVGLAEEEMRASLKTLHRMAEKVGADITVLREREVDYDSDMPRKITEVLVRKVPDNQQFLDLRVAVLGNVDSGKSTLLGVLTQGELDNGRGRARLNLFRHLHEIQSGRTSSISFEILGFNSKGEVVNYSDSRTAEEICESSSKMITFIDLAGHHKYLHTTIFGLTSYCPDCALLLVSANTGIAGTTREHLGLALALKVPFFIVVSKIDLCAKTTVERTVRQLERVLKQPGCHKVPMLVTSEDDAVTAAQQFAQSPNVTPIFTLSSVSGESLDLLKVFLNILPPLTNSKEQEELMQQLTEFQVDEIYTVPEVGTVVGGTLSSGICREGDQLVVGPTDDGCFLELRVCSIQRNRSACRVLRAGQAATLALGDFDRALLRKGMVMVSPEMNPTICSVFEAEIVLLFHATTFRRGFQVTVHVGNVRQTAVVEKIHAKDKLRTGEKAVVRFRFLKHPEYLKVGAKLLFREGVTKGIGHVTDVQAITAGEAQANMGF

SEQ ID NO: 36617 - protein, 514 aa, Homo sapiens
  Payload ID: 7253
  Gene Symbol: GTPBP2
  Gene Name: GTP binding protein 2
  Uniprot ID: Q9BX10
  ENSP ID: ENSP00000304893
MKWRLQEGRGEAVYQIGVEDNGLLVGLAEEEMRASLKTLHRMAEKVGADITVLREREVDYDSDMPRKITEVLVRKVPDNQQFLDLRVAVLGNVDSGKSTLLGVLTQGELDNGRGRARLNLFRHLHEIQSGRTSSISFEILGFNSKGEVVNYSDSRTAEEICESSSKMITFIDLAGHHKYLHTTIFGLTSYCPDCALLLVSANTGIAGTTREHLGLALALKVPFFIVVSKIDLCAKTTVERTVRQLERVLKQPGCHKVPMLVTSEDDAVTAAQQFAQSPNVTPIFTLSSVSGESLDLLKVFLNILPPLTNSKEQEELMQQLTEFQVDEIYTVPEVGTVVGGTLSSGICREGDQLVVGPTDDGCFLELRVCSIQRNRSACRVLRAGQAATLALGDFDRALLRKGMVMVSPEMNPTICSVFEAEIVLLFHATTFRRGFQVTVHVGNVRQTAVVEKIHAKDKLRTGEKAVVRFRFLKHPEYLKVGAKLLFREGVTKGIGHVTDVQAITAGEAQANMGF

SEQ ID NO: 36618 - protein, 153 aa, Homo sapiens
  Payload ID: 7253
  Gene Symbol: GTPBP2
  Gene Name: GTP binding protein 2
  ENSP ID: ENSP00000392944
  MOD_RES (1)..(1): Any amino acid
XGICREGDQLVVGPTDDGCFLELRVCSIQRNRSACRVLRAGQAATLALGDFDRALLRKGMVMVSPEMNPTICSVFEAEIVLLFHATTFRRGFQVTVHVGNVRQTAVVEKIHAKDKLRTGEKAVARERGVLSATCSLPTFWRGAKLGVARKGQS

SEQ ID NO: 36619 - protein, 154 aa, Homo sapiens
  Payload ID: 7253
  Gene Symbol: GTPBP2
  Gene Name: GTP binding protein 2
  ENSP ID: ENSP00000398905
  MOD_RES (1)..(1): Any amino acid
XGICREGDQLVVGPTDDGCFLELRVCSIQRNRSACRVLRAGQAATLALGDFDRALLRKGMVMVSPEMNPTICSVFEAEIVLLFHATTFRRGFQVTVHVGNVRQTAVVEKIHAKVRGTWPSISPEVRKEGGLPQTGRELLDPTMGIKPHLGWVAA

SEQ ID NO: 36620 - protein, 227 aa, Homo sapiens
  Payload ID: 7253
  Gene Symbol: GTPBP2
  Gene Name: GTP binding protein 2
  ENSP ID: ENSP00000410676
MDSRVSELFGGCCRPGGGPAVGGTLKARGAGSSSGCGGPKGKKKNGRNRGGKANNPPYLPPEAEDGNIEYKYRFEHLVTQMKWRLQEGRGEAVYQIGVEDNGLLVGLAEEEMRASLKTLHRMAEKVGADITVLREREVDYDSDMPRKITEVLVRKVPDNQQFLDLRVAVLGNVDSGKSTLLGVLTQGELDNGRGRARLNLFRHLHEIQSGRTSSISFEILGFNSKGE

SEQ ID NO: 36621 - protein, 315 aa, Homo sapiens
  Payload ID: 7253
  Gene Symbol: GTPBP2
  Gene Name: GTP binding protein 2
  ENSP ID: ENSP00000411358
  MOD_RES (1)..(1): Any amino acid
XQGGGAREENTSFRSRDPREEGQRLDSQAEDGNIEYKLKLVNPSQYRFEHLVTQMKWRLQEGRGEAVYQIGVEDNGLLVGLAEEEMRASLKTLHRMAEKVGADITVLREREVDYDSDMPRKITEVLVRKVPDNQQFLDLRVAVLGNVDSGKSTLLGVLTQGELDNGRGRARLNLFRHLHEIQSGRTSSISFEILGFNSKGEVVNYSDSRTAEEICESSSKMITFIDLAGHHKYLHTTIFGLTSYCPDCALLLVSANTGIAGTTREHLGLALALKVPFFIVVSKIDLCAKTTVERTVRQLERVLKQPGCHKVPMLV

SEQ ID NO: 36622 - protein, 105 aa, Homo sapiens
  Payload ID: 7253
  Gene Symbol: GTPBP2
  Gene Name: GTP binding protein 2
  ENSP ID: ENSP00000436973
GMVMVSPEMNPTICSVFEAEIVLLFHATTFRRGFQVTVHVGNVRQTAVVEKIHAKDKLRTGEKAVVRFRFLKHPEYLKVQSSSIVTKYCGLFSVVQVSRILRPFT

SEQ ID NO: 36623 - protein, 492 aa, Homo sapiens
  Payload ID: 7254
  Gene Symbol: GTPBP3
  Gene Name: GTP binding protein 3 (mitochondrial)
  Uniprot ID: Q969Y2
  ENSP ID: ENSP00000313818
MWRGLWTLAAQAARGPRRLCTRRSSGAPAPGSGATIFALSSGQGRCGIAVIRTSGPASGHALRILTAPRDLPLARHASLRLLSDPRSGEPLDRALVLWFPGPQSFTGEDCVEFHVHGGPAVVSGVLQALGSVPGLRPAEAGEFTRRAFANGKLNLTEVEGLADLIHAETEAQRRQALRQLDGELGHLCRGWAETLTKALAHVEAYIDFGEDDNLEEGVLEQADIEVRALQVALGAHLRDARRGQRLRSGVHVVVTGPPNAGKSSLVNLLSRKPVSIVSPEPGTTRDVLETPVDLAGFPVLLSDTAGLREGVGPVEQEGVRRARERLEQADLILAMLDASDLASPSSCNFLATVVASVGAQSPSDSSQRLLLVLNKSDLLSPEGPGPGPDLPPHLLLSCLTGEGLDGLLEALRKELAAVCGDPSTDPPLLTRARHQHHLQGCLDALGHYKQSKDLALAAEALRVARGHLTRLTGGGGTEEILDIIFQDFCVGK

SEQ ID NO: 36624 - protein, 524 aa, Homo sapiens
  Payload ID: 7254
  Gene Symbol: GTPBP3
  Gene Name: GTP binding protein 3 (mitochondrial)
  Uniprot ID: Q969Y2
  ENSP ID: ENSP00000351644
MWRGLWTLAAQAARGPRRLCTRRSSGAPAPGSGATIFALSSGQGRCGIAVIRTSGPASGHALRILTAPRDLPLARHASLRLLSDPRSGEPLDRALVLWFPGPQSFTGEDCVEFHVHGGPAVVSGVLQALGSVPGLRPAEAGEFTRRAFANGKLNLTEVEGLADLIHAETEAQRRQALRQLDGELGHLCRGWAETLTKALAHVEAYIDFGEDDNLEEGVLEQGGSTWWWGRKTPHISPQRLPSLSLSACLLSPTADIEVRALQVALGAHLRDARRGQRLRSGVHVVVTGPPNAGKSSLVNLLSRKPVSIVSPEPGTTRDVLETPVDLAGFPVLLSDTAGLREGVGPVEQEGVRRARERLEQADLILAMLDASDLASPSSCNFLATVVASVGAQSPSDSSQRLLLVLNKSDLLSPEGPGPGPDLPPHLLLSCLTGEGLDGLLEALRKELAAVCGDPSTDPPLLTRARHQHHLQGCLDALGHYKQSKDLALAAEALRVARGHLTRLTGGGGTEEILDIIFQDFCVGK

SEQ ID NO: 36625 - protein, 514 aa, Homo sapiens
  Payload ID: 7254
  Gene Symbol: GTPBP3
  Gene Name: GTP binding protein 3 (mitochondrial)
  Uniprot ID: Q969Y2
  ENSP ID: ENSP00000354598
MVHSPTCPHPCFLLVPASEPQFPHLQTPDPGDAVWNVRWALCTRRSSGAPAPGSGATIFALSSGQGRCGIAVIRTSGPASGHALRILTAPRDLPLARHASLRLLSDPRSGEPLDRALVLWFPGPQSFTGEDCVEFHVHGGPAVVSGVLQALGSVPGLRPAEAGEFTRRAFANGKLNLTEVEGLADLIHAETEAQRRQALRQLDGELGHLCRGWAETLTKALAHVEAYIDFGEDDNLEEGVLEQADIEVRALQVALGAHLRDARRGQRLRSGVHVVVTGPPNAGKSSLVNLLSRKPVSIVSPEPGTTRDVLETPVDLAGFPVLLSDTAGLREGVGPVEQEGVRRARERLEQADLILAMLDASDLASPSSCNFLATVVASVGAQSPSDSSQRLLLVLNKSDLLSPEGPGPGPDLPPHLLLSCLTGEGLDGLLEALRKELAAVCGDPSTDPPLLTRARHQHHLQGCLDALGHYKQSKDLALAAEALRVARGHLTRLTGGGGTEEILDIIFQDFCVGK

SEQ ID NO: 36626 - protein, 44 aa, Homo sapiens
  Payload ID: 7254
  Gene Symbol: GTPBP3
  Gene Name: GTP binding protein 3 (mitochondrial)
  ENSP ID: ENSP00000469008
MWRGLWTLAAQAARGPRRTSNLCIPQPQNPPTWSISRSSSPRST

SEQ ID NO: 36627 - protein, 101 aa, Homo sapiens
  Payload ID: 7254
  Gene Symbol: GTPBP3
  Gene Name: GTP binding protein 3 (mitochondrial)
  ENSP ID: ENSP00000470109
MWRGLWTLAAQAIVHAPEQRRTSPRLRRHHLRAKLWPRPLRHRSDPDQRPRQRPRPPNSHSTPRPAPCSPRQPAPAQRSPLRGASGPRTGALVPRSPEFHR

SEQ ID NO: 36628 - protein, 227 aa, Homo sapiens
  Payload ID: 7254
  Gene Symbol: GTPBP3
  Gene Name: GTP binding protein 3 (mitochondrial)
  ENSP ID: ENSP00000471421
MWRGLWTLAAQAARGPRRLCTRRSSGAPAPGSGATIFALSSGQGRCGIAVIRTSGPASGHALRILTAPRDLPLARHASLRLLSDPRSGEPLDRALVLWFPGPQSFTGEDCVEFHVHGGPAVVSGVLQALGSVPGLRPAEAGEFTRRAFANGKLNLTEVEGLADLIHAETEAQRRQALRQLDGELGHLCRGWAETLTKPTSKYGHCRWPWVHIYEMPGAGRGSAQGCT

SEQ ID NO: 36629 - protein, 125 aa, Homo sapiens
  Payload ID: 7254
  Gene Symbol: GTPBP3
  Gene Name: GTP binding protein 3 (mitochondrial)
  ENSP ID: ENSP00000471657
MVHSPTCPHPCFLLVPASEPQFPHLQTPDPGDAVWNIVHAPEQRRTSPRLRRHHLRAKLWPRPLRHRSDPDQRPRQRPRPPNSHSTPRPAPCSPRQPAPAQRSPLRGASGPRTGALVPRSPEFHR

SEQ ID NO: 36630 - protein, 151 aa, Homo sapiens
  Payload ID: 7254
  Gene Symbol: GTPBP3
  Gene Name: GTP binding protein 3 (mitochondrial)
  ENSP ID: ENSP00000472156
MWRGLWTLAAQAARGPRRLCTRRSSGAPAPGSGATIFALSSGQGRCGIAVIRTSGPASGHALRILTAPRDLPLARHASLRLLSDPRSGEPLDRALVLWFPGPQSFTGEDCVEFHVHGGPAVVSGVLQALGSVPGLRPAEAGAGRGSAQGCT

SEQ ID NO: 36631 - protein, 471 aa, Homo sapiens
  Payload ID: 7254
  Gene Symbol: GTPBP3
  Gene Name: GTP binding protein 3 (mitochondrial)
  Uniprot ID: Q969Y2
  ENSP ID: ENSP00000473150
MWRGLWTLAAQAARGPRRLCTRRSSGAPAPGSGATIFALSSGQGRCGIAVIRTSGPASGHALRILTAPRDLPLARHASLRLLSDPRSGEPLDRALVLWFPGPQSFTGEDCVEFHVHGGPAVVSGVLQALGSVPGLRPAEAGEFTRRAFANGKLNLTEVEGLADLIHAETEAQRRQALRQLDGELGHLCRGWAETLTKALAHVEAYIDFGEDDNLEEGVLEQADIEVRALQVALGAHLRDARRGQRLRSGVHVVVTGPPNAGKSSLVNLLSRKPVSIVSPEPGTTRDVLETPVDLAGFPVLLSDTAGLREGVGPVEQEGVRRARESCNFLATVVASVGAQSPSDSSQRLLLVLNKSDLLSPEGPGPGPDLPPHLLLSCLTGEGLDGLLEALRKELAAVCGDPSTDPPLLTRARHQHHLQGCLDALGHYKQSKDLALAAEALRVARGHLTRLTGGGGTEEILDIIFQDFCVGK

SEQ ID NO: 36632 - protein, 140 aa, Homo sapiens
  Payload ID: 7255
  Gene Symbol: GTPBP4
  Gene Name: GTP binding protein 4
  ENSP ID: ENSP00000353168
MRKVKFTQQNYHDRLSQILTDFPKLDDIHPFYADLMNILYDKDHYKLALGQINIAKNLVDNVAKDYVRLMKYGDSLYRCKQLKRAALGRMCTVIKRQKQSLEYLEQVRQHLSRLPTIDPNTRTLLLCGYPNVGKSSFINK

SEQ ID NO: 36633 - protein, 634 aa, Homo sapiens
  Payload ID: 7255
  Gene Symbol: GTPBP4
  Gene Name: GTP binding protein 4
  Uniprot ID: Q9BZE4
  ENSP ID: ENSP00000354040
MAHYNFKKITVVPSAKDFIDLTLSKTQRKTPTVIHKHYQIHRIRHFYMRKVKFTQQNYHDRLSQILTDFPKLDDIHPFYADLMNILYDKDHYKLALGQINIAKNLVDNVAKDYVRLMKYGDSLYRCKQLKRAALGRMCTVIKRQKQSLEYLEQVRQHLSRLPTIDPNTRTLLLCGYPNVGKSSFINKVTRADVDVQPYAFTTKSLFVGHMDYKYLRWQVVDTPGILDHPLEDRNTIEMQAITALAHLRAAVLYVMDLSEQCGHGLREQLELFQNIRPLFINKPLIVVANKCDVKRIAELSEDDQKIFTDLQSEGFPVIETSTLTEEGVIKVKTEACDRLLAHRVETKMKGNKVNEVLNRLHLAIPTRRDDKERPPFIPEGVVARRKRMETEESRKKRERDLELEMGDDYILDLQKYWDLMNLSEKHDKIPEIWEGHNIADYIDPAIMKKLEELEKEEELRTAAGEYDSVSESEDEEMLEIRQLAKQIREKKKLKILESKEKNTQGPRMPRTAKKVQRTVLEKEMRSLGVDMDDKDDAHYAVQARRSRSITRKRKREDSAPPSSVARSGSCSRTPRDVSGLRDVKMVKKAKTMMKNAQKKMNRLGKKGEADRHVFDMKPKHLLSGKRKAGKKDRR

SEQ ID NO: 36634 - protein, 516 aa, Homo sapiens
  Payload ID: 7256
  Gene Symbol: GTPBP6
  Gene Name: GTP binding protein 6 (putative)
  ENSP ID: ENSP00000316598
MWALRAAVRPGLRLSRVGRGRSAPRAAAPSCPARALAAVGRRSPGNLEGPWGGGRGLRADGGRSRTGDDEEEPEDADENAEEELLRGEPLLPAGTQRVCLVHPDVKWGPGKSQMTRAEWQVAEATALVHTLDGWSVVQTMVVSTKTPDRKLIFGKGNFEHLTEKIRGSPDITCVFLNVERMAAPTKKELEAAWGVEVFDRFTVVLHIFRCNARTKEARLQVALAEMPLHRSNLKRDVAHLYRGVGSRYIMGSGESFMQLQQRLLREKEAKIRKALDRLRKKRHLLRRQRTRREFPVISVVGYTNCGKTTLIKALTGDAAIQPRDQLFATLDVTAHAGTLPSRMTVLYVDTIGFLSQLPHGLIESFSATLEDVAHSDLILHVRDVSHPEAELQKCSVLSTLRGLQLPAPLLDSMVEVHNKVDLVPGYSPTEPNVVPVSALRGHGLQELKAELDAAVLKATGRQILTLRVRLAGAQLSWLYKEATVQEVDVIPEDGAADVRVIISNSAYGKFRKLFPG

SEQ ID NO: 36635 - protein, 296 aa, Homo sapiens
  Payload ID: 7257
  Gene Symbol: GEM
  Gene Name: GTP binding protein overexpressed in skeletal muscle
  Uniprot ID: P55040
  ENSP ID: ENSP00000297596
MTLNNVTMRQGTVGMQPQQQRWSIPADGRHLMVQKEPHQYSHRNRHSATPEDHCRRSWSSDSTDSVISSESGNTYYRVVLIGEQGVGKSTLANIFAGVHDSMDSDCEVLGEDTYERTLMVDGESATIILLDMWENKGENEWLHDHCMQVGDAYLIVYSITDRASFEKASELRIQLRRARQTEDIPIILVGNKSDLVRCREVSVSEGRACAVVFDCKFIETSAAVQHNVKELFEGIVRQVRLRRDSKEKNERRLAYQKRKESMPRKARRFWGKIVAKNNKNMAFKLKSKSCHDLSVL

SEQ ID NO: 36636 - protein, 296 aa, Homo sapiens; identical to SEQ ID NO: 36635
  Payload ID: 7257
  Gene Symbol: GEM
  Gene Name: GTP binding protein overexpressed in skeletal muscle
  Uniprot ID: P55040
  ENSP ID: ENSP00000379497

SEQ ID NO: 36637 - protein, 93 aa, Homo sapiens
  Payload ID: 7257
  Gene Symbol: GEM
  Gene Name: GTP binding protein overexpressed in skeletal muscle
  ENSP ID: ENSP00000428258
MTLNNVTMRQGTVGMQPQQQRWSIPADGRHLMVQKEPHQYSHRNRHSATPEDHCRRSWSSDSTDSVISSESGNTYYRVVLIGEQGVGKSTLAN

SEQ ID NO: 36638 - protein, 250 aa, Homo sapiens
  Payload ID: 7258
  Gene Symbol: GCH1
  Gene Name: GTP cyclohydrolase 1
  Uniprot ID: P30793
  ENSP ID: ENSP00000378890
MEKGPVRAPAEKPRGARCSNGFPERDPPRPGPSRPAEKPPRPEAKSAQPADGWKGERPRSEEDNELNLPNLAAAYSSILSSLGENPQRQGLLKTPWRAASAMQFFTKGYQETISDVLNDAIFDEDHDEMVIVKDIDMFSMCEHHLVPFVGKVHIGYLPNKQVLGLSKLARIVEIYSRRLQVQERLTKQIAVAITEALRPAGVGVVVEATHMCMVMRGVQKMNSKTVTSTMLGVFREDPKTREEFLTLIRS

SEQ ID NO: 36639 - protein, 250 aa, Homo sapiens; identical to SEQ ID NO: 36638
  Payload ID: 7258
  Gene Symbol: GCH1
  Gene Name: GTP cyclohydrolase 1
  Uniprot ID: P30793
  ENSP ID: ENSP00000419045

SEQ ID NO: 36640 - protein, 233 aa, Homo sapiens
  Payload ID: 7258
  Gene Symbol: GCH1
  Gene Name: GTP cyclohydrolase 1
  Uniprot ID: P30793
  ENSP ID: ENSP00000444011
MEKGPVRAPAEKPRGARCSNGFPERDPPRPGPSRPAEKPPRPEAKSAQPADGWKGERPRSEEDNELNLPNLAAAYSSILSSLGENPQRQGLLKTPWRAASAMQFFTKGYQETISDVLNDAIFDEDHDEMVIVKDIDMFSMCEHHLVPFVGKVHIGYLPNKQVLGLSKLARIVEIYSRRLQVQERLTKQIAVAITEALRPAGVGVVVEATKSNKYNKGLSPLLSSCHLFVAILK

SEQ ID NO: 36641 - protein, 213 aa, Homo sapiens
  Payload ID: 7258
  Gene Symbol: GCH1
  Gene Name: GTP cyclohydrolase 1
  Uniprot ID: P30793
  ENSP ID: ENSP00000445246
MEKGPVRAPAEKPRGARCSNGFPERDPPRPGPSRPAEKPPRPEAKSAQPADGWKGERPRSEEDNELNLPNLAAAYSSILSSLGENPQRQGLLKTPWRAASAMQFFTKGYQETISDVLNDAIFDEDHDEMVIVKDIDMFSMCEHHLVPFVGKVHIGYLPNKQVLGLSKLARIVEIYSRRLQVQERLTKQIAVAITEALRPAGVGVVVEATSAEP

SEQ ID NO: 36642 - protein, 250 aa, Homo sapiens; identical to SEQ ID NO: 36638
  Payload ID: 7258
  Gene Symbol: GCH1
  Gene Name: GTP cyclohydrolase 1
  Uniprot ID: P30793
  ENSP ID: ENSP00000477796

SEQ ID NO: 36643 - protein, 84 aa, Homo sapiens
  Payload ID: 7259
  Gene Symbol: GCHFR
  Gene Name: GTP cyclohydrolase I feedback regulator
  Uniprot ID: P30047
  ENSP ID: ENSP00000260447
MPYLLISTQIRMEVGPTMVGDEQSDPELMQHLGASKRRALGNNFYEYYVDDPPRIVLDKLERRGFRVLSMTGVGQTLVWCLHKE

SEQ ID NO: 36644 - protein, 67 aa, Homo sapiens
  Payload ID: 7259
  Gene Symbol: GCHFR
  Gene Name: GTP cyclohydrolase I feedback regulator
  ENSP ID: ENSP00000453640
MVGDEQSDPELMQHLGASKRRALGNNFYEYYVDDPPRIVLDKLERRGFRVLSMTGVGQTLVWCLHKE

SEQ ID NO: 36645 - protein, 73 aa, Homo sapiens
  Payload ID: 7259
  Gene Symbol: GCHFR
  Gene Name: GTP cyclohydrolase I feedback regulator
  Uniprot ID: P30047
  ENSP ID: ENSP00000453871
MPYLLISTQIRMSDPELMQHLGASKRRALGNNFYEYYVDDPPRIVLDKLERRGFRVLSMTGVGQTLVWCLHKE

SEQ ID NO: 36646 - protein, 44 aa, Homo sapiens
  Payload ID: 7259
  Gene Symbol: GCHFR
  Gene Name: GTP cyclohydrolase I feedback regulator
  ENSP ID: ENSP00000454067
MPYLLISTQIRMEVGPTMVGDEQSDPELMQHLGASKRRALGNNL

SEQ ID NO: 36647 - protein, 67 aa, Homo sapiens; identical to SEQ ID NO: 36644
  Payload ID: 7259
  Gene Symbol: GCHFR
  Gene Name: GTP cyclohydrolase I feedback regulator
  ENSP ID: ENSP00000454195

SEQ ID NO: 36648 - protein, 13 aa, Homo sapiens
  Payload ID: 7259
  Gene Symbol: GCHFR
  Gene Name: GTP cyclohydrolase I feedback regulator
  ENSP ID: ENSP00000477896
MPYLLISTQIRML

SEQ ID NO: 36649 - protein, 466 aa, Homo sapiens
  Payload ID: 7260
  Gene Symbol: G3BP1
  Gene Name: GTPase activating protein (SH3 domain) binding protein 1
  Uniprot ID: Q13283
  ENSP ID: ENSP00000348578
MVMEKPSPLLVGREFVRQYYTLLNQAPDMLHRFYGKNSSYVHGGLDSNGKPADAVYGQKEIHRKVMSQNFTNCHTKIRHVDAHATLNDGVVVQVMGLLSNNNQALRRFMQTFVLAPEGSVANKFYVHNDIFRYQDEVFGGFVTEPQEESEEEVEEPEERQQTPEVVPDDSGTFYDQAVVSNDMEEHLEEPVAEPEPDPEPEPEQEPVSEIQEEKPEPVLEETAPEDAQKSSSPAPADIAQTVQEDLRTFSWASVTSKNLPPSGAVPVTGIPPHVVKVPASQPRPESKPESQIPPQRPQRDQRVREQRINIPPQRGPRPIREAGEQGDIEPRRMVRHPDSHQLFIGNLPHEVDKSELKDFFQSYGNVVELRINSGGKLPNFGFVVFDDSEPVQKVLSNRPIMFRGEVRLNVEEKKTRAAREGDRRDNRLRGPGGPRGGLGGGMRGPPRGGMVQKPGFGVGRGLAPRQ

SEQ ID NO: 36650 - protein, 466 aa, Homo sapiens; identical to SEQ ID NO: 36649
  Payload ID: 7260
  Gene Symbol: G3BP1
  Gene Name: GTPase activating protein (SH3 domain) binding protein 1
  Uniprot ID: Q13283
  ENSP ID: ENSP00000377681

SEQ ID NO: 36651 - protein, 122 aa, Homo sapiens
  Payload ID: 7260
  Gene Symbol: G3BP1
  Gene Name: GTPase activating protein (SH3 domain) binding protein 1
  Uniprot ID: Q13283
  ENSP ID: ENSP00000427810
MVMEKPSPLLVGREFVRQYYTLLNQAPDMLHRFYGKNSSYVHGGLDSNGKPADAVYGQKEIHRKVMSQNFTNCHTKIRHVDAHATLNDGVVVQVMGLLSNNNQALRRFMQTFVLAPESLKKK

SEQ ID NO: 36652 - protein, 105 aa, Homo sapiens
  Payload ID: 7260
  Gene Symbol: G3BP1
  Gene Name: GTPase activating protein (SH3 domain) binding protein 1
  ENSP ID: ENSP00000428469
MVMEKPSPLLVGREFVRQYYTLLNQAPDMLHRFYGKNSSYVHGGLDSNGKPADAVYGQKEIHRKVMSQNFTNCHTKIRHVDAHATLNDGVVVQVMGLLSNNNQAL

SEQ ID NO: 36653 - protein, 122 aa, Homo sapiens; identical to SEQ ID NO: 36651
  Payload ID: 7260
  Gene Symbol: G3BP1
  Gene Name: GTPase activating protein (SH3 domain) binding protein 1
  Uniprot ID: Q13283
  ENSP ID: ENSP00000428926

SEQ ID NO: 36654 - protein, 148 aa, Homo sapiens
  Payload ID: 7260
  Gene Symbol: G3BP1
  Gene Name: GTPase activating protein (SH3 domain) binding protein 1
  ENSP ID: ENSP00000429250
MVMEKPSPLLVGREFVRQYYTLLNQAPDMLHSLHIGYHMIIRFYGKNSSYVHGGLDSNGKPADAVYGQKEIHRKVMSQNFTNCHTKIRHVDAHATLNDGVVVQVMGLLSNNNQALRRFMQTFVLAPEGSVANKFYVHNDIFRYQDEVF

SEQ ID NO: 36655 - protein, 37 aa, Homo sapiens
  Payload ID: 7260
  Gene Symbol: G3BP1
  Gene Name: GTPase activating protein (SH3 domain) binding protein 1
  ENSP ID: ENSP00000429316
MVMEKPSPLLVGREFVRQYYTLLNQAPDMLHRKSTGK

SEQ ID NO: 36656 - protein, 117 aa, Homo sapiens
  Payload ID: 7260
  Gene Symbol: G3BP1
  Gene Name: GTPase activating protein (SH3 domain) binding protein 1
  ENSP ID: ENSP00000429920
MVMEKPSPLLVGREFVRQYYTLLNQAPDMLHRFYGKNSSYVHGGLDSNGKPADAVYGQKEIHRKVMSQNFTNCHTKIRHVDAHATLNDGVVVQVMGLLSNNNQALRRFMQTFVLAPE

SEQ ID NO: 36657 - protein, 37 aa, Homo sapiens; identical to SEQ ID NO: 36655
  Payload ID: 7260
  Gene Symbol: G3BP1
  Gene Name: GTPase activating protein (SH3 domain) binding protein 1
  ENSP ID: ENSP00000430045

SEQ ID NO: 36658 - protein, 153 aa, Homo sapiens
  Payload ID: 7260
  Gene Symbol: G3BP1
  Gene Name: GTPase activating protein (SH3 domain) binding protein 1
  ENSP ID: ENSP00000430480
MVMEKPSPLLVGREFVRQYYTLLNQAPDMLHRFYGKNSSYVHGGLDSNGKPADAVYGQKEIHRKVMSQNFTNCHTKIRHVDAHATLNDGVVVQVMGLLSNNNQALRRFMQTFVLAPEVHLALFLAQSLFLNQLFLQGGLVLFSYTYERTTSLC

SEQ ID NO: 36659 - protein, 106 aa, Homo sapiens
  Payload ID: 7260
  Gene Symbol: G3BP1
  Gene Name: GTPase activating protein (SH3 domain) binding protein 1
  ENSP ID: ENSP00000430738
MVMEKPSPLLVGREFVRQYYTLLNQAPDMLHRFYGKNSSYVHGGLDSNGKPADAVYGQKEIHRKVMSQNFTNCHTKIRHVDAHATLNDGVVVQVMGLLSNNNQALR

SEQ ID NO: 36660 - protein, 37 aa, Homo sapiens; identical to SEQ ID NO: 36655
  Payload ID: 7260
  Gene Symbol: G3BP1
  Gene Name: GTPase activating protein (SH3 domain) binding protein 1
  ENSP ID: ENSP00000486887

SEQ ID NO: 36661 - protein, 449 aa, Homo sapiens
  Payload ID: 7261
  Gene Symbol: G3BP2
  Gene Name: GTPase activating protein (SH3 domain) binding protein 2
  Uniprot ID: Q9UN86
  ENSP ID: ENSP00000350518
MVMEKPSPLLVGREFVRQYYTLLNKAPEYLHRFYGRNSSYVHGGVDASGKPQEAVYGQNDIHHKVLSLNFSECHTKIRHVDAHATLSDGVVVQVMGLLSNSGQPERKFMQTFVLAPEGSVPNKFYVHNDMFRYEDEVFGDSEPELDEESEDEVEEEQEERQPSPEPVQENANSGYYEAHPVTNGIEEPLEESSHEPEPEPESETKTEELKPQVEEKNLEELEEKSTTPPPAEPVSLPQEPPKPRVEAKPEVQSQPPRVREQRPRERPGFPPRGPRPGRGDMEQNDSDNRRIIRYPDSHQLFVGNLPHDIDENELKEFFMSFGNVVELRINTKGVGGKLPNFGFVVFDDSEPVQRILIAKPIMFRGEVRLNVEEKKTRAARERETRGGGDDRRDIRRNDRGPGGPRGIVGGGMMRDRDGRGPPPRGGMAQKLGSGRGTGQMEGRFTGQRR

SEQ ID NO: 36662 - protein, 482 aa, Homo sapiens
  Payload ID: 7261
  Gene Symbol: G3BP2
  Gene Name: GTPase activating protein (SH3 domain) binding protein 2
  Uniprot ID: Q9UN86
  ENSP ID: ENSP00000352738
MVMEKPSPLLVGREFVRQYYTLLNKAPEYLHRFYGRNSSYVHGGVDASGKPQEAVYGQNDIHHKVLSLNFSECHTKIRHVDAHATLSDGVVVQVMGLLSNSGQPERKFMQTFVLAPEGSVPNKFYVHNDMFRYEDEVFGDSEPELDEESEDEVEEEQEERQPSPEPVQENANSGYYEAHPVTNGIEEPLEESSHEPEPEPESETKTEELKPQVEEKNLEELEEKSTTPPPAEPVSLPQEPPKAFSWASVTSKNLPPSGTVSSSGIPPHVKAPVSQPRVEAKPEVQSQPPRVREQRPRERPGFPPRGPRPGRGDMEQNDSDNRRIIRYPDSHQLFVGNLPHDIDENELKEFFMSFGNVVELRINTKGVGGKLPNFGFVVFDDSEPVQRILIAKPIMFRGEVRLNVEEKKTRAARERETRGGGDDRRDIRRNDRGPGGPRGIVGGGMMRDRDGRGPPPRGGMAQKLGSGRGTGQMEGRFTGQRR

SEQ ID NO: 36663 - protein, 482 aa, Homo sapiens; identical to SEQ ID NO: 36662
  Payload ID: 7261
  Gene Symbol: G3BP2
  Gene Name: GTPase activating protein (SH3 domain) binding protein 2
  Uniprot ID: Q9UN86
  ENSP ID: ENSP00000379069

SEQ ID NO: 36664 - protein, 99 aa, Homo sapiens
  Payload ID: 7261
  Gene Symbol: G3BP2
  Gene Name: GTPase activating protein (SH3 domain) binding protein 2
  ENSP ID: ENSP00000421621
MVMEKPSPLLVGREFVRQYYTLLNKAPEYLHRFYGRNSSYVHGGVDASGKPQEAVYGQNDIHHKVLSLNFSECHTKIRHVDAHATLSDGVVVQVMGLLS

SEQ ID NO: 36665 - protein, 102 aa, Homo sapiens
  Payload ID: 7261
  Gene Symbol: G3BP2
  Gene Name: GTPase activating protein (SH3 domain) binding protein 2
  ENSP ID: ENSP00000422614
MVMEKPSPLLVGREFVRQYYTLLNKAPEYLHRFYGRNSSYVHGGVDASGKPQEAVYGQNDIHHKVLSLNFSECHTKIRHVDAHATLSDGVVVQVMGLLSNSG

SEQ ID NO: 36666 - protein, 141 aa, Homo sapiens
  Payload ID: 7261
  Gene Symbol: G3BP2
  Gene Name: GTPase activating protein (SH3 domain) binding protein 2
  ENSP ID: ENSP00000422748
MVMEKPSPLLVGREFVRQYYTLLNKAPEYLHRFYGRNSSYVHGGVDASGKPQEAVYGQNDIHHKVLSLNFSECHTKIRHVDAHATLSDGVVVQVMGLLSNSGQPERKFMQTFVLAPEGSVPNKFYVHNDMFRYEDEVFGDS

SEQ ID NO: 36667 - protein, 56 aa, Homo sapiens
  Payload ID: 7261
  Gene Symbol: G3BP2
  Gene Name: GTPase activating protein (SH3 domain) binding protein 2
  ENSP ID: ENSP00000422830
MVMEKPSPLLVGREFVRQYYTLLNKAPEYLHRFYGRNSSYVHGGVDASGKPQEAVY

SEQ ID NO: 36668 - protein, 59 aa, Homo sapiens
  Payload ID: 7261
  Gene Symbol: G3BP2
  Gene Name: GTPase activating protein (SH3 domain) binding protein 2
  ENSP ID: ENSP00000423245
MVMEKPSPLLVGREFVRQYYTLLNKAPEYLHRFYGRNSSYVHGGVDASGKPQEAVYGQN

SEQ ID NO: 36669 - protein, 115 aa, Homo sapiens
  Payload ID: 7261
  Gene Symbol: G3BP2
  Gene Name: GTPase activating protein (SH3 domain) binding protein 2
  ENSP ID: ENSP00000423960
MVMEKPSPLLVGREFVRQYYTLLNKAPEYLHRFYGRNSSYVHGGVDASGKPQEAVYGQNDIHHKVLSLNFSECHTKIRHVDAHATLSDGVVVQVMGLLSNSGQPERKFMQTFVLA

SEQ ID NO: 36670 - protein, 77 aa, Homo sapiens
  Payload ID: 7261
  Gene Symbol: G3BP2
  Gene Name: GTPase activating protein (SH3 domain) binding protein 2
  ENSP ID: ENSP00000424060
MVMEKPSPLLVGREFVRQYYTLLNKAPEYLHRFYGRNSSYVHGGVDASGKPQEAVYGQNDIHHKVLSLNFSECHTKI

SEQ ID NO: 36671 - protein, 198 aa, Homo sapiens
  Payload ID: 7261
  Gene Symbol: G3BP2
  Gene Name: GTPase activating protein (SH3 domain) binding protein 2
  ENSP ID: ENSP00000424522
MVMEKPSPLLVGREFVRQYYTLLNKAPEYLHRFYGRNSSYVHGGVDASGKPQEAVYGQNDIHHKVLSLNFSECHTKIRHVDAHATLSDGVVVQVMGLLSNSGQPERKFMQTFVLAPEGSVPNKFYVHNDMFRYEDEVFGDSEPELDEESEDEVEEEQEERQPSPEPVQENANSGYYEAHPVTNGIEEPLEESSHEPEP

SEQ ID NO: 36672 - protein, 110 aa, Homo sapiens
  Payload ID: 7261
  Gene Symbol: G3BP2
  Gene Name: GTPase activating protein (SH3 domain) binding protein 2
  ENSP ID: ENSP00000425122
MVMEKPSPLLVGREFVRQYYTLLNKAPEYLHRFYGRNSSYVHGGVDASGKPQEAVYGQNDIHHKVLSLNFSECHTKIRHVDAHATLSDGVVVQVMGLLSNSGQPERKFMQ

SEQ ID NO: 36673 - protein, 125 aa, Homo sapiens
  Payload ID: 7261
  Gene Symbol: G3BP2
  Gene Name: GTPase activating protein (SH3 domain) binding protein 2
  ENSP ID: ENSP00000426311
MVMEKPSPLLVGREFVRQYYTLLNKAPEYLHRFYGRNSSYVHGGVDASGKPQEAVYGQNDIHHKVLSLNFSECHTKIRHVDAHATLSDGVVVQVMGLLSNSGQPERKFMQTFVLAPEGSVPNKFY

SEQ ID NO: 36674 - protein, 23 aa, Homo sapiens
  Payload ID: 7261
  Gene Symbol: G3BP2
  Gene Name: GTPase activating protein (SH3 domain) binding protein 2
  ENSP ID: ENSP00000426843
HGGVDASGKPQEAVYGQNNQKMK

SEQ ID NO: 36675 - protein, 629 aa, Homo sapiens [sequence omitted]

SEQ ID NO: 36676 - protein, 1460 aa, Homo sapiens
  Payload ID: 7262
  Gene Symbol: GAPVD1
  Gene Name: GTPase activating protein and VPS9 domains 1
  Uniprot ID: Q14C86
  ENSP ID: ENSP00000297933
MVKLDIHTLAHHLKQERLYVNSEKQLIQRLNADVLKTAEKLYRTAWIAKQQRINLDRLIITSAEASPAECCQHAKILEDTQFVDGYKQLGFQETAYGEFLSRLRENPRLIASSLVAGEKLNQENTQSVIYTVFTSLYGNCIMQEDESYLLQVLRYLIEFELKESDNPRRLLRRGTCAFSILFKLFSEGLFSAKLFLTATLHEPIMQLLVEDEDHLETDPNKLIERFSPSQQEKLFGEKGSDRFRQKVQEMVESNEAKLVALVNKFIGYLKQNTYCFPHSLRWIVSQMYKTLSCVDRLEVGEVRAMCTDLLLACFICPAVVNPEQYGIISDAPINEVARFNLMQVGRLLQQLAMTGSEEGDPRTKSSLGKFDKSCVAAFLDVVIGGRAVETPPLSSVNLLEGLSRTVVYITYSQLITLVNFMKSVMSGDQLREDRMALDNLLANLPPAKPGKSSSLEMTPYNTPQLSPATTPANKKNRLPIATRSRSRTNMLMDLHMDHEGSSQETIQEVQPEEVLVISLGTGPQLTPGMMSENEVLNMQLSDGGQGDVPVDENKLHGKPDKTLRFSLCSDNLEGISEGPSNRSNSVSSLDLEGESVSELGAGPSGSNGVEALQLLEHEQATTQDNLDDKLRKFEIRDMMGLTDDRDISETVSETWSTDVLGSDFDPNIDEDRLQEIAGAAAENMLGSLLCLPGSGSVLLDPCTGSTISETTSEAWSVEVLPSDSEAPDLKQEERLQELESCSGLGSTSDDTDVREVSSRPSTPGLSVVSGISATSEDIPNKIEDLRSECSSDFGGKDSVTSPDMDEITHGAHQLTSPPSQSESLLAMFDPLSSHEGASAVVRPKVHYARPSHPPPDPPILEGAVGGNEARLPNFGSHVLTPAEMEAFKQRHSYPERLVRSRSSDIVSSVRRPMSDPSWNRRPGNEERELPPAAAIGATSLVAAPHSSSSSPSKDSSRGETEERKDSDDEKSDRNRPWWRKRFVSAMPKAPIPFRKKEKQEKDKDDLGPDRFSTLTDDPSPRLSAQAQVAEDILDKYRNAIKRTSPSDGAMANYESTEVMGDGESAHDSPRDEALQNISADDLPDSASQAAHPQDSAFSYRDAKKKLRLALCSADSVAFPVLTHSTRNGLPDHTDPEDNEIVCFLKVQIAEAINLQDKNLMAQLQETMRCVCRFDNRTCRKLLASIAEDYRKRAPYIAYLTRCRQGLQTTQAHLERLLQRVLRDKEVANRYFTTVCVRLLLESKEKKIREFIQDFQKLTAADDKTAQVEDFLQFLYGAMAQDVIWQNASEEQLQDAQLAIERSVMNRIFKLAFYPNQDGDILRDQVLHEHIQRLSKVVTANHRALQIPEVYLREAPWPSAQSEIRTISAYKTPRDKVQCILRMCSTIMNLLSLANEDSVPGADDFVPVLVFVLIKANPPCLLSTVQYISSFYASCLSGEESYWWMQFTAAVEFIKTIDDRK

SEQ ID NO: 36677 - protein, 1439 aa, Homo sapiens
  Payload ID: 7262
  Gene Symbol: GAPVD1
  Gene Name: GTPase activating protein and VPS9 domains 1
  Uniprot ID: Q14C86
  ENSP ID: ENSP00000309582
MVKLDIHTLAHHLKQERLYVNSEKQLIQRLNADVLKTAEKLYRTAWIAKQQRINLDRLIITSAEASPAECCQHAKILEDTQFVDGYKQLGFQETAYGEFLSRLRENPRLIASSLVAGEKLNQENTQSVIYTVFTSLYGNCIMQEDESYLLQVLRYLIEFELKESDNPRRLLRRGTCAFSILFKLFSEGLFSAKLFLTATLHEPIMQLLVEDEDHLETDPNKLIERFSPSQQEKLFGEKGSDRFRQKVQEMVESNEAKLVALVNKFIGYLKQNTYCFPHSLRWIVSQMYKTLSCVDRLEVGEVRAMCTDLLLACFICPAVVNPEQYGIISDAPINEVARFNLMQVGRLLQQLAMTGSEEGDPRTKSSLGKFDKSCVAAFLDVVIGGRAVETPPLSSVNLLEGLSRTVVYITYSQLITLVNFMKSVMSGDQLREDRMALDNLLANLPPAKPGKSSSLEMTPYNTPQLSPATTPANKKNRLPIATRSRSRTNMLMDLHMDHEGSSQETIQEVQPEEVLVISLGTGPQLTPGMMSENEVLNMQLSDGGQGDVPVDENKLHGPSNRSNSVSSLDLEGESVSELGAGPSGSNGVEALQLLEHEQATTQDNLDDKLRKFEIRDMMGLTDDRDISETVSETWSTDVLGSDFDPNIDEDRLQEIAGAAAENMLGSLLCLPGSGSVLLDPCTGSTISETTSEAWSVEVLPSDSEAPDLKQEERLQELESCSGLGSTSDDTDVREVSSRPSTPGLSVVSGISATSEDIPNKIEDLRSECSSDFGGKDSVTSPDMDEITHGAHQLTSPPSQSESLLAMFDPLSSHEGASAVVRPKVHYARPSHPPPDPPILEGAVGGNEARLPNFGSHVLTPAEMEAFKQRHSYPERLVRSRSSDIVSSVRRPMSDPSWNRRPGNEERELPPAAAIGATSLVAAPHSSSSSPSKDSSRGETEERKDSDDEKSDRNRPWWRKRFVSAMPKAPIPFRKKEKQEKDKDDLGPDRFSTLTDDPSPRLSAQAQVAEDILDKYRNAIKRTSPSDGAMANYESTEVMGDGESAHDSPRDEALQNISADDLPDSASQAAHPQDSAFSYRDAKKKLRLALCSADSVAFPVLTHSTRNGLPDHTDPEDNEIVCFLKVQIAEAINLQDKNLMAQLQETMRCVCRFDNRTCRKLLASIAEDYRKRAPYIAYLTRCRQGLQTTQAHLERLLQRVLRDKEVANRYFTTVCVRLLLESKEKKIREFIQDFQKLTAADDKTAQVEDFLQFLYGAMAQDVIWQNASEEQLQDAQLAIERSVMNRIFKLAFYPNQDGDILRDQVLHEHIQRLSKVVTANHRALQIPEVYLREAPWPSAQSEIRTISAYKTPRDKVQCILRMCSTIMNLLSLANEDSVPGADDFVPVLVFVLIKANPPCLLSTVQYISSFYASCLSGEESYWWMQFTAAVEFIKTIDDRK

SEQ ID NO: 36678 - protein, 1412 aa, Homo sapiens
  Payload ID: 7262
  Gene Symbol: GAPVD1
  Gene Name: GTPase activating protein and VPS9 domains 1
  ENSP ID: ENSP00000377645
MVKLDIHTLAHHLKQERLYVNSEKQLIQRLNADVLKTAEKLYRTAWIAKQQRINLDRLIITSAEASPAECCQHAKILEDTQFVDGYKQLGFQETAYGEFLSRLRENPRLIASSLVAGEKLNQENTQSVIYTVFTSLYGNCIMQEDESYLLQVLRYLIEFELKESDNPRRLLRRGTCAFSILFKLFSEGLFSAKLFLTATLHEPIMQLLVEDEDHLETDPNKLIERFSPSQQEKLFGEKGSDRFRQKVQEMVESNEAKLVALVNKFIGYLKQNTYCFPHSLRWIVSQMYKTLSCVDRLEVGEVRAMCTDLLLACFICPAVVNPEQYGIISDAPINEVARFNLMQVGRLLQQLAMTGSEEGDPRTKSSLGKFDKSCVAAFLDVVIGGRAVETPPLSSVNLLEGLSRTVVYITYSQLITLVNFMKSVMSGDQLREDRMALDNLLANLPPAKPGKSSSLEMTPYNTPQLSPATTPANKKNRLPIATRSRSRTNMLMDLHMDHEGSSQETIQEVQPEEVLVISLGTGPQLTPGMMSENEVLNMQLSDGGQGDVPVDENKLHGPSNRSNSVSSLDLEGESVSELGAGPSGSNGVEALQLLEHEQATTQDNLDDKLRKFEIRDMMGLTDDRDISETVSETWSTDVLGSDFDPNIDEDRLQEIAGAAAENMLGSLLCLPGSGSVLLDPCTGSTISETTSEAWSVEVLPSDSEAPDLKQEERLQELESCSGLGSTSDDTDVREVSSRPSTPGLSVVSGISATSEDIPNKIEDLRSECSSDFGGKDSVTSPDMDEITHGAHQLTSPPSQSESLLAMFDPLSSHEGASAVVRPKVHYARPSHPPPDPPILEGAVGGNEARLPNFGSHVLTPAEMEAFKQRHSYPERLVRSRSSDIVSSVRRPMSDPSWNRRPGNEERELPPAAAIGATSLVAAPHSSSSSPSKDSSRGETEERKDSDDEKSDRNRPWWRKRFVSAMPKDDPSPRLSAQAQVAEDILDKYRNAIKRTSPSDGAMANYESTEVMGDGESAHDSPRDEALQNISADDLPDSASQAAHPQDSAFSYRDAKKKLRLALCSADSVAFPVLTHSTRNGLPDHTDPEDNEIVCFLKVQIAEAINLQDKNLMAQLQETMRCVCRFDNRTCRKLLASIAEDYRKRAPYIAYLTRCRQGLQTTQAHLERLLQRVLRDKEVANRYFTTVCVRLLLESKEKKIREFIQDFQKLTAADDKTAQVEDFLQFLYGAMAQDVIWQNASEEQLQDAQLAIERSVMNRIFKLAFYPNQDGDILRDQVLHEHIQRLSKVVTANHRALQIPEVYLREAPWPSAQSEIRTISAYKTPRDKVQCILRMCSTIMNLLSLANEDSVPGADDFVPVLVFVLIKANPPCLLSTVQYISSFYASCLSGEESYWWMQFTAAVEFIKTIDDRK

SEQ ID NO: 36679 - protein, 497 aa, Homo sapiens
  Payload ID: 7262
  Gene Symbol: GAPVD1
  Gene Name: GTPase activating protein and VPS9 domains 1
  ENSP ID: ENSP00000377646
MVKLDIHTLAHHLKQERLYVNSEKQLIQRLNADVLKTAEKLYRTAWIAKQQRINLDRLIITSAEASPAECCQHAKILEDTQFVDGYKQLGFQETAYGEFLSRLRENPRLIASSLVAGEKLNQENTQSVIYTVFTSLYGNCIMQEDESYLLQVLRYLIEFELKESDNPRRLLRRGTCAFSILFKLFSEGLFSAKLFLTATLHEPIMQLLVEDEDHLETDPNKLIERFSPSQQEKLFGEKGSDRFRQKVQEMVESNEAKLVALVNKFIGYLKQNTYCFPHSLRWIVSQMYKTLSCVDRLEVGEVRAMCTDLLLACFICPAVVNPEQYGIISDAPINEVARFNLMQVGRLLQQLAMTGSEEGDPRTKSSLGKFDKSCVAAFLDVVIGGRAVETPPLSSVNLLEGLSRTVVYITYSQLITLVNFMKSVMSGDQLREDRMALDNLLANLPPAKPGKSSSLEMTPYNTPQLSPATTPANKKNRLPIGKENFSYWSFLLNLIFH

SEQ ID NO: 36680 - protein, 1478 aa, Homo sapiens
  Payload ID: 7262
  Gene Symbol: GAPVD1
  Gene Name: GTPase activating protein and VPS9 domains 1
  Uniprot ID: Q14C86
  ENSP ID: ENSP00000377664
MVKLDIHTLAHHLKQERLYVNSEKQLIQRLNADVLKTAEKLYRTAWIAKQQRINLDRLIITSAEASPAECCQHAKILEDTQFVDGYKQLGFQETAYGEFLSRLRENPRLIASSLVAGEKLNQENTQSVIYTVFTSLYGNCIMQEDESYLLQVLRYLIEFELKESDNPRRLLRRGTCAFSILFKLFSEGLFSAKLFLTATLHEPIMQLLVEDEDHLETDPNKLIERFSPSQQEKLFGEKGSDRFRQKVQEMVESNEAKLVALVNKFIGYLKQNTYCFPHSLRWIVSQMYKTLSCVDRLEVGEVRAMCTDLLLACFICPAVVNPEQYGIISDAPINEVARFNLMQVGRLLQQLAMTGSEEGDPRTKSSLGKFDKSCVAAFLDVVIGGRAVETPPLSSVNLLEGLSRTVVYITYSQLITLVNFMKSVMSGDQLREDRMALDNLLANLPPAKPGKSSSLEMTPYNTPQLSPATTPANKKNRLPIATRSRSRTNMLMDLHMDHEGSSQETIQEVQPEEVLVISLGTGPQLTPGMMSENEVLNMQLSDGGQGDVPVDENKLHGKPDKTLRFSLCSDNLEGISEGPSNRSNSVSSLDLEGESVSELGAGPSGSNGVEALQLLEHEQATTQDNLDDKLRKFEIRDMMGLTDDRDISETVSETWSTDVLGSDFDPNIDEDRLQEIAGAAAENMLGSLLCLPGSGSVLLDPCTGSTISETTSEAWSVEVLPSDSEAPDLKQEERLQELESCSGLGSTSDDTDVREVSSRPSTPGLSVVSGISATSEDIPNKIEDLRSECSSDFGGKDSVTSPDMDEITHGAHQLTSPPSQSESLLAMFDPLSSHEGASAVVRPKVHYARPSHPPPDPPILEGAVGGNEARLPNFGSHVLTPAEMEAFKQRHSYPERLVRSRSSDIVSSVRRPMSDPSWNRRPGNEERELPPAAAIGATSLVAAPHSSSSSPSKDSSRGETEERKDSDDEKSDRNRPWWRKRFVSAMPKAPIPFRKKEKQEKDKDDLGPDRFSTLTDDPSPRLSAQAQVAEDILDKYRNAIKRTSPSDGAMANYESTGDNHDRDLSSKLLYHSDKEVMGDGESAHDSPRDEALQNISADDLPDSASQAAHPQDSAFSYRDAKKKLRLALCSADSVAFPVLTHSTRNGLPDHTDPEDNEIVCFLKVQIAEAINLQDKNLMAQLQETMRCVCRFDNRTCRKLLASIAEDYRKRAPYIAYLTRCRQGLQTTQAHLERLLQRVLRDKEVANRYFTTVCVRLLLESKEKKIREFIQDFQKLTAADDKTAQVEDFLQFLYGAMAQDVIWQNASEEQLQDAQLAIERSVMNRIFKLAFYPNQDGDILRDQVLHEHIQRLSKVVTANHRALQIPEVYLREAPWPSAQSEIRTISAYKTPRDKVQCILRMCSTIMNLLSLANEDSVPGADDFVPVLVFVLIKANPPCLLSTVQYISSFYASCLSGEESYWWMQFTAAVEFIKTIDDRK

SEQ ID NO: 36681 - protein, 1487 aa, Homo sapiens
  Payload ID: 7262
  Gene Symbol: GAPVD1
  Gene Name: GTPase activating protein and VPS9 domains 1
  Uniprot ID: Q14C86
  ENSP ID: ENSP00000377665
MVKLDIHTLAHHLKQERLYVNSEKQLIQRLNADVLKTAEKLYRTAWIAKQQRINLDRLIITSAEASPAECCQHAKILEDTQFVDGYKQLGFQETAYGEFLSRLRENPRLIASSLVAGEKLNQENTQSVIYTVFTSLYGNCIMQEDESYLLQVLRYLIEFELKESDNPRRLLRRGTCAFSILFKLFSEGLFSAKLFLTATLHEPIMQLLVEDEDHLETDPNKLIERFSPSQQEKLFGEKGSDRFRQKVQEMVESNEAKLVALVNKFIGYLKQNTYCFPHSLRWIVSQMYKTLSCVDRLEVGEVRAMCTDLLLACFICPAVVNPEQYGIISDAPINEVARFNLMQVGRLLQQLAMTGSEEGDPRTKSSLGKFDKSCVAAFLDVVIGGRAVETPPLSSVNLLEGLSRTVVYITYSQLITLVNFMKSVMSGDQLREDRMALDNLLANLPPAKPGKSSSLEMTPYNTPQLSPATTPANKKNRLPIATRSRSRTNMLMDLHMDHEGSSQETIQEVQPEEVLVISLGTGPQLTPGMMSENEVLNMQLSDGGQGDVPVDENKLHGKPDKTLRFSLCSDNLEGISEGPSNRSNSVSSLDLEGESVSELGAGPSGSNGVEALQLLEHEQATTQDNLDDKLRKFEIRDMMGLTDDRDISETVSETWSTDVLGSDFDPNIDEDRLQEIAGAAAENMLGSLLCLPGSGSVLLDPCTGSTISETTSEAWSVEVLPSDSEAPDLKQEERLQELESCSGLGSTSDDTDVREVSSRPSTPGLSVVSGISATSEDIPNKIEDLRSECSSDFGGKDSVTSPDMDEITHDFLYILQPKQHFQHIEAEADMRIQLSSSAHQLTSPPSQSESLLAMFDPLSSHEGASAVVRPKVHYARPSHPPPDPPILEGAVGGNEARLPNFGSHVLTPAEMEAFKQRHSYPERLVRSRSSDIVSSVRRPMSDPSWNRRPGNEERELPPAAAIGATSLVAAPHSSSSSPSKDSSRGETEERKDSDDEKSDRNRPWWRKRFVSAMPKAPIPFRKKEKQEKDKDDLGPDRFSTLTDDPSPRLSAQAQVAEDILDKYRNAIKRTSPSDGAMANYESTEVMGDGESAHDSPRDEALQNISADDLPDSASQAAHPQDSAFSYRDAKKKLRLALCSADSVAFPVLTHSTRNGLPDHTDPEDNEIVCFLKVQIAEAINLQDKNLMAQLQETMRCVCRFDNRTCRKLLASIAEDYRKRAPYIAYLTRCRQGLQTTQAHLERLLQRVLRDKEVANRYFTTVCVRLLLESKEKKIREFIQDFQKLTAADDKTAQVEDFLQFLYGAMAQDVIWQNASEEQLQDAQLAIERSVMNRIFKLAFYPNQDGDILRDQVLHEHIQRLSKVVTANHRALQIPEVYLREAPWPSAQSEIRTISAYKTPRDKVQCILRMCSTIMNLLSLANEDSVPGADDFVPVLVFVLIKANPPCLLSTVQYISSFYASCLSGEESYWWMQFTAAVEFIKTIDDRK

SEQ ID NO: 36682 - protein, 830 aa, Homo sapiens
  Payload ID: 7262
  Gene Symbol: GAPVD1
  Gene Name: GTPase activating protein and VPS9 domains 1
  ENSP ID: ENSP00000391251
  MOD_RES (1)..(1): Any amino acid
XLRRGTCAFSILFKLFSEGLFSAKLFLTATLHEPIMQLLVEDEDHLETDPNKLIERFSPSQQEKLFGEKGSDRFRQKVQEMVESNEAKLVALVNKFIGYLKQNTYCFPHSLRWIVSQMYKTLSCVDRLEVGEVRAMCTDLLLACFICPAVVNPEQYGIISDAPINEVARFNLMQVGRLLQQLAMTGSEEGDPRTKSSLGKFDKSCVAAFLDVVIGGRAVETPPLSSVNLLEGLSRTVVYITYSQLITLVNFMKSVMSGDQLREDRMALDNLLANLPPAKPGKSSSLEMTPYNTPQLSPATTPANKKNRLPIGQQLAAITAWDSSATNITSHITVVTPFATRSRSRTNMLMDLHMDHEGSSQETIQEVQPEEVLVISLGTGPQLTPGMMSENEVLNMQLSDGGQGDVPVDENKLHGPSNRSNSVSSLDLEGESVSELGAGPSGSNGVEALQLLEHEQATTQDNLDDKLRKFEIRDMMGLTDDRDISETVSETWSTDVLGSDFDPNIDEDRLQEIAGAAAENMLGSLLCLPGSGSVLLDPCTGSTISETTSEAWSVEVLPSDSEAPDLKQEERLQELESCSGLGSTSDDTDVREVSSRPSTPGLSVVSGISATSEDIPNKIEDLRSECSSDFGGKDSVTSPDMDEITHGAHQLTSPPSQSESLLAMFDPLSSHEGASAVVRPKVHYARPSHPPPDPPILEGAVGGNEARLPNFGSHVLTPAEMEAFKQRHSYPERLVRSRSSDIVSSVRRPMSDPSWNRRPGNEERELPPAAAIGATSLVAAPHSSSSSPSKDSSRGETEERKDSDDEKSDRNRPWWRKRFVSAMPKAPIPF

SEQ ID NO: 36683 - protein, 837 aa, Homo sapiens
  Payload ID: 7262
  Gene Symbol: GAPVD1
  Gene Name: GTPase activating protein and VPS9 domains 1
  ENSP ID: ENSP00000413082
  MOD_RES (1)..(1): Any amino acid
XNCIMQEDESYLLQVLRYLIEFELKESDNPRRLLRRGTCAFSILFKLFSEGLFSAKLFLTATLHEPIMQLLVEDEDHLETDPNKLIERFSPSQQEKLFGEKGSDRFRQKVQEMVESNEAKLVALVNKFIGYLKQNTYCFPHSLRWIVSQMYKTLSCVDRLEVGEVRAMCTDLLLACFICPAVVNPEQYGIISDAPINEVARFNLMQVGRLLQQLAMTGSEEGDPRTKSSLGKFDKSCVAAFLDVVIGGRAVETPPLSSVNLLEGLSRTVVYITYSQLITLVNFMKSVMSGDQLREDRMALDNLLANLPPAKPGKSSSLEMTPYNTPQLSPATTPANKKNRLPIATRSRSRTNMLMDLHMDHEGSSQETIQEVQPEEVLVISLGTGPQLTPGMMSENEVLNMQLSDGGQGDVPVDENKLHGKPDKTLRFSLCSDNLEGISEGPSNRSNSVSSLDLEGESVSELGAGPSGSNGVEALQLLEHEQATTQDNLDDKLRKFEIRDMMGLTDDRDISETVSETWSTDVLGSDFDPNIDEDRLQEIAGAAAENMLGSLLCLPGSGSVLLDPCTGSTISETTSEAWSVEVLPSDSEAPDLKQEERLQELESCSGLGSTSDDTDVREVSSRPSTPGLSVVSGISATSEDIPNKIEDLRSECSSDFGGKDSVTSPDMDEITHGASAVVRPKVHYARPSHPPPDPPILEGAVGGNEARLPNFGSHVLTPAEMEAFKQRHSYPERLVRSRSSDIVSSVRRPMSDPSWNRRPGNEERELPPAAAIGATSLVAAPHSSSSSPSKDSSRGETEERKDSDDEKSDRNRPWWRKRFVSAMPKAPIPFRKKEKQE

SEQ ID NO: 36684 - protein, 988 aa, Homo sapiens
  Payload ID: 7262
  Gene Symbol: GAPVD1
  Gene Name: GTPase activating protein and VPS9 domains 1
  ENSP ID: ENSP00000418747
MVKLDIHTLAHHLKQERLYVNSEKQLIQRLNADVLKTAEKLYRTAWIAKQQRINLDRLIITSAEASPAECCQHAKILEDTQFVDGYKQLGFQETAYGEFLSRLRENPRLIASSLVAGEKLNQENTQSVIYTVFTSLYGNCIMQEDESYLLQVLRYLIEFELKESDNPRRLLRRGTCAFSILFKLFSEGLFSAKLFLTATLHEPIMQLLVEDEDHLETDPNKLIERFSPSQQEKLFGEKGSDRFRQKVQEMVESNEAKLVALVNKFIGYLKQNTYCFPHSLRWIVSQMYKTLSCVDRLEVGEVRAMCTDLLLACFICPAVVNPEQYGIISDAPINEVARFNLMQVGRLLQQLAMTGSEEGDPRTKSSLGKFDKSCVAAFLDVVIGGRAVETPPLSSVNLLEGLSRTVVYITYSQLITLVNFMKSVMSGDQLREDRMALDNLLANLPPAKPGKSSSLEMTPYNTPQLSPATTPANKKNRLPIATRSRSRTNMLMDLHMDHEGSSQETIQEVQPEEVLVISLGTGPQLTPGMMSENEVLNMQLSDGGQGDVPVDENKLHGKPDKTLRFSLCSDNLEGISEGPSNRSNSVSSLDLEGESVSELGAGPSGSNGVEALQLLEHEQATTQDNLDDKLRKFEIRDMMGLTDDRDISETVSETWSTDVLGSDFDPNIDEDRLQEIAGAAAENMLGSLLCLPGSGSVLLDPCTGSTISETTSEAWSVEVLPSDSEAPDLKQEERLQELESCSGLGSTSDDTDVREVSSRPSTPGLSVVSGISATSEDIPNKIEDLRSECSSDFGGKDSVTSPDMDEITHGAHQLTSPPSQSESLLAMFDPLSSHEGASAVVRPKVHYARPSHPPPDPPILEGAVGGNEARLPNFGSHVLTPAEMEAFKQRHSYPERLVRSRSSDIVSSVRRPMSDPSWNRRPGNEERELPPAAAIGATSLVAAPHSSSSSPSKDSSRGETEERKDSDDEKSDRNRPWWRKRFVSAMPK

SEQ ID NO: 36685 - protein, 117 aa, Homo sapiens
  Payload ID: 7262
  Gene Symbol: GAPVD1
  Gene Name: GTPase activating protein and VPS9 domains 1
  ENSP ID: ENSP00000418969
MVKLDIHTLAHHLKQERLYVNSEKQLIQRLNADVLKTAEKLYRTAWIAKQQRINLDRLIITSAEASPAECCQHAKILEDTQFVDGYKQLGFQETAYGEFLSRLRENPRLIASSLVAG

SEQ ID NO: 36686 - protein, 1478 aa, Homo sapiens; identical to SEQ ID NO: 36680
  Payload ID: 7262
  Gene Symbol: GAPVD1
  Gene Name: GTPase activating protein and VPS9 domains 1
  Uniprot ID: Q14C86
  ENSP ID: ENSP00000419063

SEQ ID NO: 36687 - protein, 1433 aa, Homo sapiens
  Payload ID: 7262
  Gene Symbol: GAPVD1
  Gene Name: GTPase activating protein and VPS9 domains 1
  Uniprot ID: Q14C86
  ENSP ID: ENSP00000419767
MVKLDIHTLAHHLKQERLYVNSEKQLIQRLNADVLKTAEKLYRTAWIAKQQRINLDRLIITSAEASPAECCQHAKILEDTQFVDGYKQLGFQETAYGEFLSRLRENPRLIASSLVAGEKLNQENTQSVIYTVFTSLYGNCIMQEDESYLLQVLRYLIEFELKESDNPRRLLRRGTCAFSILFKLFSEGLFSAKLFLTATLHEPIMQLLVEDEDHLETDPNKLIERFSPSQQEKLFGEKGSDRFRQKVQEMVESNEAKLVALVNKFIGYLKQNTYCFPHSLRWIVSQMYKTLSCVDRLEVGEVRAMCTDLLLACFICPAVVNPEQYGIISDAPINEVARFNLMQVGRLLQQLAMTGSEEGDPRTKSSLGKFDKSCVAAFLDVVIGGRAVETPPLSSVNLLEGLSRTVVYITYSQLITLVNFMKSVMSGDQLREDRMALDNLLANLPPAKPGKSSSLEMTPYNTPQLSPATTPANKKNRLPIATRSRSRTNMLMDLHMDHEGSSQETIQEVQPEEVLVISLGTGPQLTPGMMSENEVLNMQLSDGGQGDVPVDENKLHGKPDKTLRFSLCSDNLEGISEGPSNRSNSVSSLDLEGESVSELGAGPSGSNGVEALQLLEHEQATTQDNLDDKLRKFEIRDMMGLTDDRDISETVSETWSTDVLGSDFDPNIDEDRLQEIAGAAAENMLGSLLCLPGSGSVLLDPCTGSTISETTSEAWSVEVLPSDSEAPDLKQEERLQELESCSGLGSTSDDTDVREVSSRPSTPGLSVVSGISATSEDIPNKIEDLRSECSSDFGGKDSVTSPDMDEITHGAHQLTSPPSQSESLLAMFDPLSSHEGASAVVRPKVHYARPSHPPPDPPILEGAVGGNEARLPNFGSHVLTPAEMEAFKQRHSYPERLVRSRSSDIVSSVRRPMSDPSWNRRPGNEERELPPAAAIGATSLVAAPHSSSSSPSKDSSRGETEERKDSDDEKSDRNRPWWRKRFVSAMPKDDPSPRLSAQAQVAEDILDKYRNAIKRTSPSDGAMANYESTEVMGDGESAHDSPRDEALQNISADDLPDSASQAAHPQDSAFSYRDAKKKLRLALCSADSVAFPVLTHSTRNGLPDHTDPEDNEIVCFLKVQIAEAINLQDKNLMAQLQETMRCVCRFDNRTCRKLLASIAEDYRKRAPYIAYLTRCRQGLQTTQAHLERLLQRVLRDKEVANRYFTTVCVRLLLESKEKKIREFIQDFQKLTAADDKTAQVEDFLQFLYGAMAQDVIWQNASEEQLQDAQLAIERSVMNRIFKLAFYPNQDGDILRDQVLHEHIQRLSKVVTANHRALQIPEVYLREAPWPSAQSEIRTISAYKTPRDKVQCILRMCSTIMNLLSLANEDSVPGADDFVPVLVFVLIKANPPCLLSTVQYISSFYASCLSGEESYWWMQFTAAVEFIKTIDDRK

SEQ ID NO: 36688 - protein, 756 aa, Homo sapiens
  Payload ID: 7262
  Gene Symbol: GAPVD1
  Gene Name: GTPase activating protein and VPS9 domains 1
  ENSP ID: ENSP00000419799
MVKLDIHTLAHHLKQERLYVNSEKQLIQRLNADVLKTAEKLYRTAWIAKQQRINLDRLIITSAEASPAECCQHAKILEDTQFVDGYKQLGFQETAYGEFLSRLRENPRLIASSLVAGEKLNQENTQSVIYTVFTSLYGNCIMQEDESYLLQVLRYLIEFELKESDNPRRLLRRGTCAFSILFKLFSEGLFSAKLFLTATLHEPIMQLLVEDEDHLETDPNKLIERFSPSQQEKLFGEKGSDRFRQKVQEMVESNEAKLVALVNKFIGYLKQNTYCFPHSLRWIVSQMYKTLSCVDRLEVGEVRAMCTDLLLACFICPAVVNPEQYGIISDAPINEVARFNLMQVGRLLQQLAMTGSEEGDPRTKSSLGKFDKSCVAAFLDVVIGGRAVETPPLSSVNLLEGLSRTVVYITYSQLITLVNFMKSVMSGDQLREDRMALDNLLANLPPAKPGKSSSLEMTPYNTPQLSPATTPANKKNRLPIATRSRSRTNMLMDLHMDHEGSSQETIQEVQPEEVLVISLGTGPQLTPGMMSENEVLNMQLSDGGQGDVPVDENKLHGKPDKTLRFSLCSDNLEGISEGPSNRSNSVSSLDLEGESVSELGAGPSGSNGVEALQLLEHEQATTQDNLDDKLRKFEIRDMMGLTDDRDISETVSETWSTDVLGSDFDPNIDEDRLQEIAGAAAENMLGSLLCLPGSGSVLLDPCTGSTISETTSEAWSVEVLPSDSEAPDLKQEERLQELESCSGLGSTSDDTDVREA

SEQ ID NO: 36689 - protein, 802 aa, Homo sapiens
  Payload ID: 7263
  Gene Symbol: GARNL3
  Gene Name: GTPase activating Rap/RanGAP domain-like 3
  ENSP ID: ENSP00000362484
MKHFCSSSVSEDLGCRRGDFSRKHYGSVELLISSDADGAIQRAGRFRVENGSSDENATALPGTWRRTDVHLENPEYHTRWYFKYFLGQVHQNYIGNDAEKSPFFLSVTLSDQNNQRVPQYRAILWRKTGTQKICLPYSPTKTLSVKSILSAMNLDKFEKGPREIFHPEIQKDLLVLEEQEGSVNFKFGVLFAKDGQLTDDEMFSNEIGSEPFQKFLNLLGDTITLKGWTGYRGGLDTKNDTTGIHSVYTVYQGHEIMFHVSTMLPYSKENKQQVERKRHIGNDIVTIVFQEGEESSPAFKPSMIRSHFTHIFALVRYNQQNDNYRLKIFSEESVPLFGPPLPTPPVFTDHQEFRDFLLVKLINGEKATLETPTFAQKRRRTLDMLIRSLHQDLMPDLHKNMLNRRSFSDVLPESPKSARKKEEARQAEFVRIGQALKLKSIVRGDAPSSLAASGICKKEPWEPQCFCSNFPHEAVCADPWGQALLVSTDAGVLLVDDDLPSVPVFDRTLPVKQMHVLETLDLLVLRADKGKDARLFVFRLSALQKGLEGKQAGKSRSDCRENKLEKTKGCHLYAINTHHSRELRIVVAIRNKLLLITRKHNKPSGVTSTSLLSPLSESPVEEFQYIREICLSDSPMVMTLVDGPAEESDNLICVAYRHQFDVVNESTGEAFRLHHVEANRVNFVAAIDVYEDGEAGLLLCYNYSCIYKKVCPFNGGSFLVQPSASDFQFCWNQAPYAIVCAFPYLLAFTTDSMEIRLVVNGNLVHTAVVPQLQLVASRVKFNQKICTRFHLETSWAEASNDL

SEQ ID NO: 36690 - protein, 1013 aa, Homo sapiens
  Payload ID: 7263
  Gene Symbol: GARNL3
  Gene Name: GTPase activating Rap/RanGAP domain-like 3
  Uniprot ID: Q5VVW2
  ENSP ID: ENSP00000362485
MVVDFCRRFVARSLCIILMKHFCSSSVSEDLGCRRGDFSRKHYGSVELLISSDADGAIQRAGRFRVENGSSDENATALPGTWRRTDVHLENPEYHTRWYFKYFLGQVHQNYIGNDAEKSPFFLSVTLSDQNNQRVPQYRAILWRKTGTQKICLPYSPTKTLSVKSILSAMNLDKFEKGPREIFHPEIQKDLLVLEEQEGSVNFKFGVLFAKDGQLTDDEMFSNEIGSEPFQKFLNLLGDTITLKGWTGYRGGLDTKNDTTGIHSVYTVYQGHEIMFHVSTMLPYSKENKQQVERKRHIGNDIVTIVFQEGEESSPAFKPSMIRSHFTHIFALVRYNQQNDNYRLKIFSEESVPLFGPPLPTPPVFTDHQEFRDFLLVKLINGEKATLETPTFAQKRRRTLDMLIRSLHQDLMPDLHKNMLNRRSFSDVLPESPKSARKKEEARQAEFVRIGQALKLKSIVRGDAPSSLAASGICKKEPWEPQCFCSNFPHEAVCADPWGQALLVSTDAGVLLVDDDLPSVPVFDRTLPVKQMHVLETLDLLVLRADKGKDARLFVFRLSALQKGLEGKQAGKSRSDCRENKLEKTKGCHLYAINTHHSRELRIVVAIRNKLLLITRKHNKPSGVTSTSLLSPLSESPVEEFQYIREICLSDSPMVMTLVDGPAEESDNLICVAYRHQFDVVNESTGEAFRLHHVEANRVNFVAAIDVYEDGEAGLLLCYNYSCIYKKVCPFNGGSFLVQPSASDFQFCWNQAPYAIVCAFPYLLAFTTDSMEIRLVVNGNLVHTAVVPQLQLVASRSDIYFTATAAVNEVSSGGSSKGASARNSPQTPPGRDTPVFPSSLGEGEIQSKNLYKIPLRNLVGRSIERPLKSPLVSKVITPPTPISVGLAAIPVTHSLSLSRMEIKEIASRTRRELLGLSDEGGPKSEGAPKAKSKPRKRLEESQGGPKPGAVRSSSSDRIPSGSLESASTSEANPEGHSASSDQDPVADREGSPVSGSSPFQLTAFSDEDIIDLK

SEQ ID NO: 36691 - protein, 48 aa, Homo sapiens
  Payload ID: 7263
  Gene Symbol: GARNL3
  Gene Name: GTPase activating Rap/RanGAP domain-like 3
  ENSP ID: ENSP00000389679
MDPLTKVPCGSQIAQTILWKAKSSLSFGIQPLQTWPTKDPELESQVNL

SEQ ID NO: 36692 - protein, 991 aa, Homo sapiens
  Payload ID: 7263
  Gene Symbol: GARNL3
  Gene Name: GTPase activating Rap/RanGAP domain-like 3
  Uniprot ID: Q5VVW2
  ENSP ID: ENSP00000396205
MKSSVSEDLGCRRGDFSRKHYGSVELLISSDADGAIQRAGRFRVENGSSDENATALPGTWRRTDVHLENPEYHTRWYFKYFLGQVHQNYIGNDAEKSPFFLSVTLSDQNNQRVPQYRAILWRKTGTQKICLPYSPTKTLSVKSILSAMNLDKFEKGPREIFHPEIQKDLLVLEEQEGSVNFKFGVLFAKDGQLTDDEMFSNEIGSEPFQKFLNLLGDTITLKGWTGYRGGLDTKNDTTGIHSVYTVYQGHEIMFHVSTMLPYSKENKQQVERKRHIGNDIVTIVFQEGEESSPAFKPSMIRSHFTHIFALVRYNQQNDNYRLKIFSEESVPLFGPPLPTPPVFTDHQEFRDFLLVKLINGEKATLETPTFAQKRRRTLDMLIRSLHQDLMPDLHKNMLNRRSFSDVLPESPKSARKKEEARQAEFVRIGQALKLKSIVRGDAPSSLAASGICKKEPWEPQCFCSNFPHEAVCADPWGQALLVSTDAGVLLVDDDLPSVPVFDRTLPVKQMHVLETLDLLVLRADKGKDARLFVFRLSALQKGLEGKQAGKSRSDCRENKLEKTKGCHLYAINTHHSRELRIVVAIRNKLLLITRKHNKPSGVTSTSLLSPLSESPVEEFQYIREICLSDSPMVMTLVDGPAEESDNLICVAYRHQFDVVNESTGEAFRLHHVEANRVNFVAAIDVYEDGEAGLLLCYNYSCIYKKVCPFNGGSFLVQPSASDFQFCWNQAPYAIVCAFPYLLAFTTDSMEIRLVVNGNLVHTAVVPQLQLVASRSDIYFTATAAVNEVSSGGSSKGASARNSPQTPPGRDTPVFPSSLGEGEIQSKNLYKIPLRNLVGRSIERPLKSPLVSKVITPPTPISVGLAAIPVTHSLSLSRMEIKEIASRTRRELLGLSDEGGPKSEGAPKAKSKPRKRLEESQGGPKPGAVRSSSSDRIPSGSLESASTSEANPEGHSASSDQDPVADREGSPVSGSSPFQLTAFSDEDIIDLK

SEQ ID NO: 36693 - protein, 48 aa, Homo sapiens; identical to SEQ ID NO: 36691
  Payload ID: 7263
  Gene Symbol: GARNL3
  Gene Name: GTPase activating Rap/RanGAP domain-like 3
  ENSP ID: ENSP00000396319

SEQ ID NO: 36694 - protein, 88 aa, Homo sapiens
  Payload ID: 7263
  Gene Symbol: GARNL3
  Gene Name: GTPase activating Rap/RanGAP domain-like 3
  ENSP ID: ENSP00000397246
MDPLTKVPCGSQIAQTILWKAKSSLSFGIQPLQTWPTKDPELESQVNLLFPVMLMEPSKGLEDSEWKMALQMRMQLPCLVLGEEQTCT

SEQ ID NO: 36695 - protein, 267 aa, Homo sapiens
  Payload ID: 7263
  Gene Symbol: GARNL3
  Gene Name: GTPase activating Rap/RanGAP domain-like 3
  ENSP ID: ENSP00000400579
MDPLTKVPCGSQIAQTILWKAKSSLSFGIQPLQTWPTKDPELESQVNLSVSEDLGCRRGDFSRKHYGSVELLISSDADGAIQRAGRFRVENGSSDENATALPGTWRRTDVHLENPEYHTRWYFKYFLGQVHQNYIGNDAEKSPFFLSVTLSDQNNQRVPQYRAILWRKTGTQKICLPYSPTKTLSVKSILSAMNLDKFEKGPREIFHPEIQKDLLVLEEQEGSVNFKFGVLFAKDGQLTDDEMFSNEIGSEPFQKFLNLLGDTITLK

SEQ ID NO: 36696 - protein, 139 aa, Homo sapiens
  Payload ID: 7263
  Gene Symbol: GARNL3
  Gene Name: GTPase activating Rap/RanGAP domain-like 3
  ENSP ID: ENSP00000411160
MDPLTKVPCGSQIAQTILWKAKSSLSFGIQPLQTWPTKDPELESQVNLSVSEDLGCRRGDFSRKHYGSVELLISSDADGAIQRAGRFRVENGSSDENATALPGTWRRTDVHLENPEYHTRWYFKYFLGQVHQNYIGNDA

SEQ ID NO: 36697 - protein, 167 aa, Homo sapiens
  Payload ID: 7263
  Gene Symbol: GARNL3
  Gene Name: GTPase activating Rap/RanGAP domain-like 3
  ENSP ID: ENSP00000411329
MKSSVSEDLGCRRGDFSRKHYGSVELLISSDADGAIQRAGRFRVENGSSDENATALPGTWRRTDVHLENPEYHTRWYFKYFLGQVHQNYIGNDAEKSPFFLSVTLSDQNNQRVPQYRAILWRKTGTQKICLPYSPTKTLSVKSILSAMNLDKFEKGPREIFHPEIQK

SEQ ID NO: 36698 - protein, 110 aa, Homo sapiens
  Payload ID: 7263
  Gene Symbol: GARNL3
  Gene Name: GTPase activating Rap/RanGAP domain-like 3
  ENSP ID: ENSP00000416473
MDPLTKVPCGSQIAQTILWKAKSSLSFGIQPLQTWPTKDPELESQVNLSVSEDLGCRRGDFSRKHYGSVELLISSDADGAIQRAGRFRVENGSSDENATALPGTWRRTDV

SEQ ID NO: 36699 - protein, 81 aa, Homo sapiens
  Payload ID: 7263
  Gene Symbol: GARNL3
  Gene Name: GTPase activating Rap/RanGAP domain-like 3
  ENSP ID: ENSP00000474589
  MOD_RES (1)..(1): Any amino acid
XMPDLHKNMLNRRSFSDVLPESPKSARKKEEARQAEFVRIGQALKLKSIVRGDAPSSLAASGICKKEMTFHQCPCLTELCQ

SEQ ID NO: 36700 - protein, 306 aa, Homo sapiens
  Payload ID: 7264
  Gene Symbol: GIMAP1
  Gene Name: GTPase, IMAP family member 1
  Uniprot ID: Q8WWP7
  ENSP ID: ENSP00000302833
MGGRKMATDEENVYGLEENAQSRQESTRRLILVGRTGAGKSATGNSILGQRRFFSRLGATSVTRACTTGSRRWDKCHVEVVDTPDIFSSQVSKTDPGCEERGHCYLLSAPGPHALLLVTQLGRFTAQDQQAVRQVRDMFGEDVLKWMVIVFTRKEDLAGGSLHDYVSNTENRALRELVAECGGRVCAFDNRATGREQEAQVEQLLGMVEGLVLEHKGAHYSNEVYELAQVLRWAGPEERLRRVAERVAARVQRRPWGAWLSARLWKWLKSPRSWRLGLALLLGGALLFWVLLHRRWSEAVAEVGPD

SEQ ID NO: 36701 - protein, 337 aa, Homo sapiens
  Payload ID: 7265
  Gene Symbol: GIMAP2
  Gene Name: GTPase, IMAP family member 2
  Uniprot ID: Q9UG22
  ENSP ID: ENSP00000223293
MDQNEHSHWGPHAKGQCASRSELRIILVGKTGTGKSAAGNSILRKQAFESKLGSQTLTKTCSKSQGSWGNREIVIIDTPDMFSWKDHCEALYKEVQRCYLLSAPGPHVLLLVTQLGRYTSQDQQAAQRVKEIFGEDAMGHTIVLFTHKEDLNGGSLMDYMHDSDNKALSKLVAACGGRICAFNNRAEGSNQDDQVKELMDCIEDLLMEKNGDHYTNGLYSLIQRSKCGPVGSDERVKEFKQSLIKYMETQRSYTALAEANCLKGALIKTQLCVLFCIQLFLRLIILWLCILHSMCNLFCCLLFSMCNLFCSLLFIIPKKLMIFLRTVIRLERKTPRL

SEQ ID NO: 36702 - protein, 43 aa, Homo sapiens
  Payload ID: 7265
  Gene Symbol: GIMAP2
  Gene Name: GTPase, IMAP family member 2
  ENSP ID: ENSP00000420423
MDQNEHSHWGERKVKRAIWLPLSKLQRGVSGAAWLLFSEYRNV

SEQ ID NO: 36703 - protein, 329 aa, Homo sapiens
  Payload ID: 7266
  Gene Symbol: GIMAP4
  Gene Name: GTPase, IMAP family member 4
  Uniprot ID: Q9NUV9
  ENSP ID: ENSP00000255945
MAAQYGSMSFNPSTPGASYGPGRQEPRNSQLRIVLVGKTGAGKSATGNSILGRKVFHSGTAAKSITKKCEKRSSSWKETELVVVDTPGIFDTEVPNAETSKEIIRCILLTSPGPHALLLVVPLGRYTEEEHKATEKILKMFGERARSFMILIFTRKDDLGDTNLHDYLREAPEDIQDLMDIFGDRYCALNNKATGAEQEAQRAQLLGLIQRVVRENKEGCYTNRMYQRAEEEIQKQTQAMQELHRVELEREKARIREEYEEKIRKLEDKVEQEKRKKQMEKKLAEQEAHYAVRQQRARTEVESKDGILELIMTALQIASFILLRLFAED

SEQ ID NO: 36704 - protein, 151 aa, Homo sapiens
  Payload ID: 7266
  Gene Symbol: GIMAP4
  Gene Name: GTPase, IMAP family member 4
  ENSP ID: ENSP00000418615
MAAQYGSMSFNPSTPGASYGERAFSAPQTRLQGGPGRQEPRNSQLRIVLVGKTGAGKSATGNSILGRKVFHSGTAAKSITKKCEKRSSSWKETELVVVDTPGIFDTEVPNAETSKEIIRCILLTSPGPHALLLVVPLGRYTEEEHKATEKI

SEQ ID NO: 36705 - protein, 343 aa, Homo sapiens
  Payload ID: 7266
  Gene Symbol: GIMAP4
  Gene Name: GTPase, IMAP family member 4
  ENSP ID: ENSP00000419545
MAAQYGSMSFNPSTPGASYGERAFSAPQTRLQGGPGRQEPRNSQLRIVLVGKTGAGKSATGNSILGRKVFHSGTAAKSITKKCEKRSSSWKETELVVVDTPGIFDTEVPNAETSKEIIRCILLTSPGPHALLLVVPLGRYTEEEHKATEKILKMFGERARSFMILIFTRKDDLGDTNLHDYLREAPEDIQDLMDIFGDRYCALNNKATGAEQEAQRAQLLGLIQRVVRENKEGCYTNRMYQRAEEEIQKQTQAMQELHRVELEREKARIREEYEEKIRKLEDKVEQEKRKKQMEKKLAEQEAHYAVRQQRARTEVESKDGILELIMTALQIASFILLRLFAED

SEQ ID NO: 36706 - protein, 307 aa, Homo sapiens
  Payload ID: 7267
  Gene Symbol: GIMAP5
  Gene Name: GTPase, IMAP family member 5
  Uniprot ID: Q96F15
  ENSP ID: ENSP00000351473
MGGFQRGKYGTMAEGRSEDNLSATPPALRIILVGKTGCGKSATGNSILGQPVFESKLRAQSVTRTCQVKTGTWNGRKVLVVDTPSIFESQADTQELYKNIGDCYLLSAPGPHVLLLVIQLGRFTAQDTVAIRKVKEVFGTGAMRHVVILFTHKEDLGGQALDDYVANTDNCSLKDLVRECERRYCAFNNWGSVEEQRQQQAELLAVIERLGREREGSFHSNDLFLDAQLLQRTGAGACQEDYRQYQAKVEWQVEKHKQELRENESNWAYKALLRVKHLMLLHYEIFVFLLLCSILFFIIFLFIFHYI

SEQ ID NO: 36707 - protein, 307 aa, Homo sapiens; identical to SEQ ID NO: 36706
  Payload ID: 7267
  Gene Symbol: GIMAP5
  Gene Name: GTPase, IMAP family member 5
  ENSP ID: ENSP00000487840

SEQ ID NO: 36708 - protein, 292 aa, Homo sapiens
  Payload ID: 7268
  Gene Symbol: GIMAP6
  Gene Name: GTPase, IMAP family member 6
  Uniprot ID: Q6P9H5
  ENSP ID: ENSP00000330374
MEEEEYEQIPQENPPEELSQDPVLELSGGLREKEQKTPRRLRLILMGKTGSGKSATGNSILGRDVFESKLSTRPVTKTSQRRSREWAGKELEVIDTPNILSPQVSPEVADAICQAIVLSAPGPHAVLLVTQLGRFTDEDQQVVRRLQEVFGVGVLGHTILVFTRKEDLAGGSLEDYVRETNNQALAWLDVTLARRHCGFNNRAQGEEQEAQLRELMEKVEAIMWENEGDYYSNKAYQYTQQNFRLKELQERQVSQGQGSEDVPGEESWLEGLSQIQKESEEAHRCLLGKADL

SEQ ID NO: 36709 - protein, 62 aa, Homo sapiens
  Payload ID: 7268
  Gene Symbol: GIMAP6
  Gene Name: GTPase, IMAP family member 6
  Uniprot ID: Q6P9H5
  ENSP ID: ENSP00000418304
MEEEEYEQIPQENPPEELSQDPVLELSGGLARGGRRYLPSHRLIRPRAPRRAPGDTTGPVHG

SEQ ID NO: 36710 - protein, 362 aa, Homo sapiens
  Payload ID: 7268
  Gene Symbol: GIMAP6
  Gene Name: GTPase, IMAP family member 6
  ENSP ID: ENSP00000479580
MEEEEYEQIPQENPPEELSQDPVLELSGGSALALGENVQPHLQGCGPRMVAQRWFQGRCWSFTICPCSLGVHPEAPGDDKMGYMGPYPSSLCFLWIFLGLREKEQKTPRRLRLILMGKTGSGKSATGNSILGRDVFESKLSTRPVTKTSQRRSREWAGKELEVIDTPNILSPQVSPEVADAICQAIVLSAPGPHAVLLVTQLGRFTDEDQQVVRRLQEVFGVGVLGHTILVFTRKEDLAGGSLEDYVRETNNQALAWLDVTLARRHCGFNNRAQGEEQEAQLRELMEKVEAIMWENEGDYYSNKAYQYTQQNFRLKELQERQVSQGQGSEDVPGEESWLEGLSQIQKESEEAHRCLLGKADL

SEQ ID NO: 36711 - protein, 300 aa, Homo sapiens
  Payload ID: 7269
  Gene Symbol: GIMAP7
  Gene Name: GTPase, IMAP family member 7
  Uniprot ID: Q8NHV1
  ENSP ID: ENSP00000315474
MAESEDRSLRIVLVGKTGSGKSATANTILGEEIFDSRIAAQAVTKNCQKASREWQGRDLLVVDTPGLFDTKESLDTTCKEISRCIISSCPGPHAIVLVLLLGRYTEEEQKTVALIKAVFGKSAMKHMVILFTRKEELEGQSFHDFIADADVGLKSIVKECGNRCCAFSNSKKTSKAEKESQVQELVELIEKMVQCNEGAYFSDDIYKDTEERLKQREEVLRKIYTDQLNEEIKLVEEDKHKSEEEKEKEIKLLKLKYDEKIKNIREEAERNIFKDVFNRIWKMLSEIWHRFLSKCKFYSS

SEQ ID NO: 36712 - protein, 665 aa, Homo sapiens
  Payload ID: 7270
  Gene Symbol: GIMAP8
  Gene Name: GTPase, IMAP family member 8
  Uniprot ID: Q8ND71
  ENSP ID: ENSP00000305107
MSEQSCQMSELRLLLLGKCRSGKSATGNAILGKHVFKSKFSDQTVIKMCQRESWVLRERKVVVIDTPDLFSSIACAEDKQRNIQHCLELSAPSLHALLLVIAIGHFTREDEETAKGIQQVFGAEARRHIIIVFTRKDDLGDDLLQDFIEKNKPLKQLVQDYEGRYCIFNNKTNSKDEQITQVLELLRKVESLVNTNGGPYHVNFKTEGSRFQDCVNEAASQEGDKPQGPRERQLQSTGPEQNPGTSELTVLLVGKRGAGKSAAGNSILGRQAFQTGFSEQSVTQSFLSESRSWRKKKVSIIDAPDISSLKNIDSEVRKHICTGPHAFLLVTPLGFYTKNDEAVLSTIQNNFGEKFFEYMIILLTRKEDLGDQDLDTFLRNSNKALYGLIQKCKNRYSAFNYRATGEEEQRQADELLEKIESMVHQNGNKHCVFREKETLNIVLVGRSGTGKSATGNSILGSLVFTSRLRAQPVTKTSQSGRRTWDGQEVVVVDTPSFNQMLDVEKDPSRLEEEVKRCLSCCEKGDTFFVLVFQLGRFTEEDKTAVAKLEAIFGADFTKYAIMLFTRKEDLGAGNLEDFMKNSDNKALRRIFKKCGRRVCAFNNKETGQAQETQVKALLTKVNDLRKESGWSGYPHTQENVSKLIKNVQEMSQAEKLLKNLIGILQ

SEQ ID NO: 36713 - protein, 387 aa, Homo sapiens
  Payload ID: 7271
  Gene Symbol: GTPBP10
  Gene Name: GTP-binding protein 10 (putative)
  Uniprot ID: A4D1E9
  ENSP ID: ENSP00000222511
MVHCSCVLFRKYGNFIDKLRLFTRGGSGGMGYPRLGGEGGKGGDVWVVAQNRMTLKQLKDRYPRKRFVAGVGANSKISALKGSKGKDCEIPVPVGISVTDENGKIIGELNKENDRILVAQGGLGGKLLTNFLPLKGQKRIIHLDLKLIADVGLVGFPNAGKSSLLSCVSHAKPAIADYAFTTLKPELGKIMYSDFKQISVADLPGLIEGAHMNKGMGHKFLKHIERTRQLLFVVDISGFQLSSHTQYRTAFETIILLTKELELYKEELQTKPALLAVNKMDLPDAQDKFHELMSQLQNPKDFLHLFEKNMIPERTVEFQHIIPISAVTGEGIEELKNCIRKSLDEQANQENDALHKKQLLNLWISDTMSSTEPPSKHAVTTSKMDII

SEQ ID NO: 36714 - protein, 308 aa, Homo sapiens
  Payload ID: 7271
  Gene Symbol: GTPBP10
  Gene Name: GTP-binding protein 10 (putative)
  Uniprot ID: A4D1E9
  ENSP ID: ENSP00000257659
MVHCSCVLFRKYGNFIDKLRLFTRGGSGGMGYPRLGGEGGKGGDVWVVAQNRMTLKQLKDRYPRKRFVAGVGANSKFPNAGKSSLLSCVSHAKPAIADYAFTTLKPELGKIMYSDFKQISVADLPGLIEGAHMNKGMGHKFLKHIERTRQLLFVVDISGFQLSSHTQYRTAFETIILLTKELELYKEELQTKPALLAVNKMDLPDAQDKFHELMSQLQNPKDFLHLFEKNMIPERTVEFQHIIPISAVTGEGIEELKNCIRKSLDEQANQENDALHKKQLLNLWISDTMSSTEPPSKHAVTTSKMDII

SEQ ID NO: 36715 - protein, 116 aa, Homo sapiens
  Payload ID: 7271
  Gene Symbol: GTPBP10
  Gene Name: GTP-binding protein 10 (putative)
  Uniprot ID: A4D1E9
  ENSP ID: ENSP00000369398
MVHCSCVLFRKYGNFIDKLRLFTRGGSGGMGYPRLGGEGGKGGDVWVVAQNRMTLKQLKDRYPRKRFVAGVGANSKISALKGSKGKDCEIPVPVGISVTDENGKIIDSQMLENPLC

SEQ ID NO: 36716 - protein, 236 aa, Homo sapiens
  Payload ID: 7271
  Gene Symbol: GTPBP10
  Gene Name: GTP-binding protein 10 (putative)
  ENSP ID: ENSP00000389510
MRTVSLCHPDWSALASSWLTAASTSWAQYGNFIDKLRLFTRGGSGGMGYPRLGGEGGKGGDVWVVAQNRMTLKQLKDRYPRKRFVAGVGANSKISALKGSKGKDCEIPVPVGISVTDENGKIIGELNKENDRILVAQGGLGGKLLTNFLPLKGQKRIIHLDLKLIADVGLVGFPNAGKSSLLSCVSHAKPAIADYAFTTLKPELGKIMYSDFKQISVADLPGLIEGAHMNKGMGHK

SEQ ID NO: 36717 - protein, 210 aa, Homo sapiens
  Payload ID: 7271
  Gene Symbol: GTPBP10
  Gene Name: GTP-binding protein 10 (putative)
  ENSP ID: ENSP00000405697
MRYGNFIDKLRLFTRGGSGGMGYPRLGGEGGKGGDVWVVAQNRMTLKQLKDRYPRKRFVAGVGANSKISALKGSKGKDCEIPVPVGISVTDENGKIIGELNKENDRILVAQGGLGGKLLTNFLPLKGQKRIIHLDLKLIADVGLVGFPNAGKSSLLSCVSHAKPAIADYAFTTLKPELGKIMYSDFKQISVADLPGLIEGAHMNKGMGHK

SEQ ID NO: 36718 - protein, 107 aa, Homo sapiens
  Payload ID: 7271
  Gene Symbol: GTPBP10
  Gene Name: GTP-binding protein 10 (putative)
  ENSP ID: ENSP00000410311
MRYGNFIDKLRLFTRGGSGGMGYPRLGGEGGKGGDVWVVAQNRMTLKQLKDRYPRKRFVAGVGANSKISALKGSKGKDCEIPVPVGISVTDENGKIIDSQMLENPLC

SEQ ID NO: 36719 - protein, 70 aa, Homo sapiens
  Payload ID: 7271
  Gene Symbol: GTPBP10
  Gene Name: GTP-binding protein 10 (putative)
  ENSP ID: ENSP00000411091
MRYGNFIDKLRLFTRGGSGGMGYPRLGGEGGKGGDVWVVAQNRMTLKQLKDRYPRKRFVAGVGANSKRTQ

SEQ ID NO: 36720 - protein, 242 aa, Homo sapiens
  Payload ID: 7271
  Gene Symbol: GTPBP10
  Gene Name: GTP-binding protein 10 (putative)
  ENSP ID: ENSP00000416596
MVHCSCVLFRKYGNFIDKLRLFTRGGSGGMGYPRLGGEGGKGGDVWVVAQNRMTLKQLKDRYPRKRFVAGVGANSKISALKGSKGKDCEIPVPVGISVTDENGKIIVTTLKPELGKIMYSDFKQISVADLPGLIEGAHMNKGMGHKFLKHIERTRQLLFVVDISGFQLSSHTQYRTAFETIILLTKELELYKEELQTKPALLAVNKMDLPDAQDKFHELMSQLQNPKDFLHLFEKNMIPERT

SEQ ID NO: 36721 - protein, 79 aa, Homo sapiens
  Payload ID: 7271
  Gene Symbol: GTPBP10
  Gene Name: GTP-binding protein 10 (putative)
  ENSP ID: ENSP00000416713
MVHCSCVLFRKYGNFIDKLRLFTRGGSGGMGYPRLGGEGGKGGDVWVVAQNRMTLKQLKDRYPRKRFVAGVGANSKRTQ

SEQ ID NO: 36722 - protein, 121 aa, Homo sapiens
  Payload ID: 7272
  Gene Symbol: GTPBP8
  Gene Name: GTP-binding protein 8 (putative)
  Uniprot ID: Q8N3Z3
  ENSP ID: ENSP00000295864
MAAPGLRLGAGRLFEMPAVLERLSRYNSTSQAFAEVLRLPKQQLRKLLYPLQEVERFLAPYGRQDLHLRIFDPSPEDIARADNIFTATERNRIDYVSSAVRIDHAPDLPRPELEENIFISG

SEQ ID NO: 36723 - protein, 251 aa, Homo sapiens
  Payload ID: 7272
  Gene Symbol: GTPBP8
  Gene Name: GTP-binding protein 8 (putative)
  Uniprot ID: Q8N3Z3
  ENSP ID: ENSP00000373175
MAAPGLRLGAGRLFEMPAVLERLSRYNSTSQAFAEVLRLPKQQLRKLLYPLQEVERFLAPYGRQDLHLRIFDPSPEDIARADNIFTATERNRIDYVSSAVRIDHAPDLPRPEGHTKKMNFFKVGKHFTVVDMPGYGFRAPEDFVDMVETYLKERRNLKRTFLLVDSVVGIQKTDNIAIEMCEEFALPYVIVLTKIDKSSKGHLLKQVLQIQKFVNMKTQGCFPQLFPVSAVTFSGIHLLRCFIASVTGSLD

SEQ ID NO: 36724 - protein, 284 aa, Homo sapiens
  Payload ID: 7272
  Gene Symbol: GTPBP8
  Gene Name: GTP-binding protein 8 (putative)
  Uniprot ID: Q8N3Z3
  ENSP ID: ENSP00000373176
MAAPGLRLGAGRLFEMPAVLERLSRYNSTSQAFAEVLRLPKQQLRKLLYPLQEVERFLAPYGRQDLHLRIFDPSPEDIARADNIFTATERNRIDYVSSAVRIDHAPDLPRPEVCFIGRSNVGKSSLIKALFSLAPEVEVRVSKKPGHTKKMNFFKVGKHFTVVDMPGYGFRAPEDFVDMVETYLKERRNLKRTFLLVDSVVGIQKTDNIAIEMCEEFALPYVIVLTKIDKSSKGHLLKQVLQIQKFVNMKTQGCFPQLFPVSAVTFSGIHLLRCFIASVTGSLD

SEQ ID NO: 36725 - protein, 173 aa, Homo sapiens
  Payload ID: 7272
  Gene Symbol: GTPBP8
  Gene Name: GTP-binding protein 8 (putative)
  ENSP ID: ENSP00000417632
MVCFIGRSNVGKSSLIKALFSLAPEVEVRVSKKPGHTKKMNFFKVGKHFTVVDMPGYGFRAPEDFVDMVETYLKERRNLKRTFLLVDSVVGIQKTDNIAIEMCEEFALPYVIVLTKIDKSSKGHLLKQVLQIQKFVNMKTQGCFPQLFPVSAVTFSGIHLLRCFIASVTGSLD

SEQ ID NO: 36726 - protein, 139 aa, Homo sapiens
  Payload ID: 7272
  Gene Symbol: GTPBP8
  Gene Name: GTP-binding protein 8 (putative)
  ENSP ID: ENSP00000418261
MPAVLERLSRYNSTSQAFAEVLRLPKQQLRKLLYPLQEVERFLAPYGRQDLHLRIFDPSPEDIARADNIFTATERNRIDYVSSAVRIDHAPDLPRPEVCFIGRSNVGKSSLIKALFSLAPEVEVRVSKKPLEENIFISG

SEQ ID NO: 36727 - protein, 134 aa, Homo sapiens
  Payload ID: 7272
  Gene Symbol: GTPBP8
  Gene Name: GTP-binding protein 8 (putative)
  ENSP ID: ENSP00000418514
MNFFKVGKHFTVVDMPGYGFRAPEDFVDMVETYLKERRNLKRTFLLVDSVVGIQKTDNIAIEMCEEFALPYVIVLTKIDKSSKGHLLKQVLQIQKFVNMKTQGCFPQLFPVSAVTFSGIHLLRCFIASVTGSLD

SEQ ID NO: 36728 - protein, 251 aa, Homo sapiens; identical to SEQ ID NO: 36723
  Payload ID: 7272
  Gene Symbol: GTPBP8
  Gene Name: GTP-binding protein 8 (putative)
  Uniprot ID: Q8N3Z3
  ENSP ID: ENSP00000418877

SEQ ID NO: 36729 - protein, 307 aa, Homo sapiens
  Payload ID: 7272
  Gene Symbol: GTPBP8
  Gene Name: GTP-binding protein 8 (putative)
  ENSP ID: ENSP00000478184
MAAPGLRLGAGRLFEMPAVLERLSRYNSTSQAFAEVLRLPKQQLRKLLYPLQEVERFLAPYGRQDLHLRIFDPSPEDIARADNIFTATERNRIDYVSSAVRIDHAPDLPRPEVRGDSTVHLRAGVTALPLPGRPARGVFYRQSNVGKSSLIKLYFHWPLRLKSESPKNQDTQENEFFKVGKHFTVVDMPGYGFRAPEDFVDMVETYLKERRNLKRTFLLVDSVVGIQKTDNIAIEMCEEFALPYVIVLTKIDKSSKGHLLKQVLQIQKFVNMKTQGCFPQLFPVSAVTFSGIHLLRCFIASVTGSLD

SEQ ID NO: 36730 - protein, 307 aa, Homo sapiens [sequence omitted]

SEQ ID NO: 36731 - protein, 304 aa, Homo sapiens
  Payload ID: 7273
  Gene Symbol:
  Gene Name: GU182339.12
  ENSP ID: ENSP00000477925
MSLMVISMACVGFFWLQGAWPHEGFRRKPSLLAHPGRLVKSEETVILQCWSDVMFEHFLLHREGTFNDTLRLIGEHIDGVSKANFSIGRMRQDLAGTYRCYGSVPHSPYQFSAPSDPLDIVITGLYEKPSLSAQPGPTVLAGESVTLSCSSWSSYDMYHLSTEGEAHERRFSAGPKVNGTFQADFPLGPATQGGTYRCFGSFHDSPYEWSKSSDPLLVSVTGNPSNSWPSPTEPSSKTGNPRHLHVLIGTSVVKLPFTILLFFLLHRWCSNKKNASVMDQGPAGNRTVNREDSDEQDHQEVSYA

SEQ ID NO: 36732 - protein, 293 aa, Homo sapiens
  Payload ID: 7274
  Gene Symbol:
  Gene Name: GU182343.1
  ENSP ID: ENSP00000482483
  MOD_RES (1)..(1): Any amino acid
XGVHRKPSLLAHPGLLVKSGETVILQCWSDVRFERFLLHREGITEDPLRLIGQLHDAGSQVNYSMGPMTPALAGTYRCFGSVTHLPYELSAPSDPLDIVVVGLYGKPSLSAQPGPTVQAGENVTLSCSSRSLFDIYHLSREAEAGELRLTAVLRVNGTFQANFPLGPVTHGGNYRCFGSFRALPHAWSDPSDPLPVSVTGNSRHLHVLIGTSVVIIPFAILLFFLLHRWCPNKKNAVVMDQEPAGNRTVNREDSDDQDPQEVTYAQLNHCVFTQRKITRPSQRPKTPPTDTSV

SEQ ID NO: 36733 - protein, 304 aa, Homo sapiens; identical to SEQ ID NO: 36731
  Payload ID: 7275
  Gene Symbol:
  Gene Name: GU182347.12
  ENSP ID: ENSP00000478314

SEQ ID NO: 36734 - protein, 328 aa, Homo sapiens
  Payload ID: 7276
  Gene Symbol:
  Gene Name: GU182353.5
  ENSP ID: ENSP00000479531
MSLMVVSMACVGFFLLQGAWPHEGGQDKPFLSAWPSPVVSEGEHVALQCRSRLGFNEFSLSKEDGVPVPELYNRVFRNTVFIGPVTPAHAGTYRCRGSHPHFLTGWSAPSNPLVIMVTGVHRKPSLLAHPGPLVKSEETVILQCWSDVMFEHFLLHREGKFNDTLRLTGELHDGVSKANFSIGRMTQDLAGTYRCYGSVPHSPYQLSAPSDPLDIVITGLCGKPSLSAQPRPMVKAGESVTLSCSSRSSYDIYHLSREGEAHELRFPAVPKVNGTFQANFPLGPATHGGTYRCFGSFRDSPYEWSDLSDPLLVSVTDSMKEKGKDVIL

SEQ ID NO: 36735 - protein, 328 aa, Homo sapiens
  Payload ID: 7277
  Gene Symbol:
  Gene Name: GU182355.5
  ENSP ID: ENSP00000479886
MSLMVVSMACVGFFLLQGAWPHEGGQDKPFLSAWPSPVVSEGEHVALQCRSRLGFNEFSLSKEDGMPVPELYNRVFRNTVFIGPVTPAHAGTYRCRGSHPHFLTGWSAPSNPLVIMVTGVHRKPSLLAHPGPLVKSEETVILQCWSDVMFEHFLLHREGKFNDTLRLTGELHDGVSKANFSIGRMTQDLAGTYRCYGSVPHSPYQLSAPSDPLDIVITGLCGKPSLSAQPRPMVKAGESVTLSCSSRSSYDIYHLSREGEAHELRFPAVPKVNGTFQANFPLGPATHGGTYRCFGSFRDSPYEWSDLSDPLLVSVTDSMKEKGKDVIL

SEQ ID NO: 36736 - protein, 398 aa, Homo sapiens
  Payload ID: 7278
  Gene Symbol:
  Gene Name: GU182357.6
  ENSP ID: ENSP00000477528
MSLMVISKACVAFFLLQGAWPHEGGQDKPLLSTWPSLVVPPEHVTLRCHSNLGFNNFSLYKDDGVPVPELYNRIFWKSLFMGPVTPSHTGTYRCRGSHTHSPSGGSAPSNPLVIVVTGFRRKPSLLAHPGPLVKSEETVILQCWSDVMFEHFLLHREGTFNHTLRLIGEHIDGVSKGNFSIGRMTQDLAGTYRCYGSVTHSPYQLSAPSDPLDIVITGLYEKPSLSAQPGPTVLAGESVTLSCSSRSSYDMYHLSREGEAHERRLPAGTKVNGTFQADFPLDPATHGGTYRCFGSFRDSPYEWSKSSDPLLVSVTGNSSNSWPSPTEPSSETGNPRHLHVLIGTSVVKLPFTILLFFLLHRWCSNKKNASVMDQGPAGNRTVNREDSDEQDHQEVSYA

SEQ ID NO: 36737 - protein, 349 aa, Homo sapiens
  Payload ID: 7278
  Gene Symbol:
  Gene Name: GU182357.6
  ENSP ID: ENSP00000480625
MSLMVVSMACVGFFLLQGAWTHEGFRRKPSLLAHPGPLVKSEETVILQCWSDVMFEHFLLHREGTFNHTLRLIGEHIDGVSKGNFSIGRMTQDLAGTYRCYGSVTHSPYQLSAPSDPLDIVITGLYEKPSLSAQPGPTVLAGESVTLSCSSRSSYDMYHLSREGEAHERRLPAGTKVNGTFQADFPLDPATHGGTYRCFGSFRDSPYEWSKSSDPLLVSVTGNPSNSWPSPTEPSSKTGNPRHLHVLIGTSVVIILFILLVFFLLHRWCSNKKNAAVMDQEPAGNRTANSEDSDEQDPQEVTYVQLDHCVFTQRKITRPSQRPKTPPTDTRVYTELPNAESRSKVVSCP

SEQ ID NO: 36738 - protein, 236 aa, Homo sapiens
  Payload ID: 7279
  Gene Symbol: GAMT
  Gene Name: guanidinoacetate N-methyltransferase
  Uniprot ID: Q14353
  ENSP ID: ENSP00000252288
MSAPSATPIFAPGENCSPAWGAAPAAYDAADTHLRILGKPVMERWETPYMHALAAAASSKGGRVLEVGFGMAIAASKVQEAPIDEHWIIECNDGVFQRLRDWAPRQTHKVIPLKGLWEDVAPTLPDGHFDGILYDTYPLSEETWHTHQFNFIKNHAFRLLKPGGVLTYCNLTSWGELMKSKYSDITIMFEETQVPALLEAGFRRENIRTEVMALVPPADCRYYAFPQMITPLVTKG

SEQ ID NO: 36739 - protein, 269 aa, Homo sapiens
  Payload ID: 7279
  Gene Symbol: GAMT
  Gene Name: guanidinoacetate N-methyltransferase
  Uniprot ID: Q14353
  ENSP ID: ENSP00000403536
MSAPSATPIFAPGENCSPAWGAAPAAYDAADTHLRILGKPVMERWETPYMHALAAAASSKGGRVLEVGFGMAIAASKVQEAPIDEHWIIECNDGVFQRLRDWAPRQTHKVIPLKGLWEDVAPTLPDGHFDGILYDTYPLSEETWHTHQFNFIKNHAFRLLKPGGVLTYCNLTSWGELMKSKYSDITIMFEVRPPEVPHGSPGSDLGWGWEGAAGATLLPGEGPFLTPWVGWTVLVHLEIKVLCLAQWLPGAVAQVYNPSTVEGRGGQIA

SEQ ID NO: 36740 - protein, 108 aa, Homo sapiens
  Payload ID: 7279
  Gene Symbol: GAMT
  Gene Name: guanidinoacetate N-methyltransferase
  ENSP ID: ENSP00000466341
QTHKVIPLKGLWEDVAPTLPDGHFDGILYDTYPLSEETWHTHQFNFIKNHAFRLLKPGGVLTYCNLTSWGELMKSKYSDITIMFEWLPGAVAQVYNPSTVEGRGGQIA

SEQ ID NO: 36741 - protein, 471 aa, Homo sapiens
  Payload ID: 7280
  Gene Symbol: GDA
  Gene Name: guanine deaminase
  Uniprot ID: Q9Y2T3
  ENSP ID: ENSP00000238018
MCAAQMPPLAHIFRGTFVHSTWTCPMEVLRDHLLGVSDSGKIVFLEEASQQEKLAKEWCFKPCEIRELSHHEFFMPGLVDTHIHASQYSFAGSSIDLPLLEWLTKYTFPAEHRFQNIDFAEEVYTRVVRRTLKNGTTTACYFATIHTDSSLLLADITDKFGQRAFVGKVCMDLNDTFPEYKETTEESIKETERFVSEMLQKNYSRVKPIVTPRFSLSCSETLMGELGNIAKTRDLHIQSHISENRDEVEAVKNLYPSYKNYTSVYDKNNLLTNKTVMAHGCYLSAEELNVFHERGASIAHCPNSNLSLSSGFLNVLEVLKHEVKIGLGTDVAGGYSYSMLDAIRRAVMVSNILLINKVNEKSLTLKEVFRLATLGGSQALGLDGEIGNFEVGKEFDAILINPKASDSPIDLFYGDFFGDISEAVIQKFLYLGDDRNIEEVYVGGKQVVPFSSSVKETIHLPASSPHPPPFP

SEQ ID NO: 36742 - protein, 454 aa, Homo sapiens
  Payload ID: 7280
  Gene Symbol: GDA
  Gene Name: guanine deaminase
  Uniprot ID: Q9Y2T3
  ENSP ID: ENSP00000351170
MCAAQMPPLAHIFRGTFVHSTWTCPMEVLRDHLLGVSDSGKIVFLEEASQQEKLAKEWCFKPCEIRELSHHEFFMPGLVDTHIHASQYSFAGSSIDLPLLEWLTKYTFPAEHRFQNIDFAEEVYTRVVRRTLKNGTTTACYFATIHTDSSLLLADITDKFGQRAFVGKVCMDLNDTFPEYKETTEESIKETERFVSEMLQKNYSRVKPIVTPRFSLSCSETLMGELGNIAKTRDLHIQSHISENRDEVEAVKNLYPSYKNYTSVYDKNNLLTNKTVMAHGCYLSAEELNVFHERGASIAHCPNSNLSLSSGFLNVLEVLKHEVKIGLGTDVAGGYSYSMLDAIRRAVMVSNILLINKVNEKSLTLKEVFRLATLGGSQALGLDGEIGNFEVGKEFDAILINPKASDSPIDLFYGDFFGDISEAVIQKFLYLGDDRNIEEVYVGGKQVVPFSSSV

SEQ ID NO: 36743 - protein, 393 aa, Homo sapiens
  Payload ID: 7280
  Gene Symbol: GDA
  Gene Name: guanine deaminase
  ENSP ID: ENSP00000366185
MFLEEASQQEKLAKEWCFKPCEIRELSHHEFFMPGLVDTHIHASQYSFAGSSIDLPLLEWLTKYTFPAEHRFQNIDFAEEVYTRVVRRTLKNGTTTACYFATIHTDSSLLLADITDKFGQRAFVGKVCMDLNDTFPEYKETTEESIKETERFVSEMLQKNSHISENRDEVEAVKNLYPSYKNYTSVYDKNNLLTNKTVMAHGCYLSAEELNVFHERGASIAHCPNSNLSLSSGFLNVLEVLKHEVKIGLGTDVAGGYSYSMLDAIRRAVMVSNILLINKVNEKSLTLKEVFRLATLGGSQALGLDGEIGNFEVGKEFDAILINPKASDSPIDLFYGDFFGDISEAVIQKFLYLGDDRNIEEVYVGGKQVVPFSSSVKETIHLPASSPHPPPFP

SEQ ID NO: 36744 - protein, 179 aa, Homo sapiens
  Payload ID: 7280
  Gene Symbol: GDA
  Gene Name: guanine deaminase
  ENSP ID: ENSP00000400857
ERGASIAHCPNSNLSLSSGFLNVLEVLKHEVKIGLGTDVAGGYSYSMLDAIRRAVMVSNILLINKVNEKSLTLKEVFRLATLGGSQALGLDGEIGNFEVGKEFDAILINPKASDSPIDLFYGDFFGDISEAVIQKFLYLGDDRNIEEVYVGGKQVVPFSSSVKETIHLPASSPHPPPFP

SEQ ID NO: 36745 - protein, 195 aa, Homo sapiens
  Payload ID: 7280
  Gene Symbol: GDA
  Gene Name: guanine deaminase
  ENSP ID: ENSP00000403897
MTLFQNTRRPLRNRSRKLRDCHSVTQAGVQWRDLSSLKPPPPVFKRFSCLSLPSSWDYRFVSEMLQKNYSRVKPIVTPRFSLSCSETLMGELGNIAKTRDLHIQSHISENRDEVEAVKNLYPSYKNYTSVYDKNNLLTNKTVMAHGCYLSAEELNVFHERGASIAHCPNSNLSLSSGFLNVLEVLKHEVKIGLGT

SEQ ID NO: 36746 - protein, 176 aa, Homo sapiens
  Payload ID: 7280
  Gene Symbol: GDA
  Gene Name: guanine deaminase
  ENSP ID: ENSP00000434682
  MOD_RES (1)..(1): Any amino acid
XGCYLSAEELNVFHERGASIAHCPNSNLSLSSGFLNVLEVLKHEVKIGLGTDVAGGYSYSMLDAIRRAVMVSNILLINKVNEKSLTLKEVFRLATLGGSQALGLDGEIGNFEVGKEFDAILINPKASDSPIDLFYGDFFGDISEAVIQKFLYLGDDRNIEEVYVGGKQVVPFSSSV

SEQ ID NO: 36747 - protein, 454 aa, Homo sapiens; identical to SEQ ID NO: 36742
  Payload ID: 7280
  Gene Symbol: GDA
  Gene Name: guanine deaminase
  Uniprot ID: Q9Y2T3
  ENSP ID: ENSP00000436619

SEQ ID NO: 36748 - protein, 380 aa, Homo sapiens
  Payload ID: 7280
  Gene Symbol: GDA
  Gene Name: guanine deaminase
  Uniprot ID: Q9Y2T3
  ENSP ID: ENSP00000437972
MPGLVDTHIHASQYSFAGSSIDLPLLEWLTKYTFPAEHRFQNIDFAEEVYTRVVRRTLKNGTTTACYFATIHTDSSLLLADITDKFGQRAFVGKVCMDLNDTFPEYKETTEESIKETERFVSEMLQKNYSRVKPIVTPRFSLSCSETLMGELGNIAKTRDLHIQSHISENRDEVEAVKNLYPSYKNYTSVYDKNNLLTNKTVMAHGCYLSAEELNVFHERGASIAHCPNSNLSLSSGFLNVLEVLKHEVKIGLGTDVAGGYSYSMLDAIRRAVMVSNILLINKVNEKSLTLKEVFRLATLGGSQALGLDGEIGNFEVGKEFDAILINPKASDSPIDLFYGDFFGDISEAVIQKFLYLGDDRNIEEVYVGGKQVVPFSSSV

SEQ ID NO: 36749 - protein, 594 aa, Homo sapiens
  Payload ID: 7281
  Gene Symbol: GMPS
  Gene Name: guanine monophosphate synthase
  Uniprot ID: P49915
  ENSP ID: ENSP00000295920
MALCNGDSKMMNKVFGGTVHKKSVREDGVFNISVDNTCSLFRGLQKEEVVLLTHGDSVDKVADGFKVVARSGNIVAGIANESKKLYGAQFHPEVGLTENGKVILKNFLYDIAGCSGTFTVQNRELECIREIKERVGTSKVLVLLSGGVDSTVCTALLNRALNQEQVIAVHIDNGFMRKRESQSVEEALKKLGIQVKVINAAHSFYNGTTTLPISDEDRTPRKRISKTLNMTTSPEEKRKIIGDTFVKIANEVIGEMNLKPEEVFLAQGTLRPDLIESASLVASGKAELIKTHHNDTELIRKLREEGKVIEPLKDFHKDEVRILGRELGLPEELVSRHPFPGPGLAIRVICAEEPYICKDFPETNNILKIVADFSASVKKPHTLLQRVKACTTEEDQEKLMQITSLHSLNAFLLPIKTVGVQGDCRSYSYVCGISSKDEPDWESLIFLARLIPRMCHNVNRVVYIFGPPVKEPPTDVTPTFLTTGVLSTLRQADFEAHNILRESGYAGKISQMPVILTPLHFDRDPLQKQPSCQRSVVIRTFITSDFMTGIPATPGNEIPVEVVLKMVTEIKKIPGISRIMYDLTSKPPGTTEWE

SEQ ID NO: 36750 - protein, 693 aa, Homo sapiens
  Payload ID: 7281
  Gene Symbol: GMPS
  Gene Name: guanine monophosphate synthase
  Uniprot ID: P49915
  ENSP ID: ENSP00000419851
MALCNGDSKLENAGGDLKDGHHHYEGAVVILDAGAQYGKVIDRRVRELFVQSEIFPLETPAFAIKEQGFRAIIISGGPNSVYAEDAPWFDPAIFTIGKPVLGICYGMQMMNKVFGGTVHKKSVREDGVFNISVDNTCSLFRGLQKEEVVLLTHGDSVDKVADGFKVVARSGNIVAGIANESKKLYGAQFHPEVGLTENGKVILKNFLYDIAGCSGTFTVQNRELECIREIKERVGTSKVLVLLSGGVDSTVCTALLNRALNQEQVIAVHIDNGFMRKRESQSVEEALKKLGIQVKVINAAHSFYNGTTTLPISDEDRTPRKRISKTLNMTTSPEEKRKIIGDTFVKIANEVIGEMNLKPEEVFLAQGTLRPDLIESASLVASGKAELIKTHHNDTELIRKLREEGKVIEPLKDFHKDEVRILGRELGLPEELVSRHPFPGPGLAIRVICAEEPYICKDFPETNNILKIVADFSASVKKPHTLLQRVKACTTEEDQEKLMQITSLHSLNAFLLPIKTVGVQGDCRSYSYVCGISSKDEPDWESLIFLARLIPRMCHNVNRVVYIFGPPVKEPPTDVTPTFLTTGVLSTLRQADFEAHNILRESGYAGKISQMPVILTPLHFDRDPLQKQPSCQRSVVIRTFITSDFMTGIPATPGNEIPVEVVLKMVTEIKKIPGISRIMYDLTSKPPGTTEWE

SEQ ID NO: 36751 - protein, 381 aa, Homo sapiens
  Payload ID: 7282
  Gene Symbol: GNA12
  Gene Name: guanine nucleotide binding protein (G protein) alpha 12
  Uniprot ID: Q03113
  ENSP ID: ENSP00000275364
MSGVVRTLSRCLLPAEAGGARERRAGSGARDAEREARRRSRDIDALLARERRAVRRLVKILLLGAGESGKSTFLKQMRIIHGREFDQKALLEFRDTIFDNILKGSRVLVDARDKLGIPWQYSENEKHGMFLMAFENKAGLPVEPATFQLYVPALSALWRDSGIREAFSRRSEFQLGESVKYFLDNLDRIGQLNYFPSKQDILLARKATKGIVEHDFVIKKIPFKMVDVGGQRSQRQKWFQCFDGITSILFMVSSSEYDQVLMEDRRTNRLVESMNIFETIVNNKLFFNVSIILFLNKMDLLVEKVKTVSIKKHFPDFRGDPHRLEDVQRYLVQCFDRKRRNRSKPLFHHFTTAIDTENVRFVFHAVKDTILQENLKDIMLQ

SEQ ID NO: 36752 - protein, 322 aa, Homo sapiens
  Payload ID: 7282
  Gene Symbol: GNA12
  Gene Name: guanine nucleotide binding protein (G protein) alpha 12
  Uniprot ID: Q03113
  ENSP ID: ENSP00000385935
MKRRMFPRPCLARMPGSRGSGSTPDGNRKCCRFEHLLIAHPGSRGSRVLVDARDKLGIPWQYSENEKHGMFLMAFENKAGLPVEPATFQLYVPALSALWRDSGIREAFSRRSEFQLGESVKYFLDNLDRIGQLNYFPSKQDILLARKATKGIVEHDFVIKKIPFKMVDVGGQRSQRQKWFQCFDGITSILFMVSSSEYDQVLMEDRRTNRLVESMNIFETIVNNKLFFNVSIILFLNKMDLLVEKVKTVSIKKHFPDFRGDPHRLEDVQRYLVQCFDRKRRNRSKPLFHHFTTAIDTENVRFVFHAVKDTILQENLKDIMLQ

SEQ ID NO: 36753 - protein, 305 aa, Homo sapiens
  Payload ID: 7282
  Gene Symbol: GNA12
  Gene Name: guanine nucleotide binding protein (G protein) alpha 12
  ENSP ID: ENSP00000386054
MAPRAGLGAGPLLLRSRADWVCGGWEAALSAPPPFCTAWVERTGLVHFLREGGHGACFPLALLHPGSVVSFQMIYPLIVLPLCASWHWGLIRKGIVLFWGESVKYFLDNLDRIGQLNYFPSKQDILLARKATKGIVEHDFVIKKIPFKMVDVGGQRSQRQKWFQCFDGITSILFMVSSSEYDQVLMEDRRTNRLVESMNIFETIVNNKLFFNVSIILFLNKMDLLVEKVKTVSIKKHFPDFRGDPHRLEDVQRYLVQCFDRKRRNRSKPLFHHFTTAIDTENVRFVFHAVKDTILQENLKDIMLQ

SEQ ID NO: 36754 - protein, 77 aa, Homo sapiens
  Payload ID: 7282
  Gene Symbol: GNA12
  Gene Name: guanine nucleotide binding protein (G protein) alpha 12
  ENSP ID: ENSP00000391462
MKRRMFPRPCLARMPGSRGSRVLVDARDKLGIPWQYSENEKHGMFLMAFENKAGLPVEPATFQLYVPALSALWRDSG

SEQ ID NO: 36755 - protein, 359 aa, Homo sapiens
  Payload ID: 7283
  Gene Symbol: GNA11
  Gene Name: guanine nucleotide binding protein (G protein), alpha 11 (Gq class)
  Uniprot ID: P29992
  ENSP ID: ENSP00000078429
MTLESMMACCLSDEVKESKRINAEIEKQLRRDKRDARRELKLLLLGTGESGKSTFIKQMRIIHGAGYSEEDKRGFTKLVYQNIFTAMQAMIRAMETLKILYKYEQNKANALLIREVDVEKVTTFEHQYVSAIKTLWEDPGIQECYDRRREYQLSDSAKYYLTDVDRIATLGYLPTQQDVLRVRVPTTGIIEYPFDLENIIFRMVDVGGQRSERRKWIHCFENVTSIMFLVALSEYDQVLVESDNENRMEESKALFRTIITYPWFQNSSVILFLNKKDLLEDKILYSHLVDYFPEFDGPQRDAQAAREFILKMFVDLNPDSDKIIYSHFTCATDTENIRFVFAAVKDTILQLNLKEYNLV

SEQ ID NO: 36756 - protein, 236 aa, Homo sapiens
  Payload ID: 7283
  Gene Symbol: GNA11
  Gene Name: guanine nucleotide binding protein (G protein), alpha 11 (Gq class)
  ENSP ID: ENSP00000465935
  MOD_RES (1)..(1): Any amino acid
XLSDSAKYYLTDVDRIATLGYLPTQQDVLRVRVPTTGIIEYPFDLENIIFRMVDVGGQRSERRKWIHCFENVTSIMFLVALSEYDQVLVESDNENRMEESKALFRTIITYPWFQNSSVILFLNKKDLLEDKILYSHLVDYFPEFDGPQRDAQAAREFILKMFVDLNPDSDKIIYSHFTCATDTENIRFVFAAVKDTILQLNLKEYNLLSGDVHLSLRTLRAPSHLLSTAKAAFFWP

SEQ ID NO: 36757 - protein, 72 aa, Homo sapiens
  Payload ID: 7283
  Gene Symbol: GNA11
  Gene Name: guanine nucleotide binding protein (G protein), alpha 11 (Gq class)
  ENSP ID: ENSP00000479797
  MOD_RES (1)..(1): Any amino acid
XLTDVDRIATLGYLPTQQDVLRVRVPTTGIIEYPFDLENIIFRWAWLCAPVVPATQEAEAGGSLKPRRLRLK

SEQ ID NO: 36758 - protein, 377 aa, Homo sapiens
  Payload ID: 7284
  Gene Symbol: GNA13
  Gene Name: guanine nucleotide binding protein (G protein), alpha 13
  Uniprot ID: Q14344
  ENSP ID: ENSP00000400717
MADFLPSRSVLSVCFPGCLLTSGEAEQQRKSKEIDKCLSREKTYVKRLVKILLLGAGESGKSTFLKQMRIIHGQDFDQRAREEFRPTIYSNVIKGMRVLVDAREKLHIPWGDNSNQQHGDKMMSFDTRAPMAAQGMVETRVFLQYLPAIRALWADSGIQNAYDRRREFQLGESVKYFLDNLDKLGEPDYIPSQQDILLARRPTKGIHEYDFEIKNVPFKMVDVGGQRSERKRWFECFDSVTSILFLVSSSEFDQVLMEDRLTNRLTESLNIFETIVNNRVFSNVSIILFLNKTDLLEEKVQIVSIKDYFLEFEGDPHCLRDVQKFLVECFRNKRRDQQQKPLYHHFTTAINTENIRLVFRDVKDTILHDNLKQLMLQ

SEQ ID NO: 36759 - protein, 282 aa, Homo sapiens
  Payload ID: 7284
  Gene Symbol: GNA13
  Gene Name: guanine nucleotide binding protein (G protein), alpha 13
  Uniprot ID: Q14344
  ENSP ID: ENSP00000439647
MRVLVDAREKLHIPWGDNSNQQHGDKMMSFDTRAPMAAQGMVETRVFLQYLPAIRALWADSGIQNAYDRRREFQLGESVKYFLDNLDKLGEPDYIPSQQDILLARRPTKGIHEYDFEIKNVPFKMVDVGGQRSERKRWFECFDSVTSILFLVSSSEFDQVLMEDRLTNRLTESLNIFETIVNNRVFSNVSIILFLNKTDLLEEKVQIVSIKDYFLEFEGDPHCLRDVQKFLVECFRNKRRDQQQKPLYHHFTTAINTENIRLVFRDVKDTILHDNLKQLMLQ

SEQ ID NO: 36760 - protein, 355 aa, Homo sapiens
  Payload ID: 7285
  Gene Symbol: GNA14
  Gene Name: guanine nucleotide binding protein (G protein), alpha 14
  Uniprot ID: O95837
  ENSP ID: ENSP00000365807
MAGCCCLSAEEKESQRISAEIERQLRRDKKDARRELKLLLLGTGESGKSTFIKQMRIIHGSGYSDEDRKGFTKLVYQNIFTAMQAMIRAMDTLRIQYVCEQNKENAQIIREVEVDKVSMLSREQVEAIKQLWQDPGIQECYDRRREYQLSDSAKYYLTDIDRIATPSFVPTQQDVLRVRVPTTGIIEYPFDLENIIFRMVDVGGQRSERRKWIHCFESVTSIIFLVALSEYDQVLAECDNENRMEESKALFKTIITYPWFLNSSVILFLNKKDLLEEKIMYSHLISYFPEYTGPKQDVRAARDFILKLYQDQNPDKEKVIYSHFTCATDTDNIRFVFAAVKDTILQLNLREFNLV

SEQ ID NO: 36761 - protein, 374 aa, Homo sapiens
  Payload ID: 7286
  Gene Symbol: GNA15
  Gene Name: guanine nucleotide binding protein (G protein), alpha 15 (Gq class)
  Uniprot ID: P30679
  ENSP ID: ENSP00000262958
MARSLTWRCCPWCLTEDEKAAARVDQEINRILLEQKKQDRGELKLLLLGPGESGKSTFIKQMRIIHGAGYSEEERKGFRPLVYQNIFVSMRAMIEAMERLQIPFSRPESKHHASLVMSQDPYKVTTFEKRYAAAMQWLWRDAGIRACYERRREFHLLDSAVYYLSHLERITEEGYVPTAQDVLRSRMPTTGINEYCFSVQKTNLRIVDVGGQKSERKKWIHCFENVIALIYLASLSEYDQCLEENNQENRMKESLALFGTILELPWFKSTSVILFLNKTDILEEKIPTSHLATYFPSFQGPKQDAEAAKRFILDMYTRMYTGCVDGPEGSKKGARSRRLFSHYTCATDTQNIRKVFKDVRDSVLARYLDEINLL

SEQ ID NO: 36762 - protein, 52 aa, Homo sapiens
  Payload ID: 7286
  Gene Symbol: GNA15
  Gene Name: guanine nucleotide binding protein (G protein), alpha 15 (Gq class)
  ENSP ID: ENSP00000467256
MARSLTWRCCPWCLTEDEKAAARVDQEINRILLEQKKQDRGELKLLLLVPGS

SEQ ID NO: 36763 - protein, 354 aa, Homo sapiens
  Payload ID: 7287
  Gene Symbol: GNAO1
  Gene Name: guanine nucleotide binding protein (G protein) , alpha activating
  Uniprot ID: P09471
  ENSP ID: ENSP00000262493
MGCTLSAEERAALERSKAIEKNLKEDGISAAKDVKLLLLGAGESGKSTIVKQMKIIHEDGFSGEDVKQYKPVVYSNTIQSLAAIVRAMDTLGIEYGDKERKADAKMVCDVVSRMEDTEPFSAELLSAMMRLWGDSGIQECFNRSREYQLNDSAKYYLDSLDRIGAADYQPTEQDILRTRVKTTGIVETHFTFKNLHFRLFDVGGQRSERKKWIHCFEDVTAIIFCVALSGYDQVLHEDETTNRMHESLMLFDSICNNKFFIDTSIILFLNKKDLFGEKIKKSPLTICFPEYTGPNTYEDAAAYIQAQFESKNRSPNKEIYCHMTCATDTNNIQVVFDAVTDIIIANNLRGCGLY

SEQ ID NO: 36764 - protein, 354 aa, Homo sapiens
  Payload ID: 7287
  Gene Symbol: GNAO1
  Gene Name: guanine nucleotide binding protein (G protein), alpha activating
  Uniprot ID: P09471
  ENSP ID: ENSP00000262494
MGCTLSAEERAALERSKAIEKNLKEDGISAAKDVKLLLLGAGESGKSTIVKQMKIIHEDGFSGEDVKQYKPVVYSNTIQSLAAIVRAMDTLGIEYGDKERKADAKMVCDVVSRMEDTEPFSAELLSAMMRLWGDSGIQECFNRSREYQLNDSAKYYLDSLDRIGAADYQPTEQDILRTRVKTTGIVETHFTFKNLHFRLFDVGGQRSERKKWIHCFEDVTAIIFCVALSGYDQVLHEDETTNRMHESLKLFDSICNNKWFTDTSIILFLNKKDIFEEKIKKSPLTICFPEYTGPSAFTEAVAYIQAQYESKNKSAHKEIYTHVTCATDTNNIQFVFDAVTDVIIAKNLRGCGLY

SEQ ID NO: 36765 - protein, 128 aa, Homo sapiens
  Payload ID: 7287
  Gene Symbol: GNAO1
  Gene Name: guanine nucleotide binding protein (G protein) , alpha activating
  ENSP ID: ENSP00000454728
MKKLNPAGTTRRIIHEDGFSGEDVKQYKPVVYSNTIQSLAAIVRAMDTLGIEYGDKERKADAKMVCDVVSRMEDTEPFSAELLSAMMRLWGDSGIQECFNRSREYQLNDSAKYYLDSLDRIGAADYQP

SEQ ID NO: 36766 - protein, 94 aa, Homo sapiens
  Payload ID: 7287
  Gene Symbol: GNAO1
  Gene Name: guanine nucleotide binding protein (G protein) , alpha activating
  ENSP ID: ENSP00000454971
IDTSIILFLNKKDLFGEKIKKSPLTICFPEYTGPNTYEDAAAYIQAQFESKNRSPNKEIYCHMTCATDTNNIQVVFDAVTDIIIANNLRGCGLY

SEQ ID NO: 36767 - protein, 83 aa, Homo sapiens
  Payload ID: 7287
  Gene Symbol: GNAO1
  Gene Name: guanine nucleotide binding protein (G protein), alpha activating
  ENSP ID: ENSP00000455774
MDTLGIEYGDKERKADAKMVCDVVSRMEDTEPFSAELLSAMMRLWGDSGIQECFNRSREYQLNDSAKYYLDSLDRIGAADYQP

SEQ ID NO: 36768 - protein, 110 aa, Homo sapiens
  Payload ID: 7287
  Gene Symbol: GNAO1
  Gene Name: guanine nucleotide binding protein (G protein), alpha activating
  ENSP ID: ENSP00000457238
MDTLGIEYGDKERKADAKMVCDVVSRMEDTEPFSAELLSAMMRLWGDSGIQECFNRSREYQLNDSAKYYLDSLDRIGAADYQPTEQDILRTRVKTTGIVETHFTFKNLHF

SEQ ID NO: 36769 - protein, 54 aa, Homo sapiens
  Payload ID: 7287
  Gene Symbol: GNAO1
  Gene Name: guanine nucleotide binding protein (G protein) , alpha activating
  ENSP ID: ENSP00000477740
MGCTLSAEERAALERSKAIEKNLKEDGISAAKDVKLLLLGAGESGKSTIVKQMK

SEQ ID NO: 36770 - protein, 381 aa, Homo sapiens
  Payload ID: 7288
  Gene Symbol: GNAL
  Gene Name: guanine nucleotide binding protein (G protein), alpha activating activity polypeptide, olfactory type
  Uniprot ID: P38405
  ENSP ID: ENSP00000269162
MGCLGGNSKTTEDQGVDEKERREANKKIEKQLQKERLAYKATHRLLLLGAGESGKSTIVKQMRILHVNGFNPEEKKQKILDIRKNVKDAIVTIVSAMSTIIPPVPLANPENQFRSDYIKSIAPITDFEYSQEFFDHVKKLWDDEGVKACFERSNEYQLIDCAQYFLERIDSVSLVDYTPTDQDLLRCRVLTSGIFETRFQVDKVNFHMFDVGGQRDERRKWIQCFNDVTAIIYVAACSSYNMVIREDNNTNRLRESLDLFESIWNNRWLRTISIILFLNKQDMLAEKVLAGKSKIEDYFPEYANYTVPEDATPDAGEDPKVTRAKFFIRDLFLRISTATGDGKHYCYPHFTCAVDTENIRRVFNDCRDIIQRMHLKQYELL

SEQ ID NO: 36771 - protein, 458 aa, Homo sapiens
  Payload ID: 7288
  Gene Symbol: GNAL
  Gene Name: guanine nucleotide binding protein (G protein), alpha activating activity polypeptide, olfactory type
  Uniprot ID: P38405
  ENSP ID: ENSP00000334051
MGLCYSLRPLLFGGPGDDPCAASEPPVEDAQPAPAPALAPVRAAARDTARTLLPRGGEGSPACARPKADKPKEKRQRTEQLSAEEREAAKEREAVKEARKVSRGIDRMLRDQKRDLQQTHRLLLLGAGESGKSTIVKQMRILHVNGFNPEEKKQKILDIRKNVKDAIVTIVSAMSTIIPPVPLANPENQFRSDYIKSIAPITDFEYSQEFFDHVKKLWDDEGVKACFERSNEYQLIDCAQYFLERIDSVSLVDYTPTDQDLLRCRVLTSGIFETRFQVDKVNFHMFDVGGQRDERRKWIQCFNDVTAIIYVAACSSYNMVIREDNNTNRLRESLDLFESIWNNRWLRTISIILFLNKQDMLAEKVLAGKSKIEDYFPEYANYTVPEDATPDAGEDPKVTRAKFFIRDLFLRISTATGDGKHYCYPHFTCAVDTENIRRVFNDCRDIIQRMHLKQYELL

SEQ ID NO: 36772 - protein, 381 aa, Homo sapiens; identical to SEQ ID NO: 36770
  Payload ID: 7288
  Gene Symbol: GNAL
  Gene Name: guanine nucleotide binding protein (G protein), alpha activating activity polypeptide, olfactory type
  Uniprot ID: P38405
  ENSP ID: ENSP00000408489

SEQ ID NO: 36773 - protein, 381 aa, Homo sapiens; identical to SEQ ID NO: 36770
  Payload ID: 7288
  Gene Symbol: GNAL
  Gene Name: guanine nucleotide binding protein (G protein), alpha activating activity polypeptide, olfactory type
  Uniprot ID: P38405
  ENSP ID: ENSP00000439023

SEQ ID NO: 36774 - protein, 54 aa, Homo sapiens
  Payload ID: 7288
  Gene Symbol: GNAL
  Gene Name: guanine nucleotide binding protein (G protein), alpha activating activity polypeptide, olfactory type
  ENSP ID: ENSP00000466709
  MOD_RES (1)..(1): Any amino acid
XTNKICWQKKSWQGNQKLKTISQNMQIILFLKTEHQGEAPPLADSQGHLPSRGC

SEQ ID NO: 36775 - protein, 179 aa, Homo sapiens
  Payload ID: 7288
  Gene Symbol: GNAL
  Gene Name: guanine nucleotide binding protein (G protein), alpha activating activity polypeptide, olfactory type
  ENSP ID: ENSP00000467345
MRILHVNGFNPEEKKQKILDIRKNVKDAIVTIVSAMSTIIPPVPLANPENQFRSDYIKSIAPITDFEYSQEFFDHVKKLWDDEGVKACFERSNEYQLIDCAQYFLERIDSVSLVDYTPTDQDLLRCRVLTSGIFETRFQVDKVNFHMFDVGGQRDERRKWIQCFNDVTAIIYVAACSSY

SEQ ID NO: 36776 - protein, 145 aa, Homo sapiens
  Payload ID: 7288
  Gene Symbol: GNAL
  Gene Name: guanine nucleotide binding protein (G protein), alpha activating activity polypeptide, olfactory type
  ENSP ID: ENSP00000467709
MSTIIPPVPLANPENQFRSDYIKSIAPITDFEYSQEFFDHVKKLWDDEGVKACFERSNEYQLIDCAQYFLERIDSVSLVDYTPTDQDLLRCRVLTSGIFETRFQVDKVNFHMFDVGGQRDERRKWIQCFNDVTAIIYVAACSSYN

SEQ ID NO: 36777 - protein, 174 aa, Homo sapiens
  Payload ID: 7288
  Gene Symbol: GNAL
  Gene Name: guanine nucleotide binding protein (G protein), alpha activating activity polypeptide, olfactory type
  Uniprot ID: P38405
  ENSP ID: ENSP00000473600
MFDVGGQRDERRKWIQCFNDVTAIIYVAACSSYNMVIREDNNTNRLRESLDLFESIWNNRWLRTISIILFLNKQDMLAEKVLAGKSKIEDYFPEYANYTVPEDATPDAGEDPKVTRAKFFIRDLFLRISTATGDGKHYCYPHFTCAVDTENIRRVFNDCRDIIQRMHLKQYELL

SEQ ID NO: 36778 - protein, 354 aa, Homo sapiens
  Payload ID: 7289
  Gene Symbol: GNAI1
  Gene Name: guanine nucleotide binding protein (G protein), alpha inhibiting activity polypeptide 1
  Uniprot ID: P63096
  ENSP ID: ENSP00000343027
MGCTLSAEDKAAVERSKMIDRNLREDGEKAAREVKLLLLGAGESGKSTIVKQMKIIHEAGYSEEECKQYKAVVYSNTIQSIIAIIRAMGRLKIDFGDSARADDARQLFVLAGAAEEGFMTAELAGVIKRLWKDSGVQACFNRSREYQLNDSAAYYLNDLDRIAQPNYIPTQQDVLRTRVKTTGIVETHFTFKDLHFKMFDVGGQRSERKKWIHCFEGVTAIIFCVALSDYDLVLAEDEEMNRMHESMKLFDSICNNKWFTDTSIILFLNKKDLFEEKIKKSPLTICYPEYAGSNTYEEAAAYIQCQFEDLNKRKDTKEIYTHFTCATDTKNVQFVFDAVTDVIIKNNLKDCGLF

SEQ ID NO: 36779 - protein, 41 aa, Homo sapiens
  Payload ID: 7289
  Gene Symbol: GNAI1
  Gene Name: guanine nucleotide binding protein (G protein), alpha inhibiting activity polypeptide 1
  ENSP ID: ENSP00000388347
MKIIHEAGYSEEECKQYKAVVYSNTIQSIIAIIRAMGRLKI

SEQ ID NO: 36780 - protein, 144 aa, Homo sapiens
  Payload ID: 7289
  Gene Symbol: GNAI1
  Gene Name: guanine nucleotide binding protein (G protein), alpha inhibiting activity polypeptide 1
  ENSP ID: ENSP00000389435
MKIIHEAGYSEEECKQYKAVVYSNTIQSIIAIIRAMGRLKIDFGDSARADDARQLFVLAGAAEEGFMTAELAGVIKRLWKDSGVQACFNRSREYQLNDSAAYYLNDLDRIAQPNYIPTQQDVLRTRVKTTGIVETHFTFKDLHF

SEQ ID NO: 36781 - protein, 22 aa, Homo sapiens
  Payload ID: 7289
  Gene Symbol: GNAI1
  Gene Name: guanine nucleotide binding protein (G protein), alpha inhibiting activity polypeptide 1
  ENSP ID: ENSP00000391439
MGCTLSAEDKAAVERSKMIDRN

SEQ ID NO: 36782 - protein, 302 aa, Homo sapiens
  Payload ID: 7289
  Gene Symbol: GNAI1
  Gene Name: guanine nucleotide binding protein (G protein), alpha inhibiting activity polypeptide 1
  Uniprot ID: P63096
  ENSP ID: ENSP00000410572
MKIIHEAGYSEEECKQYKAVVYSNTIQSIIAIIRAMGRLKIDFGDSARADDARQLFVLAGAAEEGFMTAELAGVIKRLWKDSGVQACFNRSREYQLNDSAAYYLNDLDRIAQPNYIPTQQDVLRTRVKTTGIVETHFTFKDLHFKMFDVGGQRSERKKWIHCFEGVTAIIFCVALSDYDLVLAEDEEMNRMHESMKLFDSICNNKWFTDTSIILFLNKKDLFEEKIKKSPLTICYPEYAGSNTYEEAAAYIQCQFEDLNKRKDTKEIYTHFTCATDTKNVQFVFDAVTDVIIKNNLKDCGLF

SEQ ID NO: 36783 - protein, 303 aa, Homo sapiens
  Payload ID: 7290
  Gene Symbol: GNAI2
  Gene Name: guanine nucleotide binding protein (G protein), alpha inhibiting activity polypeptide 2
  Uniprot ID: P04899
  ENSP ID: ENSP00000266027
MKIIHEDGYSEEECRQYRAVVYSNTIQSIMAIVKAMGNLQIDFADPSRADDARQLFALSCTAEEQGVLPDDLSGVIRRLWADHGVQACFGRSREYQLNDSAAYYLNDLERIAQSDYIPTQQDVLRTRVKTTGIVETHFTFKDLHFKMFDVGGQRSERKKWIHCFEGVTAIIFCVALSAYDLVLAEDEEMNRMHESMKLFDSICNNKWFTDTSIILFLNKKDLFEEKITHSPLTICFPEYTGANKYDEAASYIQSKFEDLNKRKDTKEIYTHFTCATDTKNVQFVFDAVTDVIIKNNLKDCGLF

SEQ ID NO: 36784 - protein, 355 aa, Homo sapiens
  Payload ID: 7290
  Gene Symbol: GNAI2
  Gene Name: guanine nucleotide binding protein (G protein), alpha inhibiting activity polypeptide 2
  Uniprot ID: P04899
  ENSP ID: ENSP00000312999
MGCTVSAEDKAAAERSKMIDKNLREDGEKAAREVKLLLLGAGESGKSTIVKQMKIIHEDGYSEEECRQYRAVVYSNTIQSIMAIVKAMGNLQIDFADPSRADDARQLFALSCTAEEQGVLPDDLSGVIRRLWADHGVQACFGRSREYQLNDSAAYYLNDLERIAQSDYIPTQQDVLRTRVKTTGIVETHFTFKDLHFKMFDVGGQRSERKKWIHCFEGVTAIIFCVALSAYDLVLAEDEEMNRMHESMKLFDSICNNKWFTDTSIILFLNKKDLFEEKITHSPLTICFPEYTGANKYDEAASYIQSKFEDLNKRKDTKEIYTHFTCATDTKNVQFVFDAVTDVIIKNNLKDCGLF

SEQ ID NO: 36785 - protein, 142 aa, Homo sapiens
  Payload ID: 7290
  Gene Symbol: GNAI2
  Gene Name: guanine nucleotide binding protein (G protein), alpha inhibiting activity polypeptide 2
  ENSP ID: ENSP00000394321
MGCTVSAEDKAAAERSKMIDKNLREDGEKAAREVKLLLLGSSTRMATPRRNAGSTGRLSTATPSSPSWPLSKPWATCRSTLPTPPERTTPGSYLHCPAPPRSKACSLMTCPASSGGSGLTMVCRPALAAQGNTSSTTQLPTT

SEQ ID NO: 36786 - protein, 303 aa, Homo sapiens; identical to SEQ ID NO: 36783
  Payload ID: 7290
  Gene Symbol: GNAI2
  Gene Name: guanine nucleotide binding protein (G protein), alpha inhibiting activity polypeptide 2
  Uniprot ID: P04899
  ENSP ID: ENSP00000395736

SEQ ID NO: 36787 - protein, 146 aa, Homo sapiens
  Payload ID: 7290
  Gene Symbol: GNAI2
  Gene Name: guanine nucleotide binding protein (G protein), alpha inhibiting activity polypeptide 2
  ENSP ID: ENSP00000406065
MTEGVKTLGWTKQKGGCHWGRSEGPWLLRLSVGRRRAATLLDGVCRASSCQLCPGHHIGMHQLHRCWGVREEHHRQADEDHPRGWLLRGGMPAVPGGCLQQHHPVHHGHCQSHGQPADRLCRPLQSGRRQAAICTVLHRRGARRAP

SEQ ID NO: 36788 - protein, 318 aa, Homo sapiens
  Payload ID: 7290
  Gene Symbol: GNAI2
  Gene Name: guanine nucleotide binding protein (G protein), alpha inhibiting activity polypeptide 2
  Uniprot ID: P04899
  ENSP ID: ENSP00000406369
MRGAGESGKSTIVKQMKIIHEDGYSEEECRQYRAVVYSNTIQSIMAIVKAMGNLQIDFADPSRADDARQLFALSCTAEEQGVLPDDLSGVIRRLWADHGVQACFGRSREYQLNDSAAYYLNDLERIAQSDYIPTQQDVLRTRVKTTGIVETHFTFKDLHFKMFDVGGQRSERKKWIHCFEGVTAIIFCVALSAYDLVLAEDEEMNRMHESMKLFDSICNNKWFTDTSIILFLNKKDLFEEKITHSPLTICFPEYTGANKYDEAASYIQSKFEDLNKRKDTKEIYTHFTCATDTKNVQFVFDAVTDVIIKNNLKDCGLF

SEQ ID NO: 36789 - protein, 339 aa, Homo sapiens
  Payload ID: 7290
  Gene Symbol: GNAI2
  Gene Name: guanine nucleotide binding protein (G protein), alpha inhibiting activity polypeptide 2
  Uniprot ID: P04899
  ENSP ID: ENSP00000406871
MTEGVKTLGWTKQKGGCHWGRSEGAGESGKSTIVKQMKIIHEDGYSEEECRQYRAVVYSNTIQSIMAIVKAMGNLQIDFADPSRADDARQLFALSCTAEEQGVLPDDLSGVIRRLWADHGVQACFGRSREYQLNDSAAYYLNDLERIAQSDYIPTQQDVLRTRVKTTGIVETHFTFKDLHFKMFDVGGQRSERKKWIHCFEGVTAIIFCVALSAYDLVLAEDEEMNRMHESMKLFDSICNNKWFTDTSIILFLNKKDLFEEKITHSPLTICFPEYTGANKYDEAASYIQSKFEDLNKRKDTKEIYTHFTCATDTKNVQFVFDAVTDVIIKNNLKDCGLF

SEQ ID NO: 36790 - protein, 354 aa, Homo sapiens
  Payload ID: 7291
  Gene Symbol: GNAI3
  Gene Name: guanine nucleotide binding protein (G protein), alpha inhibiting activity polypeptide 3
  Uniprot ID: P08754
  ENSP ID: ENSP00000358867
MGCTLSAEDKAAVERSKMIDRNLREDGEKAAKEVKLLLLGAGESGKSTIVKQMKIIHEDGYSEDECKQYKVVVYSNTIQSIIAIIRAMGRLKIDFGEAARADDARQLFVLAGSAEEGVMTPELAGVIKRLWRDGGVQACFSRSREYQLNDSASYYLNDLDRISQSNYIPTQQDVLRTRVKTTGIVETHFTFKDLYFKMFDVGGQRSERKKWIHCFEGVTAIIFCVALSDYDLVLAEDEEMNRMHESMKLFDSICNNKWFTETSIILFLNKKDLFEEKIKRSPLTICYPEYTGSNTYEEAAAYIQCQFEDLNRRKDTKEIYTHFTCATDTKNVQFVFDAVTDVIIKNNLKECGLY

SEQ ID NO: 36791 - protein, 350 aa, Homo sapiens
  Payload ID: 7292
  Gene Symbol: GNAT1
  Gene Name: guanine nucleotide binding protein (G protein), alpha transducing activity polypeptide 1
  Uniprot ID: P11488
  ENSP ID: ENSP00000232461
MGAGASAEEKHSRELEKKLKEDAEKDARTVKLLLLGAGESGKSTIVKQMKIIHQDGYSLEECLEFIAIIYGNTLQSILAIVRAMTTLNIQYGDSARQDDARKLMHMADTIEEGTMPKEMSDIIQRLWKDSGIQACFERASEYQLNDSAGYYLSDLERLVTPGYVPTEQDVLRSRVKTTGIIETQFSFKDLNFRMFDVGGQRSERKKWIHCFEGVTCIIFIAALSAYDMVLVEDDEVNRMHESLHLFNSICNHRYFATTSIVLFLNKKDVFFEKIKKAHLSICFPDYDGPNTYEDAGNYIKVQFLELNMRRDVKEIYSHMTCATDTQNVKFVFDAVTDIIIKENLKDCGLF

SEQ ID NO: 36792 - protein, 350 aa, Homo sapiens; identical to SEQ ID NO: 36791
  Payload ID: 7292
  Gene Symbol: GNAT1
  Gene Name: guanine nucleotide binding protein (G protein), alpha transducing activity polypeptide 1
  Uniprot ID: P11488
  ENSP ID: ENSP00000387555

SEQ ID NO: 36793 - protein, 130 aa, Homo sapiens
  Payload ID: 7292
  Gene Symbol: GNAT1
  Gene Name: guanine nucleotide binding protein (G protein), alpha transducing activity polypeptide 1
  ENSP ID: ENSP00000403537
MKIIHQDGYSLEECLEFIAIIYGNTLQSILAIVRAMTTLNIQYGDSARQDDARKLMHMADTIEEGTMPKEMSDIIQRLWKDSGIQACFERASEYQLNDSAGYYLSDLERLVTPGYVPTEQDVLRSRVKTT

SEQ ID NO: 36794 - protein, 354 aa, Homo sapiens
  Payload ID: 7293
  Gene Symbol: GNAT2
  Gene Name: guanine nucleotide binding protein (G protein), alpha transducing activity polypeptide 2
  Uniprot ID: P19087
  ENSP ID: ENSP00000251337
MGSGASAEDKELAKRSKELEKKLQEDADKEAKTVKLLLLGAGESGKSTIVKQMKIIHQDGYSPEECLEFKAIIYGNVLQSILAIIRAMTTLGIDYAEPSCADDGRQLNNLADSIEEGTMPPELVEVIRRLWKDGGVQACFERAAEYQLNDSASYYLNQLERITDPEYLPSEQDVLRSRVKTTGIIETKFSVKDLNFRMFDVGGQRSERKKWIHCFEGVTCIIFCAALSAYDMVLVEDDEVNRMHESLHLFNSICNHKFFAATSIVLFLNKKDLFEEKIKKVHLSICFPEYDGNNSYDDAGNYIKSQFLDLNMRKDVKEIYSHMTCATDTQNVKFVFDAVTDIIIKENLKDCGLF

SEQ ID NO: 36795 - protein, 123 aa, Homo sapiens
  Payload ID: 7293
  Gene Symbol: GNAT2
  Gene Name: guanine nucleotide binding protein (G protein), alpha transducing activity polypeptide 2
  ENSP ID: ENSP00000482596
MGSGASAEDKELAKRSKELEKKLQEDADKEAKTVKLLLLGAGESGKSTIVKQMKIIHQDGYSPEECLEFKAIIYGNVLQSILAIIRAMTTLGIDYAEPSCADDGRQLNNLADSIEEGTMPPEL

SEQ ID NO: 36796 - protein, 355 aa, Homo sapiens
  Payload ID: 7294
  Gene Symbol: GNAZ
  Gene Name: guanine nucleotide binding protein (G protein), alpha z polypeptide
  Uniprot ID: P19086
  ENSP ID: ENSP00000478892
MGCRQSSEEKEAARRSRRIDRHLRSESQRQRREIKLLLLGTSNSGKSTIVKQMKIIHSGGFNLEACKEYKPLIIYNAIDSLTRIIRALAALRIDFHNPDRAYDAVQLFALTGPAESKGEITPELLGVMRRLWADPGAQACFSRSSEYHLEDNAAYYLNDLERIAAADYIPTVEDILRSRDMTTGIVENKFTFKELTFKMVDVGGQRSERKKWIHCFEGVTAIIFCVELSGYDLKLYEDNQTSRMAESLRLFDSICNNNWFINTSLILFLNKKDLLAEKIRRIPLTICFPEYKGQNTYEEAAVYIQRQFEDLNRNKETKEIYSHFTCATDTSNIQFVFDAVTDVIIQNNLKYIGLC

SEQ ID NO: 36797 - protein, 395 aa, Homo sapiens
  Payload ID: 7295
  Gene Symbol: GNB5
  Gene Name: guanine nucleotide binding protein (G protein), beta 5
  Uniprot ID: O14775
  ENSP ID: ENSP00000261837
MCDQTFLVNVFGSCDKCFKQRALRPVFKKSQQLSYCSTCAEIMATEGLHENETLASLKSEAESLKGKLEEERAKLHDVELHQVAERVEALGQFVMKTRRTLKGHGNKVLCMDWCKDKRRIVSSSQDGKVIVWDSFTTNKEHAVTMPCTWVMACAYAPSGCAIACGGLDNKCSVYPLTFDKNENMAAKKKSVAMHTNYLSACSFTNSDMQILTASGDGTCALWDVESGQLLQSFHGHGADVLCLDLAPSETGNTFVSGGCDKKAMVWDMRSGQCVQAFETHESDINSVRYYPSGDAFASGSDDATCRLYDLRADREVAIYSKESIIFGASSVDFSLSGRLLFAGYNDYTINVWDVLKGSRVSILFGHENRVSTLRVSPDGTAFCSGSWDHTLRVWA

SEQ ID NO: 36798 - protein, 353 aa, Homo sapiens
  Payload ID: 7295
  Gene Symbol: GNB5
  Gene Name: guanine nucleotide binding protein (G protein), beta 5
  Uniprot ID: O14775
  ENSP ID: ENSP00000351635
MATEGLHENETLASLKSEAESLKGKLEEERAKLHDVELHQVAERVEALGQFVMKTRRTLKGHGNKVLCMDWCKDKRRIVSSSQDGKVIVWDSFTTNKEHAVTMPCTWVMACAYAPSGCAIACGGLDNKCSVYPLTFDKNENMAAKKKSVAMHTNYLSACSFTNSDMQILTASGDGTCALWDVESGQLLQSFHGHGADVLCLDLAPSETGNTFVSGGCDKKAMVWDMRSGQCVQAFETHESDINSVRYYPSGDAFASGSDDATCRLYDLRADREVAIYSKESIIFGASSVDFSLSGRLLFAGYNDYTINVWDVLKGSRVSILFGHENRVSTLRVSPDGTAFCSGSWDHTLRVWA

SEQ ID NO: 36799 - protein, 283 aa, Homo sapiens
  Payload ID: 7295
  Gene Symbol: GNB5
  Gene Name: guanine nucleotide binding protein (G protein), beta 5
  Uniprot ID: O14775
  ENSP ID: ENSP00000379626
MATEGLHENETLASLKSEAESLKGKLEEERAKLHDVELHQVAERVEALGQFVMKTRRTLKGHGNKVLCMDWCKDKRRIVSSSQDGKVIVWDSFTTNKILTASGDGTCALWDVESGQLLQSFHGHGADVLCLDLAPSETGNTFVSGGCDKKAMVWDMRSGQCVQAFETHESDINSVRYYPSGDAFASGSDDATCRLYDLRADREVAIYSKESIIFGASSVDFSLSGRLLFAGYNDYTINVWDVLKGSRVSILFGHENRVSTLRVSPDGTAFCSGSWDHTLRVWA

SEQ ID NO: 36800 - protein, 126 aa, Homo sapiens
  Payload ID: 7295
  Gene Symbol: GNB5
  Gene Name: guanine nucleotide binding protein (G protein), beta 5
  ENSP ID: ENSP00000453176
MATEGLHENETLASLKSEAESLKGKLEEERAKLHDVELHQVAERVEALGQFVMKTRRTLKGHGNKVLCMDWCKDKRRIVSSSQDGKVIVWDSFTTNKVRHCSQPRYRGFRIPAYLKVLWSSCPALS

SEQ ID NO: 36801 - protein, 103 aa, Homo sapiens
  Payload ID: 7295
  Gene Symbol: GNB5
  Gene Name: guanine nucleotide binding protein (G protein), beta 5
  ENSP ID: ENSP00000453339
AKKKSVAMHTNYLSACSFTNSDMQILTASGDGTCALWDVESGQLLQSFHGHGADVLCLDLAPSETGNTFVSGGCDKKAMVWDMRSGQCVQAFETHESDINSVR

SEQ ID NO: 36802 - protein, 100 aa, Homo sapiens
  Payload ID: 7295
  Gene Symbol: GNB5
  Gene Name: guanine nucleotide binding protein (G protein), beta 5
  ENSP ID: ENSP00000454185
MATEGLHENETLASLKSEAESLKGKLEEERAKLHDVELHQVAERVEALGQFVMKTRRTLKGHGNKVLCMDWCKDKRRIVSSSQDGKVIVWDSFTTNKWFG

SEQ ID NO: 36803 - protein, 340 aa, Homo sapiens [sequence omitted]

SEQ ID NO: 36804 - protein, 165 aa, Homo sapiens
  Payload ID: 7296
  Gene Symbol: GNB1
  Gene Name: guanine nucleotide binding protein (G protein), beta polypeptide 1
  ENSP ID: ENSP00000392765
MSELDQLRQEAEQLKNQIRDARKACADATLSQITNNIDPVGRIQMRTRRTLRGHLAKIYAMHWGTDSRLLVSASQDGKLIIWDSYTTNKVHAIPLRSSWVMTCAYAPSGNYVACGGLDNICSIYNLKTREGNVRVSRELAGHTGYLSCCRFLDDNQIVTSSGDTT

SEQ ID NO: 36805 - protein, 163 aa, Homo sapiens
  Payload ID: 7296
  Gene Symbol: GNB1
  Gene Name: guanine nucleotide binding protein (G protein), beta polypeptide 1
  ENSP ID: ENSP00000399741
MSELDQLRQEAEQLKNQIRITNNIDPVGRIQMRTRRTLRGHLAKIYAMHWGTDSRLLVSASQDGKLIIWDSYTTNKVHAIPLRSSWVMTCAYAPSGNYVACGGLDNICSIYNLKTREGNVRVSRELAGHTGYLSCCRFLDDNQIVTSSGDTTCALWDIETGQQ

SEQ ID NO: 36806 - protein, 107 aa, Homo sapiens
  Payload ID: 7296
  Gene Symbol: GNB1
  Gene Name: guanine nucleotide binding protein (G protein), beta polypeptide 1
  ENSP ID: ENSP00000416651
MSELDQLRQEAEQLKNQIRDARKACADATLSQITNNIDPVGRIQMRTRRTLRGHLAKIYAMHWGTDSRLLVSASQDGKLIIWDSYTTNKVHAIPLRSSWVMTCAYAP

SEQ ID NO: 36807 - protein, 340 aa, Homo sapiens [sequence omitted]

SEQ ID NO: 36808 - protein, 240 aa, Homo sapiens
  Payload ID: 7296
  Gene Symbol: GNB1
  Gene Name: guanine nucleotide binding protein (G protein), beta polypeptide 1
  ENSP ID: ENSP00000483532
MTCAYAPSGNYVACGGLDNICSIYNLKTREGNVRVSRELAGHTGYLSCCRFLDDNQIVTSSGDTTCALWDIETGQQTTTFTGHTGDVMSLSLAPDTRLFVSGACDASAKLWDVREGMCRQTFTGHESDINAICFFPNGNAFATGSDDATCRLFDLRADQELMTYSHDNIICGITSVSFSKSGRLLLAGYDDFNCNVWDALKADRAGVLAGHDNRVSCLGVTDDGMAVATGSWDSFLKIWN

SEQ ID NO: 36809 - protein, 327 aa, Homo sapiens
  Payload ID: 7297
  Gene Symbol: GNB1L
  Gene Name: guanine nucleotide binding protein (G protein), beta polypeptide 1-like
  Uniprot ID: Q9BYB4
  ENSP ID: ENSP00000331313
MTAPCPPPPPDPQFVLRGTQSPVHALHFCEGAQAQGRPLLFSGSQSGLVHIWSLQTRRAVTTLDGHGGQCVTWLQTLPQGRQLLSQGRDLKLCLWDLAEGRSAVVDSVCLESVGFCRSSILAGGQPRWTLAVPGRGSDEVQILEMPSKTSVCALKPKADAKLGMPMCLRLWQADCSSRPLLLAGYEDGSVVLWDVSEQKVCSRIACHEEPVMDLDFDSQKARGISGSAGKALAVWSLDWQQALQVRGTHELTNPGIAEVTIRPDRKILATAGWDHRIRVFHWRTMQPLAVLAFHSAAVQCVAFTADGLLAAGSKDQRISLWSLYPRA

SEQ ID NO: 36810 - protein, 212 aa, Homo sapiens
  Payload ID: 7297
  Gene Symbol: GNB1L
  Gene Name: guanine nucleotide binding protein (G protein), beta polypeptide 1-like
  Uniprot ID: Q9BYB4
  ENSP ID: ENSP00000384626
MTAPCPPPPPDPQFVLRGTQSPVHALHFCEGAQAQGRPLLFSGSQSGLVHIWSLQTRRAVTTLDGHGGQCVTWLQTLPQGRQLLSQGRDLKLCLWDLAEGRSAVVDSVCLESVGFCRSSILAGGQPRWTLAVPGRGSDEVQILEMPSKTSVCALKPKADAKLGMPMCLRLWQADCSSRPLLLAGYEDGSVVLWDVSEQKVCSRIACHEEPGL

SEQ ID NO: 36811 - protein, 327 aa, Homo sapiens; identical to SEQ ID NO: 36809
  Payload ID: 7297
  Gene Symbol: GNB1L
  Gene Name: guanine nucleotide binding protein (G protein), beta polypeptide 1-like
  Uniprot ID: Q9BYB4
  ENSP ID: ENSP00000385154

SEQ ID NO: 36812 - protein, 93 aa, Homo sapiens
  Payload ID: 7297
  Gene Symbol: GNB1L
  Gene Name: guanine nucleotide binding protein (G protein), beta polypeptide 1-like
  ENSP ID: ENSP00000389412
MTAPCPPPPPDPQFVLRGTQSPVHALHFCEGAQAQGRPLLFSGQGRDLKLCLWDLAEGRSAVVDSVCLESVGFCRSSILAGGQPRWTLAVPGR

SEQ ID NO: 36813 - protein, 340 aa, Homo sapiens
  Payload ID: 7298
  Gene Symbol: GNB2
  Gene Name: guanine nucleotide binding protein (G protein), beta polypeptide 2
  Uniprot ID: P62879
  ENSP ID: ENSP00000305260
MSELEQLRQEAEQLRNQIRDARKACGDSTLTQITAGLDPVGRIQMRTRRTLRGHLAKIYAMHWGTDSRLLVSASQDGKLIIWDSYTTNKVHAIPLRSSWVMTCAYAPSGNFVACGGLDNICSIYSLKTREGNVRVSRELPGHTGYLSCCRFLDDNQIITSSGDTTCALWDIETGQQTVGFAGHSGDVMSLSLAPDGRTFVSGACDASIKLWDVRDSMCRQTFIGHESDINAVAFFPNGYAFTTGSDDATCRLFDLRADQELLMYSHDNIICGITSVAFSRSGRLLLAGYDDFNCNIWDAMKGDRAGVLAGHDNRVSCLGVTDDGMAVATGSWDSFLKIWN

SEQ ID NO: 36814 - protein, 340 aa, Homo sapiens; identical to SEQ ID NO: 36813
  Payload ID: 7298
  Gene Symbol: GNB2
  Gene Name: guanine nucleotide binding protein (G protein), beta polypeptide 2
  Uniprot ID: P62879
  ENSP ID: ENSP00000377501

SEQ ID NO: 36815 - protein, 340 aa, Homo sapiens; identical to SEQ ID NO: 36813
  Payload ID: 7298
  Gene Symbol: GNB2
  Gene Name: guanine nucleotide binding protein (G protein), beta polypeptide 2
  Uniprot ID: P62879
  ENSP ID: ENSP00000377503

SEQ ID NO: 36816 - protein, 296 aa, Homo sapiens
  Payload ID: 7298
  Gene Symbol: GNB2
  Gene Name: guanine nucleotide binding protein (G protein), beta polypeptide 2
  ENSP ID: ENSP00000389391
MRTRRTLRGHLAKIYAMHWGTDSRLLVSASQDGKLIIWDSYTTNKVHAIPLRSSWVMTCAYAPSGNFVACGGLDNICSIYSLKTREGNVRVSRELPGHTGYLSCCRFLDDNQIITSSGDTTCALWDIETGQQTVGFAGHSGDVMSLSLAPDGRTFVSGACDASIKLWDVRDSMCRQTFIGHESDINAVAFFPNGYAFTTGSDDATCRLFDLRADQELLMYSHDNIICGITSVAFSRSGRLLLAGYDDFNCNIWDAMKGDRAGVLAGHDNRVSCLGVTDDGMAVATGSWDSFLKIWN

SEQ ID NO: 36817 - protein, 232 aa, Homo sapiens
  Payload ID: 7298
  Gene Symbol: GNB2
  Gene Name: guanine nucleotide binding protein (G protein), beta polypeptide 2
  ENSP ID: ENSP00000390077
MSELEQLRQEAEQLRNQIRDARKACGDSTLTQITAGLDPVGRIQMRTRRTLRGHLAKIYAMHWGTDSRLLVSASQDGKLIIWDSYTTNKVHAIPLRSSWVMTCAYAPSGNFVACGGLDNICSIYSLKTREGNVRVSRELPGHTGYLSCCRFLDDNQIITSSGDTTCALWDIETGQQTVGFAGHSGDVMSLSLAPDGRTFVSGACDASIKLWDVRDSMCRQTFIGHESDINAV

SEQ ID NO: 36818 - protein, 240 aa, Homo sapiens
  Payload ID: 7298
  Gene Symbol: GNB2
  Gene Name: guanine nucleotide binding protein (G protein), beta polypeptide 2
  Uniprot ID: P62879
  ENSP ID: ENSP00000390543
MTCAYAPSGNFVACGGLDNICSIYSLKTREGNVRVSRELPGHTGYLSCCRFLDDNQIITSSGDTTCALWDIETGQQTVGFAGHSGDVMSLSLAPDGRTFVSGACDASIKLWDVRDSMCRQTFIGHESDINAVAFFPNGYAFTTGSDDATCRLFDLRADQELLMYSHDNIICGITSVAFSRSGRLLLAGYDDFNCNIWDAMKGDRAGVLAGHDNRVSCLGVTDDGMAVATGSWDSFLKIWN

SEQ ID NO: 36819 - protein, 251 aa, Homo sapiens
  Payload ID: 7298
  Gene Symbol: GNB2
  Gene Name: guanine nucleotide binding protein (G protein), beta polypeptide 2
  ENSP ID: ENSP00000399904
MSELEQLRQEAEQLRNQIRDARKACGDSTLTQITAGLDPVGRIQMRTRRTLRGHLAKIYAMHWGTDSRLLVSASQDGKLIIWDSYTTNKVHAIPLRSSWVMTCAYAPSGNFVACGGLDNICSIYSLKTREGNVRVSRELPGHTGYLSCCRFLDDNQIITSSGDTTCALWDIETGQQTVGFAGHSGDVMSLSLAPDGRTFVSGACDASIKLWDVRDSMCRQTFIGHESDINAVAFFPNGYAFTTGSDDATCR

SEQ ID NO: 36820 - protein, 240 aa, Homo sapiens; identical to SEQ ID NO: 36818
  Payload ID: 7298
  Gene Symbol: GNB2
  Gene Name: guanine nucleotide binding protein (G protein), beta polypeptide 2
  Uniprot ID: P62879
  ENSP ID: ENSP00000400286

SEQ ID NO: 36821 - protein, 296 aa, Homo sapiens; identical to SEQ ID NO: 36816
  Payload ID: 7298
  Gene Symbol: GNB2
  Gene Name: guanine nucleotide binding protein (G protein), beta polypeptide 2
  ENSP ID: ENSP00000401873

SEQ ID NO: 36822 - protein, 152 aa, Homo sapiens
  Payload ID: 7298
  Gene Symbol: GNB2
  Gene Name: guanine nucleotide binding protein (G protein), beta polypeptide 2
  ENSP ID: ENSP00000413219
MSELEQLRQEAEQLRNQIRDARKACGDSTLTQITAGLDPVGRIQMRTRRTLRGHLAKIYAMHWGTDSRLLVSASQDGKLIIWDSYTTNKVHAIPLRSSWVMTCAYAPSGNFVACGGLDNICSIYSLKTREGNVRVSRELPGHTGYLSCCRFL

SEQ ID NO: 36823 - protein, 273 aa, Homo sapiens
  Payload ID: 7299
  Gene Symbol: GNB2L1
  Gene Name: guanine nucleotide binding protein (G protein), beta polypeptide 2-like 1
  ENSP ID: ENSP00000366013
MTEQMTLRGTLKGHNGWVTQIATTPQFPDMILSASRGSWDGTLRLWDLTTGTTTRRFVGHTKDVLSVAFSSDNRQIVSGSRDKTIKLWNTLGVCKYTVQDESHSEWVSCVRFSPNSSNPIIVSCGWDKLVKVWNLANCKLKTNHIGHTGYLNTVTVSPDGSLCASGGKDGQAMLWDLNEGKHLYTLDGGDIINALCFSPNRYWLCAATGPSIKIWDLEGKIIVDELKQEVISTSSKAEPPQCTSLAWSADGQTLFAGYTDNLVRVWQVTIGTR

SEQ ID NO: 36824 - protein, 39 aa, Homo sapiens
  Payload ID: 7299
  Gene Symbol: GNB2L1
  Gene Name: guanine nucleotide binding protein (G protein), beta polypeptide 2-like 1
  ENSP ID: ENSP00000420936
MTEQMTLRGTLKGHNGWVTQIATTPQFPDMILSASRGTD

SEQ ID NO: 36825 - protein, 197 aa, Homo sapiens
  Payload ID: 7299
  Gene Symbol: GNB2L1
  Gene Name: guanine nucleotide binding protein (G protein), beta polypeptide 2-like 1
  ENSP ID: ENSP00000421356
MTEQMTLRGTLKGHNGWVTQIATTPQFPDMILSASRVWPGAYGPGGAVMTPTCHLSVGAEIQRLFLSCRPAQGSWGDKTIIMWKLTRDETNYGIPQRALRGHSHFVSDVVISSDGQFALSGSWDGTLRLWDLTTGTTTRRFVGHTKDVLSVAFSSDNRQIVSGSRDKTIKLWNTLGVCKYTVQDESHSEWVSCVRFS

SEQ ID NO: 36826 - protein, 194 aa, Homo sapiens
  Payload ID: 7299
  Gene Symbol: GNB2L1
  Gene Name: guanine nucleotide binding protein (G protein), beta polypeptide 2-like 1
  ENSP ID: ENSP00000421416
MWKLTRDETNYGIPQRALRGHSHFVSDVVISSDGQFALSGSWDGTLRLWDLTTGTTTRRFVGHTKDVLSVAFSSDNRQIVSGSRDKTIKLWNTLGVCKYTVQDESHSEWVSCVRFSPNSSNPIIVSCGWDKLVKVWNLANCKLKTNHIGHTGYLNTVTVSPDGSLCASGGKDGQAMLWDLNEGKHLYTLDGGDI

SEQ ID NO: 36827 - protein, 138 aa, Homo sapiens
  Payload ID: 7299
  Gene Symbol: GNB2L1
  Gene Name: guanine nucleotide binding protein (G protein), beta polypeptide 2-like 1
  ENSP ID: ENSP00000421838
  MOD_RES (1)..(1): Any amino acid
XDESHSEWVSCVRFSPNSSNPIIVSCGWDKLVKVWNLANCKLKTNHIGHTGYLNTVTVSPDGSLCASGGKDGQAMLWDLNEGKHLYTLDGGDIINALCFSPNRYWLCAATGPSIKIWTLFAGYTDNLVRVWQVTIGTR

SEQ ID NO: 36828 - protein, 236 aa, Homo sapiens
  Payload ID: 7299
  Gene Symbol: GNB2L1
  Gene Name: guanine nucleotide binding protein (G protein), beta polypeptide 2-like 1
  ENSP ID: ENSP00000422029
MPLHSSLGDRARLHLKKKKSYQDKTIIMWKLTRDETNYGIPQRALRGHSHFVSDVVISSDGQFALSGSWDGTLRLWDLTTGTTTRRFVGHTKDVLSVAFSSDNRQIVSGSRDKTIKLWNTLGVCKYTVQDESHSEWVSCVRFSPNSSNPIIVSCGWDKLVKVWNLANCKLKTNHIGHTGYLNTVTVSPDGSLCASGGKDGQAMLWDLNEGKHLYTLDGGDIINALCFSPNRYWLCA

SEQ ID NO: 36829 - protein, 116 aa, Homo sapiens
  Payload ID: 7299
  Gene Symbol: GNB2L1
  Gene Name: guanine nucleotide binding protein (G protein), beta polypeptide 2-like 1
  ENSP ID: ENSP00000422198
MTEQMTLRGTLKGHNGWVTQIATTPQFPDMILSASRDKTIIMWKLTRDETNYGIPQRALRGHSHFVSDVVISSDGQFALSGSWDGTLRLWDLTTQGHHHEAICGPYQGCAECGLLL

SEQ ID NO: 36830 - protein, 274 aa, Homo sapiens
  Payload ID: 7299
  Gene Symbol: GNB2L1
  Gene Name: guanine nucleotide binding protein (G protein), beta polypeptide 2-like 1
  ENSP ID: ENSP00000422316
  MOD_RES (1)..(1): Any amino acid
XISSDGQFALSGSWDGTLRLWDLTTGTTTRRFVGHTKDVLSVAFSSDNRQIVSGSRDKTIKLWNTLGVCKYTVQDESHSEWVSCVRFSPNSSNPIIVSCGWDKLVKVWNLANCKLKTNHIGHTGYLNTVTVSPDGSLCASGGKDGQAMLWDLNEGKHLYTLDGGDIINALCFSPNRYWLCAATGPSIKIWDLEGKIIVDELKQEVISTSSKAEPPQCTSLAWSADGQEYITTTYKLAVEMRAVSYSLPGVVAHAYWRLRLCLLATRTTWCECGR

SEQ ID NO: 36831 - protein, 269 aa, Homo sapiens
  Payload ID: 7299
  Gene Symbol: GNB2L1
  Gene Name: guanine nucleotide binding protein (G protein), beta polypeptide 2-like 1
  ENSP ID: ENSP00000422768
MTEQMTLRGTLKGHNGWVTQIATTPQFPDMILSASRDKTIIMWKLTRDETNYGIPQRALRGHSHFVSDVVISSDGQFALSGSWDGTLRLWDLTTQDESHSEWVSCVRFSPNSSNPIIVSCGWDKLVKVWNLANCKLKTNHIGHTGYLNTVTVSPDGSLCASGGKDGQAMLWDLNEGKHLYTLDGGDIINALCFSPNRYWLCAATGPSIKIWDLEGKIIVDELKQEVISTSSKAEPPQCTSLAWSADGQTLFAGYTDNLVRVWQVTIGTR

SEQ ID NO: 36832 - protein, 300 aa, Homo sapiens
  Payload ID: 7299
  Gene Symbol: GNB2L1
  Gene Name: guanine nucleotide binding protein (G protein), beta polypeptide 2-like 1
  ENSP ID: ENSP00000423569
MEVVPLGSQTRERGSSPGAGRSGETQKNGGPSQEGSCQQGVGQPRGLPQKAGRGLQQASHLREAGEEAPWMRRKRPAGPAGAGTDKTIIMWKLTRDETNYGIPQRALRGHSHFVSDVVISSDGQFALSGSWDGTLRLWDLTTGTTTRRFVGHTKDVLSVAFSSDNRQIVSGSRDKTIKLWNTLGVCKYTVQDESHSEWVSCVRFSPNSSNPIIVSCGWDKLVKVWNLANCKLKTNHIGHTGYLNTVTVSPDGSLCASGGKDGQAMLWDLNEGKHLYTLDGGDIINALCFSPNRYWLCAAT

SEQ ID NO: 36833 - protein, 160 aa, Homo sapiens
  Payload ID: 7299
  Gene Symbol: GNB2L1
  Gene Name: guanine nucleotide binding protein (G protein), beta polypeptide 2-like 1
  ENSP ID: ENSP00000424237
MTEQMTLRGTLKGHNGWVTQIATTPQFPDMILSASRDKTIIMWKLTRDETNYGIPQRALRGHSHFVSDVVISSDGQFALSGSWDGTLRLWDLTTQIVSGSRDKTIKLWNTLGVCKYTVQDESHSEWVSCVRFSPNSSNPIIVSCGWDKLVKVWNLANCKL

SEQ ID NO: 36834 - protein, 83 aa, Homo sapiens
  Payload ID: 7299
  Gene Symbol: GNB2L1
  Gene Name: guanine nucleotide binding protein (G protein), beta polypeptide 2-like 1
  ENSP ID: ENSP00000424654
  MOD_RES (1)..(1): Any amino acid
XYTLDGGDIINALCFSPNRYWLCAATGPSIKIWDLEGKIIVDELKQEVISTSSKAEPPQCTSLAWSADGQVSGSVLSGDSASS

SEQ ID NO: 36835 - protein, 147 aa, Homo sapiens
  Payload ID: 7299
  Gene Symbol: GNB2L1
  Gene Name: guanine nucleotide binding protein (G protein), beta polypeptide 2-like 1
  ENSP ID: ENSP00000424760
MTEQMTLRGTLKGHNGWVTQIATTPQFPDMILSASRDKTIIMWKLTRDETNYGIPQRALRGHSHFVSDVVISSDGQFALSGSWDGTLRLWDLTTGTTTRRFVGHTKDVLSVAFSSDNRQIVSGSRDKTIKLWNTLGVCKYTVQAGVQ

SEQ ID NO: 36836 - protein, 321 aa, Homo sapiens
  Payload ID: 7299
  Gene Symbol: GNB2L1
  Gene Name: guanine nucleotide binding protein (G protein), beta polypeptide 2-like 1
  ENSP ID: ENSP00000425008
MTEQMTLRGTLKGHNGWVTQIATTPQFPDMILSASRDKTIIMWKLTRDETNYGIPQRALRGHSHFVSDVVISSDGQFALSGSWDGTLRLWDLTTLSLDLEIKPSSYGIPWVCANTLSSLILSPRLECSSAISAHCKLCFPGSRHSPASASRVAGTTGACHQDESHSEWVSCVRFSPNSSNPIIVSCGWDKLVKVWNLANCKLKTNHIGHTGYLNTVTVSPDGSLCASGGKDGQAMLWDLNEGKHLYTLDGGDIINALCFSPNRYWLCAATGPSIKIWDLEGKIIVDELKQEVISTSSKAEPPQCTSLAWSADGQTLFAGYT

SEQ ID NO: 36837 - protein, 86 aa, Homo sapiens
  Payload ID: 7299
  Gene Symbol: GNB2L1
  Gene Name: guanine nucleotide binding protein (G protein), beta polypeptide 2-like 1
  ENSP ID: ENSP00000426046
MTEQMTLRGTLKGHNGWVTQIATTPQFPDMILSASRDELKQEVISTSSKAEPPQCTSLAWSADGQTLFAGYTDNLVRVWQVTIGTR

SEQ ID NO: 36838 - protein, 233 aa, Homo sapiens
  Payload ID: 7299
  Gene Symbol: GNB2L1
  Gene Name: guanine nucleotide binding protein (G protein), beta polypeptide 2-like 1
  ENSP ID: ENSP00000426101
MTEQMTLRGTLKGHNGWVTQIATTPQFPDMILSASRDKTIIMWKLTRDETNYGIPQRALRGHSHFVSDVVISSDGQFALSGSWDGTLRLWDLTTGTTTRRFVGHTKDVLSVAFSSDNRQIVSGSRDKTIKLWNTLGVCKYTVQDESHSEWVSCVRFSPNSSNPIIVSCGWDKLVKVWNLANCKLKTNHIGHTGYLNTVTVSPDGSLCASGGKTLFAGYTDNLVRVWQVTIGTR

SEQ ID NO: 36839 - protein, 153 aa, Homo sapiens
  Payload ID: 7299
  Gene Symbol: GNB2L1
  Gene Name: guanine nucleotide binding protein (G protein), beta polypeptide 2-like 1
  ENSP ID: ENSP00000426111
MTEQMTLRGTLKGHNGWVTQIATTPQFPDMILSASRDKTIIMWKLTRDETNYGIPQRALRGHSHFVSDVVISSDGQFALSGSWDGTLRLWDLTTGTTTRRFVGHTKDVLSVAFSSDNRQIVSGSRDKTIKLWNTLGVCKYTVQSHSVAQAGVQ

SEQ ID NO: 36840 - protein, 71 aa, Homo sapiens
  Payload ID: 7299
  Gene Symbol: GNB2L1
  Gene Name: guanine nucleotide binding protein (G protein), beta polypeptide 2-like 1
  ENSP ID: ENSP00000426270
MTEQMTLRGTLKGHNGWVTQIATTPQFPDMILSASRDKTIIMWKLTRDETNYGIPQRAPPRGDLWAIPRMC

SEQ ID NO: 36841 - protein, 101 aa, Homo sapiens
  Payload ID: 7299
  Gene Symbol: GNB2L1
  Gene Name: guanine nucleotide binding protein (G protein), beta polypeptide 2-like 1
  ENSP ID: ENSP00000426708
MLWDLNEGKHLYTLDGGDIINALCFSPNRYWLCAATGPSIKIWDLEGKIIVDELKQEVISTSSKAEPPQCTSLAWSADGQTLFAGYTDNLVRVWQVTIGTR

SEQ ID NO: 36842 - protein, 317 aa, Homo sapiens [sequence omitted]

SEQ ID NO: 36843 - protein, 198 aa, Homo sapiens
  Payload ID: 7299
  Gene Symbol: GNB2L1
  Gene Name: guanine nucleotide binding protein (G protein), beta polypeptide 2-like 1
  ENSP ID: ENSP00000426960
  MOD_RES (1)..(1): Any amino acid
XDGTLRLWDLTTGTTTRRFVGHTKDVLSVAFSSDNRQIVSGSRDKTIKLWNTLGVCKYTVQDESHSEWVSCVRFSPNSSNPIIVSCGWDKLVKDGQAMLWDLNEGKHLYTLDGGDIINALCFSPNRYWLCAATGPSIKIWDLEGKIIVDELKQEVISTSSKAEPPQCTSLAWSADGQTLFAGYTDNLVRVWQVTIGTR

SEQ ID NO: 36844 - protein, 247 aa, Homo sapiens
  Payload ID: 7299
  Gene Symbol: GNB2L1
  Gene Name: guanine nucleotide binding protein (G protein), beta polypeptide 2-like 1
  ENSP ID: ENSP00000427677
  MOD_RES (1)..(1): Any amino acid
XGTTTRRFVGHTKDVLSVAFSSDNRQIVSGSRDKTIKLWNTLGVCKYTVQDESHSEWVSCVRFSPNSSNPIIVSCGWDKLVKVWNLANCKLKTNHIGHTGYLNTVTVSPDGSLCASGGKDGQAMLWDLNEGKHLYTLDGGDIINALCFSPNRYWLCAATGPSIKIWDLEGKIIVDELKQEVISTSSKAEPPQCTSLAWSADGQEYITTTYKLAVEMRAVSYSLPGVVAHAYWRLRWEDLLNCRGLRL

SEQ ID NO: 36845 - protein, 153 aa, Homo sapiens; identical to SEQ ID NO: 36839
  Payload ID: 7299
  Gene Symbol: GNB2L1
  Gene Name: guanine nucleotide binding protein (G protein), beta polypeptide 2-like 1
  ENSP ID: ENSP00000486170

SEQ ID NO: 36846 - protein, 340 aa, Homo sapiens [sequence omitted]

SEQ ID NO: 36847 - protein, 339 aa, Homo sapiens
  Payload ID: 7300
  Gene Symbol: GNB3
  Gene Name: guanine nucleotide binding protein (G protein), beta polypeptide 3
  ENSP ID: ENSP00000414734
MGEMEQLRQEAEQLKKQIADARKACADVTLAELVSGLEVVGRVQMRTRRTLRGHLAKIYAMHWATDSKLLVSASQDGKLIVWDSYTTNKVHAIPLRSSWVMTCAYAPSGNFVACGGLDNMCSIYNLKSREGNVKVSRELSAHTGYLSCCRFLDDNNIVTSSGDTTALWDIETGQQKTVFVGHTGDCMSLAVSPDFNLFISGACDASAKLWDVREGTCRQTFTGHESDINAICFFPNGEAICTGSDDASCRLFDLRADQELICFSHESIICGITSVAFSLSGRLLFAGYDDFNCNVWDSMKSERVGILSGHDNRVSCLGVTADGMAVATGSWDSFLKIWN

SEQ ID NO: 36848 - protein, 232 aa, Homo sapiens
  Payload ID: 7300
  Gene Symbol: GNB3
  Gene Name: guanine nucleotide binding protein (G protein), beta polypeptide 3
  ENSP ID: ENSP00000439753
MGEMEQLRQEAEQLKKQIADARKACADVTLAELVSGLEVVGRVQMRTRRTLRGHLAKIYAMHWATDSKLLVSASQDGKLIVWDSYTTNKVHAIPLRSSWVMTCAYAPSGNFVACGGLDNMCSIYNLKSREGNVKVSRELSAHTGYLSCCRFLDDNNIVTSSGDTTCALWDIETGQQKTVFVGHTGDCMSLAVSPDFNLFISGACDASAKLWDVREGTCRQTFTGHESDINAI

SEQ ID NO: 36849 - protein, 232 aa, Homo sapiens
  Payload ID: 7300
  Gene Symbol: GNB3
  Gene Name: guanine nucleotide binding protein (G protein), beta polypeptide 3
  ENSP ID: ENSP00000442002
MGEMEQLRQEAEQLKKQIADARKACADVTLAELVSGLEVVGRVQMRTRRTLRGHLAKIYAMHWATDSKLLVSASQDGKLIVWDSYTTNKVHAIPLRSSWVMTCAYAPSGNFVACGGLDNMCSIYNLKSREGNVKVSRELSAHTGYLSCCRFLDDNNIVTSSGDTTALWDIETGQQKTVFVGHTGDCMSLAVSPDFNLFISGACDASAKLWDVREGTCRQTFTGHESDINAIC

SEQ ID NO: 36850 - protein, 36 aa, Homo sapiens
  Payload ID: 7300
  Gene Symbol: GNB3
  Gene Name: guanine nucleotide binding protein (G protein), beta polypeptide 3
  ENSP ID: ENSP00000444325
MGEMEQLRQEAEQLKKQIADARKACADVTLAERDLL

SEQ ID NO: 36851 - protein, 264 aa, Homo sapiens
  Payload ID: 7300
  Gene Symbol: GNB3
  Gene Name: guanine nucleotide binding protein (G protein), beta polypeptide 3
  ENSP ID: ENSP00000445967
MGEMEQLRQEAEQLKKQIADARKACADVTLAELVSGLEVVGRVQMRTRRTLRGHLAKIYAMHWATDSKLLVSASQDGKLIVWDSYTTNKVHAIPLRSSWVMTCAYAPSGNFVACGGLDNMCSIYNLKSREGNVKVSRELSAHTGYLSCCRFLDDNNIVTSSGDTTCAKLWDVREGTCRQTFTGHESDINAICFFPNGEAICTGSDDASCRLFDLRADQELICFSHESIICGITSVAFSLSGRLLFAGYDDFNCNVWDSMKSERV

SEQ ID NO: 36852 - protein, 340 aa, Homo sapiens
  Payload ID: 7301
  Gene Symbol: GNB4
  Gene Name: guanine nucleotide binding protein (G protein), beta polypeptide 4
  Uniprot ID: Q9HAV0
  ENSP ID: ENSP00000232564
MSELEQLRQEAEQLRNQIQDARKACNDATLVQITSNMDSVGRIQMRTRRTLRGHLAKIYAMHWGYDSRLLVSASQDGKLIIWDSYTTNKMHAIPLRSSWVMTCAYAPSGNYVACGGLDNICSIYNLKTREGNVRVSRELPGHTGYLSCCRFLDDSQIVTSSGDTTCALWDIETAQQTTTFTGHSGDVMSLSLSPDMRTFVSGACDASSKLWDIRDGMCRQSFTGHVSDINAVSFFPNGYAFATGSDDATCRLFDLRADQELLLYSHDNIICGITSVAFSKSGRLLLAGYDDFNCNVWDTLKGDRAGVLAGHDNRVSCLGVTDDGMAVATGSWDSFLRIWN

SEQ ID NO: 36853 - protein, 340 aa, Homo sapiens; identical to SEQ ID NO: 36852
  Payload ID: 7301
  Gene Symbol: GNB4
  Gene Name: guanine nucleotide binding protein (G protein), beta polypeptide 4
  Uniprot ID: Q9HAV0
  ENSP ID: ENSP00000419693

SEQ ID NO: 36854 - protein, 165 aa, Homo sapiens
  Payload ID: 7301
  Gene Symbol: GNB4
  Gene Name: guanine nucleotide binding protein (G protein), beta polypeptide 4
  ENSP ID: ENSP00000420066
  MOD_RES (1)..(1): Any amino acid
XLIIWDSYTTNKMHAIPLRSSWVMTCAYAPSGNYVACGGLDNICSIYNLKTREGNVRVSRELPGHTGYLSCCRFLDDSQIVTSSGDTTCALWDIETAQQTTTFTGHSGDVMSLSLSPDMRTFVSGACDASSKLWDIRDGMCRQSFTGHVSDINAVSVSLLVMTTV

SEQ ID NO: 36855 - protein, 79 aa, Homo sapiens
  Payload ID: 7301
  Gene Symbol: GNB4
  Gene Name: guanine nucleotide binding protein (G protein), beta polypeptide 4
  ENSP ID: ENSP00000420606
MSELEQLRQEAEQLRNQIQDARKACNDATLVQITSNMDSVGRIQMRTRRTLRGHLAKIYAMHWGYDSRLLVSASQDGKL

SEQ ID NO: 36856 - protein, 68 aa, Homo sapiens
  Payload ID: 7302
  Gene Symbol: GNG10
  Gene Name: guanine nucleotide binding protein (G protein), gamma 10
  Uniprot ID: P50151
  ENSP ID: ENSP00000363411
MSSGASASALQRLVEQLKLEAGVERIKVSQAAAELQQYCMQNACKDALLVGVPAGSNPFREPRSCALL

SEQ ID NO: 36857 - protein, 73 aa, Homo sapiens
  Payload ID: 7303
  Gene Symbol: GNG11
  Gene Name: guanine nucleotide binding protein (G protein), gamma 11
  Uniprot ID: P61952
  ENSP ID: ENSP00000248564
MPALHIEDLPEKEKLKMEVEQLRKEVKLQRQQVSKCSEEIKNYIEERSGEDPLVKGIPEDKNPFKEKGSCVIS

SEQ ID NO: 36858 - protein, 72 aa, Homo sapiens
  Payload ID: 7304
  Gene Symbol: GNG12
  Gene Name: guanine nucleotide binding protein (G protein), gamma 12
  Uniprot ID: Q9UBI6
  ENSP ID: ENSP00000360021
MSSKTASTNNIAQARRTVQQLRLEASIERIKVSKASADLMSYCEEHARSDPLLIGIPTSENPFKDKKTCIIL

SEQ ID NO: 36859 - protein, 67 aa, Homo sapiens
  Payload ID: 7305
  Gene Symbol: GNG13
  Gene Name: guanine nucleotide binding protein (G protein), gamma 13
  Uniprot ID: Q9P2W3
  ENSP ID: ENSP00000248150
MEEWDVPQMKKEVESLKYQLAFQREMASKTIPELLKWIEDGIPKDPFLNPDLMKNNPWVEKGKCTIL

SEQ ID NO: 36860 - protein, 71 aa, Homo sapiens
  Payload ID: 7306
  Gene Symbol: GNG2
  Gene Name: guanine nucleotide binding protein (G protein), gamma 2
  Uniprot ID: P59768
  ENSP ID: ENSP00000334448
MASNNTASIAQARKLVEQLKMEANIDRIKVSKAAADLMAYCEAHAKEDPLLTPVPASENPFREKKFFCAIL

SEQ ID NO: 36861 - protein, 52 aa, Homo sapiens
  Payload ID: 7306
  Gene Symbol: GNG2
  Gene Name: guanine nucleotide binding protein (G protein), gamma 2
  ENSP ID: ENSP00000450586
MASNNTASIAQARKLVEQLKMEANIDRIKSALCWSVLRRRHIIASFVCRCSL

SEQ ID NO: 36862 - protein, 110 aa, Homo sapiens
  Payload ID: 7306
  Gene Symbol: GNG2
  Gene Name: guanine nucleotide binding protein (G protein), gamma 2
  ENSP ID: ENSP00000450758
MVYLQAKTRIPEHRKVTQLIKCWSPDLNPVFLKDLSSTPMASNNTASIAQARKLVEQLKMEANIDRIKVSKAAADLMAYCEAHAKEDPLLTPVPASENPFREKKFFCAIL

SEQ ID NO: 36863 - protein, 37 aa, Homo sapiens
  Payload ID: 7306
  Gene Symbol: GNG2
  Gene Name: guanine nucleotide binding protein (G protein), gamma 2
  ENSP ID: ENSP00000450904
MQGKLQPPMEREARDGVPSGKARSASEPQALGTEECF

SEQ ID NO: 36864 - protein, 71 aa, Homo sapiens; identical to SEQ ID NO: 36860
  Payload ID: 7306
  Gene Symbol: GNG2
  Gene Name: guanine nucleotide binding protein (G protein), gamma 2
  Uniprot ID: P59768
  ENSP ID: ENSP00000451102

SEQ ID NO: 36865 - protein, 71 aa, Homo sapiens; identical to SEQ ID NO: 36860
  Payload ID: 7306
  Gene Symbol: GNG2
  Gene Name: guanine nucleotide binding protein (G protein), gamma 2
  Uniprot ID: P59768
  ENSP ID: ENSP00000451231

SEQ ID NO: 36866 - protein, 102 aa, Homo sapiens
  Payload ID: 7306
  Gene Symbol: GNG2
  Gene Name: guanine nucleotide binding protein (G protein), gamma 2
  ENSP ID: ENSP00000451279
MQGKLQPPMEREARDGVPSGKVFLKDLSSTPMASNNTASIAQARKLVEQLKMEANIDRIKVSKAAADLMAYCEAHAKEDPLLTPVPASENPFREKKFFCAIL

SEQ ID NO: 36867 - protein, 61 aa, Homo sapiens
  Payload ID: 7306
  Gene Symbol: GNG2
  Gene Name: guanine nucleotide binding protein (G protein), gamma 2
  ENSP ID: ENSP00000451536
MTVPLNGVIRQHKTDKPDQVFLKDLSSTPMASNNTASIAQARKLVEQLKMEANIDRIKEVH

SEQ ID NO: 36868 - protein, 71 aa, Homo sapiens; identical to SEQ ID NO: 36860
  Payload ID: 7306
  Gene Symbol: GNG2
  Gene Name: guanine nucleotide binding protein (G protein), gamma 2
  Uniprot ID: P59768
  ENSP ID: ENSP00000451576

SEQ ID NO: 36869 - protein, 71 aa, Homo sapiens; identical to SEQ ID NO: 36860
  Payload ID: 7306
  Gene Symbol: GNG2
  Gene Name: guanine nucleotide binding protein (G protein), gamma 2
  Uniprot ID: P59768
  ENSP ID: ENSP00000452014

SEQ ID NO: 36870 - protein, 71 aa, Homo sapiens; identical to SEQ ID NO: 36860
  Payload ID: 7306
  Gene Symbol: GNG2
  Gene Name: guanine nucleotide binding protein (G protein), gamma 2
  Uniprot ID: P59768
  ENSP ID: ENSP00000484021

SEQ ID NO: 36871 - protein, 75 aa, Homo sapiens
  Payload ID: 7307
  Gene Symbol: GNG3
  Gene Name: guanine nucleotide binding protein (G protein), gamma 3
  Uniprot ID: P63215
  ENSP ID: ENSP00000294117
MKGETPVNSTMSIGQARKMVEQLKIEASLCRIKVSKAAADLMTYCDAHACEDPLITPVPTSENPFREKKFFCALL

SEQ ID NO: 36872 - protein, 75 aa, Homo sapiens; identical to SEQ ID NO: 35859
  Payload ID: 7308
  Gene Symbol: GNG4
  Gene Name: guanine nucleotide binding protein (G protein), gamma 4
  Uniprot ID: P50150
  ENSP ID: ENSP00000355556

SEQ ID NO: 36873 - protein, 75 aa, Homo sapiens; identical to SEQ ID NO: 35859
  Payload ID: 7308
  Gene Symbol: GNG4
  Gene Name: guanine nucleotide binding protein (G protein), gamma 4
  Uniprot ID: P50150
  ENSP ID: ENSP00000355557

SEQ ID NO: 36874 - protein, 75 aa, Homo sapiens; identical to SEQ ID NO: 35859
  Payload ID: 7308
  Gene Symbol: GNG4
  Gene Name: guanine nucleotide binding protein (G protein), gamma 4
  Uniprot ID: P50150
  ENSP ID: ENSP00000375727

SEQ ID NO: 36875 - protein, 75 aa, Homo sapiens; identical to SEQ ID NO: 35859
  Payload ID: 7308
  Gene Symbol: GNG4
  Gene Name: guanine nucleotide binding protein (G protein), gamma 4
  Uniprot ID: P50150
  ENSP ID: ENSP00000398629

SEQ ID NO: 36876 - protein, 75 aa, Homo sapiens; identical to SEQ ID NO: 35859
  Payload ID: 7308
  Gene Symbol: GNG4
  Gene Name: guanine nucleotide binding protein (G protein), gamma 4
  Uniprot ID: P50150
  ENSP ID: ENSP00000482192

SEQ ID NO: 36877 - protein, 68 aa, Homo sapiens
  Payload ID: 7309
  Gene Symbol: GNG5
  Gene Name: guanine nucleotide binding protein (G protein), gamma 5
  Uniprot ID: P63218
  ENSP ID: ENSP00000359675
MSGSSSVAAMKKVVQQLRLEAGLNRVKVSQAAADLKQFCLQNAQHDPLLTGVSSSTNPFRPQKVCSFL

SEQ ID NO: 36878 - protein, 68 aa, Homo sapiens; identical to SEQ ID NO: 36877
  Payload ID: 7309
  Gene Symbol: GNG5
  Gene Name: guanine nucleotide binding protein (G protein), gamma 5
  Uniprot ID: P63218
  ENSP ID: ENSP00000359679

SEQ ID NO: 36879 - protein, 68 aa, Homo sapiens
  Payload ID: 7310
  Gene Symbol: GNG7
  Gene Name: guanine nucleotide binding protein (G protein), gamma 7
  Uniprot ID: O60262
  ENSP ID: ENSP00000371594
MSATNNIAQARKLVEQLRIEAGIERIKVSKAASDLMSYCEQHARNDPLLVGVPASENPFKDKKPCIIL

SEQ ID NO: 36880 - protein, 36 aa, Homo sapiens
  Payload ID: 7310
  Gene Symbol: GNG7
  Gene Name: guanine nucleotide binding protein (G protein), gamma 7
  ENSP ID: ENSP00000468650
MSATNNIAQARKLVEQLRIEAGIERIKERKQGEKGR

SEQ ID NO: 36881 - protein, 70 aa, Homo sapiens
  Payload ID: 7311
  Gene Symbol: GNG8
  Gene Name: guanine nucleotide binding protein (G protein), gamma 8
  Uniprot ID: Q9UK08
  ENSP ID: ENSP00000300873
MSNNMAKIAEARKTVEQLKLEVNIDRMKVSQAAAELLAFCETHAKDDPLVTPVPAAENPFRDKRLFCVLL

SEQ ID NO: 36882 - protein, 74 aa, Homo sapiens
  Payload ID: 7312
  Gene Symbol: GNGT1
  Gene Name: guanine nucleotide binding protein (G protein), gamma transducing activity polypeptide 1
  Uniprot ID: P63211
  ENSP ID: ENSP00000248572
MPVINIEDLTEKDKLKMEVDQLKKEVTLERMLVSKCCEEVRDYVEERSGEDPLVKGIPEDKNPFKELKGGCVIS

SEQ ID NO: 36883 - protein, 74 aa, Homo sapiens; identical to SEQ ID NO: 36882
  Payload ID: 7312
  Gene Symbol: GNGT1
  Gene Name: guanine nucleotide binding protein (G protein), gamma transducing activity polypeptide 1
  Uniprot ID: P63211
  ENSP ID: ENSP00000388777

SEQ ID NO: 36884 - protein, 46 aa, Homo sapiens
  Payload ID: 7312
  Gene Symbol: GNGT1
  Gene Name: guanine nucleotide binding protein (G protein), gamma transducing activity polypeptide 1
  ENSP ID: ENSP00000395756
MPVINIEDLTEKDKLKMEVDQLKKEVTLERMLIPARHLQNQSLMDY

SEQ ID NO: 36885 - protein, 46 aa, Homo sapiens; identical to SEQ ID NO: 36884
  Payload ID: 7312
  Gene Symbol: GNGT1
  Gene Name: guanine nucleotide binding protein (G protein), gamma transducing activity polypeptide 1
  ENSP ID: ENSP00000395857

SEQ ID NO: 36886 - protein, 46 aa, Homo sapiens; identical to SEQ ID NO: 36884
  Payload ID: 7312
  Gene Symbol: GNGT1
  Gene Name: guanine nucleotide binding protein (G protein), gamma transducing activity polypeptide 1
  ENSP ID: ENSP00000401781

SEQ ID NO: 36887 - protein, 69 aa, Homo sapiens
  Payload ID: 7313
  Gene Symbol: GNGT2
  Gene Name: guanine nucleotide binding protein (G protein), gamma transducing activity polypeptide 2
  Uniprot ID: O14610
  ENSP ID: ENSP00000300406
MAQDLSEKDLLKMEVEQLKKEVKNTRIPISKAGKEIKEYVEAQAGNDPFLKGIPEDKNPFKEKGGCLIS

SEQ ID NO: 36888 - protein, 88 aa, Homo sapiens
  Payload ID: 7313
  Gene Symbol: GNGT2
  Gene Name: guanine nucleotide binding protein (G protein), gamma transducing activity polypeptide 2
  ENSP ID: ENSP00000420946
MAQDLSEKDLLKMEVEQLKKEVKNTRIPISKAGKEIKEYVEAQAGNDPFLKGIPEDKNPFKEKGPTFNALLLLLGRASWLELTWSRTP

SEQ ID NO: 36889 - protein, 69 aa, Homo sapiens; identical to SEQ ID NO: 36887
  Payload ID: 7313
  Gene Symbol: GNGT2
  Gene Name: guanine nucleotide binding protein (G protein), gamma transducing activity polypeptide 2
  Uniprot ID: O14610
  ENSP ID: ENSP00000421710

SEQ ID NO: 36890 - protein, 69 aa, Homo sapiens; identical to SEQ ID NO: 36887
  Payload ID: 7313
  Gene Symbol: GNGT2
  Gene Name: guanine nucleotide binding protein (G protein), gamma transducing activity polypeptide 2
  Uniprot ID: O14610
  ENSP ID: ENSP00000422879

SEQ ID NO: 36891 - protein, 69 aa, Homo sapiens; identical to SEQ ID NO: 36887
  Payload ID: 7313
  Gene Symbol: GNGT2
  Gene Name: guanine nucleotide binding protein (G protein), gamma transducing activity polypeptide 2
  Uniprot ID: O14610
  ENSP ID: ENSP00000423924

SEQ ID NO: 36892 - protein, 69 aa, Homo sapiens; identical to SEQ ID NO: 36887
  Payload ID: 7313
  Gene Symbol: GNGT2
  Gene Name: guanine nucleotide binding protein (G protein), gamma transducing activity polypeptide 2
  Uniprot ID: O14610
  ENSP ID: ENSP00000426022

SEQ ID NO: 36893 - protein, 359 aa, Homo sapiens
  Payload ID: 7314
  Gene Symbol: GNAQ
  Gene Name: guanine nucleotide binding protein (G protein), q polypeptide
  Uniprot ID: P50148
  ENSP ID: ENSP00000286548
MTLESIMACCLSEEAKEARRINDEIERQLRRDKRDARRELKLLLLGTGESGKSTFIKQMRIIHGSGYSDEDKRGFTKLVYQNIFTAMQAMIRAMDTLKIPYKYEHNKAHAQLVREVDVEKVSAFENPYVDAIKSLWNDPGIQECYDRRREYQLSDSTKYYLNDLDRVADPAYLPTQQDVLRVRVPTTGIIEYPFDLQSVIFRMVDVGGQRSERRKWIHCFENVTSIMFLVALSEYDQVLVESDNENRMEESKALFRTIITYPWFQNSSVILFLNKKDLLEEKIMYSHLVDYFPEYDGPQRDAQAAREFILKMFVDLNPDSDKIIYSHFTCATDTENIRFVFAAVKDTILQLNLKEYNLV

SEQ ID NO: 36894 - protein, 170 aa, Homo sapiens
  Payload ID: 7314
  Gene Symbol: GNAQ
  Gene Name: guanine nucleotide binding protein (G protein), q polypeptide
  ENSP ID: ENSP00000391501
MGERWADSQLDSRSTHGTGESGKSTFIKQMRIIHGSGYSDEDKRGFTKLVYQNIFTAMQAMIRAMDTLKIPYKYEHNKAHAQLVREVDVEKVSAFENPYVDAIKSLWNDPGIQECYDRRREYQLSDSTKYYLNDLDRVADPAYLPTQQDVLRVRVPTTGIIEYPFDLQSV

SEQ ID NO: 36895 - protein, 354 aa, Homo sapiens
  Payload ID: 7315
  Gene Symbol: GNAT3
  Gene Name: guanine nucleotide binding protein, alpha transducing 3
  Uniprot ID: A8MTJ3
  ENSP ID: ENSP00000381339
MGSGISSESKESAKRSKELEKKLQEDAERDARTVKLLLLGAGESGKSTIVKQMKIIHKNGYSEQECMEFKAVIYSNTLQSILAIVKAMTTLGIDYVNPRSAEDQRQLYAMANTLEDGGMTPQLAEVIKRLWRDPGIQACFERASEYQLNDSAAYYLNDLDRITASGYVPNEQDVLHSRVKTTGIIETQFSFKDLHFRMFDVGGQRSERKKWIHCFEGVTCIIFCAALSAYDMVLVEDEEVNRMHESLHLFNSICNHKYFSTTSIVLFLNKKDIFQEKVTKVHLSICFPEYTGPNTFEDAGNYIKNQFLDLNLKKEDKEIYSHMTCATDTQNVKFVFDAVTDIIIKENLKDCGLF

SEQ ID NO: 36896 - protein, 607 aa, Homo sapiens
  Payload ID: 7316
  Gene Symbol: GNL1
  Gene Name: guanine nucleotide binding protein-like 1
  Uniprot ID: P36915
  ENSP ID: ENSP00000365806
MPRKKPFSVKQKKKQLQDKRERKRGLQDGLRSSSNSRSGSRERREEQTDTSDGESVTHHIRRLNQQPSQGLGPRGYDPNRYRLHFERDSREEVERRKRAAREQVLQPVSAELLELDIREVYQPGSVLDFPRRPPWSYEMSKEQLMSQEERSFQDYLGKIHGAYSSEKLSYFEHNLETWRQLWRVLEMSDIVLLITDIRHPVVNFPPALYEYVTGELGLALVLVLNKVDLAPPALVVAWKHYFHQHYPQLHVVLFTSFPRDPRTPQDPSSVLKKSRRRGRGWTRALGPEQLLRACEAITVGKVDLSSWREKIARDVAGATWGNGSGEEEEEEDGPAVLVEQQTDSAMEPTGPTQERYKDGVVTIGCVGFPNVGKSSLINGLVGRKVVSVSRTPGHTRYFQTYFLTPSVKLCDCPGLIFPSLLPRQLQVLAGIYPIAQIQEPYTAVGYLASRIPVQALLHLRHPEAEDPSAEHPWCAWDICEAWAEKRGYKTAKAARNDVYRAANSLLRLAVDGRLSLCFHPPGYSEQKGTWESHPETTELVVLQGRVGPAGDEEEEEEEELSSSCEEEGEEDRDADEEGEGDEETPTSAPGSSLAGRNPYALLGEDEC

SEQ ID NO: 36897 - protein, 407 aa, Homo sapiens
  Payload ID: 7316
  Gene Symbol: GNL1
  Gene Name: guanine nucleotide binding protein-like 1
  ENSP ID: ENSP00000372942
VVNFPPALYEYVTGELGLALVLVLNKVDLAPPALVVAWKHYFHQHYPQLHVVLFTSFPRDPRTPQDPSSVLKKSRRRGRGWTRALGPEQLLRACEAITVGKVDLSSWREKIARDVAGATWGNGSGEEEEEEDGPAVLVEQQTDSAMEPTGPTQERYKDGVVTIGCVGFPNVGKSSLINGLVGRKVVSVSRTPGHTRYFQTYFLTPSVKLCDCPGLIFPSLLPRQLQVLAGIYPIAQIQEPYTAVGYLASRIPVQALLHLRHPEAEDPSAEHPWCAWDICEAWAEKRGYKTAKAARNDVYRAANSLLRLAVDGRLSLCFHPPGYSEQKGTWESHPETTELVVLQGRVGPAGDEEEEEEEELSSSCEEEGEEDRDADEEGEGDEETPTSAPGSSLAGRNPYALLGEDEC

SEQ ID NO: 36898 - protein, 607 aa, Homo sapiens; identical to SEQ ID NO: 36896
  Payload ID: 7316
  Gene Symbol: GNL1
  Gene Name: guanine nucleotide binding protein-like 1
  Uniprot ID: P36915
  ENSP ID: ENSP00000373090

SEQ ID NO: 36899 - protein, 264 aa, Homo sapiens
  Payload ID: 7316
  Gene Symbol: GNL1
  Gene Name: guanine nucleotide binding protein-like 1
  ENSP ID: ENSP00000392654
MGERVLWPLRAGQHWRHRPLPAGLQDGLRSSSNSRSGSRERREEQTDTSDGESVTHHIRRLNQQPSQGLGPRGYDPNRYRLHFERDSREEVERRKRAAREQVLQPVSAELLELDIREVYQPGSVLDFPRRPPWSYEMSKEQLMSQEERSFQDYLGKIHGAYSSEKLSYFEHNLETWRQLWRVLEMSDIVLLITDIRHPVVNFPPALYEYVTGELGLALVLVLNKVDLAPPALVVAWKHYFHQHYPQLHVVLFTSFPRDPRTPQD

SEQ ID NO: 36900 - protein, 607 aa, Homo sapiens; identical to SEQ ID NO: 36896
  Payload ID: 7316
  Gene Symbol: GNL1
  Gene Name: guanine nucleotide binding protein-like 1
  Uniprot ID: P36915
  ENSP ID: ENSP00000394290

SEQ ID NO: 36901 - protein, 66 aa, Homo sapiens
  Payload ID: 7316
  Gene Symbol: GNL1
  Gene Name: guanine nucleotide binding protein-like 1
  ENSP ID: ENSP00000396129
VVNFPPALYEYVTGELGLALVLVLNKVDLAPPALVVAWKHYFHQHYPQLHVVLFTSFPRDPRTPQD

SEQ ID NO: 36902 - protein, 264 aa, Homo sapiens; identical to SEQ ID NO: 36899
  Payload ID: 7316
  Gene Symbol: GNL1
  Gene Name: guanine nucleotide binding protein-like 1
  ENSP ID: ENSP00000400869

SEQ ID NO: 36903 - protein, 264 aa, Homo sapiens; identical to SEQ ID NO: 36899
  Payload ID: 7316
  Gene Symbol: GNL1
  Gene Name: guanine nucleotide binding protein-like 1
  ENSP ID: ENSP00000400970

SEQ ID NO: 36904 - protein, 264 aa, Homo sapiens; identical to SEQ ID NO: 36899
  Payload ID: 7316
  Gene Symbol: GNL1
  Gene Name: guanine nucleotide binding protein-like 1
  ENSP ID: ENSP00000402631

SEQ ID NO: 36905 - protein, 607 aa, Homo sapiens; identical to SEQ ID NO: 36896
  Payload ID: 7316
  Gene Symbol: GNL1
  Gene Name: guanine nucleotide binding protein-like 1
  Uniprot ID: P36915
  ENSP ID: ENSP00000403576

SEQ ID NO: 36906 - protein, 264 aa, Homo sapiens; identical to SEQ ID NO: 36899
  Payload ID: 7316
  Gene Symbol: GNL1
  Gene Name: guanine nucleotide binding protein-like 1
  ENSP ID: ENSP00000404728

SEQ ID NO: 36907 - protein, 264 aa, Homo sapiens; identical to SEQ ID NO: 36899
  Payload ID: 7316
  Gene Symbol: GNL1
  Gene Name: guanine nucleotide binding protein-like 1
  ENSP ID: ENSP00000407819

SEQ ID NO: 36908 - protein, 607 aa, Homo sapiens; identical to SEQ ID NO: 36896
  Payload ID: 7316
  Gene Symbol: GNL1
  Gene Name: guanine nucleotide binding protein-like 1
  Uniprot ID: P36915
  ENSP ID: ENSP00000409074

SEQ ID NO: 36909 - protein, 607 aa, Homo sapiens; identical to SEQ ID NO: 36896
  Payload ID: 7316
  Gene Symbol: GNL1
  Gene Name: guanine nucleotide binding protein-like 1
  Uniprot ID: P36915
  ENSP ID: ENSP00000409367

SEQ ID NO: 36910 - protein, 264 aa, Homo sapiens; identical to SEQ ID NO: 36899
  Payload ID: 7316
  Gene Symbol: GNL1
  Gene Name: guanine nucleotide binding protein-like 1
  ENSP ID: ENSP00000409984

SEQ ID NO: 36911 - protein, 607 aa, Homo sapiens; identical to SEQ ID NO: 36896
  Payload ID: 7316
  Gene Symbol: GNL1
  Gene Name: guanine nucleotide binding protein-like 1
  Uniprot ID: P36915
  ENSP ID: ENSP00000411162

SEQ ID NO: 36912 - protein, 731 aa, Homo sapiens
  Payload ID: 7317
  Gene Symbol: GNL2
  Gene Name: guanine nucleotide binding protein-like 2 (nucleolar)
  Uniprot ID: Q13823
  ENSP ID: ENSP00000362153
MVKPKYKGRSTINPSKASTNPDRVQGAGGQNMRDRATIRRLNMYRQKERRNSRGKIIKPLQYQSTVASGTVARVEPNIKWFGNTRVIKQSSLQKFQEEMDTVMKDPYKVVMKQSKLPMSLLHDRIRPHNLKVHILDTESFETTFGPKSQRKRPNLFASDMQSLIENAEMSTESYDQGKDRDLVTEDTGVRNEAQEEIYKKGQSKRIWGELYKVIDSSDVVVQVLDARDPMGTRSPHIETYLKKEKPWKHLIFVLNKCDLVPTWATKRWVAVLSQDYPTLAFHASLTNPFGKGAFIQLLRQFGKLHTDKKQISVGFIGYPNVGKSSVINTLRSKKVCNVAPIAGETKVWQYITLMRRIFLIDCPGVVYPSEDSETDIVLKGVVQVEKIKSPEDHIGAVLERAKPEYISKTYKIDSWENAEDFLEKLAFRTGKLLKGGEPDLQTVGKMVLNDWQRGRIPFFVKPPNAEPLVAPQLLPSSSLEVVPEAAQNNPGEEVTETAGEGSESIIKEETEENSHCDANTEMQQILTRVRQNFGKINVVPQFSGDDLVPVEVSDLEEELESFSDEEEEEQEQQRDDAEESSSEPEEENVGNDTKAVIKALDEKIAKYQKFLDKAKAKKFSAVRISKGLSEKIFAKPEEQRKTLEEDVDDRAPSKKGKKRKAQREEEQEHSNKAPRALTSKERRRAVRQQRPKKVGVRYYETHNVKNRNRNKKKTNDSEGQKHKRKKFRQKQ

SEQ ID NO: 36913 - protein, 233 aa, Homo sapiens
  Payload ID: 7317
  Gene Symbol: GNL2
  Gene Name: guanine nucleotide binding protein-like 2 (nucleolar)
  ENSP ID: ENSP00000441288
  MOD_RES (1)..(1): Any amino acid
XDVVVQVLDARDPMGTRSPHIETYLKKEKPWKHLIFVLNKCDLVPTWATKRWVAVLSQDYPTLAFHASLTNPFGKGAFIQLLRQFGKPWHLTFHALLGFPGLLCILCPWSPCSFYVLWLERALPKFKLQIPGQTSAPEGSRGTRLPYQILKASCSLHTDKKQISVGFIGYPNVGKSSVINTLRSKKVCNVAPIAGETKVWQYITLMRRIFLIDCPGVVYPSEDSETDIVLKGV

SEQ ID NO: 36914 - protein, 537 aa, Homo sapiens
  Payload ID: 7318
  Gene Symbol: GNL3
  Gene Name: guanine nucleotide binding protein-like 3 (nucleolar)
  Uniprot ID: Q9BVP2
  ENSP ID: ENSP00000378278
MTCHKRYKIQKKVREHHRKLRKEAKKRGHKKPRKDPGVPNSAPFKEALLREAELRKQRLEELKQQQKLDRQKELEKKRKLETNPDIKPSNVEPMEKEFGLCKTENKAKSGKQNSKKLYCQELKKVIEASDVVLEVLDARDPLGCRCPQVEEAIVQSGQKKLVLILNKSDLVPKENLESWLNYLKKELPTVVFRASTKPKDKGKITKRVKAKKNAAPFRSEVCFGKEGLWKLLGGFQETCSKAIRVGVIGFPNVGKSSIINSLKQEQMCNVGVSMGLTRSMQVVPLDKQITIIDSPSFIVSPLNSSSALALRSPASIEVVKPMEAASAILSQADARQVVLKYTVPGYRNSLEFFTVLAQRRGMHQKGGIPNVEGAAKLLWSEWTGASLAYYCHPPTSWTPPPYFNESIVVDMKSGFNLEELEKNNAQSIRAIKGPHLANSILFQSSGLTNGIIEEKDIHEELPKRKERKQEEREDDKDSDQETVDEEVDENSSGMFAAEETGEALSEETTAGEQSTRSFILDKIIEEDDAYDFSTDYV

SEQ ID NO: 36915 - protein, 549 aa, Homo sapiens
  Payload ID: 7318
  Gene Symbol: GNL3
  Gene Name: guanine nucleotide binding protein-like 3 (nucleolar)
  Uniprot ID: Q9BVP2
  ENSP ID: ENSP00000395772
MKRPKLKKASKRMTCHKRYKIQKKVREHHRKLRKEAKKRGHKKPRKDPGVPNSAPFKEALLREAELRKQRLEELKQQQKLDRQKELEKKRKLETNPDIKPSNVEPMEKEFGLCKTENKAKSGKQNSKKLYCQELKKVIEASDVVLEVLDARDPLGCRCPQVEEAIVQSGQKKLVLILNKSDLVPKENLESWLNYLKKELPTVVFRASTKPKDKGKITKRVKAKKNAAPFRSEVCFGKEGLWKLLGGFQETCSKAIRVGVIGFPNVGKSSIINSLKQEQMCNVGVSMGLTRSMQVVPLDKQITIIDSPSFIVSPLNSSSALALRSPASIEVVKPMEAASAILSQADARQVVLKYTVPGYRNSLEFFTVLAQRRGMHQKGGIPNVEGAAKLLWSEWTGASLAYYCHPPTSWTPPPYFNESIVVDMKSGFNLEELEKNNAQSIRAIKGPHLANSILFQSSGLTNGIIEEKDIHEELPKRKERKQEEREDDKDSDQETVDEEVDENSSGMFAAEETGEALSEETTAGEQSTRSFILDKIIEEDDAYDFSTDYV

SEQ ID NO: 36916 - protein, 134 aa, Homo sapiens
  Payload ID: 7318
  Gene Symbol: GNL3
  Gene Name: guanine nucleotide binding protein-like 3 (nucleolar)
  ENSP ID: ENSP00000419734
MTCHKRYKIQKKVREHHRKLRKEAKKRGHKKPRKDPGVPNSAPFKEALLREAELRKQRLEELKQQQKLDRQKELEKKRKLETNPDIKPSNVEPMEKEFGLCKTENKAKSGKQNSKKLYCQELKKVIEASDVVLE

SEQ ID NO: 36917 - protein, 96 aa, Homo sapiens
  Payload ID: 7318
  Gene Symbol: GNL3
  Gene Name: guanine nucleotide binding protein-like 3 (nucleolar)
  ENSP ID: ENSP00000419895
MTCHKRYKIQKKVREHHRKLRKEAKKRGHKKPRKDPGVPNSAPFKEALLREAELRKQRLEELKQQQKLDRQKELEKKRKLETNPDIKPSNVEPMEK

SEQ ID NO: 36918 - protein, 138 aa, Homo sapiens
  Payload ID: 7318
  Gene Symbol: GNL3
  Gene Name: guanine nucleotide binding protein-like 3 (nucleolar)
  ENSP ID: ENSP00000420345
MKRPKLKKASKRMTCHKRYKIQKKVREHHRKLRKEAKKRGHKKPRKDPGVPNSAPFKEALLREAELRKQRLEELKQQQKLDRQKELEKKRKLETNPDIKPSNVEPMEKEFGLCKTENKAKSGKQNSKKLYCQELKKVS

SEQ ID NO: 36919 - protein, 582 aa, Homo sapiens
  Payload ID: 7319
  Gene Symbol: GNL3L
  Gene Name: guanine nucleotide binding protein-like 3 (nucleolar)-like
  Uniprot ID: Q9NVN8
  ENSP ID: ENSP00000338573
MMKLRHKNKKPGEGSKGHKKISWPYPQPAKQNGKKATSKVPSAPHFVHPNDHANREAELKKKWVEEMREKQQAAREQERQKRRTIESYCQDVLRRQEEFEHKEEVLQELNMFPQLDDEATRKAYYKEFRKVVEYSDVILEVLDARDPLGCRCFQMEEAVLRAQGNKKLVLVLNKIDLVPKEVVEKWLDYLRNELPTVAFKASTQHQVKNLNRCSVPVDQASESLLKSKACFGAENLMRVLGNYCRLGEVRTHIRVGVVGLPNVGKSSLINSLKRSRACSVGAVPGITKFMQEVYLDKFIRLLDAPGIVPGPNSEVGTILRNCVHVQKLADPVTPVETILQRCNLEEISNYYGVSGFQTTEHFLTAVAHRLGKKKKGGLYSQEQAAKAVLADWVSGKISFYIPPPATHTLPTHLSAEIVKEMTEVFDIEDTEQANEDTMECLATGESDELLGDTDPLEMEIKLLHSPMTKIADAIENKTTVYKIGDLTGYCTNPNRHQMGWAKRNVDHRPKSNSMVDVCSVDRRSVLQRIMETDPLQQGQALASALKNKKKMQKRADKIASKLSDSMMSALDLSGNADDGVGD

SEQ ID NO: 36920 - protein, 582 aa, Homo sapiens; identical to SEQ ID NO: 36919
  Payload ID: 7319
  Gene Symbol: GNL3L
  Gene Name: guanine nucleotide binding protein-like 3 (nucleolar)-like
  Uniprot ID: Q9NVN8
  ENSP ID: ENSP00000354091

SEQ ID NO: 36921 - protein, 345 aa, Homo sapiens
  Payload ID: 7320
  Gene Symbol: GMPR
  Gene Name: guanosine monophosphate reductase
  Uniprot ID: P36959
  ENSP ID: ENSP00000259727
MPRIDADLKLDFKDVLLRPKRSSLKSRAEVDLERTFTFRNSKQTYSGIPIIVANMDTVGTFEMAAVMSQHSMFTAIHKHYSLDDWKLFATNHPECLQNVAVSSGSGQNDLEKMTSILEAVPQVKFICLDVANGYSEHFVEFVKLVRAKFPEHTIMAGNVVTGEMVEELILSGADIIKVGVGPGSVCTTRTKTGVGYPQLSAVIECADSAHGLKGHIISDGGCTCPGDVAKAFGAGADFVMLGGMFSGHTECAGEVFERNGRKLKLFYGMSSDTAMNKHAGGVAEYRASEGKTVEVPYKGDVENTILDILGGLRSTCTYVGAAKLKELSRRATFIRVTQQHNTVFS

SEQ ID NO: 36922 - protein, 349 aa, Homo sapiens
  Payload ID: 7321
  Gene Symbol: GMPR2
  Gene Name: guanosine monophosphate reductase 2
  ENSP ID: ENSP00000334409
MPHIDNDVKLDFKDVLLRPKRSTLKSRSEVDLTRSFSFRNSKQTYSGVPIIAANMDTVGTFEMAKVLCKFSLFTAVHKHYSLVQWQEFAGQNPELCFSHSIWLPAQAQALLTLSSWNRSWKLFPRSICLDVANGYSEHFVEFVKDVRKRFPQHTIMAGNVVTGEMVEELILSGADIIKVGIGPGSVCTTRKKTGVGYPQLSAVMECADAAHGLKGHIISDGGCSCPGDVAKAFGAGADFVMLGGMLAGHSESGGELIERDGKKYKLFYGMSSEMAMKKYAGGVAEYRASEGKTVEVPFKGDVEHTIRDILGGIRSTCTYVGAAKLKELSRRTTFIRVTQQVNPIFSEAC

SEQ ID NO: 36923 - protein, 348 aa, Homo sapiens
  Payload ID: 7321
  Gene Symbol: GMPR2
  Gene Name: guanosine monophosphate reductase 2
  Uniprot ID: Q9P2T1
  ENSP ID: ENSP00000347449
MPHIDNDVKLDFKDVLLRPKRSTLKSRSEVDLTRSFSFRNSKQTYSGVPIIAANMDTVGTFEMAKVLCKFSLFTAVHKHYSLVQWQEFAGQNPDCLEHLAASSGTGSSDFEQLEQILEAIPQVKYICLDVANGYSEHFVEFVKDVRKRFPQHTIMAGNVVTGEMVEELILSGADIIKVGIGPGSVCTTRKKTGVGYPQLSAVMECADAAHGLKGHIISDGGCSCPGDVAKAFGAGADFVMLGGMLAGHSESGGELIERDGKKYKLFYGMSSEMAMKKYAGGVAEYRASEGKTVEVPFKGDVEHTIRDILGGIRSTCTYVGAAKLKELSRRTTFIRVTQQVNPIFSEAC

SEQ ID NO: 36924 - protein, 348 aa, Homo sapiens; identical to SEQ ID NO: 36923
  Payload ID: 7321
  Gene Symbol: GMPR2
  Gene Name: guanosine monophosphate reductase 2
  Uniprot ID: Q9P2T1
  ENSP ID: ENSP00000382369

SEQ ID NO: 36925 - protein, 366 aa, Homo sapiens
  Payload ID: 7321
  Gene Symbol: GMPR2
  Gene Name: guanosine monophosphate reductase 2
  Uniprot ID: Q9P2T1
  ENSP ID: ENSP00000392859
MTSCLPALRFIATPRLSAMPHIDNDVKLDFKDVLLRPKRSTLKSRSEVDLTRSFSFRNSKQTYSGVPIIAANMDTVGTFEMAKVLCKFSLFTAVHKHYSLVQWQEFAGQNPDCLEHLAASSGTGSSDFEQLEQILEAIPQVKYICLDVANGYSEHFVEFVKDVRKRFPQHTIMAGNVVTGEMVEELILSGADIIKVGIGPGSVCTTRKKTGVGYPQLSAVMECADAAHGLKGHIISDGGCSCPGDVAKAFGAGADFVMLGGMLAGHSESGGELIERDGKKYKLFYGMSSEMAMKKYAGGVAEYRASEGKTVEVPFKGDVEHTIRDILGGIRSTCTYVGAAKLKELSRRTTFIRVTQQVNPIFSEAC

SEQ ID NO: 36926 - protein, 320 aa, Homo sapiens
  Payload ID: 7321
  Gene Symbol: GMPR2
  Gene Name: guanosine monophosphate reductase 2
  Uniprot ID: Q9P2T1
  ENSP ID: ENSP00000405743
MPHIDNDVKLDFKDVLLRPKRSTLKSRSEVDLTRSFSFRNSKQTYSGVPIIAANMDTVGTFEMAKVLCKHLAASSGTGSSDFEQLEQILEAIPQVKYICLDVANGYSEHFVEFVKDVRKRFPQHTIMAGNVVTGEMVEELILSGADIIKVGIGPGSVCTTRKKTGVGYPQLSAVMECADAAHGLKGHIISDGGCSCPGDVAKAFGAGADFVMLGGMLAGHSESGGELIERDGKKYKLFYGMSSEMAMKKYAGGVAEYRASEGKTVEVPFKGDVEHTIRDILGGIRSTCTYVGAAKLKELSRRTTFIRVTQQVNPIFSEAC

SEQ ID NO: 36927 - protein, 88 aa, Homo sapiens
  Payload ID: 7321
  Gene Symbol: GMPR2
  Gene Name: guanosine monophosphate reductase 2
  ENSP ID: ENSP00000452617
  MOD_RES (1)..(1): Any amino acid
XKYKLFYGMSSEMAMKKYAGGVAEYRASEGKTVEVPFKGDVEHTIRDILGGIRSTCTYVGAAKLKELSRRTTFIRVTQQVNPIFSEAC

SEQ ID NO: 36928 - protein, 70 aa, Homo sapiens
  Payload ID: 7321
  Gene Symbol: GMPR2
  Gene Name: guanosine monophosphate reductase 2
  ENSP ID: ENSP00000452670
MPHIDNDVKLDFKDVLLRPKRSTLKSRSEVDLTRSFSFRNSKQTYSGVPIIAANMDTVGTFEMAKVLCKS

SEQ ID NO: 36929 - protein, 139 aa, Homo sapiens
  Payload ID: 7321
  Gene Symbol: GMPR2
  Gene Name: guanosine monophosphate reductase 2
  ENSP ID: ENSP00000452683
  MOD_RES (1)..(1): Any amino acid
XAGADFVMLGGMLAGHSESGGELIERDGKKYKLFYGMSSEMAMKKYAGGVAEYRASEGKTVEVPFKGDVEHTIRDILGGIRSTCTYVGAAKLKELSRRTTFIRVTQQGSCSNSVLLYLHTQNAQGTHWGGSKEANSLRK

SEQ ID NO: 36930 - protein, 64 aa, Homo sapiens
  Payload ID: 7321
  Gene Symbol: GMPR2
  Gene Name: guanosine monophosphate reductase 2
  ENSP ID: ENSP00000452766
  MOD_RES (1)..(1): Any amino acid
XGVGYPQLSAVMECADAAHGLKGHIISDGGCSCPGDVAKAFEPQRERQWKFLLKEMWNIPSETS

SEQ ID NO: 36931 - protein, 88 aa, Homo sapiens
  Payload ID: 7321
  Gene Symbol: GMPR2
  Gene Name: guanosine monophosphate reductase 2
  ENSP ID: ENSP00000452840
MTSCLPALRFIATPRLSAMPHIDNDVKLDFKDVLLRPKRSTLKSRSEVDLTRSFSFRNSKQTYSGVPIIAANMDTVGTFEMAKVLCKS

SEQ ID NO: 36932 - protein, 57 aa, Homo sapiens
  Payload ID: 7321
  Gene Symbol: GMPR2
  Gene Name: guanosine monophosphate reductase 2
  ENSP ID: ENSP00000453079
MDTVGTFEMAKVLCKFSLFTAVHKHYSLVQWQEFAGQNPDCLEHLAASSGTGSSDFE

SEQ ID NO: 36933 - protein, 169 aa, Homo sapiens
  Payload ID: 7321
  Gene Symbol: GMPR2
  Gene Name: guanosine monophosphate reductase 2
  ENSP ID: ENSP00000453139
FVKDVRKRFPQHTIMAGNVVTGEMVEELILSGADIIKVGIGPGSVCTTRKKTGVGYPQLSAVMECADAAHGLKGHIISDGGCSCPGDVAKAFGAGADFVMLGGMLAGHSESGGELIERDGKKYKLFYGMSSEMAMKKYAGGVAEYRRCGTYHPRHPRRDPLYVYLCGSS

SEQ ID NO: 36934 - protein, 348 aa, Homo sapiens; identical to SEQ ID NO: 36923
  Payload ID: 7321
  Gene Symbol: GMPR2
  Gene Name: guanosine monophosphate reductase 2
  Uniprot ID: Q9P2T1
  ENSP ID: ENSP00000453299

SEQ ID NO: 36935 - protein, 333 aa, Homo sapiens
  Payload ID: 7321
  Gene Symbol: GMPR2
  Gene Name: guanosine monophosphate reductase 2
  ENSP ID: ENSP00000453355
MTSCLPALRFIATPRLSAMPHIDNDVKLDFKDVLLRPKRSTLKSRSEVDLTRSFSFRNSKQTYSGVPIIAANMDTVGTFEMAKVLCKFSLFTAVHKHYSLVQWQEFAGQNPDCLEHLAASSGTGSSDFEQLEQILEAIPQAGNVVTGEMVEELILSGADIIKVGIGPGSVCTTRKKTGVGYPQLSAVMECADAAHGLKGHIISDGGCSCPGDVAKAFGAGADFVMLGGMLAGHSESGGELIERDGKKYKLFYGMSSEMAMKKYAGGVAEYRASEGKTVEVPFKGDVEHTIRDILGGIRSTCTYVGAAKLKELSRRTTFIRVTQQVNPIFSEAC

SEQ ID NO: 36936 - protein, 315 aa, Homo sapiens
  Payload ID: 7321
  Gene Symbol: GMPR2
  Gene Name: guanosine monophosphate reductase 2
  ENSP ID: ENSP00000453537
MPHIDNDVKLDFKDVLLRPKRSTLKSRSEVDLTRSFSFRNSKQTYSGVPIIAANMDTVGTFEMAKVLCKFSLFTAVHKHYSLVQWQEFAGQNPDCLEHLAASSGTGSSDFEQLEQILEAIPQAGNVVTGEMVEELILSGADIIKVGIGPGSVCTTRKKTGVGYPQLSAVMECADAAHGLKGHIISDGGCSCPGDVAKAFGAGADFVMLGGMLAGHSESGGELIERDGKKYKLFYGMSSEMAMKKYAGGVAEYRASEGKTVEVPFKGDVEHTIRDILGGIRSTCTYVGAAKLKELSRRTTFIRVTQQVNPIFSEAC

SEQ ID NO: 36937 - protein, 70 aa, Homo sapiens; identical to SEQ ID NO: 36928
  Payload ID: 7321
  Gene Symbol: GMPR2
  Gene Name: guanosine monophosphate reductase 2
  ENSP ID: ENSP00000453560

SEQ ID NO: 36938 - protein, 75 aa, Homo sapiens
  Payload ID: 7321
  Gene Symbol: GMPR2
  Gene Name: guanosine monophosphate reductase 2
  ENSP ID: ENSP00000453594
MPHIDNDVKLDFKDVLLRPKRSTLKSRSEVDLTRSFSFRNSKQTYSGVPIIAANMDTVGTFEMAKVLFLSLHCCP

SEQ ID NO: 36939 - protein, 131 aa, Homo sapiens
  Payload ID: 7321
  Gene Symbol: GMPR2
  Gene Name: guanosine monophosphate reductase 2
  ENSP ID: ENSP00000453714
MPHIDNDVKLDFKDVLLRPKRSTLKSRSEVDLTRSFSFRNSKQTYSGVPIIAANMDTVGTFEMAKVLCKFSLFTAVHKHYSLVQWQEFAGQNPDCLEHLAASSGTGSSDFEQLEQILEAIPQAGNVVTGEM

SEQ ID NO: 36940 - protein, 151 aa, Homo sapiens
  Payload ID: 7321
  Gene Symbol: GMPR2
  Gene Name: guanosine monophosphate reductase 2
  ENSP ID: ENSP00000453761
MPHIDNDVKLDFKDVLLRPKRSTLKSRSEVDLTRSFSFRNSKQTYSGVPIIAANMDTVGTFEMAKFSLFTAVHKHYSLVQWQEFAGQNPDCLEHLAASSGTGSSDFEQLEQILEAIPQVKYICLDVANGYSEHFVEFVKDVRKRFPQHTIM

SEQ ID NO: 36941 - protein, 93 aa, Homo sapiens
  Payload ID: 7321
  Gene Symbol: GMPR2
  Gene Name: guanosine monophosphate reductase 2
  ENSP ID: ENSP00000453772
  MOD_RES (1)..(1): Any amino acid
XASEGKTVEVPFKGDVEHTIRDILGGIRSTCTYVGAAKLKELSRRTTFIRVTQQVNPIFSEGSCSNSVLLYLHTQNAQGTHWGGSKEANSLRK

SEQ ID NO: 36942 - protein, 69 aa, Homo sapiens
  Payload ID: 7321
  Gene Symbol: GMPR2
  Gene Name: guanosine monophosphate reductase 2
  ENSP ID: ENSP00000453833
  MOD_RES (1)..(1): Any amino acid
XMLGAWLSTEGKTVEVPFKGDVEHTIRDILGGIRSTCTYVGAAKLKELSRRTTFIRVTQQVNPIFSEAC

SEQ ID NO: 36943 - protein, 93 aa, Homo sapiens
  Payload ID: 7321
  Gene Symbol: GMPR2
  Gene Name: guanosine monophosphate reductase 2
  ENSP ID: ENSP00000453895
MTSCLPALRFIATPRLSAMPHIDNDVKLDFKDVLLRPKRSTLKSRSEVDLTRSFSFRNSKQTYSGVPIIAANMDTVGTFEMAKVLFLSLHCCP

SEQ ID NO: 36944 - protein, 239 aa, Homo sapiens
  Payload ID: 7321
  Gene Symbol: GMPR2
  Gene Name: guanosine monophosphate reductase 2
  ENSP ID: ENSP00000454009
MPHIDNDVKLDFKDVLLRPKRSTLKSRSEVDLTRSFSFRNSKQTYSGVPIIAANMDTVGTFEMAKVLCKVPGSFWDVPQMGCVFLIYKLFTLKWKMLLLSVLLPASILVAEKFSLFTAVHKHYSLVQWQEFAGQNPDCLEHLAASSGTGSSDFEQLEQILEAIPQVKYICLDVANGYSEHFVEFVKDVRKRFPQHTIMAGNVVTGEMVEELILSGADIIKVGIGPGSVCTTRKKTGVGY

SEQ ID NO: 36945 - protein, 427 aa, Homo sapiens
  Payload ID: 7321
  Gene Symbol: GMPR2
  Gene Name: guanosine monophosphate reductase 2
  ENSP ID: ENSP00000454038
MTSCLPALRFIATPRLSAMPHIDNDVKLDFKDVLLRPKRSTLKSRSEVDLTRSFSFRNSKQTYSGVPIIAANMDTVGTFEMAKVLCKFSLFTAVHKHYSLVQWQEFAGQNPDCLEHLAASSGTGSSDFEQLEQILEAIPQVKYICLDVANGYSEHFVEFVKDVRKRFPQHTIMAGNVVTGEMVEELILSGADIIKVGIGPGSVCTTRKKTGVGYPQLSAVMECADAAHGLKGHIISDGGCSCPGDVAKAFGAGADFVMLGGMLAGHSESGGELIERDGKKYKLFYGMSSEMAMKKYAGGVAEYRYVWRPRSLVIVWRQNSWLLRGGWYSSQRSMVNRGSMLGSVEKSLGLRNPEGEDNKVFPTLRASEGKTVEVPFKGDVEHTIRDILGGIRSTCTYVGAAKLKELSRRTTFIRVTQQVNPIFSEAC

SEQ ID NO: 36946 - protein, 125 aa, Homo sapiens
  Payload ID: 7321
  Gene Symbol: GMPR2
  Gene Name: guanosine monophosphate reductase 2
  ENSP ID: ENSP00000454138
MAGNVVTGEMVEELILSGADIIKVGIGPGSVCTTRKKTGVGYPQLSAVMECADAAHGLKGHIISDGGCSCPGDVAKAFGAGADFVMLGGMLAGHSESGGELIERDGKKYKLFYGMSSEMAMKKYA

SEQ ID NO: 36947 - protein, 348 aa, Homo sapiens
  Payload ID: 7321
  Gene Symbol: GMPR2
  Gene Name: guanosine monophosphate reductase 2
  ENSP ID: ENSP00000480342
MPHIDNDVKLDFKDVLLRPKRSTLKSRSEVDLTRSFSFRNSKQTYSGVPIIAANMDTVGTFEMAKVLCKFSLFTAVHKHYSLVQWQEFAGQNPDCLESIWLPAQAQALLTLSSWNRSWKLFPRKYICLDVANGYSEHFVEFVKDVRKRFPQHTIMAGNVVTGEMVEELILSGADIIKVGIGPGSVCTTRKKTGVGYPQLSAVMECADAAHGLKGHIISDGGCSCPGDVAKAFGAGADFVMLGGMLAGHSESGGELIERDGKKYKLFYGMSSEMAMKKYAGGVAEYRASEGKTVEVPFKGDVEHTIRDILGGIRSTCTYVGAAKLKELSRRTTFIRVTQQVNPIFSEAC

SEQ ID NO: 36948 - protein, 592 aa, Homo sapiens
  Payload ID: 7322
  Gene Symbol: GBP1
  Gene Name: guanylate binding protein 1, interferon-inducible
  Uniprot ID: P32455
  ENSP ID: ENSP00000359504
MASEIHMTGPMCLIENTNGRLMANPEALKILSAITQPMVVVAIVGLYRTGKSYLMNKLAGKKKGFSLGSTVQSHTKGIWMWCVPHPKKPGHILVLLDTEGLGDVEKGDNQNDSWIFALAVLLSSTFVYNSIGTINQQAMDQLYYVTELTHRIRSKSSPDENENEVEDSADFVSFFPDFVWTLRDFSLDLEADGQPLTPDEYLTYSLKLKKGTSQKDETFNLPRLCIRKFFPKKKCFVFDRPVHRRKLAQLEKLQDEELDPEFVQQVADFCSYIFSNSKTKTLSGGIQVNGPRLESLVLTYVNAISSGDLPCMENAVLALAQIENSAAVQKAIAHYEQQMGQKVQLPTETLQELLDLHRDSEREAIEVFIRSSFKDVDHLFQKELAAQLEKKRDDFCKQNQEASSDRCSALLQVIFSPLEEEVKAGIYSKPGGYRLFVQKLQDLKKKYYEEPRKGIQAEEILQTYLKSKESMTDAILQTDQTLTEKEKEIEVERVKAESAQASAKMLQEMQRKNEQMMEQKERSYQEHLKQLTEKMENDRVQLLKEQERTLALKLQEQEQLLKEGFQKESRIMKNEIQDLQTKMRRRKACTIS

SEQ ID NO: 36949 - protein, 591 aa, Homo sapiens
  Payload ID: 7323
  Gene Symbol: GBP2
  Gene Name: guanylate binding protein 2, interferon-inducible
  Uniprot ID: P32456
  ENSP ID: ENSP00000359497
MAPEINLPGPMSLIDNTKGQLVVNPEALKILSAITQPVVVVAIVGLYRTGKSYLMNKLAGKKNGFSLGSTVKSHTKGIWMWCVPHPKKPEHTLVLLDTEGLGDIEKGDNENDSWIFALAILLSSTFVYNSMGTINQQAMDQLHYVTELTDRIKANSSPGNNSVDDSADFVSFFPAFVWTLRDFTLELEVDGEPITADDYLELSLKLRKGTDKKSKSFNDPRLCIRKFFPKRKCFVFDWPAPKKYLAHLEQLKEEELNPDFIEQVAEFCSYILSHSNVKTLSGGIPVNGPRLESLVLTYVNAISSGDLPCMENAVLALAQIENSAAVEKAIAHYEQQMGQKVQLPTETLQELLDLHRDSEREAIEVFMKNSFKDVDQMFQRKLGAQLEARRDDFCKQNSKASSDCCMALLQDIFGPLEEDVKQGTFSKPGGYRLFTQKLQELKNKYYQVPRKGIQAKEVLKKYLESKEDVADALLQTDQSLSEKEKAIEVERIKAESAEAAKKMLEEIQKKNEEMMEQKEKSYQEHVKQLTEKMERDRAQLMAEQEKTLALKLQEQERLLKEGFENESKRLQKDIWDIQMRSKSLEPICNIL

SEQ ID NO: 36950 - protein, 591 aa, Homo sapiens; identical to SEQ ID NO: 36949
  Payload ID: 7323
  Gene Symbol: GBP2
  Gene Name: guanylate binding protein 2, interferon-inducible
  Uniprot ID: P32456
  ENSP ID: ENSP00000434282

SEQ ID NO: 36951 - protein, 142 aa, Homo sapiens
  Payload ID: 7324
  Gene Symbol: GBP3
  Gene Name: guanylate binding protein 3
  ENSP ID: ENSP00000235878
MAPEIHMTGPMCLIENTNGELVANPEALKILSAITQPVVVVAIVGLYRTGKSYLMNKLAGKNKGFSLGSTVKSHTKGIWMWCVPHPKKPEHTLVLLDTEGLGDVKKGDNQNDSWIFTLAVLLSSTLVYNSMGTINQQAMDQL

SEQ ID NO: 36952 - protein, 595 aa, Homo sapiens
  Payload ID: 7324
  Gene Symbol: GBP3
  Gene Name: guanylate binding protein 3
  Uniprot ID: Q9H0R5
  ENSP ID: ENSP00000359512
MAPEIHMTGPMCLIENTNGELVANPEALKILSAITQPVVVVAIVGLYRTGKSYLMNKLAGKNKGFSLGSTVKSHTKGIWMWCVPHPKKPEHTLVLLDTEGLGDVKKGDNQNDSWIFTLAVLLSSTLVYNSMGTINQQAMDQLYYVTELTHRIRSKSSPDENENEDSADFVSFFPDFVWTLRDFSLDLEADGQPLTPDEYLEYSLKLTQGTSQKDKNFNLPRLCIRKFFPKKKCFVFDLPIHRRKLAQLEKLQDEELDPEFVQQVADFCSYIFSNSKTKTLSGGIKVNGPRLESLVLTYINAISRGDLPCMENAVLALAQIENSAAVQKAIAHYDQQMGQKVQLPAETLQELLDLHRVSEREATEVYMKNSFKDVDHLFQKKLAAQLDKKRDDFCKQNQEASSDRCSALLQVIFSPLEEEVKAGIYSKPGGYCLFIQKLQDLEKKYYEEPRKGIQAEEILQTYLKSKESVTDAILQTDQILTEKEKEIEVECVKAESAQASAKMVEEMQIKYQQMMEEKEKSYQEHVKQLTEKMERERAQLLEEQEKTLTSKLQEQARVLKERCQGESTQLQNEIQKLQKTLKKKTKRYMSHKLKI

SEQ ID NO: 36953 - protein, 137 aa, Homo sapiens
  Payload ID: 7324
  Gene Symbol: GBP3
  Gene Name: guanylate binding protein 3
  ENSP ID: ENSP00000415087
QDEELDPEFVQQVADFCSYIFSNSKTKTLSGGIKAEEILQTYLKSKESVTDAILQTDQILTEKEKEIEVECVKAESAQASAKMVEEMQIKYQQMMEEKEKSYQEHVKQLTEKMERERAQLLEEQEKTLTSKLQVSKC

SEQ ID NO: 36954 - protein, 290 aa, Homo sapiens
  Payload ID: 7324
  Gene Symbol: GBP3
  Gene Name: guanylate binding protein 3
  ENSP ID: ENSP00000437168
MAPEIHMTGPMCLIENTNGELVANPEALKILSAITQPVVVVAIVGLYRTGKSYLMNKLAGKNKGFSLGSTVKSHTKGIWMWCVPHPKKPEHTLVLLDTEGLGDVKKGDNQNDSWIFTLAVLLSSTLVYNSMGTINQQAMDQLYYVTELTHRIRSKSSPDENENEDSADFVSFFPDFVWTLRDFSLDLEADGQPLTPDEYLEYSLKLTQGTSQKDKNFNLPRLCIRKFFPKKKCFVFDLPIHRRKLAQLEKLQDEELDPEFVQQVADFCSYIFSNSKTKTLSGGIKVNGPR

SEQ ID NO: 36955 - protein, 218 aa, Homo sapiens
  Payload ID: 7324
  Gene Symbol: GBP3
  Gene Name: guanylate binding protein 3
  ENSP ID: ENSP00000454978
  MOD_RES (1)..(1): Any amino acid
XHRVSEREATEVYMKNSFKDVDHLFQKKLAAQLDKKRDDFCKQNQEASSDRCSALLQVIFSPLEEEVKAGIYSKPGGYCLFIQKLQDLEKKYYEEPRKGIQAEEILQTYLKSKESVTDAILQTDQILTEKEKEIEVECVKAESAQASAKMVEEMQIKYQQMMEEKEKSYQEHVKQLTEKMERERAQLLEEQEKTLTSKLQVSKCITLWFVFLFSLCSS

SEQ ID NO: 36956 - protein, 96 aa, Homo sapiens
  Payload ID: 7324
  Gene Symbol: GBP3
  Gene Name: guanylate binding protein 3
  ENSP ID: ENSP00000455156
MAPEIHMTGPMCLIENTNGELVANPEALKILSAITQPVVVVAIVGLYRTGKSYLMNKLAGKNKGEWHEQSSAKSLLSPNTVSIHYEDVRRESWHWE

SEQ ID NO: 36957 - protein, 123 aa, Homo sapiens
  Payload ID: 7324
  Gene Symbol: GBP3
  Gene Name: guanylate binding protein 3
  ENSP ID: ENSP00000455317
MWCVPHPKKPEHTLVLLDTEGLGDVKKGDNQNDSWIFTLAVLLSSTLVYNSMGTINQQAMDQLYYVTELTHRIRSKSSPDENENEDSADFVSFFPDFVWTLRDFSLDLEADGQPLTPDEYLEY

SEQ ID NO: 36958 - protein, 91 aa, Homo sapiens
  Payload ID: 7324
  Gene Symbol: GBP3
  Gene Name: guanylate binding protein 3
  ENSP ID: ENSP00000456449
MAPEIHMTGPMCLIENTNGELVANPEALKILSAITQPVVVVAIVGLYRTGKSYLMNKLAGKNKGWSTVARSQLTTVLTSWAQAILSPQPPE

SEQ ID NO: 36959 - protein, 640 aa, Homo sapiens
  Payload ID: 7325
  Gene Symbol: GBP4
  Gene Name: guanylate binding protein 4
  Uniprot ID: Q96PP9
  ENSP ID: ENSP00000359490
MGERTLHAAVPTPGYPESESIMMAPICLVENQEEQLTVNSKALEILDKISQPVVVVAIVGLYRTGKSYLMNRLAGKRNGFPLGSTVQSETKGIWMWCVPHLSKPNHTLVLLDTEGLGDVEKSNPKNDSWIFALAVLLSSSFVYNSVSTINHQALEQLHYVTELAELIRAKSCPRPDEAEDSSEFASFFPDFIWTVRDFTLELKLDGNPITEDEYLENALKLIPGKNPKIQNSNMPRECIRHFFRKRKCFVFDRPTNDKQYLNHMDEVPEENLERHFLMQSDNFCSYIFTHAKTKTLREGIIVTGKRLGTLVVTYVDAINSGAVPCLENAVTALAQLENPAAVQRAADHYSQQMAQQLRLPTDTLQELLDVHAACEREAIAVFMEHSFKDENHEFQKKLVDTIEKKKGDFVLQNEEASAKYCQAELKRLSEHLTESILRGIFSVPGGHNLYLEEKKQVEWDYKLVPRKGVKANEVLQNFLQSQVVVEESILQSDKALTAGEKAIAAERAMKEAAEKEQELLREKQKEQQQMMEAQERSFQEYMAQMEKKLEEERENLLREHERLLKHKLKVQEEMLKEEFQKKSEQLNKEINQLKEKIESTKNEQLRLLKILDMASNIMIVTLPGASKLLGVGTKYLGSRI

SEQ ID NO: 36960 - protein, 586 aa, Homo sapiens
  Payload ID: 7326
  Gene Symbol: GBP5
  Gene Name: guanylate binding protein 5
  Uniprot ID: Q96PP8
  ENSP ID: ENSP00000359488
MALEIHMSDPMCLIENFNEQLKVNQEALEILSAITQPVVVVAIVGLYRTGKSYLMNKLAGKNKGFSVASTVQSHTKGIWIWCVPHPNWPNHTLVLLDTEGLGDVEKADNKNDIQIFALALLLSSTFVYNTVNKIDQGAIDLLHNVTELTDLLKARNSPDLDRVEDPADSASFFPDLVWTLRDFCLGLEIDGQLVTPDEYLENSLRPKQGSDQRVQNFNLPRLCIQKFFPKKKCFIFDLPAHQKKLAQLETLPDDELEPEFVQQVTEFCSYIFSHSMTKTLPGGIMVNGSRLKNLVLTYVNAISSGDLPCIENAVLALAQRENSAAVQKAIAHYDQQMGQKVQLPMETLQELLDLHRTSEREAIEVFMKNSFKDVDQSFQKELETLLDAKQNDICKRNLEASSDYCSALLKDIFGPLEEAVKQGIYSKPGGHNLFIQKTEELKAKYYREPRKGIQAEEVLQKYLKSKESVSHAILQTDQALTETEKKKKEAQVKAEAEKAEAQRLAAIQRQNEQMMQERERLHQEQVRQMEIAKQNWLAEQQKMQEQQMQEQAAQLSTTFQAQNRSLLSELQHAQRTVNNDDPCVLL

SEQ ID NO: 36961 - protein, 483 aa, Homo sapiens
  Payload ID: 7326
  Gene Symbol: GBP5
  Gene Name: guanylate binding protein 5
  ENSP ID: ENSP00000403010
MALEIHMSDPMCLIENFNEQLKVNQEALEILSAITQPVVVVAIVGLYRTGKSYLMNKLAGKNKGFSVASTVQSHTKGIWIWCVPHPNWPNHTLVLLDTEGLGDVEKADNKNDIQIFALALLLSSTFVYNTVNKIDQGAIDLLHNVTELTDLLKARNSPDLDRVEDPADSASFFPDLVWTLRDFCLGLEIDGQLVTPDEYLENSLRPKQGSDQRVQNFNLPRLCIQKFFPKKKCFIFDLPAHQKKLAQLETLPDDELEPEFVQQVTEFCSYIFSHSMTKTLPGGIMVNGSRLKNLVLTYVNAISSGDLPCIENAVLALAQRENSAAVQKAIAHYDQQMGQKVQLPMETLQELLDLHRTSEREAIEVFMKNSFKDVDQSFQKELETLLDAKQNDICKRNLEASSDYCSALLKDIFGPLEEAVKQGIYSKPGGHNLFIQKTEELKAKYYREPRKGIQAEEVLQKYLKSKESVSHAILQTDQALTET

SEQ ID NO: 36962 - protein, 638 aa, Homo sapiens
  Payload ID: 7327
  Gene Symbol: GBP7
  Gene Name: guanylate binding protein 7
  Uniprot ID: Q8N8V2
  ENSP ID: ENSP00000294671
MASEIHMPGPVCLTENTKGHLVVNSEALEILSAITQPVVVVAIVGLYRTGKSYLMNKLAGKNKGFPLGCTVKSETKGIWMWCVPHPSKPNHTLILLDTEGLGDMEKSDPKSDSWIFALAVLLSSSFVYNSMGTINHQALEQLHYVTELTELIRAKSCPRPDEVEDSSEFVSFFPDFIWTVRDFTLELKLDGHPITEDEYLENALKLISGKNPQIQNSNKPREWIRHFFPKQKCFVFDRPINDKKLLLHVEEVREDQLDSNFQMQSENFCSYIFTHAKTKTLREGILVTGNRLGMLVETYLDAINSGATPCLENAMAVLAQCENSAAVQRAANHYSQQMAQQVRFPTDTLQELLDVHAVCEREAIAVFMEYSFKDKSQEFQKKLVDTMEKKKEDFVLQNEEASAKYCQAELKRLSELLTESISRGTFFVPGGHNIYLEAKKKIEQDYTLVPRKGVKADEVLQSFLQSQVVIEESILQSDKALTAGEKAIAAKQAKKEAAEKEQELLRQKQKEQQQMMEAQERSFQENIAQLKKKMERERENYMRELRKMLSHKMKVLEELLTEGFKEIFESLNEEINRLKEQIEAAENEEPSVFSQILDVAGSIFIAALPGAAKLVDLGMKILSSLCNRLRNPGKKIIS

SEQ ID NO: 36963 - protein, 633 aa, Homo sapiens
  Payload ID: 7328
  Gene Symbol: GBP6
  Gene Name: guanylate binding protein family, member 6
  Uniprot ID: Q6ZN66
  ENSP ID: ENSP00000359485
MESGPKMLAPVCLVENNNEQLLVNQQAIQILEKISQPVVVVAIVGLYRTGKSYLMNHLAGQNHGFPLGSTVQSETKGIWMWCVPHPSKPNHTLVLLDTEGLGDVEKGDPKNDSWIFALAVLLCSTFVYNSMSTINHQALEQLHYVTELTELIKAKSSPRPDGVEDSTEFVSFFPDFLWTVRDFTLELKLNGHPITEDEYLENALKLIQGNNPRVQTSNFPRECIRRFFPKRKCFVFDRPTNDKDLLANIEKVSEKQLDPKFQEQTNIFCSYIFTHARTKTLREGITVTGNRLGTLAVTYVEAINSGAVPCLENAVITLAQRENSAAVQRAADYYSQQMAQRVKLPTDTLQELLDMHAACEREAIAIFMEHSFKDENQEFQKKFMETTMNKKGDFLLQNEESSVQYCQAKLNELSKGLMESISAGSFSVPGGHKLYMETKERIEQDYWQVPRKGVKAKEVFQRFLESQMVIEESILQSDKALTDREKAVAVDRAKKEAAEKEQELLKQKLQEQQQQMEAQDKSRKENIAQLKEKLQMEREHLLREQIMMLEHTQKVQNDWLHEGFKKKYEEMNAEISQFKRMIDTTKNDDTPWIARTLDNLADELTAILSAPAKLIGHGVKGVSSLFKKHKLPF

SEQ ID NO: 36964 - protein, 763 aa, Homo sapiens
  Payload ID: 7329
  Gene Symbol: GUCY1A2
  Gene Name: guanylate cyclase 1, soluble, alpha 2
  Uniprot ID: P33402
  ENSP ID: ENSP00000282249
MSRRKISSESFSSLGSDYLETSPEEEGECPLSRLCWNGSRSPPGPLEPSPAAAAAAAAPAPTPAASAAAAAATAGARRVQRRRRVNLDSLGESISRLTAPSPQTIQQTLKRTLQYYEHQVIGYRDAEKNFHNISNRCSYADHSNKEEIEDVSGILQCTANILGLKFEEIQKRFGEEFFNICFHENERVLRAVGGTLQDFFNGFDALLEHIRTSFGKQATLESPSFLCKELPEGTLMLHYFHPHHIVGFAMLGMIKAAGKKIYRLDVEVEQVANEKLCSDVSNPGNCSCLTFLIKECENTNIMKNLPQGTSQVPADLRISINTFCRAFPFHLMFDPSMSVLQLGEGLRKQLRCDTHKVLKFEDCFEIVSPKVNATFERVLLRLSTPFVIRTKPEASGSENKDKVMEVKGQMIHVPESNSILFLGSPCVDKLDELMGRGLHLSDIPIHDATRDVILVGEQAKAQDGLKKRMDKLKATLERTHQALEEEKKKTVDLLYSIFPGDVAQQLWQGQQVQARKFDDVTMLFSDIVGFTAICAQCTPMQVISMLNELYTRFDHQCGFLDIYKVETIGDAYCVAAGLHRKSLCHAKPIALMALKMMELSEEVLTPDGRPIQPQRSELLFSFPVSIQLVPDQHQSETDLGTEKMRIGIHSGSVLAGVVGVRMPRYCLFGNNVTLASKFESGSHPRRINVSPTTYQLLKREESFTFIPRSREELPDNFPKEIPGICYFLEVRTGPKPPKPSLSSSRIKKVSYNIGTMFLRETSL

SEQ ID NO: 36965 - protein, 753 aa, Homo sapiens
  Payload ID: 7329
  Gene Symbol: GUCY1A2
  Gene Name: guanylate cyclase 1, soluble, alpha 2
  Uniprot ID: P33402
  ENSP ID: ENSP00000344874
MSRRKISSESFSSLGSDYLETSPEEEGECPLSRLCWNGSRSPPGPLEPSPAAAAAAAAPAPTPAASAAAAAATAGARRVQRRRRVNLDSLGESISRLTAPSPQTIQQTLKRTLQYYEHQVIGYRDAEKNFHNISNRCSYADHSNKEEIEDVSGILQCTANILGLKFEEIQKRFGEEFFNICFHENERVLRAVGGTLQDFFNGFDALLEHIRTSFGKQATLESPSFLCKELPEGTLMLHYFHPHHIVGFAMLGMIKAAGKKIYRLDVEVEQVANEKLCSDVSNPGNCSCLTFLIKECENTNIMKNLPQGTSQVPADLRISINTFCRAFPFHLMFDPSMSVLQLGEGLRKQLRCDTHKVLKFEDCFEIVSPKVNATFERVLLRLSTPFVIRTKPEASGSENKDKSKHVTEGHLTQLSVAGFNSLEVMEVKGQMIHVPESNSILFLGSPCVDKLDELMGRGLHLSDIPIHDATRDVILVGEQAKAQDGLKKRMDKLKATLERTHQALEEEKKKTVDLLYSIFPGDVAQQLWQGQQVQARKFDDVTMLFSDIVGFTAICAQCTPMQVISMLNELYTRFDHQCGFLDIYKVETIGDAYCVAAGLHRKSLCHAKPIALMALKMMELSEEVLTPDGRPIQMRIGIHSGSVLAGVVGVRMPRYCLFGNNVTLASKFESGSHPRRINVSPTTYQLLKREESFTFIPRSREELPDNFPKEIPGICYFLEVRTGPKPPKPSLSSSRIKKVSYNIGTMFLRETSL

SEQ ID NO: 36966 - protein, 732 aa, Homo sapiens
  Payload ID: 7329
  Gene Symbol: GUCY1A2
  Gene Name: guanylate cyclase 1, soluble, alpha 2
  Uniprot ID: P33402
  ENSP ID: ENSP00000431245
MSRRKISSESFSSLGSDYLETSPEEEGECPLSRLCWNGSRSPPGPLEPSPAAAAAAAAPAPTPAASAAAAAATAGARRVQRRRRVNLDSLGESISRLTAPSPQTIQQTLKRTLQYYEHQVIGYRDAEKNFHNISNRCSYADHSNKEEIEDVSGILQCTANILGLKFEEIQKRFGEEFFNICFHENERVLRAVGGTLQDFFNGFDALLEHIRTSFGKQATLESPSFLCKELPEGTLMLHYFHPHHIVGFAMLGMIKAAGKKIYRLDVEVEQVANEKLCSDVSNPGNCSCLTFLIKECENTNIMKNLPQGTSQVPADLRISINTFCRAFPFHLMFDPSMSVLQLGEGLRKQLRCDTHKVLKFEDCFEIVSPKVNATFERVLLRLSTPFVIRTKPEASGSENKDKVMEVKGQMIHVPESNSILFLGSPCVDKLDELMGRGLHLSDIPIHDATRDVILVGEQAKAQDGLKKRMDKLKATLERTHQALEEEKKKTVDLLYSIFPGDVAQQLWQGQQVQARKFDDVTMLFSDIVGFTAICAQCTPMQVISMLNELYTRFDHQCGFLDIYKVETIGDAYCVAAGLHRKSLCHAKPIALMALKMMELSEEVLTPDGRPIQMRIGIHSGSVLAGVVGVRMPRYCLFGNNVTLASKFESGSHPRRINVSPTTYQLLKREESFTFIPRSREELPDNFPKEIPGICYFLEVRTGPKPPKPSLSSSRIKKVSYNIGTMFLRETSL

SEQ ID NO: 36967 - protein, 690 aa, Homo sapiens
  Payload ID: 7330
  Gene Symbol: GUCY1A3
  Gene Name: guanylate cyclase 1, soluble, alpha 3
  Uniprot ID: Q02108
  ENSP ID: ENSP00000296518
MFCTKLKDLKITGECPFSLLAPGQVPNESSEEAAGSSESCKATVPICQDIPEKNIQESLPQRKTSRSRVYLHTLAESICKLIFPEFERLNVALQRTLAKHKIKESRKSLEREDFEKTIAEQAVAAGVPVEVIKESLGEEVFKICYEEDENILGVVGGTLKDFLNSFSTLLKQSSHCQEAGKRGRLEDASILCLDKEDDFLHVYYFFPKRTTSLILPGIIKAAAHVLYETEVEVSLMPPCFHNDCSEFVNQPYLLYSVHMKSTKPSLSPSKPQSSLVIPTSLFCKTFPFHFMFDKDMTILQFGNGIRRLMNRRDFQGKPNFEEYFEILTPKINQTFSGIMTMLNMQFVVRVRRWDNSVKKSSRVMDLKGQMIYIVESSAILFLGSPCVDRLEDFTGRGLYLSDIPIHNALRDVVLIGEQARAQDGLKKRLGKLKATLEQAHQALEEEKKKTVDLLCSIFPCEVAQQLWQGQVVQAKKFSNVTMLFSDIVGFTAICSQCSPLQVITMLNALYTRFDQQCGELDVYKVETIGDAYCVAGGLHKESDTHAVQIALMALKMMELSDEVMSPHGEPIKMRIGLHSGSVFAGVVGVKMPRYCLFGNNVTLANKFESCSVPRKINVSPTTYRLLKDCPGFVFTPRSREELPPNFPSEIPGICHFLDAYQQGTNSKPCFQKKDVEDGNANFLGKASGID

SEQ ID NO: 36968 - protein, 432 aa, Homo sapiens
  Payload ID: 7330
  Gene Symbol: GUCY1A3
  Gene Name: guanylate cyclase 1, soluble, alpha 3
  ENSP ID: ENSP00000377418
MKSTKPSLSPSKPQSSLVIPTSLFCKTFPFHFMFDKDMTILQFGNGIRRLMNRRDFQGKPNFEEYFEILTPKINQTFSGIMTMLNMQFVVRVRRWDNSVKKSSRVMDLKGQMIYIVESSAILFLGSPCVDRLEDFTGRGLYLSDIPIHNALRDVVLIGEQARAQDGLKKRLGKLKATLEQAHQALEEEKKKTVDLLCSIFPCEVAQQLWQGQVVQAKKFSNVTMLFSDIVGFTAICSQCSPLQVITMLNALYTRFDQQCGELDVYKVETIGDAYCVAGGLHKESDTHAVQIALMALKMMELSDEVMSPHGEPIKMRIGLHSGSVFAGVVGVKMPRYCLFGNNVTLANKFESCSVPRKINVSPTTYRLLKDCPGFVFTPRSREELPPNFPSEIPGICHFLDAYQQGTNSKPCFQKKDVEDGNANFLGKASGID

SEQ ID NO: 36969 - protein, 138 aa, Homo sapiens
  Payload ID: 7330
  Gene Symbol: GUCY1A3
  Gene Name: guanylate cyclase 1, soluble, alpha 3
  ENSP ID: ENSP00000409903
MFCTKLKDLKITGECPFSLLAPGQVPNESSEEAAGSSESCKATVPICQDIPEKNIQESLPQRKTSRSRVYLHTLAESICKLIFPEFERLNVALQRTLAKHKIKESRKSLEREDFEKTIAEQAVAAEQPLPRSRKKGQA

SEQ ID NO: 36970 - protein, 690 aa, Homo sapiens; identical to SEQ ID NO: 36967
  Payload ID: 7330
  Gene Symbol: GUCY1A3
  Gene Name: guanylate cyclase 1, soluble, alpha 3
  Uniprot ID: Q02108
  ENSP ID: ENSP00000412201

SEQ ID NO: 36971 - protein, 690 aa, Homo sapiens; identical to SEQ ID NO: 36967
  Payload ID: 7330
  Gene Symbol: GUCY1A3
  Gene Name: guanylate cyclase 1, soluble, alpha 3
  Uniprot ID: Q02108
  ENSP ID: ENSP00000421493

SEQ ID NO: 36972 - protein, 143 aa, Homo sapiens
  Payload ID: 7330
  Gene Symbol: GUCY1A3
  Gene Name: guanylate cyclase 1, soluble, alpha 3
  ENSP ID: ENSP00000422141
MFCTKLKDLKITGECPFSLLAPGQVPNESSEEAAGSSESCKATVPICQDIPEKNIQESLPQRKTSRSRVYLHTLAESICKLIFPEFERLNVALQRTLAKHKIKESRKSLEREDFEKTIAEQAVAAGGDHWRCLLCSWGITQRE

SEQ ID NO: 36973 - protein, 690 aa, Homo sapiens; identical to SEQ ID NO: 36967
  Payload ID: 7330
  Gene Symbol: GUCY1A3
  Gene Name: guanylate cyclase 1, soluble, alpha 3
  Uniprot ID: Q02108
  ENSP ID: ENSP00000424361

SEQ ID NO: 36974 - protein, 82 aa, Homo sapiens
  Payload ID: 7330
  Gene Symbol: GUCY1A3
  Gene Name: guanylate cyclase 1, soluble, alpha 3
  ENSP ID: ENSP00000424863
MFCTKLKDLKITGECPFSLLAPGQVPNESSEEAAGSSESCKATVPICQDIPEKNIQESLPQRKTSGDHWRCLLCSWGITQRE

SEQ ID NO: 36975 - protein, 690 aa, Homo sapiens; identical to SEQ ID NO: 36967
  Payload ID: 7330
  Gene Symbol: GUCY1A3
  Gene Name: guanylate cyclase 1, soluble, alpha 3
  Uniprot ID: Q02108
  ENSP ID: ENSP00000426040

SEQ ID NO: 36976 - protein, 624 aa, Homo sapiens
  Payload ID: 7330
  Gene Symbol: GUCY1A3
  Gene Name: guanylate cyclase 1, soluble, alpha 3
  Uniprot ID: Q02108
  ENSP ID: ENSP00000426968
MFCTKLKDLKITGECPFSLLAPGQVPNESSEEAAGSSESCKATVPICQDIPEKNIQESLPQRKTSRSRVYLHTLAESICKLIFPEFERLNVALQRTLAKHKIKESRKSLEREDFEKTIAEQAVAAGVPVEVIKESLGEEVFKICYEEDENILGVVGGTLKDFLNSFSTLLKQSSHCQEAGKRGRLEDASILCLDKEDDFLHVYYFFPKRTTSLILPGIIKAAAHVLYETEVEVSLMPPCFHNDCSEFVNQPYLLYSVHMKSTKPSLSPSKPQSSLVIPTSLFCKTFPFHFMFDKDMTILQFGNGIRRLMNRRDFQGKPNFEEYFEILTPKINQTFSGIMTMLNMQFVVRVRRWDNSVKKSSRVMDLKGQMIYIVESSAILFLGSPCVDRLEDFTGRGLYLSDIPIHNALRDVVLIGEQARAQDGLKKRLGKLKATLEQAHQALEEEKKKTVDLLCSIFPCEVAQQLWQGQVVQAKKFSNVTMLFSDIVGFTAICSQCSPLQVITMLNALYTRFDQQCGELDVYKVETIGDAYCVAGGLHKESDTHAVQIALMALKMMELSDEVMSPHGEPIKMRIGLHSGSVFAGVVGVKMPRYCLFGNNVTLANKFESCSVPRKINVSPTTYR

SEQ ID NO: 36977 - protein, 143 aa, Homo sapiens; identical to SEQ ID NO: 36972
  Payload ID: 7330
  Gene Symbol: GUCY1A3
  Gene Name: guanylate cyclase 1, soluble, alpha 3
  ENSP ID: ENSP00000479710

SEQ ID NO: 36978 - protein, 619 aa, Homo sapiens
  Payload ID: 7331
  Gene Symbol: GUCY1B3
  Gene Name: guanylate cyclase 1, soluble, beta 3
  Uniprot ID: Q02153
  ENSP ID: ENSP00000264424
MYGFVNHALELLVIRNYGPEVWEDIKKEAQLDEEGQFLVRIIYDDSKTYDLVAAASKVLNLNAGEILQMFGKMFFVFCQESGYDTILRVLGSNVREFLQNLDALHDHLATIYPGMRAPSFRCTDAEKGKGLILHYYSEREGLQDIVIGIIKTVAQQIHGTEIDMKVIQQRNEECDHTQFLIEEKESKEEDFYEDLDRFEENGTQESRISPYTFCKAFPFHIIFDRDLVVTQCGNAIYRVLPQLQPGNCSLLSVFSLVRPHIDISFHGILSHINTVFVLRSKEGLLDVEKLECEDELTGTEISCLRLKGQMIYLPEADSILFLCSPSVMNLDDLTRRGLYLSDIPLHDATRDLVLLGEQFREEYKLTQELEILTDRLQLTLRALEDEKKKTDTLLYSVLPPSVANELRHKRPVPAKRYDNVTILFSGIVGFNAFCSKHASGEGAMKIVNLLNDLYTRFDTLTDSRKNPFVYKVETVGDKYMTVSGLPEPCIHHARSICHLALDMMEIAGQVQVDGESVQITIGIHTGEVVTGVIGQRMPRYCLFGNTVNLTSRTETTGEKGKINVSEYTYRCLMSPENSDPQFHLEHRGPVSMKGKKEPMQVWFLSRKNTGTEETKQDDD

SEQ ID NO: 36979 - protein, 586 aa, Homo sapiens
  Payload ID: 7331
  Gene Symbol: GUCY1B3
  Gene Name: guanylate cyclase 1, soluble, beta 3
  Uniprot ID: Q02153
  ENSP ID: ENSP00000420842
MYGFVNHALELLVIRNYGPEVWEDIKKEAQLDEEGQFLVRIIYDDSKTYDLVAAASKVLNLNAGEILQMFGKMFFVFCQESGYDTILRVLGSNVREFLQNLDALHDHLATIYPGMRAPSFRCTDAEKGKGLILHYYSEREGLQDIVIGIIKTVAQQIHGTEIDMKVIQQRNEECDHTQFLIEEKESKEEDFYEDLDRFEENGTQESRISPYTFCKAFPFHIIFDRDLVVTQCGNAIYRVLPQLQPGNCSLLSVFSLVRPHIDISFHGILSHINTVFVLRSKEGLLDVEKLECEDELTGTEISCLRLKGQMIYLPEADSILFLCSPSVMNLDDLTRRGLYLSDIPLHDATRDLVLLGEQFREEYKLTQELEILTDRLQLTLRALEDEKKKTDTGIVGFNAFCSKHASGEGAMKIVNLLNDLYTRFDTLTDSRKNPFVYKVETVGDKYMTVSGLPEPCIHHARSICHLALDMMEIAGQVQVDGESVQITIGIHTGEVVTGVIGQRMPRYCLFGNTVNLTSRTETTGEKGKINVSEYTYRCLMSPENSDPQFHLEHRGPVSMKGKKEPMQVWFLSRKNTGTEETKQDDD

SEQ ID NO: 36980 - protein, 594 aa, Homo sapiens
  Payload ID: 7331
  Gene Symbol: GUCY1B3
  Gene Name: guanylate cyclase 1, soluble, beta 3
  ENSP ID: ENSP00000422313
MFGKMFFVFCQESGYDTILRVLGSNVREFLQNLDALHDHLATIYPGMRAPSFRCTDAEKGKGLILHYYSEREGLQDIVIGIIKTVAQQIHGTEIDMKVIQQRNEECDHTQFLIEEKESKEEDFYEDLDRFEENGTQESRISPYTFCKAFPFHIIFDRDLVVTQCGNAIYRVLPQLQPGNCSLLSVFSLVRPHIDISFHGILSHINTVFVLRSKEGLLDVEKLECEDELTGTEISCLRLKGQMIYLPEADSILFLCSPSVMNLDDLTRRGLYLSDIPLHDATRDLVLLGEQFREEYKLTQELEILTDRLQLTLRALEDEKKKTDTGCPARIQAFKVQTTLMLCEKDSRSTKGFPSISYSGFLLIPLNRLLYSVLPPSVANELRHKRPVPAKRYDNVTILFSGIVGFNAFCSKHASGEGAMKIVNLLNDLYTRFDTLTDSRKNPFVYKVETVGDKYMTVSGLPEPCIHHARSICHLALDMMEIAGQVQVDGESVQITIGIHTGEVVTGVIGQRMPRYCLFGNTVNLTSRTETTGEKGKINVSEYTYRCLMSPENSDPQFHLEHRGPVSMKGKKEPMQVWFLSRKNTGTEETKQDDD

SEQ ID NO: 36981 - protein, 551 aa, Homo sapiens
  Payload ID: 7331
  Gene Symbol: GUCY1B3
  Gene Name: guanylate cyclase 1, soluble, beta 3
  ENSP ID: ENSP00000425065
MFGKMFFVFCQESGYDTILRVLGSNVREFLQNLDALHDHLATIYPGMRAPSFRCTDAEKGKGLILHYYSEREGLQDIVIGIIKTVAQQIHGTEIDMKVIQQRNEECDHTQFLIEEKESKEEDFYEDLDRFEENGTQESRISPYTFCKAFPFHIIFDRDLVVTQCGNAIYRVLPQLQPGNCSLLSVFSLVRPHIDISFHGILSHINTVFVLRSKEGLLDVEKLECEDELTGTEISCLRLKGQMIYLPEADSILFLCSPSVMNLDDLTRRGLYLSDIPLHDATRDLVLLGEQFREEYKLTQELEILTDRLQLTLRALEDEKKKTDTLLYSVLPPSVANELRHKRPVPAKRYDNVTILFSGIVGFNAFCSKHASGEGAMKIVNLLNDLYTRFDTLTDSRKNPFVYKVETVGDKYMTVSGLPEPCIHHARSICHLALDMMEIAGQVQVDGESVQITIGIHTGEVVTGVIGQRMPRYCLFGNTVNLTSRTETTGEKGKINVSEYTYRCLMSPENSDPQFHLEHRGPVSMKGKKEPMQVWFLSRKNTGTEETKQDDD

SEQ ID NO: 36982 - protein, 599 aa, Homo sapiens
  Payload ID: 7331
  Gene Symbol: GUCY1B3
  Gene Name: guanylate cyclase 1, soluble, beta 3
  Uniprot ID: Q02153
  ENSP ID: ENSP00000426319
MLMCFIKEAQLDEEGQFLVRIIYDDSKTYDLVAAASKVLNLNAGEILQMFGKMFFVFCQESGYDTILRVLGSNVREFLQNLDALHDHLATIYPGMRAPSFRCTDAEKGKGLILHYYSEREGLQDIVIGIIKTVAQQIHGTEIDMKVIQQRNEECDHTQFLIEEKESKEEDFYEDLDRFEENGTQESRISPYTFCKAFPFHIIFDRDLVVTQCGNAIYRVLPQLQPGNCSLLSVFSLVRPHIDISFHGILSHINTVFVLRSKEGLLDVEKLECEDELTGTEISCLRLKGQMIYLPEADSILFLCSPSVMNLDDLTRRGLYLSDIPLHDATRDLVLLGEQFREEYKLTQELEILTDRLQLTLRALEDEKKKTDTLLYSVLPPSVANELRHKRPVPAKRYDNVTILFSGIVGFNAFCSKHASGEGAMKIVNLLNDLYTRFDTLTDSRKNPFVYKVETVGDKYMTVSGLPEPCIHHARSICHLALDMMEIAGQVQVDGESVQITIGIHTGEVVTGVIGQRMPRYCLFGNTVNLTSRTETTGEKGKINVSEYTYRCLMSPENSDPQFHLEHRGPVSMKGKKEPMQVWFLSRKNTGTEETKQDDD

SEQ ID NO: 36983 - protein, 641 aa, Homo sapiens
  Payload ID: 7331
  Gene Symbol: GUCY1B3
  Gene Name: guanylate cyclase 1, soluble, beta 3
  ENSP ID: ENSP00000426786
MYGFVNHALELLVIRNYGPEVWEDIKKEAQLDEEGQFLVRIIYDDSKTYDLVAAASKVLNLNAGEILQMFGKMFFVFCQESGYDTILRVLGSNVREFLQKNESKHISDLHHCFLGIYLCCNNLDALHDHLATIYPGMRAPSFRCTDAEKGKGLILHYYSEREGLQDIVIGIIKTVAQQIHGTEIDMKVIQQRNEECDHTQFLIEEKESKEEDFYEDLDRFEENGTQESRISPYTFCKAFPFHIIFDRDLVVTQCGNAIYRVLPQLQPGNCSLLSVFSLVRPHIDISFHGILSHINTVFVLRSKEGLLDVEKLECEDELTGTEISCLRLKGQMIYLPEADSILFLCSPSVMNLDDLTRRGLYLSDIPLHDATRDLVLLGEQFREEYKLTQELEILTDRLQLTLRALEDEKKKTDTLLYSVLPPSVANELRHKRPVPAKRYDNVTILFSGIVGFNAFCSKHASGEGAMKIVNLLNDLYTRFDTLTDSRKNPFVYKVETVGDKYMTVSGLPEPCIHHARSICHLALDMMEIAGQVQVDGESVQITIGIHTGEVVTGVIGQRMPRYCLFGNTVNLTSRTETTGEKGKINVSEYTYRCLMSPENSDPQFHLEHRGPVSMKGKKEPMQVWFLSRKNTGTEETKQDDD

SEQ ID NO: 36984 - protein, 551 aa, Homo sapiens; identical to SEQ ID NO: 36981
  Payload ID: 7331
  Gene Symbol: GUCY1B3
  Gene Name: guanylate cyclase 1, soluble, beta 3
  ENSP ID: ENSP00000427226

SEQ ID NO: 36985 - protein, 1073 aa, Homo sapiens
  Payload ID: 7332
  Gene Symbol: GUCY2C
  Gene Name: guanylate cyclase 2C
  Uniprot ID: P25092
  ENSP ID: ENSP00000261170
MKTLLLDLALWSLLFQPGWLSFSSQVSQNCHNGSYEISVLMMGNSAFAEPLKNLEDAVNEGLEIVRGRLQNAGLNVTVNATFMYSDGLIHNSGDCRSSTCEGLDLLRKISNAQRMGCVLIGPSCTYSTFQMYLDTELSYPMISAGSFGLSCDYKETLTRLMSPARKLMYFLVNFWKTNDLPFKTYSWSTSYVYKNGTETEDCFWYLNALEASVSYFSHELGFKVVLRQDKEFQDILMDHNRKSNVIIMCGGPEFLYKLKGDRAVAEDIVIILVDLFNDQYFEDNVTAPDYMKNVLVLTLSPGNSLLNSSFSRNLSPTKRDFALAYLNGILLFGHMLKIFLENGENITTPKFAHAFRNLTFEGYDGPVTLDDWGDVDSTMVLLYTSVDTKKYKVLLTYDTHVNKTYPVDMSPTFTWKNSKLPNDITGRGPQILMIAVFTLTGAVVLLLLVALLMLRKYRKDYELRQKKWSHIPPENIFPLETNETNHVSLKIDDDKRRDTIQRLRQCKYDKKRVILKDLKHNDGNFTEKQKIELNKLLQIDYYNLTKFYGTVKLDTMIFGVIEYCERGSLREVLNDTISYPDGTFMDWEFKISVLYDIAKGMSYLHSSKTEVHGRLKSTNCVVDSRMVVKITDFGCNSILPPKKDLWTAPEHLRQANISQKGDVYSYGIIAQEIILRKETFYTLSCRDRNEKIFRVENSNGMKPFRPDLFLETAEEKELEVYLLVKNCWEEDPEKRPDFKKIETTLAKIFGLFHDQKNESYMDTLIRRLQLYSRNLEHLVEERTQLYKAERDRADRLNFMLLPRLVVKSLKEKGFVEPELYEEVTIYFSDIVGFTTICKYSTPMEVVDMLNDIYKSFDHIVDHHDVYKVETIGDAYMVASGLPKRNGNRHAIDIAKMALEILSFMGTFELEHLPGLPIWIRIGVHSGPCAAGVVGIKMPRYCLFGDTVNTASRMESTGLPLRIHVSGSTIAILKRTECQFLYEVRGETYLKGRGNETTYWLTGMKDQKFNLPTPPTVENQQRLQAEFSDMIANSLQKRQAAGIRSQKPRRVASYKKGTLEYLQLNTTDKESTYF

SEQ ID NO: 36986 - protein, 1103 aa, Homo sapiens
  Payload ID: 7333
  Gene Symbol: GUCY2D
  Gene Name: guanylate cyclase 2D, membrane (retina-specific)
  Uniprot ID: Q02846
  ENSP ID: ENSP00000254854
MTACARRAGGLPDPGLCGPAWWAPSLPRLPRALPRLPLLLLLLLLQPPALSAVFTVGVLGPWACDPIFSRARPDLAARLAAARLNRDPGLAGGPRFEVALLPEPCRTPGSLGAVSSALARVSGLVGPVNPAACRPAELLAEEAGIALVPWGCPWTQAEGTTAPAVTPAADALYALLRAFGWARVALVTAPQDLWVEAGRSLSTALRARGLPVASVTSMEPLDLSGAREALRKVRDGPRVTAVIMVMHSVLLGGEEQRYLLEAAEELGLTDGSLVFLPFDTIHYALSPGPEALAALANSSQLRRAHDAVLTLTRHCPSEGSVLDSLRRAQERRELPSDLNLQQVSPLFGTIYDAVFLLARGVAEARAAAGGRWVSGAAVARHIRDAQVPGFCGDLGGDEEPPFVLLDTDAAGDRLFATYMLDPARGSFLSAGTRMHFPRGGSAPGPDPSCWFDPNNICGGGLEPGLVFLGFLLVVGMGLAGAFLAHYVRHRLLHMQMVSGPNKIILTVDDITFLHPHGGTSRKVAQGSRSSLGARSMSDIRSGPSQHLDSPNIGVYEGDRVWLKKFPGDQHIAIRPATKTAFSKLQELRHENVALYLGLFLARGAEGPAALWEGNLAVVSEHCTRGSLQDLLAQREIKLDWMFKSSLLLDLIKGIRYLHHRGVAHGRLKSRNCIVDGRFVLKITDHGHGRLLEAQKVLPEPPRAEDQLWTAPELLRDPALERRGTLAGDVFSLAIIMQEVVCRSAPYAMLELTPEEVVQRVRSPPPLCRPLVSMDQAPVECILLMKQCWAEQPELRPSMDHTFDLFKNINKGRKTNIIDSMLRMLEQYSSNLEDLIRERTEELELEKQKTDRLLTQMLPPSVAEALKTGTPVEPEYFEQVTLYFSDIVGFTTISAMSEPIEVVDLLNDLYTLFDAIIGSHDVYKVETIGDAYMVASGLPQRNGQRHAAEIANMSLDILSAVGTFRMRHMPEVPVRIRIGLHSGPCVAGVVGLTMPRYCLFGDTVNTASRMESTGLPYRIHVNLSTVGILRALDSGYQVELRGRTELKGKGAEDTFWLVGRRGFNKPIPKPPDLQPGSSNHGISLQEIPPERRRKLEKARPGQFS

SEQ ID NO: 36987 - protein, 1108 aa, Homo sapiens
  Payload ID: 7334
  Gene Symbol: GUCY2F
  Gene Name: guanylate cyclase 2F, retinal
  Uniprot ID: P51841
  ENSP ID: ENSP00000218006
MFLGLGRFSRLVLWFAAFRKLLGHHGLASAKFLWCLCLLSVMSLPQQVWTLPYKIGVVGPWACDSLFSKALPEVAARLAIERINRDPSFDLSYSFEYVILNEDCQTSRALSSFISHHQMASGFIGPTNPGYCEAASLLGNSWDKGIFSWACVNYELDNKISYPTFSRTLPSPIRVLVTVMKYFQWAHAGVISSDEDIWVHTANRVASALRSHGLPVGVVLTTGQDSQSMRKALQRIHQADRIRIIIMCMHSALIGGETQMHLLECAHDLKMTDGTYVFVPYDALLYSLPYKHTPYRVLRNNPKLREAYDAVLTITVESQEKTFYQAFTEAAARGEIPEKLEFDQVSPLFGTIYNSIYFIAQAMNNAMKENGQAGAASLVQHSRNMQFHGFNQLMRTDSNGNGISEYVILDTNLKEWELHSTYTVDMEMELLRFGGTPIHFPGGRPPRADAKCWFAEGKICHGGIDPAFAMMVCLTLLIALLSINGFAYFIRRRINKIQLIKGPNRILLTLEDVTFINPHFGSKRGSRASVSFQITSEVQSGRSPRLSFSSGSLTPATYENSNIAIYEGDWVWLKKFSLGDFGDLKSIKSRASDVFEMMKDLRHENINPLLGFFYDSGMFAIVTEFCSRGSLEDILTNQDVKLDWMFKSSLLLDLIKGMKYLHHREFVHGRLKSRNCVVDGRFVLKVTDYGFNDILEMLRLSEEESSMEELLWTAPELLRAPRGSRLGSFAGDVYSFAIIMQEVMVRGTPFCMMDLPAQEIINRLKKPPPVYRPVVPPEHAPPECLQLMKQCWAEAAEQRPTFDEIFNQFKTFNKGKKTNIIDSMLRMLEQYSSNLEDLIRERTEELEIEKQKTEKLLTQMLPPSVAESLKKGCTVEPEGFDLVTLYFSDIVGFTTISAMSEPIEVVDLLNDLYTLFDAIIGSHDVYKVETIGDAYMVASGLPKRNGSRHAAEIANMSLDILSSVGTFKMRHMPEVPVRIRIGLHSGPVVAGVVGLTMPRYCLFGDTVNTASRMESTGLPYRIHVSLSTVTILQNLSEGYEVELRGRTELKGKGTEETFWLIGKKGFMKPLPVPPPVDKDGQVGHGLQPVEIAAFQRRKAERQLVRNKP

SEQ ID NO: 36988 - protein, 201 aa, Homo sapiens
  Payload ID: 7335
  Gene Symbol: GUCA1A
  Gene Name: guanylate cyclase activator 1A (retina)
  Uniprot ID: P43080
  ENSP ID: ENSP00000053469
MGNVMEGKSVEELSSTECHQWYKKFMTECPSGQLTLYEFRQFFGLKNLSPSASQYVEQMFETFDFNKDGYIDFMEYVAALSLVLKGKVEQKLRWYFKLYDVDGNGCIDRDELLTIIQAIRAINPCSDTTMTAEEFTDTVFSKIDVNGDGELSLEEFIEGVQKDQMLLDTLTRSLDLTRIVRRLQNGEQDEEGADEAAEAAG

SEQ ID NO: 36989 - protein, 201 aa, Homo sapiens; identical to SEQ ID NO: 36988
  Payload ID: 7335
  Gene Symbol: GUCA1A
  Gene Name: guanylate cyclase activator 1A (retina)
  Uniprot ID: P43080
  ENSP ID: ENSP00000362049

SEQ ID NO: 36990 - protein, 201 aa, Homo sapiens; identical to SEQ ID NO: 36988
  Payload ID: 7335
  Gene Symbol: GUCA1A
  Gene Name: guanylate cyclase activator 1A (retina)
  Uniprot ID: P43080
  ENSP ID: ENSP00000377784

SEQ ID NO: 36991 - protein, 88 aa, Homo sapiens
  Payload ID: 7335
  Gene Symbol: GUCA1A
  Gene Name: guanylate cyclase activator 1A (retina)
  ENSP ID: ENSP00000388438
MGNVMEGKSVEELSSTECHQWYKKFMTECPSGQLTLYEFRQFFGLKNLSPSASQYVEQMFETFDFNKDGYIDFMEYVAALSLVLKGKV

SEQ ID NO: 36992 - protein, 205 aa, Homo sapiens
  Payload ID: 7335
  Gene Symbol: GUCA1A
  Gene Name: guanylate cyclase activator 1A (retina)
  ENSP ID: ENSP00000437476
MEGKSVEELSSTECHQWYKKFMTECPSGQLTLYEFRQFFGLKNLSPSASQYVEQMFETFDFNKDGYIDFMEYVAALSLVLKGKVEQKLRWYFKLYDVDGNGCIDRDELLTIIQFPHQYQKTAIRAINPCSDTTMTAEEFTDTVFSKIDVNGDGELSLEEFIEGVQKDQMLLDTLTRSLDLTRIVRRLQNGEQDEEGADEAAEAAG

SEQ ID NO: 36993 - protein, 200 aa, Homo sapiens
  Payload ID: 7336
  Gene Symbol: GUCA1B
  Gene Name: guanylate cyclase activator 1B (retina)
  Uniprot ID: Q9UMX6
  ENSP ID: ENSP00000230361
MGQEFSWEEAEAAGEIDVAELQEWYKKFVMECPSGTLFMHEFKRFFKVTDDEEASQYVEGMFRAFDKNGDNTIDFLEYVAALNLVLRGTLEHKLKWTFKIYDKDGNGCIDRLELLNIVEGIYQLKKACRRELQTEQGQLLTPEEVVDRIFLLVDENGDGQLSLNEFVEGARRDKWVMKMLQMDMNPSSWLAQQRRKSAMF

SEQ ID NO: 36994 - protein, 209 aa, Homo sapiens
  Payload ID: 7337
  Gene Symbol: GUCA1C
  Gene Name: guanylate cyclase activator 1C
  Uniprot ID: O95843
  ENSP ID: ENSP00000261047
MGNGKSIAGDQKAVPTQETHVWYRTFMMEYPSGLQTLHEFKTLLGLQGLNQKANKHIDQVYNTFDTNKDGFVDFLEFIAAVNLIMQEKMEQKLKWYFKLYDADGNGSIDKNELLDMFMAVQALNGQQTLSPEEFINLVFHKIDINNDGELTLEEFINGMAKDQDLLEIVYKSFDFSNVLRVICNGKQPDMETDSSKSPDKAGLGKVKMK

SEQ ID NO: 36995 - protein, 196 aa, Homo sapiens
  Payload ID: 7337
  Gene Symbol: GUCA1C
  Gene Name: guanylate cyclase activator 1C
  ENSP ID: ENSP00000377535
MGNGKSIAGDQKAVPTQETHVWYRTFMMEYPSGLQTLHEFKTLLGLQGLNQKANKHIDQVYNTFDTNKDGFVDFLEFIAAVNLIMQEKMEQKLKWYFKLYDADGNGSIDKNELLDMFMAVQALNGQQTLSPEEFINLVFHKIDINNDGNGATLYWITFPTKGIDFRRIYQWHGKRSGSPGDCLQELRLLQCAESNL

SEQ ID NO: 36996 - protein, 161 aa, Homo sapiens
  Payload ID: 7337
  Gene Symbol: GUCA1C
  Gene Name: guanylate cyclase activator 1C
  ENSP ID: ENSP00000417761
MGNGKSIAGDQKAVPTQETHVWYRTFMMEYPSGLQTLHEFKTLLGLQGLNQKANKHIDQVYNTFDTNKDGFVDFLEFIAAVNLIMQEKMEQKLKWYFKLYDADGNGSIDKNELLDMFMAVQALNGQQTLSPEEFINLVFHKIDINNDGNGATLYWITFPTK

SEQ ID NO: 36997 - protein, 115 aa, Homo sapiens
  Payload ID: 7338
  Gene Symbol: GUCA2A
  Gene Name: guanylate cyclase activator 2A (guanylin)
  Uniprot ID: Q02747
  ENSP ID: ENSP00000349493
MNAFLLSALCLLGAWAALAGGVTVQDGNFSFSLESVKKLKDLQEPQEPRVGKLRNFAPIPGEPVVPILCSNPNFPEELKPLCKEPNAQEILQRLEEIAEDPGTCEICAYAACTGC

SEQ ID NO: 36998 - protein, 112 aa, Homo sapiens
  Payload ID: 7339
  Gene Symbol: GUCA2B
  Gene Name: guanylate cyclase activator 2B (uroguanylin)
  Uniprot ID: Q16661
  ENSP ID: ENSP00000361662
MGCRAASGLLPGVAVVLLLLLQSTQSVYIQYQGFRVQLESMKKLSDLEAQWAPSPRLQAQSLLPAVCHHPALPQDLQPVCASQEASSIFKTLRTIANDDCELCVNVACTGCL

SEQ ID NO: 36999 - protein, 197 aa, Homo sapiens
  Payload ID: 7340
  Gene Symbol: GUK1
  Gene Name: guanylate kinase 1
  Uniprot ID: Q16774
  ENSP ID: ENSP00000317659
MSGPRPVVLSGPSGAGKSTLLKRLLQEHSGIFGFSVSHTTRNPRPGEENGKDYYFVTREVMQRDIAAGDFIEHAEFSGNLYGTSKVAVQAVQAMNRICVLDVDLQGVRNIKATDLRPIYISVQPPSLHVLEQRLRQRNTETEESLVKRLAAAQADMESSKEPGLFDVVIINDSLDQAYAELKEALSEEIKKAQRTGA

SEQ ID NO: 37000 - protein, 197 aa, Homo sapiens; identical to SEQ ID NO: 36999
  Payload ID: 7340
  Gene Symbol: GUK1
  Gene Name: guanylate kinase 1
  Uniprot ID: Q16774
  ENSP ID: ENSP00000355677

SEQ ID NO: 37001 - protein, 197 aa, Homo sapiens; identical to SEQ ID NO: 36999
  Payload ID: 7340
  Gene Symbol: GUK1
  Gene Name: guanylate kinase 1
  Uniprot ID: Q16774
  ENSP ID: ENSP00000355679

SEQ ID NO: 37002 - protein, 199 aa, Homo sapiens
  Payload ID: 7340
  Gene Symbol: GUK1
  Gene Name: guanylate kinase 1
  ENSP ID: ENSP00000355682
MSGPRPVVLSGPSGAGKSTLLKRLLQEHSGIFGFSVSRESRALVEGYHEEPEARRGERQREVMQRDIAAGDFIEHAEFSGNLYGTSKVAVQAVQAMNRICVLDVDLQGVRNIKATDLRPIYISVQPPSLHVLEQRLRQRNTETEESLVKRLAAAQADMESSKEPGLFDVVIINDSLDQAYAELKEALSEEIKKAQRTGA

SEQ ID NO: 37003 - protein, 242 aa, Homo sapiens
  Payload ID: 7340
  Gene Symbol: GUK1
  Gene Name: guanylate kinase 1
  ENSP ID: ENSP00000355683
MSGPRPVVLSGPSGAGKSTLLKRLLQEHSGIFGFSVSHTTRNPRPGEENGKDYYFVTREVMQRDIAAGDFIEHAEFSGNLYGTSKVAVQAVQAMNRICVLDVDLQGVRNIKATDLRPIYISVQPPSLHVLRLRQRNTETEESLVKRLAAAQADMESSKEPGLFDVVIINDSLDQAYAELKEALSEVGPSLCLPGQGPRGGLGARPLLSMRPLRKSRKLKGPAPEACCLFSAPRAHTGPGQQH

SEQ ID NO: 37004 - protein, 235 aa, Homo sapiens
  Payload ID: 7340
  Gene Symbol: GUK1
  Gene Name: guanylate kinase 1
  ENSP ID: ENSP00000355684
MLRRPLAGLAAAALGRAPPDGMSGPRPVVLSGPSGAGKSTLLKRLLQEHSGIFGFSVSHTTRNPRPGEENGKDYYFVTREVMQRDIAAGDFIEHAEFSGNLYGTSKVAVQAVQAMNRICVLDVDLQGVRNIKATDLRPIYISVQPPSLHVLEQRLRQRNTETEESLVKRLAAAQADMESSPAGLESCPTAAVRTAAGKEPGLFDVVIINDSLDQAYAELKEALSEEIKKAQRTGA

SEQ ID NO: 37005 - protein, 197 aa, Homo sapiens; identical to SEQ ID NO: 36999
  Payload ID: 7340
  Gene Symbol: GUK1
  Gene Name: guanylate kinase 1
  Uniprot ID: Q16774
  ENSP ID: ENSP00000355687

SEQ ID NO: 37006 - protein, 241 aa, Homo sapiens
  Payload ID: 7340
  Gene Symbol: GUK1
  Gene Name: guanylate kinase 1
  Uniprot ID: Q16774
  ENSP ID: ENSP00000355689
MLRRPLAGLAAAALGRAPPDGMSGPRPVVLSGPSGAGKSTLLKRLLQEHSGIFGFSVSHTTRNPRPGEENGKDYYFVTREVMQRDIAAGDFIEHAEFSGNLYGTSKVAVQAVQAMNRICVLDVDLQGVRNIKATDLRPIYISVQPPSLHVLEQRLRQRNTETEESLVKRLAAAQADMESRNQESSKDRRLRLAVCSRHPGPIQDQGSSIEPPPWQAIRQLCALGQHVEWRRCCPCGWNILG

SEQ ID NO: 37007 - protein, 197 aa, Homo sapiens; identical to SEQ ID NO: 36999
  Payload ID: 7340
  Gene Symbol: GUK1
  Gene Name: guanylate kinase 1
  Uniprot ID: Q16774
  ENSP ID: ENSP00000355691

SEQ ID NO: 37008 - protein, 218 aa, Homo sapiens
  Payload ID: 7340
  Gene Symbol: GUK1
  Gene Name: guanylate kinase 1
  Uniprot ID: Q16774
  ENSP ID: ENSP00000375738
MLRRPLAGLAAAALGRAPPDGMSGPRPVVLSGPSGAGKSTLLKRLLQEHSGIFGFSVSHTTRNPRPGEENGKDYYFVTREVMQRDIAAGDFIEHAEFSGNLYGTSKVAVQAVQAMNRICVLDVDLQGVRNIKATDLRPIYISVQPPSLHVLEQRLRQRNTETEESLVKRLAAAQADMESSKEPGLFDVVIINDSLDQAYAELKEALSEEIKKAQRTGA

SEQ ID NO: 37009 - protein, 217 aa, Homo sapiens
  Payload ID: 7340
  Gene Symbol: GUK1
  Gene Name: guanylate kinase 1
  ENSP ID: ENSP00000401832
MLRRPLAGLAAAALGRAPPDGMSGPRPVVLSGPSGAGKSTLLKRLLQEHSGIFGFSVSHTTRNPRPGEENGKDYYFVTREVMQRDIAAGDFIEHAEFSGNLYGTSKVAVQAVQAMNRICVLDVDLQGVRNIKATDLRPIYISVQPPSLHVLEQRLRQRNTETEESLVKRLAAAQADMESSKEPGLFDVVIINDSLDQAYAELKEALSEEIKKAQRTG

SEQ ID NO: 37010 - protein, 272 aa, Homo sapiens
  Payload ID: 7340
  Gene Symbol: GUK1
  Gene Name: guanylate kinase 1
  ENSP ID: ENSP00000403664
MAGSQKEEIMPPQQGVPFQESGCWGSMGAQSRERSGRDHSGTWICAGGSQETFHLGAPVETTCLAASLLTPRHVGPQACGAERAFGSWEEHPAEEAAPGAQRHLWLQRVPYHEEPEARRGERQREVMQRDIAAGDFIEHAEFSGNLYGTSKVAVQAVQAMNRICVLDVDLQGVRNIKATDLRPIYISVQPPSLHVLEQRLRQRNTETEESLVKRLAAAQADMESRNQESSKDRRLRLAVCSRHPGPIQDQGSSIEPPPWQAIRQLCALGQHV

SEQ ID NO: 37011 - protein, 253 aa, Homo sapiens
  Payload ID: 7340
  Gene Symbol: GUK1
  Gene Name: guanylate kinase 1
  ENSP ID: ENSP00000407604
MAGSQKEEIMPPQQGVPFQESGCWGSMGAQSRERSGRDHSGTWICAGGSQETFHLGAPVETTCLAGMSGPRPVVLSGPSGAGKSTLLKRLLQEHSGIFGFSVSHTTRNPRPGEENGKDYYFVTREVMQRDIAAGDFIEHAEFSGNLYGTSKVAVQAVQAMNRICVLDVDLQGVRNIKATDLRPIYISVQPPSLHVLEQRLRQRNTETEESLVKRLAAAQADMESSKEPGLFDVVIINDSLDQAYAELKEALSE

SEQ ID NO: 37012 - protein, 239 aa, Homo sapiens
  Payload ID: 7341
  Gene Symbol: GUCD1
  Gene Name: guanylyl cyclase domain containing 1
  Uniprot ID: Q96NT3
  ENSP ID: ENSP00000381297
MRTEAEAAGPPLEPGDFVQLPVPVIQQLYHWDCGLACSRMVLRYLGQLDDSEFERALQKLQLTRSIWTIDLAYLMHHFGVRHRFCTQTLGVDKGYKNQSFYRKHFDTEETRVNQLFAQAKACKVLVEKCTVSVKDIQAHLAQGHVAIVLVNSGVLHCDLCSSPVKYCCFTPSGHHCFCRTPDYQGHFIVLRGYNRATGCIFYNNPAYADRMCSTSISNFEEARTSYGTDEDILFVYLDS

SEQ ID NO: 37013 - protein, 295 aa, Homo sapiens
  Payload ID: 7341
  Gene Symbol: GUCD1
  Gene Name: guanylyl cyclase domain containing 1
  Uniprot ID: Q96NT3
  ENSP ID: ENSP00000384121
MTGPGGRRNDPWGRQRAREGAHTSKHPTPRTGWTARRRRGAWALRPGTAGGWAKGQDFPSQFHLLIPAPPGDFVQLPVPVIQQLYHWDCGLACSRMVLRYLGQLDDSEFERALQKLQLTRSIWTIDLAYLMHHFGVRHRFCTQTLGVDKGYKNQSFYRKHFDTEETRVNQLFAQAKACKVLVEKCTVSVKDIQAHLAQGHVAIVLVNSGVLHCDLCSSPVKYCCFTPSGHHCFCRTPDYQGHFIVLRGYNRATGCIFYNNPAYADRMCSTSISNFEEARTSYGTDEDILFVYLDS

SEQ ID NO: 37014 - protein, 137 aa, Homo sapiens
  Payload ID: 7341
  Gene Symbol: GUCD1
  Gene Name: guanylyl cyclase domain containing 1
  ENSP ID: ENSP00000384378
MRTEAEAAGPPLEPGDFVQLPVPVIQQLYHWDCGLACSRMVLRYLGQLDDSEFERALQKLQLTRSIWTIDLAYLMHHFGVRHRFCTQTLGVDKGYKNQSFYRKHFDTEETRVNQLFAQAKACKVLVEKCRNVQHQHQ

SEQ ID NO: 37015 - protein, 127 aa, Homo sapiens
  Payload ID: 7341
  Gene Symbol: GUCD1
  Gene Name: guanylyl cyclase domain containing 1
  ENSP ID: ENSP00000385583
MRTEAEAAGPPLEPGDFVQLPVPVIQQLYHWDCGLACSRMVLRYLGQLDDSEFERALQKLQLTRSIWTIDLAYLMHHFGVRHRFCTQTLGVDKGYKNQSFYRKHFDTEETRVNQLFAQAKACKVLVE

SEQ ID NO: 37016 - protein, 240 aa, Homo sapiens
  Payload ID: 7341
  Gene Symbol: GUCD1
  Gene Name: guanylyl cyclase domain containing 1
  Uniprot ID: Q96NT3
  ENSP ID: ENSP00000386076
MRTEAEAAGPPLEPGDFVQLPVPVIQQLYHWDCGLACSRMVLRYLGQLDDSEFERALQKLQLTRSIWTIDLAYLMHHFGVRHRFCTQTLGVDKGYKNQSFYRKHFDTEETRVNQLFAQAKACKVLVEKCTVSVKDIQAHLAQGHVAIVLVNSGVLHCDLCSSPVKYCCFTPSGHHCFCRTPDYQGHFIVLRGYNRATGCIFYNNPAYADPGMCSTSISNFEEARTSYGTDEDILFVYLDS

SEQ ID NO: 37017 - protein, 136 aa, Homo sapiens
  Payload ID: 7341
  Gene Symbol: GUCD1
  Gene Name: guanylyl cyclase domain containing 1
  ENSP ID: ENSP00000387867
MRTEAEAAGPPLEPGDFVQLPVPVIQQLYHWDCGLACSRMVLRYLGQLDDSEFERALQKLQLTRSIWTIDLAYLMHHFGVRHRFCTQTLGVDKGYKNQSFYRKHFDTEETRVNQLFAQAKACKVLVEKWNVQHQHQ

SEQ ID NO: 37018 - protein, 239 aa, Homo sapiens; identical to SEQ ID NO: 37012
  Payload ID: 7341
  Gene Symbol: GUCD1
  Gene Name: guanylyl cyclase domain containing 1
  Uniprot ID: Q96NT3
  ENSP ID: ENSP00000405985

SEQ ID NO: 37019 - protein, 296 aa, Homo sapiens
  Payload ID: 7341
  Gene Symbol: GUCD1
  Gene Name: guanylyl cyclase domain containing 1
  ENSP ID: ENSP00000479370
MTGPGGRRNDPWGRQRAREGAHTSKHPTPRTGWTARRRRGAWALRPGTAGGWAKGQDFPSQFHLLIPAPPGDFVQLPVPVIQQLYHWDCGLACSRMVLRYLGQLDDSEFERALQKLQLTRSIWTIDLAYLMHHFGVRHRFCTQTLGVDKGYKNQSFYRKHFDTEETRVNQLFAQAKACKVLVEKCTVSVKDIQAHLAQGHVAIVLVNSGVLHCDLCSSPVKYCCFTPSGHHCFCRTPDYQGHFIVLRGYNRATGCIFYNNPAYADPGMCSTSISNFEEARTSYGTDEDILFVYLDS

SEQ ID NO: 37020 - protein, 669 aa, Homo sapiens
  Payload ID: 7342
  Gene Symbol: GUF1
  Gene Name: GUF1 homolog, GTPase
  Uniprot ID: Q8N442
  ENSP ID: ENSP00000281543
MWTLVGRGWGCARALAPRATGAALLVAPGPRSAPTLGAAPESWATDRLYSSAEFKEKLDMSRFPVENIRNFSIVAHVDHGKSTLADRLLELTGTIDKTKNNKQVLDKLQVERERGITVKAQTASLFYNCEGKQYLLNLIDTPGHVDFSYEVSRSLSACQGVLLVVDANEGIQAQTVANFFLAFEAQLSVIPVINKIDLKNADPERVENQIEKVFDIPSDECIKISAKLGTNVESVLQAIIERIPPPKVHRKNPLRALVFDSTFDQYRGVIANVALFDGVVSKGDKIVSAHTQKTYEVNEVGVLNPNEQPTHKLYAGQVGYLIAGMKDVTEAQIGDTLCLHKQPVEPLPGFKSAKPMVFAGMYPLDQSEYNNLKSAIEKLTLNDSSVTVHRDSSLALGAGWRLGFLGLLHMEVFNQRLEQEYNASVILTTPTVPYKAVLSSSKLIKEHREKEITIINPAQFPDKSKVTEYLEPVVLGTIITPDEYTGKIMMLCEARRAVQKNMIFIDQNRVMLKYLFPLNEIVVDFYDSLKSLSSGYASFDYEDAGYQTAELVKMDILLNGNTVEELVTVVHKDKAHSIGKAICERLKDSLPRQLFEIAIQAAIGSKIIARETVKAYRKNVLAKCYGGDITRKMKLLKRQAEGKKKLRKIGNVEVPKDAFIKVLKTQSSK

SEQ ID NO: 37021 - protein, 98 aa, Homo sapiens
  Payload ID: 7342
  Gene Symbol: GUF1
  Gene Name: GUF1 homolog, GTPase
  ENSP ID: ENSP00000422681
MWTLVGRGWGCARALAPRATGAALLVAPGPRSAPTLGAAPESWATDRLYSSAEFKGQLIKQRIISRFLINCKWNEKEESLLKHRQHLSFTIVKESSTF

SEQ ID NO: 37022 - protein, 304 aa, Homo sapiens
  Payload ID: 7343
  Gene Symbol: GULP1
  Gene Name: GULP, engulfment adaptor PTB domain containing 1
  Uniprot ID: Q9UBP9
  ENSP ID: ENSP00000352047
MNRAFSRKKDKTWMHTPEALSKHFIPYNAKFLGSTEVEQPKGTEVVRDAVRKLKFARHIKKSEGQKIPKVELQISIYGVKILEPKTKEVQHNCQLHRISFCADDKTDKRIFTFICKDSESNKHLCYVFDSEKCAEEITLTIGQAFDLAYRKFLESGGKDVETRKQIAGLQKRIQDLETENMELKNKVQDLENQLRITQVSAPPAGSMTPKSPSTDIFDMIPFSPISHQSSMPTRNGTQPPPVPSRSTEIKRDLFGAEPFDPFNCGAADFPPDIQSKLDEMQEGFKMGLTLEGTVFCLDPLDSRC

SEQ ID NO: 37023 - protein, 304 aa, Homo sapiens; identical to SEQ ID NO: 37022
  Payload ID: 7343
  Gene Symbol: GULP1
  Gene Name: GULP, engulfment adaptor PTB domain containing 1
  Uniprot ID: Q9UBP9
  ENSP ID: ENSP00000386289

SEQ ID NO: 37024 - protein, 167 aa, Homo sapiens
  Payload ID: 7343
  Gene Symbol: GULP1
  Gene Name: GULP, engulfment adaptor PTB domain containing 1
  Uniprot ID: Q9UBP9
  ENSP ID: ENSP00000386402
MNRAFSRKKDKTWMHTPEALSKHFIPYNAKFLGSTEVEQPKGTEVVRDAVRKLKFARHIKKSEGQKIPKVELQISIYGVKILEPKTKEVQHNCQLHRISFCADDKTDKRIFTFICKDSESNKHLCYVFDSEKCVSIPDVVGWFVLFYKPGIVLLLALAKYLKMNNFL

SEQ ID NO: 37025 - protein, 304 aa, Homo sapiens; identical to SEQ ID NO: 37022
  Payload ID: 7343
  Gene Symbol: GULP1
  Gene Name: GULP, engulfment adaptor PTB domain containing 1
  Uniprot ID: Q9UBP9
  ENSP ID: ENSP00000386732

SEQ ID NO: 37026 - protein, 68 aa, Homo sapiens
  Payload ID: 7343
  Gene Symbol: GULP1
  Gene Name: GULP, engulfment adaptor PTB domain containing 1
  ENSP ID: ENSP00000386809
MNRAFSRKKDKTWMHTPEALSKHFIPYNAKFLGSTEVEQPKGTEVVRDAVRKLKFARHIKKSEGQKIP

SEQ ID NO: 37027 - protein, 304 aa, Homo sapiens; identical to SEQ ID NO: 37022
  Payload ID: 7343
  Gene Symbol: GULP1
  Gene Name: GULP, engulfment adaptor PTB domain containing 1
  Uniprot ID: Q9UBP9
  ENSP ID: ENSP00000386867

SEQ ID NO: 37028 - protein, 167 aa, Homo sapiens; identical to SEQ ID NO: 37024
  Payload ID: 7343
  Gene Symbol: GULP1
  Gene Name: GULP, engulfment adaptor PTB domain containing 1
  Uniprot ID: Q9UBP9
  ENSP ID: ENSP00000387013

SEQ ID NO: 37029 - protein, 291 aa, Homo sapiens
  Payload ID: 7343
  Gene Symbol: GULP1
  Gene Name: GULP, engulfment adaptor PTB domain containing 1
  Uniprot ID: Q9UBP9
  ENSP ID: ENSP00000387144
MNRAFSRKKDKTWMHTPEALSKHFIPYNAKFLGSTEVEQPKGTEVVRDAVRKLKFARHIKKSEGQKIPKVELQISIYGVKILEPKTKEVQHNCQLHRISFCADDKTDKRIFTFICKDSESNKHLCYVFDSEKCAEEITLTIGQAFDLAYRKFLESGGKDVETRKQIAGLQKRIQDLETENMELKNKVQDLENQLRITQVSAPPAGSMTPKSPSTDIFDMIPFSPISHQSSMPTRNGTQPPPVPSRSTEIKRDLFGAEPFDPFNCGAADFPPDIQSKLDEMQRQRWRGSKWD

SEQ ID NO: 37030 - protein, 201 aa, Homo sapiens
  Payload ID: 7343
  Gene Symbol: GULP1
  Gene Name: GULP, engulfment adaptor PTB domain containing 1
  Uniprot ID: Q9UBP9
  ENSP ID: ENSP00000387171
MNRAFSRKKDKTWMHTPEALSKHFIPYNAKAEEITLTIGQAFDLAYRKFLESGGKDVETRKQIAGLQKRIQDLETENMELKNKVQDLENQLRITQVSAPPAGSMTPKSPSTDIFDMIPFSPISHQSSMPTRNGTQPPPVPSRSTEIKRDLFGAEPFDPFNCGAADFPPDIQSKLDEMQEGFKMGLTLEGTVFCLDPLDSRC

SEQ ID NO: 37031 - protein, 189 aa, Homo sapiens
  Payload ID: 7343
  Gene Symbol: GULP1
  Gene Name: GULP, engulfment adaptor PTB domain containing 1
  ENSP ID: ENSP00000391712
  MOD_RES (1)..(1): Any amino acid
XNQLRITQVSAPPLLHNMSDHEQHVFQRCSSSFWRSNGDSSPCLNISSISVTPINSPDSRLSLGLLIPPPSKCGFPKPVSESSIPRPHAGSMTPKSPSTDIFDMIPFSPISHQSSMPTRNGTQPPPVPSRSTEIKRDLFGAEPFDPFNCGAADFPPDIQSKLDEMQEGFKMGLTLEGTVFCLDPLDSRC

SEQ ID NO: 37032 - protein, 147 aa, Homo sapiens
  Payload ID: 7343
  Gene Symbol: GULP1
  Gene Name: GULP, engulfment adaptor PTB domain containing 1
  ENSP ID: ENSP00000407131
  MOD_RES (1)..(1): Any amino acid
XETENMELKNKVQDLENQLRITQVSAPPAGSMTPKSPSTDIFDMIPFSPISHQSSMPTRNGTQPPPVPSRSTEIKRDLFGAEPFDPFNCGAADFPPDIQSKLDEMQVTILIDWPINDLFHFDMGQRECYVPKLWFPSIIFAIKTRLK

SEQ ID NO: 37033 - protein, 195 aa, Homo sapiens
  Payload ID: 7344
  Gene Symbol: GVQW1
  Gene Name: GVQW motif containing 1
  Uniprot ID: Q8N7I0
  ENSP ID: ENSP00000414891
MPNFLGLHRARSFTVLCFWSTADVLNASGPRRQWHPLASCSSWSRPQSQGSTPGVLCKTGMGREPIPETQCHFANSMCSLHVSVPYFGNSPNISNFFRWSLALSPRQWCDLGSLQPPSPRFKGFSCLSLPSSWDYRRAPSPANFCILVEMGFHHVGQADLELLTSADLPTSASQSAGITGVSHHAWPQTLSLLLY

SEQ ID NO: 37034 - protein, 108 aa, Homo sapiens
  Payload ID: 7345
  Gene Symbol: GVQW2
  Gene Name: GVQW motif containing 2
  ENSP ID: ENSP00000485629
MQYPFRKLLRPSTESCCVAQARVQWCHLGSLQPPLPGFKQFSCHSLPSSWDYRWNLTLSPRLECSGAISAHCNLCLPDLSDSPASTSRVAGTTGAHHHAQEPVVIRKM

SEQ ID NO: 37035 - protein, 522 aa, Homo sapiens
  Payload ID: 7346
  Gene Symbol: GIN1
  Gene Name: gypsy retrotransposon integrase 1
  Uniprot ID: Q9NXP7
  ENSP ID: ENSP00000381970
MVRSGKNGDLHLKQIAYYKRTGEYHSTTLPSERSGIRRAAKKFVFKEKKLFYVGKDRKQNRLVIVSEEEKKKVLRECHENDSGAHHGISRTLTLVESNYYWTSVTNDVKQWVYACQHCQVAKNTVIVAPKQHLLKVENPWSLVTVDLMGPFHTSNRSHVYAIIMTDLFTKWIVILPLCDVSASEVSKAIINIFFLYGPPQKIIMDQRDEFIQQINIELYRLFGIKQIVISHTSGTVNPTESTPNTIKAFLSKHCADHPNNWDDHLSAVSFAFNVTHLEPTKNTPYFQMFSRNPYMPETSDSLHEVDGDNTSMFAKILDAIKEADKIMENKTTSLGQMENNNLDELNKSKIIVKKKPKQLNPFHLKVGHEVLRQRKNWWKDGRFQSEWVGPCVIDYITESGCAVLRDNTGVRLKRPIKMSHLKPYIRESSEQESLYLLQGSVVADHDYIGLPEIPIGAYQANILVEDATIGIVDNELLTSSKDRELLEYRNTKISPLIDDHSSLEKQTFSLLDSSNQVLEYLS

SEQ ID NO: 37036 - protein, 80 aa, Homo sapiens
  Payload ID: 7346
  Gene Symbol: GIN1
  Gene Name: gypsy retrotransposon integrase 1
  Uniprot ID: Q9NXP7
  ENSP ID: ENSP00000422960
MVRSGKNGDLHLKQIAYYKRTGEYHSTTLPSERSGIRRAAKKFVFKGICLSALPSGKKYSYCSTETAPSQGGKSMEFSYC

SEQ ID NO: 37037 - protein, 80 aa, Homo sapiens; identical to SEQ ID NO: 37036
  Payload ID: 7346
  Gene Symbol: GIN1
  Gene Name: gypsy retrotransposon integrase 1
  Uniprot ID: Q9NXP7
  ENSP ID: ENSP00000423031

SEQ ID NO: 37038 - protein, 222 aa, Homo sapiens
  Payload ID: 7346
  Gene Symbol: GIN1
  Gene Name: gypsy retrotransposon integrase 1
  Uniprot ID: Q9NXP7
  ENSP ID: ENSP00000427162
MVRSGKNGDLHLKQIAYYKRTGEYHSTTLPSERSGIRRAAKKFVFKEKKLFYVGKDRKQNRLVIVSEEEKKKVLRECHENDSGAHHGISRTLTLVESNYYWTSVTNDVKQWVYACQHCQVAKNTVIVAPKQHLLKVENPWSLVTVDLMGPFHTSNRSHVYAIIMTDLFTKWIVILPLCDVSASEVSKAIINIFFLYGPPQKIIMDQRDEFIQQKVFISCKVQ

SEQ ID NO: 37039 - protein, 194 aa, Homo sapiens
  Payload ID: 7347
  Gene Symbol: H1F0
  Gene Name: H1 histone family, member 0
  Uniprot ID: P07305
  ENSP ID: ENSP00000344504
MTENSTSAPAAKPKRAKASKKSTDHPKYSDMIVAAIQAEKNRAGSSRQSIQKYIKSHYKVGENADSQIKLSIKRLVTTGVLKQTKGVGASGSFRLAKSDEPKKSVAFKKTKKEIKKVATPKKASKPKKAASKAPTKKPKATPVKKAKKKLAATPKKAKKPKTVKAKPVKASKPKKAKPVKPKAKSSAKRAGKKK

SEQ ID NO: 37040 - protein, 255 aa, Homo sapiens
  Payload ID: 7348
  Gene Symbol: H1FNT
  Gene Name: H1 histone family, member N, testis-specific
  Uniprot ID: Q75WM6
  ENSP ID: ENSP00000334805
MEQALTGEAQSRWPRRGGSGAMAEAPGPSGESRGHSATQLPAEKTVGGPSRGCSSSVLRVSQLVLQAISTHKGLTLAALKKELRNAGYEVRRKSGRHEAPRGQAKATLLRVSGSDAAGYFRVWKVPKPRRKPGRARQEEGTRAPWRTPAAPRSSRRRRQPLRKAARKAREVWRRNARAKAKANARARRTRRARPRAKEPPCARAKEEAGATAADEGRGQAVKEDTTPRSGKDKRRSSKPREEKQEPKKPAQRTIQ

SEQ ID NO: 37041 - protein, 346 aa, Homo sapiens
  Payload ID: 7349
  Gene Symbol: H1FOO
  Gene Name: H1 histone family, member O, oocyte-specific
  Uniprot ID: Q8IZA3
  ENSP ID: ENSP00000319799
MAPGSVTSDISPSSTSTAGSSRSPESEKPGPSHGGVPPGGPSHSSLPVGRRHPPVLRMVLEALQAGEQRRGTSVAAIKLYILHKYPTVDVLRFKYLLKQALATGMRRGLLARPLNSKARGATGSFKLVPKHKKKIQPRKMAPATAPRRAGEAKGKGPKKPSEAKEDPPNVGKVKKAAKRPAKVQKPPPKPGAATEKARKQGGAAKDTRAQSGEARKVPPKPDKAMRAPSSAGGLSRKAKAKGSRSSQGDAEAYRKTKAESKSSKPTASKVKNGAASPTKKKVVAKAKAPKAGQGPNTKAAAPAKGSGSKVVPAHLSRKTEAPKGPRKAGLPIKASSSKVSSQRAEA

SEQ ID NO: 37042 - protein, 207 aa, Homo sapiens
  Payload ID: 7349
  Gene Symbol: H1FOO
  Gene Name: H1 histone family, member O, oocyte-specific
  Uniprot ID: Q8IZA3
  ENSP ID: ENSP00000422964
MAPATAPRRAGEAKGKGPKKPSEAKEDPPNVGKVKKAAKRPAKVQKPPPKPGAATEKARKQGGAAKDTRAQSGEARKVPPKPDKAMRAPSSAGGLSRKAKAKGSRSSQGDAEAYRKTKAESKSSKPTASKVKNGAASPTKKKVVAKAKAPKAGQGPNTKAAAPAKGSGSKVVPAHLSRKTEAPKGPRKAGLPIKASSSKVSSQRAEA

SEQ ID NO: 37043 - protein, 213 aa, Homo sapiens
  Payload ID: 7350
  Gene Symbol: H1FX
  Gene Name: H1 histone family, member X
  Uniprot ID: Q92522
  ENSP ID: ENSP00000329662
MSVELEEALPVTTAEGMAKKVTKAGGSAALSPSKKRKNSKKKNQPGKYSQLVVETIRRLGERNGSSLAKIYTEAKKVPWFDQQNGRTYLKYSIKALVQNDTLLQVKGTGANGSFKLNRKKLEGGGERRGAPAAATAPAPTAHKAKKAAPGAAGSRRADKKPARGQKPEQRSHKKGAGAKKDKGGKAKKTAAAGGKKVKKAAKPSVPKVPKGRK

SEQ ID NO: 37044 - protein, 488 aa, Homo sapiens
  Payload ID: 7351
  Gene Symbol: HLX
  Gene Name: H2.0-like homeobox
  Uniprot ID: Q14774
  ENSP ID: ENSP00000355870
MFAAGLAPFYASNFSLWSAAYCSSAGPGGCSFPLDPAAVKKPSFCIADILHAGVGDLGAAPEGLAGASAAALTAHLGSVHPHASFQAAARSPLRPTPVVAPSEVPAGFPQRLSPLSAAYHHHHPQQQQQQQQPQQQQPPPPPRAGALQPPASGTRVVPNPHHSGSAPAPSSKDLKFGIDRILSAEFDPKVKEGNTLRDLTSLLTGGRPAGVHLSGLQPSAGQFFASLDPINEASAILSPLNSNPRNSVQHQFQDTFPGPYAVLTKDTMPQTYKRKRSWSRAVFSNLQRKGLEKRFEIQKYVTKPDRKQLAAMLGLTDAQVKVWFQNRRMKWRHSKEAQAQKDKDKEAGEKPSGGAPAADGEQDERSPSRSEGEAESESSDSESLDMAPSDTERTEGSERSLHQTTVIKAPVTGALITASSAGSGGSSGGGGNSFSFSSASSLSSSSTSAGCASSLGGGGASELLPATQPTASSAPKSPEPAQGALGCL

SEQ ID NO: 37045 - protein, 151 aa, Homo sapiens
  Payload ID: 7351
  Gene Symbol: HLX
  Gene Name: H2.0-like homeobox
  ENSP ID: ENSP00000408248
MPQTYKRKRSWSRAVFSNLQRKGLEKRFEIQKYVTKPDRKQLAAMLGLTDAQVKVWFQNRRMKWRHSKEAQAQKDKDKEAGEKPSGGAPAADGEQDERSPSRSEGEAESESSDSESLDMAPSDTERTEGSERSLHQTTVIKAPVTGALITA

SEQ ID NO: 37046 - protein, 115 aa, Homo sapiens
  Payload ID: 7352
  Gene Symbol: H2AFB1
  Gene Name: H2A histone family, member B1
  Uniprot ID: P0C5Y9
  ENSP ID: ENSP00000484261
MPRRRRRRGSSGAGGRGRTCSRTVRAELSFSVSQVERSLREGHYAQRLSRTAPVYLAAVIEYLTAKVPELAGNEAQNSGERNITPLLLDMVVHNDRLLSTLFNTTTISQVAPGED

SEQ ID NO: 37047 - protein, 115 aa, Homo sapiens
  Payload ID: 7353
  Gene Symbol: H2AFB2
  Gene Name: H2A histone family, member B2
  Uniprot ID: P0C5Z0
  ENSP ID: ENSP00000346509
MPRRRRRRGSSGAGGRGRTCSRTVRAELSFSVSQVERSLREGHYAQRLSRTAPVYLAAVIEYLTAKVLELAGNEAQNSGERNITPLLLDMVVHNDRLLSTLFNTTTISQVAPGED

SEQ ID NO: 37048 - protein, 115 aa, Homo sapiens; identical to SEQ ID NO: 37047
  Payload ID: 7354
  Gene Symbol: H2AFB3
  Gene Name: H2A histone family, member B3
  Uniprot ID: P0C5Z0
  ENSP ID: ENSP00000482564

SEQ ID NO: 37049 - protein, 129 aa, Homo sapiens
  Payload ID: 7355
  Gene Symbol: H2AFJ
  Gene Name: H2A histone family, member J
  Uniprot ID: Q9BTM1
  ENSP ID: ENSP00000373730
MSGRGKQGGKVRAKAKSRSSRAGLQFPVGRVHRLLRKGNYAERVGAGAPVYLAAVLEYLTAEILELAGNAARDNKKTRIIPRHLQLAIRNDEELNKLLGKVTIAQGGVLPNIQAVLLPKKTESQKTKSK

SEQ ID NO: 37050 - protein, 129 aa, Homo sapiens; identical to SEQ ID NO: 37049
  Payload ID: 7355
  Gene Symbol: H2AFJ
  Gene Name: H2A histone family, member J
  Uniprot ID: Q9BTM1
  ENSP ID: ENSP00000438553

SEQ ID NO: 37051 - protein, 92 aa, Homo sapiens
  Payload ID: 7355
  Gene Symbol: H2AFJ
  Gene Name: H2A histone family, member J
  ENSP ID: ENSP00000440902
GNYAERVGAGAPVYLAAVLEYLTAEILELAGNAARDNKKTRIIPRHLQLAIRNDEELNKLLGKVTIAQGGVLPNIQAVLLPKKTESQKTKSK

SEQ ID NO: 37052 - protein, 114 aa, Homo sapiens
  Payload ID: 7356
  Gene Symbol: H2AFV
  Gene Name: H2A histone family, member V
  Uniprot ID: Q71UI9
  ENSP ID: ENSP00000222690
MAGGKAGKDSGKAKAKAVSRSQRAGLQFPVGRIHRHLKTRTTSHGRVGATAAVYSAAILEYLTAEVLELAGNASKDLKVKRITPRHLQLAIRGDEELDSLIKATIAGGEKRRCS

SEQ ID NO: 37053 - protein, 128 aa, Homo sapiens
  Payload ID: 7356
  Gene Symbol: H2AFV
  Gene Name: H2A histone family, member V
  Uniprot ID: Q71UI9
  ENSP ID: ENSP00000308405
MAGGKAGKDSGKAKAKAVSRSQRAGLQFPVGRIHRHLKTRTTSHGRVGATAAVYSAAILEYLTAEVLELAGNASKDLKVKRITPRHLQLAIRGDEELDSLIKATIAGGGVIPHIHKSLIGKKGQQKTA

SEQ ID NO: 37054 - protein, 102 aa, Homo sapiens
  Payload ID: 7356
  Gene Symbol: H2AFV
  Gene Name: H2A histone family, member V
  Uniprot ID: Q71UI9
  ENSP ID: ENSP00000340708
MFPVGRIHRHLKTRTTSHGRVGATAAVYSAAILEYLTAEVLELAGNASKDLKVKRITPRHLQLAIRGDEELDSLIKATIAGGGVIPHIHKSLIGKKGQQKTA

SEQ ID NO: 37055 - protein, 90 aa, Homo sapiens
  Payload ID: 7356
  Gene Symbol: H2AFV
  Gene Name: H2A histone family, member V
  Uniprot ID: Q71UI9
  ENSP ID: ENSP00000342714
MAGGKAGKDSGKAKAKAVSRSQRAGLQVLELAGNASKDLKVKRITPRHLQLAIRGDEELDSLIKATIAGGGVIPHIHKSLIGKKGQQKTA

SEQ ID NO: 37056 - protein, 66 aa, Homo sapiens
  Payload ID: 7356
  Gene Symbol: H2AFV
  Gene Name: H2A histone family, member V
  Uniprot ID: Q71UI9
  ENSP ID: ENSP00000370516
MAGGKAGKDSGKAKAKAVSRSQRAGLQFPVGRIHRHLKTRTTSHGRVGATAAVYSAAILEYLTAEV

SEQ ID NO: 37057 - protein, 76 aa, Homo sapiens
  Payload ID: 7356
  Gene Symbol: H2AFV
  Gene Name: H2A histone family, member V
  ENSP ID: ENSP00000397115
MAGGKAGKDSGKAKAKAVSRSQRAGLQVLELAGNASKDLKVKRITPRHLQLAIRGDEELDSLIKATIAGGEKRRCS

SEQ ID NO: 37058 - protein, 122 aa, Homo sapiens
  Payload ID: 7356
  Gene Symbol: H2AFV
  Gene Name: H2A histone family, member V
  ENSP ID: ENSP00000406901
MAGGKAGKDSGKAKAKAVSRSQRAGLQFPVGRIHRHLKTRTTSHGRVGATAAVYSAAILEYLTAEVLELAGNASKDLKVKRITPRHLQLAIRGDEELDSLIKATIAGGGMYYYLSLDSYWSF

SEQ ID NO: 37059 - protein, 40 aa, Homo sapiens
  Payload ID: 7356
  Gene Symbol: H2AFV
  Gene Name: H2A histone family, member V
  ENSP ID: ENSP00000430492
MFPVGRIHRHLKTRTTSHGRVGATAAVYSAAILEYLTAEV

SEQ ID NO: 37060 - protein, 143 aa, Homo sapiens
  Payload ID: 7357
  Gene Symbol: H2AFX
  Gene Name: H2A histone family, member X
  Uniprot ID: P16104
  ENSP ID: ENSP00000364310
MSGRGKTGGKARAKAKSRSSRAGLQFPVGRVHRLLRKGHYAERVGAGAPVYLAAVLEYLTAEILELAGNAARDNKKTRIIPRHLQLAIRNDEELNKLLGGVTIAQGGVLPNIQAVLLPKKTSATVGPKAPSGGKKATQASQEY

SEQ ID NO: 37061 - protein, 143 aa, Homo sapiens; identical to SEQ ID NO: 37060
  Payload ID: 7357
  Gene Symbol: H2AFX
  Gene Name: H2A histone family, member X
  Uniprot ID: P16104
  ENSP ID: ENSP00000434024

SEQ ID NO: 37062 - protein, 371 aa, Homo sapiens
  Payload ID: 7358
  Gene Symbol: H2AFY
  Gene Name: H2A histone family, member Y
  Uniprot ID: O75367
  ENSP ID: ENSP00000302572
MSSRGGKKKSTKTSRSAKAGVIFPVGRMLRYIKKGHPKYRIGVGAPVYMAAVLEYLTAEILELAGNAARDNKKGRVTPRHILLAVANDEELNQLLKGVTIASGGVLPNIHPELLAKKRGSKGKLEAIITPPPAKKAKSPSQKKPVSKKAGGKKGARKSKKQGEVSKAASADSTTEGTPADGFTVLSTKSLFLGQKLNLIHSEISNLAGFEVEAIINPTNADIDLKDDLGNTLEKKGGKEFVEAVLELRKKNGPLEVAGAAVSAGHGLPAKFVIHCNSPVWGADKCEELLEKTVKNCLALADDKKLKSIAFPSIGSGRNGFPKQTAAQLILKAISSYFVSTMSSSIKTVYFVLFDSESIGIYVQEMAKLDAN

SEQ ID NO: 37063 - protein, 369 aa, Homo sapiens
  Payload ID: 7358
  Gene Symbol: H2AFY
  Gene Name: H2A histone family, member Y
  Uniprot ID: O75367
  ENSP ID: ENSP00000310169
MSSRGGKKKSTKTSRSAKAGVIFPVGRMLRYIKKGHPKYRIGVGAPVYMAAVLEYLTAEILELAGNAARDNKKGRVTPRHILLAVANDEELNQLLKGVTIASGGVLPNIHPELLAKKRGSKGKLEAIITPPPAKKAKSPSQKKPVSKKAGGKKGARKSKKKQGEVSKAASADSTTEGTPADGFTVLSTKSLFLGQKLQVVQADIASIDSDAVVHPTNTDFYIGGEVGNTLEKKGGKEFVEAVLELRKKNGPLEVAGAAVSAGHGLPAKFVIHCNSPVWGADKCEELLEKTVKNCLALADDKKLKSIAFPSIGSGRNGFPKQTAAQLILKAISSYFVSTMSSSIKTVYFVLFDSESIGIYVQEMAKLDAN

SEQ ID NO: 37064 - protein, 200 aa, Homo sapiens
  Payload ID: 7358
  Gene Symbol: H2AFY
  Gene Name: H2A histone family, member Y
  ENSP ID: ENSP00000415121
MSSRGGKKKSTKTSRSAKAGVIFPVGRMLRYIKKGHPKYRIGVGAPVYMAAVLEYLTGNTLEKKGGKEFVEAVLELRKKNGPLEVAGAAVSAGHGLPAKFVIHCNSPVWGADKCEELLEKTVKNCLALADDKKLKSIAFPSIGSGRNGFPKQTAAQLILKAISSYFVSTMSSSIKTVYFVLFDSESIGIYVQEMAKLDAN

SEQ ID NO: 37065 - protein, 372 aa, Homo sapiens
  Payload ID: 7358
  Gene Symbol: H2AFY
  Gene Name: H2A histone family, member Y
  Uniprot ID: O75367
  ENSP ID: ENSP00000423563
MSSRGGKKKSTKTSRSAKAGVIFPVGRMLRYIKKGHPKYRIGVGAPVYMAAVLEYLTAEILELAGNAARDNKKGRVTPRHILLAVANDEELNQLLKGVTIASGGVLPNIHPELLAKKRGSKGKLEAIITPPPAKKAKSPSQKKPVSKKAGGKKGARKSKKKQGEVSKAASADSTTEGTPADGFTVLSTKSLFLGQKLNLIHSEISNLAGFEVEAIINPTNADIDLKDDLGNTLEKKGGKEFVEAVLELRKKNGPLEVAGAAVSAGHGLPAKFVIHCNSPVWGADKCEELLEKTVKNCLALADDKKLKSIAFPSIGSGRNGFPKQTAAQLILKAISSYFVSTMSSSIKTVYFVLFDSESIGIYVQEMAKLDAN

SEQ ID NO: 37066 - protein, 165 aa, Homo sapiens
  Payload ID: 7358
  Gene Symbol: H2AFY
  Gene Name: H2A histone family, member Y
  ENSP ID: ENSP00000423718
MSSRGGKKKSTKTSRSAKAGVIFPVGRMLRYIKKGHPKYRIGVGAPVYMAAVLEYLTAEILELAGNAARDNKKGRVTPRHILLAVANDEELNQLLKGVTIASGGVLPNIHPELLAKKRGSKGKLEAIITPPPAKKAKSPSQKKPVSKKAGGKKGARKSKNSCTSK

SEQ ID NO: 37067 - protein, 372 aa, Homo sapiens; identical to SEQ ID NO: 37065
  Payload ID: 7358
  Gene Symbol: H2AFY
  Gene Name: H2A histone family, member Y
  Uniprot ID: O75367
  ENSP ID: ENSP00000424971

SEQ ID NO: 37068 - protein, 372 aa, Homo sapiens
  Payload ID: 7359
  Gene Symbol: H2AFY2
  Gene Name: H2A histone family, member Y2
  Uniprot ID: Q9P0M6
  ENSP ID: ENSP00000362352
MSGRSGKKKMSKLSRSARAGVIFPVGRLMRYLKKGTFKYRISVGAPVYMAAVIEYLAAEILELAGNAARDNKKARIAPRHILLAVANDEELNQLLKGVTIASGGVLPRIHPELLAKKRGTKGKSETILSPPPEKRGRKATSGKKGGKKSKAAKPRTSKKSKPKDSDKEGTSNSTSEDGPGDGFTILSSKSLVLGQKLSLTQSDISHIGSMRVEGIVHPTTAEIDLKEDIGKALEKAGGKEFLETVKELRKSQGPLEVAEAAVSQSSGLAAKFVIHCHIPQWGSDKCEEQLEETIKNCLSAAEDKKLKSVAFPPFPSGRNCFPKQTAAQVTLKAISAHFDDSSASSLKNVYFLLFDSESIGIYVQEMAKLDAK

SEQ ID NO: 37069 - protein, 242 aa, Homo sapiens
  Payload ID: 7359
  Gene Symbol: H2AFY2
  Gene Name: H2A histone family, member Y2
  ENSP ID: ENSP00000404584
MSGRSGKKKMSKLSRSARAGVIFPVGRLMRYLKKGTFKYRISVGAPVYMAAVIEYLAAEILELAGNAARDNKKARIAPRHILLAVANDEELNQSKPKDSDKEGTSNSTSEDGPGDGFTILSSKSLVLGQKLSLTQSDISHIGSMRVEGIVHPTTAEIDLKEDIGKALEKAGGKEFLETVKELRKSQGPLEVAEAAVSQSSGLAAKFVIHCHIPQWGSDKCEEQLEETIKNCLSAAEDKKLKS

SEQ ID NO: 37070 - protein, 128 aa, Homo sapiens
  Payload ID: 7360
  Gene Symbol: H2AFZ
  Gene Name: H2A histone family, member Z
  Uniprot ID: P0C0S5
  ENSP ID: ENSP00000296417
MAGGKAGKDSGKAKTKAVSRSQRAGLQFPVGRIHRHLKSRTTSHGRVGATAAVYSAAILEYLTAEVLELAGNASKDLKVKRITPRHLQLAIRGDEELDSLIKATIAGGGVIPHIHKSLIGKKGQQKTV

SEQ ID NO: 37071 - protein, 154 aa, Homo sapiens
  Payload ID: 7361
  Gene Symbol: H2BFM
  Gene Name: H2B histone family, member M
  Uniprot ID: P0C1H6
  ENSP ID: ENSP00000347119
MAAASAMAEASSETTSEEGQSIQEPKEANSTKAQKQKRRGCRGSRRRHANRRGDSFGDSFTPYFPRVLKQVHQGLSLSQEAVSVMDSMIHDILDRIATEAGQLAHYTKRVTITSRDIQMAVRLLLPGKMGKLAEAQGTNAALRTSLCAIWQQRK

SEQ ID NO: 37072 - protein, 52 aa, Homo sapiens
  Payload ID: 7361
  Gene Symbol: H2BFM
  Gene Name: H2B histone family, member M
  ENSP ID: ENSP00000402466
LAHYTKRVTITSRDIQMAVRLLLPGKMGKLAEAQGTNAALRTSLCAIWQQRK

SEQ ID NO: 37073 - protein, 154 aa, Homo sapiens; identical to SEQ ID NO: 37071
  Payload ID: 7361
  Gene Symbol: H2BFM
  Gene Name: H2B histone family, member M
  Uniprot ID: P0C1H6
  ENSP ID: ENSP00000482611

SEQ ID NO: 37074 - protein, 126 aa, Homo sapiens
  Payload ID: 7362
  Gene Symbol: H2BFS
  Gene Name: H2B histone family, member S (pseudogene)
  Uniprot ID: P57053
  ENSP ID: ENSP00000481622
MPEPAKSAPAPKKGSKKAVTKAQKKDGRKRKRSRKESYSVYVYKVLKQVHPDTGISSKAMGIMNSFVNDIFERIAGEASRLPHYNKRSTITSREIQTAVRLLLPGELAKHAVSEGTKAVTKYTSAK

SEQ ID NO: 37075 - protein, 175 aa, Homo sapiens
  Payload ID: 7363
  Gene Symbol: H2BFWT
  Gene Name: H2B histone family, member W, testis-specific
  Uniprot ID: Q7Z2G1
  ENSP ID: ENSP00000354723
MLRTEVPRLPRSTTAIVWSCHLMATASAMAGPSSETTSEEQLITQEPKEANSTTSQKQSKQRKRGRHGPRRCHSNCRGDSFATYFRRVLKQVHQGLSLSREAVSVMDSLVHDILDRIATEAGHLARSTKRQTITAWETRMAVRLLLPGQMGKLAESEGTKAVLRTSLYAIQQQRK

SEQ ID NO: 37076 - protein, 175 aa, Homo sapiens; identical to SEQ ID NO: 37075
  Payload ID: 7363
  Gene Symbol: H2BFWT
  Gene Name: H2B histone family, member W, testis-specific
  Uniprot ID: Q7Z2G1
  ENSP ID: ENSP00000482103

SEQ ID NO: 37077 - protein, 136 aa, Homo sapiens
  Payload ID: 7364
  Gene Symbol: H3F3A
  Gene Name: H3 histone, family 3A
  Uniprot ID: P84243
  ENSP ID: ENSP00000355778
MARTKQTARKSTGGKAPRKQLATKAARKSAPSTGGVKKPHRYRPGTVALREIRRYQKSTELLIRKLPFQRLVREIAQDFKTDLRFQSAAIGALQEASEAYLVGLFEDTNLCAIHAKRVTIMPKDIQLARRIRGERA

SEQ ID NO: 37078 - protein, 123 aa, Homo sapiens
  Payload ID: 7364
  Gene Symbol: H3F3A
  Gene Name: H3 histone, family 3A
  ENSP ID: ENSP00000355779
MARTKQTARKSTGGKAPRKQLATKAARKSAPSTGGVKKPHRYRPGTVALREIRRYQKSTELLIRKLPFQRLVREIAQDFKTDLRFQSAAIGALQVKWWVGRLRVCIPVVYQEQFQIVACAYII

SEQ ID NO: 37079 - protein, 136 aa, Homo sapiens; identical to SEQ ID NO: 37077
  Payload ID: 7364
  Gene Symbol: H3F3A
  Gene Name: H3 histone, family 3A
  Uniprot ID: P84243
  ENSP ID: ENSP00000355780

SEQ ID NO: 37080 - protein, 136 aa, Homo sapiens; identical to SEQ ID NO: 37077
  Payload ID: 7364
  Gene Symbol: H3F3A
  Gene Name: H3 histone, family 3A
  Uniprot ID: P84243
  ENSP ID: ENSP00000355781

SEQ ID NO: 37081 - protein, 136 aa, Homo sapiens; identical to SEQ ID NO: 37077
  Payload ID: 7365
  Gene Symbol: H3F3B
  Gene Name: H3 histone, family 3B (H3.3B)
  Uniprot ID: P84243
  ENSP ID: ENSP00000254810

SEQ ID NO: 37082 - protein, 132 aa, Homo sapiens
  Payload ID: 7365
  Gene Symbol: H3F3B
  Gene Name: H3 histone, family 3B (H3.3B)
  ENSP ID: ENSP00000465403
MARTKQTARKSTGGKAPRKQLATKAARKSAPSTGGVKKPHRYRPGTVALREIRRYQKSTELLIRKLPFQRLVREIAQDFKTDLRFQSAAIGALQEASEAYLVGLFEDTNLCAIHAKRVTIMPKDIQLARRIR

SEQ ID NO: 37083 - protein, 136 aa, Homo sapiens; identical to SEQ ID NO: 37077
  Payload ID: 7365
  Gene Symbol: H3F3B
  Gene Name: H3 histone, family 3B (H3.3B)
  Uniprot ID: P84243
  ENSP ID: ENSP00000465813

SEQ ID NO: 37084 - protein, 136 aa, Homo sapiens; identical to SEQ ID NO: 37077
  Payload ID: 7365
  Gene Symbol: H3F3B
  Gene Name: H3 histone, family 3B (H3.3B)
  Uniprot ID: P84243
  ENSP ID: ENSP00000466020

SEQ ID NO: 37085 - protein, 92 aa, Homo sapiens
  Payload ID: 7365
  Gene Symbol: H3F3B
  Gene Name: H3 histone, family 3B (H3.3B)
  ENSP ID: ENSP00000466663
MARTKQTARKSTGGKAPRKQLATKAARKSAPSTGGVKKPHRYRPGTVALREIRRYQKSTELLIRKLPFQRLVREIAQDFKTDLRFQSAAIGG

SEQ ID NO: 37086 - protein, 113 aa, Homo sapiens
  Payload ID: 7365
  Gene Symbol: H3F3B
  Gene Name: H3 histone, family 3B (H3.3B)
  ENSP ID: ENSP00000467165
MARTKQTARKSTGGKAPRKQLATKAARKSAPSTGGVKKPHRYRPGTVALREIRRYQKSTELLIRKLPFQRRLAKRTWWVCSKIPTCVPSTLRESPSCPKTSSWLAGYGERELK

SEQ ID NO: 37087 - protein, 151 aa, Homo sapiens
  Payload ID: 7365
  Gene Symbol: H3F3B
  Gene Name: H3 histone, family 3B (H3.3B)
  ENSP ID: ENSP00000468484
MARTKQTARKSTGGKAPRKQLATKAARKSAPSTGGVKKPHRYRPGTVALREIRRYQKSTELLIRKLPFQRLVREIAQDFKTDLRFQSAAIGALQVRQRPGAGGGLGGFRSPSGINSAALVLNRRLAKRTWWVCSKIPTCVPSTLRESPSCP

SEQ ID NO: 37088 - protein, 136 aa, Homo sapiens; identical to SEQ ID NO: 37077
  Payload ID: 7365
  Gene Symbol: H3F3B
  Gene Name: H3 histone, family 3B (H3.3B)
  Uniprot ID: P84243
  ENSP ID: ENSP00000468714

SEQ ID NO: 37089 - protein, 135 aa, Homo sapiens
  Payload ID: 7366
  Gene Symbol: H3F3C
  Gene Name: H3 histone, family 3C
  Uniprot ID: Q6NXT2
  ENSP ID: ENSP00000339835
MARTKQTARKSTGGKAPRKQLATKAARKSTPSTCGVKPHRYRPGTVALREIRRYQKSTELLIRKLPFQRLVREIAQDFNTDLRFQSAAVGALQEASEAYLVGLLEDTNLCAIHAKRVTIMPKDIQLARRIRGERA

SEQ ID NO: 37090 - protein, 348 aa, Homo sapiens
  Payload ID: 7367
  Gene Symbol: HMX1
  Gene Name: H6 family homeobox 1
  Uniprot ID: Q9NP08
  ENSP ID: ENSP00000383516
MPDELTEPGRATPARASSFLIENLLAAEAKGAGRATQGDGSREDEEEDDDDPEDEDAEQARRRRLQRRRQLLAGTGPGGEARARALLGPGALGLGPRPPPGPGPPFALGCGGAARWYPRAHGGYGGGLSPDTSDRDSPETGEEMGRAEGAWPRGPGPGAVQREAAELAARGPAAGTEEASELAEVPAAAGETRGGVGVGGGRKKKTRTVFSRSQVFQLESTFDLKRYLSSAERAGLAASLQLTETQVKIWFQNRRNKWKRQLAAELEAASLSPPGAQRLVRVPVLYHESPPAAAAAGPPATLPFPLAPAAPAPPPPLLGFSGALAYPLAAFPAAASVPFLRAQMPGLV

SEQ ID NO: 37091 - protein, 190 aa, Homo sapiens
  Payload ID: 7367
  Gene Symbol: HMX1
  Gene Name: H6 family homeobox 1
  ENSP ID: ENSP00000446997
MPDELTEPGRATPARASSFLIENLLAAEAKGAGRATQGDGSREDEEEDDDDPEDEDAEQARRRRLQRRRQLLAGTGPGGEARARALLGPGALGLGPRPPPGPGPPFALGCGGAARWYPRAHGGYGGGLSPDSTQKITPQPVQCGEGQVTRADKYKVNRSDSGSLWMAEEAAGTGWCSHNTVEPLSAWTPE

SEQ ID NO: 37092 - protein, 373 aa, Homo sapiens
  Payload ID: 7367
  Gene Symbol: HMX1
  Gene Name: H6 family homeobox 1
  ENSP ID: ENSP00000479086
MPDELTEPGRATPARASSFLIENLLAAEAKGAGRDPGRRQPGGRGGGRRRPRRRGRRAGRRRRLQRRRQLLAGTGPGGEARAVAARAGALGLGPRPPPGPGPPFALGCGGAARWYPRAHGGYGGGLSPDTSDRDSPETGEEMGRAEGAWPRGPGRSGAAGGSGAGGAWPGGRHGGGSELAEVPAAAGETRGGVGVGGGRKKKTRTVFSRSQVFQLESTFDLKRYLSSAERAGLAASLQLTETQVKIWFQNRRNKWKRQLAAELEAASLSPPGAQAWSACRCSTTKAPRPQPPLGPRPPCPSRWPARPRRPHRCSASPGPSPTRWPPSRPPPPCPFCGRRCLAWCEPRLPGPLPTTLWTCVDARSAAGAGLRGR

SEQ ID NO: 37093 - protein, 273 aa, Homo sapiens
  Payload ID: 7368
  Gene Symbol: HMX2
  Gene Name: H6 family homeobox 2
  Uniprot ID: A2RU54
  ENSP ID: ENSP00000341108
MGSKEDAGKGCPAAGGVSSFTIQSILGGGPSEAPREPVGWPARKRSLSVSSEEEEPDDGWKAPACFCPDQHGPKEQGPKHHPPIPFPCLGTPKGSGGSGPGGLERTPFLSPSHSDFKEEKERLLPAGSPSPGSERPRDGGAERQAGAAKKKTRTVFSRSQVYQLESTFDMKRYLSSSERACLASSLQLTETQVKTWFQNRRNKWKRQLSAELEAANMAHASAQTLVSMPLVFRDSSLLRVPVPRSLAFPAPLYYPGSNLSALPLYNLYNKLDY

SEQ ID NO: 37094 - protein, 357 aa, Homo sapiens
  Payload ID: 7369
  Gene Symbol: HMX3
  Gene Name: H6 family homeobox 3
  Uniprot ID: A6NHT5
  ENSP ID: ENSP00000350549
MPEPGPDAAGTASAQPQPPPPPPPAPKESPFSIKNLLNGDHHRPPPKPQPPPRTLFAPASAAAAAAAAAAAAAKGALEGAAGFALSQVGDLAFPRFEIPAQRFALPAHYLERSPAWWYPYTLTPAGGHLPRPEASEKALLRDSSPASGTDRDSPEPLLKADPDHKELDSKSPDEIILEESDSEESKKEGEAAPGAAGASVGAAAATPGAEDWKKGAESPEKKPACRKKKTRTVFSRSQVFQLESTFDMKRYLSSSERAGLAASLHLTETQVKIWFQNRRNKWKRQLAAELEAANLSHAAAQRIVRVPILYHENSAAEGAAAAAAGAPVPVSQPLLTFPHPVYYSHPVVSSVPLLRPV

SEQ ID NO: 37095 - protein, 1134 aa, Homo sapiens
  Payload ID: 7370
  Gene Symbol: HR
  Gene Name: hair growth associated
  Uniprot ID: O43593
  ENSP ID: ENSP00000326765
MESTPSFLKGTPTWEKTAPENGIVRQEPGSPPRDGLHHGPLCLGEPAPFWRGVLSTPDSWLPPGFPQGPKDMLPLVEGEGPQNGERKVNWLGSKEGLRWKEAMLTHPLAFCGPACPPRCGPLMPEHSGGHLKSDPVAFRPWHCPFLLETKILERAPFWVPTCLPPYLVSGLPPEHPCDWPLTPHPWVYSGGQPKVPSAFSLGSKGFYYKDPSIPRLAKEPLAAAEPGLFGLNSGGHLQRAGEAERPSLHQRDGEMGAGRQQNPCPLFLGQPDTVPWTSWPACPPGLVHTLGNVWAGPGDGNLGYQLGPPATPRCPSPEPPVTQRGCCSSYPPTKGGGLGPCGKCQEGLEGGASGASEPSEEVNKASGPRACPPSHHTKLKKTWLTRHSEQFECPRGCPEVEERPVARLRALKRAGSPEVQGAMGSPAPKRPPDPFPGTAEQGAGGWQEVRDTSIGNKDVDSGQHDEQKGPQDGQASLQDPGLQDIPCLALPAKLAQCQSCAQAAGEGGGHACHSQQVRRSPLGGELQQEEDTATNSSSEEGPGSGPDSRLSTGLAKHLLSGLGDRLCRLLRREREALAWAQREGQGPAVTEDSPGIPRCCSRCHHGLFNTHWRCPRCSHRLCVACGRVAGTGRAREKAGFQEQSAEECTQEAGHAACSLMLTQFVSSQALAELSTAMHQVWVKFDIRGHCPCQADARVWAPGDAGQQKESTQKTPPTPQPSCNGDTHRTKSIKEETPDSAETPAEDRAGRGPLPCPSLCELLASTAVKLCLGHERIHMAFAPVTPALPSDDRITNILDSIIAQVVERKIQEKALGPGLRAGPGLRKGLGLPLSPVRPRLPPPGALLWLQEPQPCPRRGFHLFQEHWRQGQPVLVSGIQRTLQGNLWGTEALGALGGQVQALSPLGPPQPSSLGSTTFWEGFSWPELRPKSDEGSVLLLHRALGDEDTSRVENLAASLPLPEYCALHGKLNLASYLPPGLALRPLEPQLWAAYGVSPHRGHLGTKNLCVEVADLVSILVHADTPLPAWHRAQKDFLSGLDGEGLWSPGSQVSTVWHVFRAQDAQRIRRFLQMVQGLVSTVSVTQHFLSPETSALSAQLCHQGPSLPPDCHLLYAQMDWAVFQAVKVAVGTLQEAK

SEQ ID NO: 37096 - protein, 1189 aa, Homo sapiens
  Payload ID: 7370
  Gene Symbol: HR
  Gene Name: hair growth associated
  Uniprot ID: O43593
  ENSP ID: ENSP00000370826
MESTPSFLKGTPTWEKTAPENGIVRQEPGSPPRDGLHHGPLCLGEPAPFWRGVLSTPDSWLPPGFPQGPKDMLPLVEGEGPQNGERKVNWLGSKEGLRWKEAMLTHPLAFCGPACPPRCGPLMPEHSGGHLKSDPVAFRPWHCPFLLETKILERAPFWVPTCLPPYLVSGLPPEHPCDWPLTPHPWVYSGGQPKVPSAFSLGSKGFYYKDPSIPRLAKEPLAAAEPGLFGLNSGGHLQRAGEAERPSLHQRDGEMGAGRQQNPCPLFLGQPDTVPWTSWPACPPGLVHTLGNVWAGPGDGNLGYQLGPPATPRCPSPEPPVTQRGCCSSYPPTKGGGLGPCGKCQEGLEGGASGASEPSEEVNKASGPRACPPSHHTKLKKTWLTRHSEQFECPRGCPEVEERPVARLRALKRAGSPEVQGAMGSPAPKRPPDPFPGTAEQGAGGWQEVRDTSIGNKDVDSGQHDEQKGPQDGQASLQDPGLQDIPCLALPAKLAQCQSCAQAAGEGGGHACHSQQVRRSPLGGELQQEEDTATNSSSEEGPGSGPDSRLSTGLAKHLLSGLGDRLCRLLRREREALAWAQREGQGPAVTEDSPGIPRCCSRCHHGLFNTHWRCPRCSHRLCVACGRVAGTGRAREKAGFQEQSAEECTQEAGHAACSLMLTQFVSSQALAELSTAMHQVWVKFDIRGHCPCQADARVWAPGDAGQQKESTQKTPPTPQPSCNGDTHRTKSIKEETPDSAETPAEDRAGRGPLPCPSLCELLASTAVKLCLGHERIHMAFAPVTPALPSDDRITNILDSIIAQVVERKIQEKALGPGLRAGPGLRKGLGLPLSPVRPRLPPPGALLWLQEPQPCPRRGFHLFQEHWRQGQPVLVSGIQRTLQGNLWGTEALGALGGQVQALSPLGPPQPSSLGSTTFWEGFSWPELRPKSDEGSVLLLHRALGDEDTSRVENLAASLPLPEYCALHGKLNLASYLPPGLALRPLEPQLWAAYGVSPHRGHLGTKNLCVEVADLVSILVHADTPLPAWHRAQKDFLSGLDGEGLWSPGSQVSTVWHVFRAQDAQRIRRFLQMVCPAGAGALEPGAPGSCYLDAGLRRRLREEWGVSCWTLLQAPGEAVLVPAGAPHQVQGLVSTVSVTQHFLSPETSALSAQLCHQGPSLPPDCHLLYAQMDWAVFQAVKVAVGTLQEAK

SEQ ID NO: 37097 - protein, 54 aa, Homo sapiens
  Payload ID: 7370
  Gene Symbol: HR
  Gene Name: hair growth associated
  ENSP ID: ENSP00000430413
  MOD_RES (1)..(1): Any amino acid
XTQEAGHAACSLMLTQFVSSQEGINTENAPNSTTFLQWRHPQDQEHQRGDPRFR

SEQ ID NO: 37098 - protein, 259 aa, Homo sapiens
  Payload ID: 7371
  Gene Symbol: HDHD2
  Gene Name: haloacid dehalogenase-like hydrolase domain containing 2
  Uniprot ID: Q9H0R4
  ENSP ID: ENSP00000300605
MAACRALKAVLVDLSGTLHIEDAAVPGAQEALKRLRGASVIIRFVTNTTKESKQDLLERLRKLEFDISEDEIFTSLTAARSLLERKQVRPMLLVDDRALPDFKGIQTSDPNAVVMGLAPEHFHYQILNQAFRLLLDGAPLIAIHKARYYKRKDGLALGPGPFVTALEYATDTKATVVGKPEKTFFLEALRGTGCEPEEAVMIGDDCRDDVGGAQDVGMLGILVKTGKYRASDEEKINPPPYLTCESFPHAVDHILQHLL

SEQ ID NO: 37099 - protein, 122 aa, Homo sapiens
  Payload ID: 7371
  Gene Symbol: HDHD2
  Gene Name: haloacid dehalogenase-like hydrolase domain containing 2
  ENSP ID: ENSP00000465282
MAACRALKAVLVDLSGTLHIEDAAVPGAQEALKRFVTNTTKESKQDLLERLRKLEFDISEDEIFTSLTAARSLLERKQVRPMLLVDDRALPDFKGIQTSDPNAVVMGLAPEHFHYQILNQAF

SEQ ID NO: 37100 - protein, 54 aa, Homo sapiens
  Payload ID: 7371
  Gene Symbol: HDHD2
  Gene Name: haloacid dehalogenase-like hydrolase domain containing 2
  ENSP ID: ENSP00000465829
MAACRALKAVLVDLSGTLHIEDAAVPGAQEALKRQAILQVQLTNMFVTWCFCNH

SEQ ID NO: 37101 - protein, 54 aa, Homo sapiens; identical to SEQ ID NO: 37100
  Payload ID: 7371
  Gene Symbol: HDHD2
  Gene Name: haloacid dehalogenase-like hydrolase domain containing 2
  ENSP ID: ENSP00000466602

SEQ ID NO: 37102 - protein, 146 aa, Homo sapiens
  Payload ID: 7371
  Gene Symbol: HDHD2
  Gene Name: haloacid dehalogenase-like hydrolase domain containing 2
  ENSP ID: ENSP00000466710
MAACRALKAVLVDLSGTLHIEDAAVPGAQEALKRFVTNTTKESKQDLLERLRKLEFDISEDEIFTSLTAARSLLERKQVRPMLLVDDRALPDFKGIQTSDPNAVVMGLAPEHFHYQILNQAFRLLLDGAPLIAIHKARYYKRKDGL

SEQ ID NO: 37103 - protein, 131 aa, Homo sapiens
  Payload ID: 7371
  Gene Symbol: HDHD2
  Gene Name: haloacid dehalogenase-like hydrolase domain containing 2
  ENSP ID: ENSP00000466923
MAACRALKAVLVDLSGTLHIEDAAVPGAQEALKRLRGASVIIRFVTNTTKESKQDLLERLRKLEFDISEDEIFTSLTAARSLLERKQVRPMLLVDDRALPDFKGIQTSDPNAVVMGLAPEHFHYQILNQAF

SEQ ID NO: 37104 - protein, 54 aa, Homo sapiens; identical to SEQ ID NO: 37100
  Payload ID: 7371
  Gene Symbol: HDHD2
  Gene Name: haloacid dehalogenase-like hydrolase domain containing 2
  ENSP ID: ENSP00000467309

SEQ ID NO: 37105 - protein, 132 aa, Homo sapiens
  Payload ID: 7371
  Gene Symbol: HDHD2
  Gene Name: haloacid dehalogenase-like hydrolase domain containing 2
  ENSP ID: ENSP00000467775
MAACRALKAVLVDLSGTLHIEDAAVPGAQEALKRLRGASVIIRFVTNTTKESKQDLLERLRKLEFDISEDEIFTSLTAARSLLERKQVRPMLLVDDRALPDFKGIQTSDPNAVVMGLAPEHFHYQILNQAFR

SEQ ID NO: 37106 - protein, 132 aa, Homo sapiens; identical to SEQ ID NO: 37105
  Payload ID: 7371
  Gene Symbol: HDHD2
  Gene Name: haloacid dehalogenase-like hydrolase domain containing 2
  ENSP ID: ENSP00000467998

SEQ ID NO: 37107 - protein, 204 aa, Homo sapiens
  Payload ID: 7371
  Gene Symbol: HDHD2
  Gene Name: haloacid dehalogenase-like hydrolase domain containing 2
  ENSP ID: ENSP00000468067
MAACRALKAVLVDLSGTLHIEDAAVPGAQEALKRLRGASVIIRFVTNTTKESKQDLLERLRKLEFDISEDEIFTSLTAARSLLERKQVRPMLLVDDRALPDFKGIQTSDPNAVVMGLAPEHFHYQILNQAFRLLLDGAPLIAIHKARYYKRKDGLALGPGPFVTALEYATDTKATVVGKPEKTFFLEALRGTGCEPEEAVMIGD

SEQ ID NO: 37108 - protein, 251 aa, Homo sapiens
  Payload ID: 7372
  Gene Symbol: HDHD3
  Gene Name: haloacid dehalogenase-like hydrolase domain containing 3
  Uniprot ID: Q9BSH5
  ENSP ID: ENSP00000238379
MAHRLQIRLLTWDVKDTLLRLRHPLGEAYATKARAHGLEVEPSALEQGFRQAYRAQSHSFPNYGLSHGLTSRQWWLDVVLQTFHLAGVQDAQAVAPIAEQLYKDFSHPCTWQVLDGAEDTLRECRTRGLRLAVISNFDRRLEGILGGLGLREHFDFVLTSEAAGWPKPDPRIFQEALRLAHMEPVVAAHVGDNYLCDYQGPRAVGMHSFLVVGPQALDPVVRDSVPKEHILPSLAHLLPALDCLEGSTPGL

SEQ ID NO: 37109 - protein, 251 aa, Homo sapiens; identical to SEQ ID NO: 37108
  Payload ID: 7372
  Gene Symbol: HDHD3
  Gene Name: haloacid dehalogenase-like hydrolase domain containing 3
  Uniprot ID: Q9BSH5
  ENSP ID: ENSP00000363295

SEQ ID NO: 37110 - protein, 281 aa, Homo sapiens
  Payload ID: 7373
  Gene Symbol: HP
  Gene Name: haptoglobin
  ENSP ID: ENSP00000228226
MSRISQMTAARSPPRLHMAMWSTRFATSVRTNPVQRILGGHLDAKGSFPWQAKMVSHHNLTTGATLINEQWLLTTAKNLFLNHSENATAKDIAPTLTLYVGKKQLVEIEKVVLHPNYSQVDIGLIKLKQKVSVNERVMPICLPSKDYAEVGRVGYVSGWGRNANFKFTDHLKYVMLPVADQDQCIRHYEGSTVPEKKTPKSPVGVQPILNEHTFCAGMSKYQEDTCYGDAGSAFAVHDLEEDTWYATGILSFDKSCAVAEYGVYVKVTSIQDWVQKTIAEN

SEQ ID NO: 37111 - protein, 406 aa, Homo sapiens
  Payload ID: 7373
  Gene Symbol: HP
  Gene Name: haptoglobin
  Uniprot ID: P00738
  ENSP ID: ENSP00000348170
MSALGAVIALLLWGQLFAVDSGNDVTDIADDGCPKPPEIAHGYVEHSVRYQCKNYYKLRTEGDGVYTLNDKKQWINKAVGDKLPECEADDGCPKPPEIAHGYVEHSVRYQCKNYYKLRTEGDGVYTLNNEKQWINKAVGDKLPECEAVCGKPKNPANPVQRILGGHLDAKGSFPWQAKMVSHHNLTTGATLINEQWLLTTAKNLFLNHSENATAKDIAPTLTLYVGKKQLVEIEKVVLHPNYSQVDIGLIKLKQKVSVNERVMPICLPSKDYAEVGRVGYVSGWGRNANFKFTDHLKYVMLPVADQDQCIRHYEGSTVPEKKTPKSPVGVQPILNEHTFCAGMSKYQEDTCYGDAGSAFAVHDLEEDTWYATGILSFDKSCAVAEYGVYVKVTSIQDWVQKTIAEN

SEQ ID NO: 37112 - protein, 442 aa, Homo sapiens
  Payload ID: 7373
  Gene Symbol: HP
  Gene Name: haptoglobin
  ENSP ID: ENSP00000350406
MSALGAVIALLLWGQLFAVDSGNDVTDIADDGCPKPPEIAHGYVEHSVRYQCKNYYKLRTEGDGVYTLNDKKQWINKAVGDKLPECEADDGCPKPPEIAHGYVEHSVRYQCKNYYKLRTEGDGEAMPCSLPHVNLRVTFTSPADVGKEGMLMMMSPSPRVYTLNNEKQWINKAVGDKLPECEAVCGKPKNPANPVQRILGGHLDAKGSFPWQAKMVSHHNLTTGATLINEQWLLTTAKNLFLNHSENATAKDIAPTLTLYVGKKQLVEIEKVVLHPNYSQVDIGLIKLKQKVSVNERVMPICLPSKDYAEVGRVGYVSGWGRNANFKFTDHLKYVMLPVADQDQCIRHYEGSTVPEKKTPKSPVGVQPILNEHTFCAGMSKYQEDTCYGDAGSAFAVHDLEEDTWYATGILSFDKSCAVAEYGVYVKVTSIQDWVQKTIAEN

SEQ ID NO: 37113 - protein, 347 aa, Homo sapiens
  Payload ID: 7373
  Gene Symbol: HP
  Gene Name: haptoglobin
  Uniprot ID: P00738
  ENSP ID: ENSP00000381199
MSALGAVIALLLWGQLFAVDSGNDVTDIADDGCPKPPEIAHGYVEHSVRYQCKNYYKLRTEGDGVYTLNNEKQWINKAVGDKLPECEAVCGKPKNPANPVQRILGGHLDAKGSFPWQAKMVSHHNLTTGATLINEQWLLTTAKNLFLNHSENATAKDIAPTLTLYVGKKQLVEIEKVVLHPNYSQVDIGLIKLKQKVSVNERVMPICLPSKDYAEVGRVGYVSGWGRNANFKFTDHLKYVMLPVADQDQCIRHYEGSTVPEKKTPKSPVGVQPILNEHTFCAGMSKYQEDTCYGDAGSAFAVHDLEEDTWYATGILSFDKSCAVAEYGVYVKVTSIQDWVQKTIAEN

SEQ ID NO: 37114 - protein, 92 aa, Homo sapiens
  Payload ID: 7373
  Gene Symbol: HP
  Gene Name: haptoglobin
  ENSP ID: ENSP00000454413
MSALGAVIALLLWGQLFAVDSGNDVTDIADDGCPKPPEIAHGYVEHSVRYQCKNYYKLRTEGDGVYTLNNEKQWINKAVGDKLPECEAAHTE

SEQ ID NO: 37115 - protein, 347 aa, Homo sapiens
  Payload ID: 7373
  Gene Symbol: HP
  Gene Name: haptoglobin
  ENSP ID: ENSP00000454966
MSALGAVIALLLWGQLFAVDSGNDVTDIADDGCPKPPEIAHGYVEHSVRYQCKNYYKLRTEGDGVYTLNDKKQWINKAVGDKLPECEAVCGKPKNPANPVQRILGGHLDAKGSFPWQAKMVSHHNLTTGATLINEQWLLTTAKNLFLNHSENATAKDIAPTLTLYVGKKQLVEIEKVVLHPNYSQVDIGLIKLKQKVSVNERVMPICLPSKDYAEVGRVGYVSGWGRNANFKFTDHLKYVMLPVADQDQCIRHYEGSTVPEKKTPKSPVGVQPILNEHTFCAGMSKYQEDTCYGDAGSAFAVHDLEEDTWYATGILSFDKSCAVAEYGVYVKVTSIQDWVQKTIAEN

SEQ ID NO: 37116 - protein, 222 aa, Homo sapiens
  Payload ID: 7373
  Gene Symbol: HP
  Gene Name: haptoglobin
  ENSP ID: ENSP00000456503
MSALGAVIALLLWGQLFAVDSGNDVTDIADDGCPKPPEIAHGYVEHSVRYQCKNYYKLRTEGDGVYTLNNEKQWINKAVGDKLPECEAGATLINEQWLLTTAKNLFLNHSENATAKDIAPTLTLYVGKKQLVEIEKVVLHPNYSQVDIGLIKLKQKVSVNERVMPICLPSKDYAEVGRVGYVSGWGRNANFKFTDHLKYVMLPVADQDQCIRHYEGSTVPEK

SEQ ID NO: 37117 - protein, 347 aa, Homo sapiens; identical to SEQ ID NO: 37113
  Payload ID: 7373
  Gene Symbol: HP
  Gene Name: haptoglobin
  Uniprot ID: P00738
  ENSP ID: ENSP00000457629

SEQ ID NO: 37118 - protein, 149 aa, Homo sapiens
  Payload ID: 7373
  Gene Symbol: HP
  Gene Name: haptoglobin
  ENSP ID: ENSP00000461999
  MOD_RES (1)..(1): Any amino acid
XALGAVIALLLWGQLFAVDSGNDVTDIADDGCPKPPEIAHGYVEHSVRYQCKNYYKLRTEGDGVYTLNDKKQWINKAVGDKLPECEADDGCPKPPEIAHGYVEHSVRYQCKNYYKLRTEGDGVYTLNNEKQWINKAVGDKLPECEAGGC

SEQ ID NO: 37119 - protein, 88 aa, Homo sapiens
  Payload ID: 7373
  Gene Symbol: HP
  Gene Name: haptoglobin
  ENSP ID: ENSP00000462662
MSALGAVIALLLWGQLFAVDSGNDVTDIADDGCPKPPEIAHGYVEHSVRYQCKNYYKLRTEGDGVYTLNNEKQWINKAVGDKLPECEA

SEQ ID NO: 37120 - protein, 365 aa, Homo sapiens
  Payload ID: 7373
  Gene Symbol: HP
  Gene Name: haptoglobin
  ENSP ID: ENSP00000463491
  MOD_RES (1)..(1): Any amino acid
XALGAVIALLLWGQLFAVDSGNDVTDIADDGCPKPPEIAHGYVEHSVRYQCKNYYKLRTEGDGVYTLNDKKQWINKAVGDKLPECEADDGCPKPPEIAHGYVEHSVRYQCKNYYKLRTEGDGVYTLNNEKQWINKAVGDKLPECEAGATLINEQWLLTTAKNLFLNHSENATAKDIAPTLTLYVGKKQLVEIEKVVLHPNYSQVDIGLIKLKQKVSVNERVMPICLPSKDYAEVGRVGYVSGWGRNANFKFTDHLKYVMLPVADQDQCIRHYEGSTVPEKKTPKSPVGVQPILNEHTFCAGMSKYQEDTCYGDAGSAFAVHDLEEDTWYATGILSFDKSCAVAEYGVYVKVTSIQDWVQKTIAEN

SEQ ID NO: 37121 - protein, 91 aa, Homo sapiens
  Payload ID: 7373
  Gene Symbol: HP
  Gene Name: haptoglobin
  ENSP ID: ENSP00000463755
MSALGAVIALLLWGQLFAVDSGNDVTDIADDGCPKPPEIAHGYVEHSVRYQCKNYYKLRTEGDGVYTLNNEKQWINKAVGDKLPECEAGGC

SEQ ID NO: 37122 - protein, 404 aa, Homo sapiens
  Payload ID: 7373
  Gene Symbol: HP
  Gene Name: haptoglobin
  ENSP ID: ENSP00000464070
  MOD_RES (1)..(1): Any amino acid
XALGAVIALLLWGQLFAVDSGNDVTDIADDGCPKPPEIAHGYVEHSVRYQCKNYYKLRTEGDGVYTLNDKKQWINKAVGDKLPECEADDGCPKPPEIAHGYVEHSVRYQCKNYYKLRTEGDVYTLNNEKQWINKAVGDKLPECEAVCGKPKNPANPVQRILGGHLDAKGSFPWQAKMVSHHNLTTGATLINEQWLLTTAKNLFLNHSENATAKDIAPTLTLYVGKKQLVEIEKVVLHPNYSQVDIGLIKLKQKVSVNERVMPICLPSKDYAEVGRVGYVSGWGRNANFKFTDHLKYVMLPVADQDQCIRHYEGSTVPEKKTPKSPVGVQPILNEHTFCAGMSKYQEDTCYGDAGSAFAVHDLEEDTWYATGILSFDKSCAVAEYGVYVKVTSIQDWVQKTIAEN

SEQ ID NO: 37123 - protein, 281 aa, Homo sapiens; identical to SEQ ID NO: 37110
  Payload ID: 7373
  Gene Symbol: HP
  Gene Name: haptoglobin
  ENSP ID: ENSP00000478279

SEQ ID NO: 37124 - protein, 281 aa, Homo sapiens
  Payload ID: 7374
  Gene Symbol: HPR
  Gene Name: haptoglobin-related protein
  ENSP ID: ENSP00000349451
MSRIFQMTASRSPLRLQMAMWSTCFATSVRTNPVQRILGGHLDAKGSFPWQAKMVSHHNLTTGATLINEQWLLTTAKNLFLNHSENATAKDIAPTLTLYVGKKQLVEIEKVVLHPNYHQVDIGLIKLKQKVLVNERVMPICLPSKNYAEVGRVGYVSGWGQSDNFKLTDHLKYVMLPVADQYDCITHYEGSTCPKWKAPKSPVGVQPILNEHTFCVGMSKYQEDTCYGDAGSAFAVHDLEEDTWYAAGILSFDKSCAVAEYGVYVKVTSIQHWVQKTIAEN

SEQ ID NO: 37125 - protein, 348 aa, Homo sapiens
  Payload ID: 7374
  Gene Symbol: HPR
  Gene Name: haptoglobin-related protein
  Uniprot ID: P00739
  ENSP ID: ENSP00000441828
MSDLGAVISLLLWGRQLFALYSGNDVTDISDDRFPKPPEIANGYVEHLFRYQCKNYYRLRTEGDGVYTLNDKKQWINKAVGDKLPECEAVCGKPKNPANPVQRILGGHLDAKGSFPWQAKMVSHHNLTTGATLINEQWLLTTAKNLFLNHSENATAKDIAPTLTLYVGKKQLVEIEKVVLHPNYHQVDIGLIKLKQKVLVNERVMPICLPSKNYAEVGRVGYVSGWGQSDNFKLTDHLKYVMLPVADQYDCITHYEGSTCPKWKAPKSPVGVQPILNEHTFCVGMSKYQEDTCYGDAGSAFAVHDLEEDTWYAAGILSFDKSCAVAEYGVYVKVTSIQHWVQKTIAEN

SEQ ID NO: 37126 - protein, 117 aa, Homo sapiens
  Payload ID: 7374
  Gene Symbol: HPR
  Gene Name: haptoglobin-related protein
  ENSP ID: ENSP00000462916
MSDLGAVISLLLWGRQLFALYSGNDVTDISDDRFPKPPEIANGYVEHLFRYQCKNYYRLRTEGDGVYTLNDKKQWINKAVGDKLPECEAVCGKPKNPANPVQRILGGHLVRGWDPKL

SEQ ID NO: 37127 - protein, 91 aa, Homo sapiens
  Payload ID: 7375
  Gene Symbol: HRK
  Gene Name: harakiri, BCL2 interacting protein
  Uniprot ID: O00198
  ENSP ID: ENSP00000257572
MCPCPLHRGRGPPAVCACSAGRLGLRSSAAQLTAARLKALGDELHQRTMWRRRARSRRAPAPGALPTYWPWLCAAAQVAALAAWLLGRRNL

SEQ ID NO: 37128 - protein, 18 aa, Homo sapiens
  Payload ID: 7375
  Gene Symbol: HRK
  Gene Name: harakiri, BCL2 interacting protein
  ENSP ID: ENSP00000465379
AAAQVAALAAWLLGRRNL

SEQ ID NO: 37129 - protein, 349 aa, Homo sapiens
  Payload ID: 7376
  Gene Symbol: HARBI1
  Gene Name: harbinger transposase derived 1
  Uniprot ID: Q96MB7
  ENSP ID: ENSP00000317743
MAIPITVLDCDLLLYGRGHRTLDRFKLDDVTDEYLMSMYGFPRQFIYYLVELLGANLSRPTQRSRAISPETQVLAALGFYTSGSFQTRMGDAIGISQASMSRCVANVTEALVERASQFIRFPADEASIQALKDEFYGLAGMPGVMGVVDCIHVAIKAPNAEDLSYVNRKGLHSLNCLMVCDIRGTLMTVETNWPGSLQDCAVLQQSSLSSQFEAGMHKDSWLLGDSSFFLRTWLMTPLHIPETPAEYRYNMAHSATHSVIEKTFRTLCSRFRCLDGSKGALQYSPEKSSHIILACCVLHNISLEHGMDVWSSPMTGPMEQPPEEEYEHMESLDLEADRIRQELMLTHFS

SEQ ID NO: 37130 - protein, 75 aa, Homo sapiens
  Payload ID: 7376
  Gene Symbol: HARBI1
  Gene Name: harbinger transposase derived 1
  ENSP ID: ENSP00000431697
MAIPITVLDCDLLLYGRGHRTLDRFKLDDVTDEYLMSMYGFPRQFIYYLVELLGANLSRPTQRSRAISPETQVLA

SEQ ID NO: 37131 - protein, 42 aa, Homo sapiens
  Payload ID: 7376
  Gene Symbol: HARBI1
  Gene Name: harbinger transposase derived 1
  ENSP ID: ENSP00000436232
MAIPITVLDCDLLLYGRGHRTLDRFKLDDVTDEYLMSMYGFP

SEQ ID NO: 37132 - protein, 189 aa, Homo sapiens
  Payload ID: 7377
  Gene Symbol: HRAS
  Gene Name: Harvey rat sarcoma viral oncogene homolog
  Uniprot ID: P01112
  ENSP ID: ENSP00000309845
MTEYKLVVVGAGGVGKSALTIQLIQNHFVDEYDPTIEDSYRKQVVIDGETCLLDILDTAGQEEYSAMRDQYMRTGEGFLCVFAINNTKSFEDIHQYREQIKRVKDSDDVPMVLVGNKCDLAARTVESRQAQDLARSYGIPYIETSAKTRQGVEDAFYTLVREIRQHKLRKLNPPDESGPGCMSCKCVLS

SEQ ID NO: 37133 - protein, 170 aa, Homo sapiens
  Payload ID: 7377
  Gene Symbol: HRAS
  Gene Name: Harvey rat sarcoma viral oncogene homolog
  Uniprot ID: P01112
  ENSP ID: ENSP00000380722
MTEYKLVVVGAGGVGKSALTIQLIQNHFVDEYDPTIEDSYRKQVVIDGETCLLDILDTAGQEEYSAMRDQYMRTGEGFLCVFAINNTKSFEDIHQYREQIKRVKDSDDVPMVLVGNKCDLAARTVESRQAQDLARSYGIPYIETSAKTRQGSRSGSSSSSGTLWDPPGPM

SEQ ID NO: 37134 - protein, 189 aa, Homo sapiens; identical to SEQ ID NO: 37132
  Payload ID: 7377
  Gene Symbol: HRAS
  Gene Name: Harvey rat sarcoma viral oncogene homolog
  Uniprot ID: P01112
  ENSP ID: ENSP00000380723

SEQ ID NO: 37135 - protein, 170 aa, Homo sapiens; identical to SEQ ID NO: 37133
  Payload ID: 7377
  Gene Symbol: HRAS
  Gene Name: Harvey rat sarcoma viral oncogene homolog
  Uniprot ID: P01112
  ENSP ID: ENSP00000388246

SEQ ID NO: 37136 - protein, 189 aa, Homo sapiens; identical to SEQ ID NO: 37132
  Payload ID: 7377
  Gene Symbol: HRAS
  Gene Name: Harvey rat sarcoma viral oncogene homolog
  Uniprot ID: P01112
  ENSP ID: ENSP00000407586

SEQ ID NO: 37137 - protein, 170 aa, Homo sapiens; identical to SEQ ID NO: 37133
  Payload ID: 7377
  Gene Symbol: HRAS
  Gene Name: Harvey rat sarcoma viral oncogene homolog
  Uniprot ID: P01112
  ENSP ID: ENSP00000434023

SEQ ID NO: 37138 - protein, 170 aa, Homo sapiens; identical to SEQ ID NO: 37133
  Payload ID: 7377
  Gene Symbol: HRAS
  Gene Name: Harvey rat sarcoma viral oncogene homolog
  Uniprot ID: P01112
  ENSP ID: ENSP00000480317

SEQ ID NO: 37139 - protein, 189 aa, Homo sapiens; identical to SEQ ID NO: 37132
  Payload ID: 7377
  Gene Symbol: HRAS
  Gene Name: Harvey rat sarcoma viral oncogene homolog
  Uniprot ID: P01112
  ENSP ID: ENSP00000480686

SEQ ID NO: 37140 - protein, 189 aa, Homo sapiens; identical to SEQ ID NO: 37132
  Payload ID: 7377
  Gene Symbol: HRAS
  Gene Name: Harvey rat sarcoma viral oncogene homolog
  Uniprot ID: P01112
  ENSP ID: ENSP00000482366

SEQ ID NO: 37141 - protein, 170 aa, Homo sapiens; identical to SEQ ID NO: 37133
  Payload ID: 7377
  Gene Symbol: HRAS
  Gene Name: Harvey rat sarcoma viral oncogene homolog
  Uniprot ID: P01112
  ENSP ID: ENSP00000488225

SEQ ID NO: 37142 - protein, 170 aa, Homo sapiens; identical to SEQ ID NO: 37133
  Payload ID: 7377
  Gene Symbol: HRAS
  Gene Name: Harvey rat sarcoma viral oncogene homolog
  Uniprot ID: P01112
  ENSP ID: ENSP00000488296

SEQ ID NO: 37143 - protein, 14 aa, Homo sapiens
  Payload ID: 7377
  Gene Symbol: HRAS
  Gene Name: Harvey rat sarcoma viral oncogene homolog
  ENSP ID: ENSP00000488397
MTEYKLVVVGAGGV

SEQ ID NO: 37144 - protein, 189 aa, Homo sapiens; identical to SEQ ID NO: 37132
  Payload ID: 7377
  Gene Symbol: HRAS
  Gene Name: Harvey rat sarcoma viral oncogene homolog
  Uniprot ID: P01112
  ENSP ID: ENSP00000488757

SEQ ID NO: 37145 - protein, 278 aa, Homo sapiens
  Payload ID: 7378
  Gene Symbol: HAUS1
  Gene Name: HAUS augmin-like complex, subunit 1
  Uniprot ID: Q96CS2
  ENSP ID: ENSP00000282058
MEPQEERETQVAAWLKKIFGDHPIPQYEVNPRTTEILHHLSERNRVRDRDVYLVIEDLKQKASEYESEAKYLQDLLMESVNFSPANLSSTGSRYLNALVDSAVALETKDTSLASFIPAVNDLTSDLFRTKSKSEEIKIELEKLEKNLTATLVLEKCLQEDVKKAELHLSTERAKVDNRRQNMDFLKAKSEEFRFGIKAAEEQLSARGMDASLSHQSLVALSEKLARLKQQTIPLKKKLESYLDLMPNPSLAQVKIEEAKRELDSIEAELTRRVDMMEL

SEQ ID NO: 37146 - protein, 80 aa, Homo sapiens
  Payload ID: 7378
  Gene Symbol: HAUS1
  Gene Name: HAUS augmin-like complex, subunit 1
  ENSP ID: ENSP00000465093
MEPQEERETQVAAWLKKIFGDHPIPQYEVNPRTTEILHHLSERNRVRDRDVYLVIEDLKQKASEYESEGEIKSRVLNENK

SEQ ID NO: 37147 - protein, 71 aa, Homo sapiens
  Payload ID: 7378
  Gene Symbol: HAUS1
  Gene Name: HAUS augmin-like complex, subunit 1
  ENSP ID: ENSP00000465492
MEPQEERETQVAAWLKKIFGDHPIPQYEVNPRTTEILHHLSERNRVRDRDVYLVIEDLKQKASEYESEVFF

SEQ ID NO: 37148 - protein, 94 aa, Homo sapiens
  Payload ID: 7378
  Gene Symbol: HAUS1
  Gene Name: HAUS augmin-like complex, subunit 1
  ENSP ID: ENSP00000465622
  MOD_RES (1)..(1): Any amino acid
XEERETQVAAWLKKIFGDHPIPQYEVNPRTTEILHHLSERNRVRDRDVYLVIEDLKQKASEYESEESCSVAQAGVLWCDLSSLQPPPLGFKQFS

SEQ ID NO: 37149 - protein, 94 aa, Homo sapiens
  Payload ID: 7378
  Gene Symbol: HAUS1
  Gene Name: HAUS augmin-like complex, subunit 1
  ENSP ID: ENSP00000466364
MEPQEERETQVAAWLKKIFGDHPIPQYEVNPRTTEILHHLSERNRVRDRDVYLVIEDLKQKASEYESEGMSRKQSCICLQKGPKLIIVVRTWTF

SEQ ID NO: 37150 - protein, 94 aa, Homo sapiens; identical to SEQ ID NO: 37149
  Payload ID: 7378
  Gene Symbol: HAUS1
  Gene Name: HAUS augmin-like complex, subunit 1
  ENSP ID: ENSP00000466715

SEQ ID NO: 37151 - protein, 123 aa, Homo sapiens
  Payload ID: 7378
  Gene Symbol: HAUS1
  Gene Name: HAUS augmin-like complex, subunit 1
  ENSP ID: ENSP00000467975
MEPQEERETQVAAWLKKIFGDHPIPQYEVNPRTTEILHHLSERNRVRDRDVYLVIEDLKQKASEYESEGATFSQRHGCFSVSSVLSSTIRETGKIKATDYTFEEKIGVLFRLNAESVSCSSEN

SEQ ID NO: 37152 - protein, 107 aa, Homo sapiens
  Payload ID: 7378
  Gene Symbol: HAUS1
  Gene Name: HAUS augmin-like complex, subunit 1
  ENSP ID: ENSP00000468575
MEPQEERETQVNPRTTEILHHLSERNRVRDRDVYLVIEDLKQKASEYESEAKYLQDLLMESVNFSPANLSSTGSRYLNALVDSAVALETKDTSLASFIPAVNDLTSD

SEQ ID NO: 37153 - protein, 235 aa, Homo sapiens
  Payload ID: 7379
  Gene Symbol: HAUS2
  Gene Name: HAUS augmin-like complex, subunit 2
  Uniprot ID: Q9NVX0
  ENSP ID: ENSP00000260372
MAAANPWDPASAPNGAGLVLGHFIASGMVNQEMLNMSKKTVSCFVNFTRLQQITNIQAEIYQKNLEIELLKLEKDTADVVHPFFLAQKCHTLQSMNNHLEAVLKEKRSLRQRLLKPMCQENLPIEAVYHRYMVHLLELAVTFIERLETHLETIRNIPHLAANLKKMNQALAKMDILVTETEELAENILKWRKQQNEVSSCIPKILAEESYLYKHDIIMPPLPFTSKVHVQTINAK

SEQ ID NO: 37154 - protein, 93 aa, Homo sapiens
  Payload ID: 7379
  Gene Symbol: HAUS2
  Gene Name: HAUS augmin-like complex, subunit 2
  ENSP ID: ENSP00000390445
MAAANPWDPASAPNGAGLVLGHFIASGMVNQKNLEIELLKLEKDTADVVHPFFLEMKSCYVAQAGLELMASILPFQSPKTLRLQLRSVILCKA

SEQ ID NO: 37155 - protein, 124 aa, Homo sapiens
  Payload ID: 7379
  Gene Symbol: HAUS2
  Gene Name: HAUS augmin-like complex, subunit 2
  ENSP ID: ENSP00000455104
MAAANPWDPASAPNGAGLVLGHFIASGMVNQEMLNMSKKTVSCFVNFTRLQQITNIQAEIYQKNLEIELLKLEKDTADVVHPFFLEMKSCYVAQAGLELMASILPFQSPKTLRLQLRSVILCKA

SEQ ID NO: 37156 - protein, 95 aa, Homo sapiens
  Payload ID: 7379
  Gene Symbol: HAUS2
  Gene Name: HAUS augmin-like complex, subunit 2
  ENSP ID: ENSP00000455118
MAAANPWDPASAPNGAGLVLGHFIASGMVNQEMLNMSKKTVSCFVNFTRLQQITNIQAEIYQKNLEIELLKLEKDTADVVHPFFLDIWYICWSWL

SEQ ID NO: 37157 - protein, 180 aa, Homo sapiens
  Payload ID: 7379
  Gene Symbol: HAUS2
  Gene Name: HAUS augmin-like complex, subunit 2
  ENSP ID: ENSP00000455942
MAAANPWDPASAPNGAGLVLGHFIASGMVNQEMLNMSKKTVSCFVNFTRLQQITNIQAEIYQKNLEIELLKLEKDTADVVHPFFLEMKSCYVAQAGLELMASILPFQSPKTLRLQKCHTLQSMNNHLEAVLKEKRSLRQRLLKPMCQENLPIEAVYHRYMVHLLELAVTFIERLETHLET

SEQ ID NO: 37158 - protein, 71 aa, Homo sapiens
  Payload ID: 7379
  Gene Symbol: HAUS2
  Gene Name: HAUS augmin-like complex, subunit 2
  ENSP ID: ENSP00000456054
MAAANPWDPASAPNGAGLVLGHFIASGMVNQEMLNMSKKTVSCFVNFTRLQQITNIQAEIYQLRSVILCKA

SEQ ID NO: 37159 - protein, 204 aa, Homo sapiens
  Payload ID: 7379
  Gene Symbol: HAUS2
  Gene Name: HAUS augmin-like complex, subunit 2
  Uniprot ID: Q9NVX0
  ENSP ID: ENSP00000456578
MAAANPWDPASAPNGAGLVLGHFIASGMVNQKNLEIELLKLEKDTADVVHPFFLAQKCHTLQSMNNHLEAVLKEKRSLRQRLLKPMCQENLPIEAVYHRYMVHLLELAVTFIERLETHLETIRNIPHLAANLKKMNQALAKMDILVTETEELAENILKWRKQQNEVSSCIPKILAEESYLYKHDIIMPPLPFTSKVHVQTINAK

SEQ ID NO: 37160 - protein, 63 aa, Homo sapiens
  Payload ID: 7379
  Gene Symbol: HAUS2
  Gene Name: HAUS augmin-like complex, subunit 2
  ENSP ID: ENSP00000457169
MAAANPWDPASAPNGAGLVLGHFIASGMVNQEMLNMSKKTVSCFVNFTRLQQITNIQAEIYQR

SEQ ID NO: 37161 - protein, 93 aa, Homo sapiens; identical to SEQ ID NO: 37154
  Payload ID: 7379
  Gene Symbol: HAUS2
  Gene Name: HAUS augmin-like complex, subunit 2
  ENSP ID: ENSP00000475743

SEQ ID NO: 37162 - protein, 55 aa, Homo sapiens
  Payload ID: 7379
  Gene Symbol: HAUS2
  Gene Name: HAUS augmin-like complex, subunit 2
  ENSP ID: ENSP00000475909
DVVHPFFLAQKCHTLQSMNNHLEAVLKEKRSLRQRLLKPMCQENLPIEAVYHRLD

SEQ ID NO: 37163 - protein, 603 aa, Homo sapiens
  Payload ID: 7380
  Gene Symbol: HAUS3
  Gene Name: HAUS augmin-like complex, subunit 3
  Uniprot ID: Q68CZ6
  ENSP ID: ENSP00000243706
MSCGNEFVETLKKIGYPKADNLNGEDFDWLFEGVEDESFLKWFCGNVNEQNVLSERELEAFSILQKSGKPILEGAALDEALKTCKTSDLKTPRLDDKELEKLEDEVQTLLKLKNLKIQRRNKCQLMASVTSHKSLRLNAKEEEATKKLKQSQGILNAMITKISNELQALTDEVTQLMMFFRHSNLGQGTNPLVFLSQFSLEKYLSQEEQSTAALTLYTKKQFFQGIHEVVESSNEDNFQLLDIQTPSICDNQEILEERRLEMARLQLAYICAQHQLIHLKASNSSMKSSIKWAEESLHSLTSKAVDKENLDAKISSLTSEIMKLEKEVTQIKDRSLPAVVRENAQLLNMPVVKGDFDLQIAKQDYYTARQELVLNQLIKQKASFELLQLSYEIELRKHRDIYRQLENLVQELSQSNMMLYKQLEMLTDPSVSQQINPRNTIDTKDYSTHRLYQVLEGENKKKELFLTHGNLEEVAEKLKQNISLVQDQLAVSAQEHSFFLSKRNKDVDMLCDTLYQGGNQLLLSDQELTEQFHKVESQLNKLNHLLTDILADVKTKRKTLANNKLHQMEREFYVYFLKDEDYLKDIVENLETQSKIKAVSLED

SEQ ID NO: 37164 - protein, 603 aa, Homo sapiens; identical to SEQ ID NO: 37163
  Payload ID: 7380
  Gene Symbol: HAUS3
  Gene Name: HAUS augmin-like complex, subunit 3
  Uniprot ID: Q68CZ6
  ENSP ID: ENSP00000392903

SEQ ID NO: 37165 - protein, 33 aa, Homo sapiens
  Payload ID: 7380
  Gene Symbol: HAUS3
  Gene Name: HAUS augmin-like complex, subunit 3
  ENSP ID: ENSP00000423285
MSCGNEFVETLKKIGYPKADNLNGEDFDWLFEG

SEQ ID NO: 37166 - protein, 489 aa, Homo sapiens
  Payload ID: 7380
  Gene Symbol: HAUS3
  Gene Name: HAUS augmin-like complex, subunit 3
  Uniprot ID: Q68CZ6
  ENSP ID: ENSP00000427350
MSCGNEFVETLKKIGYPKADNLNGEDFDWLFEGVEDESFLKWFCGNVNEQNVLSERELEAFSILQKSGKPILEGAALDEALKTCKTSDLKTPRLDDKELEKLEDEVQTLLKLKNLKIQRRNKCQLMASVTSHKSLRLNAKEEEATKKLKQSQGILNAMITKISNELQALTDEVTQLMMFFRHSNLGQGTNPLVFLSQFSLEKYLSQEEQSTAALTLYTKKQFFQGIHEVVESSNEDNFQLLDIQTPSICDNQEILEERRLEMARLQLAYICAQHQLIHLKASNSSMKSSIKWAEESLHSLTSKAVDKENLDAKISSLTSEIMKLEKEVTQIKDRSLPAVVRENAQLLNMPVVKGDFDLQIAKQDYYTARQELVLNQLIKQKASFELLQLSYEIELRKHRDIYRQLENLVQELSQSNMMLYKQLEMLTDPSVSQQINPRNTIDTKDYSTHRLYQVLEGENKKKELFLTHGNLEEVAEAGEWHEPRRRGLQ

SEQ ID NO: 37167 - protein, 10 aa, Homo sapiens
  Payload ID: 7380
  Gene Symbol: HAUS3
  Gene Name: HAUS augmin-like complex, subunit 3
  ENSP ID: ENSP00000427356
MSCGNEFVET

SEQ ID NO: 37168 - protein, 363 aa, Homo sapiens
  Payload ID: 7381
  Gene Symbol: HAUS4
  Gene Name: HAUS augmin-like complex, subunit 4
  Uniprot ID: Q9H6D7
  ENSP ID: ENSP00000206474
MASGDFCSPGEGMEILQQVCSKQLPPCNLSKEDLLQNPYFSKLLLNLSQHVDESGLSLTLAKEQAQAWKEVRLHKTTWLRSEILHRVIQELLVDYYVKIQDTNVTSEDKKFHETLEQRLLVTELMRLLGPSQEREIPPLLGLEKADLLELMPLSEDFVWMRARLQQEVEEQLKKKCFTLLCYYDPNSDADSETVKAAKVWKLAEVLVGEQQQCQDAKSQQKEQMLLLEKKSAAYSQVLLRCLTLLQRLLQEHRLKTQSELDRINAQYLEVKCGAMILKLRMEELKILSDTYTVEKVEVHRLIRDRLEGAIHLQEQDMENSRQVLNSYEVLGEEFDRLVKEYTVLKQATENKRWALQEFSKVYR

SEQ ID NO: 37169 - protein, 318 aa, Homo sapiens
  Payload ID: 7381
  Gene Symbol: HAUS4
  Gene Name: HAUS augmin-like complex, subunit 4
  Uniprot ID: Q9H6D7
  ENSP ID: ENSP00000342776
MASGDFCSPGEGMEILQQVCSKQLPPCNLSKEDLLQNPYFSKLLLNLSQHVDESGLSLTLAKEQAQAWKEVRLHKTTWLRSEILHRVIQELLVDYYVKIQDTNVTSEDKKDFVWMRARLQQEVEEQLKKKCFTLLCYYDPNSDADSETVKAAKVWKLAEVLVGEQQQCQDAKSQQKEQMLLLEKKSAAYSQVLLRCLTLLQRLLQEHRLKTQSELDRINAQYLEVKCGAMILKLRMEELKILSDTYTVEKVEVHRLIRDRLEGAIHLQEQDMENSRQVLNSYEVLGEEFDRLVKEYTVLKQATENKRWALQEFSKVYR

SEQ ID NO: 37170 - protein, 237 aa, Homo sapiens
  Payload ID: 7381
  Gene Symbol: HAUS4
  Gene Name: HAUS augmin-like complex, subunit 4
  Uniprot ID: Q9H6D7
  ENSP ID: ENSP00000343473
MASGDFCSPGEGMEILQQVCSKQLPPCNLSKEDLLQNPYFSKLLLNLSQHVDESGLSLTLAKEQAQAWKEVRLHKTTWLRSEILHRVIQELLVDYYVKIQDTNVTSEDKKVLLRCLTLLQRLLQEHRLKTQSELDRINAQYLEVKCGAMILKLRMEELKILSDTYTVEKVEVHRLIRDRLEGAIHLQEQDMENSRQVLNSYEVLGEEFDRLVKEYTVLKQATENKRWALQEFSKVYR

SEQ ID NO: 37171 - protein, 363 aa, Homo sapiens; identical to SEQ ID NO: 37168
  Payload ID: 7381
  Gene Symbol: HAUS4
  Gene Name: HAUS augmin-like complex, subunit 4
  Uniprot ID: Q9H6D7
  ENSP ID: ENSP00000441026

SEQ ID NO: 37172 - protein, 144 aa, Homo sapiens
  Payload ID: 7381
  Gene Symbol: HAUS4
  Gene Name: HAUS augmin-like complex, subunit 4
  ENSP ID: ENSP00000450542
HRVIQELLVDYYVKIQDTNVTSEDKKFHETLEQRLLVTELMRLLGPSQEREIPPLLGLEKADLLELMPLSEDFVWMRARLQQEVEEQLKKKCFTLLCYYDPNSGASPLPHFAAEASSRTPAEDSIRARPHQCPVPGSQVRCYDP

SEQ ID NO: 37173 - protein, 147 aa, Homo sapiens
  Payload ID: 7381
  Gene Symbol: HAUS4
  Gene Name: HAUS augmin-like complex, subunit 4
  ENSP ID: ENSP00000450612
  MOD_RES (1)..(1): Any amino acid
XCSKQLPPCNLSKEDLLQNPYFSKLLLNLSQHVDESGLSLTLAKEQAQAWKEVRLHKTTWLRSEILHRVIQELLVDYYVKIQDTNVTSEDKKFHETLEQRLLVTELMRLLGPSQEREIPPLLGLEKADLLELMPLSEVGGEILEPNK

SEQ ID NO: 37174 - protein, 17 aa, Homo sapiens
  Payload ID: 7381
  Gene Symbol: HAUS4
  Gene Name: HAUS augmin-like complex, subunit 4
  ENSP ID: ENSP00000450680
MRLLGPSQEREIPPLLG

SEQ ID NO: 37175 - protein, 318 aa, Homo sapiens; identical to SEQ ID NO: 37169
  Payload ID: 7381
  Gene Symbol: HAUS4
  Gene Name: HAUS augmin-like complex, subunit 4
  Uniprot ID: Q9H6D7
  ENSP ID: ENSP00000451018

SEQ ID NO: 37176 - protein, 160 aa, Homo sapiens
  Payload ID: 7381
  Gene Symbol: HAUS4
  Gene Name: HAUS augmin-like complex, subunit 4
  ENSP ID: ENSP00000452058
MASGDFCSPGEGMEILQQVCSKQLPPCNLSKEDLLQNPYFSKLLLNLSQHVDESGLSLTLAKEQAQAWKEVRLHKTTWLRSEILHRVIQELLVDYYVKIQDTNVTSEDKKFHETLEQRLLVTELMRLLGPSQEREIPPLLGLEKADLLELMPLSEDFVWM

SEQ ID NO: 37177 - protein, 279 aa, Homo sapiens
  Payload ID: 7381
  Gene Symbol: HAUS4
  Gene Name: HAUS augmin-like complex, subunit 4
  ENSP ID: ENSP00000452165
MASGDFCSPGEGMEILQQVCSKQLPPCNLSKEDLLQNPYFSKLLLNLSQHVDESGLSLTLAKEQAQAWKEVRLHKTTWLRSEILHRVIQELLVDYYVKIQDTNVTSEDKKFHETLEQRLLVTELMRLLGPSQEREIPPLLGLEKADLLELMPLSEDFVWMRARLQQEVEEQLKKKCFTLLCYYDPNSDADSETVKAAKVWKLAEVLVGEQQQCQDAKSQQKEQMLLLEKKSAAYSQVLLRCLTLLQRLLQEHRLKTQSELDRINAQYLEVKCGAMILKL

SEQ ID NO: 37178 - protein, 318 aa, Homo sapiens; identical to SEQ ID NO: 37169
  Payload ID: 7381
  Gene Symbol: HAUS4
  Gene Name: HAUS augmin-like complex, subunit 4
  Uniprot ID: Q9H6D7
  ENSP ID: ENSP00000452239

SEQ ID NO: 37179 - protein, 239 aa, Homo sapiens
  Payload ID: 7381
  Gene Symbol: HAUS4
  Gene Name: HAUS augmin-like complex, subunit 4
  Uniprot ID: Q9H6D7
  ENSP ID: ENSP00000452260
MRLLGPSQEREIPPLLGLEKADLLELMPLSEDFVWMRARLQQEVEEQLKKKCFTLLCYYDPNSDADSETVKAAKVWKLAEVLVGEQQQCQDAKSQQKEQMLLLEKKSAAYSQVLLRCLTLLQRLLQEHRLKTQSELDRINAQYLEVKCGAMILKLRMEELKILSDTYTVEKVEVHRLIRDRLEGAIHLQEQDMENSRQVLNSYEVLGEEFDRLVKEYTVLKQATENKRWALQEFSKVYR

SEQ ID NO: 37180 - protein, 187 aa, Homo sapiens
  Payload ID: 7381
  Gene Symbol: HAUS4
  Gene Name: HAUS augmin-like complex, subunit 4
  ENSP ID: ENSP00000452261
MASGDFCSPGEGMEILQQVCSKQLPPCNLSKEDLLQNPYFSKLLLNLSQHVDESGLSLTLAKEQAQAWKEVRLHKTTWLRSEILHRVIQELLVDYYVKIQDTNVTSEDKKFHETLEQRLLVTELMRLLGPSQEREIPPLLGLEKADLLELMPLSEDFVWMRARLQQEVEEQLKKKCFTLLCYYDPNS

SEQ ID NO: 37181 - protein, 152 aa, Homo sapiens
  Payload ID: 7381
  Gene Symbol: HAUS4
  Gene Name: HAUS augmin-like complex, subunit 4
  ENSP ID: ENSP00000452595
MASGDFCSPGEGMEILQQVCSKQLPPCNLSKEDLLQNPYFSKLLLNLSQHVDESGLSLTLAKEQAQAWKEVRLHKTTWLRSEILHRVIQELLVDYYVKIQDTNVTSEDKKDFVWMRARLQQEVEEQLKKKCFTLLCYYDPNSGASPLPHFAA

SEQ ID NO: 37182 - protein, 633 aa, Homo sapiens
  Payload ID: 7382
  Gene Symbol: HAUS5
  Gene Name: HAUS augmin-like complex, subunit 5
  Uniprot ID: O94927
  ENSP ID: ENSP00000439056
MELAQEARELGCWAVEEMGVPVAARAPESTLRRLCLGQGADIWAYILQHVHSQRTVKKIRGNLLWYGHQDSPQVRRKLELEAAVTRLRAEIQELDQSLELMERDTEAQDTAMEQARQHTQDTQRRALLLRAQAGAMRRQQHTLRDPMQRLQNQLRRLQDMERKAKVDVTFGSLTSAALGLEPVVLRDVRTACTLRAQFLQNLLLPQAKRGSLPTPHDDHFGTSYQQWLSSVETLLTNHPPGHVLAALEHLAAEREAEIRSLCSGDGLGDTEISRPQAPDQSDSSQTLPSMVHLIQEGWRTVGVLVSQRSTLLKERQVLTQRLQGLVEEVERRVLGSSERQVLILGLRRCCLWTELKALHDQSQELQDAAGHRQLLLRELQAKQQRILHWRQLVEETQEQVRLLIKGNSASKTRLCRSPGEVLALVQRKVVPTFEAVAPQSRELLRCLEEEVRHLPHILLGTLLRHRPGELKPLPTVLPSIHQLHPASPRGSSFIALSHKLGLPPGKASELLLPAAASLRQDLLLLQDQRSLWCWDLLHMKTSLPPGLPTQELLQIQASQEKQQKENLGQALKRLEKLLKQALERIPELQGIVGDWWEQPGQAALSEELCQGLSLPQWRLRWVQAQGALQKLCS

SEQ ID NO: 37183 - protein, 290 aa, Homo sapiens
  Payload ID: 7382
  Gene Symbol: HAUS5
  Gene Name: HAUS augmin-like complex, subunit 5
  Uniprot ID: O94927
  ENSP ID: ENSP00000466661
MELAQEARELGCWAVEEMGVPVAARAPESTLRRLCLGQGADIWAYILQHVHSQRTVKKIRGNLLWYGHQDSPQVRRKLELEAAVTRLRAEIQELDQSLELMERDTEAQDTAMEQARQHTQDTQRRALLLRAQAGAMRRQQHTLRDPMQRLQNQLRRLQDMERKAKVDVTFGSLTSAALGLEPVVLRDVRTACTLRAQFLQNLLLPQAKRGSLPTPHDDHFGTSYQQWLSSVETLLTNHPPGHVLAALEHLAAEREAEIRSLCSGDGLGDTEISRRAGGLWVCWSPSGAPS

SEQ ID NO: 37184 - protein, 168 aa, Homo sapiens
  Payload ID: 7382
  Gene Symbol: HAUS5
  Gene Name: HAUS augmin-like complex, subunit 5
  ENSP ID: ENSP00000467688
PASPRGSSFIALSHKLGLPPGKASELLLPAAASLRQDLLLLQDQRSLWCWDLLHMKTSLPPGLPTQELLQIQASQEKQQKENLGQALKRLEKLLKQALERIPELQGIVGDWTFGRKQRQDSSAVVPTRTCSPLMCCSAAPLSSWTLSFHPAKAPPKTPSSLSFSAKSN

SEQ ID NO: 37185 - protein, 89 aa, Homo sapiens
  Payload ID: 7382
  Gene Symbol: HAUS5
  Gene Name: HAUS augmin-like complex, subunit 5
  ENSP ID: ENSP00000475856
MELAQEARELGCWAVEEMGVPVAARAPESTLRRLCLGQGADIWAYILQHVHSQRTVKKIRGNLLWYGHQDSPQVRSICYKILFHPKNDL

SEQ ID NO: 37186 - protein, 60 aa, Homo sapiens
  Payload ID: 7382
  Gene Symbol: HAUS5
  Gene Name: HAUS augmin-like complex, subunit 5
  ENSP ID: ENSP00000475934
MELAQEARELGCWAVEEMGVPVAARAPESTLRRNEDPTPCVLPQAYAYTLSPQAVSGPGG

SEQ ID NO: 37187 - protein, 802 aa, Homo sapiens
  Payload ID: 7383
  Gene Symbol: HAUS6
  Gene Name: HAUS augmin-like complex, subunit 6
  ENSP ID: ENSP00000369865
MKYIKSNSKNSSHHFVETFNIKPQDLHKCIARCHFARSRFLQILQRQDCVTQKYQENAQLSVKQVRNLRSECIGLENQIKKMEPYDDHSNMEEKIQKVRSLWASVNETLMFLEKEREVVSSVLSLVNQYALDGTNVAINIPRLLLDKIEKQMFQLHIGNVYEAGKLNLLTVIQLLNEVLKVMKYERCQADQARLTVDLHYLEKETKFQKERLSDLKHMRYRIKDDLTTIRHSVVEKQGEWHKKWKEFLGLSPFSLIKGWTPSVDLLPPMSPLSFDPASEEVYAKSILCQYPASLPDAHKQHNQENGCRGDSDTLGALHDLANSPASFLSQSVSSSDRNSVTVLEKDTKMGTPKEKNEAISKKIPEFEVENSPLSDVAKNTESSAFGGSLPAKKSDPFQKEQDHLVEEVARAVLSDSPQLSEGKEIKLEELIDSLGSNPFLTRNQIPRTPENLITEIRSSWRKAIEMEENRTKEPIQMDAEHREVLPESLPVLHNQREFSMADFLLETTVSDFGQSHLTEEKVISDCECVPQKHVLTSHIDEPPTQNQSDLLNKKVICKQDLECLAFTKLSETSRMETFSPAVGNRIDVMGGSEEEFMKILDHLEVSCNKPSTNKTMLWNSFQISSGISSKSFKDNDFGILHETLPEEVGHLSFNSSSSSEANFKLEPNSPMHGGTLLEDVVGGRQTTPESDFNLQALRSRYEALKKSLSKKREESYLSNSQTPERHKPELSPTPQNVQTDDTLNFLDTCDLHTEHIKPSLRTSIGERKRSLSPLIKFSPVEQRLRTTIACSLGELPNLKGKV

SEQ ID NO: 37188 - protein, 955 aa, Homo sapiens
  Payload ID: 7383
  Gene Symbol: HAUS6
  Gene Name: HAUS augmin-like complex, subunit 6
  Uniprot ID: Q7Z4H7
  ENSP ID: ENSP00000369871
MSSASVTAFEKEHLWMYLQALGFEPGPATIACGKIVSHTHLGVNMFDKLNRDAFHIISYFLFQVLDQSLTKEVFKFCWPPFDQKSDTEFRKHCCEWIKRISGECGSSFPQVVGSLFLSPGGPKFIHLMYHFARFVAMKYIKSNSKNSSHHFVETFNIKPQDLHKCIARCHFARSRFLQILQRQDCVTQKYQENAQLSVKQVRNLRSECIGLENQIKKMEPYDDHSNMEEKIQKVRSLWASVNETLMFLEKEREVVSSVLSLVNQYALDGTNVAINIPRLLLDKIEKQMFQLHIGNVYEAGKLNLLTVIQLLNEVLKVMKYERCQADQARLTVDLHYLEKETKFQKERLSDLKHMRYRIKDDLTTIRHSVVEKQGEWHKKWKEFLGLSPFSLIKGWTPSVDLLPPMSPLSFDPASEEVYAKSILCQYPASLPDAHKQHNQENGCRGDSDTLGALHDLANSPASFLSQSVSSSDRNSVTVLEKDTKMGTPKEKNEAISKKIPEFEVENSPLSDVAKNTESSAFGGSLPAKKSDPFQKEQDHLVEEVARAVLSDSPQLSEGKEIKLEELIDSLGSNPFLTRNQIPRTPENLITEIRSSWRKAIEMEENRTKEPIQMDAEHREVLPESLPVLHNQREFSMADFLLETTVSDFGQSHLTEEKVISDCECVPQKHVLTSHIDEPPTQNQSDLLNKKVICKQDLECLAFTKLSETSRMETFSPAVGNRIDVMGGSEEEFMKILDHLEVSCNKPSTNKTMLWNSFQISSGISSKSFKDNDFGILHETLPEEVGHLSFNSSSSSEANFKLEPNSPMHGGTLLEDVVGGRQTTPESDFNLQALRSRYEALKKSLSKKREESYLSNSQTPERHKPELSPTPQNVQTDDTLNFLDTCDLHTEHIKPSLRTSIGERKRSLSPLIKFSPVEQRLRTTIACSLGELPNLKEEDILNKSLDAKEPPSDLTR

SEQ ID NO: 37189 - protein, 183 aa, Homo sapiens
  Payload ID: 7383
  Gene Symbol: HAUS6
  Gene Name: HAUS augmin-like complex, subunit 6
  ENSP ID: ENSP00000409615
MGTPKEKNEAISKKIPEFEVENSPLSDVAKNTESSAFGGSLPAKKSDPFQKEQDHLVEEVARAVLSDSPQLSEGKEIKLEELIDSLGSNPFLTRNQIPRTPENLITEIRSSWRKAIEMEENRTKEPIQMDAEHREVLPESLPVLHNQREFSMADFLLETTVSDFGQSHLTEEKVISDCECVPQ

SEQ ID NO: 37190 - protein, 127 aa, Homo sapiens
  Payload ID: 7384
  Gene Symbol: HAUS7
  Gene Name: HAUS augmin-like complex, subunit 7
  ENSP ID: ENSP00000359229
MAGQDAGCGRGGDDYSEDEGDSSVSRAAVEVFGKLKDLNCPFLEGLYITEPKTIQELLCSPSEYRLEILEWMCTRVWPSLQDRFSSLKGVPTEVKIQEMTKLGHELMLCAPDDQELLKRFIHVTNGL

SEQ ID NO: 37191 - protein, 368 aa, Homo sapiens
  Payload ID: 7384
  Gene Symbol: HAUS7
  Gene Name: HAUS augmin-like complex, subunit 7
  Uniprot ID: Q99871
  ENSP ID: ENSP00000359230
MGGARLGARNMAGQDAGCGRGGDDYSEDEGDSSVSRAAVEVFGKLKDLNCPFLEGLYITEPKTIQELLCSPSEYRLEILEWMCTRVWPSLQDRFSSLKGVPTEVKIQEMTKLGHELMLCAPDDQELLKGCACAQKQLHFMDQLLDTIRSLTIGCSSCSSLMEHFEDTREKNEALLGELFSSPHLQMLLNPECDPWPLDMQPLLNKQSDDWQWASASAKSEEEEKLAELARQLQESAAKLHALRTEYFAQHEQGAAAGAADISTLDQKLRLVTSDFHQLILAFLQVYDDELGECCQRPGPDLHPCGPIIQATHQNLTSYSQLLQVVMAVADTSAKAVETVKKQQGEQICWGGSSSVMSLATKMNELMEK

SEQ ID NO: 37192 - protein, 211 aa, Homo sapiens
  Payload ID: 7384
  Gene Symbol: HAUS7
  Gene Name: HAUS augmin-like complex, subunit 7
  ENSP ID: ENSP00000389431
  MOD_RES (1)..(1): Any amino acid
XKSEEEEKLAELARQLQESAAKLHALRTEYFAQHEQGAAAGAADISTLDQKLRLVTSDFHQLILAFLQVYDDELGECCQRPGPDLHPCGPIIQATHQNLTSYSQIPRGQPKKPALVTMTTVPTCATLPLAQGFRDVHFGFLSERLRAFQPLTGWSCETPRSGMLLQVVMAVADTSAKAVETVKKQQGEQICWGGSSSVMSLATKMNELMEK

SEQ ID NO: 37193 - protein, 127 aa, Homo sapiens; identical to SEQ ID NO: 37190
  Payload ID: 7384
  Gene Symbol: HAUS7
  Gene Name: HAUS augmin-like complex, subunit 7
  ENSP ID: ENSP00000485783

SEQ ID NO: 37194 - protein, 410 aa, Homo sapiens
  Payload ID: 7385
  Gene Symbol: HAUS8
  Gene Name: HAUS augmin-like complex, subunit 8
  Uniprot ID: Q9BT25
  ENSP ID: ENSP00000253669
MADSSGRGAGKPATGPTNSSSAKKKDKRVQGGRVIESRYLQYEKKTTQKAPAGDGSQTRGKMSEGGRKSSLLQKSKADSSGVGKGDLQSTLLEGHGTAPPDLDLSAINDKSIVKKTPQLAKTISKKPESTSFSAPRKKSPDLSEAMEMMESQTLLLTLLSVKMENNLAEFERRAEKNLLIMCKEKEKLQKKAHELKRRLLLSQRKRELADVLDAQIEMLSPFEAVATRFKEQYRTFATALDTTRHELPVRSIHLEGDGQQLLDALQHELVTTQRLLGELDVGDSEENVQVLDLLSELKDVTAKKDLELRRSFAQVLELSAEASKEAALANQEVWEETQGMAPPSRWYFNQDSACRESGGAPKNTPLSEDDNPGASSAPAQATFISPSEDFSSSSQAEVPPSLSRSGRDLS

SEQ ID NO: 37195 - protein, 409 aa, Homo sapiens
  Payload ID: 7385
  Gene Symbol: HAUS8
  Gene Name: HAUS augmin-like complex, subunit 8
  Uniprot ID: Q9BT25
  ENSP ID: ENSP00000395298
MADSSGRGAGKPATGPTNSSSAKKKDKRVQGGRVIESRYLQYEKKTTQKAPAGDGSQTRGKMSEGGRKSSLLQKSKDSSGVGKGDLQSTLLEGHGTAPPDLDLSAINDKSIVKKTPQLAKTISKKPESTSFSAPRKKSPDLSEAMEMMESQTLLLTLLSVKMENNLAEFERRAEKNLLIMCKEKEKLQKKAHELKRRLLLSQRKRELADVLDAQIEMLSPFEAVATRFKEQYRTFATALDTTRHELPVRSIHLEGDGQQLLDALQHELVTTQRLLGELDVGDSEENVQVLDLLSELKDVTAKKDLELRRSFAQVLELSAEASKEAALANQEVWEETQGMAPPSRWYFNQDSACRESGGAPKNTPLSEDDNPGASSAPAQATFISPSEDFSSSSQAEVPPSLSRSGRDLS

SEQ ID NO: 37196 - protein, 349 aa, Homo sapiens
  Payload ID: 7385
  Gene Symbol: HAUS8
  Gene Name: HAUS augmin-like complex, subunit 8
  Uniprot ID: Q9BT25
  ENSP ID: ENSP00000470829
MSEGGRKSSLLQKSKADSSGVGKGDLQSTLLEGHGTAPPDLDLSAINDKSIVKKTPQLAKTISKKPESTSFSAPRKKSPDLSEAMEMMESQTLLLTLLSVKMENNLAEFERRAEKNLLIMCKEKEKLQKKAHELKRRLLLSQRKRELADVLDAQIEMLSPFEAVATRFKEQYRTFATALDTTRHELPVRSIHLEGDGQQLLDALQHELVTTQRLLGELDVGDSEENVQVLDLLSELKDVTAKKDLELRRSFAQVLELSAEASKEAALANQEVWEETQGMAPPSRWYFNQDSACRESGGAPKNTPLSEDDNPGASSAPAQATFISPSEDFSSSSQAEVPPSLSRSGRDLS

SEQ ID NO: 37197 - protein, 39 aa, Homo sapiens
  Payload ID: 7385
  Gene Symbol: HAUS8
  Gene Name: HAUS augmin-like complex, subunit 8
  ENSP ID: ENSP00000471868
MADSSGRGAGKPATGPTNSSSAKKKDKRVQVCPHRWKSD

SEQ ID NO: 37198 - protein, 91 aa, Homo sapiens
  Payload ID: 7385
  Gene Symbol: HAUS8
  Gene Name: HAUS augmin-like complex, subunit 8
  ENSP ID: ENSP00000473111
MADSSGRGAGKPATGPTNSSSAKKKDKRVQGGRVIESRYLQYEKKTTQKQIAVGSERVTCSPRCWKGMAQLHLTWISLLLMTKASSKRRHS

SEQ ID NO: 37199 - protein, 215 aa, Homo sapiens
  Payload ID: 7386
  Gene Symbol: HBS1L
  Gene Name: HBS1-like translational GTPase
  ENSP ID: ENSP00000323566
MARHRNVRGYNYDEDFEDDDLYGQSVEDDYCISPSTAAQFIYSRRDKPSVEPVEEYDYEDLKESSNSVSNHQLSGFDQARLYSCLDHMREVLGDAVPDEILIEAVLKNKFDVQKALSGVLEQDRVQSLKDKNEATVSTGKIAKGVLFSSSEVSADNVQSSYPQSANHLDYSSKPFDFASSVGKYGLSHNSSVPTHCLLHRKKKLDTRKSEKKLES

SEQ ID NO: 37200 - protein, 147 aa, Homo sapiens
  Payload ID: 7386
  Gene Symbol: HBS1L
  Gene Name: HBS1-like translational GTPase
  ENSP ID: ENSP00000356794
MARHRNVRGYNYDEDFEDDDLYGQSVEDDYCISPSTAAQFIYSRRDKPSVEPVEEYDYEDLKESSNSVSNHQLSGFDQARLYSCLDHMREVLGDAVPDEILIEAVLKNKFDVQKALSGVLEQDRVQSLKDKNEATVSTGKIAKGPCC

SEQ ID NO: 37201 - protein, 632 aa, Homo sapiens
  Payload ID: 7386
  Gene Symbol: HBS1L
  Gene Name: HBS1-like translational GTPase
  Uniprot ID: Q9Y450
  ENSP ID: ENSP00000356796
MARHRNVRGYNYDEDFEDDDLYGQSVEDDYCISPSTAAQFIYSRRDKPSVEPVEEYDYEDLKESSNSVSNHQLSGFDQARLYSCLDHMREVLGDAVPDEILIEAVLKNKFDVQKALSGVLEQDRVQSLKDKNEATVSTGKIAKGVLFSSSEVSADNVQSSYPQSANHLDYSSKPFDFASSVGKYGLSHNSSVPTHCLLHRKKKLDTRKSEKKLESCKLTKELSLANLIHDMSRDSCESQPSVRLSSTDSLESLLSKNLDADLLRPHASECISKDDSAFKEIPDLKTIIIKGTTPNNSLYIQNNSLSDFQNIPVQDSLGSSNNPLYLTSSLENMTVDNLNASKETEVGNVSLVEQSAKNHTFKNDNLQFSQCESPSLTELFQEHKENNISQCFTLSDLCNQSSASFTDLSLGSFPLSQLANRCQSSPGISELTGSLSSLAFHKASPTRDLENLSLSELIAETIDVDNSQIKKESFEVSLSEVRSPGIDSNIDLSVLIKNPDFVPKPVVDPSIAPSSRTKVLSSKLGKNSNFAKDNKKNNKGSLTRKPPFSLSWTKALAARPSAFASTLCLRYPLKSCKRRTLDLYKTFLYSRQVQDVKDKEISPLVAITPFDFKSASPDDIVKANQKKAFTRE

SEQ ID NO: 37202 - protein, 642 aa, Homo sapiens
  Payload ID: 7386
  Gene Symbol: HBS1L
  Gene Name: HBS1-like translational GTPase
  Uniprot ID: Q9Y450
  ENSP ID: ENSP00000356800
MARHRNVRGYNYDEDFEDDDLYGQSVEDDYCISPSTARLYSCLDHMREVLGDAVPDEILIEAVLKNKFDVQKALSGVLEQDRVQSLKDKNEATVSTGKIAKGKPVDSQTSRSESEIVPKVAKMTVSGKKQTMGFEVPGVSSEENGHSFHTPQKGPPIEDAIASSDVLETASKSANPPHTIQASEEQSSTPAPVKKSGKLRQQIDVKAELEKRQGGKQLLNLVVIGHVDAGKSTLMGHMLYLLGNINKRTMHKYEQESKKAGKASFAYAWVLDETGEERERGVTMDVGMTKFETTTKVITLMDAPGHKDFIPNMITGAAQADVAVLVVDASRGEFEAGFETGGQTREHGLLVRSLGVTQLAVAVNKMDQVNWQQERFQEITGKLGHFLKQAGFKESDVGFIPTSGLSGENLITRSQSSELTKWYKGLCLLEQIDSFKPPQRSIDKPFRLCVSDVFKDQGSGFCITGKIEAGYIQTGDRLLAMPPNETCTVKGITLHDEPVDWAAAGDHVSLTLVGMDIIKINVGCIFCGPKVPIKACTRFRARILIFNIEIPITKGFPVLLHYQTVSEPAVIKRLISVLNKSTGEVTKKKPKFLTKGQNALVELQTQRPIALELYKDFKELGRFMLRYGGSTIAAGVVTEIKE

SEQ ID NO: 37203 - protein, 684 aa, Homo sapiens
  Payload ID: 7386
  Gene Symbol: HBS1L
  Gene Name: HBS1-like translational GTPase
  Uniprot ID: Q9Y450
  ENSP ID: ENSP00000356811
MARHRNVRGYNYDEDFEDDDLYGQSVEDDYCISPSTAAQFIYSRRDKPSVEPVEEYDYEDLKESSNSVSNHQLSGFDQARLYSCLDHMREVLGDAVPDEILIEAVLKNKFDVQKALSGVLEQDRVQSLKDKNEATVSTGKIAKGKPVDSQTSRSESEIVPKVAKMTVSGKKQTMGFEVPGVSSEENGHSFHTPQKGPPIEDAIASSDVLETASKSANPPHTIQASEEQSSTPAPVKKSGKLRQQIDVKAELEKRQGGKQLLNLVVIGHVDAGKSTLMGHMLYLLGNINKRTMHKYEQESKKAGKASFAYAWVLDETGEERERGVTMDVGMTKFETTTKVITLMDAPGHKDFIPNMITGAAQADVAVLVVDASRGEFEAGFETGGQTREHGLLVRSLGVTQLAVAVNKMDQVNWQQERFQEITGKLGHFLKQAGFKESDVGFIPTSGLSGENLITRSQSSELTKWYKGLCLLEQIDSFKPPQRSIDKPFRLCVSDVFKDQGSGFCITGKIEAGYIQTGDRLLAMPPNETCTVKGITLHDEPVDWAAAGDHVSLTLVGMDIIKINVGCIFCGPKVPIKACTRFRARILIFNIEIPITKGFPVLLHYQTVSEPAVIKRLISVLNKSTGEVTKKKPKFLTKGQNALVELQTQRPIALELYKDFKELGRFMLRYGGSTIAAGVVTEIKE

SEQ ID NO: 37204 - protein, 619 aa, Homo sapiens
  Payload ID: 7386
  Gene Symbol: HBS1L
  Gene Name: HBS1-like translational GTPase
  ENSP ID: ENSP00000389826
MARHRNVRGYNYDEDFEDDDLYGQSVEDDYCISPSTAAQFIYSRRDKPSVEPVEEYDYEDLKESSNSVSNHQLSGFDQGKPVDSQTSRSESEIVPKVAKMTVSGKKQTMGFEVPGVSSEENGHSFHTPQKGPPIEDAIASSDVLETASKSANPPHTIQASEEQSSTPAPVKKSGKLRQQIDVKAELEKRQGGKQLLNLVVIGHVDAGKSTLMGHMLYLLGNINKRTMHKYEQESKKAGKASFAYAWVLDETGEERERGVTMDVGMTKFETTTKVITLMDAPGHKDFIPNMITGAAQADVAVLVVDASRGEFEAGFETGGQTREHGLLVRSLGVTQLAVAVNKMDQVNWQQERFQEITGKLGHFLKQAGFKESDVGFIPTSGLSGENLITRSQSSELTKWYKGLCLLEQIDSFKPPQRSIDKPFRLCVSDVFKDQGSGFCITGKIEAGYIQTGDRLLAMPPNETCTVKGITLHDEPVDWAAAGDHVSLTLVGMDIIKINVGCIFCGPKVPIKACTRFRARILIFNIEIPITKGFPVLLHYQTVSEPAVIKRLISVLNKSTGEVTKKKPKFLTKGQNALVELQTQRPIALELYKDFKELGRFMLRYGGSTIAAGVVTEIKE

SEQ ID NO: 37205 - protein, 142 aa, Homo sapiens
  Payload ID: 7386
  Gene Symbol: HBS1L
  Gene Name: HBS1-like translational GTPase
  ENSP ID: ENSP00000432092
MTVSGKKQTMGFEVPGVSSEENGHSFHTPQKGPPIEDAIASSDVLETASKSANPPHTIQASEEQSSTPAPVKKSGKLRQQIDVKAELEKRQGGKQLLNLVVIGHVDAGKSTLMGHMLYLLGNINKRTMHKYEQESKKAGKAS

SEQ ID NO: 37206 - protein, 167 aa, Homo sapiens
  Payload ID: 7386
  Gene Symbol: HBS1L
  Gene Name: HBS1-like translational GTPase
  ENSP ID: ENSP00000433030
MERPAPWTLWVTTSWWYIWALRSSVTFLPDFEDDDLYGQSVEDDYCISPSTAAQFIYSRRDKPSVEPVEEYDYEDLKESSNSVSNHQLSGFDQARLYSCLDHMREVLGDAVPDEILIEAVLKNKFDVQKALSGVLEQDRVQSLKDKNEATVSTGKIAKGKPVDSQTS

SEQ ID NO: 37207 - protein, 74 aa, Homo sapiens
  Payload ID: 7386
  Gene Symbol: HBS1L
  Gene Name: HBS1-like translational GTPase
  ENSP ID: ENSP00000433161
  MOD_RES (1)..(1): Any amino acid
XEDDDLYGQSVEDDYCISPSTAAQFIYSRRDKPSVEPVEEYDYEDLKESSNSVSNHQLSGFDQAATQLSGHWSC

SEQ ID NO: 37208 - protein, 554 aa, Homo sapiens
  Payload ID: 7386
  Gene Symbol: HBS1L
  Gene Name: HBS1-like translational GTPase
  ENSP ID: ENSP00000434533
QSVEDDYCISPSTGKPVDSQTSRSESEIVPKVAKMTVSGKKQTMGFEVPGVSSEENGHSFHTPQKGPPIEDAIASSDVLETASKSANPPHTIQASEEQSSTPAPVKKSGKLRQQIDVKAELEKRQGGKQLLNLVVIGHVDAGKSTLMGHMLYLLGNINKRTMHKYEQESKKAGKASFAYAWVLDETGEERERGVTMDVGMTKFETTTKVITLMDAPGHKDFIPNMITGAAQADVAVLVVDASRGEFEAGFETGGQTREHGLLVRSLGVTQLAVAVNKMDQVNWQQERFQEITGKLGHFLKQAGFKESDVGFIPTSGLSGENLITRSQSSELTKWYKGLCLLEQIDSFKPPQRSIDKPFRLCVSDVFKDQGSGFCITGKIEAGYIQTGDRLLAMPPNETCTVKGITLHDEPVDWAAAGDHVSLTLVGMDIIKINVGCIFCGPKVPIKACTRFRARILIFNIEIPITKGFPVLLHYQTVSEPAVIKRLISVLNKSTGEVTKKKPKFLTKGQNALVELQTQRPIALELYKDFKELGRFMLRYGGSTIAAGVVTEIKE

SEQ ID NO: 37209 - protein, 141 aa, Homo sapiens
  Payload ID: 7386
  Gene Symbol: HBS1L
  Gene Name: HBS1-like translational GTPase
  ENSP ID: ENSP00000434855
MARHRNVRGYNYDEAAQFIYSRRDKPSVEPVEEYDYEDLKESSNSVSNHQLSGFDQARLYSCLDHMREVLGDAVPDEILIEAVLKNKFDVQKALSGVLEQDRVQSLKDKNEATVSTGKIAKGKPVDSQTSRSESEIVPKVA

SEQ ID NO: 37210 - protein, 118 aa, Homo sapiens
  Payload ID: 7386
  Gene Symbol: HBS1L
  Gene Name: HBS1-like translational GTPase
  ENSP ID: ENSP00000435608
MARHRNVRGYNYDEARLYSCLDHMREVLGDAVPDEILIEAVLKNKFDVQKALSGVLEQDRVQSLKDKNEATVSTGKIAKGKESYFLLLKFQLIMFKVLILSQQIIWIIVANPLILLAQ

SEQ ID NO: 37211 - protein, 520 aa, Homo sapiens
  Payload ID: 7386
  Gene Symbol: HBS1L
  Gene Name: HBS1-like translational GTPase
  ENSP ID: ENSP00000436256
MTVSGKKQTMGFEVPGVSSEENGHSFHTPQKGPPIEDAIASSDVLETASKSANPPHTIQASEEQSSTPAPVKKSGKLRQQIDVKAELEKRQGGKQLLNLVVIGHVDAGKSTLMGHMLYLLGNINKRTMHKYEQESKKAGKASFAYAWVLDETGEERERGVTMDVGMTKFETTTKVITLMDAPGHKDFIPNMITGAAQADVAVLVVDASRGEFEAGFETGGQTREHGLLVRSLGVTQLAVAVNKMDQVNWQQERFQEITGKLGHFLKQAGFKESDVGFIPTSGLSGENLITRSQSSELTKWYKGLCLLEQIDSFKPPQRSIDKPFRLCVSDVFKDQGSGFCITGKIEAGYIQTGDRLLAMPPNETCTVKGITLHDEPVDWAAAGDHVSLTLVGMDIIKINVGCIFCGPKVPIKACTRFRARILIFNIEIPITKGFPVLLHYQTVSEPAVIKRLISVLNKSTGEVTKKKPKFLTKGQNALVELQTQRPIALELYKDFKELGRFMLRYGGSTIAAGVVTEIKE

SEQ ID NO: 37212 - protein, 170 aa, Homo sapiens
  Payload ID: 7386
  Gene Symbol: HBS1L
  Gene Name: HBS1-like translational GTPase
  ENSP ID: ENSP00000436472
  MOD_RES (1)..(1): Any amino acid
XAGFETGGQTREHGLLVRSLGVTQLAVAVNKMDQVNWQQERFQEITGKLGHFLKQAGFKESDVGFIPTSGLSGENLITRSQSSELTKWYKGLCLLEQIDSFKPPQRSIDKPFRLCVSDVFKDQGSGFCITGKIEAGYIQTGDRLLAMPPNETCTVKGIYLQDAFAKQALS

SEQ ID NO: 37213 - protein, 243 aa, Homo sapiens
  Payload ID: 7386
  Gene Symbol: HBS1L
  Gene Name: HBS1-like translational GTPase
  ENSP ID: ENSP00000436620
MTVSGKKQTMGFEVPGVSSEENGHSFHTPQKGPPIEDAIASSDVLETASKSANPPHTIQASEEQSSTPAPVKKSGKLRQQIDVKAELEKRQGGKQLLNLVVIGHVDAGKSTLMGHMLYLLGNINKRTMHKYEQESKKAGKASFAYAWVLDETGEERERGVTMDVGMTKFETTTKVITLMDAPGHKDFIPNMITGAAQADVAVLVVDASRGEFEAGFETGGQTREHGLLVRSLGVTQLAVAVNK

SEQ ID NO: 37214 - protein, 41 aa, Homo sapiens
  Payload ID: 7387
  Gene Symbol: HCK
  Gene Name: HCK proto-oncogene, Src family tyrosine kinase
  ENSP ID: ENSP00000262651
LGGRSSCEDPGCPRDEERAPRGNRCHELQSFQDVPLKMDCI

SEQ ID NO: 37215 - protein, 526 aa, Homo sapiens
  Payload ID: 7387
  Gene Symbol: HCK
  Gene Name: HCK proto-oncogene, Src family tyrosine kinase
  ENSP ID: ENSP00000365012
LGGRSSCEDPGCPRDEERAPRMGCMKSKFLQVGGNTFSKTETSASPHCPVYVPDPTSTIKPGPNSHNSNTPGIREAGSEDIIVVALYDYEAIHHEDLSFQKGDQMVVLEESGEWWKARSLATRKEGYIPSNYVARVDSLETEEWFFKGISRKDAERQLLAPGNMLGSFMIRDSETTKGSYSLSVRDYDPRQGDTVKHYKIRTLDNGGFYISPRSTFSTLQELVDHYKKGNDGLCQKLSVPCMSSKPQKPWEKDAWEIPRESLKLEKKLGAGQFGEVWMATYNKHTKVAVKTMKPGSMSVEAFLAEANVMKTLQHDKLVKLHAVVTKEPIYIITEFMAKGSLLDFLKSDEGSKQPLPKLIDFSAQIAEGMAFIEQRNYIHRDLRAANILVSASLVCKIADFGLARVIEDNEYTAREGAKFPIKWTAPEAINFGSFTIKSDVWSFGILLMEIVTYGRIPYPGMSNPEVIRALERGYRMPRPENCPEELYNIMMRCWKNRPEERPTFEYIQSVLDDFYTATESQYQQQP

SEQ ID NO: 37216 - protein, 525 aa, Homo sapiens
  Payload ID: 7387
  Gene Symbol: HCK
  Gene Name: HCK proto-oncogene, Src family tyrosine kinase
  ENSP ID: ENSP00000365022
LGGRSSCEDPGCPRDEERAPRMGCMKSKFLQVGGNTFSKTETSASPHCPVYVPDPTSTIKPGPNSHNSNTPGIREGSEDIIVVALYDYEAIHHEDLSFQKGDQMVVLEESGEWWKARSLATRKEGYIPSNYVARVDSLETEEWFFKGISRKDAERQLLAPGNMLGSFMIRDSETTKGSYSLSVRDYDPRQGDTVKHYKIRTLDNGGFYISPRSTFSTLQELVDHYKKGNDGLCQKLSVPCMSSKPQKPWEKDAWEIPRESLKLEKKLGAGQFGEVWMATYNKHTKVAVKTMKPGSMSVEAFLAEANVMKTLQHDKLVKLHAVVTKEPIYIITEFMAKGSLLDFLKSDEGSKQPLPKLIDFSAQIAEGMAFIEQRNYIHRDLRAANILVSASLVCKIADFGLARVIEDNEYTAREGAKFPIKWTAPEAINFGSFTIKSDVWSFGILLMEIVTYGRIPYPGMSNPEVIRALERGYRMPRPENCPEELYNIMMRCWKNRPEERPTFEYIQSVLDDFYTATESQYQQQP

SEQ ID NO: 37217 - protein, 61 aa, Homo sapiens
  Payload ID: 7387
  Gene Symbol: HCK
  Gene Name: HCK proto-oncogene, Src family tyrosine kinase
  ENSP ID: ENSP00000420457
LGGRSSCEDPGCPRDEERAPRQTKQNRSSLEVANLSQFPPEEDGVHEVQVPPGRRQYILKN

SEQ ID NO: 37218 - protein, 504 aa, Homo sapiens
  Payload ID: 7387
  Gene Symbol: HCK
  Gene Name: HCK proto-oncogene, Src family tyrosine kinase
  Uniprot ID: P08631
  ENSP ID: ENSP00000427757
MGCMKSKFLQVGGNTFSKTETSASPHCPVYVPDPTSTIKPGPNSHNSNTPGIREGSEDIIVVALYDYEAIHHEDLSFQKGDQMVVLEESGEWWKARSLATRKEGYIPSNYVARVDSLETEEWFFKGISRKDAERQLLAPGNMLGSFMIRDSETTKGSYSLSVRDYDPRQGDTVKHYKIRTLDNGGFYISPRSTFSTLQELVDHYKKGNDGLCQKLSVPCMSSKPQKPWEKDAWEIPRESLKLEKKLGAGQFGEVWMATYNKHTKVAVKTMKPGSMSVEAFLAEANVMKTLQHDKLVKLHAVVTKEPIYIITEFMAKGSLLDFLKSDEGSKQPLPKLIDFSAQIAEGMAFIEQRNYIHRDLRAANILVSASLVCKIADFGLARVIEDNEYTAREGAKFPIKWTAPEAINFGSFTIKSDVWSFGILLMEIVTYGRIPYPGMSNPEVIRALERGYRMPRPENCPEELYNIMMRCWKNRPEERPTFEYIQSVLDDFYTATESQYQQQP

SEQ ID NO: 37219 - protein, 505 aa, Homo sapiens
  Payload ID: 7387
  Gene Symbol: HCK
  Gene Name: HCK proto-oncogene, Src family tyrosine kinase
  Uniprot ID: P08631
  ENSP ID: ENSP00000429848
MGCMKSKFLQVGGNTFSKTETSASPHCPVYVPDPTSTIKPGPNSHNSNTPGIREAGSEDIIVVALYDYEAIHHEDLSFQKGDQMVVLEESGEWWKARSLATRKEGYIPSNYVARVDSLETEEWFFKGISRKDAERQLLAPGNMLGSFMIRDSETTKGSYSLSVRDYDPRQGDTVKHYKIRTLDNGGFYISPRSTFSTLQELVDHYKKGNDGLCQKLSVPCMSSKPQKPWEKDAWEIPRESLKLEKKLGAGQFGEVWMATYNKHTKVAVKTMKPGSMSVEAFLAEANVMKTLQHDKLVKLHAVVTKEPIYIITEFMAKGSLLDFLKSDEGSKQPLPKLIDFSAQIAEGMAFIEQRNYIHRDLRAANILVSASLVCKIADFGLARVIEDNEYTAREGAKFPIKWTAPEAINFGSFTIKSDVWSFGILLMEIVTYGRIPYPGMSNPEVIRALERGYRMPRPENCPEELYNIMMRCWKNRPEERPTFEYIQSVLDDFYTATESQYQQQP

SEQ ID NO: 37220 - protein, 505 aa, Homo sapiens; identical to SEQ ID NO: 37219
  Payload ID: 7387
  Gene Symbol: HCK
  Gene Name: HCK proto-oncogene, Src family tyrosine kinase
  Uniprot ID: P08631
  ENSP ID: ENSP00000441169

SEQ ID NO: 37221 - protein, 526 aa, Homo sapiens; identical to SEQ ID NO: 37215
  Payload ID: 7387
  Gene Symbol: HCK
  Gene Name: HCK proto-oncogene, Src family tyrosine kinase
  ENSP ID: ENSP00000444986

SEQ ID NO: 37222 - protein, 505 aa, Homo sapiens; identical to SEQ ID NO: 37219
  Payload ID: 7387
  Gene Symbol: HCK
  Gene Name: HCK proto-oncogene, Src family tyrosine kinase
  Uniprot ID: P08631
  ENSP ID: ENSP00000486627

SEQ ID NO: 37223 - protein, 279 aa, Homo sapiens
  Payload ID: 7388
  Gene Symbol: HAX1
  Gene Name: HCLS1 associated protein X-1
  Uniprot ID: O00165
  ENSP ID: ENSP00000329002
MSLFDLFRGFFGFPGPRSHRDPFFGGMTRDEDDDEEEEEEGGSWGRGNPRFHSPQHPPEEFGFGFSFSPGGGIRFHDNFGFDDLVRDFNSIFSDMGAWTLPSHPPELPGPESETPGERLREGQTLRDSMLKYPDSHQPRIFGGVLESDARSESPQPAPDWGSQRPFHRFDDVWPMDPHPRTREDNDLDSQVSQEGLGPVLQPQPKSYFKSISVTKITKPDGIVEERRTVVDSEGRTETTVTRHEADSSPRGDPESPRPPALDDAFSILDLFLGRWFRSR

SEQ ID NO: 37224 - protein, 255 aa, Homo sapiens
  Payload ID: 7388
  Gene Symbol: HAX1
  Gene Name: HCLS1 associated protein X-1
  ENSP ID: ENSP00000394920
MSLFDLFRGFFGFPGPRSHRDPFFGGMTRDEDDDEEEEEEGGSWGRGNPRFHSPQHPPEEFGFGFSFSPGGGIRFHDNFGFDDLNFQVLSQRHLVRDYGRDRHFGTQCLSIQIVTSPGSLGGSWRVMQEVNPPNQHQTGAPRGHFIGLMMYGLWTPILEPERTMFLPVHLSPFFLWTLSLLLLHLSALPDLDSQVSQEGLGPVLQPQPKSYFKSISVTKITKPDGIVEERRTVVDSEGRTETTVTRHEADSSPRG

SEQ ID NO: 37225 - protein, 191 aa, Homo sapiens
  Payload ID: 7388
  Gene Symbol: HAX1
  Gene Name: HCLS1 associated protein X-1
  Uniprot ID: O00165
  ENSP ID: ENSP00000403848
MSLFDLFRGFFGFPGPRSHRDPFFGGMTRDEDDDEEEEEEGGSWGRGNPRFHSPQHPPEEFGFGFSFSPGGGIRFHDNFGFDDLNFQVLSQRHLVRDYGRDRHFGTQCLSIQIVTSPGSLGGSWRVMQEVNPPNQHQTGAPRGHFIGLMMYGLWTPILEPERTMILIPRFPRRVLARFYSPSPNPISRASL

SEQ ID NO: 37226 - protein, 231 aa, Homo sapiens
  Payload ID: 7388
  Gene Symbol: HAX1
  Gene Name: HCLS1 associated protein X-1
  Uniprot ID: O00165
  ENSP ID: ENSP00000411448
MSLFDLFRGFFGFPGPRSFSPGGGIRFHDNFGFDDLVRDFNSIFSDMGAWTLPSHPPELPGPESETPGERLREGQTLRDSMLKYPDSHQPRIFGGVLESDARSESPQPAPDWGSQRPFHRFDDVWPMDPHPRTREDNDLDSQVSQEGLGPVLQPQPKSYFKSISVTKITKPDGIVEERRTVVDSEGRTETTVTRHEADSSPRGDPESPRPPALDDAFSILDLFLGRWFRSR

SEQ ID NO: 37227 - protein, 151 aa, Homo sapiens
  Payload ID: 7388
  Gene Symbol: HAX1
  Gene Name: HCLS1 associated protein X-1
  ENSP ID: ENSP00000433951
MLKYPDSHQPRIFGGVLESDARSESPQPAPDWGSQRPFHRFDDVWPMDPHPRTREDNDLDSQVSQEGLGPVLQPQPKSYFKSISVTKITKPDGIVEERRTVVDSEGRTETTVTRHEADSSPRGDPESPRPPALDDAFSILDLFLGRWFRSR

SEQ ID NO: 37228 - protein, 287 aa, Homo sapiens
  Payload ID: 7388
  Gene Symbol: HAX1
  Gene Name: HCLS1 associated protein X-1
  Uniprot ID: O00165
  ENSP ID: ENSP00000435088
MSLFDLFRGFFGFPGPRSHRDPFFGGMTRDEDDDEEEEEEGGSWGRGNPRFHSPQHPPEEFGFGFSFSPGGGIRFHDNFGFDDLVRDFNSIFSDMGAWTLPSHPPANTCHLSAELPGPESETPGERLREGQTLRDSMLKYPDSHQPRIFGGVLESDARSESPQPAPDWGSQRPFHRFDDVWPMDPHPRTREDNDLDSQVSQEGLGPVLQPQPKSYFKSISVTKITKPDGIVEERRTVVDSEGRTETTVTRHEADSSPRGDPESPRPPALDDAFSILDLFLGRWFRSR

SEQ ID NO: 37229 - protein, 392 aa, Homo sapiens
  Payload ID: 7389
  Gene Symbol: HS1BP3
  Gene Name: HCLS1 binding protein 3
  Uniprot ID: Q53T59
  ENSP ID: ENSP00000305193
MQSPAVLVTSRRLQNAHTGLDLTVPQHQEVRGKMMSGHVEYQILVVTRLAAFKSAKHRPEDVVQFLVSKKYSEIEEFYQKLSSRYAAASLPPLPRKVLFVGESDIRERRAVFNEILRCVSKDAELAGSPELLEFLGTRSPGAAGLTSRDSSVLDGTDSQTGNDEEAFDFFEEQDQVAEEGPPVQSLKGEDAEESLEEEEALDPLGIMRSKKPKKHPKVAVKAKPSPRLTIFDEEVDPDEGLFGPGRKLSPQDPSEDVSSVDPLKLFDDPDLGGAIPLGDSLLLPAACESGGPTPSLSHRDASKELFRVEEDLDQILNLGAEPKPKPQLKPKPPVAAKPVIPRKPAVPPKAGPAEAVAGQQKPQEQIQAMDEMDILQYIQDHDTPAQAAPSLF

SEQ ID NO: 37230 - protein, 213 aa, Homo sapiens
  Payload ID: 7389
  Gene Symbol: HS1BP3
  Gene Name: HCLS1 binding protein 3
  ENSP ID: ENSP00000384984
MQSPAVLVTSRRLQNAHTGLDLTVPQHQEVRGKMMSGHVEYQILVVTRLAAFKSAKHRPEDVVQFLVSKKYSEIEEFYQKLSSRYAAASLPPLPRKVLFVGESDIRERRAVFNEILRCVSKDAELAGSPELLEFLGTRSPGAAGLTSRDSSVLDGTDSQTGNDEEAFDFFEEQDQVAEEGPPVQSLKGEDAEESLEEEEALDPLGIMRLVSCC

SEQ ID NO: 37231 - protein, 199 aa, Homo sapiens
  Payload ID: 7389
  Gene Symbol: HS1BP3
  Gene Name: HCLS1 binding protein 3
  ENSP ID: ENSP00000385788
MQSPAVLVTSRRLQNAHTGLDLTVPQHQEVRGKMMSGHVEYQILVVTRLAAFKSAKHRPEDVVQFLVSKKYSEIEEFYQKLSSRYAAASLPPLPRKVLFVGESDIRERRAVFNEILRCVSKDAELAGSPELLEFLGTQGSAPCPSGLPGPELGPAAVPQWEHVHSCLCSLEASARLVRQVASLTSLAGWWAEGGLPLRD

SEQ ID NO: 37232 - protein, 74 aa, Homo sapiens
  Payload ID: 7389
  Gene Symbol: HS1BP3
  Gene Name: HCLS1 binding protein 3
  ENSP ID: ENSP00000387364
  MOD_RES (1)..(1): Any amino acid
XSPQDPSEDVSSVDPLKLFDDPDLGGAIPLGDSLLLPAACESGGPTPSLSHRDASKELFRWDHLVAGKQAQGSH

SEQ ID NO: 37233 - protein, 123 aa, Homo sapiens
  Payload ID: 7389
  Gene Symbol: HS1BP3
  Gene Name: HCLS1 binding protein 3
  ENSP ID: ENSP00000389960
MRSKKPKKHPKVAVKAKPSPRLTIFDEEVDPDEGLFGPGRKLSPQDPSEDVSSVDPLKLFDDPDLGGAIPLGDSLLLPAACESGGPTPSLSHRDASKELFRTLAHKGFQCAQSNCLLTSPRIP

SEQ ID NO: 37234 - protein, 132 aa, Homo sapiens
  Payload ID: 7389
  Gene Symbol: HS1BP3
  Gene Name: HCLS1 binding protein 3
  ENSP ID: ENSP00000392203
PVQSLKGEDAEESLEEEEALDPLGIMRSKKPKKHPKVAVKAKPSPRLTIFDEEVDPDEGLFGPGRKLSPQDPSEDVSSVDPLKLFDDPDLGGAIPLGDSLLLPAACESGGPTPSLSHRDASKELFRQIQKEP

SEQ ID NO: 37235 - protein, 111 aa, Homo sapiens
  Payload ID: 7389
  Gene Symbol: HS1BP3
  Gene Name: HCLS1 binding protein 3
  ENSP ID: ENSP00000397546
  MOD_RES (1)..(1): Any amino acid
XSKKPKKHPKVAVKAKPSPRLTIFDEEVDPDEGLFGPGRKLSPQDPSEDVSSVDPLKLFDDPDLGGAIPLGDSLLLPAACESGGPTPSLSHRDASKELFRYHLSPAALGQL

SEQ ID NO: 37236 - protein, 25 aa, Homo sapiens
  Payload ID: 7389
  Gene Symbol: HS1BP3
  Gene Name: HCLS1 binding protein 3
  ENSP ID: ENSP00000486756
MQSPAVLVTSRSPKSTARLRSFTRN

SEQ ID NO: 37237 - protein, 71 aa, Homo sapiens
  Payload ID: 7390
  Gene Symbol: HDDC2
  Gene Name: HD domain containing 2
  Uniprot ID: Q7Z4H3
  ENSP ID: ENSP00000316242
MASVSSATFSGHGARSLLQFLRLVGQLKRVPRTGWVYRNVQRPESVSDHMYRMAVMAMVIKDDRLNKDRKL

SEQ ID NO: 37238 - protein, 204 aa, Homo sapiens
  Payload ID: 7390
  Gene Symbol: HDDC2
  Gene Name: HD domain containing 2
  Uniprot ID: Q7Z4H3
  ENSP ID: ENSP00000381220
MASVSSATFSGHGARSLLQFLRLVGQLKRVPRTGWVYRNVQRPESVSDHMYRMAVMAMVIKDDRLNKDRCVRLALVHDMAECIVGDIAPADNIPKEEKHRREEEAMKQITQLLPEDLRKELYELWEEYETQSSAEAKFVKQLDQCEMILQASEYEDLEHKPGRLQDFYDSTAGKFNHPEIVQLVSELEAERSTNIAAAASEPHS

SEQ ID NO: 37239 - protein, 71 aa, Homo sapiens; identical to SEQ ID NO: 37237
  Payload ID: 7390
  Gene Symbol: HDDC2
  Gene Name: HD domain containing 2
  Uniprot ID: Q7Z4H3
  ENSP ID: ENSP00000476969

SEQ ID NO: 37240 - protein, 107 aa, Homo sapiens
  Payload ID: 7390
  Gene Symbol: HDDC2
  Gene Name: HD domain containing 2
  ENSP ID: ENSP00000477042
MASVSSATFSGHGARSLLQFLRLVGQLKRVPRTGWVYRNVQRPESVSDHMYRMAVMAMVIKDDRLNKDRCVRLALVHDMAECIVGDIAPADNIPKEEKHRREEKRKT

SEQ ID NO: 37241 - protein, 108 aa, Homo sapiens
  Payload ID: 7390
  Gene Symbol: HDDC2
  Gene Name: HD domain containing 2
  ENSP ID: ENSP00000477277
MASVSSATFSGHGARSLLQFLRLVGQLKRVPRTGWVYRNVQRPESVSDHMYRMAVMAMVIKDDRLNKDRCVRLALVHDMAECIVGDIAPADNIPKEEKHRREEVSVDY

SEQ ID NO: 37242 - protein, 140 aa, Homo sapiens
  Payload ID: 7391
  Gene Symbol: HDDC3
  Gene Name: HD domain containing 3
  Uniprot ID: Q8N4P3
  ENSP ID: ENSP00000330721
MGSEAAQLLEAADFAARKHRQQRRKDPEGTPYINHPIGVARILTHEAGITDIVVLQAALLHDTVEDTDTTLDEVELHFGAQVRRLVEEVTDDKTLPKLERKRLQVEQAPHSSPGAKLVKLADKLYNLRDLNRCTPEVKIQ

SEQ ID NO: 37243 - protein, 179 aa, Homo sapiens
  Payload ID: 7391
  Gene Symbol: HDDC3
  Gene Name: HD domain containing 3
  Uniprot ID: Q8N4P3
  ENSP ID: ENSP00000377814
MGSEAAQLLEAADFAARKHRQQRRKDPEGTPYINHPIGVARILTHEAGITDIVVLQAALLHDTVEDTDTTLDEVELHFGAQVRRLVEEVTDDKTLPKLERKRLQVEQAPHSSPGAKLVKLADKLYNLRDLNRCTPEGWSEHRVQEYFEWAAQVVKGLQGTNRQLEEALKHLFKQRGLTI

SEQ ID NO: 37244 - protein, 152 aa, Homo sapiens
  Payload ID: 7391
  Gene Symbol: HDDC3
  Gene Name: HD domain containing 3
  ENSP ID: ENSP00000452937
SGGRTPRGPPTSTTPSVGASAAERRLRHLGGVARILTHEAGITDIVVLQAALLHDTVEDTDTTLDEVELHFGAQVRRLVEEVTDDKTLPKLERKRLQVEQAPHSSPGAKLVKLADKLYNLRDLNRCTPEGWSEHRVQEYFEWAAQVVKGLQG

SEQ ID NO: 37245 - protein, 143 aa, Homo sapiens
  Payload ID: 7391
  Gene Symbol: HDDC3
  Gene Name: HD domain containing 3
  ENSP ID: ENSP00000454103
MGSEAAQLLEAADFAARKHRQQRRKDPEGTPYINHPIGVARILTHEAGITDIVVLQAALLHDTVEDTDTTLDEVELHFGAQVRRLVEEVTDDKTLPKLERKRLQVEQAPHSSPGAKLVKLADKLYNLRDLNRCTPEGTLSYGL

SEQ ID NO: 37246 - protein, 543 aa, Homo sapiens
  Payload ID: 7392
  Gene Symbol: HECA
  Gene Name: hdc homolog, cell cycle regulator
  Uniprot ID: Q9UBI9
  ENSP ID: ENSP00000356630
MPNPKNSKGGRKNKRANSSGDEQENGAGALAAAGAAGAAAGGALAAAAGCGAAAAGAPGAGGAAGAGGAGTGAANAAAAAGAAAAGDAKNEAPCATPLICSFGRPVDLEKDDYQKVVCNNEHCPCSTWMHLQCFYEWESSILVQFNCIGRARSWNEKQCRQNMWTKKGYDLAFRFCSCRCGQGHLKKDTDWYQVKRMQDEKKKKSGSEKNTGRPPGEAAEEAKKCRPPNKPQKGPSHDLPRRHSMDRQNSQEKAVGAAAYGARSPGGSPGQSPPTGYSILSPAHFSGPRSSRYLGEFLKNAIHLEPHKKAMAGGHVFRNAHFDYSPAGLAVHRGGHFDTPVQFLRRLDLSELLTHIPRHKLNTFHVRMEDDAQVGQGEDLRKFILAALSASHRNVVNCALCHRALPVFEQFPLVDGTLFLSPSRHDEIEYDVPCHLQGRLMHLYAVCVDCLEGVHKIICIKCKSRWDGSWHQLGTMYTYDILAASPCCQARLNCKHCGKPVIDVRIGMQYFSEYSNVQQCPHCGNLDYHFVKPFSSFKVLEAY

SEQ ID NO: 37247 - protein, 215 aa, Homo sapiens
  Payload ID: 7393
  Gene Symbol: HAND1
  Gene Name: heart and neural crest derivatives expressed 1
  Uniprot ID: O96004
  ENSP ID: ENSP00000231121
MNLVGSYAHHHHHHHPHPAHPMLHEPFLFGPASRCHQERPYFQSWLLSPADAAPDFPAGGPPPAAAAAATAYGPDARPGQSPGRLEALGGRLGRRKGSGPKKERRRTESINSAFAELRECIPNVPADTKLSKIKTLRLATSYIAYLMDVLAKDAQSGDPEAFKAELKKADGGRESKRKRELQQHEGFPPALGPVEKRIKGRTGWPQQVWALELNQ

SEQ ID NO: 37248 - protein, 217 aa, Homo sapiens
  Payload ID: 7394
  Gene Symbol: HAND2
  Gene Name: heart and neural crest derivatives expressed 2
  Uniprot ID: P61296
  ENSP ID: ENSP00000352565
MSLVGGFPHHPVVHHEGYPFAAAAAAAAAAAASRCSHEENPYFHGWLIGHPEMSPPDYSMALSYSPEYASGAAGLDHSHYGGVPPGAGPPGLGGPRPVKRRGTANRKERRRTQSINSAFAELRECIPNVPADTKLSKIKTLRLATSYIAYLMDLLAKDDQNGEAEAFKAEIKKTDVKEEKRKKELNEILKSTVSSNDKKTKGRTGWPQHVWALELKQ

SEQ ID NO: 37249 - protein, 92 aa, Homo sapiens
  Payload ID: 7394
  Gene Symbol: HAND2
  Gene Name: heart and neural crest derivatives expressed 2
  ENSP ID: ENSP00000427084
  MOD_RES (1)..(1): Any amino acid
XPNVPADTKLSKIKTLRLATSYIAYLMDLLAKDDQNGEAEAFKAEIKKTDVKEEKRKKELNEILKSTVSSNDKKTKGRTGWPQHVWALELKQ

SEQ ID NO: 37250 - protein, 186 aa, Homo sapiens
  Payload ID: 7394
  Gene Symbol: HAND2
  Gene Name: heart and neural crest derivatives expressed 2
  ENSP ID: ENSP00000477638
MSLVGGFPHHPVVHHEGYPFAAAAAAAAAAAASRCSHEENPYFHGWLIGHPEMSPPDYSMALSYSPEYASGTANRKERRRTQSINSAFAELRECIPNVPADTKLSKIKTLRLATSYIAYLMDLLAKDDQNGEAEAFKAEIKKTDVKEEKRKKELNEILKSTVSSNDKKTKGRTGWPQHVWALELKQ

SEQ ID NO: 37251 - protein, 1381 aa, Homo sapiens
  Payload ID: 7395
  Gene Symbol: HEG1
  Gene Name: heart development protein with EGF-like domains 1
  Uniprot ID: Q9ULI3
  ENSP ID: ENSP00000311502
MASPRASRWPPPLLLLLLPLLLLPPAAPGTRDPPPSPARRALSLAPLAGAGLELQLERRPEREPPPTPPRERRGPATPGPSYRAPEPGAATQRGPSGRAPRGGSADAAWKHWPESNTEAHVENITFYQNQEDFSTVSSKEGVMVQTSGKSHAASDAPENLTLLAETADARGRSGSSSRTNFTILPVGYSLEIATALTSQSGNLASESLHLPSSSSEFDERIAAFQTKSGTASEMGTERAMGLSEEWTVHSQEATTSAWSPSFLPALEMGELTTPSRKRNSSGPDLSWLHFYRTAASSPLLDLSSSSESTEKLNNSTGLQSSSVSQTKTMHVATVFTDGGPRTLRSLTVSLGPVSKTEGFPKDSRIATTSSSVLLSPSAVESRRNSRVTGNPGDEEFIEPSTENEFGLTSLRWQNDSPTFGEHQLASSSEVQNGSPMSQTETVSRSVAPMRGGEITAHWLLTNSTTSADVTGSSASYPEGVNASVLTQFSDSTVQSGGSHTALGDRSYSESSSTSSSESLNSSAPRGERSIAGISYGQVRGTAIEQRTSSDHTDHTYLSSTFTKGERALLSITDNSSSSDIVESSTSYIKISNSSHSEYSSFFHAQTERSNISSYDGEYAQPSTESPVLHTSNLPSYTPTINMPNTSVVLDTDAEFVSDSSSSSSSSSSSSSSGPPLPLPSVSQSHHLFSSILPSTRASVHLLKSTSDASTPWSSSPSPLPVSLTTSTSAPLSVSQTTLPQSSSTPVLPRARETPVTSFQTSTMTSFMTMLHSSQTADLKSQSTPHQEKVITESKSPSLVSLPTESTKAVTTNSPLPPSLTESSTEQTLPATSTNLAQMSPTFTTTILKTSQPLMTTPGTLSSTASLVTGPIAVQTTAGKQLSLTHPEILVPQISTEGGISTERNRVIVDATTGLIPLTSVPTSAKEMTTKLGVTAEYSPASRSLGTSPSPQTTVVSTAEDLAPKSATFAVQSSTQSPTTVSSSASVNSCAVNPCLHNGECVADNTSRGYHCRCPPSWQGDDCSVDVNECLSNPCPSTAMCNNTQGSFICKCPVGYQLEKGICNLVRTFVTEFKLKRTFLNTTVEKHSDLQEVENEITKTLNMCFSALPSYIRSTVHASRESNAVVISLQTTFSLASNVTLFDLADRMQKCVNSCKSSAEVCQLLGSQRRIFRAGSLCKRKSPECDKDTSICTDLDGVALCQCKSGYFQFNKMDHSCRACEDGYRLENETCMSCPFGLGGLNCGNPYQLITVVIAAAGGGLLLILGIALIVTCCRKNKNDISKLIFKSGDFQMSPYAEYPKNPRSQEWGREAIEMHENGSTKNLLQMTDVYYSPTSVRNPELERNGLYPAYTGLPGSRHSCIFPGQYNPSFISDESRRRDYF

SEQ ID NO: 37252 - protein, 63 aa, Homo sapiens
  Payload ID: 7395
  Gene Symbol: HEG1
  Gene Name: heart development protein with EGF-like domains 1
  ENSP ID: ENSP00000417494
RKNKNDISKLIFKSGDFQMSPYAEYPKNPRSQEWGREAIEMHENGSTKNLLQMTDVYYSGAFF

SEQ ID NO: 37253 - protein, 265 aa, Homo sapiens [sequence omitted]

SEQ ID NO: 37254 - protein, 120 aa, Homo sapiens
  Payload ID: 7396
  Gene Symbol: HEATR1
  Gene Name: HEAT repeat containing 1
  ENSP ID: ENSP00000355538
MTSLAQQLQRLALPQSDASLLSRDEVASLLFDPKEAATIDRDTAFAIGCTGLEELLGIDPSFEQFEAPLFSQLAKTLERSVQTKAVNKQLDENISLFLIHLSPYFLLKPAQKCLEWLIHR

SEQ ID NO: 37255 - protein, 2063 aa, Homo sapiens
  Payload ID: 7396
  Gene Symbol: HEATR1
  Gene Name: HEAT repeat containing 1
  ENSP ID: ENSP00000355540
MTSLAQQLQRLALPQSDASLLSRDEVASLLFDPKEAATIDRDTAFAIGCTGLEELLGIDPSFEQFEAPLFSQLAKTLERSVQTKAVNKQLDENISLFLIHLSPYFLLKPAQKCLEWLIHRFHIHLYNQDSLIACVLPYHETRIFVRVIQLLKINNSKHRWFWLLPVKQSGVPLAKGTLITHCYKDLGFMDFICSLVTKSVKVFAEYPGSSAQLRVLLAFYASTIVSALVAAEDVSDNIIAKLFPYIQKGLKSSLPDYRAATYMIICQISVKVTMENTFVNSLASQIIKTLTKIPSLIKDGLSCLIVLLQRQKPESLGKKPFPHLCNVPDLITILHGISETYDVSPLLHYMLPHLVVSIIHHVTGEETEGMDGQIYKRHLEAILTKISLKNNLDHLLASLLFEEYISYSSQEEMDSNKVSLLNEQFLPLIRLLESKYPRTLDVVLEEHLKEIADLKKQELFHQFVSLSTSGGKYQFLADSDTSLMLSLNHPLAPVRILAMNHLKKIMKTSKEGVDESFIKEAVLARLGDDNIDVVLSAISAFEIFKEHFSSEVTISNLLNLFQRAELSKNGEWYEVLKIAADILIKEEILSENDQLSNQVVVCLLPFMVINNDDTESAEMKIAIYLSKSGICSLHPLLRGWEEALENVIKSTKPGKLIGVANQKMIELLADNINLGDPSSMLKMVEDLISVGEEESFNLKQKVTFHVILSVLVSCCSSLKETHFPFAIRVFSLLQKKIKKLESVITAVEIPSEWHIELMLDRGIPVELWAHYVEELNSTQRVAVEDSVFLVFSLKKFIYALKAPKSFPKGDIWWNPEQLKEDSRDYLHLLIGLFEMMLNGADAVHFRVLMKLFIKVHLEDVFQLFKFCSVLWTYGSSLSNPLNCSVKTVLQTQALYVGCAMLSSQKTQCKHQLASISSPVVTSLLINLGSPVKEVRRAAIQCLQALSGVASPFYLIIDHLISKAEEITSDAAYVIQDLATLFEELQREKKLKSHQKLSETLKNLLSCVYSCPSYIAKDLMKVLQGVNGEITKPFFAAISDEKVQQKLLRMLFDLLVNCKNSHCAQTVSSVFKGISVNAEQVRIELEPPDKAKPLGTVQQKRRQKMQQKKSQDLESVQEVGGSYWQRVTLILELLQHKKKLRSPQILVPTLFNLLSRCLEPLPQEQGNMEYTKQLILSCLLNICQKLSPDGGKIPKDILDEEKFNVELIVQCIRLSEMPQTHHHALLLLGTVAGIFPDKVLHNIMSIFTFMGANVMRLDDTYSFQVINKTVKMVIPALIQSDSGDSIEVSRNVEEIVVKIISVFVDALPHVPEHRRLPILVQLVDTLGAEKFLWILLILLFEQYVTKTVLAAAYGEKDAILEADTEFWFSVCCEFSVQHQIQSLMNILQYLLKLPEEKEETIPKAVSFNKSESQEEMLQVFNVETHTSKQLRHFKFLSVSFMSQLLSSNNFLKKVVESGGPEILKGLEERLLETVLGYISAVAQSMERNADKLTVKFWRALLSKAYDLLDKVNALLPTETFIPVIRGLVGNPLPSVRRKALDLLNNKLQQNISWKKTIVTRFLKLVPDLLAIVQRKKKEGEEEQAINRQTALYTLKLLCKNFGAENPDPFVPVLNTAVKLIAPERKEEKNVLGSALLCIAEVTSTLEALAIPQLPSLMPSLLTTMKNTSELVSSEVYLLSALAALQKVVETLPHFISPYLEGILSQVIHLEKITSEMGSASQANIRLTSLKKTLATTLAPRVLLPAIKKTYKQIEKNWKNHMGPFMSILQEHIGVMKKEELTSHQSQLTAFFLEALDFRAQHSENDLEEVGKTENCIIDCLVAMVVKLSEVTFRPLFFKLFDWAKTEDAPKDRLLTFYNLADCIAEKLKGLFTLFAGHLVKPFADTLNQVNISKTDEAFFDSENDPEKCCLLLQFILNCLYKIFLFDTQHFISKERAEALMMPLVDQLENRLGGEEKFQERVTKHLIPCIAQFSVAMADDSLWKPLNYQILLKTRDSSPKVRFAALITVLALAEKLKENYIVLLPESIPFLAELMEDECEEVEHQCQKTIQQLETVLGEPLQSYF

SEQ ID NO: 37256 - protein, 2144 aa, Homo sapiens
  Payload ID: 7396
  Gene Symbol: HEATR1
  Gene Name: HEAT repeat containing 1
  Uniprot ID: Q9H583
  ENSP ID: ENSP00000355541
MTSLAQQLQRLALPQSDASLLSRDEVASLLFDPKEAATIDRDTAFAIGCTGLEELLGIDPSFEQFEAPLFSQLAKTLERSVQTKAVNKQLDENISLFLIHLSPYFLLKPAQKCLEWLIHRFHIHLYNQDSLIACVLPYHETRIFVRVIQLLKINNSKHRWFWLLPVKQSGVPLAKGTLITHCYKDLGFMDFICSLVTKSVKVFAEYPGSSAQLRVLLAFYASTIVSALVAAEDVSDNIIAKLFPYIQKGLKSSLPDYRAATYMIICQISVKVTMENTFVNSLASQIIKTLTKIPSLIKDGLSCLIVLLQRQKPESLGKKPFPHLCNVPDLITILHGISETYDVSPLLHYMLPHLVVSIIHHVTGEETEGMDGQIYKRHLEAILTKISLKNNLDHLLASLLFEEYISYSSQEEMDSNKVSLLNEQFLPLIRLLESKYPRTLDVVLEEHLKEIADLKKQELFHQFVSLSTSGGKYQFLADSDTSLMLSLNHPLAPVRILAMNHLKKIMKTSKEGVDESFIKEAVLARLGDDNIDVVLSAISAFEIFKEHFSSEVTISNLLNLFQRAELSKNGEWYEVLKIAADILIKEEILSENDQLSNQVVVCLLPFMVINNDDTESAEMKIAIYLSKSGICSLHPLLRGWEEALENVIKSTKPGKLIGVANQKMIELLADNINLGDPSSMLKMVEDLISVGEEESFNLKQKVTFHVILSVLVSCCSSLKETHFPFAIRVFSLLQKKIKKLESVITAVEIPSEWHIELMLDRGIPVELWAHYVEELNSTQRVAVEDSVFLVFSLKKFIYALKAPKSFPKGDIWWNPEQLKEDSRDYLHLLIGLFEMMLNGADAVHFRVLMKLFIKVHLEDVFQLFKFCSVLWTYGSSLSNPLNCSVKTVLQTQALYVGCAMLSSQKTQCKHQLASISSPVVTSLLINLGSPVKEVRRAAIQCLQALSGVASPFYLIIDHLISKAEEITSDAAYVIQDLATLFEELQREKKLKSHQKLSETLKNLLSCVYSCPSYIAKDLMKVLQGVNGEMVLSQLLPMAEQLLEKIQKEPTAVLKDEAMVLHLTLGKYNEFSVSLLNEDPKSLDIFIKAVHTTKELYAGMPTIQITALEKITKPFFAAISDEKVQQKLLRMLFDLLVNCKNSHCAQTVSSVFKGISVNAEQVRIELEPPDKAKPLGTVQQKRRQKMQQKKSQDLESVQEVGGSYWQRVTLILELLQHKKKLRSPQILVPTLFNLLSRCLEPLPQEQGNMEYTKQLILSCLLNICQKLSPDGGKIPKDILDEEKFNVELIVQCIRLSEMPQTHHHALLLLGTVAGIFPDKVLHNIMSIFTFMGANVMRLDDTYSFQVINKTVKMVIPALIQSDSGDSIEVSRNVEEIVVKIISVFVDALPHVPEHRRLPILVQLVDTLGAEKFLWILLILLFEQYVTKTVLAAAYGEKDAILEADTEFWFSVCCEFSVQHQIQSLMNILQYLLKLPEEKEETIPKAVSFNKSESQEEMLQVFNVETHTSKQLRHFKFLSVSFMSQLLSSNNFLKKVVESGGPEILKGLEERLLETVLGYISAVAQSMERNADKLTVKFWRALLSKAYDLLDKVNALLPTETFIPVIRGLVGNPLPSVRRKALDLLNNKLQQNISWKKTIVTRFLKLVPDLLAIVQRKKKEGEEEQAINRQTALYTLKLLCKNFGAENPDPFVPVLNTAVKLIAPERKEEKNVLGSALLCIAEVTSTLEALAIPQLPSLMPSLLTTMKNTSELVSSEVYLLSALAALQKVVETLPHFISPYLEGILSQVIHLEKITSEMGSASQANIRLTSLKKTLATTLAPRVLLPAIKKTYKQIEKNWKNHMGPFMSILQEHIGVMKKEELTSHQSQLTAFFLEALDFRAQHSENDLEEVGKTENCIIDCLVAMVVKLSEVTFRPLFFKLFDWAKTEDAPKDRLLTFYNLADCIAEKLKGLFTLFAGHLVKPFADTLNQVNISKTDEAFFDSENDPEKCCLLLQFILNCLYKIFLFDTQHFISKERAEALMMPLVDQLENRLGGEEKFQERVTKHLIPCIAQFSVAMADDSLWKPLNYQILLKTRDSSPKVRFAALITVLALAEKLKENYIVLLPESIPFLAELMEDECEEVEHQCQKTIQQLETVLGEPLQSYF

SEQ ID NO: 37257 - protein, 680 aa, Homo sapiens
  Payload ID: 7397
  Gene Symbol: HEATR3
  Gene Name: HEAT repeat containing 3
  Uniprot ID: Q7Z4Q2
  ENSP ID: ENSP00000299192
MGKSRTKRFKRPQFSPTGDCQAEAAAAANGTGGEEDDGPAAELLEKLQHPSAEVRECACAGLARLVQQRPALPGLARRDAVRRLGPLLLDPSLAVRETAAGALRNLSACGGFEVCDDMVTKDIMTPLVALLKECSAGLDSNEMSLQEKKDQNRNSIENIANETVNVLWNICECSSRAVSIFNKEGCLEIVLKYLSRFPTNVDLAISVAYCLQTVTEDNPELLKSFSATALNMLESALLSPVSSMESLLLKTLVAGTIWNLKDIIPCKSQAEIINALLKILSEVLGMDAGEMVIQMKEAETQRLKTAAEAEEILENTNGDDLIEDDEMEGISHKRRVRRKTFVSDLLPPTDKELRETIALLTAQQTALEIIVNMCCNEDPSDDEWEELSSSDESDAFMENSFSECGGQLFSPLCLSHEVHTALTNYLIPKKIFEKTAFPNSIAVDLCSRNPTWKPLIRKMNTIQCRALFCLQSLVSLLDVEHLGGAAALQTLAQHLSQLLFSQPDFAKHVDFLEAISSALRALLQTMASKNISQCMTPDQLMTLCKAGIHSSNVGVRVNVVSILGITGSVLAKEDGTLETLKNIGCFLLEVTTKDPSLVVAGEALDALFDVFADGKEAERASIQIKLLSALKEFQPVFKMKIRKEGRGNYSTDQLCVLDNVKMNLRRFIAYQETVEKRLTS

SEQ ID NO: 37258 - protein, 1026 aa, Homo sapiens
  Payload ID: 7398
  Gene Symbol: HEATR4
  Gene Name: HEAT repeat containing 4
  Uniprot ID: Q86WZ0
  ENSP ID: ENSP00000335447
MTRTQKGKTFLPHCFYQSLPPRLGWGMILNYSKLKGKEECASVSSVPMVFFSSQYRLHRKSQYLKMAAANLTFSQEVVWQRGLPSIPYSQYSFDHLYNTNDIIHTPQIRKARPQKPVSFKFLGSSSPLTGDTSLAVKTESSANPEKKLKKSKPASTVREAPRPLIHHPCMHPDMLGRPPSLDVNLEEREAWLLPPEKEARAWEATVLEKLNERTARWIQSKRPRRPGASPNKWQSFLRQQYDWSHIRDELTSASDLELLKQLEAEETAEFEDQSVILPPQEKKKPELLLPVYYRLPSYFQQAETVEIMPGNKSTEDIHEKTSLSQPQTQSYFRQVTPRAGKFAYSTDNTFEQEIYFDEVQIIHQIGAKRDQIVLENLNRYNKQLSKVFPETPEKWSAQAIPEASYRPVQGALRWTALPTPAKDMLLQVGEKDVPIKTRRLKKQAKSLQEDVTWELVVLRRMLKEWKTAWALIIEWHHETVENLLQSLGDLHDDVRIKAITTCATAALERPRIATSQRDSDKTIQDLPEVLLPALEAALCDKNAHVRMAAAICQYAIQSHNPLARNIMQTALLKGNSVDSWAAAQCLALEGTATYPVIKRILHQLFTKKNEDTEEQSYILLSYLSEKTTLIHTMLAVELNSCQWKNRIVACQAFSRISGNVCLDMKHKLIQLMWNDWNKEVRRAAAQALGQMSLGKEVHDIIRVKLGQGNSQERVEALYLIGELKLMTAKLLPSFLHCFSDDFTAVRRAACLAAGALQIRDKMVLECLLNLMQRDPYWKIKAFAIRALGQIGQVSPELTDLLLWAIHYEESPGVRLEACRSILALKLQGDRVRDTFLDVLLLENHDAVLKEMYQTMKILNLGNEGNQEMLQEIKNRIKTLSQKDLLTHKILKLEMVMGKVREEAKRVYLKPKGEQGPLTLQTLLQETFQDEMVLPRRPSEVCDTEAVIKPVKPRAPNPWLQSSVPGLTTRSKVRSSLVKDLRTSPEKRIAVGPFRSDYPALYLGKFSERTFFSPIMSSPSGKKGAHL

SEQ ID NO: 37259 - protein, 1026 aa, Homo sapiens; identical to SEQ ID NO: 37258
  Payload ID: 7398
  Gene Symbol: HEATR4
  Gene Name: HEAT repeat containing 4
  Uniprot ID: Q86WZ0
  ENSP ID: ENSP00000450444

SEQ ID NO: 37260 - protein, 39 aa, Homo sapiens
  Payload ID: 7398
  Gene Symbol: HEATR4
  Gene Name: HEAT repeat containing 4
  ENSP ID: ENSP00000451367
MTRTQKGKTFLPHCFYQSLPPRLGWGMILNYSKLKGKEE

SEQ ID NO: 37261 - protein, 191 aa, Homo sapiens
  Payload ID: 7398
  Gene Symbol: HEATR4
  Gene Name: HEAT repeat containing 4
  ENSP ID: ENSP00000452407
MTRTQKGKTFLPHCFYQSLPPRLGWGMILNYSKLKGKEECASVSSVPMVFFSSQYRLHRKSQYLKMAAANLTFSQEVVWQRGLPSIPYSQYSFDHLYNTNDIIHTPQIRKARPQKPVSFKFLGSSSPLTGDTSLAVKTESSANPEKKLKKSKPASTVREAPRPLIHHPCMHPDMLGRPPSLDVNLEEREAW

SEQ ID NO: 37262 - protein, 36 aa, Homo sapiens
  Payload ID: 7398
  Gene Symbol: HEATR4
  Gene Name: HEAT repeat containing 4
  ENSP ID: ENSP00000456792
MTRTQKGKTFLPHCFYQSLPPRLGWGMILNYSKLKG

SEQ ID NO: 37263 - protein, 113 aa, Homo sapiens
  Payload ID: 7399
  Gene Symbol: HEATR5A
  Gene Name: HEAT repeat containing 5A
  Uniprot ID: Q86XA9
  ENSP ID: ENSP00000371903
MELAHSLLLNEEAYNQLGEVQKAEFIFEWLRYLEKLLLATSRNDVREKQKTLVEQLLSLLNSSPGPPTRKLLAKNLAILYSIGDTFSVHEAIDKCNDLIRSKDDSPSYLPTKL

SEQ ID NO: 37264 - protein, 2046 aa, Homo sapiens
  Payload ID: 7399
  Gene Symbol: HEATR5A
  Gene Name: HEAT repeat containing 5A
  ENSP ID: ENSP00000437968
MELAHSLLLNEEAYNQLGEVQKAEFIFEWLRYLEKLLLATSRNDVREKQKTLVEQLLSLLNSSPGPPTRKLLAKNLAILYSIGDTFSVHEAIDKCNDLIRSKDDSPSYLPTKLAAVVCLGSLYKKLGRILGNTFTDTVGNILKAMKSAESQGRYEIMLSLQNILNGLGAAAAPCHRDVYKAARSCLTDRSMAVRCAAAKCLLELQNEAIFMWSTDLDSVATLCFKSFEGSNYDVRISVSKLLGIILAKAVISKHPGTAASRQSIRRVSLEEVLELLGTGFLRGSSGFLRASGDMLKGTSSVSRDVRVGVTQAYVVFVSTLGGAWLEKNFAAFFSHILSLASPSHPKATQTQIDAVCCRRCVSFILRTTIGGLLGEKAQLAAVKDICQAIWKLKKVMDAVMSDGNLETRLGSTDVAASQHMLVCALQELGNLIHNLGTTAAPLLQDSSTGLLDSILSVILHPSISVRLAAAWCLHCIAVALPSYLTPLLDRCLERLTGHKSSPEAVTGFSFAVAALLGAVKHCPLGIPHGKGKIIMTLAEDLLCSAAQNSRLSAQRTQAGWLLISALMTLGPAVVSHHLARVLLLWKCVFPASPKDLETEKSRGDSFTWQVTLEGRAGALCAIKSFVSHCGDLLTEEVTQRLLPPLPCAVDLLTQLSSILKMYGSPLKTPSVVYRQRLYELLILLPPETYEGNLCAILRELAADLTAPDIQVAASTFLLPPLCHQDDLLILSPFLQETDHRFIEEQLLLGNGVACGSLEYDPYSIYEKDVEGDSVPKPLPPALSVISSASKLFGVVCAHVGETQRLLILEQLLDSIKHTKGARQQVVQLHVVSSVSSFLKYVAGSKGCLGPEEMKRFALTLVMGALESPNPLLRCAAAESWARLAQVVDDGAFTAGLAQVSFDKLKSARDVVTRTGHSLALGSLHRYLGGISSSQHLNSCIGILYTLAQDSTSPDVQTWALHSLSLIIDSAGPLYYVHVEPTLSLIIMLLLNVPPTHAEVHQSLGRCLNALITTLGPELQGNSTSISTLRTSCLLGCAVMQDNPDCLVQAQAISCLQQLHMFAPRHVNLSSLVSCLCVNLCSPYLLLRRAVLACLRQLVQREAAEVSEHAVMLAKDSREELTPDANIREVGLEGALLILLDKETDERLCHDIKETLNYMLTSMAVEKLSLWLKLCKDVLAASADFTAVTCVDTMQEEEGDKGDDASVLTTRRDEKSHPFTNPRWATRVFAAECVCRIINQCENANSAHFDIALAQEMKKRDSRNDFLVLHLADLIRMAFMAATDHSDQLRLSGLEMLLVVIRRFATVPEPEFPGHVILEQYQANVGAALRPAFTSETPPDVTAKACQVCSAWIASGVVSDLNDLRRVHQLLVSSLTKIQAGKEALSHLYNESASTMEILAVLKAWAEVYIIAVQRHKNHRQPLKTTTCLEDGIRNGSCSSDGLLDLVYADLGTLSRLWLAALQDFALLTLPSEFASQLPAEGGAFYTAETSENAKLHYYNSWALILHATALWLTSTGFVVADPDEGASNLSRPVTPTSMCQGSSSGATIKSPEDVYTDRFHLILGISVEFLCSLRSDATMESITACLHALQALLDVPWPRSKIGSDQDLGIELLNVLHRVILTRESPSIQLASLEVVRQIICAAQEHVKEKRRSAEVDDGAAEKETLPEFGEGKDTGGLVPGKSLVFATLELCVCILVRQLPELNPKLTGSPGVKATKPQILLEDGSRLVSAALVILSELPAVCSPEGSISILPTILYLTIGVLRETAVKLPGGQLSSTVAASLQALKGILSSPMARAEKSRTAWTDLLRSALTTILDCWDPVDETHQELDEVSLLTAITVFILSTSPEVTTIPCLQKRCIDKFKATLEIKDPVVQIKTYQLLHSIFQYPNPAVSYPYIYSLASCIMEKLQEIDKRKPENTAELEIFQEGIKVLETLVTVAEEHHRAQLVACLLPILISFLLDENSLGSATSIMRNLHDFALQNLMQIGPQYSSVFKSLVASSPALKARLEAAIKGNQESVKVKIPTSKYTKSPGKNSSIQLKTSFL

SEQ ID NO: 37265 - protein, 1599 aa, Homo sapiens
  Payload ID: 7399
  Gene Symbol: HEATR5A
  Gene Name: HEAT repeat containing 5A
  ENSP ID: ENSP00000439979
  MOD_RES (1)..(1): Any amino acid
XGEKAQLAAVKDICQAIWKLKKVMDAVMSDGNLETRLGSTDVAASQHMLVCALQELGNLIHNLGTTAAPLLQDSSTGLLDSILSVILHPSISVRLAAAWCLHCIAVALPSYLTPLLDRCLERLTGHKSSPEAVTGFSFAVAALLGAVKHCPLGIPHGKGKIIMTLAEDLLCSAAQNSRLSAQRTQAGWLLISALMTLGPAVVSHHLARVLLLWKCVFPASPKDLETEKSRGDSFTWQVTLEGRAGALCAIKSFVSHCGDLLTEEVTQRLLPPLPCAVDLLTQLSSILKMYGSPLKTPSVVYRQRLYELLILLPPETYEGNLCAILRELAADLTAPDIQVAASTFLLPPLCHQDDLLILSPFLQETDHRFIEEQLLLGNGVACGSLEYDPYSIYEKDVEGDSVPKPLPPALSVISSASKLFGVVCAHVGETQRLLILEQLLDSIKHTKGARQQVVQLHVVSSVSSFLKYVAGSKGCLGPEEMKRFALTLVMGALESPNPLLRCAAAESWARLAQVVDDGAFTAGLAQVSFDKLKSARDVVTRTGHSLALGSLHRYLGGISSSQHLNSCIGILYTLAQDSTSPDVQTWALHSLSLIIDSAGPLYYVHVEPTLSLIIMLLLNVPPTHAEVHQSLGRCLNALITTLGPELQGNSTSISTLRTSCLLGCAVMQDNPDCLVQAQAISCLQQLHMFAPRHVNLSSLVSCLCVNLCSPYLLLRRAVLACLRQLVQREAAEVSEHAVMLAKDSREELTPDANIREVGLEGALLILLDKETDERLCHDIKETLNYMLTSMAVEKLSLWLKLCKDVLAASADFTAVTCVDTMQEEEGDKGDDASVLTTRRDEKSHPFTNPRWATRVFAAECVCRIINQCENANSAHFDIALAQEMKKRDSRNDFLVLHLADLIRMAFMAATDHSDQLRLSGLEMLLVVIRRFATVPEPEFPGHVILEQYQANVGAALRPAFTSETPPDVTAKACQVCSAWIASGVVSDLNDLRRVHQLLVSSLTKIQAGKEALSHLYNESASTMEILAVLKAWAEVYIIAVQRHKNHRQPLKTTTCLEDGIRNGSCSSDGLLDLVYADLGTLSRLWLAALQDFALLTLPSEFASQLPAEGGAFYTAETSENAKLHYYNSWALILHATALWLTSTGFVVADPDEGASNLSRPVTPTSMCQGSSSGATIKSPEDVYTDRFHLILGISVEFLCSLRSDATMESITACLHALQALLDVPWPRSKIGSDQDLGIELLNVLHRVILTRESPSIQLASLEVVRQIICAAQEHVKEKRRSAEVDDGAAEKETLPEFGEGKDTGGLVPGKSLVFATLELCVCILVRQLPELNPKLTGSPGVKATKPQILLEDGSRLVSAALVILSELPAVCSPEVDETHQELDEVSLLTAITVFILSTSPEVTTIPCLQKRCIDKFKATLEIKDPVVQIKTYQLLHSIFQYPNPAVSYPYIYSLASCIMEKLQEIDKRKPENTAELEIFQEGIKVLETLVTVAEEHHRAQLVACLLPILISFLLDENSLGSATSIMRNLHDFALQNLMQIGPQYSSVFKSLVASSPALKARLEAAIKGNQESVKVKIPTSKYTKSPGKNSSIQLKTSFL

SEQ ID NO: 37266 - protein, 124 aa, Homo sapiens
  Payload ID: 7399
  Gene Symbol: HEATR5A
  Gene Name: HEAT repeat containing 5A
  ENSP ID: ENSP00000446884
  MOD_RES (1)..(1): Any amino acid
XLLLRRAVLACLRQLVQREAAEVSEHAVMLAKDSREELTPDANIREVGLEGALLILLDKETDERLCHDIKETLNYMLTSMAVEKLSLWLKLCKDVLAASAGKYWTLSVKIIKLKFETLHKIVYH

SEQ ID NO: 37267 - protein, 199 aa, Homo sapiens
  Payload ID: 7399
  Gene Symbol: HEATR5A
  Gene Name: HEAT repeat containing 5A
  ENSP ID: ENSP00000447708
  MOD_RES (1)..(1): Any amino acid
XSLIIMLLLNVPPTHAEVHQSLGRCLNALITTLGPELQGNSTSISTLRTSCLLGCAVMQDNPDCLVQAQAISCLQQLHMFAPRHVNLSSLVSCLCEILLDNSVLVNLCSPYLLLRRAVLACLRQLVQREAAEVSEHAVMLAKDSREELTPDANIREVGLEGALLILLDKETDERLCHDIKETLNYMLTSMAVEKLSLWL

SEQ ID NO: 37268 - protein, 87 aa, Homo sapiens
  Payload ID: 7399
  Gene Symbol: HEATR5A
  Gene Name: HEAT repeat containing 5A
  ENSP ID: ENSP00000450262
MELAHSLLLNEEAYNQLGEVQKAEFIFEWLRYLEKLLLATSRNDVREKQKTLVEQLLSLLNSSPGPPTRKLLAKNLAILYSIGDTFS

SEQ ID NO: 37269 - protein, 896 aa, Homo sapiens
  Payload ID: 7399
  Gene Symbol: HEATR5A
  Gene Name: HEAT repeat containing 5A
  ENSP ID: ENSP00000450296
  MOD_RES (1)..(1): Any amino acid
XSHPKATQTQIDAVCCRRCVSFILRTTIGGLLGEKAQLAAVKDICQAIWKLKKVMDVAASQHMLVCALQELGNLIHNLGTTAAPLLQDSSTGLLDSILSVILHPSISVRLAAAWCLHCIAVALPSYLTPLLDRCLERLTGHKSSPEAVTGFSFAVAALLGAVKHCPLGIPHGKGKIIMTLAEDLLCSAAQNSRLSAQRTQAGWLLISALMTLGPAVVSHHLARVLLLWKCVFPASPKDLETEKSRGDSFTWQVTLEGRAGALCAIKSFVSHCGDLLTEEVTQRLLPPLPCAVDLLTQLSSILKMYGSPLKTPSVVYRQRLYELLILLPPETYEGNLCAILRELAADLTAPDIQVAASTFLLPPLCHQDDLLILSPFLQETDHRFIEEQLLLGNGVACGSLEYDPYSIYEKDVEGDSVPKPLPPALSVISSASKLFGVVCAHVGETQRLLILEQLLDSIKHTKGARQQVVQLHVVSSVSSFLKYVAGSKGCLGPEEMKRFALTLVMGALESPNPLLRCAAAESWARLAQVVDDGAFTAGLAQVSFDKLKSARDVVTRTGHSLALGSLHRYLGGISSSQHLNSCIGILYTLAQDSTSPDVQTWALHSLSLIIDSAGPLYYVHVEPTLSLIIMLLLNVPPTHAEVHQSLGRCLNALITTLGPELQGNSTSISTLRTSCLLGCAVMQDNPDCLVQAQAISCLQQLHMFAPRHVNLSSLVSCLCVNLCSPYLLLRRAVLACLRQLVQREAAEVSEHAVMLAKDSREELTPDANIREVGLEGALLILLDKETDERLCHDIKETLNYMLTSMAVEKLSLWLKLCKDVLAASADFTAVTCVDTMQEEEGDKGDDASVLTTRRDEKSHPFTNPRWATRVFAAECVCRIINQCENANSAHFDIALA

SEQ ID NO: 37270 - protein, 2071 aa, Homo sapiens
  Payload ID: 7400
  Gene Symbol: HEATR5B
  Gene Name: HEAT repeat containing 5B
  Uniprot ID: Q9P2D3
  ENSP ID: ENSP00000233099
MELAHSLLLNEEALAQITEAKRPVFIFEWLRFLDKVLVAANKTDVKEKQKKLVEQLTGLISSSPGPPTRKLLAKNLAALYSIGDTFTVFQTLDKCNDIIRNKDDTAAYLPTKLAAVACVGAFYEKMGRMLGSAFPETVNNLLKSLKSAESQGRSEILMSLQKVLSGLGGAAASSHRDIYKNARSLLTDRSMAVRCAVAKCLLELQNEAVFMWTAELENIATLCFKALENSNYGVRVAVSKLLGTVMATALMPKQATVMRQNVKRATFDEVLELMATGFLRGGSGFLKSGGEMLKVGGSVNREVRVGVTQAYVVFVTTLGGQWLERSFATFLSHVLDLVSHPRATQTHVEAVYSRRCVSFILRATVGSLLGEKAQIAAAKEICQAIGKQMKAVEAVVNDTSGENKSGAADIAASQHVMVCALQELGSLVQSLNATASPLIQEASIGLLEIVTSVLLHPSMAARLAAAWCLRCVAVALPFQLTPFLDRCAERLNNLKTSPEAVSGYSFAMAALLGGVHQCPLGIPHAKGKMVVSIAEDLLRTAAQNSRLSLQRTQAGWLLLGALMTLGPSVVRYHLPKMLLLWRNVFPRSLKELEAEKARGDSFTWQVTLEGRAGALCAMRSFVAHCPELLTEDVIRKLMTPIECAMTMMSHIPSVMKAHGAHLKASAAMVRLRLYDILALLPPKTYEGSFNALLRELVAEFTLTDNSANTTTSLLRSLCHYDDSVLLGSWLQETDHKSIEDQLQPNSASGSGALEHDPSSIYLRIPAGEAVPGPLPLGVSVIDASVALFGVVFPHVSYKHRLQMLDHFAECVKQAKGVRQQAVQLNIFTAVLSALKGLAENKSTLGPEEVRKSALTLVMGPLDNPNPILRCAAGEALGRMAQVVGEATFIARMAQYSFDKLKSARDVVSRTGHSLALGCLHRYVGGIGSGQHLKTSVSILLALAQDGTSPEVQTWSLHSLALIVDSSGPMYRGYVEPTLSLVLTLLLTVPPSHTEVHQCLGRCLGAIITTVGPELQGNGATTSTIRSSCLVGCAITQDHSDSLVQAAAISCLQQLHMFAPRHVNLSSLVPSLCVHLCSSHLLLRRAAVACLRQLAQREAAEVCEYAMSLAKNTGDKESSSANVSPFAPGVSSRTDIHCRHQGVNITETGLEGLLFGMLDRETDRKLCSDIHDTLGHMLSSLAVEKLSHWLMLCKDVLAASSDMSTATLLSSGKDEEAEKKDEMDDDTMFTTLGEEDKSKPFVAPRWATRVFAADCLCRIINLCENADQAHFDLALARSAKLRNPTNDLLVLHLSDLIRMAFMAATDHSNQLRMAGLQALEDIIKKFASVPEPEFPGHVILEQYQANVGAALRPAFSQDTPSDIIAKACQVCSTWIGSGVVSDLNDLRRVHNLLVSSLDKVQAGKGSSSQLYRESATTMEKLAVLKAWAEVYVVAMNIKKEAESKPKRAIKNTDDDDDDCGTIDELPPDSLITLVQPELPTLSRLWLAALKDYALLTLPAEFSSQLPPDGGAFYTPETIDTARLHYRNSWAPILHAVALWLNSTGFTCSESTEAAAISGLQKRSTSVNLNQASGAVGSAKSLPEINKDRMHLILGVSIQFLCSPRPEEPIEHVTACLQALHTLLDSPYARVHIAEDQLIGVELLSVLHRLLLTWNPSSVQLLVTGVVQQIVRAAQDYLQEKRNTLNEDDMEKEACTVLGEGGDSGGLIPGKSLVFATMELLMFILVRHMPHLSTKVSDSPSHIATKTRLSEESARLVAATVTILSDLPSLCSPAGCMTILPTILFLIARILKDTAIKSADNQVPPPVSAALQGIKSIVTLSMAKTEAGVQKQWTALIRSTLACILEYSQPEDSVPTPDEVSMLTAIALFLWSASNEIIGVQSLQNGCMNRFKNALNSCDPWVQAKCYQLLLSVFQHSNRALSTPYIHSLAPIVVEKLKAVERNRPASNIELLAVQEGIKVLETLVALGEEQNRVQLLALLVPTLISYLLDENSFASASSASKDLHEFALQNLMHIGPLYPHAFKTVMGAAPELKVRLETAVRASQASKAKAAARQPAPAIHSAPTIKLKTSFF

SEQ ID NO: 37271 - protein, 115 aa, Homo sapiens
  Payload ID: 7400
  Gene Symbol: HEATR5B
  Gene Name: HEAT repeat containing 5B
  ENSP ID: ENSP00000408222
VQAKCYQLLLSVFQHSNRALSTPYIHSLAPIVVEKLKAVERNRPASNIELLAVQEGIKVLETLVALGEEQNILGSQPESTLRSLPPDPILLPPAHNSQAPVIYPPRPPKVLGLQA

SEQ ID NO: 37272 - protein, 1181 aa, Homo sapiens
  Payload ID: 7401
  Gene Symbol: HEATR6
  Gene Name: HEAT repeat containing 6
  Uniprot ID: Q6AI08
  ENSP ID: ENSP00000184956
MAAVQVVGSWPSVQPREAPREAIPERGNGFRLLSARLCALRPDDSSSARTEIHLLFDQLISENYSEGSGVAPEDVSALLVQACRLVPLNQNHLVSKVSQLIHHLLNRLQVIVDEQHLDFLLAYTISAIHQCSSWTHREILQALAALVYCNGSKCQKYLPELLGNTGLLMKLSDLAQSDPEVRRAAVHCMANLCLSVPGQPYLEEPYQNVCFQAFLTILQSPKSSDMDDITFCMLLQNALKGIQSLLNGGRMKLTQTDELGALLAVLKKFMFHGLPGLNIEMPTVLYPTPLPQYDGRTPIKPQQSESSASRPTLNKKKKSKVKPKKIQQGEEEEKESSGEIEAAPVTGTGRVNLHEGNTWCPSSLGVQSLPLDGSGAAEKDGVSSSFSSSSWKRVSSSESDFSDAEGGMQSKMRSYQAKVRQGALVCFLSTIKSIEKKVLYGYWSAFIPDTPELGSPQSVSLMTLTLKDPSPKTRACALQVLSAILEGSKQFLSVAEDTSDHRRAFTPFSVMIACSIRELHRCLLLALVAESSSQTVTQIIKCLANLVSNAPYDRLKLSLLTKVWNQIKPYIRHKDVNVRVSSLTLLGAIVSTHAPLPEVQLLLQQPCSSGLGNSNSATPHLSPPDWWKKAPAGPSLEETSVSSPKGSSEPCWLIRLCISIVVLPKEDSCSGSDAGSAAGSTYEPSPMRLEALQVLTLLARGYFSMTQAYLMELGEVICKCMGEADPSIQLHGAKLLEELGTGLIQQYKPDSTAAPDQRAPVFLVVMFWTMMLNGPLPRALQNSEHPTLQASACDALSSILPEAFSNLPNDRQMLCITVLLGLNDSKNRLVKAATSRALGVYVLFPCLRQDVIFVADAANAILMSLEDKSLNVRAKAAWSLGNLTDTLIVNMETPDPSFQEEFSGLLLLKMLRSAIEASKDKDKVKSNAVRALGNLLHFLQPSHIEKPTFAEIIEESIQALISTVLTEAAMKVRWNACYAMGNVFKNPALPLGTAPWTSQAYNALTSVVTSCKNFKVRIRSAAALSVPGKREQYGSVDQYARIWNALVTALQKSEDTIDFLEFKYCVSLRTQICQALIHLLSLASASDLPCMKETLELSGNMVQSYILQFLKSGAEGDDTGAPHSPQERDQMVRMALKHMGSIQAPTGDTARRAIMGFLEEILAVCFDSSGSQGALPGLTNQ

SEQ ID NO: 37273 - protein, 1069 aa, Homo sapiens
  Payload ID: 7401
  Gene Symbol: HEATR6
  Gene Name: HEAT repeat containing 6
  ENSP ID: ENSP00000464927
MAAVQVVGSWPSVQPREAPREAIPERGNGFRLLSARLCALRPDDSSSARTEIHLLFDQLISENYSEGSGVAPEDVSALLVQACRLVPLNQNHLVSKVSQLIHHLLNRLQVIVDEQHLDFLLAYTISAIHQCSSWTHREILQALAALVYCNGSKCQKYLPELLGNTGLLMKLSDLAQSDPEVRRAAVHCMANLCLSVPGQPYLEEPYQNVCFQAFLTILQSPKSSDMDDITFCMLLQNALKGIQSLLNGGRMKLTQTDELGALLAVLKKFMFHGLPGLNIEMPTVLYPTPLPQYDGRTPIKPQQSESSASRPTLNKKKKSKVKPKKIQQGEEEEKESSGEIEAAPVTGTGRVNLHEGNTWCPSSLGVQSLPLDGSGAAEKDGVSSSFSSSSWKRVSSSESDFSDAEGGMQSKMRSYQAKVRQGALVCFLSTIKSIEKKVLYGYWSAFIPDTPELGSPQSVSLMTLTLKDPSPKTRACALQVLSAILEGSKQFLSVAEDTSDHRRAFTPFSVMIACSIRELHRCLLLALVAESSSQTVTQIIKCLANLVSNAPYDRLKLSLLTKVWNQIKPYIRHKDVNVRVSSLTLLGAIVSTHAPLPEVQLLLQQPCSSGLGNSNSATPHLSPPDWWKKAPAGPSLEETSVSSPKGSSEPCWLIRLCISIVVLPKEDSCSGSDAGSAAGSTYEPSPMRLEAFSNLPNDRQMLCITVLLGLNDSKNRLVKAATSRALGVYVLFPCLRQDVIFVADAANAILMSLEDKSLNVRAKAAWSLGNLTDTLIVNMETPDPSFQEEFSGLLLLKMLRSAIEASKDKDKVKSNAVRALGNLLHFLQPSHIEKPTFAEIIEESIQALISTVLTEAAMKVRWNACYAMGNVFKNPALPLGTAPWTSQAYNALTSVVTSCKNFKVRIRSAAALSVPGKREQYGSVDQYARIWNALVTALQKSEDTIDFLEFKYCVSLRTQICQALIHLLSLASASDLPCMKETLELSGNMVQSYILQFLKSGAEGDDTGAPHSPQERDQMVRMALKHMGSIQAPTGDTARRAIMGFLEEILAVCFDSSGSQGALPGLTNQ

SEQ ID NO: 37274 - protein, 184 aa, Homo sapiens
  Payload ID: 7401
  Gene Symbol: HEATR6
  Gene Name: HEAT repeat containing 6
  ENSP ID: ENSP00000465429
  MOD_RES (1)..(1): Any amino acid
XAAVQVVGSWPSVQPREAPREAIPERGNGFRLLSARLCALRPDDSSSARTEIHLLFDQLISENYSEGSGVAPEDVSALLVQACRLVPLNQNHLVSKVSQLIHHLLNRLQYLPELLGNTGLLMKLSDLAQSDPEVRRAAVHCMANLCLSVPGQPYLEEPYQNVCFQAFLTILQSPKSSDMDDITF

SEQ ID NO: 37275 - protein, 53 aa, Homo sapiens
  Payload ID: 7401
  Gene Symbol: HEATR6
  Gene Name: HEAT repeat containing 6
  ENSP ID: ENSP00000465540
AKAAWSLGNLTDTLIVNMETPDPSFQEEFSGLLLLKMLRSAIEASKDKDKKLP

SEQ ID NO: 37276 - protein, 24 aa, Homo sapiens
  Payload ID: 7401
  Gene Symbol: HEATR6
  Gene Name: HEAT repeat containing 6
  ENSP ID: ENSP00000465595
  MOD_RES (1)..(1): Any amino acid
XHLVSKVSQLIHHLLNRLQLPMSG

SEQ ID NO: 37277 - protein, 114 aa, Homo sapiens
  Payload ID: 7401
  Gene Symbol: HEATR6
  Gene Name: HEAT repeat containing 6
  ENSP ID: ENSP00000465817
MAAVQVVGSWPSVQPREAPREAIPERGNGFRLLSARLCALRPDDSSSARTEIHLLFDQLISENYSEGSGVAPEDVSALLVQACRLVPLNQNHLVSKVSQLIHHLLNRLQLPMSG

SEQ ID NO: 37278 - protein, 120 aa, Homo sapiens
  Payload ID: 7401
  Gene Symbol: HEATR6
  Gene Name: HEAT repeat containing 6
  ENSP ID: ENSP00000465986
LEELGTGLIQQYKPDSTAAPDQRAPVFLVVMFWTMMLNGPLPRALQNSEHPTLQASACDALSSILPEAFSNLPNDRQMLCITVLLGLNDSKNRLVKAATSRALGVYVLFPCLRQTQQMQY

SEQ ID NO: 37279 - protein, 413 aa, Homo sapiens
  Payload ID: 7401
  Gene Symbol: HEATR6
  Gene Name: HEAT repeat containing 6
  ENSP ID: ENSP00000466192
MAAVQVVGSWPSVQPREAPREAIPERGNGFRLLSARLCALRPDDSSSARTEIHLLFDQLISENYSEGSGVAPEDVSALLVQACRLVPLNQNHLVSKVSQLIHHLLNRLQVIVDEQHLDFLLAYTISAIHQCSSWTHREILQALAALVYCNGSKCQKYLPELLGNTGLLMKLSDLAQSDPEVRRAAVHCMANLCLSVPGQPYLEEPYQNVCFQAFLTILQSPKSSDMDDITFCMLLQNALKGIQSLLNGGRMKLTQTDELGALLAVLKKFMFHGLPGLNIEMPTVLYPTPLPQYDGRTPIKPQQSESSASRPTLNKKKKSKVKPKKIQQGEEEEKESSGEIEAAPVTGTGRVNLHEGNTWCPSSLGVQSLPLDGSGAAEKDGVSSSFSSSSWKRVSSSESDFSDAEGGMQSKMR

SEQ ID NO: 37280 - protein, 213 aa, Homo sapiens
  Payload ID: 7401
  Gene Symbol: HEATR6
  Gene Name: HEAT repeat containing 6
  ENSP ID: ENSP00000468810
MAAVQVVGSWPSVQPREAPREAIPERGNGFRLLSARLCALRPDDSSSARTEIHLLFDQLISENYSEGSGVAPEDVSALLVQACRLVPLNQNHLVSKVSQLIHHLLNRLQSFTLLPRLECGAISAHSKLRLPSLHHSSASASQVAGTTGTRHHVIVDEQHLDFLLAYTISAIHQCSSWTHREILQALAALVYCNGSKCQKYLPELLGNTGLLMK

SEQ ID NO: 37281 - protein, 916 aa, Homo sapiens [sequence omitted]

SEQ ID NO: 37282 - protein, 530 aa, Homo sapiens
  Payload ID: 7402
  Gene Symbol: HEATR9
  Gene Name: HEAT repeat containing 9
  Uniprot ID: A2RTY3
  ENSP ID: ENSP00000473760
MAYEKSTDISDVSRSMFLYPWLEYPDKTKELRKAMAPVHLPLSCYQMPKEEFPPSPECWRQHPSKPNSVPYCYFKKPEIYTHWHDLYDQREEREAEKMLRKMRDDCRYIKEELTKSLESPREDEQFYAAQALGCLRISDKFVMEALQQVAQTGPEKVKYEAYRTLAILGCLNKHVIRALIKQLKEKNEGQRMETLTGLRMALNSWAAVSKDKRTQVGDEGKLVPVLQTLIKKSSSEASLEAALCLGFLRPCSNMVQEFLLQCLCQGLKTQRMKALRMLVKVMHVHSAPVIKAILDQLCSSSVLEDRFEATQMLKTIGLEQIQAQGLEELTFNLLRRKTHNEPFLAVRQAVAQTVEELKLKPTMMNLVEAQLMNPDATARQEAVISLGVLGIRSPQVFHLLLDLLDAENHQAVKKSLQETLILCASIDPWIQNKLKNKVLSVYEAPKTNVKAEPTRFQKEPENPEELTIQDFRLAKLNPLFIAKSITKVGQKKTPAFPPCCSKPRKHRPQVIGPWQPRIKKQLRVLAEIAK

SEQ ID NO: 37283 - protein, 570 aa, Homo sapiens
  Payload ID: 7402
  Gene Symbol: HEATR9
  Gene Name: HEAT repeat containing 9
  Uniprot ID: A2RTY3
  ENSP ID: ENSP00000473941
MAYEKSTDISDVSRSMFLYPWLEYPDKTKELRKAMAPVHLPLSCYQMPKEEFPPSPECWRQHPSKPNSVPYCYFKKPEIYTHWHDLYDQREEREAEKMLRKMRDDCRYIKEVHQTHIKMFHLPMSKLTIKSEMRSRPLEPTQDPLKWQRLRELTKSLESPREDEQFYAAQALGCLRISDKFVMEALQQVAQTGPEKVKYEAYRTLAILGCLNKHVIRALIKQLKEKNEGQRMETLTGLRMALNSWAAVSKDKRTQVGDEGKLVPVLQTLIKKSSSEASLEAALCLGFLRPCSNMVQEFLLQCLCQGLKTQRMKALRMLVKVMHVHSAPVIKAILDQLCSSSVLEDRFEATQMLKTIGLEQIQAQGLEELTFNLLRRKTHNEPFLAVRQAVAQTVEELKLKPTMMNLVEAQLMNPDATARQEAVISLGVLGIRSPQVFHLLLDLLDAENHQAVKKSLQETLILCASIDPWIQNKLKNKVLSVYEAPKTNVKAEPTRFQKEPENPEELTIQDFRLAKLNPLFIAKSITKVGQKKTPAFPPCCSKPRKHRPQVIGPWQPRIKKQLRVLAEIAK

SEQ ID NO: 37284 - protein, 140 aa, Homo sapiens
  Payload ID: 7402
  Gene Symbol: HEATR9
  Gene Name: HEAT repeat containing 9
  ENSP ID: ENSP00000474337
MAYEKSTDISDVSRSMFLYPWLEYPDKTKELRKAMAPVHLPLSCYQMPKEEFPPSPECWRQHPSKPNSVPYCYFKKPEIYTHWHDLYDQREEREAEKMLRKMRDDCRYIKEELTKSLESPREDEQFYAAQALGCLRISDK

SEQ ID NO: 37285 - protein, 283 aa, Homo sapiens
  Payload ID: 7402
  Gene Symbol: HEATR9
  Gene Name: HEAT repeat containing 9
  ENSP ID: ENSP00000474391
MAYEKSTDISDVSRSMFLYPWLEYPDKTKELRKAMAPVHLPLSCYQMPKEEFPPSPECWRQHPSKPNSVPYCYFKKPEIYTHWHDLYDQREEREAEKMLRKMRDDCRYIKEVHQTHIKMFHLPMSKLTIKSEMRSRPLEPTQDPLKWQRLRELTKSLESPREDEQFYAAQALGCLRISDKFVMEALQQVAQTGPEKVKYEAYRTLAILGCLNKHVIRALIKQLKEKNEGQRMETLTGLRMALNSWAAVSKDKVIGRTVFNWGQSWTRGLKSGMRASWCLYYRH

SEQ ID NO: 37286 - protein, 340 aa, Homo sapiens
  Payload ID: 7402
  Gene Symbol: HEATR9
  Gene Name: HEAT repeat containing 9
  Uniprot ID: A2RTY3
  ENSP ID: ENSP00000474893
MAPVHLPLSCYQMPKEEFPPSPECWRQHPSKPNSVPYCYFKKPEIYTHWHDLYDQREEREAEKMLRKMRDDCRYIKEELTKSLESPREDEQFYAAQALGCLRISDKFVMEALQQVAQTGPEKVKYEAYRTLAILGCLNKHVIRALIKQLKEKNEGQRMETLTGLRMALNSWAAVSKDKRTQVGDEGKLVPVLQTLIKKSSSEASLEAALCLGFLRPCSNMVQEFLLQCLCQGLKTQRMKALRMLVKVMHVHSAPVIKAILDQLCSSSVLEDRFEATQMLKTIGLEQIQAQGLEELTFNLLRRKTHNEPFLAVRQAVAQTVEELKLKPTMMNLVEANKRRK

SEQ ID NO: 37287 - protein, 380 aa, Homo sapiens
  Payload ID: 7402
  Gene Symbol: HEATR9
  Gene Name: HEAT repeat containing 9
  Uniprot ID: A2RTY3
  ENSP ID: ENSP00000474899
MAPVHLPLSCYQMPKEEFPPSPECWRQHPSKPNSVPYCYFKKPEIYTHWHDLYDQREEREAEKMLRKMRDDCRYIKEVHQTHIKMFHLPMSKLTIKSEMRSRPLEPTQDPLKWQRLRELTKSLESPREDEQFYAAQALGCLRISDKFVMEALQQVAQTGPEKVKYEAYRTLAILGCLNKHVIRALIKQLKEKNEGQRMETLTGLRMALNSWAAVSKDKRTQVGDEGKLVPVLQTLIKKSSSEASLEAALCLGFLRPCSNMVQEFLLQCLCQGLKTQRMKALRMLVKVMHVHSAPVIKAILDQLCSSSVLEDRFEATQMLKTIGLEQIQAQGLEELTFNLLRRKTHNEPFLAVRQAVAQTVEELKLKPTMMNLVEANKRRK

SEQ ID NO: 37288 - protein, 570 aa, Homo sapiens; identical to SEQ ID NO: 37283
  Payload ID: 7402
  Gene Symbol: HEATR9
  Gene Name: HEAT repeat containing 9
  Uniprot ID: A2RTY3
  ENSP ID: ENSP00000479676

SEQ ID NO: 37289 - protein, 380 aa, Homo sapiens; identical to SEQ ID NO: 37287
  Payload ID: 7402
  Gene Symbol: HEATR9
  Gene Name: HEAT repeat containing 9
  Uniprot ID: A2RTY3
  ENSP ID: ENSP00000487778

SEQ ID NO: 37290 - protein, 340 aa, Homo sapiens; identical to SEQ ID NO: 37286
  Payload ID: 7402
  Gene Symbol: HEATR9
  Gene Name: HEAT repeat containing 9
  Uniprot ID: A2RTY3
  ENSP ID: ENSP00000488053

SEQ ID NO: 37291 - protein, 530 aa, Homo sapiens; identical to SEQ ID NO: 37282
  Payload ID: 7402
  Gene Symbol: HEATR9
  Gene Name: HEAT repeat containing 9
  Uniprot ID: A2RTY3
  ENSP ID: ENSP00000488224

SEQ ID NO: 37292 - protein, 283 aa, Homo sapiens; identical to SEQ ID NO: 37285
  Payload ID: 7402
  Gene Symbol: HEATR9
  Gene Name: HEAT repeat containing 9
  ENSP ID: ENSP00000488334

SEQ ID NO: 37293 - protein, 858 aa, Homo sapiens
  Payload ID: 7403
  Gene Symbol: HSPH1
  Gene Name: heat shock 105kDa/110kDa protein 1
  Uniprot ID: Q92598
  ENSP ID: ENSP00000318687
MSVVGLDVGSQSCYIAVARAGGIETIANEFSDRCTPSVISFGSKNRTIGVAAKNQQITHANNTVSNFKRFHGRAFNDPFIQKEKENLSYDLVPLKNGGVGIKVMYMGEEHLFSVEQITAMLLTKLKETAENSLKKPVTDCVISVPSFFTDAERRSVLDAAQIVGLNCLRLMNDMTAVALNYGIYKQDLPSLDEKPRIVVFVDMGHSAFQVSACAFNKGKLKVLGTAFDPFLGGKNFDEKLVEHFCAEFKTKYKLDAKSKIRALLRLYQECEKLKKLMSSNSTDLPLNIECFMNDKDVSGKMNRSQFEELCAELLQKIEVPLYSLLEQTHLKVEDVSAVEIVGGATRIPAVKERIAKFFGKDISTTLNADEAVARGCALQCAILSPAFKVREFSVTDAVPFPISLIWNHDSEDTEGVHEVFSRNHAAPFSKVLTFLRRGPFELEAFYSDPQGVPYPEAKIGRFVVQNVSAQKDGEKSRVKVKVRVNTHGIFTISTASMVEKVPTEENEMSSEADMECLNQRPPENPDTDKNVQQDNSEAGTQPQVQTDAQQTSQSPPSPELTSEENKIPDADKANEKKVDQPPEAKKPKIKVVNVELPIEANLVWQLGKDLLNMYIETEGKMIMQDKLEKERNDAKNAVEEYVYEFRDKLCGPYEKFICEQDHQNFLRLLTETEDWLYEEGEDQAKQAYVDKLEELMKIGTPVKVRFQEAEERPKMFEELGQRLQHYAKIAADFRNKDEKYNHIDESEMKKVEKSVNEVMEWMNNVMNAQAKKSLDQDPVVRAQEIKTKIKELNNTCEPVVTQPKPKIESPKLERTPNGPNIDKKEEDLEDKNNFGAEPPHQNGECYPNEKNSVNMDLD

SEQ ID NO: 37294 - protein, 814 aa, Homo sapiens
  Payload ID: 7403
  Gene Symbol: HSPH1
  Gene Name: heat shock 105kDa/110kDa protein 1
  Uniprot ID: Q92598
  ENSP ID: ENSP00000369768
MSVVGLDVGSQSCYIAVARAGGIETIANEFSDRCTPSVISFGSKNRTIGVAAKNQQITHANNTVSNFKRFHGRAFNDPFIQKEKENLSYDLVPLKNGGVGIKVMYMGEEHLFSVEQITAMLLTKLKETAENSLKKPVTDCVISVPSFFTDAERRSVLDAAQIVGLNCLRLMNDMTAVALNYGIYKQDLPSLDEKPRIVVFVDMGHSAFQVSACAFNKGKLKVLGTAFDPFLGGKNFDEKLVEHFCAEFKTKYKLDAKSKIRALLRLYQECEKLKKLMSSNSTDLPLNIECFMNDKDVSGKMNRSQFEELCAELLQKIEVPLYSLLEQTHLKVEDVSAVEIVGGATRIPAVKERIAKFFGKDISTTLNADEAVARGCALQCAILSPAFKVREFSVTDAVPFPISLIWNHDSEDTEGVHEVFSRNHAAPFSKVLTFLRRGPFELEAFYSDPQGVPYPEAKIGRFVVQNVSAQKDGEKSRVKVKVRVNTHGIFTISTASMVEKVPTEENEMSSEADMECLNQRPPENPDTDANEKKVDQPPEAKKPKIKVVNVELPIEANLVWQLGKDLLNMYIETEGKMIMQDKLEKERNDAKNAVEEYVYEFRDKLCGPYEKFICEQDHQNFLRLLTETEDWLYEEGEDQAKQAYVDKLEELMKIGTPVKVRFQEAEERPKMFEELGQRLQHYAKIAADFRNKDEKYNHIDESEMKKVEKSVNEVMEWMNNVMNAQAKKSLDQDPVVRAQEIKTKIKELNNTCEPVVTQPKPKIESPKLERTPNGPNIDKKEEDLEDKNNFGAEPPHQNGECYPNEKNSVNMDLD

SEQ ID NO: 37295 - protein, 782 aa, Homo sapiens
  Payload ID: 7403
  Gene Symbol: HSPH1
  Gene Name: heat shock 105kDa/110kDa protein 1
  ENSP ID: ENSP00000396090
MATAAVLRGPAAHWVESFQKAREEGSGSGTWRGRWRRRSVISFGSKNRTIGVAAKNQQITHANNTVSNFKRFHGRAFNDPFIQKEKENLSYDLVPLKNGGVGIKVMYMGEEHLFSVEQITAMLLTKLKETAENSLKKPVTDCVISVLGTAFDPFLGGKNFDEKLVEHFCAEFKTKYKLDAKSKIRALLRLYQECEKLKKLMSSNSTDLPLNIECFMNDKDVSGKMNRSQFEELCAELLQKIEVPLYSLLEQTHLKVEDVSAVEIVGGATRIPAVKERIAKFFGKDISTTLNADEAVARGCALQCAILSPAFKVREFSVTDAVPFPISLIWNHDSEDTEGVHEVFSRNHAAPFSKVLTFLRRGPFELEAFYSDPQGVPYPEAKIGRFVVQNVSAQKDGEKSRVKVKVRVNTHGIFTISTASMVEKVPTEENEMSSEADMECLNQRPPENPDTDKNVQQDNSEAGTQPQVQTDAQQTSQSPPSPELTSEENKIPDADKANEKKVDQPPEAKKPKIKVVNVELPIEANLVWQLGKDLLNMYIETEGKMIMQDKLEKERNDAKNAVEEYVYEFRDKLCGPYEKFICEQDHQNFLRLLTETEDWLYEEGEDQAKQAYVDKLEELMKIGTPVKVRFQEAEERPKMFEELGQRLQHYAKIAADFRNKDEKYNHIDESEMKKVEKSVNEVMEWMNNVMNAQAKKSLDQDPVVRAQEIKTKIKELNNTCEPVVTQPKPKIESPKLERTPNGPNIDKKEEDLEDKNNFGAEPPHQNGECYPNEKNSVNMDLD

SEQ ID NO: 37296 - protein, 115 aa, Homo sapiens
  Payload ID: 7403
  Gene Symbol: HSPH1
  Gene Name: heat shock 105kDa/110kDa protein 1
  ENSP ID: ENSP00000408991
DEKYNHIDESEMKKVEKSVNEVMEWMNNVMNAQAKKSLDQDPVVRAQEIKTKIKELNNTCEPVVTQPKPKIESPKLERTPNGPNIDKKEEDLEDKNNFGAEPPHQNDSCGIVNSY

SEQ ID NO: 37297 - protein, 115 aa, Homo sapiens
  Payload ID: 7403
  Gene Symbol: HSPH1
  Gene Name: heat shock 105kDa/110kDa protein 1
  ENSP ID: ENSP00000473512
MSVVGLDVGSQSCYIAVARAGGIETIANEFSDRCTPSVISFGSKNRTIGVAAKNQQITHANNTVSNFKRFHGRAFNDPFIQKEKENLSYDLVPLKNGGVGIKSPPSLQMLRGDLC

SEQ ID NO: 37298 - protein, 860 aa, Homo sapiens
  Payload ID: 7403
  Gene Symbol: HSPH1
  Gene Name: heat shock 105kDa/110kDa protein 1
  Uniprot ID: Q92598
  ENSP ID: ENSP00000487365
MATAAVLRGPAAHWVESFQKAREEGSGSGTWRGRWRRRSVISFGSKNRTIGVAAKNQQITHANNTVSNFKRFHGRAFNDPFIQKEKENLSYDLVPLKNGGVGIKVMYMGEEHLFSVEQITAMLLTKLKETAENSLKKPVTDCVISVPSFFTDAERRSVLDAAQIVGLNCLRLMNDMTAVALNYGIYKQDLPSLDEKPRIVVFVDMGHSAFQVSACAFNKGKLKVLGTAFDPFLGGKNFDEKLVEHFCAEFKTKYKLDAKSKIRALLRLYQECEKLKKLMSSNSTDLPLNIECFMNDKDVSGKMNRSQFEELCAELLQKIEVPLYSLLEQTHLKVEDVSAVEIVGGATRIPAVKERIAKFFGKDISTTLNADEAVARGCALQCAILSPAFKVREFSVTDAVPFPISLIWNHDSEDTEGVHEVFSRNHAAPFSKVLTFLRRGPFELEAFYSDPQGVPYPEAKIGRFVVQNVSAQKDGEKSRVKVKVRVNTHGIFTISTASMVEKVPTEENEMSSEADMECLNQRPPENPDTDKNVQQDNSEAGTQPQVQTDAQQTSQSPPSPELTSEENKIPDADKANEKKVDQPPEAKKPKIKVVNVELPIEANLVWQLGKDLLNMYIETEGKMIMQDKLEKERNDAKNAVEEYVYEFRDKLCGPYEKFICEQDHQNFLRLLTETEDWLYEEGEDQAKQAYVDKLEELMKIGTPVKVRFQEAEERPKMFEELGQRLQHYAKIAADFRNKDEKYNHIDESEMKKVEKSVNEVMEWMNNVMNAQAKKSLDQDPVVRAQEIKTKIKELNNTCEPVVTQPKPKIESPKLERTPNGPNIDKKEEDLEDKNNFGAEPPHQNGECYPNEKNSVNMDLD

SEQ ID NO: 37299 - protein, 102 aa, Homo sapiens
  Payload ID: 7404
  Gene Symbol: HSPE1
  Gene Name: heat shock 10kDa protein 1
  Uniprot ID: P61604
  ENSP ID: ENSP00000233893
MAGQAFRKFLPLFDRVLVERSAAETVTKGGIMLPEKSQGKVLQATVVAVGSGSKGKGGEIQPVSVKVGDKVLLPEYGGTKVVLDDKDYFLFRDGDILGKYVD

SEQ ID NO: 37300 - protein, 101 aa, Homo sapiens
  Payload ID: 7404
  Gene Symbol: HSPE1
  Gene Name: heat shock 10kDa protein 1
  ENSP ID: ENSP00000386447
MAGQAFRKFLPLFDRVLVERSAAETVTKGGIMLPEKSQGKVLQATVVAVGSGSKGKGGEIQPVSVKVGDKVLLPEYGGTKVVLDDKVCKLNNSKKKSDICN

SEQ ID NO: 37301 - protein, 47 aa, Homo sapiens
  Payload ID: 7404
  Gene Symbol: HSPE1
  Gene Name: heat shock 10kDa protein 1
  ENSP ID: ENSP00000387101
MGGEIQPVSVKVGDKVLLPEYGGTKVVLDDKDYFLFRDGDILGKYVD

SEQ ID NO: 37302 - protein, 196 aa, Homo sapiens
  Payload ID: 7405
  Gene Symbol: HSPB8
  Gene Name: heat shock 22kDa protein 8
  Uniprot ID: Q9UJY1
  ENSP ID: ENSP00000281938
MADGQMPFSCHYPSRLRRDPFRDSPLSSRLLDDGFGMDPFPDDLTASWPDWALPRLSSAWPGTLRSGMVPRGPTATARFGVPAEGRTPPPFPGEPWKVCVNVHSFKPEELMVKTKDGYVEVSGKHEEKQQEGGIVSKNFTKKIQLPAEVDPVTVFASLSPEGLLIIEAPQVPPYSTFGESSFNNELPQDSQEVTCT

SEQ ID NO: 37303 - protein, 152 aa, Homo sapiens
  Payload ID: 7405
  Gene Symbol: HSPB8
  Gene Name: heat shock 22kDa protein 8
  ENSP ID: ENSP00000441541
  MOD_RES (1)..(1): Any amino acid
XEPWKVCVNVHSFKPEELMVKTKDGYVEVSGKHEEKQQEGGIVSKNFTKKIQEHNTTGSKLKQTRDEGTSKQADKIVTGVGGCGHLKKYHRGSLYCHLFLIFSDRIYINSFFPFLNSIIFNYIRHFVTGKPENPKTQKKMKIIHIPSFQRRL

SEQ ID NO: 37304 - protein, 205 aa, Homo sapiens
  Payload ID: 7406
  Gene Symbol: HSPB1
  Gene Name: heat shock 27kDa protein 1
  Uniprot ID: P04792
  ENSP ID: ENSP00000248553
MTERRVPFSLLRGPSWDPFRDWYPHSRLFDQAFGLPRLPEEWSQWLGGSSWPGYVRPLPPAAIESPAVAAPAYSRALSRQLSSGVSEIRHTADRWRVSLDVNHFAPDELTVKTKDGVVEITGKHEERQDEHGYISRCFTRKYTLPPGVDPTQVSSSLSPEGTLTVEAPMPKLATQSNEITIPVTFESRAQLGGPEAAKSDETAAK

SEQ ID NO: 37305 - protein, 37 aa, Homo sapiens
  Payload ID: 7406
  Gene Symbol: HSPB1
  Gene Name: heat shock 27kDa protein 1
  ENSP ID: ENSP00000405285
MPKLATQSNEITIPVTFESRAQLGGPEAAKSDETAAK

SEQ ID NO: 37306 - protein, 186 aa, Homo sapiens [sequence omitted]

SEQ ID NO: 37307 - protein, 182 aa, Homo sapiens
  Payload ID: 7407
  Gene Symbol: HSPB2
  Gene Name: heat shock 27kDa protein 2
  Uniprot ID: Q16082
  ENSP ID: ENSP00000302476
MSGRSVPHAHPATAEYEFANPSRLGEQRFGEGLLPEEILTPTLYHGYYVRPRAAPAGEGSRAGASELRLSEGKFQAFLDVSHFTPDEVTVRTVDNLLEVSARHPQRLDRHGFVSREFCRTYVLPADVDPWRVRAALSHDGILNLEAPRGGRHLDTEVNEVYISLLPAPPDPEEEEEAAIVEP

SEQ ID NO: 37308 - protein, 150 aa, Homo sapiens
  Payload ID: 7408
  Gene Symbol: HSPB3
  Gene Name: heat shock 27kDa protein 3
  Uniprot ID: Q12988
  ENSP ID: ENSP00000303394
MAKIILRHLIEIPVRYQEEFEARGLEDCRLDHALYALPGPTIVDLRKTRAAQSPPVDSAAETPPREGKSHFQILLDVVQFLPEDIIIQTFEGWLLIKAQHGTRMDEHGFISRSFTRQYKLPDGVEIKDLSAVLCHDGILVVEVKDPVGTK

SEQ ID NO: 37309 - protein, 170 aa, Homo sapiens
  Payload ID: 7409
  Gene Symbol: HSPB7
  Gene Name: heat shock 27kDa protein family, member 7 (cardiovascular)
  Uniprot ID: Q9UBY9
  ENSP ID: ENSP00000310111
MSHRTSSTFRAERSFHSSSSSSSSSTSSSASRALPAQDPPMEKALSMFSDDFGSFMRPHSEPLAFPARPGGAGNIKTLGDAYEFAVDVRDFSPEDIIVTTSNNHIEVRAEKLAADGTVMNTFAHKCQLPEDVDPTSVTSALREDGSLTIRARRHPHTEHVQQTFRTEIKI

SEQ ID NO: 37310 - protein, 245 aa, Homo sapiens
  Payload ID: 7409
  Gene Symbol: HSPB7
  Gene Name: heat shock 27kDa protein family, member 7 (cardiovascular)
  ENSP ID: ENSP00000364870
MGRQVNPRPRGNCQLDREEGTQQRVTAHRKTMSHCQVLWEDKDSQCWGHLDWVWAHVSRSSQRGLPGGGGIGADLGRKGRIWRGQQRPLTATWAEQRAWPPLRMASTLAQGKDPPMEKALSMFSDDFGSFMRPHSEPLAFPARPGGAGNIKTLGDAYEFAVDVRDFSPEDIIVTTSNNHIEVRAEKLAADGTVMNTFAHKCQLPEDVDPTSVTSALREDGSLTIRARRHPHTEHVQQTFRTEIKI

SEQ ID NO: 37311 - protein, 174 aa, Homo sapiens
  Payload ID: 7409
  Gene Symbol: HSPB7
  Gene Name: heat shock 27kDa protein family, member 7 (cardiovascular)
  ENSP ID: ENSP00000385472
MSHRTSSTFRAERSFHSSSSSSSSSTSSSASRALPAQDPPMEKALSMFSDDFGSFMRPHSEPLAFPAHPTARPGGAGNIKTLGDAYEFAVDVRDFSPEDIIVTTSNNHIEVRAEKLAADGTVMNTFAHKCQLPEDVDPTSVTSALREDGSLTIRARRHPHTEHVQQTFRTEIKI

SEQ ID NO: 37312 - protein, 165 aa, Homo sapiens
  Payload ID: 7409
  Gene Symbol: HSPB7
  Gene Name: heat shock 27kDa protein family, member 7 (cardiovascular)
  ENSP ID: ENSP00000391578
MSHRTSSTFRAERSFHSSSSSSSSSTSSSASRALPAQDPPMEKALSMFSDDFGSFMRPHSEPLAFPARPGGAGNIKTLGDAYEFAVDVRDFSPEDIIVTTSNNHIELAADGTVMNTFAHKCQLPEDVDPTSVTSALREDGSLTIRARRHPHTEHVQQTFRTEIKI

SEQ ID NO: 37313 - protein, 124 aa, Homo sapiens
  Payload ID: 7409
  Gene Symbol: HSPB7
  Gene Name: heat shock 27kDa protein family, member 7 (cardiovascular)
  ENSP ID: ENSP00000417966
MFSDDFGSFMRPHSEPLAFPAAHPTARPGGAGNIKTLGDAYEFAVDVRDFSPEDIIVTTSNNHIELAADGTVMNTFAHKCQLPEDVDPTSVTSALREDGSLTIRARRHPHTEHVQQTFRTEIKI

SEQ ID NO: 37314 - protein, 175 aa, Homo sapiens
  Payload ID: 7409
  Gene Symbol: HSPB7
  Gene Name: heat shock 27kDa protein family, member 7 (cardiovascular)
  Uniprot ID: Q9UBY9
  ENSP ID: ENSP00000419477
MSHRTSSTFRAERSFHSSSSSSSSSTSSSASRALPAQDPPMEKALSMFSDDFGSFMRPHSEPLAFPAAHPTARPGGAGNIKTLGDAYEFAVDVRDFSPEDIIVTTSNNHIEVRAEKLAADGTVMNTFAHKCQLPEDVDPTSVTSALREDGSLTIRARRHPHTEHVQQTFRTEIKI

SEQ ID NO: 37315 - protein, 573 aa, Homo sapiens
  Payload ID: 7410
  Gene Symbol: HSPD1
  Gene Name: heat shock 60kDa protein 1 (chaperonin)
  Uniprot ID: P10809
  ENSP ID: ENSP00000340019
MLRLPTVFRQMRPVSRVLAPHLTRAYAKDVKFGADARALMLQGVDLLADAVAVTMGPKGRTVIIEQSWGSPKVTKDGVTVAKSIDLKDKYKNIGAKLVQDVANNTNEEAGDGTTTATVLARSIAKEGFEKISKGANPVEIRRGVMLAVDAVIAELKKQSKPVTTPEEIAQVATISANGDKEIGNIISDAMKKVGRKGVITVKDGKTLNDELEIIEGMKFDRGYISPYFINTSKGQKCEFQDAYVLLSEKKISSIQSIVPALEIANAHRKPLVIIAEDVDGEALSTLVLNRLKVGLQVVAVKAPGFGDNRKNQLKDMAIATGGAVFGEEGLTLNLEDVQPHDLGKVGEVIVTKDDAMLLKGKGDKAQIEKRIQEIIEQLDVTTSEYEKEKLNERLAKLSDGVAVLKVGGTSDVEVNEKKDRVTDALNATRAAVEEGIVLGGGCALLRCIPALDSLTPANEDQKIGIEIIKRTLKIPAMTIAKNAGVEGSLIVEKIMQSSSEVGYDAMAGDFVNMVEKGIIDPTKVVRTALLDAAGVASLLTTAEVVVTEIPKEEKDPGMGAMGGMGGGMGGGMF

SEQ ID NO: 37316 - protein, 573 aa, Homo sapiens; identical to SEQ ID NO: 37315
  Payload ID: 7410
  Gene Symbol: HSPD1
  Gene Name: heat shock 60kDa protein 1 (chaperonin)
  Uniprot ID: P10809
  ENSP ID: ENSP00000373620

SEQ ID NO: 37317 - protein, 48 aa, Homo sapiens
  Payload ID: 7410
  Gene Symbol: HSPD1
  Gene Name: heat shock 60kDa protein 1 (chaperonin)
  ENSP ID: ENSP00000390404
MLRLPTVFRQMRPVSRVLAPHLTRAYAKDVKFGADARALMLQGKNSDY

SEQ ID NO: 37318 - protein, 234 aa, Homo sapiens [sequence omitted]

SEQ ID NO: 37319 - protein, 94 aa, Homo sapiens
  Payload ID: 7410
  Gene Symbol: HSPD1
  Gene Name: heat shock 60kDa protein 1 (chaperonin)
  ENSP ID: ENSP00000396460
MLRLPTVFRQMRPVSRVLAPHLTRAYAKDVKFGADARALMLQGVDLLADAVAVTMGPKGRTVIIEQSWGSPKVTKDGVTVAKSIDLKDKYKNIG

SEQ ID NO: 37320 - protein, 83 aa, Homo sapiens
  Payload ID: 7410
  Gene Symbol: HSPD1
  Gene Name: heat shock 60kDa protein 1 (chaperonin)
  ENSP ID: ENSP00000402478
MLRLPTVFRQMRPVSRVLAPHLTRAYAKDVKFGADARALMLQGVDLLADAVAVTMGPKGRTVIIEQSWGSPKVTKDGVTVAKS

SEQ ID NO: 37321 - protein, 58 aa, Homo sapiens
  Payload ID: 7410
  Gene Symbol: HSPD1
  Gene Name: heat shock 60kDa protein 1 (chaperonin)
  ENSP ID: ENSP00000412227
MLRLPTVFRQMRPVSRVLAPHLTRAYAKDVKFGADARALMLQGVDLLADAVAVTMGPK

SEQ ID NO: 37322 - protein, 221 aa, Homo sapiens
  Payload ID: 7410
  Gene Symbol: HSPD1
  Gene Name: heat shock 60kDa protein 1 (chaperonin)
  ENSP ID: ENSP00000412717
MLRLPTVFRQMRPVSRVLAPHLTRAYAKDVKFGADARALMLQGVDLLADAVAVTMGPKGRTVIIEQSWGSPKVTKDGVTVAKSIDLKDKYKNIGAKLVQDVANNTNEEAGDGTTTATVLARSIAKEGFEKISKGANPVEIRRGVMLAVDAVIAELKKQSKPVTTPEEIAQVATISANGDKEIGNIISDAMKKVGRKGVITVKDGKTLNDELEIIEGMKFDR

SEQ ID NO: 37323 - protein, 175 aa, Homo sapiens
  Payload ID: 7410
  Gene Symbol: HSPD1
  Gene Name: heat shock 60kDa protein 1 (chaperonin)
  ENSP ID: ENSP00000414446
MKTCWTREQLQGKRQGEVVKGKQGGEYRHPDPARQAGWQETEMLRLPTVFRQMRPVSRVLAPHLTRAYAKDVKFGADARALMLQGVDLLADAVAVTMGPKGRTVIIEQSWGSPKVTKDGVTVAKSIDLKDKYKNIGAKLVQDVANNTNEEAGDGTTTATVLARSIAKEGFEKISK

SEQ ID NO: 37324 - protein, 686 aa, Homo sapiens
  Payload ID: 7411
  Gene Symbol: HSPA12B
  Gene Name: heat shock 70kD protein 12B
  Uniprot ID: Q96MM6
  ENSP ID: ENSP00000254963
MLAVPEMGLQGLYIGSSPERSPVPSPPGSPRTQESCGIAPLTPSQSPKPEVRAPQQASFSVVVAIDFGTTSSGYAFSFASDPEAIHMMRKWEGGDPGVAHQKTPTCLLLTPEGAFHSFGYTARDYYHDLDPEEARDWLYFEKFKMKIHSATDLTLKTQLEAVNGKTMPALEVFAHALRFFREHALQELREQSPSLPEKDTVRWVLTVPAIWKQPAKQFMREAAYLAGLVSRENAEQLLIALEPEAASVYCRKLRLHQLLDLSGRAPGGGRLGERRSIDSSFRQAREQLRRSRHSRTFLVESGVGELWAEMQAGDRYVVADCGGGTVDLTVHQLEQPHGTLKELYKASGGPYGAVGVDLAFEQLLCRIFGEDFIATFKRQRPAAWVDLTIAFEARKRTAGPHRAGALNISLPFSFIDFYRKQRGHNVETALRRSSVNFVKWSSQGMLRMSCEAMNELFQPTVSGIIQHIEALLARPEVQGVKLLFLVGGFAESAVLQHAVQAALGARGLRVVVPHDVGLTILKGAVLFGQAPGVVRVRRSPLTYGVGVLNRFVPGRHPPEKLLVRDGRRWCTDVFERFVAAEQSVALGEEVRRSYCPARPGQRRVLINLYCCAAEDARFITDPGVRKCGALSLELEPADCGQDTAGAPPGRREIRAAMQFGDTEIKVTAVDVSTNRSVRASIDFLSN

SEQ ID NO: 37325 - protein, 600 aa, Homo sapiens
  Payload ID: 7411
  Gene Symbol: HSPA12B
  Gene Name: heat shock 70kD protein 12B
  ENSP ID: ENSP00000382608
MMRKWEGGDPGVAHQKTPTCLLLTPEGAFHSFGYTARDYYHDLDPEEARDWLYFEKFKMKIHSATDLTLKTQLEAVNGKTMPALEVFAHALRFFREHALQELREQSPSLPEKDTVRWVLTVPAIWKQPAKQFMREAAYLAGLVSRENAEQLLIALEPEAASVYCRKLRLHQLLDLSGRAPGGGRLGERRSIDSSFRQAREQLRRSRHSRTFLVESGVGELWAEMQAGDRYVVADCGGGTVDLTVHQLEQPHGTLKELYKASGGPYGAVGVDLAFEQLLCRIFGEDFIATFKRQRPAAWVDLTIAFEARKRTAGPHRAGALNISLPFSFIDFYRKQRGHNVETALRRSSVNFVKWSSQGMLRMSCEAMNELFQPTVSGIIQHIEALLARPEVQGVKLLFLVGGFAESAVLQHAVQAALGARGLRVVVPHDVGLTILKGAVLFGQAPGVVRVRRSPLTYGVGVLNRFVPGRHPPEKLLVRDGRRWCTDVFERFVAAEQSVALGEEVRRSYCPARPGQRRVLINLYCCAAEDARFITDPGVRKCGALSLELEPADCGQDTAGAPPGRREIRAAMQFGDTEIKVTAVDVSTNRSVRASIDFLSN

SEQ ID NO: 37326 - protein, 675 aa, Homo sapiens
  Payload ID: 7412
  Gene Symbol: HSPA12A
  Gene Name: heat shock 70kDa protein 12A
  Uniprot ID: O43301
  ENSP ID: ENSP00000358211
MADKEAGGSDGPRETAPTSAYSSPARSLGDTGITPLSPSHIVNDTDSNVSEQQSFLVVVAVDFGTTSSGYAYSFTKEPECIHVMRRWEGGDPGVSNQKTPTTILLTPERKFHSFGYAARDFYHDLDPNEAKQWLYLEKFKMKLHTTGDLTMDTDLTAANGKKVKALEIFAYALQYFKEQALKELSDQAGSEFENSDVRWVITVPAIWKQPAKQFMRQAAYQAGLASPENSEQLIIALEPEAASIYCRKLRLHQMIELSSKAAVNGYSGSDTVGAGFTQAKEHIRRNRQSRTFLVENVIGEIWSELEEGDKYVVVDSGGGTVDLTVHQIRLPEGHLKELYKATGGPYGSLGVDYEFEKLLYKIFGEDFIEQFKIKRPAAWVDLMIAFESRKRAAAPDRTNPLNITLPFSFIDYYKKFRGHSVEHALRKSNVDFVKWSSQGMLRMSPDAMNALFKPTIDSIIEHLRDLFQKPEVSTVKFLFLVGGFAEAPLLQQAVQAAFGDQCRIIIPQDVGLTILKGAVLFGLDPAVIKVRRSPLTYGVGVLNRYVEGKHPPEKLLVKDGTRWCTDVFDKFISADQSVALGELVKRSYTPAKPSQLVIVINIYSSEHDNVSFITDPGVKKCGTLRLDLTGTSGTAVPARREIQTLMQFGDTEIKATAIDIATSKSVKVGIDFLNY

SEQ ID NO: 37327 - protein, 119 aa, Homo sapiens
  Payload ID: 7412
  Gene Symbol: HSPA12A
  Gene Name: heat shock 70kDa protein 12A
  ENSP ID: ENSP00000466041
ELSDQAGSEFENSDVRWVITVPAIWKQPAKQFMRQAAYQAGLASPENSEQLIIALEPEAASIYCRKLRLHQMIELSSKAAVNGYSGSDTVGAGFTQGTSALSLPLLLSFLPKPWMSLSL

SEQ ID NO: 37328 - protein, 136 aa, Homo sapiens
  Payload ID: 7412
  Gene Symbol: HSPA12A
  Gene Name: heat shock 70kDa protein 12A
  ENSP ID: ENSP00000466927
MLGLNDETAPTSAYSSPARSLGDTGITPLSPSHIVNDTDSNVSEQQSFLVVVAVDFGTTSSGYAYSFTKEPECIHVMRRWEGGDPGVSNQKTPTTILLTPERKFHSFGYAARDFYHDLDPNEAKQWLYLEKFKMKL

SEQ ID NO: 37329 - protein, 509 aa, Homo sapiens
  Payload ID: 7413
  Gene Symbol: HSPA14
  Gene Name: heat shock 70kDa protein 14
  Uniprot ID: Q0VDF9
  ENSP ID: ENSP00000367623
MAAIGVHLGCTSACVAVYKDGRAGVVANDAGDRVTPAVVAYSENEEIVGLAAKQSRIRNISNTVMKVKQILGRSSSDPQAQKYIAESKCLVIEKNGKLRYEIDTGEETKFVNPEDVARLIFSKMKETAHSVLGSDANDVVITVPFDFGEKQKNALGEAARAAGFNVLRLIHEPSAALLAYGIGQDSPTGKSNILVFKLGGTSLSLSVMEVNSGIYRVLSTNTDDNIGGAHFTETLAQYLASEFQRSFKHDVRGNARAMMKLTNSAEVAKHSLSTLGSANCFLDSLYEGQDFDCNVSRARFELLCSPLFNKCIEAIRGLLDQNGFTADDINKVVLCGGSSRIPKLQQLIKDLFPAVELLNSIPPDEVIPIGAAIEAGILIGKENLLVEDSLMIECSARDILVKGVDESGASRFTVLFPSGTPLPARRQHTLQAPGSISSVCLELYESDGKNSAKEETKFAQVVLQDLDKKENGLRDILAVLTMKRDGSLHVTCTDQETGKCEAISIEIAS

SEQ ID NO: 37330 - protein, 143 aa, Homo sapiens
  Payload ID: 7413
  Gene Symbol: HSPA14
  Gene Name: heat shock 70kDa protein 14
  ENSP ID: ENSP00000390513
MAAIGVHLGCTSACVAVYKDGRAGVVANDAGDRVTPAVVAYSENEEIVGLAAKQSRIRNISNTVMKVKQILGRRVLSRDPQLQQLPQPFQRCSCSLSEQPHGQTGCVRGAQPLHQHQPQHSWGSLHTADSSLLFESWFCFWWG

SEQ ID NO: 37331 - protein, 128 aa, Homo sapiens
  Payload ID: 7413
  Gene Symbol: HSPA14
  Gene Name: heat shock 70kDa protein 14
  ENSP ID: ENSP00000404691
  MOD_RES (1)..(1): Any amino acid
XACVAVYKDGRAGVVANDAGDRVTPAVVAYSENEEIVGLAAKQSRIRNISNTVMKVKQILGRSSSDPQAQKYIAESKCLVIEKNGKLRYEIDTGEETKFVNPEDVARLIFSKMKGAYSPWSQSNSEDG

SEQ ID NO: 37332 - protein, 641 aa, Homo sapiens
  Payload ID: 7414
  Gene Symbol: HSPA1A
  Gene Name: heat shock 70kDa protein 1A
  Uniprot ID: P0DMV8
  ENSP ID: ENSP00000364802
MAKAAAIGIDLGTTYSCVGVFQHGKVEIIANDQGNRTTPSYVAFTDTERLIGDAAKNQVALNPQNTVFDAKRLIGRKFGDPVVQSDMKHWPFQVINDGDKPKVQVSYKGETKAFYPEEISSMVLTKMKEIAEAYLGYPVTNAVITVPAYFNDSQRQATKDAGVIAGLNVLRIINEPTAAAIAYGLDRTGKGERNVLIFDLGGGTFDVSILTIDDGIFEVKATAGDTHLGGEDFDNRLVNHFVEEFKRKHKKDISQNKRAVRRLRTACERAKRTLSSSTQASLEIDSLFEGIDFYTSITRARFEELCSDLFRSTLEPVEKALRDAKLDKAQIHDLVLVGGSTRIPKVQKLLQDFFNGRDLNKSINPDEAVAYGAAVQAAILMGDKSENVQDLLLLDVAPLSLGLETAGGVMTALIKRNSTIPTKQTQIFTTYSDNQPGVLIQVYEGERAMTKDNNLLGRFELSGIPPAPRGVPQIEVTFDIDANGILNVTATDKSTGKANKITITNDKGRLSKEEIERMVQEAEKYKAEDEVQRERVSAKNALESYAFNMKSAVEDEGLKGKISEADKKKVLDKCQEVISWLDANTLAEKDEFEHKRKELEQVCNPIISGLYQGAGGPGPGGFGAQGPKGGSGSGPTIEEVD

SEQ ID NO: 37333 - protein, 476 aa, Homo sapiens
  Payload ID: 7414
  Gene Symbol: HSPA1A
  Gene Name: heat shock 70kDa protein 1A
  ENSP ID: ENSP00000372880
MAKAAAIGIDLGTTYSCVGVFQHGKGERNVLIFDLGGGTFDVSILTIDDGIFEVKATAGDTHLGGEDFDNRLVNHFVEEFKRKHKKDISQNKRAVRRLRTACERAKRTLSSSTQASLEIDSLFEGIDFYTSITRARFEELCSDLFRSTLEPVEKALRDAKLDKAQIHDLVLVGGSTRIPKVQKLLQDFFNGRDLNKSINPDEAVAYGAAVQAAILMGDKSENVQDLLLLDVAPLSLGLETAGGVMTALIKRNSTIPTKQTQIFTTYSDNQPGVLIQVYEGERAMTKDNNLLGRFELSGIPPAPRGVPQIEVTFDIDANGILNVTATDKSTGKANKITITNDKGRLSKEEIERMVQEAEKYKAEDEVQRERVSAKNALESYAFNMKSAVEDEGLKGKISEADKKKVLDKCQEVISWLDANTLAEKDEFEHKRKELEQVCNPIISGLYQGAGGPGPGGFGAQGPKGGSGSGPTIEEVD

SEQ ID NO: 37334 - protein, 641 aa, Homo sapiens
  Payload ID: 7414
  Gene Symbol: HSPA1A
  Gene Name: heat shock 70kDa protein 1A
  Uniprot ID: P0DMV8
  ENSP ID: ENSP00000382915
MAKAAAIGIDLGTTYSCVGVFQHGKVEIIANDQGNRTTPSYVAFTDTERLIGDAAKNQVALNPQNTVFDAKRLIGRKFGDPVVQSDMKHWPFQVINDGDKPKVQVSYKGDTKAFYPEEISSMVLTKMKEIAEAYLGYPVTNAVITVPAYFNDSQRQATKDAGVIAGLNVLRIINEPTAAAIAYGLDRTGKGERNVLIFDLGGGTFDVSILTIDDGIFEVKATAGDTHLGGEDFDNRLVNHFVEEFKRKHKKDISQNKRAVRRLRTACERAKRTLSSSTQASLEIDSLFEGIDFYTSITRARFEELCSDLFRSTLEPVEKALRDAKLDKAQIHDLVLVGGSTRIPKVQKLLQDFFNGRDLNKSINPDEAVAYGAAVQAAILMGDKSENVQDLLLLDVAPLSLGLETAGGVMTALIKRNSTIPTKQTQIFTTYSDNQPGVLIQVYEGERAMTKDNNLLGRFELSGIPPAPRGVPQIEVTFDIDANGILNVTATDKSTGKANKITITNDKGRLSKEEIERMVQEAEKYKAEDEVQRERVSAKNALESYAFNMKSAVEDEGLKGKISEADKKKVLDKCQEVISWLDANTLAEKDEFEHKRKELEQVCNPIISGLYQGAGGPGPGGFGAQGPKGGSGSGPTIEEVD

SEQ ID NO: 37335 - protein, 476 aa, Homo sapiens; identical to SEQ ID NO: 37333
  Payload ID: 7414
  Gene Symbol: HSPA1A
  Gene Name: heat shock 70kDa protein 1A
  ENSP ID: ENSP00000393259

SEQ ID NO: 37336 - protein, 641 aa, Homo sapiens; identical to SEQ ID NO: 37332
  Payload ID: 7414
  Gene Symbol: HSPA1A
  Gene Name: heat shock 70kDa protein 1A
  Uniprot ID: P0DMV8
  ENSP ID: ENSP00000404524

SEQ ID NO: 37337 - protein, 641 aa, Homo sapiens; identical to SEQ ID NO: 37332
  Payload ID: 7414
  Gene Symbol: HSPA1A
  Gene Name: heat shock 70kDa protein 1A
  Uniprot ID: P0DMV8
  ENSP ID: ENSP00000406359

SEQ ID NO: 37338 - protein, 641 aa, Homo sapiens; identical to SEQ ID NO: 37332
  Payload ID: 7414
  Gene Symbol: HSPA1A
  Gene Name: heat shock 70kDa protein 1A
  Uniprot ID: P0DMV8
  ENSP ID: ENSP00000408907

SEQ ID NO: 37339 - protein, 476 aa, Homo sapiens; identical to SEQ ID NO: 37333
  Payload ID: 7414
  Gene Symbol: HSPA1A
  Gene Name: heat shock 70kDa protein 1A
  ENSP ID: ENSP00000410693

SEQ ID NO: 37340 - protein, 476 aa, Homo sapiens; identical to SEQ ID NO: 37333
  Payload ID: 7414
  Gene Symbol: HSPA1A
  Gene Name: heat shock 70kDa protein 1A
  ENSP ID: ENSP00000415927

SEQ ID NO: 37341 - protein, 476 aa, Homo sapiens; identical to SEQ ID NO: 37333
  Payload ID: 7414
  Gene Symbol: HSPA1A
  Gene Name: heat shock 70kDa protein 1A
  ENSP ID: ENSP00000477378

SEQ ID NO: 37342 - protein, 641 aa, Homo sapiens; identical to SEQ ID NO: 37332
  Payload ID: 7415
  Gene Symbol: HSPA1B
  Gene Name: heat shock 70kDa protein 1B
  Uniprot ID: P0DMV9
  ENSP ID: ENSP00000364801

SEQ ID NO: 37343 - protein, 641 aa, Homo sapiens; identical to SEQ ID NO: 37332
  Payload ID: 7415
  Gene Symbol: HSPA1B
  Gene Name: heat shock 70kDa protein 1B
  Uniprot ID: P0DMV9
  ENSP ID: ENSP00000375391

SEQ ID NO: 37344 - protein, 641 aa, Homo sapiens; identical to SEQ ID NO: 37332
  Payload ID: 7415
  Gene Symbol: HSPA1B
  Gene Name: heat shock 70kDa protein 1B
  Uniprot ID: P0DMV9
  ENSP ID: ENSP00000375399

SEQ ID NO: 37345 - protein, 642 aa, Homo sapiens
  Payload ID: 7415
  Gene Symbol: HSPA1B
  Gene Name: heat shock 70kDa protein 1B
  ENSP ID: ENSP00000387691
GMAKAAAIGIDLGTTYSCVGVFQHGKVEIIANDQGNRTTPSYVAFTDTERLIGDAAKNQVALNPQNTVFDAKRLIGRKFGDPVVQSDMKHWPFQVINDGDKPKVQVSYKGETKAFYPEEISSMVLTKMKEIAEAYLGYPVTNAVITVPAYFNDSQRQATKDAGVIAGLNVLRIINEPTAAAIAYGLDRTGKGERNVLIFDLGGGTFDVSILTIDDGIFEVKATAGDTHLGGEDFDNRLVNHFVEEFKRKHKKDISQNKRAVRRLRTACERAKRTLSSSTQASLEIDSLFEGIDFYTSITRARFEELCSDLFRSTLEPVEKALRDAKLDKAQIHDLVLVGGSTRIPKVQKLLQDFFNGRDLNKSINPDEAVAYGAAVQAAILMGDKSENVQDLLLLDVAPLSLGLETAGGVMTALIKRNSTIPTKQTQIFTTYSDNQPGVLIQVYEGERAMTKDNNLLGRFELSGIPPAPRGVPQIEVTFDIDANGILNVTATDKSTGKANKITITNDKGRLSKEEIERMVQEAEKYKAEDEVQRERVSAKNALESYAFNMKSAVEDEGLKGKISEADKKKVLDKCQEVISWLDANTLAEKDEFEHKRKELEQVCNPIISGLYQGAGGPGPGGFGAQGPKGGSGSGPTIEEVD

SEQ ID NO: 37346 - protein, 641 aa, Homo sapiens; identical to SEQ ID NO: 37332
  Payload ID: 7415
  Gene Symbol: HSPA1B
  Gene Name: heat shock 70kDa protein 1B
  Uniprot ID: P0DMV9
  ENSP ID: ENSP00000393087

SEQ ID NO: 37347 - protein, 642 aa, Homo sapiens; identical to SEQ ID NO: 37345
  Payload ID: 7415
  Gene Symbol: HSPA1B
  Gene Name: heat shock 70kDa protein 1B
  ENSP ID: ENSP00000402651

SEQ ID NO: 37348 - protein, 641 aa, Homo sapiens; identical to SEQ ID NO: 37332
  Payload ID: 7415
  Gene Symbol: HSPA1B
  Gene Name: heat shock 70kDa protein 1B
  Uniprot ID: P0DMV9
  ENSP ID: ENSP00000403530

SEQ ID NO: 37349 - protein, 642 aa, Homo sapiens; identical to SEQ ID NO: 37345
  Payload ID: 7415
  Gene Symbol: HSPA1B
  Gene Name: heat shock 70kDa protein 1B
  ENSP ID: ENSP00000442789

SEQ ID NO: 37350 - protein, 641 aa, Homo sapiens
  Payload ID: 7416
  Gene Symbol: HSPA1L
  Gene Name: heat shock 70kDa protein 1-like
  Uniprot ID: P34931
  ENSP ID: ENSP00000364805
MATAKGIAIGIDLGTTYSCVGVFQHGKVEIIANDQGNRTTPSYVAFTDTERLIGDAAKNQVAMNPQNTVFDAKRLIGRKFNDPVVQADMKLWPFQVINEGGKPKVLVSYKGENKAFYPEEISSMVLTKLKETAEAFLGHPVTNAVITVPAYFNDSQRQATKDAGVIAGLNVLRIINEPTAAAIAYGLDKGGQGERHVLIFDLGGGTFDVSILTIDDGIFEVKATAGDTHLGGEDFDNRLVSHFVEEFKRKHKKDISQNKRAVRRLRTACERAKRTLSSSTQANLEIDSLYEGIDFYTSITRARFEELCADLFRGTLEPVEKALRDAKMDKAKIHDIVLVGGSTRIPKVQRLLQDYFNGRDLNKSINPDEAVAYGAAVQAAILMGDKSEKVQDLLLLDVAPLSLGLETAGGVMTALIKRNSTIPTKQTQIFTTYSDNQPGVLIQVYEGERAMTKDNNLLGRFDLTGIPPAPRGVPQIEVTFDIDANGILNVTATDKSTGKVNKITITNDKGRLSKEEIERMVLDAEKYKAEDEVQREKIAAKNALESYAFNMKSVVSDEGLKGKISESDKNKILDKCNELLSWLEVNQLAEKDEFDHKRKELEQMCNPIITKLYQGGCTGPACGTGYVPGRPATGPTIEEVD

SEQ ID NO: 37351 - protein, 641 aa, Homo sapiens
  Payload ID: 7416
  Gene Symbol: HSPA1L
  Gene Name: heat shock 70kDa protein 1-like
  Uniprot ID: P34931
  ENSP ID: ENSP00000372881
MATAKGIAIGIDLGTTYSCVGVFQHGKVEIIANDQGNRTTPSYVAFTDTERLIGDAAKNQVAMNPQNTVFDAKRLIGRKFNDPVVQADMKLWPFQVINEGGKPKVLVSYKGENKAFYPEEISSMVLTKLKETAEAFLGHPVTNAVITVPAYFNDSQRQATKDAGVIAGLNVLRIINEPTAAAIAYGLDKGGQGERHVLIFDLGGGTFDVSILTIDDGIFEVKATAGDTHLGGEDFDNRLVSHFVEEFKRKHKKDISQNKRAVRRLRTACERAKRTLSSSTQANLEIDSLYEGIDFYTSITRARFEELCADLFRGTLEPVEKALRDAKMDKAKIHDIVLVGGSTRIPKVQRLLQDYFNGRDLNKSINPDEAVAYGAAVQAAILMGDKSEKVQDLLLLDVAPLSLGLETAGGVMTALIKRNSTIPTKQTQIFTTYSDNQPGVLIQVYEGERAMTKDNNLLGRFDLTGIPPAPRGVPQIEVTFDIDANGILNVTAMDKSTGKVNKITITNDKGRLSKEEIERMVLDAEKYKAEDEVQREKIAAKNALESYAFNMKSVVSDEGLKGKISESDKNKILDKCNELLSWLEVNQLAEKDEFDHKRKELEQMCNPIITKLYQGGCTGPACGTGYVPGRPATGPTIEEVD

SEQ ID NO: 37352 - protein, 641 aa, Homo sapiens; identical to SEQ ID NO: 37350
  Payload ID: 7416
  Gene Symbol: HSPA1L
  Gene Name: heat shock 70kDa protein 1-like
  Uniprot ID: P34931
  ENSP ID: ENSP00000396486

SEQ ID NO: 37353 - protein, 641 aa, Homo sapiens; identical to SEQ ID NO: 37351
  Payload ID: 7416
  Gene Symbol: HSPA1L
  Gene Name: heat shock 70kDa protein 1-like
  Uniprot ID: P34931
  ENSP ID: ENSP00000408347

SEQ ID NO: 37354 - protein, 641 aa, Homo sapiens
  Payload ID: 7416
  Gene Symbol: HSPA1L
  Gene Name: heat shock 70kDa protein 1-like
  ENSP ID: ENSP00000409151
MATAKGIAIGIDLGTTYSCVGVFQHGKVEIIANDQGNRTTPSYVAFTDTERLIGDAAKNQVAMNPQNTVFDAKRLIGRKFNDPVVQADMKLWPFQVINEGGKPKVLVSYKGENKAFYPEEISSMVLTKLKETAEAFLGHPVTNAVITVPAYFNDSQRQATKDAGVIAGLNVLRIINEPTAAAIAYGLDKGGQGERHVLIFDLGGGTFDVSILTIDDGIFEVKATAGDTHLGGEDFDNRLVSHFVEEFKRKHKKDISQNKRAVRRLRTACERAKRTLSSSTQANLEIDSLYEGIDFYTSITRARFEELCADLFRGTLEPVEKALRDAKMDKAKIHDIVLVGGSTRIPKVQRLLQDYFNGRDLNKSINPDEAVAYGAAVQAAILMGDKSEKVQDLLLLDVAPLSLGLETAGGVMTALIKRNSTIPTKQTQIFTTYSDNQPGVLIQVYEGERAMTKDNNLLGRFDLTGIPPAPRGVPQIEVTFDIDANGILNVTAMDKSTGKVNKITITNDKGRLSKEEIERMVLDAEKYKAEDEVQREKIAAKNALESYAFNMKSVVSDEGLKGKISESDKNKILDKCNELLSWLEVNQLAEKDEFDHKRKELKQMCNPIITKLYQGGCTGPACGTGYVPGRPATGPTIEEVD

SEQ ID NO: 37355 - protein, 639 aa, Homo sapiens
  Payload ID: 7417
  Gene Symbol: HSPA2
  Gene Name: heat shock 70kDa protein 2
  Uniprot ID: P54652
  ENSP ID: ENSP00000247207
MSARGPAIGIDLGTTYSCVGVFQHGKVEIIANDQGNRTTPSYVAFTDTERLIGDAAKNQVAMNPTNTIFDAKRLIGRKFEDATVQSDMKHWPFRVVSEGGKPKVQVEYKGETKTFFPEEISSMVLTKMKEIAEAYLGGKVHSAVITVPAYFNDSQRQATKDAGTITGLNVLRIINEPTAAAIAYGLDKKGCAGGEKNVLIFDLGGGTFDVSILTIEDGIFEVKSTAGDTHLGGEDFDNRMVSHLAEEFKRKHKKDIGPNKRAVRRLRTACERAKRTLSSSTQASIEIDSLYEGVDFYTSITRARFEELNADLFRGTLEPVEKALRDAKLDKGQIQEIVLVGGSTRIPKIQKLLQDFFNGKELNKSINPDEAVAYGAAVQAAILIGDKSENVQDLLLLDVTPLSLGIETAGGVMTPLIKRNTTIPTKQTQTFTTYSDNQSSVLVQVYEGERAMTKDNNLLGKFDLTGIPPAPRGVPQIEVTFDIDANGILNVTAADKSTGKENKITITNDKGRLSKDDIDRMVQEAERYKSEDEANRDRVAAKNALESYTYNIKQTVEDEKLRGKISEQDKNKILDKCQEVINWLDRNQMAEKDEYEHKQKELERVCNPIISKLYQGGPGGGSGGGGSGASGGPTIEEVD

SEQ ID NO: 37356 - protein, 639 aa, Homo sapiens; identical to SEQ ID NO: 37355
  Payload ID: 7417
  Gene Symbol: HSPA2
  Gene Name: heat shock 70kDa protein 2
  Uniprot ID: P54652
  ENSP ID: ENSP00000378199

SEQ ID NO: 37357 - protein, 840 aa, Homo sapiens
  Payload ID: 7418
  Gene Symbol: HSPA4
  Gene Name: heat shock 70kDa protein 4
  Uniprot ID: P34932
  ENSP ID: ENSP00000302961
MSVVGIDLGFQSCYVAVARAGGIETIANEYSDRCTPACISFGPKNRSIGAAAKSQVISNAKNTVQGFKRFHGRAFSDPFVEAEKSNLAYDIVQLPTGLTGIKVTYMEEERNFTTEQVTAMLLSKLKETAESVLKKPVVDCVVSVPCFYTDAERRSVMDATQIAGLNCLRLMNETTAVALAYGIYKQDLPALEEKPRNVVFVDMGHSAYQVSVCAFNRGKLKVLATAFDTTLGGRKFDEVLVNHFCEEFGKKYKLDIKSKIRALLRLSQECEKLKKLMSANASDLPLSIECFMNDVDVSGTMNRGKFLEMCNDLLARVEPPLRSVLEQTKLKKEDIYAVEIVGGATRIPAVKEKISKFFGKELSTTLNADEAVTRGCALQCAILSPAFKVREFSITDVVPYPISLRWNSPAEEGSSDCEVFSKNHAAPFSKVLTFYRKEPFTLEAYYSSPQDLPYPDPAIAQFSVQKVTPQSDGSSSKVKVKVRVNVHGIFSVSSASLVEVHKSEENEEPMETDQNAKEEEKMQVDQEEPHVEEQQQQTPAENKAESEEMETSQAGSKDKKMDQPPQAKKAKVKTSTVDLPIENQLLWQIDREMLNLYIENEGKMIMQDKLEKERNDAKNAVEEYVYEMRDKLSGEYEKFVSEDDRNSFTLKLEDTENWLYEDGEDQPKQVYVDKLAELKNLGQPIKIRFQESEERPKLFEELGKQIQQYMKIISSFKNKEDQYDHLDAADMTKVEKSTNEAMEWMNNKLNLQNKQSLTMDPVVKSKEIEAKIKELTSTCSPIISKPKPKVEPPKEEQKNAEQNGPVDGQGDNPGPQAAEQGTDTAVPSDSDKKLPEMDID

SEQ ID NO: 37358 - protein, 475 aa, Homo sapiens [sequence omitted]

SEQ ID NO: 37359 - protein, 148 aa, Homo sapiens
  Payload ID: 7418
  Gene Symbol: HSPA4
  Gene Name: heat shock 70kDa protein 4
  Uniprot ID: P34932
  ENSP ID: ENSP00000480688
MSVVGIDLGFQSCYVAVARAGGIETIANEYSDRCTPACISFGPKNRSIGAAAKSQVISNAKNTVQGFKRFHGRAFSDPFVEAEKSNLAYDIVQLPTGLTGIKVTYMEEEQNGPVDGQGDNPGPQAAEQGTDTAVPSDSDKKLPEMDID

SEQ ID NO: 37360 - protein, 699 aa, Homo sapiens [sequence omitted]

SEQ ID NO: 37361 - protein, 839 aa, Homo sapiens
  Payload ID: 7419
  Gene Symbol: HSPA4L
  Gene Name: heat shock 70kDa protein 4-like
  Uniprot ID: O95757
  ENSP ID: ENSP00000296464
MSVVGIDLGFLNCYIAVARSGGIETIANEYSDRCTPACISLGSRTRAIGNAAKSQIVTNVRNTIHGFKKLHGRSFDDPIVQTERIRLPYELQKMPNGSAGVKVRYLEEERPFAIEQVTGMLLAKLKETSENALKKPVADCVISIPSFFTDAERRSVMAAAQVAGLNCLRLMNETTAVALAYGIYKQDLPPLDEKPRNVVFIDMGHSAYQVLVCAFNKGKLKVLATTFDPYLGGRNFDEALVDYFCDEFKTKYKINVKENSRALLRLYQECEKLKKLMSANASDLPLNIECFMNDLDVSSKMNRAQFEQLCASLLARVEPPLKAVMEQANLQREDISSIEIVGGATRIPAVKEQITKFFLKDISTTLNADEAVARGCALQCAILSPAFKVREFSITDLVPYSITLRWKTSFEDGSGECEVFCKNHPAPFSKVITFHKKEPFELEAFYTNLHEVPYPDARIGSFTIQNVFPQSDGDSSKVKVKVRVNIHGIFSVASASVIEKQNLEGDHSDAPMETETSFKNENKDNMDKMQVDQEEGHQKCHAEHTPEEEIDHTGAKTKSAVSDKQDRLNQTLKKGKVKSIDLPIQSSLCRQLGQDLLNSYIENEGKMIMQDKLEKERNDAKNAVEEYVYDFRDRLGTVYEKFITPEDLSKLSAVLEDTENWLYEDGEDQPKQVYVDKLQELKKYGQPIQMKYMEHEERPKALNDLGKKIQLVMKVIEAYRNKDERYDHLDPTEMEKVEKCISDAMSWLNSKMNAQNKLSLTQDPVVKVSEIVAKSKELDNFCNPIIYKPKPKAEVPEDKPKANSEHNGPMDGQSGTETKSDSTKDSSQHTKSSGEMEVD

SEQ ID NO: 37362 - protein, 839 aa, Homo sapiens; identical to SEQ ID NO: 37361
  Payload ID: 7419
  Gene Symbol: HSPA4L
  Gene Name: heat shock 70kDa protein 4-like
  Uniprot ID: O95757
  ENSP ID: ENSP00000422482

SEQ ID NO: 37363 - protein, 813 aa, Homo sapiens
  Payload ID: 7419
  Gene Symbol: HSPA4L
  Gene Name: heat shock 70kDa protein 4-like
  ENSP ID: ENSP00000425645
MKPILLFMERACISLGSRTRAIGNAAKSQIVTNVRNTIHGFKKLHGRSFDDPIVQTERIRLPYELQKMPNGSAGVKVRYLEEERPFAIEQVTGMLLAKLKETSENALKKPVADCVISIPSFFTDAERRSVMAAAQVAGLNCLRLMNETTAVALAYGIYKQDLPPLDEKPRNVVFIDMGHSAYQVLVCAFNKGKLKVLATTFDPYLGGRNFDEALVDYFCDEFKTKYKINVKENSRALLRLYQECEKLKKLMSANASDLPLNIECFMNDLDVSSKMNRAQFEQLCASLLARVEPPLKAVMEQANLQREDISSIEIVGGATRIPAVKEQITKFFLKDISTTLNADEAVARGCALQCAILSPAFKVREFSITDLVPYSITLRWKTSFEDGSGECEVFCKNHPAPFSKVITFHKKEPFELEAFYTNLHEVPYPDARIGSFTIQNVFPQSDGDSSKVKVKVRVNIHGIFSVASASVIEKQNLEGDHSDAPMETETSFKNENKDNMDKMQVDQEEGHQKCHAEHTPEEEIDHTGAKTKSAVSDKQDRLNQTLKKGKVKSIDLPIQSSLCRQLGQDLLNSYIENEGKMIMQDKLEKERNDAKNAVEEYVYDFRDRLGTVYEKFITPEDLSKLSAVLEDTENWLYEDGEDQPKQVYVDKLQELKKYGQPIQMKYMEHEERPKALNDLGKKIQLVMKVIEAYRNKDERYDHLDPTEMEKVEKCISDAMSWLNSKMNAQNKLSLTQDPVVKVSEIVAKSKELDNFCNPIIYKPKPKAEVPEDKPKANSEHNGPMDGQSGTETKSDSTKDSSQHTKSSGEMEVD

SEQ ID NO: 37364 - protein, 531 aa, Homo sapiens
  Payload ID: 7419
  Gene Symbol: HSPA4L
  Gene Name: heat shock 70kDa protein 4-like
  ENSP ID: ENSP00000427305
MSVVGIDLGFLNCYIAVARSGGIETIANEYSDRCTPACISLGSRTRAIGNAAKSQIVTNVRNTIHGFKKLHGRSFDDPIVQTERIRLPYELQKMPNGSAGVKIPSFFTDAERRSVMAAAQVAGLNCLRLMNETTAVALAYGIYKQDLPPLDEKPRNVVFIDMGHSAYQVLVCAFNKGKLKVLATTFDPYLGGRNFDEALVDYFCDEFKTKYKINVKENSRALLRLYQECEKLKKLMSANASDLPLNIECFMNDLDVSSKMNRAQFEQLCASLLARVEPPLKAVMEQANLQREDISSIEIVGGATRIPAVKEQITKFFLKDISTTLNADEAVARGCALQCAILSPAFKVREFSITDLVPYSITLRWKTSFEDGSGECEVFCKNHPAPFSKVITFHKKEPFELEAFYTNLHEVPYPDARIGSFTIQNVFPQSDGDSSKVKVKVRVNIHGIFSVASASVIEKQNLEGDHSDAPMETETSFKNENKDNMDKMQVDQEEGHQKCHAEHTPEEEIDHTGAKTKSAVSDKQDRLNQTL

SEQ ID NO: 37365 - protein, 654 aa, Homo sapiens
  Payload ID: 7420
  Gene Symbol: HSPA5
  Gene Name: heat shock 70kDa protein 5 (glucose-regulated protein, 78kDa)
  Uniprot ID: P11021
  ENSP ID: ENSP00000324173
MKLSLVAAMLLLLSAARAEEEDKKEDVGTVVGIDLGTTYSCVGVFKNGRVEIIANDQGNRITPSYVAFTPEGERLIGDAAKNQLTSNPENTVFDAKRLIGRTWNDPSVQQDIKFLPFKVVEKKTKPYIQVDIGGGQTKTFAPEEISAMVLTKMKETAEAYLGKKVTHAVVTVPAYFNDAQRQATKDAGTIAGLNVMRIINEPTAAAIAYGLDKREGEKNILVFDLGGGTFDVSLLTIDNGVFEVVATNGDTHLGGEDFDQRVMEHFIKLYKKKTGKDVRKDNRAVQKLRREVEKAKRALSSQHQARIEIESFYEGEDFSETLTRAKFEELNMDLFRSTMKPVQKVLEDSDLKKSDIDEIVLVGGSTRIPKIQQLVKEFFNGKEPSRGINPDEAVAYGAAVQAGVLSGDQDTGDLVLLDVCPLTLGIETVGGVMTKLIPRNTVVPTKKSQIFSTASDNQPTVTIKVYEGERPLTKDNHLLGTFDLTGIPPAPRGVPQIEVTFEIDVNGILRVTAEDKGTGNKNKITITNDQNRLTPEEIERMVNDAEKFAEEDKKLKERIDTRNELESYAYSLKNQIGDKEKLGGKLSSEDKETMEKAVEEKIEWLESHQDADIEDFKAKKKELEEIVQPIISKLYGSAGPPPTGEEDTAEKDEL

SEQ ID NO: 37366 - protein, 643 aa, Homo sapiens
  Payload ID: 7421
  Gene Symbol: HSPA6
  Gene Name: heat shock 70kDa protein 6 (HSP70B')
  Uniprot ID: P17066
  ENSP ID: ENSP00000310219
MQAPRELAVGIDLGTTYSCVGVFQQGRVEILANDQGNRTTPSYVAFTDTERLVGDAAKSQAALNPHNTVFDAKRLIGRKFADTTVQSDMKHWPFRVVSEGGKPKVRVCYRGEDKTFYPEEISSMVLSKMKETAEAYLGQPVKHAVITVPAYFNDSQRQATKDAGAIAGLNVLRIINEPTAAAIAYGLDRRGAGERNVLIFDLGGGTFDVSVLSIDAGVFEVKATAGDTHLGGEDFDNRLVNHFMEEFRRKHGKDLSGNKRALRRLRTACERAKRTLSSSTQATLEIDSLFEGVDFYTSITRARFEELCSDLFRSTLEPVEKALRDAKLDKAQIHDVVLVGGSTRIPKVQKLLQDFFNGKELNKSINPDEAVAYGAAVQAAVLMGDKCEKVQDLLLLDVAPLSLGLETAGGVMTTLIQRNATIPTKQTQTFTTYSDNQPGVFIQVYEGERAMTKDNNLLGRFELSGIPPAPRGVPQIEVTFDIDANGILSVTATDRSTGKANKITITNDKGRLSKEEVERMVHEAEQYKAEDEAQRDRVAAKNSLEAHVFHVKGSLQEESLRDKIPEEDRRKMQDKCREVLAWLEHNQLAEKEEYEHQKRELEQICRPIFSRLYGGPGVPGGSSCGTQARQGDPSTGPIIEEVD

SEQ ID NO: 37367 - protein, 646 aa, Homo sapiens
  Payload ID: 7422
  Gene Symbol: HSPA8
  Gene Name: heat shock 70kDa protein 8
  Uniprot ID: P11142
  ENSP ID: ENSP00000227378
MSKGPAVGIDLGTTYSCVGVFQHGKVEIIANDQGNRTTPSYVAFTDTERLIGDAAKNQVAMNPTNTVFDAKRLIGRRFDDAVVQSDMKHWPFMVVNDAGRPKVQVEYKGETKSFYPEEVSSMVLTKMKEIAEAYLGKTVTNAVVTVPAYFNDSQRQATKDAGTIAGLNVLRIINEPTAAAIAYGLDKKVGAERNVLIFDLGGGTFDVSILTIEDGIFEVKSTAGDTHLGGEDFDNRMVNHFIAEFKRKHKKDISENKRAVRRLRTACERAKRTLSSSTQASIEIDSLYEGIDFYTSITRARFEELNADLFRGTLDPVEKALRDAKLDKSQIHDIVLVGGSTRIPKIQKLLQDFFNGKELNKSINPDEAVAYGAAVQAAILSGDKSENVQDLLLLDVTPLSLGIETAGGVMTVLIKRNTTIPTKQTQTFTTYSDNQPGVLIQVYEGERAMTKDNNLLGKFELTGIPPAPRGVPQIEVTFDIDANGILNVSAVDKSTGKENKITITNDKGRLSKEDIERMVQEAEKYKAEDEKQRDKVSSKNSLESYAFNMKATVEDEKLQGKINDEDKQKILDKCNEIINWLDKNQTAEKEEFEHQQKELEKVCNPIITKLYQSAGGMPGGMPGGFPGGGAPPSGGASSGPTIEEVD

SEQ ID NO: 37368 - protein, 493 aa, Homo sapiens
  Payload ID: 7422
  Gene Symbol: HSPA8
  Gene Name: heat shock 70kDa protein 8
  Uniprot ID: P11142
  ENSP ID: ENSP00000404372
MSKGPAVGIDLGTTYSCVGVFQHGKVEIIANDQGNRTTPSYVAFTDTERLIGDAAKNQVAMNPTNTVFDAKRLIGRRFDDAVVQSDMKHWPFMVVNDAGRPKVQVEYKGETKSFYPEEVSSMVLTKMKEIAEAYLGKTVTNAVVTVPAYFNDSQRQATKDAGTIAGLNVLRIINEPTAAAIAYGLDKKVGAERNVLIFDLGGGTFDVSILTIEDGIFEVKSTAGDTHLGGEDFDNRMVNHFIAEFKRKHKKDISENKRAVRRLRTACERAKRTLSSSTQASIEIDSLYEGIDFYTSITRARFEELNADLFRGTLDPVEKALRDAKLDKSQIHDIVLVGGSTRIPKIQKLLQDFFNGKELNKSINPDEAVAYGAAVQAAILSGDKSENVQDLLLLDVTPLSLGIETAGGVMTVLIKRNTTIPTKQTQTFTTYSDNQPGVLIQVYEGERAMTKDNNLLGKFELTGMPGGMPGGFPGGGAPPSGGASSGPTIEEVD

SEQ ID NO: 37369 - protein, 183 aa, Homo sapiens
  Payload ID: 7422
  Gene Symbol: HSPA8
  Gene Name: heat shock 70kDa protein 8
  ENSP ID: ENSP00000431641
MSKGPAVGIDLGTTYSCVGVFQHGKVEIIANDQGNRTTPSYVAFTDTERLIGDAAKNQVAMNPTNTVFDAKRLIGRRFDDAVVQSDMKHWPFMVVNDAGRPKVQVEYKGETKSFYPEEVSSMVLTKMKEIAEAYLGKTVTNAVVTVPAYFNDSQRQATKDAGTIAGLNVLRIINEPTAAAIAY

SEQ ID NO: 37370 - protein, 646 aa, Homo sapiens; identical to SEQ ID NO: 37367
  Payload ID: 7422
  Gene Symbol: HSPA8
  Gene Name: heat shock 70kDa protein 8
  Uniprot ID: P11142
  ENSP ID: ENSP00000432083

SEQ ID NO: 37371 - protein, 312 aa, Homo sapiens
  Payload ID: 7422
  Gene Symbol: HSPA8
  Gene Name: heat shock 70kDa protein 8
  ENSP ID: ENSP00000432884
MNPTNTVFDAKRLIGRRFDDAVVQSDMKHWPFMVVNDAGRPKVQVEYKGETKSFYPEEVSSMVLTKMKEIAEAYLGKTVTNAVVTVPAYFNDSQRQATKDAGTIAGLNVLRIINEPTAAAIAYGLDKKVGAERNVLIFDLGGGTFDVSILTIEDGIFEVKSTAGDTHLGGEDFDNRMVNHFIAEFKRKHKKDISENKRAVRRLRTACERAKRTLSSSTQASIEIDSLYEGIDFYTSITRARFEELNADLFRGTLDPVEKALRDAKLDKSQIHDIVLVGGSTRIPKIQKLLQDFFNGKELNKSINPDEAVAYG

SEQ ID NO: 37372 - protein, 410 aa, Homo sapiens
  Payload ID: 7422
  Gene Symbol: HSPA8
  Gene Name: heat shock 70kDa protein 8
  ENSP ID: ENSP00000433316
MVNHFIAEFKRKHKKDISENKRAVRRLRTACERAKRTLSSSTQASIEIDSLYEGIDFYTSITRARFEELNADLFRGTLDPVEKALRDAKLDKSQIHDIVLVGGSTRIPKIQKLLQDFFNGKELNKSINPDEAVAYGAAVQAAILSGDKSENVQDLLLLDVTPLSLGIETAGGVMTVLIKRNTTIPTKQTQTFTTYSDNQPGVLIQVYEGERAMTKDNNLLGKFELTGIPPAPRGVPQIEVTFDIDANGILNVSAVDKSTGKENKITITNDKGRLSKEDIERMVQEAEKYKAEDEKQRDKVSSKNSLESYAFNMKATVEDEKLQGKINDEDKQKILDKCNEIINWLDKNQTAEKEEFEHQQKELEKVCNPIITKLYQSAGGMPGGMPGGFPGGGAPPSGGASSGPTIEEVD

SEQ ID NO: 37373 - protein, 627 aa, Homo sapiens
  Payload ID: 7422
  Gene Symbol: HSPA8
  Gene Name: heat shock 70kDa protein 8
  ENSP ID: ENSP00000433584
MSKGPAVGIDLGTTYSCVGVFQHGKVEIIANDQGNRTTPSYVAFTDTERLIGDAAKNQVAMNPTNTVFDAKRLIGRRFDDAVVQSDMKHWPFMVVNDAGRPKVQVEYKGETKSFYPEEVSSMVLTKMKEIAEAYLGKATKDAGTIAGLNVLRIINEPTAAAIAYGLDKKVGAERNVLIFDLGGGTFDVSILTIEDGIFEVKSTAGDTHLGGEDFDNRMVNHFIAEFKRKHKKDISENKRAVRRLRTACERAKRTLSSSTQASIEIDSLYEGIDFYTSITRARFEELNADLFRGTLDPVEKALRDAKLDKSQIHDIVLVGGSTRIPKIQKLLQDFFNGKELNKSINPDEAVAYGAAVQAAILSGDKSENVQDLLLLDVTPLSLGIETAGGVMTVLIKRNTTIPTKQTQTFTTYSDNQPGVLIQVYEGERAMTKDNNLLGKFELTGIPPAPRGVPQIEVTFDIDANGILNVSAVDKSTGKENKITITNDKGRLSKEDIERMVQEAEKYKAEDEKQRDKVSSKNSLESYAFNMKATVEDEKLQGKINDEDKQKILDKCNEIINWLDKNQTAEKEEFEHQQKELEKVCNPIITKLYQSAGGMPGGMPGGFPGGGAPPSGGASSGPTIEEVD

SEQ ID NO: 37374 - protein, 171 aa, Homo sapiens
  Payload ID: 7422
  Gene Symbol: HSPA8
  Gene Name: heat shock 70kDa protein 8
  ENSP ID: ENSP00000434415
MSKGPAVGIDLGTTYSCVGVFQHGKVEIIANDQGNRTTPSYVAFTDTERLIGDAAKNQVAMNPTNTVFDAKRLIGRRFDDAVVQSDMKHWPFMVVNDAGRPKVQVEYKGETKSFYPEEVSSMVLTKMKEIAEAYLGKTVTNAVVTVPAYFNDSQRQATKDAGTIAGLNVLR

SEQ ID NO: 37375 - protein, 137 aa, Homo sapiens
  Payload ID: 7422
  Gene Symbol: HSPA8
  Gene Name: heat shock 70kDa protein 8
  ENSP ID: ENSP00000434565
MSKGPAVGIDLGTTYSCVGVFQHGKVEIIANDQGNRTTPSYVAFTDTERLIGDAAKNQVAMNPTNTVFDAKRLIGRRFDDAVVQSDMKHWPFMVVNDAGRPKVQVEYKGETKSFYPEEVSSMVLTKMKEIAEAYLGK

SEQ ID NO: 37376 - protein, 132 aa, Homo sapiens
  Payload ID: 7422
  Gene Symbol: HSPA8
  Gene Name: heat shock 70kDa protein 8
  ENSP ID: ENSP00000434851
MSKGPAVGIDLGTTYSCVGVFQHGKVEIIANDQGNRTTPSYVAFTDTERLIGDAAKNQVAMNPTNTVFDAKRLIGRRFDDAVVQSDMKHWPFMVVNDAGRPKVQVEYKGETKSFYPEEVSSMVLTKMKEIAE

SEQ ID NO: 37377 - protein, 150 aa, Homo sapiens
  Payload ID: 7422
  Gene Symbol: HSPA8
  Gene Name: heat shock 70kDa protein 8
  ENSP ID: ENSP00000435019
MTKDNNLLGKFELTGIPPAPRGVPQIEVTFDIDANGILNVSAVDKSTGKENKITITNDKGRLSKEDIERMVQEAEKYKAEDEKQRDKVSSKNSLESYAFNMKATVEDEKLQGKINDEDKQKILDKCNEIINWLDKNQTAEKEEFEHQQKE

SEQ ID NO: 37378 - protein, 187 aa, Homo sapiens
  Payload ID: 7422
  Gene Symbol: HSPA8
  Gene Name: heat shock 70kDa protein 8
  ENSP ID: ENSP00000435154
MSKGPAVGIDLGTTYSCVGVFQHGKVEIIANDQGNRTTPSYVAFTDTERLIGDAAKNQVAMNPTNTVFDAKRLIGRRFDDAVVQSDMKHWPFMVVNDAGRPKVQVEYKGETKSFYPEEVSSMVLTKMKEIAEAYLGKTVTNAVVTVPAYFNDSQRQATKDAGTIAGLNVLRIINEPTAAAIAYGLDK

SEQ ID NO: 37379 - protein, 223 aa, Homo sapiens
  Payload ID: 7422
  Gene Symbol: HSPA8
  Gene Name: heat shock 70kDa protein 8
  ENSP ID: ENSP00000435908
MTVLIKRNTTIPTKQTQTFTTYSDNQPGVLIQVYEGERAMTKDNNLLGKFELTGIPPAPRGVPQIEVTFDIDANGILNVSAVDKSTGKENKITITNDKGRLSKEDIERMVQEAEKYKAEDEKQRDKVSSKNSLESYAFNMKATVEDEKLQGKINDEDKQKILDKCNEIINWLDKNQTAEKEEFEHQQKELEKVCNPIITKLYQSAGGMPGGMPGGFPGGGAPP

SEQ ID NO: 37380 - protein, 178 aa, Homo sapiens
  Payload ID: 7422
  Gene Symbol: HSPA8
  Gene Name: heat shock 70kDa protein 8
  ENSP ID: ENSP00000436183
MSKGPAVGIDLGTTYSCVGVFQHGKVEIIANDQGNRTTPSYVAFTDTERLIGDAAKNQVAMNPTNTVFDAKRLIGRRFDDAVVQSDMKHWPFMVVNDAGRPKVQVEYKGETKSFYPEEVSSMVLTKMKEIAEAYLGKTVTNAVVTVPAYFNDSQRQATKDAGTIAGLNVLRIINEPTA

SEQ ID NO: 37381 - protein, 168 aa, Homo sapiens
  Payload ID: 7422
  Gene Symbol: HSPA8
  Gene Name: heat shock 70kDa protein 8
  ENSP ID: ENSP00000436762
MSKGPAVGIDLGTTYSCVGVFQHGKVEIIANDQGNRTTPSYVAFTDTERLIGDAAKNQVAMNPTNTVFETKSFYPEEVSSMVLTKMKEIAEAYLGKTVTNAVVTVPAYFNDSQRQATKDAGTIAGLNVLRIINEPTAAAIAYGLDKKVGAERNVLIFDLGGGTFDVSI

SEQ ID NO: 37382 - protein, 646 aa, Homo sapiens; identical to SEQ ID NO: 37367
  Payload ID: 7422
  Gene Symbol: HSPA8
  Gene Name: heat shock 70kDa protein 8
  Uniprot ID: P11142
  ENSP ID: ENSP00000437125

SEQ ID NO: 37383 - protein, 500 aa, Homo sapiens
  Payload ID: 7422
  Gene Symbol: HSPA8
  Gene Name: heat shock 70kDa protein 8
  ENSP ID: ENSP00000437189
MSKGPAVGIDLGTTYSCVGVFQHGKVEIIANDQGNRTTPSYVAFTDTERLIGDAAKNQVAMNPTNTVFDAKRLIGRRFDDAVVQSDMKHWPFMVVNDAGRPKHKKDISENKRAVRRLRTACERAKRTLSSSTQASIEIDSLYEGIDFYTSITRARFEELNADLFRGTLDPVEKALRDAKLDKSQIHDIVLVGGSTRIPKIQKLLQDFFNGKELNKSINPDEAVAYGAAVQAAILSGDKSENVQDLLLLDVTPLSLGIETAGGVMTVLIKRNTTIPTKQTQTFTTYSDNQPGVLIQVYEGERAMTKDNNLLGKFELTGIPPAPRGVPQIEVTFDIDANGILNVSAVDKSTGKENKITITNDKGRLSKEDIERMVQEAEKYKAEDEKQRDKVSSKNSLESYAFNMKATVEDEKLQGKINDEDKQKILDKCNEIINWLDKNQTAEKEEFEHQQKELEKVCNPIITKLYQSAGGMPGGMPGGFPGGGAPPSGGASSGPTIEEVD

SEQ ID NO: 37384 - protein, 679 aa, Homo sapiens
  Payload ID: 7423
  Gene Symbol: HSPA9
  Gene Name: heat shock 70kDa protein 9 (mortalin)
  Uniprot ID: P38646
  ENSP ID: ENSP00000297185
MISASRAAAARLVGAAASRGPTAARHQDSWNGLSHEAFRLVSRRDYASEAIKGAVVGIDLGTTNSCVAVMEGKQAKVLENAEGARTTPSVVAFTADGERLVGMPAKRQAVTNPNNTFYATKRLIGRRYDDPEVQKDIKNVPFKIVRASNGDAWVEAHGKLYSPSQIGAFVLMKMKETAENYLGHTAKNAVITVPAYFNDSQRQATKDAGQISGLNVLRVINEPTAAALAYGLDKSEDKVIAVYDLGGGTFDISILEIQKGVFEVKSTNGDTFLGGEDFDQALLRHIVKEFKRETGVDLTKDNMALQRVREAAEKAKCELSSSVQTDINLPYLTMDSSGPKHLNMKLTRAQFEGIVTDLIRRTIAPCQKAMQDAEVSKSDIGEVILVGGMTRMPKVQQTVQDLFGRAPSKAVNPDEAVAIGAAIQGGVLAGDVTDVLLLDVTPLSLGIETLGGVFTKLINRNTTIPTKKSQVFSTAADGQTQVEIKVCQGEREMAGDNKLLGQFTLIGIPPAPRGVPQIEVTFDIDANGIVHVSAKDKGTGREQQIVIQSSGGLSKDDIENMVKNAEKYAEEDRRKKERVEAVNMAEGIIHDTETKMEEFKDQLPADECNKLKEEISKMRELLARKDSETGENIRQAASSLQQASLKLFEMAYKKMASEREGSGSSGTGEQKEDQKEEKQ

SEQ ID NO: 37385 - protein, 38 aa, Homo sapiens
  Payload ID: 7423
  Gene Symbol: HSPA9
  Gene Name: heat shock 70kDa protein 9 (mortalin)
  ENSP ID: ENSP00000420944
MISASRAAAARLVGAAASRGPTAARHQIRSNQGSSCWY

SEQ ID NO: 37386 - protein, 100 aa, Homo sapiens
  Payload ID: 7423
  Gene Symbol: HSPA9
  Gene Name: heat shock 70kDa protein 9 (mortalin)
  ENSP ID: ENSP00000421311
  MOD_RES (1)..(1): Any amino acid
XVLLHLSAMISASRAAAARLVGAAASRGPTAARHQDSWNGLSHEAFRLVSRRDYASEAIKGAVVGIDLGTTNSCVAVMEGAGECRRCQNHPFSCGLYSRW

SEQ ID NO: 37387 - protein, 102 aa, Homo sapiens
  Payload ID: 7423
  Gene Symbol: HSPA9
  Gene Name: heat shock 70kDa protein 9 (mortalin)
  ENSP ID: ENSP00000421892
  MOD_RES (1)..(1): Any amino acid
XTQVEIKVCQGEREMAGDNKLLGQFTLIGIPPAPRGVPQIEVTFDIDANGIVHVSAKDKGTGREQQIVIQSSGGLSKDDIENMVKNAEKYAEEDRRKKRFPK

SEQ ID NO: 37388 - protein, 62 aa, Homo sapiens
  Payload ID: 7423
  Gene Symbol: HSPA9
  Gene Name: heat shock 70kDa protein 9 (mortalin)
  ENSP ID: ENSP00000423098
MEGKQAKVLENAEGARTTPSVVAFTADGERLVGMPAKRQAVTNPNNTFYATKRLIGRRYDDP

SEQ ID NO: 37389 - protein, 42 aa, Homo sapiens
  Payload ID: 7423
  Gene Symbol: HSPA9
  Gene Name: heat shock 70kDa protein 9 (mortalin)
  ENSP ID: ENSP00000423759
MISASRAAAARLVGAAASRGPTAARHQDTHWLVTESVFSFLG

SEQ ID NO: 37390 - protein, 95 aa, Homo sapiens
  Payload ID: 7423
  Gene Symbol: HSPA9
  Gene Name: heat shock 70kDa protein 9 (mortalin)
  ENSP ID: ENSP00000425598
MEGKQAKVLENAEGARTTPSVVAFTADGERLVGMPAKRQAVTNPNNTFYATKRLIGRRYDDPEVQKDIKNVPFKIVRASNGDAWVEAHGKLYSPS

SEQ ID NO: 37391 - protein, 163 aa, Homo sapiens
  Payload ID: 7423
  Gene Symbol: HSPA9
  Gene Name: heat shock 70kDa protein 9 (mortalin)
  ENSP ID: ENSP00000429475
  MOD_RES (1)..(1): Any amino acid
XDLTKDNMALQRVREAAEKAKCELSSSVQTDINLPYLTMDSSGPKHLNMKLTRAQFEGIVTDLIRRTIAPCQKAMQDAEVSKSDIGEVILVGGMTRMPKEICKKKKNEPGKKRSWTRWMPHILRNPRGRVQWLTPVIPALWEAKAGGSRGSADCTGSFWQSPK

SEQ ID NO: 37392 - protein, 76 aa, Homo sapiens
  Payload ID: 7424
  Gene Symbol: HSBP1
  Gene Name: heat shock factor binding protein 1
  Uniprot ID: O75506
  ENSP ID: ENSP00000392896
MAETDPKTVQDLTSVVQTLLQQMQDKFQTMSDQIIGRIDDMSSRIDDLEKNIADLMTQAGVEELESENKIPATQKS

SEQ ID NO: 37393 - protein, 66 aa, Homo sapiens
  Payload ID: 7424
  Gene Symbol: HSBP1
  Gene Name: heat shock factor binding protein 1
  ENSP ID: ENSP00000456049
MAETDPKTVQDLTSVVRDGCEGRRPRPSRAAPGQALLDRGAPTAAARGVCRGPVSGSVSGRGSRPP

SEQ ID NO: 37394 - protein, 76 aa, Homo sapiens; identical to SEQ ID NO: 37392
  Payload ID: 7424
  Gene Symbol: HSBP1
  Gene Name: heat shock factor binding protein 1
  Uniprot ID: O75506
  ENSP ID: ENSP00000458007

SEQ ID NO: 37395 - protein, 74 aa, Homo sapiens
  Payload ID: 7425
  Gene Symbol: HSBP1L1
  Gene Name: heat shock factor binding protein 1-like 1
  Uniprot ID: C9JCN9
  ENSP ID: ENSP00000414236
MDVRGPEAPGGRALRDAAENLFQELQEHFQALTATLNLRMEEMGNRIEDLQKNVKDLMVQAGIENSIKEQMLKT

SEQ ID NO: 37396 - protein, 45 aa, Homo sapiens
  Payload ID: 7425
  Gene Symbol: HSBP1L1
  Gene Name: heat shock factor binding protein 1-like 1
  ENSP ID: ENSP00000467108
MDVRGPEAPGGRALRDAAENLFQELQEHFQALTATLNLRNILFYL

SEQ ID NO: 37397 - protein, 471 aa, Homo sapiens
  Payload ID: 7426
  Gene Symbol: HSPA13
  Gene Name: heat shock protein 70kDa family, member 13
  Uniprot ID: P48723
  ENSP ID: ENSP00000285667
MAREMTILGSAVLTLLLAGYLAQQYLPLPTPKVIGIDLGTTYCSVGVFFPGTGKVKVIPDENGHISIPSMVSFTDNDVYVGYESVELADSNPQNTIYDAKRFIGKIFTAEELEAEIGRYPFKVLNKNGMVEFSVTSNETITVSPEYVGSRLLLKLKEMAEAYLGMPVANAVISVPAEFDLKQRNSTIEAANLAGLKILRVINEPTAAAMAYGLHKADVFHVLVIDLGGGTLDVSLLNKQGGMFLTRAMSGNNKLGGQDFNQRLLQYLYKQIYQTYGFVPSRKEEIHRLRQAVEMVKLNLTLHQSAQLSVLLTVEEQDRKEPHSSDTELPKDKLSSADDHRVNSGFGRGLSDKKSGESQVLFETEISRKLFDTLNEDLFQKILVPIQQVLKEGHLEKTEIDEVVLVGGSTRIPRIRQVIQEFFGKDPNTSVDPDLAVVTGVAIQAGIDGGSWPLQVSALEIPNKHLQKTNFN

SEQ ID NO: 37398 - protein, 732 aa, Homo sapiens
  Payload ID: 7427
  Gene Symbol: HSP90AA1
  Gene Name: heat shock protein 90kDa alpha (cytosolic), class A member 1
  Uniprot ID: P07900
  ENSP ID: ENSP00000216281
MPEETQTQDQPMEEEEVETFAFQAEIAQLMSLIINTFYSNKEIFLRELISNSSDALDKIRYESLTDPSKLDSGKELHINLIPNKQDRTLTIVDTGIGMTKADLINNLGTIAKSGTKAFMEALQAGADISMIGQFGVGFYSAYLVAEKVTVITKHNDDEQYAWESSAGGSFTVRTDTGEPMGRGTKVILHLKEDQTEYLEERRIKEIVKKHSQFIGYPITLFVEKERDKEVSDDEAEEKEDKEEEKEKEEKESEDKPEIEDVGSDEEEEKKDGDKKKKKKIKEKYIDQEELNKTKPIWTRNPDDITNEEYGEFYKSLTNDWEDHLAVKHFSVEGQLEFRALLFVPRRAPFDLFENRKKKNNIKLYVRRVFIMDNCEELIPEYLNFIRGVVDSEDLPLNISREMLQQSKILKVIRKNLVKKCLELFTELAEDKENYKKFYEQFSKNIKLGIHEDSQNRKKLSELLRYYTSASGDEMVSLKDYCTRMKENQKHIYYITGETKDQVANSAFVERLRKHGLEVIYMIEPIDEYCVQQLKEFEGKTLVSVTKEGLELPEDEEEKKKQEEKKTKFENLCKIMKDILEKKVEKVVVSNRLVTSPCCIVTSTYGWTANMERIMKAQALRDNSTMGYMAAKKHLEINPDHSIIETLRQKAEADKNDKSVKDLVILLYETALLSSGFSLEDPQTHANRIYRMIKLGLGIDEDDPTADDTSAAVTEEMPPLEGDDDTSRMEEVD

SEQ ID NO: 37399 - protein, 854 aa, Homo sapiens
  Payload ID: 7427
  Gene Symbol: HSP90AA1
  Gene Name: heat shock protein 90kDa alpha (cytosolic), class A member 1
  Uniprot ID: P07900
  ENSP ID: ENSP00000335153
MPPCSGGDGSTPPGPSLRDRDCPAQSAEYPRDRLDPRPGSPSEASSPPFLRSRAPVNWYQEKAQVFLWHLMVSGSTTLLCLWKQPFHVSAFPVTASLAFRQSQGAGQHLYKDLQPFILLRLLMPEETQTQDQPMEEEEVETFAFQAEIAQLMSLIINTFYSNKEIFLRELISNSSDALDKIRYESLTDPSKLDSGKELHINLIPNKQDRTLTIVDTGIGMTKADLINNLGTIAKSGTKAFMEALQAGADISMIGQFGVGFYSAYLVAEKVTVITKHNDDEQYAWESSAGGSFTVRTDTGEPMGRGTKVILHLKEDQTEYLEERRIKEIVKKHSQFIGYPITLFVEKERDKEVSDDEAEEKEDKEEEKEKEEKESEDKPEIEDVGSDEEEEKKDGDKKKKKKIKEKYIDQEELNKTKPIWTRNPDDITNEEYGEFYKSLTNDWEDHLAVKHFSVEGQLEFRALLFVPRRAPFDLFENRKKKNNIKLYVRRVFIMDNCEELIPEYLNFIRGVVDSEDLPLNISREMLQQSKILKVIRKNLVKKCLELFTELAEDKENYKKFYEQFSKNIKLGIHEDSQNRKKLSELLRYYTSASGDEMVSLKDYCTRMKENQKHIYYITGETKDQVANSAFVERLRKHGLEVIYMIEPIDEYCVQQLKEFEGKTLVSVTKEGLELPEDEEEKKKQEEKKTKFENLCKIMKDILEKKVEKVVVSNRLVTSPCCIVTSTYGWTANMERIMKAQALRDNSTMGYMAAKKHLEINPDHSIIETLRQKAEADKNDKSVKDLVILLYETALLSSGFSLEDPQTHANRIYRMIKLGLGIDEDDPTADDTSAAVTEEMPPLEGDDDTSRMEEVD

SEQ ID NO: 37400 - protein, 174 aa, Homo sapiens
  Payload ID: 7427
  Gene Symbol: HSP90AA1
  Gene Name: heat shock protein 90kDa alpha (cytosolic), class A member 1
  ENSP ID: ENSP00000450712
MPEETQTQDQPMEEEEVETFAFQAEIAQLMSLIINTFYSNKEIFLRELISNSSDALDKIRYESLTDPSKLDSGKELHINLIPNKQDRTLTIVDTGIGMTKADLINNLGEPMGRGTKVILHLKEDQTEYLEERRIKEIVKKHSQFIGYPITLFVEKERDKEVSDDEAEEKEDKEE

SEQ ID NO: 37401 - protein, 52 aa, Homo sapiens
  Payload ID: 7427
  Gene Symbol: HSP90AA1
  Gene Name: heat shock protein 90kDa alpha (cytosolic), class A member 1
  ENSP ID: ENSP00000451400
  MOD_RES (1)..(1): Any amino acid
XVETFAFQAEIAQLMSLIINTFYSNKEIFLRELISNSSDVNLWVVEQKLSYT

SEQ ID NO: 37402 - protein, 80 aa, Homo sapiens
  Payload ID: 7427
  Gene Symbol: HSP90AA1
  Gene Name: heat shock protein 90kDa alpha (cytosolic), class A member 1
  ENSP ID: ENSP00000452241
MPPCSGGDGSTPPGPSLRDRDCPAQSAEYPRDRLDPRPGSPSEASSPPFLRRCLRKPRPKTNRWRRRRLRRSPFRQKLPS

SEQ ID NO: 37403 - protein, 100 aa, Homo sapiens
  Payload ID: 7427
  Gene Symbol: HSP90AA1
  Gene Name: heat shock protein 90kDa alpha (cytosolic), class A member 1
  ENSP ID: ENSP00000489370
MPPCSGGDGSTPPGPSLRDRDCPAQSAEYPRDRLDPRPGSPSEASSPPFLRRAPVNWYQEKAQVFLWHLMVSGSTTLLCLWKQPFHVSAFPVTASLAFRQ

SEQ ID NO: 37404 - protein, 724 aa, Homo sapiens
  Payload ID: 7428
  Gene Symbol: HSP90AB1
  Gene Name: heat shock protein 90kDa alpha (cytosolic), class B member 1
  Uniprot ID: P08238
  ENSP ID: ENSP00000325875
MPEEVHHGEEEVETFAFQAEIAQLMSLIINTFYSNKEIFLRELISNASDALDKIRYESLTDPSKLDSGKELKIDIIPNPQERTLTLVDTGIGMTKADLINNLGTIAKSGTKAFMEALQAGADISMIGQFGVGFYSAYLVAEKVVVITKHNDDEQYAWESSAGGSFTVRADHGEPIGRGTKVILHLKEDQTEYLEERRVKEVVKKHSQFIGYPITLYLEKEREKEISDDEAEEEKGEKEEEDKDDEEKPKIEDVGSDEEDDSGKDKKKKTKKIKEKYIDQEELNKTKPIWTRNPDDITQEEYGEFYKSLTNDWEDHLAVKHFSVEGQLEFRALLFIPRRAPFDLFENKKKKNNIKLYVRRVFIMDSCDELIPEYLNFIRGVVDSEDLPLNISREMLQQSKILKVIRKNIVKKCLELFSELAEDKENYKKFYEAFSKNLKLGIHEDSTNRRRLSELLRYHTSQSGDEMTSLSEYVSRMKETQKSIYYITGESKEQVANSAFVERVRKRGFEVVYMTEPIDEYCVQQLKEFDGKSLVSVTKEGLELPEDEEEKKKMEESKAKFENLCKLMKEILDKKVEKVTISNRLVSSPCCIVTSTYGWTANMERIMKAQALRDNSTMGYMMAKKHLEINPDHPIVETLRQKAEADKNDKAVKDLVVLLFETALLSSGFSLEDPQTHSNRIYRMIKLGLGIDEDEVAAEEPNAAVPDEIPPLEGDEDASRMEEVD

SEQ ID NO: 37405 - protein, 724 aa, Homo sapiens; identical to SEQ ID NO: 37404
  Payload ID: 7428
  Gene Symbol: HSP90AB1
  Gene Name: heat shock protein 90kDa alpha (cytosolic), class B member 1
  Uniprot ID: P08238
  ENSP ID: ENSP00000360609

SEQ ID NO: 37406 - protein, 724 aa, Homo sapiens; identical to SEQ ID NO: 37404
  Payload ID: 7428
  Gene Symbol: HSP90AB1
  Gene Name: heat shock protein 90kDa alpha (cytosolic), class B member 1
  Uniprot ID: P08238
  ENSP ID: ENSP00000360709

SEQ ID NO: 37407 - protein, 724 aa, Homo sapiens; identical to SEQ ID NO: 37404
  Payload ID: 7428
  Gene Symbol: HSP90AB1
  Gene Name: heat shock protein 90kDa alpha (cytosolic), class B member 1
  Uniprot ID: P08238
  ENSP ID: ENSP00000481908

SEQ ID NO: 37408 - protein, 803 aa, Homo sapiens
  Payload ID: 7429
  Gene Symbol: HSP90B1
  Gene Name: heat shock protein 90kDa beta (Grp94), member 1
  Uniprot ID: P14625
  ENSP ID: ENSP00000299767
MRALWVLGLCCVLLTFGSVRADDEVDVDGTVEEDLGKSREGSRTDDEVVQREEEAIQLDGLNASQIRELREKSEKFAFQAEVNRMMKLIINSLYKNKEIFLRELISNASDALDKIRLISLTDENALSGNEELTVKIKCDKEKNLLHVTDTGVGMTREELVKNLGTIAKSGTSEFLNKMTEAQEDGQSTSELIGQFGVGFYSAFLVADKVIVTSKHNNDTQHIWESDSNEFSVIADPRGNTLGRGTTITLVLKEEASDYLELDTIKNLVKKYSQFINFPIYVWSSKTETVEEPMEEEEAAKEEKEESDDEAAVEEEEEEKKPKTKKVEKTVWDWELMNDIKPIWQRPSKEVEEDEYKAFYKSFSKESDDPMAYIHFTAEGEVTFKSILFVPTSAPRGLFDEYGSKKSDYIKLYVRRVFITDDFHDMMPKYLNFVKGVVDSDDLPLNVSRETLQQHKLLKVIRKKLVRKTLDMIKKIADDKYNDTFWKEFGTNIKLGVIEDHSNRTRLAKLLRFQSSHHPTDITSLDQYVERMKEKQDKIYFMAGSSRKEAESSPFVERLLKKGYEVIYLTEPVDEYCIQALPEFDGKRFQNVAKEGVKFDESEKTKESREAVEKEFEPLLNWMKDKALKDKIEKAVVSQRLTESPCALVASQYGWSGNMERIMKAQAYQTGKDISTNYYASQKKTFEINPRHPLIRDMLRRIKEDEDDKTVLDLAVVLFETATLRSGYLLPDTKAYGDRIERMLRLSLNIDPDAKVEEEPEEEPEETAEDTTEDTEQDEDEEMDVGTDEEEETAKESTAEKDEL

SEQ ID NO: 37409 - protein, 53 aa, Homo sapiens
  Payload ID: 7429
  Gene Symbol: HSP90B1
  Gene Name: heat shock protein 90kDa beta (Grp94), member 1
  ENSP ID: ENSP00000446266
MRALWVLGLCCVLLTFGSVRADDEVDVDGTVEEDLGKSREGSRTDDEVVQRSR

SEQ ID NO: 37410 - protein, 48 aa, Homo sapiens
  Payload ID: 7429
  Gene Symbol: HSP90B1
  Gene Name: heat shock protein 90kDa beta (Grp94), member 1
  ENSP ID: ENSP00000446748
MMKLIINSLYKNKEIFLRELISNASDALDKIRLISLTDENALSGNEEL

SEQ ID NO: 37411 - protein, 147 aa, Homo sapiens
  Payload ID: 7429
  Gene Symbol: HSP90B1
  Gene Name: heat shock protein 90kDa beta (Grp94), member 1
  ENSP ID: ENSP00000450215
  MOD_RES (1)..(1): Any amino acid
XQYGWSGNMERIMKAQAYQTGKDISTNYYASQKKTFEINPRHPLIRDMLRRIKEDEDDKTVLDLAVVLFETATLRSGYLLPDTKAYGDRIERMLRLSLNIDPDAKVEEEPEEEPEETAEDTTEDTEQDEDEEMDVGTDEEEETAKMS

SEQ ID NO: 37412 - protein, 315 aa, Homo sapiens [sequence omitted]

SEQ ID NO: 37413 - protein, 144 aa, Homo sapiens
  Payload ID: 7430
  Gene Symbol: HSPB11
  Gene Name: heat shock protein family B (small), member 11
  Uniprot ID: Q9Y547
  ENSP ID: ENSP00000194214
MRKIDLCLSSEGSEVILATSSDEKHPPENIIDGNPETFWTTTGMFPQEFIICFHKHVRIERLVIQSYFVQTLKIEKSTSKEPVDFEQWIEKDLVHTEGQLQNEEIVAHDGSATYLRFIIVSAFDHFASVHSVSAEGTVVSNLSS

SEQ ID NO: 37414 - protein, 74 aa, Homo sapiens
  Payload ID: 7430
  Gene Symbol: HSPB11
  Gene Name: heat shock protein family B (small), member 11
  ENSP ID: ENSP00000360427
MRKIDLCLSSEGSEVILATSSDEKHPPENIIDGNPETFWTTTGMFPQEFIICFHKHVRIERLVIQSYFGKQILH

SEQ ID NO: 37415 - protein, 112 aa, Homo sapiens
  Payload ID: 7430
  Gene Symbol: HSPB11
  Gene Name: heat shock protein family B (small), member 11
  ENSP ID: ENSP00000360428
MRKIDLCLSSEGSEVILATSSDEKHPPENIIDGNPETFWTTTGMFPQEFIICFHKHVRIERLVIQSYFVQTLKIEKSTSKEPVDFEQWIEKDLVHTEGQLQNEEIVVSEYTL

SEQ ID NO: 37416 - protein, 214 aa, Homo sapiens
  Payload ID: 7430
  Gene Symbol: HSPB11
  Gene Name: heat shock protein family B (small), member 11
  ENSP ID: ENSP00000360429
MRKIDLCLSSEGSEVILATSSDEKHPPENIIDGNPETFWTTTGMFPQEFIICFHKHVRIERLVIQSYFVQTLKIEKSTSKEPVDFEQWIEKDLVHTEGQLQNEEIVAGVGWRYLGSLQPPSPGFKRFSCLSLPRSWDYRHLPPHPANFFAFLVKMGFCHVGQAGLELQTSGDLPTSASQSAGITGVSHCARPGKANFKWRRVGKAFQKPPWYTR

SEQ ID NO: 37417 - protein, 160 aa, Homo sapiens
  Payload ID: 7431
  Gene Symbol: HSPB6
  Gene Name: heat shock protein, alpha-crystallin-related, B6
  Uniprot ID: O14558
  ENSP ID: ENSP00000004982
MEIPVPVQPSWLRRASAPLPGLSAPGRLFDQRFGEGLLEAELAALCPTTLAPYYLRAPSVALPVAQVPTDPGHFSVLLDVKHFSPEEIAVKVVGEHVEVHARHEERPDEHGFVAREFHRRYRLPPGVDPAAVTSALSPEGVLSIQAAPASAQAPPPAAAK

SEQ ID NO: 37418 - protein, 137 aa, Homo sapiens
  Payload ID: 7431
  Gene Symbol: HSPB6
  Gene Name: heat shock protein, alpha-crystallin-related, B6
  ENSP ID: ENSP00000467169
MEIPVPVQPSWLRRASAPLPGLSAPGRLFDQRFGEGLLEAELAALCPTTLAPYYLRAPSVALPVAQVPTDPGHFSVLLDVKHFSPEEIAVKVVGEHVEVHARHEERPVSRGVGRGWSGYARRRAGGAGPLKPPSPPG

SEQ ID NO: 37419 - protein, 160 aa, Homo sapiens; identical to SEQ ID NO: 37417
  Payload ID: 7431
  Gene Symbol: HSPB6
  Gene Name: heat shock protein, alpha-crystallin-related, B6
  Uniprot ID: O14558
  ENSP ID: ENSP00000468057

SEQ ID NO: 37420 - protein, 159 aa, Homo sapiens
  Payload ID: 7432
  Gene Symbol: HSPB9
  Gene Name: heat shock protein, alpha-crystallin-related, B9
  Uniprot ID: Q9BQS6
  ENSP ID: ENSP00000458018
MQRVGNTFSNESRVASRCPSVGLAERNRVATMPVRLLRDSPAAQEDNDHARDGFQMKLDAHGFAPEELVVQVDGQWLMVTGQQQLDVRDPERVSYRMSQKVHRKMLPSNLSPTAMTCCLTPSGQLWVRGQCVALALPEAQTGPSPRLGSLGSKASNLTR

SEQ ID NO: 37421 - protein, 495 aa, Homo sapiens
  Payload ID: 7433
  Gene Symbol: HSF1
  Gene Name: heat shock transcription factor 1
  ENSP ID: ENSP00000383590
MDLPVGPGAAGPSNVPAFLTKLWTLVSDPDTDALICWSPSGNSFHVFDQGQFAKEVLPKYFKHNNMASFVRQLNMYGFRKVVHIEQGGLVKPERDDTEFQHPCFLRGQEQLLENIKRKVTSVSTLKSEDIKIRQDSVTKLLTDVQLMKGKQECMDSKLLAMKHENEALWREVASLRQKHAQQQKVVNKLIQFLISLVQSNRILGVKRKIPLMLNDSGSAHSMPKYSRQFSLEHVHGSGPYSAPSPAYSSSSLYAPDAVASSGPIISDITELAPASPMASPGGSIDERPLSSSPLVRVKEEPPSPPQSPRVEEASPGRPSSVDTLLSPTALIDSILRESEPAPASVTALTDARGHTDTEGRPPSPPPTSTPEKCLSVACLDNLARTPQMSRVARLFPCPSSSPHGQVQPGNELSDHLDAMDSNLDNLQTMLSSHGFSVDTSALLDIQELLSPQEPPRPPEAENSSPDSAGALHSAAAVPAGPRLRGHREQRPAGAV

SEQ ID NO: 37422 - protein, 529 aa, Homo sapiens
  Payload ID: 7433
  Gene Symbol: HSF1
  Gene Name: heat shock transcription factor 1
  Uniprot ID: Q00613
  ENSP ID: ENSP00000431512
MDLPVGPGAAGPSNVPAFLTKLWTLVSDPDTDALICWSPSGNSFHVFDQGQFAKEVLPKYFKHNNMASFVRQLNMYGFRKVVHIEQGGLVKPERDDTEFQHPCFLRGQEQLLENIKRKVTSVSTLKSEDIKIRQDSVTKLLTDVQLMKGKQECMDSKLLAMKHENEALWREVASLRQKHAQQQKVVNKLIQFLISLVQSNRILGVKRKIPLMLNDSGSAHSMPKYSRQFSLEHVHGSGPYSAPSPAYSSSSLYAPDAVASSGPIISDITELAPASPMASPGGSIDERPLSSSPLVRVKEEPPSPPQSPRVEEASPGRPSSVDTLLSPTALIDSILRESEPAPASVTALTDARGHTDTEGRPPSPPPTSTPEKCLSVACLDKNELSDHLDAMDSNLDNLQTMLSSHGFSVDTSALLDLFSPSVTVPDMSLPDLDSSLASIQELLSPQEPPRPPEAENSSPDSGKQLVHYTAQPLFLLDPGSVDTGSNDLPVLFELGEGSYFSEGDGFAEDPTISLLTGSEPPKAKDPTVS

SEQ ID NO: 37423 - protein, 138 aa, Homo sapiens
  Payload ID: 7433
  Gene Symbol: HSF1
  Gene Name: heat shock transcription factor 1
  ENSP ID: ENSP00000436616
MASFVRQLNMYGFRKVVHIEQGGLVKPERDDTEFQHPCFLRGQEQLLENIKRKVTSVSTLKSEDIKIRQDSVTKLLTDVQLMKGKQECMDSKLLAMKHENEALWREVASLRQKHAQQQKVVNKLIQFLISLVQSNRIL

SEQ ID NO: 37424 - protein, 47 aa, Homo sapiens
  Payload ID: 7433
  Gene Symbol: HSF1
  Gene Name: heat shock transcription factor 1
  ENSP ID: ENSP00000480423
IISDITELAPASPMASPGGSIDESPHGRQGPHGHRGPASLPPAHLHP

SEQ ID NO: 37425 - protein, 64 aa, Homo sapiens
  Payload ID: 7433
  Gene Symbol: HSF1
  Gene Name: heat shock transcription factor 1
  ENSP ID: ENSP00000481007
MDLPVGPGAAGPSNVPAFLTKLWTLVSDPDTDALICWSPLPGSRLVYMVRPCKTGQLRFAEVNQ

SEQ ID NO: 37426 - protein, 91 aa, Homo sapiens
  Payload ID: 7433
  Gene Symbol: HSF1
  Gene Name: heat shock transcription factor 1
  ENSP ID: ENSP00000484174
  MOD_RES (1)..(1): Any amino acid
XFRKVVHIEQGGLVKPERDDTEFQHPCFLRGQEQLLENIKRKVTSVSTLKSEDIKIRQDSVTKLLTDVQLMKGKQECMDSKLLAMKHSFSS

SEQ ID NO: 37427 - protein, 536 aa, Homo sapiens
  Payload ID: 7434
  Gene Symbol: HSF2
  Gene Name: heat shock transcription factor 2
  Uniprot ID: Q03933
  ENSP ID: ENSP00000357440
MKQSSNVPAFLSKLWTLVEETHTNEFITWSQNGQSFLVLDEQRFAKEILPKYFKHNNMASFVRQLNMYGFRKVVHIDSGIVKQERDGPVEFQHPYFKQGQDDLLENIKRKVSSSKPEENKIRQEDLTKIISSAQKVQIKQETIESRLSELKSENESLWKEVSELRAKHAQQQQVIRKIVQFIVTLVQNNQLVSLKRKRPLLLNTNGAQKKNLFQHIVKEPTDNHHHKVPHSRTEGLKPRERISDDIIIYDVTDDNADEENIPVIPETNEDVISDPSNCSQYPDIVIVEDDNEDEYAPVIQSGEQNEPARESLSSGSDGSSPLMSSAVQLNGSSSLTSEDPVTMMDSILNDNINLLGKVELLDYLDSIDCSLEDFQAMLSGRQFSIDPDLLVDLFTSSVQMNPTDYINNTKSENKGLETTKNNVVQPVSEEGRKSKSKPDKQLIQYTAFPLLAFLDGNPASSVEQASTTASSEVLSSVDKPIEVDELLDSSLDPEPTQSKLVRLEPLTEAEASEATLFYLCELAPAPLDSDMPLLDS

SEQ ID NO: 37428 - protein, 518 aa, Homo sapiens
  Payload ID: 7434
  Gene Symbol: HSF2
  Gene Name: heat shock transcription factor 2
  Uniprot ID: Q03933
  ENSP ID: ENSP00000400380
MKQSSNVPAFLSKLWTLVEETHTNEFITWSQNGQSFLVLDEQRFAKEILPKYFKHNNMASFVRQLNMYGFRKVVHIDSGIVKQERDGPVEFQHPYFKQGQDDLLENIKRKVSSSKPEENKIRQEDLTKIISSAQKVQIKQETIESRLSELKSENESLWKEVSELRAKHAQQQQVIRKIVQFIVTLVQNNQLVSLKRKRPLLLNTNGAQKKNLFQHIVKEPTDNHHHKVPHSRTEGLKPRERISDDIIIYDVTDDNADEENIPVIPETNEDVISDPSNCSQYPDIVIVEDDNEDEYAPVIQSGEQNEPARESLSSGSDGSSPLMSSAVQLNGSSSLTSEDPVTMMDSILNDNINLLGKVELLDYLDSIDCSLEDFQAMLSGRQFSIDPDLLVDSENKGLETTKNNVVQPVSEEGRKSKSKPDKQLIQYTAFPLLAFLDGNPASSVEQASTTASSEVLSSVDKPIEVDELLDSSLDPEPTQSKLVRLEPLTEAEASEATLFYLCELAPAPLDSDMPLLDS

SEQ ID NO: 37429 - protein, 214 aa, Homo sapiens
  Payload ID: 7434
  Gene Symbol: HSF2
  Gene Name: heat shock transcription factor 2
  ENSP ID: ENSP00000477405
HSRTEGLKPRERISDDIIIYDVTDDNADEENIPVIPETNEDVISDPSNCSQYPDIVIVEDDNEDEYAPVIQSGEQNEPARESLSSGSDGSSPLMSSAVQLNGSSSLTSEDPVTMMDSILNDNINLLGKVELLDYLDSIDCSLEDFQAMLSGRQFSIDPDLLVDSENKGLETTKNNVVQPVSEEGRKSKSKPDKQLIQYTAFPLLAFLDGNPASS

SEQ ID NO: 37430 - protein, 334 aa, Homo sapiens
  Payload ID: 7435
  Gene Symbol: HSF2BP
  Gene Name: heat shock transcription factor 2 binding protein
  Uniprot ID: O75031
  ENSP ID: ENSP00000291560
MGEAGAAEEACRHMGTKEEFVKVRKKDLERLTTEVMQIRDFLPRILNGEVLESFQKLKIVEKNLERKEQELEQLKMDCEHFKARLETVQADNIREKKEKLALRQQLNEAKQQLLQQAEYCTEMGAAACTLLWGVSSSEEVVKAILGGDKALKFFSITGQTMESFVKSLDGDVQELDSDESQFVFALAGIVTNVAAIACGREFLVNSSRVLLDTILQLLGDLKPGQCTKLKVLMLMSLYNVSINLKGLKYISESPGFIPLLWWLLSDPDAEVCLHVLRLVQSVVLEPEVFSKSASEFRSSLPLQRILAMSKSRNPRLQTAAQELLEDLRTLEHNV

SEQ ID NO: 37431 - protein, 226 aa, Homo sapiens
  Payload ID: 7435
  Gene Symbol: HSF2BP
  Gene Name: heat shock transcription factor 2 binding protein
  ENSP ID: ENSP00000409585
MGEAGAAEEACRHMGTKEEFVKVRKKDLERLTTEVMQIRDFLPRILNGEVLESFQKLKIVEKNLERKEQELEQLKMDCEHFKARLETVQADNIREKKEKLALRQQLNEAKQQLLQQAEYCTEMGAAACTLLWGVSSSEEVVKAILGGVSMDKALKFFSITGQTMESFVKSLDGDVQELDSDESQFVFALAGIVTNVAAIACGREFLVNSSRVLLDTILQLLGDLKP

SEQ ID NO: 37432 - protein, 315 aa, Homo sapiens
  Payload ID: 7436
  Gene Symbol: HSF4
  Gene Name: heat shock transcription factor 4
  ENSP ID: ENSP00000403219
MQEAPAALPTEPGPSPVPAFLGKLWALVGDPGTDHLIRWSPSGTSFLVSDQSRFAKEVLPQYFKHSNMASFVRQLNMYGFRKVVSIEQGGLLRPERDHVEFQHPSFVRGREQLLERVRRKVPALRGDDGRWRPEDLGRLLGEVQALRGVQESTEARLRELRQQNEILWREVVTLRQSHGQQHRVIGKLIQCLFGPLQAGPSNAGGKRKLSLMLDEGSSCPTPAKFNTCPLPGALLQDPYFIQSPLPETNLGLSPHRARGPIISDIPEDSPSPEGTRLSPSSDGRSPPATACGCGAGHPGRERELQPRGAQECPTA

SEQ ID NO: 37433 - protein, 194 aa, Homo sapiens
  Payload ID: 7436
  Gene Symbol: HSF4
  Gene Name: heat shock transcription factor 4
  ENSP ID: ENSP00000427832
MQEAPAALPTEPGPSPVPAFLGKLWALVGDPGTDHLIRWSPSGTSFLVSDQSRFAKEVLPQYFKHSNMASFVRQLNMYGFRKVVSIEQGGLLRPERDHVEFQHPSFVRGREQLLERVRRKVPALRGDDGRWRPEDLGRLLGEAERDLVAGGGDTSAEPRSAAPGHWQADPVSLWATSGGAEQCRRQEKAVPDAG

SEQ ID NO: 37434 - protein, 17 aa, Homo sapiens
  Payload ID: 7436
  Gene Symbol: HSF4
  Gene Name: heat shock transcription factor 4
  ENSP ID: ENSP00000427963
  MOD_RES (1)..(1): Any amino acid
XFSLRPGPASPRDKFGP

SEQ ID NO: 37435 - protein, 223 aa, Homo sapiens
  Payload ID: 7436
  Gene Symbol: HSF4
  Gene Name: heat shock transcription factor 4
  ENSP ID: ENSP00000428077
  MOD_RES (1)..(1): Any amino acid
XTCPLPGALLQDPYFIQSEEKMEASLPPNQTQALQHGLSLLPQTFSLRPGPAPPPLPVAVVQAILEGKGSFSPEGPRNAQQPEPGDPREIPDRGPLGLESGDRSPESLLPPMLLQPPQESVEPAGPLDVLGPSLQGREWTLMDLDMELSLMQPLVPERGEPELAVKGLNSPSPGKDPTLGAPLLLDVQAALGGPALGLPGALTIYSTPESRTASYLGPEASPS

SEQ ID NO: 37436 - protein, 318 aa, Homo sapiens
  Payload ID: 7436
  Gene Symbol: HSF4
  Gene Name: heat shock transcription factor 4
  ENSP ID: ENSP00000428161
MQEAPAALPTEPGPSPVPAFLGKLWALVGDPGTDHLIRWSPSGTSFLVSDQSRFAKEVLPQYFKHSNMASFVRQLNMYGFRKVVSIEQGGLLRPERDHVEFQHPSFVRGREQLLERVRRKVPALRGDDGRWRPEDLGRLLGEVQALRGVQESTEARLRELRQQNEILWREVVTLRQSHGQQHRVIGKLIQCLFGPLQAGPSNAGGKRKLSLMLDEGSSCPTPAKFNTCPLPGALLQDPYFIQSPPRHCLWLWCRPSWKGKGASAPRGPGMPNSLNQGIPGRYLTGGLWAWKAGTGAQRVCCLRCCFSPLKKVWNLQGL

SEQ ID NO: 37437 - protein, 416 aa, Homo sapiens
  Payload ID: 7436
  Gene Symbol: HSF4
  Gene Name: heat shock transcription factor 4
  ENSP ID: ENSP00000428978
MQEAPAALPTEPGPSPVPAFLGKLWALVGDPGTDHLIRWSPSGTSFLVSDQSRFAKEVLPQYFKHSNMASFVRQLNMYGFRKVVSIEQGGLLRPERDHVEFQHPSFVRGREQLLERVRRKVPALRGDDGRWRPEDLGRLLGEVQALRGVQESTEARLRELRQQNEILWREVVTLRQSHGQQHRVIGKLIQCLFGPLQAGPSNAGGKRKLSLMLDEGSSCPTPAKFNTCPLPGALLQDPYFIQSPLPETNLGLSPHRARGPIISDIPEDSPSPEGTRLSPSSDGRRGPLGLESGDRSPESLLPPMLLQPPQESVEPAGPLDVLGPSLQGREWTLMDLDMELSLMQPLVPERGEPELAVKGLNSPSPGKDPTLGAPLLLDVQAALGGPALGLPGALTIYSTPESRTASYLGPEASPSP

SEQ ID NO: 37438 - protein, 63 aa, Homo sapiens
  Payload ID: 7436
  Gene Symbol: HSF4
  Gene Name: heat shock transcription factor 4
  ENSP ID: ENSP00000429486
  MOD_RES (1)..(1): Any amino acid
XMDLDMELSLMQPLVPERGEPELAVKGLNSPSPGPHARGPTPAGCPGGLGRPSPGPAWGFNHL

SEQ ID NO: 37439 - protein, 47 aa, Homo sapiens
  Payload ID: 7436
  Gene Symbol: HSF4
  Gene Name: heat shock transcription factor 4
  ENSP ID: ENSP00000429580
MQEAPAALPTEPGPSPVPAFLGKLWALVGDPGTDHLIRWSPTVFGRW

SEQ ID NO: 37440 - protein, 182 aa, Homo sapiens
  Payload ID: 7436
  Gene Symbol: HSF4
  Gene Name: heat shock transcription factor 4
  ENSP ID: ENSP00000430211
  MOD_RES (1)..(1): Any amino acid
XARLRELRQQNEILWREVVTLRQSHGQQHRVIGKLIQCLFGPLQAGPSNAGGKRKLTPTSSSRLSQRQIWALALTGPGAPSSLTSQKTLHPLRGPGFLPPVMAGAPPPLPVAVVQAILEGKGSFSPEGPRNAQQPEPGDPREIPDRGPLGLESGDRSPESLLPPMLLQPPQESVEPAGPLDV

SEQ ID NO: 37441 - protein, 185 aa, Homo sapiens
  Payload ID: 7436
  Gene Symbol: HSF4
  Gene Name: heat shock transcription factor 4
  ENSP ID: ENSP00000430299
GTSFLVSDQSRFAKEVLPQYFKHSNMASFVRQLNMYGFRKVVSIEQGGLLRPERDHVEFQHPSFVRGREQLLERVRRKVPALRGDDGRWRPEDLGRLLGENEILWREVVTLRQSHGQQHRVIGKLIQCLFGPLQAGPSNAGGKRKLSLMLDEGSSCPTPAKFNTCPLPGALLQDPYFIQSPLPET

SEQ ID NO: 37442 - protein, 315 aa, Homo sapiens; identical to SEQ ID NO: 37432
  Payload ID: 7436
  Gene Symbol: HSF4
  Gene Name: heat shock transcription factor 4
  ENSP ID: ENSP00000430631

SEQ ID NO: 37443 - protein, 77 aa, Homo sapiens
  Payload ID: 7436
  Gene Symbol: HSF4
  Gene Name: heat shock transcription factor 4
  ENSP ID: ENSP00000430724
  MOD_RES (1)..(1): Any amino acid
XRKVPALRGDDGRWRPEDLGRLLGEAERDLVAGGGDTSAEPRSAAPGHWQADPVSLWATSGGAEQCRRQEKAVPDAG

SEQ ID NO: 37444 - protein, 141 aa, Homo sapiens
  Payload ID: 7436
  Gene Symbol: HSF4
  Gene Name: heat shock transcription factor 4
  ENSP ID: ENSP00000430840
  MOD_RES (1)..(1): Any amino acid
XVAVVQAILEGKGSFSPEGPRNAQQPEPGDPREIPDRGPLGLESGDRSPESLLPPMLLQPPQESVEPAGPLDVLGPSLQGREWTLMDLDMELSLMQPLVPERGEPELAVKGLNSPSPALLRAGLPPTWARKPVPPPKTPRL

SEQ ID NO: 37445 - protein, 492 aa, Homo sapiens
  Payload ID: 7436
  Gene Symbol: HSF4
  Gene Name: heat shock transcription factor 4
  Uniprot ID: Q9ULV5
  ENSP ID: ENSP00000430947
MQEAPAALPTEPGPSPVPAFLGKLWALVGDPGTDHLIRWSPSGTSFLVSDQSRFAKEVLPQYFKHSNMASFVRQLNMYGFRKVVSIEQGGLLRPERDHVEFQHPSFVRGREQLLERVRRKVPALRGDDGRWRPEDLGRLLGEVQALRGVQESTEARLRELRQQNEILWREVVTLRQSHGQQHRVIGKLIQCLFGPLQAGPSNAGGKRKLSLMLDEGSSCPTPAKFNTCPLPGALLQDPYFIQSPLPETNLGLSPHRARGPIISDIPEDSPSPEGTRLSPSSDGRREKGLALLKEEPASPGGDGEAGLALAPNECDFCVTAPPPLPVAVVQAILEGKGSFSPEGPRNAQQPEPGDPREIPDRGPLGLESGDRSPESLLPPMLLQPPQESVEPAGPLDVLGPSLQGREWTLMDLDMELSLMQPLVPERGEPELAVKGLNSPSPGKDPTLGAPLLLDVQAALGGPALGLPGALTIYSTPESRTASYLGPEASPSP

SEQ ID NO: 37446 - protein, 462 aa, Homo sapiens
  Payload ID: 7436
  Gene Symbol: HSF4
  Gene Name: heat shock transcription factor 4
  Uniprot ID: Q9ULV5
  ENSP ID: ENSP00000463706
MQEAPAALPTEPGPSPVPAFLGKLWALVGDPGTDHLIRWSPSGTSFLVSDQSRFAKEVLPQYFKHSNMASFVRQLNMYGFRKVVSIEQGGLLRPERDHVEFQHPSFVRGREQLLERVRRKVPALRGDDGRWRPEDLGRLLGEVQALRGVQESTEARLRELRQQNEILWREVVTLRQSHGQQHRVIGKLIQCLFGPLQAGPSNAGGKRKLSLMLDEGSSCPTPAKFNTCPLPGALLQDPYFIQSPSTYSLSQRQIWALALTGPGAPSSLTSQKTLHPLRGPGFLPPVMAGAPPPLPVAVVQAILEGKGSFSPEGPRNAQQPEPGDPREIPDRGPLGLESGDRSPESLLPPMLLQPPQESVEPAGPLDVLGPSLQGREWTLMDLDMELSLMQPLVPERGEPELAVKGLNSPSPGKDPTLGAPLLLDVQAALGGPALGLPGALTIYSTPESRTASYLGPEASPSP

SEQ ID NO: 37447 - protein, 596 aa, Homo sapiens
  Payload ID: 7437
  Gene Symbol: HSF5
  Gene Name: heat shock transcription factor family member 5
  Uniprot ID: Q4G112
  ENSP ID: ENSP00000313243
MEALLSTPINPNNFPAKLWRLVNSPRYRSIRWDGRGEGLLIDQPLFEAELLSPPGPGGGGGTAGAGAEPELFKTTSFTSFIRQLNLYGFRKVVLGGPGGGKPAGNGPLHHFHNPHFRRDQPQLLVHLKRLTSANKAKLAAGLEVPCRPPNRFQRLLITSASAATAPLQHQQPPPPAGPRPEPHGPVAVGQFHRSFRRDSLSPYSCVSTPSHDHSTYPLKGLDRTPVPHRIWQNSLGMHPGQVETSPTFSDKGVPFPVLQRFPTEVTYTLQPSTTSVHVQQGPQTMVSSSQKYSNYTPSAQYSQAYYPTAVLQCCSPTHMDALSSCVTPTASSYAHCNYFQNPSMQSSYPVEFLPSNWPCSTTDENTKTEVNLEAVFQIVDELHSSPKLEMVKVEPVENQCPTSPSYRGQHILANSNNSNPCSASQASQLEPLTPVGSDIMSFVVGTEQAVACSLPQSPEYIYTIHTAQPVENSTIQESAAIQQAHVKLKEHLNHNPSPSSVVFVQEGPPFSTHQVDANIKCQTSSRENILPSEQMGFLISEMGPASKPSEDTGLATPARYREHRSNSQQGKSPDLHLLVDVACKQERFPKEEELKE

SEQ ID NO: 37448 - protein, 475 aa, Homo sapiens
  Payload ID: 7437
  Gene Symbol: HSF5
  Gene Name: heat shock transcription factor family member 5
  Uniprot ID: Q4G112
  ENSP ID: ENSP00000484295
MEALLSTPINPNNFPAKLWRLVNSPRYRSIRWDGRGEGLLIDQPLFEAELLSPPAGPRPEPHGPVAVGQFHRSFRRDSLSPYSCVSTPSHDHSTYPLKGLDRTPVPHRIWQNSLGMHPGQVETSPTFSDKGVPFPVLQRFPTEVTYTLQPSTTSVHVQQGPQTMVSSSQKYSNYTPSAQYSQAYYPTAVLQCCSPTHMDALSSCVTPTASSYAHCNYFQNPSMQSSYPVEFLPSNWPCSTTDENTKTEVNLEAVFQIVDELHSSPKLEMVKVEPVENQCPTSPSYRGQHILANSNNSNPCSASQASQLEPLTPVGSDIMSFVVGTEQAVACSLPQSPEYIYTIHTAQPVENSTIQESAAIQQAHVKLKEHLNHNPSPSSVVFVQEGPPFSTHQVDANIKCQTSSRENILPSEQMGFLISEMGPASKPSEDTGLATPARYREHRSNSQQGKSPDLHLLVDVACKQERFPKEEELKE

SEQ ID NO: 37449 - protein, 423 aa, Homo sapiens
  Payload ID: 7438
  Gene Symbol: HSFX1
  Gene Name: heat shock transcription factor family, X-linked 1
  Uniprot ID: Q9UBD0
  ENSP ID: ENSP00000359444
MEDKRSLSMARCEERNSRGQDHGLERVPFPPQLQSETYLHPADPSPAWDDPGSTGSPNLRLLTEEIAFQPLAEEASFRRPHPDGDVPPQGEDNLLSLPFPQKLWRLVSSNQFSSIWWDDSGACRVINQKLFEKEILKRDVAHKVFATTSIKSFFRQLNLYGFRKRRQCTFRTFTRIFSAKRLVSILNKLEFYCHPYFQRDSPHLLVRMKRRVGVKSAPRHQEEDKPEAAGSCLAPADTEQQDHTSPNENDQVTPQHREPAGPNTQIRSGSAPPATPVMVPDSAVASDNSPVTQPAGEWSEGSQAHVTPVAAVPGPAALPFLYVPGSPTQMNSYGPVVALPTASRSTLAMDTTGLPAPGMLPFCHLWVPVTLVAAGAAQPAASMVMFPHLPALHHHCPHSHRTSQYMPASDGPQAYPDYADQST

SEQ ID NO: 37450 - protein, 423 aa, Homo sapiens; identical to SEQ ID NO: 37449
  Payload ID: 7439
  Gene Symbol: HSFX2
  Gene Name: heat shock transcription factor family, X-linked 2
  Uniprot ID: Q9UBD0
  ENSP ID: ENSP00000469223

SEQ ID NO: 37451 - protein, 401 aa, Homo sapiens
  Payload ID: 7440
  Gene Symbol: HSFY1
  Gene Name: heat shock transcription factor, Y-linked 1
  Uniprot ID: Q96LI6
  ENSP ID: ENSP00000303599
MAHVSSETQDVSPKDELTASEASTRSPLCEHTFPGDSDLRSMIEEHAFQVLSQGSLLESPSYTVCVSEPDKDDDFLSLNFPRKLWKIVESDQFKSISWDENGTCIVINEELFKKEILETKAPYRIFQTDAIKSFVRQLNLYGFSKIQQNFQRSAFLATFLSEEKESSVLSKLKFYYNPNFKRGYPQLLVRVKRRIGVKNASPISTLFNEDFNKKHFRAGANMENHNSALAAEASEESLFSASKNLNMPLTRESSVRQIIANSSVPIRSGFPPPSPSTSVGPSEQIATDQHAILNQLTTIHMHSHSTYMQARGHIVNFITTTTSQYHIISPLQNGYFGLTVEPSAVPTRYPLVSVNEAPYRNMLPAGNPWLQMPTIADRSAAPHSRLALQPSPLDKYHPNYN

SEQ ID NO: 37452 - protein, 203 aa, Homo sapiens
  Payload ID: 7440
  Gene Symbol: HSFY1
  Gene Name: heat shock transcription factor, Y-linked 1
  Uniprot ID: Q96LI6
  ENSP ID: ENSP00000311166
MAHVSSETQDVSPKDELTASEASTRSPLCEHTFPGDSDLRSMIEEHAFQVLSQGSLLESPSYTVCVSEPDKDDDFLSLNFPRKLWKIVESDQFKSISWDENGTCIVINEELFKKEILETKAPYRIFQTDAIKSFVRQLNLYGFSKIQQNFQRSAFLATFLSEEKESSVLSKIRFTKMKLSRSSTYENRYLCCNLHLKDESNYS

SEQ ID NO: 37453 - protein, 214 aa, Homo sapiens
  Payload ID: 7440
  Gene Symbol: HSFY1
  Gene Name: heat shock transcription factor, Y-linked 1
  Uniprot ID: Q96LI6
  ENSP ID: ENSP00000342302
MAHVSSETQDVSPKDELTASEASTRSPLCEHTFPGDSDLRSMIEEHAFQVLSQGSLLESPSYTVCVSEPDKDDDFLSLNFPRKLWKIVESDQFKSISWDENGTCIVINEELFKKEILETKAPYRIFQTDAIKSFVRQLNLYGFSKIQQNFQRSAFLATFLSEEKESSVLSKLHVFVFHHSLFGATFGEHHFQPCPLPSGNKAPISTWSGDSWLL

SEQ ID NO: 37454 - protein, 214 aa, Homo sapiens; identical to SEQ ID NO: 37453
  Payload ID: 7440
  Gene Symbol: HSFY1
  Gene Name: heat shock transcription factor, Y-linked 1
  Uniprot ID: Q96LI6
  ENSP ID: ENSP00000372307

SEQ ID NO: 37455 - protein, 401 aa, Homo sapiens; identical to SEQ ID NO: 37451
  Payload ID: 7441
  Gene Symbol: HSFY2
  Gene Name: heat shock transcription factor, Y-linked 2
  Uniprot ID: Q96LI6
  ENSP ID: ENSP00000306549

SEQ ID NO: 37456 - protein, 203 aa, Homo sapiens; identical to SEQ ID NO: 37452
  Payload ID: 7441
  Gene Symbol: HSFY2
  Gene Name: heat shock transcription factor, Y-linked 2
  Uniprot ID: Q96LI6
  ENSP ID: ENSP00000340971

SEQ ID NO: 37457 - protein, 214 aa, Homo sapiens; identical to SEQ ID NO: 37453
  Payload ID: 7441
  Gene Symbol: HSFY2
  Gene Name: heat shock transcription factor, Y-linked 2
  Uniprot ID: Q96LI6
  ENSP ID: ENSP00000372303

SEQ ID NO: 37458 - protein, 137 aa, Homo sapiens
  Payload ID: 7442
  Gene Symbol: HRSP12
  Gene Name: heat-responsive protein 12
  Uniprot ID: P52758
  ENSP ID: ENSP00000254878
MSSLIRRVISTAKAPGAIGPYSQAVLVDRTIYISGQIGMDPSSGQLVSGGVAEEAKQALKNMGEILKAAGCDFTNVVKTTVLLADINDFNTVNEIYKQYFKSNFPARAAYQVAALPKGSRIEIEAVAIQGPLTTASL

SEQ ID NO: 37459 - protein, 148 aa, Homo sapiens
  Payload ID: 7442
  Gene Symbol: HRSP12
  Gene Name: heat-responsive protein 12
  ENSP ID: ENSP00000428596
  MOD_RES (1)..(1): Any amino acid
XGRLSHVVLDQKGDQHRESPRGHWTLQLSVYCSQAVLVDRTIYISGQIGMDPSSGQLVSGGVAEEAKQALKNMGEILKAAGCDFTNVVKTTVLLADINDFNTVNEIYKQYFKSNFPARAAYQVAALPKGSRIEIEAVAIQGPLTTASL

SEQ ID NO: 37460 - protein, 42 aa, Homo sapiens
  Payload ID: 7442
  Gene Symbol: HRSP12
  Gene Name: heat-responsive protein 12
  ENSP ID: ENSP00000429321
MSSLIRRVISTAKAPGAIGPYRTDRHGPFKWTACVRRGSRRS

SEQ ID NO: 37461 - protein, 127 aa, Homo sapiens
  Payload ID: 7442
  Gene Symbol: HRSP12
  Gene Name: heat-responsive protein 12
  ENSP ID: ENSP00000430482
  MOD_RES (1)..(1): Any amino acid
XSSKKPAGLVLGLLLLKGLQEGRLSHVVLDQKGDQHRESPRGHWTLQALKNMGEILKAAGCDFTNVVKTTVLLADINDFNTVNEIYKQYFKSNFPARAAYQVAALPKGSRIEIEAVAIQGPLTTASL

SEQ ID NO: 37462 - protein, 4834 aa, Homo sapiens
  Payload ID: 7443
  Gene Symbol: HERC2
  Gene Name: HECT and RLD domain containing E3 ubiquitin protein ligase 2
  Uniprot ID: O95714
  ENSP ID: ENSP00000261609
MPSESFCLAAQARLDSKWLKTDIQLAFTRDGLCGLWNEMVKDGEIVYTGTESTQNGELPPRKDDSVEPSGTKKEDLNDKEKKDEEETPAPIYRAKSILDSWVWGKQPDVNELKECLSVLVKEQQALAVQSATTTLSALRLKQRLVILERYFIALNRTVFQENVKVKWKSSGISLPPVDKKSSRPAGKGVEGLARVGSRAALSFAFAFLRRAWRSGEDADLCSELLQESLDALRALPEASLFDESTVSSVWLEVVERATRFLRSVVTGDVHGTPATKGPGSIPLQDQHLALAILLELAVQRGTLSQMLSAILLLLQLWDSGAQETDNERSAQGTSAPLLPLLQRFQSIICRKDAPHSEGDMHLLSGPLSPNESFLRYLTLPQDNELAIDLRQTAVVVMAHLDRLATPCMPPLCSSPTSHKGSLQEVIGWGLIGWKYYANVIGPIQCEGLANLGVTQIACAEKRFLILSRNGRVYTQAYNSDTLAPQLVQGLASRNIVKIAAHSDGHHYLALAATGEVYSWGCGDGGRLGHGDTVPLEEPKVISAFSGKQAGKHVVHIACGSTYSAAITAEGELYTWGRGNYGRLGHGSSEDEAIPMLVAGLKGLKVIDVACGSGDAQTLAVTENGQVWSWGDGDYGKLGRGGSDGCKTPKLIEKLQDLDVVKVRCGSQFSIALTKDGQVYSWGKGDNQRLGHGTEEHVRYPKLLEGLQGKKVIDVAAGSTHCLALTEDSEVHSWGSNDQCQHFDTLRVTKPEPAALPGLDTKHIVGIACGPAQSFAWSSCSEWSIGLRVPFVVDICSMTFEQLDLLLRQVSEGMDGSADWPPPQEKECVAVATLNLLRLQLHAAISHQVDPEFLGLGLGSILLNSLKQTVVTLASSAGVLSTVQSAAQAVLQSGWSVLLPTAEERARALSALLPCAVSGNEVNISPGRRFMIDLLVGSLMADGGLESALHAAITAEIQDIEAKKEAQKEKEIDEQEANASTFHRSRTPLDKDLINTGICESSGKQCLPLVQLIQQLLRNIASQTVARLKDVARRISSCLDFEQHSRERSASLDLLLRFQRLLISKLYPGESIGQTSDISSPELMGVGSLLKKYTALLCTHIGDILPVAASIASTSWRHFAEVAYIVEGDFTGVLLPELVVSIVLLLSKNAGLMQEAGAVPLLGGLLEHLDRFNHLAPGKERDDHEELAWPGIMESFFTGQNCRNNEEVTLIRKADLENHNKDGGFWTVIDGKVYDIKDFQTQSLTGNSILAQFAGEDPVVALEAALQFEDTRESMHAFCVGQYLEPDQEIVTIPDLGSLSSPLIDTERNLGLLLGLHASYLAMSTPLSPVEIECAKWLQSSIFSGGLQTSQIHYSYNEEKDEDHCSSPGGTPASKSRLCSHRRALGDHSQAFLQAIADNNIQDHNVKDFLCQIERYCRQCHLTTPIMFPPEHPVEEVGRLLLCCLLKHEDLGHVALSLVHAGALGIEQVKHRTLPKSVVDVCRVVYQAKCSLIKTHQEQGRSYKEVCAPVIERLRFLFNELRPAVCNDLSIMSKFKLLSSLPRWRRIAQKIIRERRKKRVPKKPESTDDEEKIGNEESDLEEACILPHSPINVDKRPIAIKSPKDKWQPLLSTVTGVHKYKWLKQNVQGLYPQSPLLSTIAEFALKEEPVDVEKMRKCLLKQLERAEVRLEGIDTILKLASKNFLLPSVQYAMFCGWQRLIPEGIDIGEPLTDCLKDVDLIPPFNRMLLEVTFGKLYAWAVQNIRNVLMDASAKFKELGIQPVPLQTITNENPSGPSLGTIPQARFLLVMLSMLTLQHGANNLDLLLNSGMLALTQTALRLIGPSCDNVEEDMNASAQGASATVLEETRKETAPVQLPVSGPELAAMMKIGTRVMRGVDWKWGDQDGPPPGLGRVIGELGEDGWIRVQWDTGSTNSYRMGKEGKYDLKLAELPAAAQPSAEDSDTEDDSEAEQTERNIHPTAMMFTSTINLLQTLCLSAGVHAEIMQSEATKTLCGLLRMLVESGTTDKTSSPNRLVYREQHRSWCTLGFVRSIALTPQVCGALSSPQWITLLMKVVEGHAPFTATSLQRQILAVHLLQAVLPSWDKTERARDMKCLVEKLFDFLGSLLTTCSSDVPLLRESTLRRRRVRPQASLTATHSSTLAEEVVALLRTLHSLTQWNGLINKYINSQLRSITHSFVGRPSEGAQLEDYFPDSENPEVGGLMAVLAVIGGIDGRLRLGGQVMHDEFGEGTVTRITPKGKITVQFSDMRTCRVCPLNQLKPLPAVAFNVNNLPFTEPMLSVWAQLVNLAGSKLEKHKIKKSTKQAFAGQVDLDLLRCQQLKLYILKAGRALLSHQDKLRQILSQPAVQETGTVHTDDGAVVSPDLGDMSPEGPQPPMILLQQLLASATQPSPVKAIFDKQELEAAALAVCQCLAVESTHPSSPGFEDCSSSEATTPVAVQHIRPARVKRRKQSPVPALPIVVQLMEMGFSRRNIEFALKSLTGASGNASSLPGVEALVGWLLDHSDIQVTELSDADTVSDEYSDEEVVEDVDDAAYSMSTGAVVTESQTYKKRADFLSNDDYAVYVRENIQVGMMVRCCRAYEEVCEGDVGKVIKLDRDGLHDLNVQCDWQQKGGTYWVRYIHVELIGYPPPSSSSHIKIGDKVRVKASVTTPKYKWGSVTHQSVGVVKAFSANGKDIIVDFPQQSHWTGLLSEMELVPSIHPGVTCDGCQMFPINGSRFKCRNCDDFDFCETCFKTKKHNTRHTFGRINEPGQSAVFCGRSGKQLKRCHSSQPGMLLDSWSRMVKSLNVSSSVNQASRLIDGSEPCWQSSGSQGKHWIRLEIFPDVLVHRLKMIVDPADSSYMPSLVVVSGGNSLNNLIELKTININPSDTTVPLLNDCTEYHRYIEIAIKQCRSSGIDCKIHGLILLGRIRAEEEDLAAVPFLASDNEEEEDEKGNSGSLIRKKAAGLESAATIRTKVFVWGLNDKDQLGGLKGSKIKVPSFSETLSALNVVQVAGGSKSLFAVTVEGKVYACGEATNGRLGLGISSGTVPIPRQITALSSYVVKKVAVHSGGRHATALTVDGKVFSWGEGDDGKLGHFSRMNCDKPRLIEALKTKRIRDIACGSSHSAALTSSGELYTWGLGEYGRLGHGDNTTQLKPKMVKVLLGHRVIQVACGSRDAQTLALTDEGLVFSWGDGDFGKLGRGGSEGCNIPQNIERLNGQGVCQIECGAQFSLALTKSGVVWTWGKGDYFRLGHGSDVHVRKPQVVEGLRGKKIVHVAVGALHCLAVTDSGQVYAWGDNDHGQQGNGTTTVNRKPTLVQGLEGQKITRVACGSSHSVAWTTVDVATPSVHEPVLFQTARDPLGASYLGVPSDADSSAASNKISGASNSKPNRPSLAKILLSLDGNLAKQQALSHILTALQIMYARDAVVGALMPAAMIAPVECPSFSSAAPSDASAMASPMNGEECMLAVDIEDRLSPNPWQEKREIVSSEDAVTPSAVTPSAPSASARPFIPVTDDLGAASIIAETMTKTKEDVESQNKAAGPEPQALDEFTSLLIADDTRVVVDLLKLSVCSRAGDRGRDVLSAVLSGMGTAYPQVADMLLELCVTELEDVATDSQSGRLSSQPVVVESSHPYTDDTSTSGTVKIPGAEGLRVEFDRQCSTERRHDPLTVMDGVNRIVSVRSGREWSDWSSELRIPGDELKWKFISDGSVNGWGWRFTVYPIMPAAGPKELLSDRCVLSCPSMDLVTCLLDFRLNLASNRSIVPRLAASLAACAQLSALAASHRMWALQRLRKLLTTEFGQSININRLLGENDGETRALSFTGSALAALVKGLPEALQRQFEYEDPIVRGGKQLLHSPFFKVLVALACDLELDTLPCCAETHKWAWFRRYCMASRVAVALDKRTPLPRLFLDEVAKKIRELMADSENMDVLHESHDIFKREQDEQLVQWMNRRPDDWTLSAGGSGTIYGWGHNHRGQLGGIEGAKVKVPTPCEALATLRPVQLIGGEQTLFAVTADGKLYATGYGAGGRLGIGGTESVSTPTLLESIQHVFIKKVAVNSGGKHCLALSSEGEVYSWGEAEDGKLGHGNRSPCDRPRVIESLRGIEVVDVAAGGAHSACVTAAGDLYTWGKGRYGRLGHSDSEDQLKPKLVEALQGHRVVDIACGSGDAQTLCLTDDDTVWSWGDGDYGKLGRGGSDGCKVPMKIDSLTGLGVVKVECGSQFSVALTKSGAVYTWGKGDYHRLGHGSDDHVRRPRQVQGLQGKKVIAIATGSLHCVCCTEDGEVYTWGDNDEGQLGDGTTNAIQRPRLVAALQGKKVNRVACGSAHTLAWSTSKPASAGKLPAQVPMEYNHLQEIPIIALRNRLLLLHHLSELFCPCIPMFDLEGSLDETGLGPSVGFDTLRGILISQGKEAAFRKVVQATMVRDRQHGPVVELNRIQVKRSRSKGGLAGPDGTKSVFGQMCAKMSSFGPDSLLLPHRVWKVKFVGESVDDCGGGYSESIAEICEELQNGLTPLLIVTPNGRDESGANRDCYLLSPAARAPVHSSMFRFLGVLLGIAIRTGSPLSLNLAEPVWKQLAGMSLTIADLSEVDKDFIPGLMYIRDNEATSEEFEAMSLPFTVPSASGQDIQLSSKHTHITLDNRAEYVRLAINYRLHEFDEQVAAVREGMARVVPVPLLSLFTGYELETMVCGSPDIPLHLLKSVATYKGIEPSASLIQWFWEVMESFSNTERSLFLRFVWGRTRLPRTIADFRGRDFVIQVLDKYNPPDHFLPESYTCFFLLKLPRYSCKQVLEEKLKYAIHFCKSIDTDDYARIALTGEPAADDSSDDSDNEDVDSFASDSTQDYLTGH

SEQ ID NO: 37463 - protein, 80 aa, Homo sapiens
  Payload ID: 7443
  Gene Symbol: HERC2
  Gene Name: HECT and RLD domain containing E3 ubiquitin protein ligase 2
  ENSP ID: ENSP00000456237
MPSESFCLAAQARLDSKWLKTDIQLAFTRDGLCGLWNEMVKDGEIVYTGTESTQNGELPPRKVETGFHRVSQDGLELLTS

SEQ ID NO: 37464 - protein, 200 aa, Homo sapiens
  Payload ID: 7443
  Gene Symbol: HERC2
  Gene Name: HECT and RLD domain containing E3 ubiquitin protein ligase 2
  ENSP ID: ENSP00000457745
  MOD_RES (1)..(1): Any amino acid
XRDPLGASYLGVPSDADSSAASNKISGASNSKPNRPSLAKILLSLDGNLAKQQALSHILTALQIMYARDAVVGALMPAAMIAPVECPSFSSAAPSDASAMASPMNGEECMLAVDIEDRLSPNPWQEKREIVSSEDAVTPSAVTPSAPSASARPFIPVTDDLGAASIIAETMTKTKEVADMLLELCVTELEDVATDSQSGR

SEQ ID NO: 37465 - protein, 24 aa, Homo sapiens
  Payload ID: 7443
  Gene Symbol: HERC2
  Gene Name: HECT and RLD domain containing E3 ubiquitin protein ligase 2
  ENSP ID: ENSP00000477508
MPSESFCLAAQARLDSKWLKTDIQ

SEQ ID NO: 37466 - protein, 523 aa, Homo sapiens
  Payload ID: 7443
  Gene Symbol: HERC2
  Gene Name: HECT and RLD domain containing E3 ubiquitin protein ligase 2
  ENSP ID: ENSP00000484177
MVRARVVLPGRSCGRGGGVCRVGRCVCSDTLVLGAAGHITGDMPNGVRQRSRVSTVERPRWQGLPGVHTSRCVTREGPMHGASSSCIRQCRISPTVCFLLRQRPHACLLPPLQVKRSRSKGGLAGPDGTKSVFGQMCAKMSSFGPDSLLLPHRVWKVKFVGESVDDCGGGYSESIAEICEELQNGLTPLLIVTPNGRDESGANRDCYLLSPAARAPVHSSMFRFLGVLLGIAIRTGSPLSLNLAEPVWKQLAGMSLTIADLSEVDKDFIPGLMYIRDNEATSEEFEAMSLPFTVPSASGQDIQLSSKHTHITLDNRAEYVRLAINYRLHEFDEQVAAVREGMARVVPVPLLSLFTGYELETMVCGSPDIPLHLLKSVATYKGIEPSASLIQWFWEVMESFSNTERSLFLRFVWGRTRLPRTIADFRGRDFVIQVLDKYNPPDHFLPESYTCFFLLKLPRYSCKQVLEEKLKYAIHFCKSIDTDDYARIALTGEPAADDSSDDSDNEDVDSFASDSTQDYLTGH

SEQ ID NO: 37467 - protein, 2081 aa, Homo sapiens
  Payload ID: 7443
  Gene Symbol: HERC2
  Gene Name: HECT and RLD domain containing E3 ubiquitin protein ligase 2
  ENSP ID: ENSP00000487606
  MOD_RES (1)..(1): Any amino acid
XQSAVFCGRSGKQLKRCHSSQPGMLLDSWSRMVKSLNVSSSVNQASRLIDGSEPCWQSSGSQGKHWIRLEIFPDVLVHRLKMIVDPADSSYMPSLVVVSGGNSLNNLIELKTININPSDTTVPLLNDCTEYHRYIEIAIKQCRSSGIDCKIHGLILLGRIRAEEEDLAAVPFLASDNEEEEDEKGNSGSLIRKKAAGLESAATIRTKVFVWGLNDKDQLGGLKGSKIKVPSFSETLSALNVVQVAGGSKSLFAVTVEGKVYACGEATNGRLGLGISSGTVPIPRQITALSSYVVKKVAVHSGGRHATALTVDGKVFSWGEGDDGKLGHFSRMNCDKPRLIEALKTKRIRDIACGSSHSAALTSSGELYTWGLGEYGRLGHGDNTTQLKPKMVKVLLGHRVIQVACGSRDAQTLALTDEGLVFSWGDGDFGKLGRGGSEGCNIPQNIERLNGQGVCQIECGAQFSLALTKSGVVWTWGKGDYFRLGHGSDVHVRKPQVVEGLRGKKIVHVAVGALHCLAVTDSGQVYAWGDNDHGQQGNGTTTVNRKPTLVQGLEGQKITRVACGSSHSVAWTTVDVATPSVHEPVLFQTARDPLGASYLGVPSDADSSAASNKISGASNSKPNRPSLAKILLSLDGNLAKQQALSHILTALQIMYARDAVVGALMPAAMIAPVECPSFSSAAPSDASAMASPMNGEECMLAVDIEDRLSPNPWQEKREIVSSEDAVTPSAVTPSAPSASARPFIPVTDDLGAASIIAETMTKTKEDVESQNKAAGPEPQALDEFTSLLIADDTRVVVDLLKLSVCSRAGDRGRDVLSAVLSGMGTAYPQVADMLLELCVTELEDVATDSQSGRLSSQPVVVESSHPYTDDTSTSGTVKIPGAEGLRVEFDRQCSTERRHDPLTVMDGVNRIVSVRSGREWSDWSSELRIPGDELKWKFISDGSVNGWGWRFTVYPIMPAAGPKELLSDRCVLSCPSMDLVTCLLDFRLNLASNRSIVPRLAASLAACAQLSALAASHRMWALQRLRKLLTTEFGQSININRLLGENDGETRALSFTGSALAALVKGLPEALQRQFEYEDPIVRGGKQLLHSPFFKVLVALACDLELDTLPCCAETHKWAWFRRYCMASRVAVALDKRTPLPRLFLDEVAKKIRELMADSENMDVLHESHDIFKREQDEQLVQWMNRRPDDWTLSAGGSGTIYGWGHNHRGQLGGIEGAKVKVPTPCEALATLRPVQLIGGEQTLFAVTADGKLYATGYGAGGRLGIGGTESVSTPTLLESIQHVFIKKVAVNSGGKHCLALSSEGEVYSWGEAEDGKLGHGNRSPCDRPRVIESLRGIEVVDVAAGGAHSACVTAAGDLYTWGKGRYGRLGHSDSEDQLKPKLVEALQGHRVVDIACGSGDAQTLCLTDDDTVWSWGDGDYGKLGRGGSDGCKVPMKIDSLTGLGVVKVECGSQFSVALTKSGAVYTWGKGDYHRLGHGSDDHVRRPRQVQGLQGKKVIAIATGSLHCVCCTEDGEVYTWGDNDEGQLGDGTTNAIQRPRLVAALQGKKVNRVACGSAHTLAWSTSKPASAGKLPAQVPMEYNHLQEIPIIALRNRLLLLHHLSELFCPCIPMFDLEGSLDETGLGPSVGFDTLRGILISQGKEAAFRKVVQATMVRDRQHGPVVELNRIQVKRSRSKGGLAGPDGTKSVFGQMCAKMSSFGPDSLLLPHRVWKVKFVGESVDDCGGGYSESIAEICEELQNGLTPLLIVTPNGRDESGANRDCYLLSPAARAPVHSSMFRFLGVLLGIAIRTGSPLSLNLAEPVWKQLAGMSLTIADLSEVDKDFIPGLMYIRDNEATSEEFEAMSLPFTVPSASGQDIQLSSKHTHITLDNRAEYVRLAINYRLHEFDEQVAAVREGMARVVPVPLLSLFTGYELETMVCGSPDIPLHLLKSVATYKGIEPSASLIQWFWEVMESFSNTERSLFLRFVWGRTRLPRTIADFRGRDFVIQVLDKYNPPDHFLPESYTCFFLLKLPRYSCKQVLEEKLKYAIHFCKSIDTDDYARIALTGEPAADDSSDDSDNEDVDSFASDSTQDYLTGH

SEQ ID NO: 37468 - protein, 959 aa, Homo sapiens
  Payload ID: 7443
  Gene Symbol: HERC2
  Gene Name: HECT and RLD domain containing E3 ubiquitin protein ligase 2
  ENSP ID: ENSP00000488506
MPSESFCLAAQARLDSKWLKTDIQLAFTRDGLCGLWNEMVKDGEIVYTGTESTQNGELPPRKDDSVEPSGTKKEDLNDKEKKDEEETPAPIYRAKSILDSWVWGKQPDVNELKECLSVLVKEQQALAVQSATTTLSALRLKQRLVILERYFIALNRTVFQENVKVKWKSSGISLPPVDKKSSRPAGKGVEGLARVGSRAALSFAFAFLRRAWRSGEDADLCSELLQESLDALRALPEASLFDESTVSSVWLEVVERATRFLRSVVTGDVHGTPATKGPGSIPLQDQHLALAILLELAVQRGTLSQMLSAILLLLQLWDSGAQETDNERSAQGTSAPLLPLLQRFQSIICRKDAPHSEGDMHLLSGPLSPNESFLRYLTLPQDNELAIDLRQTAVVVMAHLDRLATPCMPPLCSSPTSHKGSLQEVIGWGLIGWKYYANVIGPIQCEGLANLGVTQIACAEKRFLILSRNGRVYTQAYNSDTLAPQLVQGLASRNIVKIAAHSDGHHYLALAATGEVYSWGCGDGGRLGHGDTVPLEEPKVISAFSGKQAGKHVVHIACGSTYSAAITAEGELYTWGRGNYGRLGHGSSEDEAIPMLVAGLKGLKVIDVACGSGDAQTLAVTENGQVWSWGDGDYGKLGRGGSDGCKTPKLIEKLQDLDVVKVRCGSQFSIALTKDGQVYSWGKGDNQRLGHGTEEHVRYPKLLEGLQGKKVIDVAAGSTHCLALTEDSEVHSWGSNDQCQHFDTLRVTKPEPAALPGLDTKHIVGIACGPAQSFAWSSCSEWSIGLRVPFVVDICSMTFEQLDLLLRQVSEGMDGSADWPPPQEKECVAVATLNLLRLQLHAAISHQVDPEFLGLGLGSILLNSLKQTVVTLASSAGVLSTVQSAAQAVLQSGWSVLLPTAEERARALSALLPCAVSGNEVNISPGRRFMIDLLVGSLMADGGLESALHAAITAEIQVW

SEQ ID NO: 37469 - protein, 24 aa, Homo sapiens
  Payload ID: 7443
  Gene Symbol: HERC2
  Gene Name: HECT and RLD domain containing E3 ubiquitin protein ligase 2
  ENSP ID: ENSP00000488879
MPSESFCLAAQARLDSKWLKTDIQ

SEQ ID NO: 37470 - protein, 1050 aa, Homo sapiens
  Payload ID: 7444
  Gene Symbol: HERC3
  Gene Name: HECT and RLD domain containing E3 ubiquitin protein ligase 3
  Uniprot ID: Q15034
  ENSP ID: ENSP00000264345
MLCWGYWSLGQPGISTNLQGIVAEPQVCGFISDRSVKEVACGGNHSVFLLEDGEVYTCGLNTKGQLGHEREGNKPEQIGALADQHIIHVACGESHSLALSDRGQLFSWGAGSDGQLGLMTTEDSVAVPRLIQKLNQQTILQVSCGNWHCLALAADGQFFTWGKNSHGQLGLGKEFPSQASPQRVRSLEGIPLAQVAAGGAHSFALSLSGAVFGWGMNNAGQLGLSDEKDRESPCHVKLLRTQKVVYISCGEEHTAVLTKSGGVFTFGAGSCGQLGHDSMNDEVNPRRVLELMGSEVTQIACGRQHTLAFVPSSGLIYAFGCGARGQLGTGHTCNVKCPSPVKGYWAAHSGQLSARADRFKYHIVKQIFSGGDQTFVLCSKYENYSPAVDFRTMNQAHYTSLINDETIAVWRQKLSEHNNANTINGVVQILSSAACWNGSFLEKKIDEHFKTSPKIPGIDLNSTRVLFEKLMNSQHSMILEQILNSFESCLIPQLSSSPPDVEAMRIYLILPEFPLLQDSKYYITLTIPLAMAILRLDTNPSKVLDNWWSQVCPKYFMKLVNLYKGAVLYLLRGRKTFLIPVLFNNYITAALKLLEKLYKVNLKVKHVEYDTFYIPEISNLVDIQEDYLMWFLHQAGMKARPSIIQDTVTLCSYPFIFDAQAKTKMLQTDAELQMQVAVNGANLQNVFMLLTLEPLLARSPFLVLHVRRNNLVGDALRELSIHSDIDLKKPLKVIFDGEEAVDAGGVTKEFFLLLLKELLNPIYGMFTYYQDSNLLWFSDTCFVEHNWFHLIGITCGLAIYNSTVVDLHFPLALYKKLLNVKPGLEDLKELSPTEGRSLQELLDYPGEDVEETFCLNFTICRESYGVIEQKKLIPGGDNVTVCKDNRQEFVDAYVNYVFQISVHEWYTAFSSGFLKVCGGKVLELFQPSELRAMMVGNSNYNWEELEETAIYKGDYSATHPTVKLFWETFHEFPLEKKKKFLLFLTGSDRIPIYGMASLQIVIQSTASGEEYLPVAHTCYNLLDLPKYSSKEILSARLTQALDNYEGFSLA

SEQ ID NO: 37471 - protein, 368 aa, Homo sapiens
  Payload ID: 7444
  Gene Symbol: HERC3
  Gene Name: HECT and RLD domain containing E3 ubiquitin protein ligase 3
  Uniprot ID: Q15034
  ENSP ID: ENSP00000384005
MLCWGYWSLGQPGISTNLQGIVAEPQVCGFISDRSVKEVACGGNHSVFLLEDGEVYTCGLNTKGQLGHEREGNKPEQIGALADQHIIHVACGESHSLALSDRGQLFSWGAGSDGQLGLMTTEDSVAVPRLIQKLNQQTILQVSCGNWHCLALAADGQFFTWGKNSHGQLGLGKEFPSQASPQRVRSLEGIPLAQVAAGGAHSFALSLSGAVFGWGMNNAGQLGLSDEKDRESPCHVKLLRTQKVVYISCGEEHTAVLTKSGGVFTFGAGSCGQLGHDSMNDEVNPRRVLELMGSEVTQIACGRQHTLAFVPSSGLIYAFGCGARGQLGTGHTCNVKCPSPVKGYWAAHSGQLSARAGKNDCLWNLKVF

SEQ ID NO: 37472 - protein, 1050 aa, Homo sapiens; identical to SEQ ID NO: 37470
  Payload ID: 7444
  Gene Symbol: HERC3
  Gene Name: HECT and RLD domain containing E3 ubiquitin protein ligase 3
  Uniprot ID: Q15034
  ENSP ID: ENSP00000385684

SEQ ID NO: 37473 - protein, 128 aa, Homo sapiens
  Payload ID: 7444
  Gene Symbol: HERC3
  Gene Name: HECT and RLD domain containing E3 ubiquitin protein ligase 3
  ENSP ID: ENSP00000389991
MLCWGYWSLGQPGISTNLQGIVAEPQVCGFISDRSVKEVACGGNHSVFLLEDGEVYTCGLNTKGQLGHEREGNKPEQIGALADQHIIHVACGESHSLALSDRGQLFSWGAGSDGQLGLMTTEDSVAVP

SEQ ID NO: 37474 - protein, 131 aa, Homo sapiens
  Payload ID: 7444
  Gene Symbol: HERC3
  Gene Name: HECT and RLD domain containing E3 ubiquitin protein ligase 3
  ENSP ID: ENSP00000405863
MLCWGYWSLGQPGISTNLQGIVAEPQVCGFISDRSVKEVACGGNHSVFLLEDGEVYTCGLNTKGQLGHEREGNKPEQIGALADQHIIHVACGESHSLALSDRGQLFSWGAGSDGQLGLMTTEDSVAVPRLI

SEQ ID NO: 37475 - protein, 227 aa, Homo sapiens
  Payload ID: 7444
  Gene Symbol: HERC3
  Gene Name: HECT and RLD domain containing E3 ubiquitin protein ligase 3
  ENSP ID: ENSP00000406210
MLCWGYWSLGQPGISTNLQGIVAEPQVCGFISDRSVKEVACGGNHSVFLLEDGEVYTCGLNTKGQLGHEREGNKPEQIGALADQHIIHVACGESHSLALSDRGQLFSWGAGSDGQLGLMTTEDSVAVPRLIQKLNQQTILQVSCGNWHCLALAADGQFFTWGKNSHGQLGLGKEFPSQASPQRVRSLEGIPLAQVAAGGAHSFALSLSGAVFGWGMNNAGQLGLSDE

SEQ ID NO: 37476 - protein, 94 aa, Homo sapiens
  Payload ID: 7444
  Gene Symbol: HERC3
  Gene Name: HECT and RLD domain containing E3 ubiquitin protein ligase 3
  ENSP ID: ENSP00000410029
MLCWGYWSLGQPGISTNLQGIVAEPQVCGFISDRSVKEVACGGNHSVFLLEDGEVYTCGLNTKGQLGHEREGNKPEQIGALADQHIIHVACGES

SEQ ID NO: 37477 - protein, 278 aa, Homo sapiens
  Payload ID: 7444
  Gene Symbol: HERC3
  Gene Name: HECT and RLD domain containing E3 ubiquitin protein ligase 3
  ENSP ID: ENSP00000421021
VNLKVKHVEYDTFYIPEISNLVDIQEDYLMWFLHQAGMDTVTLCSYPFIFDAQAKTKMLQTDAELQMQVAVNGANLQNVFMLLTLEPLLARSPFLVLHVRRNNLVGDALRELSIHSDIDLKKPLKVIFDGEEAVDAGGVTKEFFLLLLKELLNPIYGMFTYYQDSNLLWFSDTCFVEHNWFHLIGITCGLAIYNSTVVDLHFPLALYKKLLNVKPGLEDLKELSPTEGRSLQELLDYPGEDVEETFCLNFTICRESYGVIEQKKLIPGGDNVTVCKDN

SEQ ID NO: 37478 - protein, 78 aa, Homo sapiens
  Payload ID: 7444
  Gene Symbol: HERC3
  Gene Name: HECT and RLD domain containing E3 ubiquitin protein ligase 3
  ENSP ID: ENSP00000424786
MLCWGYWSLGQPGISTNLQGIVAEPQVCGFISDRSVKEVACGGNHSVFLLEDGEVYTCGLNTKGQLGHEREGNKPEQI

SEQ ID NO: 37479 - protein, 947 aa, Homo sapiens
  Payload ID: 7445
  Gene Symbol: HERC4
  Gene Name: HECT and RLD domain containing E3 ubiquitin protein ligase 4
  Uniprot ID: Q5GLZ8
  ENSP ID: ENSP00000277817
MCVDSLVRICSGLSYGRIRNIKSLSDIQIVQVACGYYHSLALSKASEVFCWGQNKYGQLGLGTDCKKQTSPQLLKSLLGIPFMQVAAGGAHSFVLTLSGAIFGWGRNKFGQLGLNDENDRYVPNLLKSLRSQKIVYICCGEDHTAALTKEGGVFTFGAGGYGQLGHNSTSHEINPRKVFELMGSIVTEIACGRQHTSAFVPSSGRIYSFGLGGNGQLGTGSTSNRKSPFTVKGNWYPYNGQCLPDIDSEEYFCVKRIFSGGDQSFSHYSSPQNCGPPDDFRCPNPTKQIWTVNEALIQKWLSYPSGRFPVEIANEIDGTFSSSGCLNGSFLAVSNDDHYRTGTRFSGVDMNAARLLFHKLIQPDHPQISQQVAASLEKNLIPKLTSSLPDVEALRFYLTLPECPLMSDSNNFTTIAIPFGTALVNLEKAPLKVLENWWSVLEPPLFLKIVELFKEVVVHLLKLYKIGIPPSERRIFNSFLHTALKVLEILHRVNEKMGQIIQYDKFYIHEVQELIDIRNDYINWVQQQAYGMDVNHGLTELADIPVTICTYPFVFDAQAKTTLLQTDAVLQMQMAIDQAHRQNVSSLFLPVIESVNPCLILVVRRENIVGDAMEVLRKTKNIDYKKPLKVIFVGEDAVDAGGVRKEFFLLIMRELLDPKYGMFRYYEDSRLIWFSDKTFEDSDLFHLIGVICGLAIYNCTIVDLHFPLALYKKLLKKKPSLDDLKELMPDVGRSMQQLLDYPEDDIEETFCLNFTITVENFGATEVKELVLNGADTAVNKQNRQEFVDAYVDYIFNKSVASLFDAFHAGFHKVCGGKVLLLFQPNELQAMVIGNTNYDWKELEKNTEYKGEYWAEHPTIKIFWEVFHELPLEKKKQFLLFLTGSDRIPILGMKSLKLVIQSTGGGEEYLPVSHTCFNLLDLPKYTEKETLRSKLIQAIDHNEGFSLI

SEQ ID NO: 37480 - protein, 1049 aa, Homo sapiens
  Payload ID: 7445
  Gene Symbol: HERC4
  Gene Name: HECT and RLD domain containing E3 ubiquitin protein ligase 4
  Uniprot ID: Q5GLZ8
  ENSP ID: ENSP00000362804
MLCWGNASFGQLGLGGIDEEIVLEPRKSDFFINKRVRDVGCGLRHTVFVLDDGTVYTCGCNDLGQLGHEKSRKKPEQVVALDAQNIVAVSCGEAHTLALNDKGQVYAWGLDSDGQLGLVGSEECIRVPRNIKSLSDIQIVQVACGYYHSLALSKASEVFCWGQNKYGQLGLGTDCKKQTSPQLLKSLLGIPFMQVAAGGAHSFVLTLSGAIFGWGRNKFGQLGLNDENDRYVPNLLKSLRSQKIVYICCGEDHTAALTKEGGVFTFGAGGYGQLGHNSTSHEINPRKVFELMGSIVTEIACGRQHTSAFVPSSGRIYSFGLGGNGQLGTGSTSNRKSPFTVKGNWYPYNGQCLPDIDSEEYFCVKRIFSGGDQSFSHYSSPQNCGPPDDFRCPNPTKQIWTVNEALIQKWLSYPSGRFPVEIANEIDGTFSSSGCLNGSFLAVSNDDHYRTGTRFSGVDMNAARLLFHKLIQPDHPQISQQVAASLEKNLIPKLTSSLPDVEALRFYLTLPECPLMSDSNNFTTIAIPFGTALVNLEKAPLKVLENWWSVLEPPLFLKIVELFKEVVVHLLKLYKIGIPPSERRIFNSFLHTALKVLEILHRVNEKMGQIIQYDKFYIHEVQELIDIRNDYINWVQQQAYGMLADIPVTICTYPFVFDAQAKTTLLQTDAVLQMQMAIDQAHRQNVSSLFLPVIESVNPCLILVVRRENIVGDAMEVLRKTKNIDYKKPLKVIFVGEDAVDAGGVRKEFFLLIMRELLDPKYGMFRYYEDSRLIWFSDKTFEDSDLFHLIGVICGLAIYNCTIVDLHFPLALYKKLLKKKPSLDDLKELMPDVGRSMQQLLDYPEDDIEETFCLNFTITVENFGATEVKELVLNGADTAVNKQNRQEFVDAYVDYIFNKSVASLFDAFHAGFHKVCGGKVLLLFQPNELQAMVIGNTNYDWKELEKNTEYKGEYWAEHPTIKIFWEVFHELPLEKKKQFLLFLTGSDRIPILGMKSLKLVIQSTGGGEEYLPVSHTCFNLLDLPKYTEKETLRSKLIQAIDHNEGFSLI

SEQ ID NO: 37481 - protein, 1057 aa, Homo sapiens
  Payload ID: 7445
  Gene Symbol: HERC4
  Gene Name: HECT and RLD domain containing E3 ubiquitin protein ligase 4
  Uniprot ID: Q5GLZ8
  ENSP ID: ENSP00000378624
MLCWGNASFGQLGLGGIDEEIVLEPRKSDFFINKRVRDVGCGLRHTVFVLDDGTVYTCGCNDLGQLGHEKSRKKPEQVVALDAQNIVAVSCGEAHTLALNDKGQVYAWGLDSDGQLGLVGSEECIRVPRNIKSLSDIQIVQVACGYYHSLALSKASEVFCWGQNKYGQLGLGTDCKKQTSPQLLKSLLGIPFMQVAAGGAHSFVLTLSGAIFGWGRNKFGQLGLNDENDRYVPNLLKSLRSQKIVYICCGEDHTAALTKEGGVFTFGAGGYGQLGHNSTSHEINPRKVFELMGSIVTEIACGRQHTSAFVPSSGRIYSFGLGGNGQLGTGSTSNRKSPFTVKGNWYPYNGQCLPDIDSEEYFCVKRIFSGGDQSFSHYSSPQNCGPPDDFRCPNPTKQIWTVNEALIQKWLSYPSGRFPVEIANEIDGTFSSSGCLNGSFLAVSNDDHYRTGTRFSGVDMNAARLLFHKLIQPDHPQISQQVAASLEKNLIPKLTSSLPDVEALRFYLTLPECPLMSDSNNFTTIAIPFGTALVNLEKAPLKVLENWWSVLEPPLFLKIVELFKEVVVHLLKLYKIGIPPSERRIFNSFLHTALKVLEILHRVNEKMGQIIQYDKFYIHEVQELIDIRNDYINWVQQQAYGMDVNHGLTELADIPVTICTYPFVFDAQAKTTLLQTDAVLQMQMAIDQAHRQNVSSLFLPVIESVNPCLILVVRRENIVGDAMEVLRKTKNIDYKKPLKVIFVGEDAVDAGGVRKEFFLLIMRELLDPKYGMFRYYEDSRLIWFSDKTFEDSDLFHLIGVICGLAIYNCTIVDLHFPLALYKKLLKKKPSLDDLKELMPDVGRSMQQLLDYPEDDIEETFCLNFTITVENFGATEVKELVLNGADTAVNKQNRQEFVDAYVDYIFNKSVASLFDAFHAGFHKVCGGKVLLLFQPNELQAMVIGNTNYDWKELEKNTEYKGEYWAEHPTIKIFWEVFHELPLEKKKQFLLFLTGSDRIPILGMKSLKLVIQSTGGGEEYLPVSHTCFNLLDLPKYTEKETLRSKLIQAIDHNEGFSLI

SEQ ID NO: 37482 - protein, 399 aa, Homo sapiens
  Payload ID: 7445
  Gene Symbol: HERC4
  Gene Name: HECT and RLD domain containing E3 ubiquitin protein ligase 4
  ENSP ID: ENSP00000406171
  MOD_RES (1)..(1): Any amino acid
XGNASFGQLGLGGIDEEIVLEPRKSDFFINKRVRDVGCGLRHTVFVLDDGTVYTCGCNDLGQLGHEKSRKKPEQVVALDAQNIVAVSCGEAHTLALNDKGQVYAWGLDSDGQLGLVGSEECIRVPRNIKSLSDIQIVQVACGYYHSLALSKASEVFCWGQNKYGQLGLGTDCKKQTSPQLLKSLLGIPFMQVAAGGAHSFVLTLSGAIFGWGRNKFGQLGLNDENDRYVPNLLKSLRSQKIVYICCGEDHTAALTKEGGVFTFGAGGYGQLGHNSTSHEINPRKVFELMGSIVTEIACGRQHTSAFVPSSGRIYSFGLGGNGQLGTGSTSNRKSPFTVKGNWYPYNGQCLPDIEARSCHVVQAGLELLGSSDPPTLASQSAGITVNEHQCLLPPQKRTQ

SEQ ID NO: 37483 - protein, 979 aa, Homo sapiens
  Payload ID: 7445
  Gene Symbol: HERC4
  Gene Name: HECT and RLD domain containing E3 ubiquitin protein ligase 4
  Uniprot ID: Q5GLZ8
  ENSP ID: ENSP00000416504
MLCWGNASFGQLGLGGIDEEIVLEPRKSDFFINKRVRDVGCGLRHTVFVLDDGTVYTCGCNDLGQLGHEKSRKKPEQVVALDAQNIVAVSCGEAHTLALNDKGQVYAWGLDSDGQLGLVGSEECIRVPRNIKSLSDIQIVQVACGYYHSLALSKASEVFCWGQNKYGQLGLGTDCKKQTSPQLLKSLLGIPFMQVAAGGAHSFVLTLSGAIFGWGRNKFGQLGLNDENDRYVPNLLKSLRSQKIVYICCGEDHTAALTKEGGVFTFGAGGYGQLGHNSTSHEINPRKVFELMGSIVTEIACGRQHTSAFVPSSGRIYSFGLGGNGQLGTGSTSNRKSPFTVKGNWYPYNGQCLPDIDSEEYFCVKRIFSGGDQSFSHYSSPQNCGPPDDFRCPNPTKQIWTVNEALIQKWLSYPSGRFPVEIANEIDGTFSSSGCLNGSFLAVSNDDHYRTGTRFSGVDMNAARLLFHKLIQPDHPQISQQVAASLEKNLIPKLTSSLPDVEALRFYLTLPECPLMSDSNNFTTIAIPFGTALVNLEKAPLKVLENWWSVLEPPLFLKIVELFKEVVVHLLKLYKIGIPPSERRIFNSFLHTALKVLEILHRVNEKMGQIIQYDKFYIHEVQELIDIRNDYINWVQQQAYGMDVNHGLTELADIPVTICTYPFVFDAQAKTTLLQTDAVLQMQMAIDQAHRQNVSSLFLPVIESVNPCLILVVRRENIVGDAMEVLRKTKNIDYKKPLKVIFVGEDAVDAGGVRKEFFLLIMRELLDPKYGMFRYYEDSRLIWFSDKITVENFGATEVKELVLNGADTAVNKQNRQEFVDAYVDYIFNKSVASLFDAFHAGFHKVCGGKVLLLFQPNELQAMVIGNTNYDWKELEKNTEYKGEYWAEHPTIKIFWEVFHELPLEKKKQFLLFLTGSDRIPILGMKSLKLVIQSTGGGEEYLPVSHTCFNLLDLPKYTEKETLRSKLIQAIDHNEGFSLI

SEQ ID NO: 37484 - protein, 110 aa, Homo sapiens
  Payload ID: 7445
  Gene Symbol: HERC4
  Gene Name: HECT and RLD domain containing E3 ubiquitin protein ligase 4
  Uniprot ID: Q5GLZ8
  ENSP ID: ENSP00000422383
MLCWGNASFGQLGLGGIDEEIVLEPRKSDFFINKRVRDVGCGLRHTVFVLDDGTVYTCGCNDLGQLGHEKSRKKPEFRSCFPGRSAMAPSRLTATSASQVQAILLPQPPE

SEQ ID NO: 37485 - protein, 117 aa, Homo sapiens
  Payload ID: 7445
  Gene Symbol: HERC4
  Gene Name: HECT and RLD domain containing E3 ubiquitin protein ligase 4
  Uniprot ID: Q5GLZ8
  ENSP ID: ENSP00000423671
MLCWGNASFGQLGLGGIDEEIVLEPRKSDFFINKRVRDVGCGLRHTVFVLDDGTVYTCGCNDLGQLGHEKSRKKPEILKVCQISRLYRLLVVTIIHLHFLKQVKSSVGDRINMANWV

SEQ ID NO: 37486 - protein, 29 aa, Homo sapiens
  Payload ID: 7445
  Gene Symbol: HERC4
  Gene Name: HECT and RLD domain containing E3 ubiquitin protein ligase 4
  ENSP ID: ENSP00000426563
MLCWGNASFGQLGLGGIDEEIVLEPRKSD

SEQ ID NO: 37487 - protein, 240 aa, Homo sapiens
  Payload ID: 7445
  Gene Symbol: HERC4
  Gene Name: HECT and RLD domain containing E3 ubiquitin protein ligase 4
  ENSP ID: ENSP00000427191
MLCWGNASFGQLGLGGIDEEIVLEPRKSDFFINKRVRDVGCGLRHTVFVLDDGTVYTCGCNDLGQLGHEKSRKKPEQVVALDAQNIVAVSCGEAHTLALNDKGQVYAWGLDSDGQLGLVGSEECIRVPSCFPKIMCVDSLVRICSGLSYGRIRNIKSLSDIQIVQVACGYYHSLALSKASEVFCWGQNKYGQLGLGTDCKKQTSPQLLKSLLGIPFMQVAAGGAHSFVLTLSGAIFGWGR

SEQ ID NO: 37488 - protein, 1024 aa, Homo sapiens
  Payload ID: 7446
  Gene Symbol: HERC5
  Gene Name: HECT and RLD domain containing E3 ubiquitin protein ligase 5
  Uniprot ID: Q9UII4
  ENSP ID: ENSP00000264350
MERRSRRKSRRNGRSTAGKAAATQPAKSPGAQLWLFPSAAGLHRALLRRVEVTRQLCCSPGRLAVLERGGAGVQVHQLLAGSGGARTPKCIKLGKNMKIHSVDQGAEHMLILSSDGKPFEYDNYSMKHLRFESILQEKKIIQITCGDYHSLALSKGGELFAWGQNLHGQLGVGRKFPSTTTPQIVEHLAGVPLAQISAGEAHSMALSMSGNIYSWGKNECGQLGLGHTESKDDPSLIEGLDNQKVEFVACGGSHSALLTQDGLLFTFGAGKHGQLGHNSTQNELRPCLVAELVGYRVTQIACGRWHTLAYVSDLGKVFSFGSGKDGQLGNGGTRDQLMPLPVKVSSSEELKLESHTSEKELIMIAGGNQSILLWIKKENSYVNLKRTIPTLNEGTVKRWIADVETKRWQSTKREIQEIFSSPACLTGSFLRKRRTTEMMPVYLDLNKARNIFKELTQKDWITNMITTCLKDNLLKRLPFHSPPQEALEIFFLLPECPMMHISNNWESLVVPFAKVVCKMSDQSSLVLEEYWATLQESTFSKLVQMFKTAVICQLDYWDESAEENGNVQALLEMLKKLHRVNQVKCQLPESIFQVDELLHRLNFFVEVCRRYLWKMTVDASENVQCCVIFSHFPFIFNNLSKIKLLHTDTLLKIESKKHKAYLRSAAIEEERESEFALRPTFDLTVRRNHLIEDVLNQLSQFENEDLRKELWVSFSGEIGYDLGGVKKEFFYCLFAEMIQPEYGMFMYPEGASCMWFPVKPKFEKKRYFFFGVLCGLSLFNCNVANLPFPLALFKKLLDQMPSLEDLKELSPDLGKNLQTLLDDEGDNFEEVFYIHFNVHWDRNDTNLIPNGSSITVNQTNKRDYVSKYINYIFNDSVKAVYEEFRRGFYKMCDEDIIKLFHPEELKDVIVGNTDYDWKTFEKNARYEPGYNSSHPTIVMFWKAFHKLTLEEKKKFLVFLTGTDRLQMKDLNNMKITFCCPESWNERDPIRALTCFSVLFLPKYSTMETVEEALQEAINNNRGFG

SEQ ID NO: 37489 - protein, 662 aa, Homo sapiens
  Payload ID: 7446
  Gene Symbol: HERC5
  Gene Name: HECT and RLD domain containing E3 ubiquitin protein ligase 5
  ENSP ID: ENSP00000424129
MIAGGNQSILLWIKKENSYVNLKRTIPTLNEGTVKRWIADVETKRWQSTKREIQEIFSSPACLTGSFLRKRRTTEMMPVYLDLNKARNIFKELTQKDWITNMITTCLKDNLLKRLPFHSPPQEALEIFFLLPECPMMHISNNWESLVVPFAKVVCKMSDQSSLVLEEYWATLQESTFSKLVQMFKTAVICQLDYWDESAEENGNVQALLEMLKKLHRVNQVKCQLPESIFQVDELLHRLNFFVEVCRRYLWKMTVDASENVQCCVIFSHFPFIFNNLSKIKLLHTDTLLKIESKKHKAYLRSAAIEEERESEFALRPTFDLTVRRNHLIEDVLNQLSQFENEDLRKELWVSFSGEIGYDLGGVKKEFFYCLFAEMIQPEYGMFMYPEGASCMWFPVKPKFEKKRYFFFGVLCGLSLFNCNVANLPFPLALFKKLLDQMPSLEDLKELSPDLGKNLQTLLDDEGDNFEEVFYIHFNVHWDRNDTNLIPNGSSITVNQTNKRDYVSKYINYIFNDSVKAVYEEFRRGFYKMCDEDIIKLFHPEELKDVIVGNTDYDWKTFEKNARYEPGYNSSHPTIVMFWKAFHKLTLEEKKKFLVFLTGTDRLQMKDLNNMKITFCCPESWNERDPIRALTCFSVLFLPKYSTMETVEEALQEAINNNRGFG

SEQ ID NO: 37490 - protein, 4861 aa, Homo sapiens
  Payload ID: 7447
  Gene Symbol: HERC1
  Gene Name: HECT and RLD domain containing E3 ubiquitin protein ligase family member 1
  Uniprot ID: Q15751
  ENSP ID: ENSP00000390158
MATMIPPVKLKWLEHLNSSWITEDSESIATREGVAVLYSKLVSNKEVVPLPQQVLCLKGPQLPDFERESLSSDEQDHYLDALLSSQLALAKMVCSDSPFAGALRKRLLVLQRVFYALSNKYHDKGKVKQQQHSPESSSGSADVHSVSERPRSSTDALIEMGVRTGLSLLFALLRQSWMMPVSGPGLSLCNDVIHTAIEVVSSLPPLSLANESKIPPMGLDCLSQVTTFLKGVTIPNSGADTLGRRLASELLLGLAAQRGSLRYLLEWIEMALGASAVVHTMEKGKLLSSQEGMISFDCFMTILMQMRRSLGSSADRSQWREPTRTSDGLCSLYEAALCLFEEVCRMASDYSRTCASPDSIQTGDAPIVSETCEVYVWGSNSSHQLVEGTQEKILQPKLAPSFSDAQTIEAGQYCTFVISTDGSVRACGKGSYGRLGLGDSNNQSTLKKLTFEPHRSIKKVSSSKGSDGHTLAFTTEGEVFSWGDGDYGKLGHGNSSTQKYPKLIQGPLQGKVVVCVSAGYRHSAAVTEDGELYTWGEGDFGRLGHGDSNSRNIPTLVKDISNVGEVSCGSSHTIALSKDGRTVWSFGGGDNGKLGHGDTNRVYKPKVIEALQGMFIRKVCAGSQSSLALTSTGQVYAWGCGACLGCGSSEATALRPKLIEELAATRIVDVSIGDSHCLALSHDNEVYAWGNNSMGQCGQGNSTGPITKPKKVSGLDGIAIQQISAGTSHSLAWTALPRDRQVVAWHRPYCVDLEESTFSHLRSFLERYCDKINSEIPPLPFPSSREHHSFLKLCLKLLSNHLALALAGGVATSILGRQAGPLRNLLFRLMDSTVPDEIQEVVIETLSVGATMLLPPLRERMELLHSLLPQGPDRWESLSKGQRMQLDIILTSLQDHTHVASLLGYSSPSDAADLSSVCTGYGNLSDQPYGTQSCHPDTHLAEILMKTLLRNLGFYTDQAFGELEKNSDKFLLGTSSSENSQPAHLHELLCSLQKQLLAFCHINNISENSSSVALLHKHLQLLLPHATDIYSRSANLLKESPWNGSVGEKLRDVIYVSAAGSMLCQIVNSLLLLPVSVARPLLSYLLDLLPPLDCLNRLLPAADLLEDQELQWPLHGGPELIDPAGLPLPQPAQSWVWLVDLERTIALLIGRCLGGMLQGSPVSPEEQDTAYWMKTPLFSDGVEMDTPQLDKCMSCLLEVALSGNEEQKPFDYKLRPEIAVYVDLALGCSKEPARSLWISMQDYAVSKDWDSATLSNESLLDTVSRFVLAALLKHTNLLSQACGESRYQPGKHLSEVYRCVYKVRSRLLACKNLELIQTRSSSRDRWISENQDSADVDPQEHSFTRTIDEEAEMEEQAERDREEGHPEPEDEEEEREHEVMTAGKIFQCFLSAREVARSRDRDRMNSGAGSGARADDPPPQSQQERRVSTDLPEGQDVYTAACNSVIHRCALLILGVSPVIDELQKRREEGQLQQPSTSASEGGGLMTRSESLTAESRLVHTSPNYRLIKSRSESDLSQPESDEEGYALSGRRNVDLDLAASHRKRGPMHSQLESLSDSWARLKHSRDWLCNSSYSFESDFDLTKSLGVHTLIENVVSFVSGDVGNAPGFKEPEESMSTSPQASIIAMEQQQLRAELRLEALHQILVLLSGMEEKGSISLAGSRLSSGFQSSTLLTSVRLQFLAGCFGLGTVGHTGGKGESGRLHHYQDGIRAAKRNIQIEIQVAVHKIYQQLSATLERALQANKHHIEAQQRLLLVTVFALSVHYQPVDVSLAISTGLLNVLSQLCGTDTMLGQPLQLLPKTGVSQLSTALKVASTRLLQILAITTGTYADKLSPKVVQSLLDLLCSQLKNLLSQTGVLHMASFGEGEQEDGEEEEKKVDSSGETEKKDFRAALRKQHAAELHLGDFLVFLRRVVSSKAIQSKMASPKWTEVLLNIASQKCSSGIPLVGNLRTRLLALHVLEAVLPACESGVEDDQMAQIVERLFSLLSDCMWETPIAQAKHAIQIKEKEQEIKLQKQGELEEEDENLPIQEVSFDPEKAQCCLVENGQILTHGSGGKGYGLASTGVTSGCYQWKFYIVKENRGNEGTCVGVSRWPVHDFNHRTTSDMWLYRAYSGNLYHNGEQTLTLSSFTQGDFITCVLDMEARTISFGKNGEEPKLAFEDVDAAELYPCVMFYSSNPGEKVKICDMQMRGTPRDLLPGDPICSPVAAVLAEATIQLIRILHRTDRWTYCINKKMMERLHKIKICIKESGQKLKKSRSVQSREENEMREEKESKEEEKGKHTRHGLADLSELQLRTLCIEVWPVLAVIGGVDAGLRVGGRCVHKQTGRHATLLGVVKEGSTSAKVQWDEAEITISFPTFWSPSDTPLYNLEPCEPLPFDVARFRGLTASVLLDLTYLTGVHEDMGKQSTKRHEKKHRHESEEKGDVEQKPESESALDMRTGLTSDDVKSQSTTSSKSENEIASFSLDPTLPSVESQHQITEGKRKNHEHMSKNHDVAQSEIRAVQLSYLYLGAMKSLSALLGCSKYAELLLIPKVLAENGHNSDCASSPVVHEDVEMRAALQFLMRHMVKRAVMRSPIKRALGLADLERAQAMIYKLVVHGLLEDQFGGKIKQEIDQQAEESDPAQQAQTPVTTSPSASSTTSFMSSSLEDTTTATTPVTDTETVPASESPGVMPLSLLRQMFSSYPTTTVLPTRRAQTPPISSLPTSPSDEVGRRQSLTSPDSQSARPANRTALSDPSSRLSTSPPPPAIAVPLLEMGFSLRQIAKAMEATGARGEADAQNITVLAMWMIEHPGHEDEEEPQSGSTADSRPGAAVLGSGGKSNDPCYLQSPGDIPSADAAEMEEGFSESPDNLDHTENAASGSGPSARGRSAVTRRHKFDLAARTLLARAAGLYRSVQAHRNQSRREGISLQQDPGALYDFNLDEELEIDLDDEAMEAMFGQDLTSDNDILGMWIPEVLDWPTWHVCESEDREEVVVCELCECSVVSFNQHMKRNHPGCGRSANRQGYRSNGSYVDGWFGGECGSGNPYYLLCGTCREKYLAMKTKSKSTSSERYKGQAPDLIGKQDSVYEEDWDMLDVDEDEKLTGEEEFELLAGPLGLNDRRIVPEPVQFPDSDPLGASVAMVTATNSMEETLMQIGCHGSVEKSSSGRITLGEQAAALANPHDRVVALRRVTAAAQVLLARTMVMRALSLLSVSGSSCSLAAGLESLGLTDIRTLVRLMCLAAAGRAGLSTSPSAMASTSERSRGGHSKANKPISCLAYLSTAVGCLASNAPSAAKLLVQLCTQNLISAATGVNLTTVDDSIQRKFLPSFLRGIAEENKLVTSPNFVVTQALVALLADKGAKLRPNYDKSEVEKKGPLELANALAACCLSSRLSSQHRQWAAQQLVRTLAAHDRDNQTTLQTLADMGGDLRKCSFIKLEAHQNRVMTCVWCNKKGLLATSGNDGTIRVWNVTKKQYSLQQTCVFNRLEGDAEESLGSPSDPSFSPVSWSISGKYLAGALEKMVNIWQVNGGKGLVDIQPHWVSALAWPEEGPATAWSGESPELLLVGRMDGSLGLIEVVDVSTMHRRELEHCYRKDVSVTCIAWFSEDRPFAVGYFDGKLLLGTKEPLEKGGIVLIDAHKDTLISMKWDPTGHILMTCAKEDSVKLWGSISGCWCCLHSLCHPSIVNGIAWCRLPGKGSKLQLLMATGCQSGLVCVWRIPQDTTQTNVTSAEGWWEQESNCQDGYRKSSGAKCVYQLRGHITPVRTVAFSSDGLALVSGGLGGLMNIWSLRDGSVLQTVVIGSGAIQTTVWIPEVGVAACSNRSKDVLVVNCTAEWAAANHVLATCRTALKQQGVLGLNMAPCMRAFLERLPMMLQEQYAYEKPHVVCGDQLVHSPYMQCLASLAVGLHLDQLLCNPPVPPHHQNCLPDPASWNPNEWAWLECFSTTIKAAEALTNGAQFPESFTVPDLEPVPEDELVFLMDNSKWINGMDEQIMSWATSRPEDWHLGGKCDVYLWGAGRHGQLAEAGRNVMVPAAAPSFSQAQQVICGQNCTFVIQANGTVLACGEGSYGRLGQGNSDDLHVLTVISALQGFVVTQLVTSCGSDGHSMALTESGEVFSWGDGDYGKLGHGNSDRQRRPRQIEALQGEEVVQMSCGFKHSAVVTSDGKLFTFGNGDYGRLGLGNTSNKKLPERVTALEGYQIGQVACGLNHTLAVSADGSMVWAFGDGDYGKLGLGNSTAKSSPQKIDVLCGIGIKKVACGTQFSVALTKDGHVYTFGQDRLIGLPEGRARNHNRPQQIPVLAGVIIEDVAVGAEHTLALASNGDVYAWGSNSEGQLGLGHTNHVREPTLVTGLQGKNVRQISAGRCHSAAWTAPPVPPRAPGVSVPLQLGLPDTVPPQYGALREVSIHTVRARLRLLYHFSDLMYSSWRLLNLSPNNQNSTSHYNAGTWGIVQGQLRPLLAPRVYTLPMVRSIGKTMVQGKNYGPQITVKRISTRGRKCKPIFVQIARQVVKLNASDLRLPSRAWKVKLVGEGADDAGGVFDDTITEMCQELETGIVDLLIPSPNATAEVGYNRDRFLFNPSACLDEHLMQFKFLGILMGVAIRTKKPLDLHLAPLVWKQLCCVPLTLEDLEEVDLLYVQTLNSILHIEDSGITEESFHEMIPLDSFVGQSADGKMVPIIPGGNSIPLTFSNRKEYVERAIEYRLHEMDRQVAAVREGMSWIVPVPLLSLLTAKQLEQMVCGMPEISVEVLKKVVRYREVDEQHQLVQWFWHTLEEFSNEERVLFMRFVSGRSRLPANTADISQRFQIMKVDRPYDSLPTSQTCFFQLRLPPYSSQLVMAERLRYAINNCRSIDMDNYMLSRNVDNAEGSDTDY

SEQ ID NO: 37491 - protein, 165 aa, Homo sapiens
  Payload ID: 7447
  Gene Symbol: HERC1
  Gene Name: HECT and RLD domain containing E3 ubiquitin protein ligase family member 1
  ENSP ID: ENSP00000452654
  MOD_RES (1)..(1): Any amino acid
XGGVDAGLRVGGRCVHKQTGRHATLLGVVKEGSTSAKVQWDEAEITISDTPLYNLEPCEPLPFDVARFRGLTASVLLDLTYLTGVHEDMGKQSTKRHEKKHRHESEEKGDVEQKPESESALDMRTGLTSDDVKSQSTTSSKSENEIASFSLDPTLPSVESQHQIT

SEQ ID NO: 37492 - protein, 26 aa, Homo sapiens
  Payload ID: 7447
  Gene Symbol: HERC1
  Gene Name: HECT and RLD domain containing E3 ubiquitin protein ligase family member 1
  ENSP ID: ENSP00000452671
NSDDLHVLTVISALQDFKGHLHQSSL

SEQ ID NO: 37493 - protein, 145 aa, Homo sapiens
  Payload ID: 7447
  Gene Symbol: HERC1
  Gene Name: HECT and RLD domain containing E3 ubiquitin protein ligase family member 1
  ENSP ID: ENSP00000452969
MATMIPPVKLKWLEHLNSSWITEDSESIATREGVAVLYSKLVSNKEVVPLPQQVLCLKGPQLPDFERESLSSDEQDHYLDALLSSQLALAKMVCSDSPFAGALRKRLLVLQRVFYALSNKYHDKGKVKQQQHSPESSSGSADVHS

SEQ ID NO: 37494 - protein, 20 aa, Homo sapiens
  Payload ID: 7447
  Gene Symbol: HERC1
  Gene Name: HECT and RLD domain containing E3 ubiquitin protein ligase family member 1
  ENSP ID: ENSP00000453010
MATMIPPVKLKWLEHLNSSW

SEQ ID NO: 37495 - protein, 153 aa, Homo sapiens
  Payload ID: 7447
  Gene Symbol: HERC1
  Gene Name: HECT and RLD domain containing E3 ubiquitin protein ligase family member 1
  ENSP ID: ENSP00000453086
MATMIPPVKLKWLEHLNSSWITEDSESIATREGVAVLYSKLVSNKEVVPLPQQVLCLKGPQLPDFERESLSSDEQDHYLDALLSSQLALAKMVCSDSPFAGALRKRLLVLQRVFYALSNKYHDKGKVKQQQHSPESSSGSADVHSVSERPRSS

SEQ ID NO: 37496 - protein, 152 aa, Homo sapiens
  Payload ID: 7447
  Gene Symbol: HERC1
  Gene Name: HECT and RLD domain containing E3 ubiquitin protein ligase family member 1
  ENSP ID: ENSP00000453196
  MOD_RES (1)..(1): Any amino acid
XDVAVGAEHTLALASNGDVYAWGSNSEGQLGLGHTNHVREPTLVTGLQGKNVRQISAGRCHSAAWTAPPVPPRAPGVSVPLQLGLPDTVPPQYGALREVSIHTVRARLRLLYHFSDLMYSSWRLLNLSPNNQVTDWRGKQPGTDWLEQHIPL

SEQ ID NO: 37497 - protein, 47 aa, Homo sapiens
  Payload ID: 7447
  Gene Symbol: HERC1
  Gene Name: HECT and RLD domain containing E3 ubiquitin protein ligase family member 1
  ENSP ID: ENSP00000453603
  MOD_RES (1)..(1): Any amino acid
XNSTAKSSPQKIDVLCGIGIKKVACGTQFSVALTKDGHVYTFGQGGE

SEQ ID NO: 37498 - protein, 691 aa, Homo sapiens
  Payload ID: 7447
  Gene Symbol: HERC1
  Gene Name: HECT and RLD domain containing E3 ubiquitin protein ligase family member 1
  ENSP ID: ENSP00000453937
MATMIPPVKLKWLEHLNSSWITEDSESIATREGVAVLYSKLVSNKEVVPLPQQVLCLKGPQLPDFERESLSSDEQDHYLDALLSSQLALAKMVCSDSPFAGALRKRLLVLQRVFYALSNKYHDKGKVKQQQHSPESSSGSADVHSVSERPRSSTDALIEMGVRTGLSLLFALLRQSWMMPVSGPGLSLCNDVIHTAIEVVSSLPPLSLANESKIPPMGLDCLSQVTTFLKGVTIPNSGADTLGRRLASELLLGLAAQRGSLRYLLEWIEMALGASAVVHTMEKGKLLSSQEGMISFDCFMTILMQMRRSLISENQDSADVDPQEHSFTRTIDEEAEMEEQAERDREEGHPEPEDEEEEREHEVMTAGKIFQCFLSAREVARSRDRDRMNSGAGSGARADDPPPQSQQERRVSTDLPEGQDVYTAACNSVIHRCALLILGVSPVIDELQKRREEGQLQQPSTSASEGGGLMTRSESLTAESRLVHTSPNYRLIKSRSESDLSQPESDEEGYALSGRRNVDLDLAASHRKRGPMHSQLESLSDSWARLKHSRDWLCNSSYSFESDFDLTKSLGVHTLIENVVSFVSGDVGNAPGFKEPEESMSTSPQASIIAMEQQQLRAELRLEALHQILVLLSGMEEKGSISLAGSRLSSGFQSSTLLTSVRLQFLAGCFGLGTVGHTGGKGESGRLHHYQ

SEQ ID NO: 37499 - protein, 1022 aa, Homo sapiens
  Payload ID: 7448
  Gene Symbol: HERC6
  Gene Name: HECT and RLD domain containing E3 ubiquitin protein ligase family member 6
  Uniprot ID: Q8IVU3
  ENSP ID: ENSP00000264346
MYFCWGADSRELQRRRTAGSPGAELLQAASGERHSLLLLTNHRVLSCGDNSRGQLGRRGAQRGELPEPIQALETLIVDLVSCGKEHSLAVCHKGRVFAWGAGSEGQLGIGEFKEISFTPKKIMTLNDIKIIQVSCGHYHSLALSKDSQVFSWGKNSHGQLGLGKEFPSQASPQRVRSLEGIPLAQVAAGGAHSFALSLCGTSFGWGSNSAGQLALSGRNVPVQSNKPLSVGALKNLGVVYISCGDAHTAVLTQDGKVFTFGDNRSGQLGYSPTPEKRGPQLVERIDGLVSQIDCGSYHTLAYVHTTGQVVSFGHGPSDTSKPTHPEALTENFDISCLISAEDFVDVQVKHIFAGTYANFVTTHQDTSSTRAPGKTLPEISRISQSMAEKWIAVKRRSTEHEMAKSEIRMIFSSPACLTASFLKKRGTGETTSIDVDLEMARDTFKKLTKKEWISSMITTCLEDDLLRALPCHSPHQEALSVFLLLPECPVMHDSKNWKNLVVPFAKAVCEMSKQSLQVLKKCWAFLQESSLNPLIQMLKAAIISQLLHQTKTEQDHCNVKALLGMMKELHKVNKANCRLPENTFNINELSNLLNFYIDRGRQLFRDNHLIPAETPSPVIFSDFPFIFNSLSKIKLLQADSHIKMQMSEKKAYMLMHETILQKKDEFPPSPRFILRVRRSRLVKDALRQLSQAEATDFCKVLVVEFINEICPESGGVSSEFFHCMFEEMTKPEYGMFMYPEMGSCMWFPAKPKPEKKRYFLFGMLCGLSLFNLNVANLPFPLALYKKLLDQKPSLEDLKELSPRLGKSLQEVLDDAADDIGDALCIRFSIHWDQNDVDLIPNGISIPVDQTNKRDYVSKYIDYIFNVSVKAVYEEFQRGFYRVCEKEILRHFYPEELMTAIIGNTDYDWKQFEQNSKYEQGYQKSHPTIQLFWKAFHKLTLDEKKKFLFFLTGRDRLHARGIQKMEIVFRCPETFSERDHPTSITCHNILSLPKYSTMERMEEALQVAINNNRGFVSPMLTQS

SEQ ID NO: 37500 - protein, 322 aa, Homo sapiens
  Payload ID: 7448
  Gene Symbol: HERC6
  Gene Name: HECT and RLD domain containing E3 ubiquitin protein ligase family member 6
  ENSP ID: ENSP00000273960
MYFCWGADSRELQRRRTAGSPGAELLQAASGERHSLLLLTNHRVLSCGDNSRGQLGRRGAQRGELPEPIQALETLIVDLVSCGKEHSLAVCHKGRVFAWGAGSEGQLGIGEFKEISFTPKKIMTLNDIKIIQVSCGHYHSLALSKDSQVFSWGKNSHGQLGLGKEFPSQASPQRVRSLEGIPLAQVAAGGAHSFALSLCGTSFGWGSNSAGQLALSGRNVPVQSNKPLSVGALKNLGVVYISCGDAHTAVLTQDGKVFTFGDNRSGQLGYSPTPEKRGPQLVERIDGLVSQIDCGRLRGCSSQTHFCWNICQLCDNSSVKLE

SEQ ID NO: 37501 - protein, 986 aa, Homo sapiens
  Payload ID: 7448
  Gene Symbol: HERC6
  Gene Name: HECT and RLD domain containing E3 ubiquitin protein ligase family member 6
  Uniprot ID: Q8IVU3
  ENSP ID: ENSP00000369617
MYFCWGADSRELQRRRTAGSPGAELLQAASGERHSLLLLTNHRVLSCGDNSRGQLGRRGAQRGELPEPIQALETLIVDLVSCGKEHSLAVCHKGRVFAWGAGSEGQLGIGEFKEISFTPKKIMTLNDIKIIQVSCGHYHSLALSKDSQVFSWGKNSHGQLGLGKEFPSQASPQRVRSLEGIPLAQVAAGGAHSFALSLCGTSFGWGSNSAGQLALSGRNVPVQSNKPLSVGALKNLGVVYISCGDAHTAVLTQDGKVFTFGDNRSGQLGYSPTPEKRGPQLVERIDGLVSQIDCGSYHTLAYVHTTGQVVSFGHGPSDTSKPTHPEALTENFDISCLISAEDFVDVQVKHIFAGTYANFVTTHQDTSSTRAPGKTLPEISRISQSMAEKWIAVKRRSTEHEMAKSEIRMIFSSPACLTASFLKKRGTGETTSIDVDLEMARDTFKKLTKKEWISSMITTCLEDDLLRALPCHSPHQEALSVFLLLPECPVMHDSKNWKNLVVPFAKAVCEMSKQSLQVLKKCWAFLQESSLNPLIQMLKAAIISQLLHQTKTEQDHCNVKALLGMMKELHKVNKANCRLPENTFNINELSNLLNFYIDRGRQLFRDNHLMSEKKAYMLMHETILQKKDEFPPSPRFILRVRRSRLVKDALRQLSQAEATDFCKVLVVEFINEICPESGGVSSEFFHCMFEEMTKPEYGMFMYPEMGSCMWFPAKPKPEKKRYFLFGMLCGLSLFNLNVANLPFPLALYKKLLDQKPSLEDLKELSPRLGKSLQEVLDDAADDIGDALCIRFSIHWDQNDVDLIPNGISIPVDQTNKRDYVSKYIDYIFNVSVKAVYEEFQRGFYRVCEKEILRHFYPEELMTAIIGNTDYDWKQFEQNSKYEQGYQKSHPTIQLFWKAFHKLTLDEKKKFLFFLTGRDRLHARGIQKMEIVFRCPETFSERDHPTSITCHNILSLPKYSTMERMEEALQVAINNNRGFVSPMLTQS

SEQ ID NO: 37502 - protein, 186 aa, Homo sapiens
  Payload ID: 7448
  Gene Symbol: HERC6
  Gene Name: HECT and RLD domain containing E3 ubiquitin protein ligase family member 6
  ENSP ID: ENSP00000425060
  MOD_RES (1)..(1): Any amino acid
XDNSRGQLGRRGAQRGELPVVVGGCFVLFPKEPIQALETLIVDLVSCGKEHSLAVCHKGRVFAWGAGSEGQLGIGEFKEISFTPKKIMTLNDIKIIQVSCGHYHSLALSKDSQVFSWGKNSHGQLGLGKEFPSQASPQRVRSLEGIPLAQVAAGGAHSFALSLCGTSFGWGSNSAGQLALSGRNVP

SEQ ID NO: 37503 - protein, 73 aa, Homo sapiens
  Payload ID: 7448
  Gene Symbol: HERC6
  Gene Name: HECT and RLD domain containing E3 ubiquitin protein ligase family member 6
  ENSP ID: ENSP00000425504
MYFCWGADSRELQRRRTAGSPGAELLQAASGERHSLLLLTNHRVLSCGDNSRGQLGRRGAQRGELPGIGNPNC

SEQ ID NO: 37504 - protein, 909 aa, Homo sapiens
  Payload ID: 7449
  Gene Symbol: HACE1
  Gene Name: HECT domain and ankyrin repeat containing E3 ubiquitin protein ligase 1
  Uniprot ID: Q8IYU2
  ENSP ID: ENSP00000262903
MERAMEQLNRLTRSLRRARTVELPEDNETAVYTLMPMVMADQHRSVSELLSNSKFDVNYAFGRVKRSLLHIAANCGSVECLVLLLKKGANPNYQDISGCTPLHLAARNGQKKCMSKLLEYSADVNICNNEGLTAIHWLAVNGRTELLHDLVQHVSDVDVEDAMGQTALHVACQNGHKTTVQCLLDSGADINRPNVSGATPLYFACSHGQRDTAQILLLRGAKYLPDKNGVTPLDLCVQGGYGETCEVLIQYHPRLFQTIIQMTQNEDLRENMLRQVLEHLSQQSESQYLKILTSLAEVATTNGHKLLSLSSNYDAQMKSLLRIVRMFCHVFRIGPSSPSNGIDMGYNGNKTPRSQVFKPLELLWHSLDEWLVLIATELMKNKRDSTEITSILLKQKGQDQDAASIPPFEPPGPGSYENLSTGTRESKPDALAGRQEASADCQDVISMTANRLSAVIQAFYMCCSCQMPPGMTSPRFIEFVCKHDEVLKCFVNRNPKIIFDHFHFLLECPELMSRFMHIIKAQPFKDRCEWFYEHLHSGQPDSDMVHRPVNENDILLVHRDSIFRSSCEVVSKANCAKLKQGIAVRFHGEEGMGQGVVREWFDILSNEIVNPDYALFTQSADGTTFQPNSNSYVNPDHLNYFRFAGQILGLALNHRQLVNIYFTRSFYKHILGIPVNYQDVASIDPEYAKNLQWILDNDISDLGLELTFSVETDVFGAMEEVPLKPGGGSILVTQNNKAEYVQLVTELRMTRAIQPQINAFLQGFHMFIPPSLIQLFDEYELELLLSGMPEIDVSDWIKNTEYTSGYEREDPVIQWFWEVVEDITQEERVLLLQFVTGSSRVPHGGFANIMGGSGLQNFTIAAVPYTPNLLPTSSTCINMLKLPEYPSKEILKDRLLVALHCGSYGYTMA

SEQ ID NO: 37505 - protein, 694 aa, Homo sapiens
  Payload ID: 7449
  Gene Symbol: HACE1
  Gene Name: HECT domain and ankyrin repeat containing E3 ubiquitin protein ligase 1
  Uniprot ID: Q8IYU2
  ENSP ID: ENSP00000358121
MERAMEQLNRLTRSLRRARTVELPEDNETAVYTLMPMVMADQHRSVSELLSNSKFDVNYAFGRVKRSLLHIAANCGSVECLVLLLKKGANPNYQDISGCTPLHLAARNGQKKCMSKLLEYSADVNICNNEGLTAIHWLAVNGRTELLHDLVQHVSDVDVEDAMGQTALHVACQNGHKTTVQCLLDSGADINRPNVSGATPLYFACSHGQRDTAQILLLRGAKYLPDKNGVTPLDLCVQGGYGETCEVLIQYHPRLFQTIIQMTQNEDLRENMLRQVLEHLSQQSESQYLKILTSLAEVATTNGHKLLSLSSNYDAQMKSLLRIVRMFCHVFRIGPSSPSNGIDMGYNGNKTPRSQVFKPLELLWHSLDEWLVLIATELMKNKRDSTEITSILLKQKGQDQDAASIPPFEPPGPGSYENLSTGTRESKPDALAGRQEASADCQDVISMTANRLSAVIQAFYMCCSCQMPPGMTSPRFIEFVCKHDEVLKCFVNRNPKIIFDHFHFLLECPELMSRFMHIIKAQAEYVQLVTELRMTRAIQPQINAFLQGFHMFIPPSLIQLFDEYELELLLSGMPEIDVSDWIKNTEYTSGYEREDPVIQWFWEVVEDITQEERVLLLQFVTGSSRVPHGGFANIMGGSGLQNFTIAAVPYTPNLLPTSSTCINMLKLPEYPSKEILKDRLLVALHCGSYGYTMA

SEQ ID NO: 37506 - protein, 178 aa, Homo sapiens
  Payload ID: 7449
  Gene Symbol: HACE1
  Gene Name: HECT domain and ankyrin repeat containing E3 ubiquitin protein ligase 1
  ENSP ID: ENSP00000392425
MERAMEQLNRLTRSLRRARTVELPEDNETAVYTLMPMVMADQHRSVSELLSNSKFDVNYAFGRVKRSLLHIAANCGSVECLVLLLKKGANPNYQDISGCTPLHLAARNGQKKCMSKLLEYSADVNICNNEGLTAIHWLAVNGRTELLHDLVQHVSDVDVEDAMGQTALHVACQNGHKT

SEQ ID NO: 37507 - protein, 138 aa, Homo sapiens
  Payload ID: 7449
  Gene Symbol: HACE1
  Gene Name: HECT domain and ankyrin repeat containing E3 ubiquitin protein ligase 1
  ENSP ID: ENSP00000427901
MPMVMADQHRSVSELLSNSKFDVNYAFGRVKRSLLHIAANCGSVECLVLLLKKGANPNYQDISGCTPLHLAARNGQKKCMSKLLEYSADVNICNNEGLTAIHWLAVNGRTELLHDLVQHVSDVDVEDAMGQTALHVAC

SEQ ID NO: 37508 - protein, 300 aa, Homo sapiens
  Payload ID: 7449
  Gene Symbol: HACE1
  Gene Name: HECT domain and ankyrin repeat containing E3 ubiquitin protein ligase 1
  ENSP ID: ENSP00000428110
  MOD_RES (1)..(1): Any amino acid
XCEVVSKANCAKLKQGIAVRFHGEEGMGQGVVREWFDILSNEIVNPDYALFTQSADGTTFQPNSNSYVNPDHLNYFRFAGQILGLALNHRQLVNIYFTRSFYKHILGIPVNYQDVASIDPEYAKNLQWILDNDISDLGLELTFSVETDVFGAMEEVPLKPGGGSILVTQNNKELLLSGMPEIDVSDWIKNTEYTSGYEREDPVIQWFWEVVEDITQEERVLLLQFVTGSSRVPHGGFANIMGGSGLQNFTIAAVPYTPNLLPTSSTCINMLKLPEYPSKEILKDRLLVALHCGSYGYTMA

SEQ ID NO: 37509 - protein, 329 aa, Homo sapiens
  Payload ID: 7449
  Gene Symbol: HACE1
  Gene Name: HECT domain and ankyrin repeat containing E3 ubiquitin protein ligase 1
  ENSP ID: ENSP00000429520
  MOD_RES (1)..(1): Any amino acid
XIKAQPFKDRCEWFYEHLHSGQPDSDMVHRPVNENDILLVHRDSIFRSSCEVVSKANCAKLKQGIAVRFHGEEGMGQGVVREWFDILSNEIVNPDYALFTQSADGTTFQPNSNSYVNPDHLNYFRFAGQILGLALNHRQLVNIYFTRSFYKHILGIPVNYQDVASIDPEYAKNLQWILDNDISDLGLELTFSVETDVFGAMEEVPLKPGGGSILVTQNNKELLLSGMPEIDVSDWIKNTEYTSGYEREDPVIQFVTGSSRVPHGGFANIMGGSGLQNFTIAAVPYTPNLLPTSSTCINMLKLPEYPSKEILKDRLLVALHCGSYGYTMA

SEQ ID NO: 37510 - protein, 207 aa, Homo sapiens
  Payload ID: 7449
  Gene Symbol: HACE1
  Gene Name: HECT domain and ankyrin repeat containing E3 ubiquitin protein ligase 1
  ENSP ID: ENSP00000429765
MERAMEQLNRLTRSLRRARTVELPEDNETAVYTLMPMVMADQHRSVSELLSNSKFDVNYAFGRVKRSLLHIAANCGSVECLVLLLKKGANPNYQDISGCTPLHLAARNGQKKCMSKLLEYSADVNICNNEGLTATVQCLLDSGADINRPNVSGATPLYFACSHGQRDTAQILLLRGAKYLPDKNGVTPLDLCVQGGYGETCEVLIQY

SEQ ID NO: 37511 - protein, 44 aa, Homo sapiens
  Payload ID: 7449
  Gene Symbol: HACE1
  Gene Name: HECT domain and ankyrin repeat containing E3 ubiquitin protein ligase 1
  ENSP ID: ENSP00000430669
  MOD_RES (1)..(1): Any amino acid
XSLRRARTVELPEELRGGPGPRTPLARRSHPGRDEVSLCSPGWS

SEQ ID NO: 37512 - protein, 175 aa, Homo sapiens
  Payload ID: 7449
  Gene Symbol: HACE1
  Gene Name: HECT domain and ankyrin repeat containing E3 ubiquitin protein ligase 1
  ENSP ID: ENSP00000430898
  MOD_RES (1)..(1): Any amino acid
XQDAASIPPFEPPGPGSYENLSTGTRESKPDALAGRQEASADCQDVISMTANRLSAVIQAFYMCCSCQMPPGMTSPRFIEFVCKHDEVLKCFVNRNPKIIFDHFHFLLECPELMSRFMHIIKAQPFKDRCEWFYEHLHSGQPDSDMVHRPVNENDILLVHRGVAVKLCQKQIVQS

SEQ ID NO: 37513 - protein, 2610 aa, Homo sapiens
  Payload ID: 7450
  Gene Symbol: HECTD1
  Gene Name: HECT domain containing E3 ubiquitin protein ligase 1
  Uniprot ID: Q9ULT8
  ENSP ID: ENSP00000382269
MADVDPDTLLEWLQMGQGDERDMQLIALEQLCMLLLMSDNVDRCFETCPPRTFLPALCKIFLDESAPDNVLEVTARAITYYLDVSAECTRRIVGVDGAIKALCNRLVVVELNNRTSRDLAEQCVKVLELICTRESGAVFEAGGLNCVLTFIRDSGHLVHKDTLHSAMAVVSRLCGKMEPQDSSLEICVESLSSLLKHEDHQVSDGALRCFASLADRFTRRGVDPAPLAKHGLTEELLSRMAAAGGTVSGPSSACKPGRSTTGAPSTTADSKLSNQVSTIVSLLSTLCRGSPVVTHDLLRSELPDSIESALQGDERCVLDTMRLVDLLLVLLFEGRKALPKSSAGSTGRIPGLRRLDSSGERSHRQLIDCIRSKDTDALIDAIDTGAFEVNFMDDVGQTLLNWASAFGTQEMVEFLCERGADVNRGQRSSSLHYAACFGRPQVAKTLLRHGANPDLRDEDGKTPLDKARERGHSEVVAILQSPGDWMCPVNKGDDKKKKDTNKDEEECNEPKGDPEMAPIYLKRLLPVFAQTFQQTMLPSIRKASLALIRKMIHFCSEALLKEVCDSDVGHNLPTILVEITATVLDQEDDDDGHLLALQIIRDLVDKGGDIFLDQLARLGVISKVSTLAGPSSDDENEEESKPEKEDEPQEDAKELQQGKPYHWRDWSIIRGRDCLYIWSDAAALELSNGSNGWFRFILDGKLATMYSSGSPEGGSDSSESRSEFLEKLQRARGQVKPSTSSQPILSAPGPTKLTVGNWSLTCLKEGEIAIHNSDGQQATILKEDLPGFVFESNRGTKHSFTAETSLGSEFVTGWTGKRGRKLKSKLEKTKQKVRTMARDLYDDHFKAVESMPRGVVVTLRNIATQLESSWELHTNRQCIESENTWRDLMKTALENLIVLLKDENTISPYEMCSSGLVQALLTVLNNSMDLDMKQDCSQLVERINVFKTAFSENEDDESRPAVALIRKLIAVLESIERLPLHLYDTPGSTYNLQILTRRLRFRLERAPGETALIDRTGRMLKMEPLATVESLEQYLLKMVAKQWYDFDRSSFVFVRKLREGQNFIFRHQHDFDENGIIYWIGTNAKTAYEWVNPAAYGLVVVTSSEGRNLPYGRLEDILSRDNSALNCHSNDDKNAWFAIDLGLWVIPSAYTLRHARGYGRSALRNWVFQVSKDGQNWTSLYTHVDDCSLNEPGSTATWPLDPPKDEKQGWRHVRIKQMGKNASGQTHYLSLSGFELYGTVNGVCEDQLGKAAKEAEANLRRQRRLVRSQVLKYMVPGARVIRGLDWKWRDQDGSPQGEGTVTGELHNGWIDVTWDAGGSNSYRMGAEGKFDLKLAPGYDPDTVASPKPVSSTVSGTTQSWSSLVKNNCPDKTSAAAGSSSRKGSSSSVCSVASSSDISLGSTKTERRSEIVMEHSIVSGADVHEPIVVLSSAENVPQTEVGSSSSASTSTLTAETGSENAERKLGPDSSVRTPGESSAISMGIVSVSSPDVSSVSELTNKEAASQRPLSSSASNRLSVSSLLAAGAPMSSSASVPNLSSRETSSLESFVRRVANIARTNATNNMNLSRSSSDNNTNTLGRNVMSTATSPLMGAQSFPNLTTPGTTSTVTMSTSSVTSSSNVATATTVLSVGQSLSNTLTTSLTSTSSESDTGQEAEYSLYDFLDSCRASTLLAELDDDEDLPEPDEEDDENEDDNQEDQEYEEVMILRRPSLQRRAGSRSDVTHHAVTSQLPQVPAGAGSRPIGEQEEEEYETKGGRRRTWDDDYVLKRQFSALVPAFDPRPGRTNVQQTTDLEIPPPGTPHSELLEEVECTPSPRLALTLKVTGLGTTREVELPLTNFRSTIFYYVQKLLQLSCNGNVKSDKLRRIWEPTYTIMYREMKDSDKEKENGKMGCWSIEHVEQYLGTDELPKNDLITYLQKNADAAFLRHWKLTGTNKSIRKNRNCSQLIAAYKDFCEHGTKSGLNQGAISTLQSSDILNLTKEQPQAKAGNGQNSCGVEDVLQLLRILYIVASDPYSRISQEDGDEQPQFTFPPDEFTSKKITTKILQQIEEPLALASGALPDWCEQLTSKCPFLIPFETRQLYFTCTAFGASRAIVWLQNRREATVERTRTTSSVRRDDPGEFRVGRLKHERVKVPRGESLMEWAENVMQIHADRKSVLEVEFLGEEGTGLGPTLEFYALVAAEFQRTDLGAWLCDDNFPDDESRHVDLGGGLKPPGYYVQRSCGLFTAPFPQDSDELERITKLFHFLGIFLAKCIQDNRLVDLPISKPFFKLMCMGDIKSNMSKLIYESRGDRDLHCTESQSEASTEEGHDSLSVGSFEEDSKSEFILDPPKPKPPAWFNGILTWEDFELVNPHRARFLKEIKDLAIKRRQILSNKGLSEDEKNTKLQELVLKNPSGSGPPLSIEDLGLNFQFCPSSRIYGFTAVDLKPSGEDEMITMDNAEEYVDLMFDFCMHTGIQKQMEAFRDGFNKVFPMEKLSSFSHEEVQMILCGNQSPSWAAEDIINYTEPKLGYTRDSPGFLRFVRVLCGMSSDERKAFLQFTTGCSTLPPGGLANLHPRLTVVRKVDATDASYPSVNTCVHYLKLPEYSSEEIMRERLLAATMEKGFHLN

SEQ ID NO: 37514 - protein, 2610 aa, Homo sapiens; identical to SEQ ID NO: 37513
  Payload ID: 7450
  Gene Symbol: HECTD1
  Gene Name: HECT domain containing E3 ubiquitin protein ligase 1
  Uniprot ID: Q9ULT8
  ENSP ID: ENSP00000450697

SEQ ID NO: 37515 - protein, 122 aa, Homo sapiens
  Payload ID: 7450
  Gene Symbol: HECTD1
  Gene Name: HECT domain containing E3 ubiquitin protein ligase 1
  ENSP ID: ENSP00000450920
  MOD_RES (1)..(1): Any amino acid
XTNATNNMNLSRSSSDNNTNTLGRNVMSTATSPLMGAQSFPNLTTPGTTSTVTMSTSSVTSSSNVATATTVLSVGQSLSNTLTTSLTSTSSESDTGQEAEYSLYVFMKNSLSASSFMQDNVI

SEQ ID NO: 37516 - protein, 976 aa, Homo sapiens
  Payload ID: 7450
  Gene Symbol: HECTD1
  Gene Name: HECT domain containing E3 ubiquitin protein ligase 1
  ENSP ID: ENSP00000451260
  MOD_RES (1)..(1): Any amino acid
XLSNTLTTSLTSTSSESDTGQEAEYSLYDFLDSCRASTLLAELDDDEDLPEPDEEDDENEDDNQEDQEYEEILRRPSLQRRAGSRSDVTHHAVTSQLPQVPAGAGSRPIGEQEEEEYETKGGRRRTWDDDYVLKRQFSALVPAFDPRPGRTNVQQTTDLEIPPPGTPHSELLEEVECTPSPRLALTLKVTGLGTTREVELPLTNFRSTIFYYVQKLLQLSCNGNVKSDKLRRIWEPTYTIMYREMKDSDKEKENGKMGCWSIEHVEQYLGTDELPKNDLITYLQKNADAAFLRHWKLTGTNKSIRKNRNCSQLIAAYKDFCEHGTKSGLNQGAISTLQSSDILNLTKEQPQAKAGNGQNSCGVEDVLQLLRILYIVASDPYSRISQEDGDEQPQFTFPPDEFTSKKITTKILQQIEEPLALASGALPDWCEQLTSKCPFLIPFETRQLYFTCTAFGASRAIVWLQNRREATVERTRTTSSVRRDDPGEFRVGRLKHERVKVPRGESLMEWAENVMQIHADRKSVLEVEFLGEEGTGLGPTLEFYALVAAEFQRTDLGAWLCDDNFPDDESRHVDLGGGLKPPGYYVQRSCGLFTAPFPQDSDELERITKLFHFLGIFLAKCIQDNRLVDLPISKPFFKLMCMGDIKSNMSKLIYESRGDRDLHCTESQSEASTEEGHDSLSVGSFEEDSKSEFILDPPKPKPPAWFNGILTWEDFELVNPHRARFLKEIKDLAIKRRQILSNKGLSEDEKNTKLQELVLKNPSGSGPPLSIEDLGLNFQFCPSSRIYGFTAVDLKPSGEDEMITMDNAEEYVDLMFDFCMHTGIQKQMEAFRDGFNKVFPMEKLSSFSHEEVQMILCGNQSPSWAAEDIINYTEPKLGYTRDSPGFLRFVRVLCGMSSDERKAFLQFTTGCSTLPPGGLANLHPRLTVVRKVDATDASYPSVNTCVHYLKLPEYSSEEIMRERLLAATMEKGFHLN

SEQ ID NO: 37517 - protein, 1465 aa, Homo sapiens
  Payload ID: 7450
  Gene Symbol: HECTD1
  Gene Name: HECT domain containing E3 ubiquitin protein ligase 1
  ENSP ID: ENSP00000451860
VFAQTFQQTMLPSIRKASLALIRKMIHFCSEALLKEVCDSDVGHNLPTILVEITATVLDQEDDDDGHLLALQIIRDLVDKGGDIFLDQLARLGVISKVSTLAGPSSDDENEEESKPEKEDEPQEDAKELQQGKPYHWRDWSIIRGRDCLYIWSDAAALELSNGSNGWFRFILDGKLATMYSSGSPEGGSDSSESRSEFLEKLQRARGQVKPSTSSQPILSAPGPTKLTVGNWSLTCLKEGEIAIHNSDGQQATILKEDLPGFVFESNRGTKHSFTAETSLGSEFVTGWTGKRGRKLKSKLEKTKQKVRTMARDLYDDHFKAVESMPRGVVVTLRNIATQLESSWELHTNRQCIESENTWRDLMKTALENLIVLLKDENTISPYEMCSSGLVQALLTVLNNSMDLDMKQDCSQLVERINVFKTAFSENEDDESRPAVALIRKLIAVLESIERLPLHLYDTPGSTYNLQILTRRLRFRLERAPGETALIDRTGRMLKMEPLATVESLEQYLLKMVAKQWYDFDRSSFVFVRKLREGQNFIFRHQHDFDENGIIYWIGTNAKTAYEWVNPAAYGLVVVTSSEGRNLPYGRLEDILSRDNSALNCHSNDDKNAWFAIDLGLWVIPSAYTLRHARGYGRSALRNWVFQVSKDGQNWTSLYTHVDDCSLNEPGSTATWPLDPPKDEKQGWRHVRIKQMGKNASGQTHYLSLSGFELYGTVNGVCEDQLGKAAKEAEANLRRQRRLVRSQVLKYMVPGARVIRGLDWKWRDQDGSPQGEGTVTGELHNGTTQSWSSLVKNNCPDKTSAAAGSSSRKGSSSSVCSVASSSDISLGSTKTERRSEIVMEHSIVSGADVHEPIVVLSSAENVPQTEVGSSSSASTSTLTAETGSENAERKLGPDSSVRTPGESSAISMGIVSVSSPDVSSVSELTNKEAASQRPLSSSASNRLSVSSLLAAGAPMSSSASVPNLSSRETSSLESFVRRVANIARTNATNNMNLSRSSSDNNTNTLGRNVMSTATSPLMGAQSFPNLTTPGTTSTVTMSTSSVTSSSNVATATTVLSVGQSLSNTLTTSLTSTSSESDTGQEAEYSLYDFLDSCRASTLLAELDDDEDLPEPDEEDDENEDDNQEDQEYEEVMILRRPSLQRRAGSRSDVTHHAVTSQLPQVPAGAGSRPIGEQEEEEYETKGGRRRTWDDDYVLKRQFSALVPAFDPRPGRTNVQQTTDLEIPPPGTPHSELLEEVECTPSPRLALTLKVTGLGTTREVELPLTNFRSTIFYYVQKLLQLSCNGNVKSDKLRRIWEPTYTIMYREMKDSDKEKENGKMGCWSIEHVEQYLGTDELPKNDLITYLQKNADAAFLRHWKLTGTNKSIRKNRNCSQLIAAYKDFCEHGTKSGLNQGAISTLQSSDILNLTKEQPQAKAGNGQNSCGVEDVLQLLRILYIVASDPYSRISQEDGDEQPQFTFPPDEFTS

SEQ ID NO: 37518 - protein, 926 aa, Homo sapiens
  Payload ID: 7450
  Gene Symbol: HECTD1
  Gene Name: HECT domain containing E3 ubiquitin protein ligase 1
  ENSP ID: ENSP00000452015
MADVDPDTLLEWLQMGQGDERDMQLIALEQLCMLLLMSDNVDRCFETCPPRTFLPALCKIFLDESAPDNVLEVTARAITYYLDVSAECTRRIVGVDGAIKALCNRLVVVELNNRTSRDLAEQCVKVLELICTRESGAVFEAGGLNCVLTFIRDSGHLVHKDTLHSAMAVVSRLCGKMEPQDSSLEICVESLSSLLKHEDHQVSDGALRCFASLADRFTRRGVDPAPLAKHGLTEELLSRMAAAGGTVSGPSSACKPGRSTTGAPSTTADSKLSNQVSTIVSLLSTLCRGSPVVTHDLLRSELPDSIESALQGDERCVLDTMRLVDLLLVLLFEGRKALPKSSAGSTGRIPGLRRLDSSGERSHRQLIDCIRSKDTDALIDAIDTGAFEVNFMDDVGQTLLNWASAFGTQEMVEFLCERGADVNRGQRSSSLHYAACFGRPQVAKTLLRHGANPDLRDEDGKTPLDKARERGHSEVVAILQSPGDWMCPVNKGDDKKKKDTNKDEEECNEPKGDPEMAPIYLKRLLPVFAQTFQQTMLPSIRKASLALIRKMIHFCSEALLKEVCDSDVGHNLPTILVEITATVLDQEDDDDGHLLALQIIRDLVDKGGDIFLDQLARLGVISKVSTLAGPSSDDENEEESKPEKEDEPQEDAKELQQGKPYHWRDWSIIRGRDCLYIWSDAAALELSNGSNGWFRFILDGKLATMYSSGSPEGGSDSSESRSEFLEKLQRARGQVKPSTSSQPILSAPGPTKLTVGNWSLTCLKEGEIAIHNSDGQQATILKEDLPGFVFESNRGTKHSFTAETSLGSEFVTGWTGKRGRKLKSKLEKTKQKVRTMARDLYDDHFKAVESMPRGVVVTLRNIATQLESSWELHTNRQCIESENTWRDLMKTALENLIVLLKDENTISPYEMCSSGLVQALLTVLNN

SEQ ID NO: 37519 - protein, 185 aa, Homo sapiens
  Payload ID: 7450
  Gene Symbol: HECTD1
  Gene Name: HECT domain containing E3 ubiquitin protein ligase 1
  ENSP ID: ENSP00000452233
  MOD_RES (1)..(1): Any amino acid
XSKDGQNWTSLYTHVDDCSLNEPGSTATWPLDPPKDEKQGWRHVRIKQMGKNASGQTHYLSLSGFELYGTVNGVCEDQLGKAAKEAEANLRRQRRLVRSQVLKYMVPGARVIRGLDWKWRDQDGSPQGEGTVTGELHNASPLMGAQSFPNLTTPGTTSTVTMSTSSVTSSSNVATATTVLSVGQS

SEQ ID NO: 37520 - protein, 212 aa, Homo sapiens
  Payload ID: 7450
  Gene Symbol: HECTD1
  Gene Name: HECT domain containing E3 ubiquitin protein ligase 1
  ENSP ID: ENSP00000479695
  MOD_RES (1)..(1): Any amino acid
XDSSLEICVESLSSLLKHEDHQVSDGALRCFASLADRFTRRGVDPAPLAKHGLTEELLSRMAAAGGTVSGPSSACKPGRSTTGAPSTTADSKLSNQVSTIVSLLSTLCRGSPVVTHDLLRSELPDSIESALQGDERCVLDTMRLVDLLLVLLFEGRKALPKSSAGSTGRIPGLRRLDSSGERSHRQLIDCIRSKDTDALIDAIDTGGQKIFF

SEQ ID NO: 37521 - protein, 2614 aa, Homo sapiens [sequence omitted]

SEQ ID NO: 37522 - protein, 776 aa, Homo sapiens
  Payload ID: 7451
  Gene Symbol: HECTD2
  Gene Name: HECT domain containing E3 ubiquitin protein ligase 2
  Uniprot ID: Q5U5R9
  ENSP ID: ENSP00000298068
MSEAVRVPSPATPLVVAAPAPEERKGKESEREKLPPIVSAGAGATAGLDRGAKGQISTFSSFISAVSPKKEAAENRSSPAHLVFPNIKNVREPPPICLDVRQKQRTSMDASSSEMKAPVLPEPILPIQPKTVKDFQEDVEKVKSSGDWKAVHDFYLTTFDSFPELNAAFKKDATASFNTIEDSGINAKFVNAVYDTLLNTPQDVQKTVLKGIINSLLREWKGPRTKDDLRAYFILLQNPQFNNTSTYVIYAHLLRQIATLVEADHHFLVHWFKKLSQKRFKQLVERLLQFISLRLFPAKPEEFPPITKCSWWIPSAAKVLALLNTANNLVHPPLIPYTDFYNSTLDHIDLMEEYHTWQNFGNSHRFSFCQYPFVISVAAKKIIIQRDSEQQMINIARQSLVDKVSRRQRPDMNILFLNMKVRRTHLVSDSLDELTRKRADLKKKLKVTFVGEAGLDMGGLTKEWFLLLIRQIFHPDYGMFTYHKDSHCHWFSSFKCDNYSEFRLVGILMGLAVYNSITLDIRFPPCCYKKLLSPPIIPSDQNIPVGICNVTVDDLCQIMPELAHGLSELLSHEGNVEEDFYSTFQVFQEEFGIIKSYNLKPGGDKISVTNQNRKEYVQLYTDFLLNKSIYKQFAAFYYGFHSVCASNALMLLRPEEVEILVCGSPDLDMHALQRSTQYDGYAKTDLTIKYFWDVVLGFPLDLQKKLLHFTTGSDRVPVGGMADLNFKISKNETSTNCLPVAHTCFNQLCLPPYKSKKDLKQKLIIGISNSEGFGLE

SEQ ID NO: 37523 - protein, 426 aa, Homo sapiens
  Payload ID: 7451
  Gene Symbol: HECTD2
  Gene Name: HECT domain containing E3 ubiquitin protein ligase 2
  ENSP ID: ENSP00000360731
MEEYHTWQNFGNSHRFSFCQYPFVISVAAKKIIIQRDSEQQMINIARQSLVDKVSRRQRPDMNILFLNMKVRRTHLVSDSLDELTRKRADLKKKLKVTFVGEAGLDMGGLTKEWFLLLIRQIFHPDYGMFTYHKDSHCHWFSSFKCDNYSEFRLVGILMGLAVYNSITLDIRFPPCCYKKLLSPPIIPSDQNIPVGICNVTVDDLCQIMPELAHGLSELLSHEGNVEEDFYSTFQVFQEEFGIIKSYNLKPGGDKISVTNQNRKEYVQLYTDFLLNKSIYKQFAAFYYGFHSVCASNALMLLRPEEVEILVCGSPDLDMHALQRSTQYDGYAKTDLTIKYFWDVVLGFPLDLQKKLLHFTTGSDRVPVGGMADLNFKISKNETSTNCLPVAHTCFNQLCLPPYKSKKDLKQKLIIGISNSEGFGLE

SEQ ID NO: 37524 - protein, 207 aa, Homo sapiens
  Payload ID: 7451
  Gene Symbol: HECTD2
  Gene Name: HECT domain containing E3 ubiquitin protein ligase 2
  Uniprot ID: Q5U5R9
  ENSP ID: ENSP00000360746
MSEAVRVPSPATPLVVAAPAPEERKGKESEREKLPPIVSAGAGATAGLDRGAKGQISTFSSFISAVSPKKEAAENRSSPAHLVFPNIKNVREPPPICLDVRQKQRTSMDASSSEMKAPVLPEPILPIQPKTVKDFQEDVEKVKSSGDWKAVHDFYLTTFDSFPELNAAFKKDATASFNTIEDSGINAKFVNAVYDTLLNTVSIMTCK

SEQ ID NO: 37525 - protein, 780 aa, Homo sapiens
  Payload ID: 7451
  Gene Symbol: HECTD2
  Gene Name: HECT domain containing E3 ubiquitin protein ligase 2
  ENSP ID: ENSP00000401023
MSEAVRVPSPATPLVVAAPAPEERKGKESEREKLPPIVSAGAGATAGLDRGAKGQISTFSSFISAVSPKKEAAENRSSPAHLVFPNIKNVREPPPICLDVRQKQRTSMDASSSEMKAPVLPEPILPIQPKTVKDFQEDVEKVKSSGDWKAVHDFYLTTFDSFPELNAAFKKDATASFNTIEDSGINAKFVNAVYDTLLNTPQDVQKTVLKGIINSLLREWKGPRTKDDLRAYFILLQNPQFNNTSTYVIYAHLLRQIATLVEADHHFLVHWFKKQYSRLSQKRFKQLVERLLQFISLRLFPAKPEEFPPITKCSWWIPSAAKVLALLNTANNLVHPPLIPYTDFYNSTLDHIDLMEEYHTWQNFGNSHRFSFCQYPFVISVAAKKIIIQRDSEQQMINIARQSLVDKVSRRQRPDMNILFLNMKVRRTHLVSDSLDELTRKRADLKKKLKVTFVGEAGLDMGGLTKEWFLLLIRQIFHPDYGMFTYHKDSHCHWFSSFKCDNYSEFRLVGILMGLAVYNSITLDIRFPPCCYKKLLSPPIIPSDQNIPVGICNVTVDDLCQIMPELAHGLSELLSHEGNVEEDFYSTFQVFQEEFGIIKSYNLKPGGDKISVTNQNRKEYVQLYTDFLLNKSIYKQFAAFYYGFHSVCASNALMLLRPEEVEILVCGSPDLDMHALQRSTQYDGYAKTDLTIKYFWDVVLGFPLDLQKKLLHFTTGSDRVPVGGMADLNFKISKNETSTNCLPVAHTCFNQLCLPPYKSKKDLKQKLIIGISNSEGFGLE

SEQ ID NO: 37526 - protein, 23 aa, Homo sapiens
  Payload ID: 7451
  Gene Symbol: HECTD2
  Gene Name: HECT domain containing E3 ubiquitin protein ligase 2
  ENSP ID: ENSP00000487686
MDASSSEMKAPVLPEPILPIQPK

SEQ ID NO: 37527 - protein, 471 aa, Homo sapiens
  Payload ID: 7452
  Gene Symbol: HECTD3
  Gene Name: HECT domain containing E3 ubiquitin protein ligase 3
  Uniprot ID: Q5T447
  ENSP ID: ENSP00000361241
MLGSWGCYRYAKLFSCSLSTHARFIKILDSVLHHLVPAWDHTLGTFSEIKQVKQFLLLSRQRPGLVAQCLRDSESSKPSFMPRLYINRRLAMEHRACPSRDPACKNAVFTQVYEGLKPSDKYEKPLDYRWPMRYDQWWECKFIAEGIIDQGGGFRDSLADMSEELCPSSADTPVPLPFFVRTANQGNGTGEARDMYVPNPSCRDFAKYEWIGQLMGAALRGKEFLVLALPGFVWKQLSGEEVSWSKDFPAVDSVLVKLLEVMEGMDKETFEFKFGKELTFTTVLSDQQVVELIPGGAGIVVGYGDRSRFIQLVQKARLEESKEQVAAMQAGLLKVVPQAVLDLLTWQELEKKVCGDPEVTVDALRKLTRFEDFEPSDSRVQYFWEALNNFTNEDRSRFLRFVTGRSRLPARIYIYPDKLGYETTDALPESSTCSSTLFLPHYASAKVCEEKLRYAAYNCVAIDTDMSPWEE

SEQ ID NO: 37528 - protein, 861 aa, Homo sapiens
  Payload ID: 7452
  Gene Symbol: HECTD3
  Gene Name: HECT domain containing E3 ubiquitin protein ligase 3
  Uniprot ID: Q5T447
  ENSP ID: ENSP00000361245
MAGPGPGAVLESPRQLLGRVRFLAEAARSLRAGRPLPAALAFVPREVLYKLYKDPAGPSRVLLPVWEAEGLGLRVGAAGPAPGTGSGPLRAARDSIELRRGACVRTTGEELCNGHGLWVKLTKEQLAEHLGDCGLQEGWLLVCRPAEGGARLVPIDTPNHLQRQQQLFGVDYRPVLRWEQVVDLTYSHRLGSRPQPAEAYAEAVQRLLYVPPTWTYECDEDLIHFLYDHLGKEDENLGSVKQYVESIDVSSYTEEFNVSCLTDSNADTYWESDGSQCQHWVRLTMKKGTIVKKLLLTVDTTDDNFMPKRVVVYGGEGDNLKKLSDVSIDETLIGDVCVLEDMTVHLPIIEIRIVECRDDGIDVRLRGVKIKSSRQRELGLNADLFQPTSLVRYPRLEGTDPEVLYRRAVLLQRFIKILDSVLHHLVPAWDHTLGTFSEIKQVKQFLLLSRQRPGLVAQCLRDSESSKPSFMPRLYINRRLAMEHRACPSRDPACKNAVFTQVYEGLKPSDKYEKPLDYRWPMRYDQWWECKFIAEGIIDQGGGFRDSLADMSEELCPSSADTPVPLPFFVRTANQGNGTGEARDMYVPNPSCRDFAKYEWIGQLMGAALRGKEFLVLALPGFVWKQLSGEEVSWSKDFPAVDSVLVKLLEVMEGMDKETFEFKFGKELTFTTVLSDQQVVELIPGGAGIVVGYGDRSRFIQLVQKARLEESKEQVAAMQAGLLKVVPQAVLDLLTWQELEKKVCGDPEVTVDALRKLTRFEDFEPSDSRVQYFWEALNNFTNEDRSRFLRFVTGRSRLPARIYIYPDKLGYETTDALPESSTCSSTLFLPHYASAKVCEEKLRYAAYNCVAIDTDMSPWEE

SEQ ID NO: 37529 - protein, 4416 aa, Homo sapiens
  Payload ID: 7453
  Gene Symbol: HECTD4
  Gene Name: HECT domain containing E3 ubiquitin protein ligase 4
  ENSP ID: ENSP00000366783
MGSSAAAAAAAAAAADSAQWLSVKEETIFLHDGLIRVTDLAELPSEILGAPEAADTDLEILTFETKNPSELAERLRSVCGNQSNAYARLLEYRLNALRGLWNAQRQLALEEQHERESSGDEETLALLKRQGLLQQPEQAPFTSRMGLLLVFPLIQSQSRTDPSLCNITAEVLLNCLRDCQPLSLTKEPADCLNGIETLLCSWLEETSDTGRHIPHKQKENAAAALVALACARGSLKTFVHTVHLLQKQTDLGSLPVADVLYRLLLLEGGPGSPSCLLGGKHIVSWGYEDMLPAPDSNTGSSSENKDADLGRCLTADGLYLYTTNSVGRGVSKLGSGLHGTLRGFVYCRNEELEPGWVAFGSGSLLHRPVSFDNKPHSLFQVIDQNTLQVCQVVPMPANHLPIGSTMSTVHLSSDGTYFYWIWSPASLNEKTPKGHSVFMDIFELVVENGVFVANPLQERTILMRKEGESAKSINEMLLSRLSRYRASPSATLAALTGSTISNTLKEDQAANTSCGLPLKMLRKTPIYTCGTYLVMLVPPPGGSGSSATRSLFGGTSGLSSLKILASSLVYNISDGQFTSRADLIDAAGSSLGRGALVPGLGACYDTVNNMLWTCSNDYIDQWCNPGNQAFHYVCQRLGVSHIITEPKEEAITTNEVINQLLHHVGAMCIHQLNLLATNPNLPITSVLGKQHPIEAHHLSSICDIMEKAMVNGDTCIIRCILVVFQVVFKFFFSPQTERNRDIIRRSGLLLWQLLMAPKDQICPEIQKEVCLAISSGLNILYPGETEINNLLKLVLTEGERNSGLSQLRDVILTNLAEQLQNNRFGSDEDDHYRLNDELLHYILKIVVRESCILITKCQTVSKDDFQKLLSTVPAASSCLRYLMAVQNHLLSNTILIKPDENDDSDSSLQGETLKELKVSILALATQILTGCDEVLEMLQQVTTALINSDIADREQRLKGLEQVTKATMLGHLLPVLLTSLMHPNLQTLIMADALMPQLVQLVLYTSQTALLLKTQCPVFAEVGCSPCGAPDQKCRLFPDERMLEEKEEPGFLTGLKIPAPWAAGKTVETVHPVRDNYKFKETVHIPGARCLYLRFDSRCSSQYDYDKLVIYAGPNTNSRKVAEYGGNTLGYGSRSVLGTGWPKDLVKVEGDTVTFSFEMRSGREHNTPDKAMWGFACTVRAQESSEDVSGGLPFLVDLALGLSVLACSMLRILYNGPEITKEEEACQELLRSKLLQRCQWQVEANGVISPALTPSPSPLPLTIEEDREFTYPSDVLVPPVGNYFDLPRIRLPPGIMIKLREISGRARPQFRPSIKEVIQPDVMEEMVVSCVIKHLNLVDALQSLINFQYQEEHAEEYDLLCKIMGETFKKLNAMERQLQSVAELEQKWQSEVDDAMQGKLENNMPFFYDYHFNENKMKELELLCSMKEVSFDGNDLENMVLSLREKFLQEVNSLIQKPSHPLAKTKTLVKSLMNRAELLLHVTIAAQSGLTRSISGTPAETPACKSASETKVISHAVRQPVFLRSMSAPSDLEMIGNEDLEFTRANQRRRHVTSHRSSSFTLLQSLAIEDSRDKPTYSVLLGQLFAFIGTNPDQAVSSSSFLLAAQTRWRRGNTRKQALVHMRELLTAAVRVGGVTHLVGPVTMVLQGGPRIEELTCGGMVEQVQEAFGETMTSVVSLCARYPIACANSIGLLCTIPYTRSEEKCLVRSGLVQLMDRLCSLSNQTESSSSEKQTKKQKVATMAWAAFQVLANRCVEWEKEEGGSTEAVHSGLARQVSSLLTNHLARATECCGNQAAGNDALQDVLSLLNDLSRSHIGKAILSQPACVSKLLSLLLDQRPSPKLVLIILQLCRAALPLMSVEDCGNVELPPWSYSVPSLNSEQEDPSDPASKIASLLLAKLADYVVPGCQTVLSPTASEPDTTLTKTSPKNSLKGDKDPGEESEAVDGKLSIFIHKREDQSSHEVLQPLLSSSEGRPFRLGTGANMEKVVKMDRDMTKGGCCEVITEEAAAALRKATKWAQSGLIVSIGPPVESINPETVSGLSTGDKKKTAQTSICRERNSELARTDPVRPFISGHVANSMAAEVIALLHSLLMAPESNAAQIWTTTAEKVLSRALMYIPQLGKYAESILENGSSSGRKLAKLQRIARQAVAALCALGGFKETIKIGSEVQVLGRGISGSIGVVASINEQEGIATVRFPPIDCRKTSQASDTLTIPLSRLCVPRSEALPLHKLSITEKVVQAVQSMLLPQEGSLSIHTSLPATGDGSAPVMAVVRLLAEIRTRACLVMAQLLEDSLFCEEFIQQCPAAVEVLNLVAQECSAGERLAVVEVQCERLRMLYRDCARPPPPPLQADRRQPKEITWSPSRVFPPVRACMFSSHLTSVTFLADPSAGGGLPRGTFIYATSPLPVQAPSFYWEIEIVSYGDTDDDTGPIVSFGFTTEAEKRDGAWTNPVGTCLFHNNGRAVHYNGSSLLQWKSVRLDVTLSPGDVAGIGWERTEGTPPPPGQPAKGRVYFTYCGQRLSPYLEDVSGGMWPVVHIQKKNTKTRANFGSRPFAYAEGQAHRNAADLCTDLAEEISANFEALPFAMASDSDNDAGTSIASDPGTHGPPCRIAAVATAQQQYDSDTSCHYKVELSYENFITSGPDPHPPPIADDESDDDDDDDIPQEDHYALLVKAWETKVFPTIRRRFRNEAERKSGLDQIKGALQLGMVDIARQTVEFLYEENGGIPRDLYLPTIEDIKDEANKFTIDKVRKGLTVVTRSPDSNNVASSAVGTALPKFAIRGMLKTFGLHGVVLDVDSVNELVQVETYLRSEGVLVRYWYPIDMLERPPAGYRRTATNGLVTLDNTNLQIHRELLRCEAALARLYCRMALLNIFAPKLPHLFTRLFHIPAIRDITLEHLQLLSNQLLAPPLPDGTISSSSILLAQSLQHCIHSQNCSATDLFYQGNSQTVREWLNVAITRTLHQGEESLLELTKQICSFLQTAPEQFPSEEFPISESKVNMDVNFPGAAFVVVSCKESQSGFRKDSSLYKAPWARVLVYGLGHKVKRNGQLNLIEAACYPRDASPANTGLAPPPTADQYPSVVLSTDRVHIKLGVSPPPGAVLVLHSLPLEFPLAMAFAEQLLSWKSEDSEGKSEDEPDTIPTSVLLQVVELLGNFLWTTDMAACVKELVFHLLAELLRTVHTLEQRRHPAGLSSSIALQLNPCLAMLMALQSELHKLYDEETQNWVSGGACGGSGGAAAGDQGRFSTYFHALMEGCLAVAEVTLPTNMSVTASGVTSATAPNLSDSSSSSSSSPGQTPQSPSLLSKRKKVKMKREKASSSGKRQSSRTVDSDPTVLSIGGSKPEDMLWFHRALTLLIILRHLTRKDPQGLGVTSDAIADACQALVGPTAHSRLLVISGIPTHLDEGVVRGAIRKACNAHGGVFKDEIYIPLQEEDTKKPKDKAEGGDGKVEPEKTLAFPGTDSMEVSTSSSLTPAMSISASASTSQASICSSQGISQTVSDLSVDPLPAGLELPIPPGLLEPHAVSSQESLDISLCSTGSLGSLGSLGEPLDNAETASVSDMGSMYTVTSLDNQPLAARPIKGFAVVEIRSRAKIEKIRASLFNNNDLIGLSSLDGEDELMEMSTEEILTVSVVNQSLFDTQGSPGLEDYFNDKSIKGEKLVPGAREVLTEIFKSCAHSEQTLSLTPAKPIRVSDIYLSKEQINSQTPGNLLHLFFTNVRPPKKVLEDQLTQILRKYGVPKPKFDKSKYSKAGKEQHPVKVVSTKRPITKPPAKDKAVLNSVSRTALSEKKPTVKPKSPEKSKPDEKDPEKSPTKKQEVPEEKYLTLEGFHKFVIDRARQDIRSVWRAILSCGYDLHFERCACIDVRHAQKASRKWTLEMDVALVQYINQLCRHLAITPARLHPHEVYLDPADAADPRVACLLNVPIESLRLRFALLQSLNTTLETFFLPLVELRQTPMYTHSIAALLKEAKGLIFYDTKVTVMNRVLNATVQRTADHAAPEITLDPLEIVGGEIRASENSYFCQAARQLASVPSSQLCVKLASGGDPTYAFNIRFTGEEVHGTSGSFRHFLWQVCKELQSSSLSLLLLCPSSAVNKNKGKYILTPSPITYGEEQLLHFLGQLLGIAIRADVPLPLDLLPSFWKTLVGEPLDPEQDLQEADILTYNYVKKFESINDETELEALCAEIASQHLATESPDSPNKPCCRFTYLTMTGEEVELCSRGRHILVAWENKDIYAAAIRSLRLRELQNVECVTAVRAGLGSIIPLQLLTMLSPLEMELRTCGLPYINLEFLKAHTMYQVGLMETDQHIEFFWGALEMFTQEELCKFIKFACNQERIPFTCPCKDGGPDTAHVPPYPMKIAPPDGTAGSPDSRYIRVETCMFMIKLPQYSSLEIMLEKLRCAIHYREDPLSG

SEQ ID NO: 37530 - protein, 109 aa, Homo sapiens
  Payload ID: 7453
  Gene Symbol: HECTD4
  Gene Name: HECT domain containing E3 ubiquitin protein ligase 4
  ENSP ID: ENSP00000448061
AAADSAQWLSVKEETIFLHDGLIRVTDLAELPSEILGAPEAADTDLEILTFETKNPSELAERLRSVCGNQSNAYARLLEYRLNALRGLWNAQRQLALEEQHERESSGGI

SEQ ID NO: 37531 - protein, 4284 aa, Homo sapiens
  Payload ID: 7453
  Gene Symbol: HECTD4
  Gene Name: HECT domain containing E3 ubiquitin protein ligase 4
  ENSP ID: ENSP00000449784
MGLLLVFPLIQSQSRTDPSLCNITAEVLLNCLRDCQPLSLTKEPADCLNGIETLLCSWLEETSDTGRHIPHKQKENAAAALVALACARGSLKTFVHTVHLLQKQTDLGSLPVADVLYRLLLLEGGPGSPSCLLGGKHIVSWGYEDMLPAPDSNTGSSSENKDADLGRCLTADGLYLYTTNSVGRGVSKLGSGLHGTLRGFVYCRNEELEPGWVAFGSGSLLHRPVSFDNKPHSLFQVIDQNTLQVCQVVPMPANHLPIGSTMSTVHLSSDGTYFYWIWSPASLNEKTPKGHSVFMDIFELVVENGVFVANPLQERTILMRKEGESAKSINEMLLSRLSRYRASPSATLAALTGSTISNTLKEDQAANTSCGLPLKMLRKTPIYTCGTYLVMLVPPPGGSGSSATRSLFGGTSGLSSLKILASSLVYNISDGQFTSRADLIDAAGSSLGRGALVPGLGACYDTVNNMLWTCSNDYIDQWCNPGNQAFHYVCQRLGVSHIITEPKEEAITTNEVINQLLHHVGAMCIHQLNLLATNPNLPITSVLGKQHPIEAHHLSSICDIMEKAMVNGDTCIIRCILVVFQVVFKFFFSPQTERNRDIIRRSGLLLWQLLMAPKDQICPEIQKEVCLAISSGLNILYPGETEINNLLKLVLTEGERNSGLSQLRDVILTNLAEQLQNNRFGSDEDDHYRLNDELLHYILKIVVRESCILITKCQTVSKDDFQKLLSTVPAASSCLRYLMAVQNHLLSNTILIKPDENDDSDSSLQGETLKVQELKVSILALATQILTGCDEVLEMLQQVTTALINSDIADREQRLKGLEQVTKATMLGHLLPVLLTSLMHPNLQTLIMADALMPQLVQLVLYTSQTALLLKTQCPVFAEVGCSPCGAPDQKCRLFPDERMLEEKEEPGFLTGLKIPAPWAAGKTVETVHPVRDNYKFKETVHIPGARCLYLRFDSRCSSQYDYDKLVIYAGPNTNSRKVAEYGGNTLGYGSRSVLGTGWPKDLVKCISPPSLNFKVEGDTVTFSFEMRSGREHNTPDKAMWGFACTVRAQESSEDVSGGLPFLVDLALGLSVLACSMLRILYNGPEITKEEEACQELLRSKLLQRCQWQVEANGVISPALTPSPSPLPLTIEEDREFTYPSDVLVPPVGNYFDLPRIRLPPGIMIKLREISGRARPQFRPSIKEVIQPDVMEEMVVSCVIKHLNLVDALQSLINFQYQEEHAEEYDLLCKIMGETFKKLNAMERQLQSVAELEQKWQSEVDDAMQGKLENNMPFFYDYHFNENKMKELELLCSMKEVSFDGNDLENMVLSLREKFLQEVNSLIQKPSHPLAKTKTLVKSLMNRAELLLHVTIAAQSGLTRSISGTPAETPACKSASETKVISHAVRQPVFLRSMSAPSDLEMIGNEDLEFTRANQRRRHVTSHRSSSFTLLQSLAIEDSRDKPTYSVLLGQLFAFIGTNPDQAVSSSSFLLAAQTRWRRGNTRKQALVHMRELLTAAVRVGGVTHLVGPVTMVLQGGPRIEELTCGGMVEQVQEAFGETMTSVVSLCARYPIACANSIGLLCTIPYTRSEEKCLVRSGLVQLMDRLCSLSNQTESSSSEKQTKKQKVATMAWAAFQVLANRCVEWEKEEGGSTEAVHSGLARQVSSLLTNHLARATECCGNQAAGNDALQDVLSLLNDLSRSHIGKAILSQPACVSKLLSLLLDQRPSPKLVLIILQLCRAALPLMSVEDCGNVELPPWSYSVPSLNSEQEDPSDPASKIASLLLAKLADYVVPGCQTVLSPTASEPDTTLTKTSPKNSLKGDKDPGEESEAVDGKLSIFIHKREDQSSHEVLQPLLSSSEGRPFRLGTGANMEKVVKMDRDMTKGGCCEVITEEAAAALRKATKWAQSGLIVSIGPPVESINPETVSGLSTGDKKKTAQTSICRERNSELARTDPVRPFISGHVANSMAAEVIALLHSLLMAPESNAAQIWTTTAEKVLSRALMYIPQLGKYAESILENGSSSGRKLAKLQRIARQAVAALCALGGFKETIKIGSEVQVLGRGISGSIGVVASINEQEGIATVRFPPIDCRKTSQASDTLTIPLSRLCVPRSEALPLHKLSITEKVVQAVQSMLLPQEGSLSIHTSLPATGDGSAPVMAVVRLLAEIRTRACLVMAQLLEDSLFCEEFIQQCPAAVEVLNLVAQECSAGERLAVVEVQCERLRMLYRDCARPPPPPLQADRRQPKEITWSPSRVFPPVRACMFSSHLTSVTFLADPSAGGGLPRGTFIYATSPLPVQAPSFYWEIEIVSYGDTDDDTGPIVSFGFTTEAEKRDGAWTNPVGTCLFHNNGRAVHYNGSSLLQWKSVRLDVTLSPGDVAGIGWERTEGTPPPPGQPAKGRVYFTYCGQRLSPYLEDVSGGMWPVVHIQKKNTKTRANFGSRPFAYAEGQAHRNAADLCTDLAEEISANFEALPFAMASDSDNDAGTSIASDPGTHGPPCRIAAVATAQQQYDSDTSCHYKVELSYENFITSGPDPHPPPIADDESDDDDDDDIPQEDHYALLVKAWETKVFPTIRRRFRNEAERKSGLDQIKGALQLGMVDIARQTVEFLYEENGGIPRDLYLPTIEDIKDEANKFTIDKVRKGLTVVTRSPDSNNVASSAVGTALPKFAIRGMLKTFGLHGVVLDVDSVNELVQVETYLRSEGVLVRYWYPIDMLERPPAGYRRTATNGLVTLDNTNLQIHRELLRCEAALARLYCRMALLNIFAPKLPHLFTRLFHIPAIRDITLEHLQLLSNQLLAPPLPDGTISSSSILLAQSLQHCIHSQNCSATDLFYQGNSQTVREWLNVAITRTLHQGEESLLELTKQICSFLQTAPEQFPSEEFPISESKVNMDVNFPGAAFVVVSCKESQSGFRKDSSLYKAPWARVLVYGLGHKVKRNGQLNLIEAACYPRDASPANTGLAPPPTADQYPSVVLSTDRVHIKLGVSPPPGAVLVLHSLPLEFPLAMAFAEQLLSWKSEDSEGKSEDEPDTIPTSVLLQVVELLGNFLWTTDMAACVKELVFHLLAELLRTVHTLEQRRHPAGLSSSIALQLNPCLAMLMALQSELHKLYDEETQNWVSGGACGGSGGAAAGDQGRFSTYFHALMEGCLAVAEVTLPTNMSVTASGVTSATAPNLSDSSSSSSSSPGQTPQSPSLLSKRKKVKMKREKASSSGKRQSSRTVDSDPTVLSIGGSKPEDMLWFHRALTLLIILRHLTRKDPQGLGVTSDAIADACQALVGPTAHSRLLVISGIPTHLDEGVVRGAIRKACNAHGGVFKDEIYIPLQEEDTKKPKDKAEGGDGKVEPEKTLAFPGTDSMEVSTSSSLTPAMSISASASTSQASICSSQGISQTVSDLSVDPLPAGLELPIPPGLLEPHAVSSQESLDISLCSTGSLGSLGSLGEPLDNAETASVSDMGSMYTVTSLDNQPLAARPIKGFAVVEIRSRAKIEKIRASLFNNNDLIGLSSLDGEDELMEMSTEEILTVSVVNQSLFDTQGSPGLEDYFNDKSIKGEKLVPGAREVLTEIFKSCAHSEQTLSLTPAKPIRVSDIYLSKEQINSQTPGNLLHLFFTNVRPPKKVLEDQLTQILRKYGVPKPKFDKSKYSKAGKEQHPVKVVSTKRPITKPPAKDKAVLNSVSRTALSEKKPTVKPKSPEKSKPDEKDPEKSPTKKQEVPEEKYLTLEGFHKFVIDRARQDIRSVWRAILSCGYDLHFERCACIDVRHAQKASRKWTLEMDVALVQYINQLCRHLAITPARLHPHEVYLDPADAADPRVACLLNVPIESLRLRFALLQSLNTTLETFFLPLVELRQTPMYTHSIAALLKEAKGLIFYDTKVTVMNRVLNATVQRTADHAAPEITLDPLEIVGGEIRASENSYFCQAARQLASVPSSQLCVKLASGGDPTYAFNIRFTGEEVHGTSGSFRHFLWQVCKELQSSSLSLLLLCPSSAVNKNKGKYILTPSPITYGEEQLLHFLGQLLGIAIRADVPLPLDLLPSFWKTLVGEPLDPEQDLQEADILTYNYVKKFESINDETELEALCAEIASQHLATESPDSPNKPCCRFTYLTMTGEEVELCSRGRHILVAWENKDIYAAAIRSLRLRELQNVECVTAVRAGLGSIIPLQLLTMLSPLEMELRTCGLPYINLEFLKAHTMYQVGLMETDQHIEFFWGALEMFTQEELCKFIKFACNQERIPFTCPCKDGGPDTAHVPPYPMKIAPPDGTAGSPDSRYIRVETCMFMIKLPQYSSLEIMLEKLRCAIHYREDPLSG

SEQ ID NO: 37532 - protein, 262 aa, Homo sapiens
  Payload ID: 7453
  Gene Symbol: HECTD4
  Gene Name: HECT domain containing E3 ubiquitin protein ligase 4
  ENSP ID: ENSP00000477079
  MOD_RES (1)..(1): Any amino acid
XRTALSEKKPTVKPKSPEKSKPDEKDPEKSPTKKQEVPEEKYLTLEGFHKFVIDRARQDIRSVWRAILSCGYDLHFERCACIDVRHAQKASRKWTLEMDVALVQYINQLCRHLAITPARLHPHEVYLDPADAADPRVACLLMIGLPVLPVSQASQPPGRDLSLTAPAPSDVPIESLRLRFALLQSLNTTLETFFLPLVELRQTPMYTHSIAALLKEAKGQCLHLPWPCRKREVTCKTPGPESTGSVLGQPRQEDATPPQPFM

SEQ ID NO: 37533 - protein, 1606 aa, Homo sapiens
  Payload ID: 7454
  Gene Symbol: HECW1
  Gene Name: HECT, C2 and WW domain containing E3 ubiquitin protein ligase 1
  Uniprot ID: Q76N89
  ENSP ID: ENSP00000379228
MLLHLCSVKNLYQNRFLGLAAMASPSRNSQSRRRCKEPLRYSYNPDQFHNMDLRGGPHDGVTIPRSTSDTDLVTSDSRSTLMVSSSYYSIGHSQDLVIHWDIKEEVDAGDWIGMYLIDEVLSENFLDYKNRGVNGSHRGQIIWKIDASSYFVEPETKICFKYYHGVSGALRATTPSVTVKNSAAPIFKSIGADETVQGQGSRRLISFSLSDFQAMGLKKGMFFNPDPYLKISIQPGKHSIFPALPHHGQERRSKIIGNTVNPIWQAEQFSFVSLPTDVLEIEVKDKFAKSRPIIKRFLGKLSMPVQRLLERHAIGDRVVSYTLGRRLPTDHVSGQLQFRFEITSSIHPDDEEISLSTEPESAQIQDSPMNNLMESGSGEPRSEAPESSESWKPEQLGEGSVPDGPGNQSIELSRPAEEAAVITEAGDQGMVSVGPEGAGELLAQVQKDIQPAPSAEELAEQLDLGEEASALLLEDGEAPASTKEEPLEEEATTQSRAGREEEEKEQEEEGDVSTLEQGEGRLQLRASVKRKSRPCSLPVSELETVIASACGDPETPRTHYIRIHTLLHSMPSAQGGSAAEEEDGAEEESTLKDSSEKDGLSEVDTVAADPSALEEDREEPEGATPGTAHPGHSGGHFPSLANGAAQDGDTHPSTGSESDSSPRQGGDHSCEGCDASCCSPSCYSSSCYSTSCYSSSCYSASCYSPSCYNGNRFASHTRFSSVDSAKISESTVFSSQDDEEEENSAFESVPDSMQSPELDPESTNGAGPWQDELAAPSGHVERSPEGLESPVAGPSNRREGECPILHNSQPVSQLPSLRPEHHHYPTIDEPLPPNWEARIDSHGRVFYVDHVNRTTTWQRPTAAATPDGMRRSGSIQQMEQLNRRYQNIQRTIATERSEEDSGSQSCEQAPAGGGGGGGSDSEAESSQSSLDLRREGSLSPVNSQKITLLLQSPAVKFITNPEFFTVLHANYSAYRVFTSSTCLKHMILKVRRDARNFERYQHNRDLVNFINMFADTRLELPRGWEIKTDQQGKSFFVDHNSRATTFIDPRIPLQNGRLPNHLTHRQHLQRLRSYSAGEASEVSRNRGASLLARPGHSLVAAIRSQHQHESLPLAYNDKIVAFLRQPNIFEMLQERQPSLARNHTLREKIHYIRTEGNHGLEKLSCDADLVILLSLFEEEIMSYVPLQAAFHPGYSFSPRCSPCSSPQNSPGLQRASARAPSPYRRDFEAKLRNFYRKLEAKGFGQGPGKIKLIIRRDHLLEGTFNQVMAYSRKELQRNKLYVTFVGEEGLDYSGPSREFFFLLSQELFNPYYGLFEYSANDTYTVQISPMSAFVENHLEWFRFSGRILGLALIHQYLLDAFFTRPFYKALLRLPCDLSDLEYLDEEFHQSLQWMKDNNITDILDLTFTVNEEVFGQVTERELKSGGANTQVTEKNKKEYIERMVKWRVERGVVQQTEALVRGFYEVVDSRLVSVFDARELELVIAGTAEIDLNDWRNNTEYRGGYHDGHLVIRWFWAAVERFNNEQRLRLLQFVTGTSSVPYEGFAALRGSNGLRRFCIEKWGKITSLPRAHTCFNRLDLPPYPSYSMLYEKLLTAVEETSTFGLE

SEQ ID NO: 37534 - protein, 1572 aa, Homo sapiens
  Payload ID: 7454
  Gene Symbol: HECW1
  Gene Name: HECT, C2 and WW domain containing E3 ubiquitin protein ligase 1
  Uniprot ID: Q76N89
  ENSP ID: ENSP00000407774
MLLHLCSVKNLYQNRFLGLAAMASPSRNSQSRRRCKEPLRYSYNPDQFHNMDLRGGPHDGVTIPRSTSDTDLVTSDSRSTLMVSSSYYSIGHSQDLVIHWDIKEEVDAGDWIGMYLIDEVLSENFLDYKNRGVNGSHRGQIIWKIDASSYFVEPETKICFKYYHGVSGALRATTPSVTVKNSAAPIFKSIGADETVQGQGSRRLISFSLSDFQAMGLKKGMFFNPDPYLKISIQPGKHSIFPALPHHGQERRSKIIGNTVNPIWQAEQFSFVSLPTDVLEIEVKDKFAKSRPIIKRFLGKLSMPVQRLLERHAIGDRVVSYTLGRRLPTDHVSGQLQFRFEITSSIHPDDEEISLSTEPESAQIQDSPMNNLMESGSGEPRSEAPESSESWKPEQLGEGSVPDGPGNQSIELSRPAEEAAVITEAGDQGMVSVGPEGAGELLAQVQKDIQPAPSAEELAEQLDLGEEASALLLEDGEAPASTKEEPLEEEATTQSRAGREEEEKEQEEEGDVSTLEQGEGRLQLRASVKRKSRPCSLPVSELETVIASACGDPETPRTHYIRIHTLLHSMPSAQGGSAAEEEDGAEEESTLKDSSEKDGLSEVDTVAADPSALEEDREEPEGATPGTAHPGHSGGHFPSLANGAAQDGDTHPSTGSESDSSPRQGGDHSCEGCDASCCSPSCYSSSCYSTSCYSSSCYSASCYSPSCYNGNRFASHTRFSSVDSAKISESTVFSSQDDEEEENSAFESVPDSMQSPELDPESTNGAGPWQDELAAPSGHVERSPEGLESPVAGPSNRREDWEARIDSHGRVFYVDHVNRTTTWQRPTAAATPDGMRRSGSIQQMEQLNRRYQNIQRTIATERSEEDSGSQSCEQAPAGGGGGGGSDSEAESSQSSLDLRREGSLSPVNSQKITLLLQSPAVKFITNPEFFTVLHANYSAYRVFTSSTCLKHMILKVRRDARNFERYQHNRDLVNFINMFADTRLELPRGWEIKTDQQGKSFFVDHNSRATTFIDPRIPLQNGRLPNHLTHRQHLQRLRSYSAGEASEVSRNRGASLLARPGHSLVAAIRSQHQHESLPLAYNDKIVAFLRQPNIFEMLQERQPSLARNHTLREKIHYIRTEGNHGLEKLSCDADLVILLSLFEEEIMSYVPLQAAFHPGYSFSPRCSPCSSPQNSPGLQRASARAPSPYRRDFEAKLRNFYRKLEAKGFGQGPGKIKLIIRRDHLLEGTFNQVMAYSRKELQRNKLYVTFVGEEGLDYSGPSREFFFLLSQELFNPYYGLFEYSANDTYTVQISPMSAFVENHLEWFRFSGRILGLALIHQYLLDAFFTRPFYKALLRLPCDLSDLEYLDEEFHQSLQWMKDNNITDILDLTFTVNEEVFGQVTERELKSGGANTQVTEKNKKEYIERMVKWRVERGVVQQTEALVRGFYEVVDSRLVSVFDARELELVIAGTAEIDLNDWRNNTEYRGGYHDGHLVIRWFWAAVERFNNEQRLRLLQFVTGTSSVPYEGFAALRGSNGLRRFCIEKWGKITSLPRAHTCFNRLDLPPYPSYSMLYEKLLTAVEETSTFGLE

SEQ ID NO: 37535 - protein, 138 aa, Homo sapiens
  Payload ID: 7454
  Gene Symbol: HECW1
  Gene Name: HECT, C2 and WW domain containing E3 ubiquitin protein ligase 1
  ENSP ID: ENSP00000413336
  MOD_RES (1)..(1): Any amino acid
XPRIPLQNGRLPNHLTHRQHLQRLRSYSAGEARVQWCDLGSLQPPPPRFKQFSCLSLSSSWDYRFRFSGRILGLALIHQYLLDAFFTRPFYKALLRLPCDLSDLEYLDEEFHQSLQWMKDNNITDILDLTFTVNEEVF

SEQ ID NO: 37536 - protein, 1572 aa, Homo sapiens
  Payload ID: 7455
  Gene Symbol: HECW2
  Gene Name: HECT, C2 and WW domain containing E3 ubiquitin protein ligase 2
  Uniprot ID: Q9P2P5
  ENSP ID: ENSP00000260983
MASSAREHLLFVRRRNPQMRYTLSPENLQSLAAQSSMPENMTLQRANSDTDLVTSESRSSLTASMYEYTLGQAQNLIIFWDIKEEVDPSDWIGLYHIDENSPANFWDSKNRGVTGTQKGQIVWRIEPGPYFMEPEIKICFKYYHGISGALRATTPCITVKNPAVMMGAEGMEGGASGNLHSRKLVSFTLSDLRAVGLKKGMFFNPDPYLKMSIQPGKKSSFPTCAHHGQERRSTIISNTTNPIWHREKYSFFALLTDVLEIEIKDKFAKSRPIIKRFLGKLTIPVQRLLERQAIGDQMLSYNLGRRLPADHVSGYLQFKVEVTSSVHEDASPEAVGTILGVNSVNGDLGSPSDDEDMPGSHHDSQVCSNGPVSEDSAADGTPKHSFRTSSTLEIDTEELTSTSSRTSPPRGRQDSLNDYLDAIEHNGHSRPGTATCSERSMGASPKLRSSFPTDTRLNAMLHIDSDEEDHEFQQDLGYPSSLEEEGGLIMFSRASRADDGSLTSQTKLEDNPVENEEASTHEAASFEDKPENLPELAESSLPAGPAPEEGEGGPEPQPSADQGSAELCGSQEVDQPTSGADTGTSDASGGSRRAVSETESLDQGSEPSQVSSETEPSDPARTESVSEASTRPEGESDLECADSSCNESVTTQLSSVDTRCSSLESARFPETPAFSSQEEEDGACAAEPTSSGPAEGSQESVCTAGSLPVVQVPSGEDEGPGAESATVPDQEELGEVWQRRGSLEGAAAAAESPPQEEGSAGEAQGTCEGATAQEEGATGGSQANGHQPLRSLPSVRQDVSRYQRVDEALPPNWEARIDSHGRIFYVDHVNRTTTWQRPTAPPAPQVLQRSNSIQQMEQLNRRYQSIRRTMTNERPEENTNAIDGAGEEADFHQASADFRRENILPHSTSRSRITLLLQSPPVKFLISPEFFTVLHSNPSAYRMFTNNTCLKHMITKVRRDTHHFERYQHNRDLVGFLNMFANKQLELPRGWEMKHDHQGKAFFVDHNSRTTTFIDPRLPLQSSRPTSALVHRQHLTRQRSHSAGEVGEDSRHAGPPVLPRPSSTFNTVSRPQYQDMVPVAYNDKIVAFLRQPNIFEILQERQPDLTRNHSLREKIQFIRTEGTPGLVRLSSDADLVMLLSLFEEEIMSYVPPHALLHPSYCQSPRGSPVSSPQNSPGTQRANARAPAPYKRDFEAKLRNFYRKLETKGYGQGPGKLKLIIRRDHLLEDAFNQIMGYSRKDLQRNKLYVTFVGEEGLDYSGPSREFFFLVSRELFNPYYGLFEYSANDTYTVQISPMSAFVDNHHEWFRFSGRILGLALIHQYLLDAFFTRPFYKALLRILCDLSDLEYLDEEFHQSLQWMKDNDIHDILDLTFTVNEEVFGQITERELKPGGANIPVTEKNKKEYIERMVKWRIERGVVQQTESLVRGFYEVVDARLVSVFDARELELVIAGTAEIDLSDWRNNTEYRGGYHDNHIVIRWFWAAVERFNNEQRLRLLQFVTGTSSIPYEGFASLRGSNGPRRFCVEKWGKITALPRAHTCFNRLDLPPYPSFSMLYEKLLTAVEETSTFGLE

SEQ ID NO: 37537 - protein, 1216 aa, Homo sapiens
  Payload ID: 7455
  Gene Symbol: HECW2
  Gene Name: HECT, C2 and WW domain containing E3 ubiquitin protein ligase 2
  Uniprot ID: Q9P2P5
  ENSP ID: ENSP00000386775
MPGSHHDSQVCSNGPVSEDSAADGTPKHSFRTSSTLEIDTEELTSTSSRTSPPRGRQDSLNDYLDAIEHNGHSRPGTATCSERSMGASPKLRSSFPTDTRLNAMLHIDSDEEDHEFQQDLGYPSSLEEEGGLIMFSRASRADDGSLTSQTKLEDNPVENEEASTHEAASFEDKPENLPELAESSLPAGPAPEEGEGGPEPQPSADQGSAELCGSQEVDQPTSGADTGTSDASGGSRRAVSETESLDQGSEPSQVSSETEPSDPARTESVSEASTRPEGESDLECADSSCNESVTTQLSSVDTRCSSLESARFPETPAFSSQEEEDGACAAEPTSSGPAEGSQESVCTAGSLPVVQVPSGEDEGPGAESATVPDQEELGEVWQRRGSLEGAAAAAESPPQEEGSAGEAQGTCEGATAQEEGATGGSQANGHQPLRSLPSVRQDVSRYQRVDEALPPNWEARIDSHGRIFYVDHVNRTTTWQRPTAPPAPQVLQRSNSIQQMEQLNRRYQSIRRTMTNERPEENTNAIDGAGEEADFHQASADFRRENILPHSTSRSRITLLLQSPPVKFLISPEFFTVLHSNPSAYRMFTNNTCLKHMITKVRRDTHHFERYQHNRDLVGFLNMFANKQLELPRGWEMKHDHQGKAFFVDHNSRTTTFIDPRLPLQSSRPTSALVHRQHLTRQRSHSAGEVGEDSRHAGPPVLPRPSSTFNTVSRPQYQDMVPVAYNDKIVAFLRQPNIFEILQERQPDLTRNHSLREKIQFIRTEGTPGLVRLSSDADLVMLLSLFEEEIMSYVPPHALLHPSYCQSPRGSPVSSPQNSPGTQRANARAPAPYKRDFEAKLRNFYRKLETKGYGQGPGKLKLIIRRDHLLEDAFNQIMGYSRKDLQRNKLYVTFVGEEGLDYSGPSREFFFLVSRELFNPYYGLFEYSANDTYTVQISPMSAFVDNHHEWFRFSGRILGLALIHQYLLDAFFTRPFYKALLRILCDLSDLEYLDEEFHQSLQWMKDNDIHDILDLTFTVNEEVFGQITERELKPGGANIPVTEKNKKEYIERMVKWRIERGVVQQTESLVRGFYEVVDARLVSVFDARELELVIAGTAEIDLSDWRNNTEYRGGYHDNHIVIRWFWAAVERFNNEQRLRLLQFVTGTSSIPYEGFASLRGSNGPRRFCVEKWGKITALPRAHTCFNRLDLPPYPSFSMLYEKLLTAVEETSTFGLE

SEQ ID NO: 37538 - protein, 118 aa, Homo sapiens
  Payload ID: 7455
  Gene Symbol: HECW2
  Gene Name: HECT, C2 and WW domain containing E3 ubiquitin protein ligase 2
  ENSP ID: ENSP00000395770
MASSAREHLLFVRRRNPQMRYTLSPENLQSLAAQSSMPENMTLQRANSDTDLVTSESRSSLTASMYEYTLGQAQNLIIFWDIKEEVDPSDWIGLYHIDENSPANFWDSKNRGVTGTQK

SEQ ID NO: 37539 - protein, 133 aa, Homo sapiens
  Payload ID: 7455
  Gene Symbol: HECW2
  Gene Name: HECT, C2 and WW domain containing E3 ubiquitin protein ligase 2
  ENSP ID: ENSP00000409918
MASSAREHLLFVRRRNPQMRYTLSPENLQSLAAQSSMPENMTLQRANSDTDLVTSESRSSLTASMYEYTLGQAQNLIIFWDIKEEVDPSDWIGLYHIDENSPANFWDSKNRGVTGTQKGQIVWRIEPGPYFME

SEQ ID NO: 37540 - protein, 4374 aa, Homo sapiens
  Payload ID: 7456
  Gene Symbol: HUWE1
  Gene Name: HECT, UBA and WWE domain containing 1, E3 ubiquitin protein ligase
  Uniprot ID: Q7Z6Z7
  ENSP ID: ENSP00000262854
MKVDRTKLKKTPTEAPADCRALIDKLKVCNDEQLLLELQQIKTWNIGKCELYHWVDLLDRFDGILADAGQTVENMSWMLVCDRPEREQLKMLLLAVLNFTALLIEYSFSRHLYSSIEHLTTLLASSDMQVVLAVLNLLYVFSKRSNYITRLGSDKRTPLLTRLQHLAESWGGKENGFGLAECCRDLHMMKYPPSATTLHFEFYADPGAEVKIEKRTTSNTLHYIHIEQLDKISESPSEIMESLTKMYSIPKDKQMLLFTHIRLAHGFSNHRKRLQAVQARLHAISILVYSNALQESANSILYNGLIEELVDVLQITDKQLMEIKAASLRTLTSIVHLERTPKLSSIIDCTGTASYHGFLPVLVRNCIQAMIDPSMDPYPHQFATALFSFLYHLASYDAGGEALVSCGMMEALLKVIKFLGDEQDQITFVTRAVRVVDLITNLDMAAFQSHSGLSIFIYRLEHEVDLCRKECPFVIKPKIQRPNTTQEGEEMETDMDGVQCIPQRAALLKSMLNFLKKAIQDPAFSDGIRHVMDGSLPTSLKHIISNAEYYGPSLFLLATEVVTVFVFQEPSLLSSLQDNGLTDVMLHALLIKDVPATREVLGSLPNVFSALCLNARGLQSFVQCQPFERLFKVLLSPDYLPAMRRRRSSDPLGDTASNLGSAVDELMRHQPTLKTDATTAIIKLLEEICNLGRDPKYICQKPSIQKADGTATAPPPRSNHAAEEASSEDEEEEEVQAMQSFNSTQQNETEPNQQVVGTEERIPIPLMDYILNVMKFVESILSNNTTDDHCQEFVNQKGLLPLVTILGLPNLPIDFPTSAACQAVAGVCKSILTLSHEPKVLQEGLLQLDSILSSLEPLHRPIESPGGSVLLRELACAGNVADATLSAQATPLLHALTAAHAYIMMFVHTCRVGQSEIRSISVNQWGSQLGLSVLSKLSQLYCSLVWESTVLLSLCTPNSLPSGCEFGQADMQKLVPKDEKAGTTQGGKRSDGEQDGAAGSMDASTQGLLEGIGLDGDTLAPMETDEPTASDSKGKSKITPAMAARIKQIKPLLSASSRLGRALAELFGLLVKLCVGSPVRQRRSHHAASTTTAPTPAARSTASALTKLLTKGLSWQPPPYTPTPRFRLTFFICSVGFTSPMLFDERKYPYHLMLQKFLCSGGHNALFETFNWALSMGGKVPVSEGLEHSDLPDGTGEFLDAWLMLVEKMVNPTTVLESPHSLPAKLPGGVQNFPQFSALRFLVVTQKAAFTCIKNLWNRKPLKVYGGRMAESMLAILCHILRGEPVIRERLSKEKEGSRGEEDTGQEEGGSRREPQVNQQQLQQLMDMGFTREHAMEALLNTSTMEQATEYLLTHPPPIMGGVVRDLSMSEEDQMMRAIAMSLGQDIPMDQRAESPEEVACRKEEEERKAREKQEEEEAKCLEKFQDADPLEQDELHTFTDTMLPGCFHLLDELPDTVYRVCDLIMTAIKRNGADYRDMILKQVVNQVWEAADVLIKAALPLTTSDTKTVSEWISQMATLPQASNLATRILLLTLLFEELKLPCAWVVESSGILNVLIKLLEVVQPCLQAAKEQKEVQTPKWITPVLLLIDFYEKTAISSKRRAQMTKYLQSNSNNWRWFDDRSGRWCSYSASNNSTIDSAWKSGETSVRFTAGRRRYTVQFTTMVQVNEETGNRRPVMLTLLRVPRLNKNSKNSNGQELEKTLEESKEMDIKRKENKGNDTPLALESTNTEKETSLEETKIGEILIQGLTEDMVTVLIRACVSMLGVPVDPDTLHATLRLCLRLTRDHKYAMMFAELKSTRMILNLTQSSGFNGFTPLVTLLLRHIIEDPCTLRHTMEKVVRSAATSGAGSTTSGVVSGSLGSREINYILRVLGPAACRNPDIFTEVANCCIRIALPAPRGSGTASDDEFENLRIKGPNAVQLVKTTPLKPSPLPVIPDTIKEVIYDMLNALAAYHAPEEADKSDPKPGVMTQEVGQLLQDMGDDVYQQYRSLTRQSSDFDTQSGFSINSQVFAADGASTETSASGTSQGEASTPEESRDGKKDKEGDRASEEGKQKGKGSKPLMPTSTILRLLAELVRSYVGIATLIANYSYTVGQSELIKEDCSVLAFVLDHLLPHTQNAEDKDTPALARLFLASLAAAGSGTDAQVALVNEVKAALGRALAMAESTEKHARLQAVMCIISTIMESCPSTSSFYSSATAKTQHNGMNNIIRLFLKKGLVNDLARVPHSLDLSSPNMANTVNAALKPLETLSRIVNQPSSLFGSKSASSKNKSEQDAQGASQDSSSNQQDPGEPGEAEVQEEDHDVTQTEVADGDIMDGEAETDSVVIAGQPEVLSSQEMQVENELEDLIDELLERDGGSGNSTIIVSRSGEDESQEDVLMDEAPSNLSQASTLQANREDSMNILDPEDEEEHTQEEDSSGSNEDEDDSQDEEEEEEEDEEDDQEDDEGEEGDEDDDDDGSEMELDEDYPDMNASPLVRFERFDREDDLIIEFDNMFSSATDIPPSPGNIPTTHPLMVRHADHSSLTLGSGSSTTRLTQGIGRSQRTLRQLTANTGHTIHVHYPGNRQPNPPLILQRLLGPSAAADILQLSSSLPLQSRGRARLLVGNDDVHIIARSDDELLDDFFHDQSTATSQAGTLSSIPTALTRWTEECKVLDAESMHDCVSVVKVSIVNHLEFLRDEELEERREKRRKQLAEEETKITDKGKEDKENRDQSAQCTASKSNDSTEQNLSDGTPMPDSYPTTPSSTDAATSESKETLGTLQSSQQQPTLPTPPALGEVPQELQSPAGEGGSSTQLLMPVEPEELGPTRPSGEAETTQMELSPAPTITSLSPERAEDSDALTAVSSQLEGSPMDTSSLASCTLEEAVGDTSAAGSSEQPRAGSSTPGDAPPAVAEVQGRSDGSGESAQPPEDSSPPASSESSSTRDSAVAISGADSRGILEEPLPSTSSEEEDPLAGISLPEGVDPSFLAALPDDIRREVLQNQLGIRPPTRTAPSTNSSAPAVVGNPGVTEVSPEFLAALPPAIQEEVLAQQRAEQQRRELAQNASSDTPMDPVTFIQTLPSDLRRSVLEDMEDSVLAVMPPDIAAEAQALRREQEARQRQLMHERLFGHSSTSALSAILRSPAFTSRLSGNRGVQYTRLAVQRGGTFQMGGSSSHNRPSGSNVDTLLRLRGRLLLDHEALSCLLVLLFVDEPKLNTSRLHRVLRNLCYHAQTRHWVIRSLLSILQRSSESELCIETPKLTTSEEKGKKSSKSCGSSSHENRPLDLLHKMESKSSNQLSWLSVSMDAALGCRTNIFQIQRSGGRKHTEKHASGGSTVHIHPQAAPVVCRHVLDTLIQLAKVFPSHFTQQRTKETNCESDRERGNKACSPCSSQSSSSGICTDFWDLLVKLDNMNVSRKGKNSVKSVPVSAGGEGETSPYSLEASPLGQLMNMLSHPVIRRSSLLTEKLLRLLSLISIALPENKVSEAQANSGSGASSTTTATSTTSTTTTTAASTTPTPPTAPTPVTSAPALVAATAISTIVVAASTTVTTPTTATTTVSISPTTKGSKSPAKVSDGGSSSTDFKMVSSGLTENQLQLSVEVLTSHSCSEEGLEDAANVLLQLSRGDSGTRDTVLKLLLNGARHLGYTLCKQIGTLLAELREYNLEQQRRAQCETLSPDGLPEEQPQTTKLKGKMQSRFDMAENVVIVASQKRPLGGRELQLPSMSMLTSKTSTQKFFLRVLQVIIQLRDDTRRANKKAKQTGRLGSSGLGSASSIQAAVRQLEAEADAIIQMVREGQRARRQQQAATSESSQSEASVRREESPMDVDQPSPSAQDTQSIASDGTPQGEKEKEERPPELPLLSEQLSLDELWDMLGECLKELEESHDQHAVLVLQPAVEAFFLVHATERESKPPVRDTRESQLAHIKDEPPPLSPAPLTPATPSSLDPFFSREPSSMHISSSLPPDTQKFLRFAETHRTVLNQILRQSTTHLADGPFAVLVDYIRVLDFDVKRKYFRQELERLDEGLRKEDMAVHVRRDHVFEDSYRELHRKSPEEMKNRLYIVFEGEEGQDAGGLLREWYMIISREMFNPMYALFRTSPGDRVTYTINPSSHCNPNHLSYFKFVGRIVAKAVYDNRLLECYFTRSFYKHILGKSVRYTDMESEDYHFYQGLVYLLENDVSTLGYDLTFSTEVQEFGVCEVRDLKPNGANILVTEENKKEYVHLVCQMRMTGAIRKQLAAFLEGFYEIIPKRLISIFTEQELELLISGLPTIDIDDLKSNTEYHKYQSNSIQIQWFWRALRSFDQADRAKFLQFVTGTSKVPLQGFAALEGMNGIQKFQIHRDDRSTDRLPSAHTCFNQLDLPAYESFEKLRHMLLLAIQECSEGFGLA

SEQ ID NO: 37541 - protein, 4374 aa, Homo sapiens; identical to SEQ ID NO: 37540
  Payload ID: 7456
  Gene Symbol: HUWE1
  Gene Name: HECT, UBA and WWE domain containing 1, E3 ubiquitin protein ligase
  Uniprot ID: Q7Z6Z7
  ENSP ID: ENSP00000340648

SEQ ID NO: 37542 - protein, 1197 aa, Homo sapiens
  Payload ID: 7456
  Gene Symbol: HUWE1
  Gene Name: HECT, UBA and WWE domain containing 1, E3 ubiquitin protein ligase
  ENSP ID: ENSP00000403236
  MOD_RES (1)..(1): Any amino acid
XPSGSNVDTLLRLRGRLLLDHEALSCLLVLLFVDEPKLNTSRLHRVLRNLCYHAQTRHWVIRSLLSILQRSSESELCIETPKLTTSEEKGKKSSKSCGSSSHENRPLDLLHKMESKSSNQLSWLSVSMDAALGCRTNIFQIQRSGGRKHTEKHASGGSTVHIHPQAAPVVCRHVLDTLIQLAKVFPSHFTQQRTKETNCESDRERGNKACSPCSSQSSSSGICTDFWDLLVKLDNMNVSRKGKNSVKSVPVSAGGEGETSPYSLEASPLGQLMNMLSHPVIRRSSLLTEKLLRLLSLISIALPENKVSEAQANSGSGASSTTTATSTTSTTTTTAASTTPTPPTAPTPVTSAPALVAATAISTIVVAASTTVTTPTTATTTVSISPTTKGSKSPAKVSDGGSSSTDFKMVSSGLTENQLQLSVEVLTSHSCSEEGLEDAANVLLQLSRGDSGTRDTVLKLLLNGARHLGYTLCKQIGTLLAELREYNLEQQRRAQCETLSPDGLPEEQPQTTKLKGKMQSRFDMAENVVIVASQKRPLGGRELQLPSMSMLTSKTSTQKFFLRVLQVIIQLRDDTRRANKKAKQTGRLGSSGLGSASSIQAAVRQLEAEADAIIQMSESSQSEASVRREESPMDVDQPSPSAQDTQSIASDGTPQGEKEKEERPPELPLLSEQLSLDELWDMLGECLKELEESHDQHAVLVLQPAVEAFFLVHATERESKPPVRDTRESQLAHIKDEPPPLSPAPLTPATPSSLDPFFSREPSSMHISSSLPPDTQKFLRFAETHRTVLNQILRQSTTHLADGPFAVLVDYIRVLDFDVKRKYFRQELERLDEGLRKEDMAVHVRRDHVFEDSYRELHRKSPEEMKNRLYIVFEGEEGQDAGGLLREWYMIISREMFNPMYALFRTSPGDRVTYTINPSSHCNPNHLSYFKFVGRIVAKAVYDNRLLECYFTRSFYKHILGKSVRYTDMESEDYHFYQGLVYLLENDVSTLGYDLTFSTEVQEFGVCEVRDLKPNGANILVTEENKKEYVHLVCQMRMTGAIRKQLAAFLEGFYEIIPKRLISIFTEQELELLISGLPTIDIDDLKSNTEYHKYQSNSIQIQWFWRALRSFDQADRAKFLQFVTGTSKVPLQGFAALEGMNGIQKFQIHRDDRSTDRLPSAHTCFNQLDLPAYESFEKLRHMLLLAIQECSEGFGLA

SEQ ID NO: 37543 - protein, 92 aa, Homo sapiens
  Payload ID: 7456
  Gene Symbol: HUWE1
  Gene Name: HECT, UBA and WWE domain containing 1, E3 ubiquitin protein ligase
  ENSP ID: ENSP00000413651
MKVDRTKLKKTPTEAPADCRALIDKLKVCNDEQLLLELQQIKTWNIGKCELYHWVDLLDRFDGILADAGQTVENMSWMLVCDRPEREQLKML

SEQ ID NO: 37544 - protein, 4365 aa, Homo sapiens
  Payload ID: 7456
  Gene Symbol: HUWE1
  Gene Name: HECT, UBA and WWE domain containing 1, E3 ubiquitin protein ligase
  Uniprot ID: Q7Z6Z7
  ENSP ID: ENSP00000479451
MKVDRTKLKKTPTEAPADCRALIDKLKVCNDEQLLLELQQIKTWNIGKCELYHWVDLLDRFDGILADAGQTVENMSWMLVCDRPEREQLKMLLLAVLNFTALLIEYSFSRHLYSSIEHLTTLLASSDMQVVLAVLNLLYVFSKRSNYITRLGSDKRTPLLTRLQHLAESWGGKENGFGLAECCRDLHMMKYPPSATTLHFEFYADPGAEVKIEKRTTSNTLHYIHIEQLDKISESPSEIMESLTKMYSIPKDKQMLLFTHIRLAHGFSNHRKRLQAVQARLHAISILVYSNALQESANSILYNGLIEELVDVLQITDKQLMEIKAASLRTLTSIVHLERTPKLSSIIDCTGTASYHGFLPVLVRNCIQAMIDPSMDPYPHQFATALFSFLYHLASYDAGGEALVSCGMMEALLKVIKFLGDEQDQITFVTRAVRVVDLITNLDMAAFQSHSGLSIFIYRLEHEVDLCRKECPFVIKPKIQRPNTTQEGEEMETDMDGVQCIPQRAALLKSMLNFLKKAIQDPAFSDGIRHVMDGSLPTSLKHIISNAEYYGPSLFLLATEVVTVFVFQEPSLLSSLQDNGLTDVMLHALLIKDVPATREVLGSLPNVFSALCLNARGLQSFVQCQPFERLFKVLLSPDYLPAMRRRRSSDPLGDTASNLGSAVDELMRHQPTLKTDATTAIIKLLEEICNLGRDPKYICQKPSIQKADGTATAPPPRSNHAAEEASSEDEEEEEVQAMQSFNSTQQNETEPNQQVVGTEERIPIPLMDYILNVMKFVESILSNNTTDDHCQEFVNQKGLLPLVTILGLPNLPIDFPTSAACQAVAGVCKSILTLSHEPKVLQEGLLQLDSILSSLEPLHRPIESPGGSVLLRELACAGNVADATLSAQATPLLHALTAAHAYIMMFVHTCRVGQSEIRSISVNQWGSQLGLSVLSKLSQLYCSLVWESTVLLSLCTPNSLPSGCEFGQADMQKLVPKDEKADGEQDGAAGSMDASTQGLLEGIGLDGDTLAPMETDEPTASDSKGKSKITPAMAARIKQIKPLLSASSRLGRALAELFGLLVKLCVGSPVRQRRSHHAASTTTAPTPAARSTASALTKLLTKGLSWQPPPYTPTPRFRLTFFICSVGFTSPMLFDERKYPYHLMLQKFLCSGGHNALFETFNWALSMGGKVPVSEGLEHSDLPDGTGEFLDAWLMLVEKMVNPTTVLESPHSLPAKLPGGVQNFPQFSALRFLVVTQKAAFTCIKNLWNRKPLKVYGGRMAESMLAILCHILRGEPVIRERLSKEKEGSRGEEDTGQEEGGSRREPQVNQQQLQQLMDMGFTREHAMEALLNTSTMEQATEYLLTHPPPIMGGVVRDLSMSEEDQMMRAIAMSLGQDIPMDQRAESPEEVACRKEEEERKAREKQEEEEAKCLEKFQDADPLEQDELHTFTDTMLPGCFHLLDELPDTVYRVCDLIMTAIKRNGADYRDMILKQVVNQVWEAADVLIKAALPLTTSDTKTVSEWISQMATLPQASNLATRILLLTLLFEELKLPCAWVVESSGILNVLIKLLEVVQPCLQAAKEQKEVQTPKWITPVLLLIDFYEKTAISSKRRAQMTKYLQSNSNNWRWFDDRSGRWCSYSASNNSTIDSAWKSGETSVRFTAGRRRYTVQFTTMVQVNEETGNRRPVMLTLLRVPRLNKNSKNSNGQELEKTLEESKEMDIKRKENKGNDTPLALESTNTEKETSLEETKIGEILIQGLTEDMVTVLIRACVSMLGVPVDPDTLHATLRLCLRLTRDHKYAMMFAELKSTRMILNLTQSSGFNGFTPLVTLLLRHIIEDPCTLRHTMEKVVRSAATSGAGSTTSGVVSGSLGSREINYILRVLGPAACRNPDIFTEVANCCIRIALPAPRGSGTASDDEFENLRIKGPNAVQLVKTTPLKPSPLPVIPDTIKEVIYDMLNALAAYHAPEEADKSDPKPGVMTQEVGQLLQDMGDDVYQQYRSLTRQSSDFDTQSGFSINSQVFAADGASTETSASGTSQGEASTPEESRDGKKDKEGDRASEEGKQKGKGSKPLMPTSTILRLLAELVRSYVGIATLIANYSYTVGQSELIKEDCSVLAFVLDHLLPHTQNAEDKDTPALARLFLASLAAAGSGTDAQVALVNEVKAALGRALAMAESTEKHARLQAVMCIISTIMESCPSTSSFYSSATAKTQHNGMNNIIRLFLKKGLVNDLARVPHSLDLSSPNMANTVNAALKPLETLSRIVNQPSSLFGSKSASSKNKSEQDAQGASQDSSSNQQDPGEPGEAEVQEEDHDVTQTEVADGDIMDGEAETDSVVIAGQPEVLSSQEMQVENELEDLIDELLERDGGSGNSTIIVSRSGEDESQEDVLMDEAPSNLSQASTLQANREDSMNILDPEDEEEHTQEEDSSGSNEDEDDSQDEEEEEEEDEEDDQEDDEGEEGDEDDDDDGSEMELDEDYPDMNASPLVRFERFDREDDLIIEFDNMFSSATDIPPSPGNIPTTHPLMVRHADHSSLTLGSGSSTTRLTQGIGRSQRTLRQLTANTGHTIHVHYPGNRQPNPPLILQRLLGPSAAADILQLSSSLPLQSRGRARLLVGNDDVHIIARSDDELLDDFFHDQSTATSQAGTLSSIPTALTRWTEECKVLDAESMHDCVSVVKVSIVNHLEFLRDEELEERREKRRKQLAEEETKITDKGKEDKENRDQSAQCTASKSNDSTEQNLSDGTPMPDSYPTTPSSTDAATSESKETLGTLQSSQQQPTLPTPPALGEVPQELQSPAGEGGSSTQLLMPVEPEELGPTRPSGEAETTQMELSPAPTITSLSPERAEDSDALTAVSSQLEGSPMDTSSLASCTLEEAVGDTSAAGSSEQPRAGSSTPGDAPPAVAEVQGRSDGSGESAQPPEDSSPPASSESSSTRDSAVAISGADSRGILEEPLPSTSSEEEDPLAGISLPEGVDPSFLAALPDDIRREVLQNQLGIRPPTRTAPSTNSSAPAVVGNPGVTEVSPEFLAALPPAIQEEVLAQQRAEQQRRELAQNASSDTPMDPVTFIQTLPSDLRRSVLEDMEDSVLAVMPPDIAAEAQALRREQEARQRQLMHERLFGHSSTSALSAILRSPAFTSRLSGNRGVQYTRLAVQRGGTFQMGGSSSHNRPSGSNVDTLLRLRGRLLLDHEALSCLLVLLFVDEPKLNTSRLHRVLRNLCYHAQTRHWVIRSLLSILQRSSESELCIETPKLTTSEEKGKKSSKSCGSSSHENRPLDLLHKMESKSSNQLSWLSVSMDAALGCRTNIFQIQRSGGRKHTEKHASGGSTVHIHPQAAPVVCRHVLDTLIQLAKVFPSHFTQQRTKETNCESDRERGNKACSPCSSQSSSSGICTDFWDLLVKLDNMNVSRKGKNSVKSVPVSAGGEGETSPYSLEASPLGQLMNMLSHPVIRRSSLLTEKLLRLLSLISIALPENKVSEAQANSGSGASSTTTATSTTSTTTTTAASTTPTPPTAPTPVTSAPALVAATAISTIVVAASTTVTTPTTATTTVSISPTTKGSKSPAKVSDGGSSSTDFKMVSSGLTENQLQLSVEVLTSHSCSEEGLEDAANVLLQLSRGDSGTRDTVLKLLLNGARHLGYTLCKQIGTLLAELREYNLEQQRRAQCETLSPDGLPEEQPQTTKLKGKMQSRFDMAENVVIVASQKRPLGGRELQLPSMSMLTSKTSTQKFFLRVLQVIIQLRDDTRRANKKAKQTGRLGSSGLGSASSIQAAVRQLEAEADAIIQMVREGQRARRQQQAATSESSQSEASVRREESPMDVDQPSPSAQDTQSIASDGTPQGEKEKEERPPELPLLSEQLSLDELWDMLGECLKELEESHDQHAVLVLQPAVEAFFLVHATERESKPPVRDTRESQLAHIKDEPPPLSPAPLTPATPSSLDPFFSREPSSMHISSSLPPDTQKFLRFAETHRTVLNQILRQSTTHLADGPFAVLVDYIRVLDFDVKRKYFRQELERLDEGLRKEDMAVHVRRDHVFEDSYRELHRKSPEEMKNRLYIVFEGEEGQDAGGLLREWYMIISREMFNPMYALFRTSPGDRVTYTINPSSHCNPNHLSYFKFVGRIVAKAVYDNRLLECYFTRSFYKHILGKSVRYTDMESEDYHFYQGLVYLLENDVSTLGYDLTFSTEVQEFGVCEVRDLKPNGANILVTEENKKEYVHLVCQMRMTGAIRKQLAAFLEGFYEIIPKRLISIFTEQELELLISGLPTIDIDDLKSNTEYHKYQSNSIQIQWFWRALRSFDQADRAKFLQFVTGTSKVPLQGFAALEGMNGIQKFQIHRDDRSTDRLPSAHTCFNQLDLPAYESFEKLRHMLLLAIQECSEGFGLA

SEQ ID NO: 37545 - protein, 191 aa, Homo sapiens
  Payload ID: 7456
  Gene Symbol: HUWE1
  Gene Name: HECT, UBA and WWE domain containing 1, E3 ubiquitin protein ligase
  ENSP ID: ENSP00000483891
  MOD_RES (1)..(1): Any amino acid
XTPTPPTAPTPVTSAPALVAATAISTIVVAASTTVTTPTTATTTVSISPTTKGSKSPAKVSDGGSSSTDFKMVSSGLTENQLQLSVEVLTSHSCSEEGLEDAANVLLQLSRGDSGTRDTVLKLLLNGARHLGYTLCKQIGTLLAELREYNLEQQRRAQCETLSPDGLPEEQPQTTKLKGKMQSRFLRFRLS

SEQ ID NO: 37546 - protein, 230 aa, Homo sapiens
  Payload ID: 7456
  Gene Symbol: HUWE1
  Gene Name: HECT, UBA and WWE domain containing 1, E3 ubiquitin protein ligase
  ENSP ID: ENSP00000484417
  MOD_RES (1)..(1): Any amino acid
XVSCGMMEALLKVIKFLGDEQDQITFVTRAVRVVDLITNLDMAAFQSHSGLSIFIYRLEHEVDLCRKECPFVIKPKIQRPNTTQEGEEMETDMDVADVAMESSPGSSISMEHRLDVELRASGSSSSTNISSGPSPGPSPGPGTGPGPGPGPGPGPGPGPGPGPGPGPGPGPGPGPRPGVQCIPQRAALLKSMLNFLKKAIQDPAFSDGIRHVMDGSLPTSLKHIISNAEY

SEQ ID NO: 37547 - protein, 493 aa, Homo sapiens
  Payload ID: 7457
  Gene Symbol: HHAT
  Gene Name: hedgehog acyltransferase
  Uniprot ID: Q5VTY9
  ENSP ID: ENSP00000261458
MLPRWELALYLLASLGFHFYSFYEVYKVSREHEEELDQEFELETDTLFGGLKKDATDFEWSFWMEWGKQWLVWLLLGHMVVSQMATLLARKHRPWILMLYGMWACWCVLGTPGVAMVLLHTTISFCVAQFRSQLLTWLCSLLLLSTLRLQGVEEVKRRWYKTENEYYLLQFTLTVRCLYYTSFSLELCWQQLPAASTSYSFPWMLAYVFYYPVLHNGPILSFSEFIKQMQQQEHDSLKASLCVLALGLGRLLCWWWLAELMAHLMYMHAIYSSIPLLETVSCWTLGGLALAQVLFFYVKYLVLFGVPALLMRLDGLTPPALPRCVSTMFSFTGMWRYFDVGLHNFLIRYVYIPVGGSQHGLLGTLFSTAMTFAFVSYWHGGYDYLWCWAALNWLGVTVENGVRRLVETPCIQDSLARYFSPQARRRFHAALASCSTSMLILSNLVFLGGNEVGKTYWNRIFIQGWPWVTLSVLGFLYCYSHVGIAWAQTYATD

SEQ ID NO: 37548 - protein, 183 aa, Homo sapiens
  Payload ID: 7457
  Gene Symbol: HHAT
  Gene Name: hedgehog acyltransferase
  ENSP ID: ENSP00000355976
MRLDGLTPPALPRCVSTMFSFTGMWRYFDVGLHNFLIRYVYIPVGGSQHGLLGTLFSTAMTFAFVSYWHGGYDYLWCWAALNWLGVTVENGVRRLVETPCIQDSLARYFSPQARRRFHAALASCSTSMLILSNLVFLGGNEVGKTYWNRIFIQGWPWVTLSVLGFLYCYSHVGIAWAQTYATD

SEQ ID NO: 37549 - protein, 493 aa, Homo sapiens; identical to SEQ ID NO: 37547
  Payload ID: 7457
  Gene Symbol: HHAT
  Gene Name: hedgehog acyltransferase
  Uniprot ID: Q5VTY9
  ENSP ID: ENSP00000355977

SEQ ID NO: 37550 - protein, 207 aa, Homo sapiens
  Payload ID: 7457
  Gene Symbol: HHAT
  Gene Name: hedgehog acyltransferase
  ENSP ID: ENSP00000413399
MEWGKQWLVWLLLGHMVVSQMATLLARKRRWYKTENEYYLLQFTLTVRCLYYTSFSLELCWQQLPAASTSYSFPWMLAYVFYYPVLHNGPILSFSEFIKQMQQQEHDSLKASLCVLALGLGRLLCWWWLAELMAHLMYMHAIYSSIPLLETVSCWTLGGLALAQVLFFYVKYLVLFGVPALLMRLDGLTPPALPRCVSTMFSFTGMW

SEQ ID NO: 37551 - protein, 493 aa, Homo sapiens; identical to SEQ ID NO: 37547
  Payload ID: 7457
  Gene Symbol: HHAT
  Gene Name: hedgehog acyltransferase
  Uniprot ID: Q5VTY9
  ENSP ID: ENSP00000416845

SEQ ID NO: 37552 - protein, 494 aa, Homo sapiens
  Payload ID: 7457
  Gene Symbol: HHAT
  Gene Name: hedgehog acyltransferase
  Uniprot ID: Q5VTY9
  ENSP ID: ENSP00000438468
MSLGLGSAERGVLGTRGARERCRRRRPGQPGEHEEELDQEFELETDTLFGGLKKDATDFEWSFWMEWGKQWLVWLLLGHMVVSQMATLLARKHRPWILMLYGMWACWCVLGTPGVAMVLLHTTISFCVAQFRSQLLTWLCSLLLLSTLRLQGVEEVKRRWYKTENEYYLLQFTLTVRCLYYTSFSLELCWQQLPAASTSYSFPWMLAYVFYYPVLHNGPILSFSEFIKQMQQQEHDSLKASLCVLALGLGRLLCWWWLAELMAHLMYMHAIYSSIPLLETVSCWTLGGLALAQVLFFYVKYLVLFGVPALLMRLDGLTPPALPRCVSTMFSFTGMWRYFDVGLHNFLIRYVYIPVGGSQHGLLGTLFSTAMTFAFVSYWHGGYDYLWCWAALNWLGVTVENGVRRLVETPCIQDSLARYFSPQARRRFHAALASCSTSMLILSNLVFLGGNEVGKTYWNRIFIQGWPWVTLSVLGFLYCYSHVGIAWAQTYATD

SEQ ID NO: 37553 - protein, 82 aa, Homo sapiens
  Payload ID: 7457
  Gene Symbol: HHAT
  Gene Name: hedgehog acyltransferase
  ENSP ID: ENSP00000439229
MTFAFVSYWHGGYDYLWCWAALNWLGVTVENGVRRLVETPCIQDSLVSRILAAVLGDSGTRQIRFIRDGAIRFPAPTMGPFY

SEQ ID NO: 37554 - protein, 428 aa, Homo sapiens
  Payload ID: 7457
  Gene Symbol: HHAT
  Gene Name: hedgehog acyltransferase
  Uniprot ID: Q5VTY9
  ENSP ID: ENSP00000442625
MLPRWELALYLLASLGFHFYSFYEVYKVSREHEEELDQEFELETDTLFGGLKKDATDFEWSFWMEWGKQWLVWLLLGHMVVSQMATLLARKRRWYKTENEYYLLQFTLTVRCLYYTSFSLELCWQQLPAASTSYSFPWMLAYVFYYPVLHNGPILSFSEFIKQMQQQEHDSLKASLCVLALGLGRLLCWWWLAELMAHLMYMHAIYSSIPLLETVSCWTLGGLALAQVLFFYVKYLVLFGVPALLMRLDGLTPPALPRCVSTMFSFTGMWRYFDVGLHNFLIRYVYIPVGGSQHGLLGTLFSTAMTFAFVSYWHGGYDYLWCWAALNWLGVTVENGVRRLVETPCIQDSLARYFSPQARRRFHAALASCSTSMLILSNLVFLGGNEVGKTYWNRIFIQGWPWVTLSVLGFLYCYSHVGIAWAQTYATD

SEQ ID NO: 37555 - protein, 356 aa, Homo sapiens
  Payload ID: 7457
  Gene Symbol: HHAT
  Gene Name: hedgehog acyltransferase
  Uniprot ID: Q5VTY9
  ENSP ID: ENSP00000444995
MLPRWELALYLLASLGFHFYSFYEVYKVSREHEEELDQEFELETDTLFGGLKKDATDFEWSFWMEWGKQWLVWLLLGHMVVSQMATLLARKMQQQEHDSLKASLCVLALGLGRLLCWWWLAELMAHLMYMHAIYSSIPLLETVSCWTLGGLALAQVLFFYVKYLVLFGVPALLMRLDGLTPPALPRCVSTMFSFTGMWRYFDVGLHNFLIRYVYIPVGGSQHGLLGTLFSTAMTFAFVSYWHGGYDYLWCWAALNWLGVTVENGVRRLVETPCIQDSLARYFSPQARRRFHAALASCSTSMLILSNLVFLGGNEVGKTYWNRIFIQGWPWVTLSVLGFLYCYSHVGIAWAQTYATD

SEQ ID NO: 37556 - protein, 504 aa, Homo sapiens
  Payload ID: 7458
  Gene Symbol: HHATL
  Gene Name: hedgehog acyltransferase-like
  Uniprot ID: Q9HCP6
  ENSP ID: ENSP00000310621
MGIKTALPAAELGLYSLVLSGALAYAGRGLLEASQDGAHRKAFRESVRPGWEYIGRKMDVADFEWVMWFTSFRNVIIFALSGHVLFAKLCTMVAPKLRSWMYAVYGALAVMGTMGPWYLLLLLGHCVGLYVASLLGQPWLCLGLGLASLASFKMDPLISWQSGFVTGTFDLQEVLFHGGSSFTVLRCTSFALESCAHPDRHYSLADLLKYNFYLPFFFFGPIMTFDRFHAQVSQVEPVRREGELWHIRAQAGLSVVAIMAVDIFFHFFYILTIPSDLKFANRLPDSALAGLAYSNLVYDWVKAAVLFGVVNTVACLDHLDPPQPPKCITALYVFAETHFDRGINDWLCKYVYNHIGGEHSAVIPELAATVATFAITTLWLGPCDIVYLWSFLNCFGLNFELWMQKLAEWGPLARIEASLSVQMSRRVRALFGAMNFWAIIMYNLVSLNSLKFTELVARRLLLTGFPQTTLSILFVTYCGVQLVKERERTLALEEEQKQDKEKPE

SEQ ID NO: 37557 - protein, 231 aa, Homo sapiens
  Payload ID: 7458
  Gene Symbol: HHATL
  Gene Name: hedgehog acyltransferase-like
  ENSP ID: ENSP00000395779
MGIKTALPAAELGLYSLVLSGALAYAGRGLLEASQDGAHRKAFRESVRPGWEYIGRKMDVADFEWVMWFTSFRNVIIFALSGHVLFAKLCTMVAPKLRSWMYAVYGALAVMGTMGPWYLLLLLGHCVGLYVASLLGQPWLCLGLGLASLASFKMDPLISWQSGFVTGTFDLQEVLFHGGSSFTVLRCTSFALESCAHPDRHYSLADLLKYNFYLPFFFFGPIMTFDRFHAQ

SEQ ID NO: 37558 - protein, 124 aa, Homo sapiens
  Payload ID: 7458
  Gene Symbol: HHATL
  Gene Name: hedgehog acyltransferase-like
  ENSP ID: ENSP00000401568
  MOD_RES (1)..(1): Any amino acid
XVLFGVVNTVACLDHLDPPQPPKCITALYVFAETHFDRGINDWLCKVRALFGAMNFWAIIMYNLVSLNSLKFTELVARRLLLTGFPQTTLSILFVTYCGVQLVKERERTLALEEEQKQDKEKPE

SEQ ID NO: 37559 - protein, 261 aa, Homo sapiens
  Payload ID: 7458
  Gene Symbol: HHATL
  Gene Name: hedgehog acyltransferase-like
  ENSP ID: ENSP00000403787
MGIKTALPAAELGLYSLVLSGALAYAGRGLLEASQDGAHRKAFRESVRPGWEYIGRKMDVADFEWVMWFTSFRNVIIFALSGHVLFAKLCTMVAPKSGFVTGTFDLQEVLFHGGSSFTVLRCTSFALESCAHPDRHYSLADLLKYNFYLPFFFFGPIMTFDRFHAQVSQVEPVRREGELWHIRAQAGLSVVAIMAVDIFFHFFYILTIPSDLKFANRLPDSALAGLAYSNLVYDWVKAAVLFGVVNTVACLDHLDPPQPPK

SEQ ID NO: 37560 - protein, 504 aa, Homo sapiens; identical to SEQ ID NO: 37556
  Payload ID: 7458
  Gene Symbol: HHATL
  Gene Name: hedgehog acyltransferase-like
  Uniprot ID: Q9HCP6
  ENSP ID: ENSP00000405423

SEQ ID NO: 37561 - protein, 117 aa, Homo sapiens
  Payload ID: 7458
  Gene Symbol: HHATL
  Gene Name: hedgehog acyltransferase-like
  ENSP ID: ENSP00000408999
MGIKTALPAAELGLYSLVLSGALAYAGRGLLEASQDGAHRKAFRESVRPGWEYIGRKMDVADFEWVMWFTSFRNVIIFALSGHVLFAKLCTMVAPKLRSWMYAVYGALAVMGTMGPW

SEQ ID NO: 37562 - protein, 116 aa, Homo sapiens
  Payload ID: 7458
  Gene Symbol: HHATL
  Gene Name: hedgehog acyltransferase-like
  ENSP ID: ENSP00000413810
MGIKTALPAAELGLYSLVLSGALAYAGRGLLEASQDGAHRKAFRESVRPGWEYIGRKMDVADFEWVMWFTSFRNVIIFALSGHVLFAKLCTMVAPKSGFVTGTFDLQEVLFHGGSS

SEQ ID NO: 37563 - protein, 203 aa, Homo sapiens
  Payload ID: 7458
  Gene Symbol: HHATL
  Gene Name: hedgehog acyltransferase-like
  ENSP ID: ENSP00000415351
MGIKTALPAAELGLYSLVLSGALAYAGRGLLEASQDGAHRKAFRESVRPGWEYIGRKMDVADFEWVMWFTSFRNVIIFALSGHVLFAKLCTMVAPKLRSWMYAVYGALAVMGTMGPWYLLLLLGHCVGLYVASLLGQPWLCLGLGLASLASFKMDPLISWQSGFVTGTFDLQEVLFHGGSSFTVLRCTSFALESCAHPDRHYS

SEQ ID NO: 37564 - protein, 700 aa, Homo sapiens
  Payload ID: 7459
  Gene Symbol: HHIP
  Gene Name: hedgehog interacting protein
  Uniprot ID: Q96QV1
  ENSP ID: ENSP00000296575
MLKMLSFKLLLLAVALGFFEGDAKFGERNEGSGARRRRCLNGNPPKRLKRRDRRMMSQLELLSGGEMLCGGFYPRLSCCLRSDSPGLGRLENKIFSVTNNTECGKLLEEIKCALCSPHSQSLFHSPEREVLERDLVLPLLCKDYCKEFFYTCRGHIPGFLQTTADEFCFYYARKDGGLCFPDFPRKQVRGPASNYLDQMEEYDKVEEISRKHKHNCFCIQEVVSGLRQPVGALHSGDGSQRLFILEKEGYVKILTPEGEIFKEPYLDIHKLVQSGIKGGDERGLLSLAFHPNYKKNGKLYVSYTTNQERWAIGPHDHILRVVEYTVSRKNPHQVDLRTARVFLEVAELHRKHLGGQLLFGPDGFLYIILGDGMITLDDMEEMDGLSDFTGSVLRLDVDTDMCNVPYSIPRSNPHFNSTNQPPEVFAHGLHDPGRCAVDRHPTDININLTILCSDSNGKNRSSARILQIIKGKDYESEPSLLEFKPFSNGPLVGGFVYRGCQSERLYGSYVFGDRNGNFLTLQQSPVTKQWQEKPLCLGTSGSCRGYFSGHILGFGEDELGEVYILSSSKSMTQTHNGKLYKIVDPKRPLMPEECRATVQPAQTLTSECSRLCRNGYCTPTGKCCCSPGWEGDFCRTAKCEPACRHGGVCVRPNKCLCKKGYLGPQCEQVDRNIRRVTRAGILDQIIDMTSYLLDLTSYIV

SEQ ID NO: 37565 - protein, 320 aa, Homo sapiens
  Payload ID: 7459
  Gene Symbol: HHIP
  Gene Name: hedgehog interacting protein
  Uniprot ID: Q96QV1
  ENSP ID: ENSP00000408587
MLKMLSFKLLLLAVALGFFEGDAKFGERNEGSGARRRRCLNGNPPKRLKRRDRRMMSQLELLSGGEMLCGGFYPRLSCCLRSDSPGLGRLENKIFSVTNNTECGKLLEEIKCALCSPHSQSLFHSPEREVLERDLVLPLLCKDYCKEFFYTCRGHIPGFLQTTADEFCFYYARKDGGLCFPDFPRKQVRGPASNYLDQMEEYDKVEEISRKHKHNCFCIQEVVSGLRQPVGALHSGDGSQRLFILEKEGYVKILTPEGEIFKEPYLDIHKLVQSGIKVGFLNFIYFCAGYVNFILVLPSSLKVFLCNKRKNLAGENKGAT

SEQ ID NO: 37566 - protein, 1087 aa, Homo sapiens
  Payload ID: 7460
  Gene Symbol: HELB
  Gene Name: helicase (DNA) B
  Uniprot ID: Q8NG08
  ENSP ID: ENSP00000247815
MARSSPYLRQLQGPLLPPRDLVEEDDDYLNDDVEEDEESVFIDAEELCSGGVKAGSLPGCLRVSICDENTQETCKVFGRFPITGAWWRVKVQVKPVVGSRSYQYQVQGFPSYFLQSDMSPPNQKHICALFLKECEVSSDDVNKFLTWVKEVSNYKNLNFENLRETLRTFHKETGRKDQKQPTQNGQEELFLDNEMSLPLENTIPFRNVMTALQFPKIMEFLPVLLPRHFKWIIGSGSKEMLKEIEEILGTHPWKLGFSKITYREWKLLRCEASWIAFCQCESLLQLMTDLEKNALIMYSRLKQICREDGHTYVEVNDLTLTLSNHMSFHAASESLKFLKDIGVVTYEKSCVFPYDLYHAERAIAFSICDLMKKPPWHLCVDVEKVLASIHTTKPENSSDDALNESKPDEVRLENPVDVVDTQDNGDHIWTNGENEINAEISEVQLDQDQVEVPLDRDQVAALEMICSNPVTVISGKGGCGKTTIVSRLFKHIEQLEEREVKKACEDFEQDQNASEEWITFTEQSQLEADKAIEVLLTAPTGKAAGLLRQKTGLHAYTLCQVNYSFYSWTQTMMTTNKPWKFSSVRVLVVDEGSLVSVGIFKSVLNLLCEHSKLSKLIILGDIRQLPSIEPGNLLKDLFETLKSRNCAIELKTNHRAESQLIVDNATRISRRQFPKFDAELNISDNPTLPISIQDKTFIFVRLPEEDASSQSSKTNHHSCLYSAVKTLLQENNLQNAKTSQFIAFRRQDCDLINDCCCKHYTGHLTKDHQSRLVFGIGDKICCTRNAYLSDLLPENISGSQQNNDLDASSEDFSGTLPDFAKNKRDFESNVRLCNGEIFFITNDVTDVTFGKRRSLTINNMAGLEVTVDFKKLMKYCRIKHAWARTIHTFQGSEEQTVVYVVGKAGRQHWQHVYTAVTRGRCRVYVIAEESQLRNAIMKNSFPRKTRLKHFLQSKLSSSGAPPADFPSPRKSSGDSGGPSTPSASPLPVVTDHAMTNDVTWSEASSPDERTLTFAERWQLSSPDGVDTDDDLPKSRASKRTCGVNDDESPSKIFMVGESPQVSSRLQNLRLNNLIPRQLFKPTDNQET

SEQ ID NO: 37567 - protein, 574 aa, Homo sapiens
  Payload ID: 7460
  Gene Symbol: HELB
  Gene Name: helicase (DNA) B
  Uniprot ID: Q8NG08
  ENSP ID: ENSP00000396955
MARSSPYLRQLQGPLLPPRDLVEEDDDYLNDDVEEDEESVFIDAEELCSGGVKAGSLPGCLRVSICDENTQETCKVFGRFPITGAWWRVKVQVKPVVGSRSYQYQVQGFPSYFLQSDMSPPNQKHICALFLKECEVSSDDVNKFLTWVKEVSNYKNLNFENLRETLRTFHKETGRKDQKQPTQNGQEELFLDNEMSLPLENTIPFRNVMTALQFPKIMEFLPVLLPRHFKWIIGSGSKEMLKEIEEILGTHPWKLGFSKITYREWKLLRCEASWIAFCQCESLLQLMTDLEKNALIMYSRLKQICREDGHTYVEVNDLTLTLSNHMSFHAASESLKFLKDIGVVTYEKSCVFPYDLYHAERAIAFSICDLMKKPPWHLCVDVEKVLASIHTTKPENSSDDALNESKPDEVRLENPVDVVDTQDNGDHIWTNGENEINAEISEVQLDQDQVEVPLDRDQVAALEMICSNPVTVISGKGGCGKTTIVSRLFKHIEQLEEREVKKACEDFEQDQNASEEWITFTEQSQLEADKAIEVLLTAPTGKAAGLLRQKTGLHAYTLCQVTLDSYPVLNLVTC

SEQ ID NO: 37568 - protein, 846 aa, Homo sapiens
  Payload ID: 7460
  Gene Symbol: HELB
  Gene Name: helicase (DNA) B
  ENSP ID: ENSP00000439617
MARSSPYLRQLQGPLLPPRDLVEEDDDYLNDDVEEDEESVFIDAEELCSGGVKAGSLPGCLRVSICDENTQETCKVFGRFPITGAWWRVKVQVKPVVGSRSYQYQVQGFPSYFLQSDMSPPNQKHICALFLKECEVSSDDVNKFLTWVKEVSNYKNLNFENLRETLRTFHKETGRKDQKQPTQNGQEELFLDNEMSLPLENTIPFRNVMTALQFPKIMEFLPVLLPRHFKWIIGSGSKEMLKEIEEILGTHPWKLGFSKITYREWKLLRCEASWIAFCQCESLLQLMTDLEKNALIMYSRLKQICREDGHTYVEVNDLTLTLSNHMSFHAASESLKFLKDIGVVTYEKSCVFPYDLYHAERAIAFSICDLMKKPPWHLCVDVEKVLASIHTTKPENSSDDALNESKPDEVRLENPVDVVDTQDNGDHIWTNGENEINAEISEVQLDQDQVEVPLDRDQVAALEMICSNPVTVISGKGGCGKTTIVSRLFKHIEQLEEREVKKACEDFEQDQNASEEWITFTEQSQLEADKAIEVLLTAPTGKAAGLLRQKTGLHAYTLCQVNYSFYSWTQTMMTTNKPWKFSSVRVLVVDEGSLVSVGIFKSVLNLLCEHSKLSKLIILGDIRQLPSIEPGNLLKDLFETLKSRNCAIELKTNHRAESQLIVDNATRISRRQFPKFDAELNISDNPTLPISIQDKTFIFVRLPEEDASSQSSKTNHHSCLYSAVKTLLQENNLQNAKTSQFIAFRRQDCDLINDCCCKHYTGHLTKDHQSRLVFGIGDKICCTRNAYLSDLLPENISGSQQNNDLDASSEDFSGTLPDFAKNKRDFESNVRLCNGEIFFITNIEYL

SEQ ID NO: 37569 - protein, 1087 aa, Homo sapiens; identical to SEQ ID NO: 37566
  Payload ID: 7460
  Gene Symbol: HELB
  Gene Name: helicase (DNA) B
  Uniprot ID: Q8NG08
  ENSP ID: ENSP00000443287

SEQ ID NO: 37570 - protein, 1942 aa, Homo sapiens
  Payload ID: 7461
  Gene Symbol: HELZ
  Gene Name: helicase with zinc finger
  Uniprot ID: P42694
  ENSP ID: ENSP00000351524
MEDRRAEKSCEQACESLKRQDYEMALKHCTEALLSLGQYSMADFTGPCPLEIERIKIESLLYRIASFLQLKNYVQADEDCRHVLGEGLAKGEDAFRAVLCCMQLKGKLQPVSTILAKSLTGESLNGMVTKDLTRLKTLLSETETATSNALSGYHVEDLDEGSCNGWHFRPPPRGITSSEEYTLCKRFLEQGICRYGAQCTSAHSQEELAEWQKRYASRLIKLKQQNENKQLSGSYMETLIEKWMNSLSPEKVLSECIEGVKVEHNPDLSVTVSTKKSHQTWTFALTCKPARMLYRVALLYDAHRPHFSIIAISAGDSTTQVSQEVPENCQEWIGGKMAQNGLDHYVYKVGIAFNTEIFGTFRQTIVFDFGLEPVLMQRVMIDAASTEDLEYLMHAKQQLVTTAKRWDSSSKTIIDFEPNETTDLEKSLLIRYQIPLSADQLFTQSVLDKSLTKSNYQSRLHDLLYIEEIAQYKEISKFNLKVQLQILASFMLTGVSGGAKYAQNGQLFGRFKLTETLSEDTLAGRLVMTKVNAVYLLPVPKQKLVQTQGTKEKVYEATIEEKTKEYIFLRLSRECCEELNLRPDCDTQVELQFQLNRLPLCEMHYALDRIKDNGVLFPDISMTPTIPWSPNRQWDEQLDPRLNAKQKEAVLAITTPLAIQLPPVLIIGPYGTGKTFTLAQAVKHILQQQETRILICTHSNSAADLYIKDYLHPYVEAGNPQARPLRVYFRNRWVKTVHPVVHQYCLISSAHSTFQMPQKEDILKHRVVVVTLNTSQYLCQLDLEPGFFTHILLDEAAQAMECETIMPLALATQNTRIVLAGDHMQLSPFVYSEFARERNLHVSLLDRLYEHYPAEFPCRILLCENYRSHEAIINYTSELFYEGKLMASGKQPAHKDFYPLTFFTARGEDVQEKNSTAFYNNAEVFEVVERVEELRRKWPVAWGKLDDGSIGVVTPYADQVFRIRAELRKKRLSDVNVERVLNVQGKQFRVLFLSTVRTRHTCKHKQTPIKKKEQLLEDSTEDLDYGFLSNYKLLNTAITRAQSLVAVVGDPIALCSIGRCRKFWERFIALCHENSSLHGITFEQIKAQLEALELKKTYVLNPLAPEFIPRALRLQHSGSTNKQQQSPPKGKSLHHTQNDHFQNDGIVQPNPSVLIGNPIRAYTPPPPLGPHPNLGKSPSPVQRIDPHTGTSILYVPAVYGGNVVMSVPLPVPWTGYQGRFAVDPRIITHQAAMAYNMNLLQTHGRGSPIPYGLGHHPPVTIGQPQNQHQEKDQHEQNRNGKSDTNNSGPEINKIRTPEKKPTEPKQVDLESNPQNRSPESRPSVVYPSTKFPRKDNLNPRHINLPLPAPHAQYAIPNRHFHPLPQLPRPPFPIPQQHTLLNQQQNNLPEQPNQIPPQPNQVVQQQSQLNQQPQQPPPQLSPAYQAGPNNAFFNSAVAHRPQSPPAEAVIPEQQPPPMLQEGHSPLRAIAQPGPILPSHLNSFIDENPSGLPIGEALDRIHGSVALETLRQQQARFQQWSEHHAFLSQGSAPYPHHHHPHLQHLPQPPLGLHQPPVRADWKLTSSAEDEVETTYSRFQDLIRELSHRDQSETRELAEMPPPQSRLLQYRQVQSRSPPAVPSPPSSTDHSSHFSNFNDNSRDIEVASNPAFPQRLPPQIFNSPFSLPSEHLAPPPLKYLAPDGAWTFANLQQNHLMGPGFPYGLPPLPHRPPQNPFVQIQNHQHAIGQEPFHPLSSRTVSSSSLPSLEEYEPRGPGRPLYQRRISSSSVQPCSEEVSTPQDSLAQCKELQDHSNQSSFNFSSPESWVNTTSSTPYQNIPCNGSSRTAQPRELIAPPKTVKPPEDQLKSENLEVSSSFNYSVLQHLGQFPPLMPNKQIAESANSSSPQSSAGGKPAMSYASALRAPPKPRPPPEQAKKSSDPLSLFQELSLGSSSGSNGFYSYFK

SEQ ID NO: 37571 - protein, 567 aa, Homo sapiens
  Payload ID: 7461
  Gene Symbol: HELZ
  Gene Name: helicase with zinc finger
  ENSP ID: ENSP00000411144
MEDRRAEKSCEQACESLKRQDYEMALKHCTEALLSLGQYSMADFTGPCPLEIERIKIESLLYRIASFLQLKNYVQADEDCRHVLGEGLAKGEDAFRAVLCCMQLKGKLQPVSTILAKSLTGESLNGMVTKDLTRLKTLLSETETATSNALSGYHVEDLDEGSCNGWHFRPPPRGITSSEEYTLCKRFLEQGICRYGAQCTSAHSQEELAEWQKRYASRLIKLKQQNENKQLSGSYMETLIEKWMNSLSPEKVLSECIEGVKVEHNPDLSVTVSTKKSHQTWTFALTCKPARMLYRVALLYDAHRPHFSIIAISAGDSTTQVSQEVPENCQEWIGGKMAQNGLDHYVYKVGIAFNTEIFGTFRQTIVFDFGLEPVLMQRVMIDAASTEDLEYLMHAKQQLVTTAKRWDSSSKTIIDFEPNETTDLEKSLLIRYQIPLSADQLFTQSVLDKSLTKSNYQSRLHDLLYIEEIAQYKEISKFNLKVQLQILASFMLTGVSGGAKYAQNGQLFGRFKLTETLSEDTLAGRLVMTKVNAVYLLPVPKQKLVQTQGTKEKVYEATIEEKTKEYI

SEQ ID NO: 37572 - protein, 65 aa, Homo sapiens
  Payload ID: 7461
  Gene Symbol: HELZ
  Gene Name: helicase with zinc finger
  ENSP ID: ENSP00000462320
MEDRRAEKSCEQACESLKRQDYEMALKHCTEALLSLGQYSMADFTGPCPLEIERIKIESLLYRIA

SEQ ID NO: 37573 - protein, 103 aa, Homo sapiens
  Payload ID: 7461
  Gene Symbol: HELZ
  Gene Name: helicase with zinc finger
  ENSP ID: ENSP00000462763
MEDRRAEKSCEQACESLKRQDYEMALKHCTEALLSLGQYSMADFTGPCPLEIERIKIESLLYRIASFLQLKNYVQADEDCRHVLGEGLAKGEDAFRAVLCCMQ

SEQ ID NO: 37574 - protein, 1163 aa, Homo sapiens
  Payload ID: 7461
  Gene Symbol: HELZ
  Gene Name: helicase with zinc finger
  Uniprot ID: P42694
  ENSP ID: ENSP00000463727
MEDRRAEKSCEQACESLKRQDYEMALKHCTEALLSLGQYSMADFTGPCPLEIERIKIESLLYRIASFLQLKNYVQADEDCRHVLGEGLAKGEDAFRAVLCCMQLKGKLQPVSTILAKSLTGESLNGMVTKDLTRLKTLLSETETATSNALSGYHVEDLDEGSCNGWHFRPPPRGITSSEEYTLCKRFLEQGICRYGAQCTSAHSQEELAEWQKRYASRLIKLKQQNENKQLSGSYMETLIEKWMNSLSPEKVLSECIEGVKVEHNPDLSVTVSTKKSHQTWTFALTCKPARMLYRVALLYDAHRPHFSIIAISAGDSTTQVSQEVPENCQEWIGGKMAQNGLDHYVYKVGIAFNTEIFGTFRQTIVFDFGLEPVLMQRVMIDAASTEDLEYLMHAKQQLVTTAKRWDSSSKTIIDFEPNETTDLEKSLLIRYQIPLSADQLFTQSVLDKSLTKSNYQSRLHDLLYIEEIAQYKEISKFNLKVQLQILASFMLTGVSGGAKYAQNGQLFGRFKLTETLSEDTLAGRLVMTKVNAVYLLPVPKQKLVQTQGTKEKVYEATIEEKTKEYIFLRLSRECCEELNLRPDCDTQVELQFQLNRLPLCEMHYALDRIKDNGVLFPDISMTPTIPWSPNRQWDEQLDPRLNAKQKEAVLAITTPLAIQLPPVLIIGPYGTGKTFTLAQAVKHILQQQETSRILICTHSNSAADLYIKDYLHPYVEAGNPQARPLRVYFRNRWVKTVHPVVHQYCLISSAHSTFQMPQKEDILKHRVVVVTLNTSQYLCQLDLEPGFFTHILLDEAAQAMECETIMPLALATQNTRIVLAGDHMQLSPFVYSEFARERNLHVSLLDRLYEHYPAEFPCRILLCENYRSHEAIINYTSELFYEGKLMASGKQPAHKDFYPLTFFTARGEDVQEKNSTAFYNNAEVFEVVERVEELRRKWPVAWGKLDDGSIGVVTPYADQVFRIRAELRKKRLSDVNVERVLNVQGKQFRVLFLSTVRTRHTCKHKQTPIKKKEQLLEDSTEDLDYGFLSNYKLLNTAITRAQSLVAVVGDPIALCSIGRCRKFWERFIALCHENSSLHGITFEQIKAQLEALELKKTYVLNPLAPEFIPRALRLQHSGSTNKQQQSPPKVKPLLMKLKRLKGENFAEVPKVYWDASYFKCWN

SEQ ID NO: 37575 - protein, 193 aa, Homo sapiens
  Payload ID: 7461
  Gene Symbol: HELZ
  Gene Name: helicase with zinc finger
  ENSP ID: ENSP00000464354
  MOD_RES (1)..(1): Any amino acid
XFRQTIVFDFGLEPVLMQRVMIDAASTEVFFFRYMYVSLNRKVIRTTYRVSQPSAQSLCYYGFHLVLVLCYFFSPDLEYLMHAKQQLVTTAKRWDSSSKTIIDFEPNETTDLEKSLLIRYQIPLSADQLFTQSVLDKSLTKSNYQSRLHDLLYIEEIAQYKEISKFNLKVQLQILASFMLTGVSGGAKYAQNG

SEQ ID NO: 37576 - protein, 1943 aa, Homo sapiens
  Payload ID: 7461
  Gene Symbol: HELZ
  Gene Name: helicase with zinc finger
  ENSP ID: ENSP00000464512
MEDRRAEKSCEQACESLKRQDYEMALKHCTEALLSLGQYSMADFTGPCPLEIERIKIESLLYRIASFLQLKNYVQADEDCRHVLGEGLAKGEDAFRAVLCCMQLKGKLQPVSTILAKSLTGESLNGMVTKDLTRLKTLLSETETATSNALSGYHVEDLDEGSCNGWHFRPPPRGITSSEEYTLCKRFLEQGICRYGAQCTSAHSQEELAEWQKRYASRLIKLKQQNENKQLSGSYMETLIEKWMNSLSPEKVLSECIEGVKVEHNPDLSVTVSTKKSHQTWTFALTCKPARMLYRVALLYDAHRPHFSIIAISAGDSTTQVSQEVPENCQEWIGGKMAQNGLDHYVYKVGIAFNTEIFGTFRQTIVFDFGLEPVLMQRVMIDAASTEDLEYLMHAKQQLVTTAKRWDSSSKTIIDFEPNETTDLEKSLLIRYQIPLSADQLFTQSVLDKSLTKSNYQSRLHDLLYIEEIAQYKEISKFNLKVQLQILASFMLTGVSGGAKYAQNGQLFGRFKLTETLSEDTLAGRLVMTKVNAVYLLPVPKQKLVQTQGTKEKVYEATIEEKTKEYIFLRLSRECCEELNLRPDCDTQVELQFQLNRLPLCEMHYALDRIKDNGVLFPDISMTPTIPWSPNRQWDEQLDPRLNAKQKEAVLAITTPLAIQLPPVLIIGPYGTGKTFTLAQAVKHILQQQETSRILICTHSNSAADLYIKDYLHPYVEAGNPQARPLRVYFRNRWVKTVHPVVHQYCLISSAHSTFQMPQKEDILKHRVVVVTLNTSQYLCQLDLEPGFFTHILLDEAAQAMECETIMPLALATQNTRIVLAGDHMQLSPFVYSEFARERNLHVSLLDRLYEHYPAEFPCRILLCENYRSHEAIINYTSELFYEGKLMASGKQPAHKDFYPLTFFTARGEDVQEKNSTAFYNNAEVFEVVERVEELRRKWPVAWGKLDDGSIGVVTPYADQVFRIRAELRKKRLSDVNVERVLNVQGKQFRVLFLSTVRTRHTCKHKQTPIKKKEQLLEDSTEDLDYGFLSNYKLLNTAITRAQSLVAVVGDPIALCSIGRCRKFWERFIALCHENSSLHGITFEQIKAQLEALELKKTYVLNPLAPEFIPRALRLQHSGSTNKQQQSPPKGKSLHHTQNDHFQNDGIVQPNPSVLIGNPIRAYTPPPPLGPHPNLGKSPSPVQRIDPHTGTSILYVPAVYGGNVVMSVPLPVPWTGYQGRFAVDPRIITHQAAMAYNMNLLQTHGRGSPIPYGLGHHPPVTIGQPQNQHQEKDQHEQNRNGKSDTNNSGPEINKIRTPEKKPTEPKQVDLESNPQNRSPESRPSVVYPSTKFPRKDNLNPRHINLPLPAPHAQYAIPNRHFHPLPQLPRPPFPIPQQHTLLNQQQNNLPEQPNQIPPQPNQVVQQQSQLNQQPQQPPPQLSPAYQAGPNNAFFNSAVAHRPQSPPAEAVIPEQQPPPMLQEGHSPLRAIAQPGPILPSHLNSFIDENPSGLPIGEALDRIHGSVALETLRQQQARFQQWSEHHAFLSQGSAPYPHHHHPHLQHLPQPPLGLHQPPVRADWKLTSSAEDEVETTYSRFQDLIRELSHRDQSETRELAEMPPPQSRLLQYRQVQSRSPPAVPSPPSSTDHSSHFSNFNDNSRDIEVASNPAFPQRLPPQIFNSPFSLPSEHLAPPPLKYLAPDGAWTFANLQQNHLMGPGFPYGLPPLPHRPPQNPFVQIQNHQHAIGQEPFHPLSSRTVSSSSLPSLEEYEPRGPGRPLYQRRISSSSVQPCSEEVSTPQDSLAQCKELQDHSNQSSFNFSSPESWVNTTSSTPYQNIPCNGSSRTAQPRELIAPPKTVKPPEDQLKSENLEVSSSFNYSVLQHLGQFPPLMPNKQIAESANSSSPQSSAGGKPAMSYASALRAPPKPRPPPEQAKKSSDPLSLFQELSLGSSSGSNGFYSYFK

SEQ ID NO: 37577 - protein, 2080 aa, Homo sapiens
  Payload ID: 7462
  Gene Symbol: HELZ2
  Gene Name: helicase with zinc finger 2, transcriptional coactivator
  Uniprot ID: Q9BYK8
  ENSP ID: ENSP00000393257
MSSSPSRSAADIYIREYFHSHVSGGHPEATPLRVMYTDRPLSQTDPVTLQYCCLTDDRQAFRPPTRAELARHRVVVTTTSQARELRVPVGFFSHILIDEAAQMLECEALTPLAYASHGTRLVLAGDHMQVTPRLFSVARARAAEHTLLHRLFLCYQQETHEVARQSRLVFHENYRCTDAIVSFISRHFYVAKGNPIHARGKVPPHPRHYPLMFCHVAGSPDRDMSMASWLNLAEIAQVVEKVQEAYNTWPSCWGGREQRCICVVSHGAQVSALRQELRRRDLGQVSVGSFEILPGRQFRVVVLSTVHTCQSLLSPGALAPEFFTDARVLNTVLTRAQSQLVVVGDAVALCSFGACGKLWESFIRECVERHSVCPEGLSMEQVEQGVAQRRRWPPRGTQAGAAGNWEAAPEPVGDLAEEQAAVVTAMVKAEPGDEALSPASRDITATTAQTEAAAAPAGDAVKEDVVPGACAAGAAAAAGVESTEAEDAEADFWPWDGELNADDAILRELLDESQKVMVTVGEDGLLDTVARPESLQQARLYENLPPAALRKLLHAEPERYRHCSFVPETFERASAIPLDDASSGPIQVRGRLDCGMAFAGDEVLVQLLSGDKAPEGRLRGRVLGVLKRKRHELAFVCRMDTWDPRIMVPINGSVTKIFVAELKDPSQVPIYSLRKGRLQRVGLERLTAEARHSRLFWVQIVLWRQGFYYPLGIVREVLPEASTWEQGLRILGLEYSLRVPPSDQATITKVLQKYHTELGRVAGRREDCRAFLTFTVDPQGACNLDDALSVRDLGPRCEVAVHITDVASFVPRDGVLDVEARRQGAAFYAPGREPVPMLPASLCQDVLSLLPGRDRLAISLFLTMEKASGQLKSLRFAPSVVQSDRQLSYEEAEEVIRQHPGAGRELPARLDSVDACVVAACYFSRLLRRHRLRSDCFYEQPDEDGTLGFRAAHIMVKEYMIQFNRLVAEFLVGSECTRTVTPLRWQPAPRSQQLKALCEKHGDRVPLSLHLGHHLHGGGGSPPDTRLHLLASLWKQVQFAARTQDYEQMVDLVTTDDMHPFLAPAGRDLRKALERSAFGRCARGHQQQGGHYSLQVDWYTWATSPIRRYLDVVLQRQILLALGHGGSAYSARDIDGLCQAFSLQHALAQSYQRRARSLHLAVQLKAQPLDKLGFVVDVEAGSRCFRLLFPSNRETLPDPCPVPYGSLQLAEHPHALAGRPGLRLLWRRRVYSAQGSSPPLPLPGTVPDPHTLAVETALWKQLLELVELQRWPEAAALIQEKGEASQRRELVQVQRSHCGHFLEVARELGSGDTLQVQLGTSLQHGFLVPSPQLWTVAPGFSLCLEHVERPGDCFSGRVYRAPRDRYRDVDEYACVWEPFCALESATGAVAENDSVTLQHLSVSWEASRTPQGQLQGAFRLEAAFLEENCADINFSCCYLCIRLEGLPAPTASPRPGPSSLGPGLNVDPGTYTWVAHGQTQDWDQERRADRQEAPRRVHLFVHHMGMEKVPEEVLRPGTLFTVELLPKQLPDLRKEEAVRGLEEASPLVTSIALGRPVPQPLCRVIPSRFLERQTYNIPGGRHKLNPSQNVAVREALEKPFTVIQGPPGTGKTIVGLHIVFWFHKSNQEQVQPGGPPRGEKRLGGPCILYCGPSNKSVDVLAGLLLRRMELKPLRVYSEQAEASEFPVPRVGSRKLLRKSPREGRPNQSLRSITLHHRIRQAPNPYSSEIKAFDTRLQRGELFSREDLVWYKKVLWEARKFELDRHEVILCTCSCAASASLKILDVRQILVDEAGMATEPETLIPLVQFPQAEKVVLLGDHKQLRPVVKNERLQNLGLDRSLFERYHEDAHMLDTQYRMHEGICAFPSVAFYKSKLKTWQGLRRPPSVLGHAGKESCPVIFGHVQGHERSLLVSTDEGNENSKANLEEVAEVVRITKQLTLGRTVEPQDIAVLTPYNAQASEISKALRREGIAGVAVSSITKSQGSEWRYVLVSTVRTCAKSDLDQRPTKSWLKKFLGFVVDPNQVNVAVTRAQEGLCLIGDHLLLRCCPLWRSLLDFCEAQQTLVPAGQVRVCRRPTMPS

SEQ ID NO: 37578 - protein, 2649 aa, Homo sapiens
  Payload ID: 7462
  Gene Symbol: HELZ2
  Gene Name: helicase with zinc finger 2, transcriptional coactivator
  Uniprot ID: Q9BYK8
  ENSP ID: ENSP00000417401
MAVWEAEQLGGLQRGDLLTPPAPDGDGRTAPLGQPPGAQLYCPACLVTCHSQEAFENHCASSEHAQMVAFDQALPWEHRSPPPGLSKFELCPKPDLCEYGDACTKAHSAQELQEWVRRTQAVELRGQAAWQDGLVPYQERLLAEYQRSSSEVLVLAETLDGVRVTCNQPLMYQAQERKTQYSWTFAVHSEEPLLHVALLKQEPGADFSLVAPGLPPGRLYARGERFRVPSSTADFQVGVRVQAASFGTFEQWVVFDFGRRPVLLQKLGLQLGQGRRPGPCRNLALGHPEEMERWHTGNRHVVPGVERTAEQTALMAKYKGPALALEFNRSSVASGPISPTNYRQRMHQFLYEEEAAQQQLVAKLTLRGQVFLKTALQTPALNMLFAPPGALYAEVPVPSSLMPDTDQGFLLGRAVSTALVAPVPAPDNTVFEVRLERRASSEQALWLLLPARCCLALGLQPEARLVLEVQFQIDPMTFRLWHQAVDTLPEEQLVVPDLPTCALPRPWSVPPLRRGNRKQELAVALIAGWGPGDGRRVPPLLIYGPFGTGKTYTLAMASLEVIRRPETKVLICTHTNSAADIYIREYFHSHVSGGHPEATPLRVMYTDRPLSQTDPVTLQYCCLTDDRQAFRPPTRAELARHRVVVTTTSQARELRVPVGFFSHILIDEAAQMLECEALTPLAYASHGTRLVLAGDHMQVTPRLFSVARARAAEHTLLHRLFLCYQQETHEVARQSRLVFHENYRCTDAIVSFISRHFYVAKGNPIHARGKVPPHPRHYPLMFCHVAGSPDRDMSMASWLNLAEIAQVVEKVQEAYNTWPSCWGGREQRCICVVSHGAQVSALRQELRRRDLGQVSVGSFEILPGRQFRVVVLSTVHTCQSLLSPGALAPEFFTDARVLNTVLTRAQSQLVVVGDAVALCSFGACGKLWESFIRECVERHSVCPEGLSMEQVEQGVAQRRRWPPRGTQAGAAGNWEAAPEPVGDLAEEQAAVVTAMVKAEPGDEALSPASRDITATTAQTEAAAAPAGDAVKEDVVPGACAAGAAAAAGVESTEAEDAEADFWPWDGELNADDAILRELLDESQKVMVTVGEDGLLDTVARPESLQQARLYENLPPAALRKLLHAEPERYRHCSFVPETFERASAIPLDDASSGPIQVRGRLDCGMAFAGDEVLVQLLSGDKAPEGRLRGRVLGVLKRKRHELAFVCRMDTWDPRIMVPINGSVTKIFVAELKDPSQVPIYSLRKGRLQRVGLERLTAEARHSRLFWVQIVLWRQGFYYPLGIVREVLPEASTWEQGLRILGLEYSLRVPPSDQATITKVLQKYHTELGRVAGRREDCRAFLTFTVDPQGACNLDDALSVRDLGPRCEVAVHITDVASFVPRDGVLDVEARRQGAAFYAPGREPVPMLPASLCQDVLSLLPGRDRLAISLFLTMEKASGQLKSLRFAPSVVQSDRQLSYEEAEEVIRQHPGAGRELPARLDSVDACVVAACYFSRLLRRHRLRSDCFYEQPDEDGTLGFRAAHIMVKEYMIQFNRLVAEFLVGSECTRTVTPLRWQPAPRSQQLKALCEKHGDRVPLSLHLGHHLHGGGGSPPDTRLHLLASLWKQVQFAARTQDYEQMVDLVTTDDMHPFLAPAGRDLRKALERSAFGRCARGHQQQGGHYSLQVDWYTWATSPIRRYLDVVLQRQILLALGHGGSAYSARDIDGLCQAFSLQHALAQSYQRRARSLHLAVQLKAQPLDKLGFVVDVEAGSRCFRLLFPSNRETLPDPCPVPYGSLQLAEHPHALAGRPGLRLLWRRRVYSAQGSSPPLPLPGTVPDPHTLAVETALWKQLLELVELQRWPEAAALIQEKGEASQRRELVQVQRSHCGHFLEVARELGSGDTLQVQLGTSLQHGFLVPSPQLWTVAPGFSLCLEHVERPGDCFSGRVYRAPRDRYRDVDEYACVWEPFCALESATGAVAENDSVTLQHLSVSWEASRTPQGQLQGAFRLEAAFLEENCADINFSCCYLCIRLEGLPAPTASPRPGPSSLGPGLNVDPGTYTWVAHGQTQDWDQERRADRQEAPRRVHLFVHHMGMEKVPEEVLRPGTLFTVELLPKQLPDLRKEEAVRGLEEASPLVTSIALGRPVPQPLCRVIPSRFLERQTYNIPGGRHKLNPSQNVAVREALEKPFTVIQGPPGTGKTIVGLHIVFWFHKSNQEQVQPGGPPRGEKRLGGPCILYCGPSNKSVDVLAGLLLRRMELKPLRVYSEQAEASEFPVPRVGSRKLLRKSPREGRPNQSLRSITLHHRIRQAPNPYSSEIKAFDTRLQRGELFSREDLVWYKKVLWEARKFELDRHEVILCTCSCAASASLKILDVRQILVDEAGMATEPETLIPLVQFPQAEKVVLLGDHKQLRPVVKNERLQNLGLDRSLFERYHEDAHMLDTQYRMHEGICAFPSVAFYKSKLKTWQGLRRPPSVLGHAGKESCPVIFGHVQGHERSLLVSTDEGNENSKANLEEVAEVVRITKQLTLGRTVEPQDIAVLTPYNAQASEISKALRREGIAGVAVSSITKSQGSEWRYVLVSTVRTCAKSDLDQRPTKSWLKKFLGFVVDPNQVNVAVTRAQEGLCLIGDHLLLRCCPLWRSLLDFCEAQQTLVPAGQVRVCRRPTMPS

SEQ ID NO: 37579 - protein, 714 aa, Homo sapiens
  Payload ID: 7463
  Gene Symbol: HELLS
  Gene Name: helicase, lymphoid-specific
  ENSP ID: ENSP00000239026
MRKKRGREDESYNISEVMSKEEILSVAKKNKKENEDENSSSTNLCVEDLQKNKDSNSIIKDRLSETVRQNTKFFFDPVRKCNGQPVPFQQPKHFTGGVMRWYQVEGMEWLRMLWENGINGILADEMGLGKTVQCIATIALMIQRGVPGPFLVCGPLSTLPNWMAEFKRFTPDIPTMLYHGTQEERQKLVRNIYKRKGTLQIHPVVITSFEIAMRDRNALQHCYWKYLIVDEGHRIKNMKCRLIRELKRFNADNKLLLTGTPLQNNLSELWSLLNFLLPDVFDDLKSFESWFDITSLSETAEDIIAKEREQNVLHMLHQILTPFLLRRLKSDVALEVPPKREVVVYAPLSKKQEIFYTAIVNRTIANMFGSSEKETIELSPTGRPKRRTRKSINYSKIDDFPNELEKLISQIQPEVDRERAVVEVNIPVESEVNLKLQNIMMLLRKCCNHPYLIEYPIDPVTQEFKIDEELVTNSGKFLILDRMLPELKKRGHKVLLFSQMTSMLDILMDYCHLRDFNFSRLDGSMSYSEREKNMHSFNTDPEVFIFLVSTRAGGLGINLTAADTVIIYDSDWNPQSDLQAQDRCHRIGQTKPVVVYRLVTANTIDQKIVERAAAKRKLEKLIIHKNHFKGGQSGLNLSKNFLDPKELMELLKSRDYEREIKGSREKVISDKDLELLLDRSDLIDQMNASGPIKEKMGIFKILENSEDSSPECLF

SEQ ID NO: 37580 - protein, 838 aa, Homo sapiens
  Payload ID: 7463
  Gene Symbol: HELLS
  Gene Name: helicase, lymphoid-specific
  Uniprot ID: Q9NRZ9
  ENSP ID: ENSP00000239027
MPAERPAGSGGSEAPAMVEQLDTAVITPAMLEEEEQLEAAGLERERKMLEKARMSWDRESTEIRYRRLQHLLEKSNIYSKFLLTKMEQQQLEEQKKKEKLERKKESLKVKKGKNSIDASEEKPVMRKKRGREDESYNISEVMSKEEILSVAKKNKKENEDENSSSTNLCVEDLQKNKDSNSIIKDRLSETVRQNTKFFFDPVRKCNGQPVPFQQPKHFTGGVMRWYQVEGMEWLRMLWENGINGILADEMGLGKTVQCIATIALMIQRGVPGPFLVCGPLSTLPNWMAEFKRFTPDIPTMLYHGTQEERQKLVRNIYKRKGTLQIHPVVITSFEIAMRDRNALQHCYWKYLIVDEGHRIKNMKCRLIRELKRFNADNKLLLTGTPLQNNLSELWSLLNFLLPDVFDDLKSFESWFDITSLSETAEDIIAKEREQNVLHMLHQILTPFLLRRLKSDVALEVPPKREVVVYAPLSKKQEIFYTAIVNRTIANMFGSSEKETIELSPTGRPKRRTRKSINYSKIDDFPNELEKLISQIQPEVDRERAVVEVNIPVESEVNLKLQNIMMLLRKCCNHPYLIEYPIDPVTQEFKIDEELVTNSGKFLILDRMLPELKKRGHKVLLFSQMTSMLDILMDYCHLRDFNFSRLDGSMSYSEREKNMHSFNTDPEVFIFLVSTRAGGLGINLTAADTVIIYDSDWNPQSDLQAQDRCHRIGQTKPVVVYRLVTANTIDQKIVERAAAKRKLEKLIIHKNHFKGGQSGLNLSKNFLDPKELMELLKSRDYEREIKGSREKVISDKDLELLLDRSDLIDQMNASGPIKEKMGIFKILENSEDSSPECLF

SEQ ID NO: 37581 - protein, 310 aa, Homo sapiens
  Payload ID: 7463
  Gene Symbol: HELLS
  Gene Name: helicase, lymphoid-specific
  ENSP ID: ENSP00000360378
MMLLRKCCNHPYLIEYPIDPVTQEFKIDEELVTNSGKFLILDRMLPELKKRGHKVLLFSQMTSMLDILMDYCHLRDFNFSRLDGSMSYSEREKNMHSFNTDPEVFIFLVSTRAGGLGINLTAADTVIIYDSDWNPQSDLQAQDRCHRIGQTKPVVVYRLVTANTIDQKIVERAAAKRKLEKLIIHKNHFKGGQSGLNLSKNFLDPKELMELLKSRDYEREIKGSREKVISDKDLELLLDRSDLIDQMNASGPIKEKMGIFKILENSEDSSPELETGFHHLGLTGPELISGDLPTSASQSAGITSVSHCVA

SEQ ID NO: 37582 - protein, 700 aa, Homo sapiens
  Payload ID: 7463
  Gene Symbol: HELLS
  Gene Name: helicase, lymphoid-specific
  ENSP ID: ENSP00000360383
MQVKRSQEILSVAKKNKKENEDENSSSTNLCVEDLQKNKDSNSIIKDRLSETVRQNTKFFFDPVRKCNGQPVPFQQPKHFTGGVMRWYQVEGMEWLRMLWENGINGILADEMGLGKTVQCIATIALMIQRGVPGPFLVCGPLSTLPNWMAEFKRFTPDIPTMLYHGTQEERQKLVRNIYKRKGTLQIHPVVITSFEIAMRDRNALQHCYWKYLIVDEGHRIKNMKCRLIRELKRFNADNKLLLTGTPLQNNLSELWSLLNFLLPDVFDDLKSFESWFDITSLSETAEDIIAKEREQNVLHMLHQILTPFLLRRLKSDVALEVPPKREVVVYAPLSKKQEIFYTAIVNRTIANMFGSSEKETIELSPTGRPKRRTRKSINYSKIDDFPNELEKLISQIQPEVDRERAVVEVNIPVESEVNLKLQNIMMLLRKCCNHPYLIEYPIDPVTQEFKIDEELVTNSGKFLILDRMLPELKKRGHKVLLFSQMTSMLDILMDYCHLRDFNFSRLDGSMSYSEREKNMHSFNTDPEVFIFLVSTRAGGLGINLTAADTVIIYDSDWNPQSDLQAQDRCHRIGQTKPVVVYRLVTANTIDQKIVERAAAKRKLEKLIIHKNHFKGGQSGLNLSKNFLDPKELMELLKSRDYEREIKGSREKVISDKDLELLLDRSDLIDQMNASGPIKEKMGIFKILENSEDSSPECLF

SEQ ID NO: 37583 - protein, 884 aa, Homo sapiens
  Payload ID: 7463
  Gene Symbol: HELLS
  Gene Name: helicase, lymphoid-specific
  ENSP ID: ENSP00000377601
MPAERPAGSGGSEAPAMVEQLDTAVITPAMLEEEEQLEAAGLERERKMLEKARMSWDRESTEIRYRRLQHLLEKSNIYSKFLLTKMEQQQLEEQKKKEKLERKKESLKVKKGKNSIDASEEKPVMRKKRGREDESYNISEVMSKEEILSVAKKNKKENEDENSSSTNLCVEDLQKNKDSNSIIKDRLSETVRQNTKFFFDPVRKCNGQPVPFQQPKHFTGGVMRWYQVEGMEWLRMLWENGINGILADEMGLGKTVQCIATIALMIQRGVPGPFLVCGPLSTLPNWMAEFKRFTPDIPTMLYHGTQEERQKLVRNIYKRKGTLQIHPVVITSFEIAMRDRNALQHCYWKYLIVDEGHRIKNMKCRLIRELKRFNADNKLLLTGTPLQNNLSELWSLLNFLLPDVFDDLKSFESWFDITSLSETAEDIIAKEREQNVLHMLHQERIPRMYVSEFTDEGFFEGKLPSRKDLYDIRPYENTYLLKLHTNFEILTPFLLRRLKSDVALEVPPKREVVVYAPLSKKQEIFYTAIVNRTIANMFGSSEKETIELSPTGRPKRRTRKSINYSKIDDFPNELEKLISQIQPEVDRERAVVEVNIPVESEVNLKLQNIMMLLRKCCNHPYLIEYPIDPVTQEFKIDEELVTNSGKFLILDRMLPELKKRGHKVLLFSQMTSMLDILMDYCHLRDFNFSRLDGSMSYSEREKNMHSFNTDPEVFIFLVSTRAGGLGINLTAADTVIIYDSDWNPQSDLQAQDRCHRIGQTKPVVVYRLVTANTIDQKIVERAAAKRKLEKLIIHKNHFKGGQSGLNLSKNFLDPKELMELLKSRDYEREIKGSREKVISDKDLELLLDRSDLIDQMNASGPIKEKMGIFKILENSEDSSPECLF

SEQ ID NO: 37584 - protein, 740 aa, Homo sapiens
  Payload ID: 7463
  Gene Symbol: HELLS
  Gene Name: helicase, lymphoid-specific
  Uniprot ID: Q9NRZ9
  ENSP ID: ENSP00000377609
MPAERPAGSGGSEAPAMVEQLDTAVITPAMLEEEEQLEAAGLERERKMLEKARMSWDRESTEIRYRRLQHLLEKSNIYSKFLLTKMEQQQLEEQKKKEKLERKKESLKVKKGKNSIDASEEKPVMRKKRGREDESYNISEVMSKEEILSVAKKNKKENEDENSSSTNLCVEDLQKNKDSNSIIKDRLSETVRQNTKFFFDPVRKCNGQPVPFQQPKHFTGGVMRWYQVEGMEWLRMLWENGINGILADEMGLGKTVQCIATIALMIQRGVPGPFLVCGPLSTLPNWMAEFKRFTPDIPTMLYHGTQEERQKLVRNIYKRKGTLQIHPVVITSFEIAMRDRNALQILTPFLLRRLKSDVALEVPPKREVVVYAPLSKKQEIFYTAIVNRTIANMFGSSEKETIELSPTGRPKRRTRKSINYSKIDDFPNELEKLISQIQPEVDRERAVVEVNIPVESEVNLKLQNIMMLLRKCCNHPYLIEYPIDPVTQEFKIDEELVTNSGKFLILDRMLPELKKRGHKVLLFSQMTSMLDILMDYCHLRDFNFSRLDGSMSYSEREKNMHSFNTDPEVFIFLVSTRAGGLGINLTAADTVIIYDSDWNPQSDLQAQDRCHRIGQTKPVVVYRLVTANTIDQKIVERAAAKRKLEKLIIHKNHFKGGQSGLNLSKNFLDPKELMELLKSRDYEREIKGSREKVISDKDLELLLDRSDLIDQMNASGPIKEKMGIFKILENSEDSSPECLF

SEQ ID NO: 37585 - protein, 192 aa, Homo sapiens
  Payload ID: 7463
  Gene Symbol: HELLS
  Gene Name: helicase, lymphoid-specific
  ENSP ID: ENSP00000409945
MVEQLDTAVITPAMLEEEEQLEAAGLERERKMLEKARMSWDRESTEIRYRRLQHLLEKSNIYSKFLLTKMEQQQLEEQKKKEKLERKKESLKVKKGKNSIDASEEKPVMRKKRGREDESYNISEVMSKEEILSVAKKNKKENEDENSSSTNLCVEDLQKNKDSNSIIKDRLSETVRQNTKFFFDPVRKCNGQ

SEQ ID NO: 37586 - protein, 97 aa, Homo sapiens
  Payload ID: 7463
  Gene Symbol: HELLS
  Gene Name: helicase, lymphoid-specific
  ENSP ID: ENSP00000485823
MPAERPAGSGGSEAPAMVEQLDTAVITPAMLEEEEQLEAAGLERERKMLEKARMSWDRESTEIRYRRLQHLLEKSNIYSKFLLTKMEQQQLETVMKI

SEQ ID NO: 37587 - protein, 1101 aa, Homo sapiens
  Payload ID: 7464
  Gene Symbol: HELQ
  Gene Name: helicase, POLQ-like
  Uniprot ID: Q8TDG4
  ENSP ID: ENSP00000295488
MDECGSRIRRRVSLPKRNRPSLGCIFGAPTAAELVPGDEGKEEEEMVAENRRRKTAGVLPVEVQPLLLSDSPECLVLGGGDTNPDLLRHMPTDRGVGDQPNDSEVDMFGDYDSFTENSFIAQVDDLEQKYMQLPEHKKHATDFATENLCSESIKNKLSITTIGNLTELQTDKHTENQSGYEGVTIEPGADLLYDVPSSQAIYFENLQNSSNDLGDHSMKERDWKSSSHNTVNEELPHNCIEQPQQNDESSSKVRTSSDMNRRKSIKDHLKNAMTGNAKAQTPIFSRSKQLKDTLLSEEINVAKKTVESSSNDLGPFYSLPSKVRDLYAQFKGIEKLYEWQHTCLTLNSVQERKNLIYSLPTSGGKTLVAEILMLQELLCCRKDVLMILPYVAIVQEKISGLSSFGIELGFFVEEYAGSKGRFPPTKRREKKSLYIATIEKGHSLVNSLIETGRIDSLGLVVVDELHMIGEGSRGATLEMTLAKILYTSKTTQIIGMSATLNNVEDLQKFLQAEYYTSQFRPVELKEYLKINDTIYEVDSKAENGMTFSRLLNYKYSDTLKKMDPDHLVALVTEVIPNYSCLVFCPSKKNCENVAEMICKFLSKEYLKHKEKEKCEVIKNLKNIGNGNLCPVLKRTIPFGVAYHHSGLTSDERKLLEEAYSTGVLCLFTCTSTLAAGVNLPARRVILRAPYVAKEFLKRNQYKQMIGRAGRAGIDTIGESILILQEKDKQQVLELITKPLENCYSHLVQEFTKGIQTLFLSLIGLKIATNLDDIYHFMNGTFFGVQQKVLLKEKSLWEITVESLRYLTEKGLLQKDTIYKSEEEVQYNFHITKLGRASFKGTIDLAYCDILYRDLKKGLEGLVLESLLHLIYLTTPYDLVSQCNPDWMIYFRQFSQLSPAEQNVAAILGVSESFIGKKASGQAIGKKVDKNVVNRLYLSFVLYTLLKETNIWTVSEKFNMPRGYIQNLLTGTASFSSCVLHFCEELEEFWVYRALLVELTKKLTYCVKAELIPLMEVTGVLEGRAKQLYSAGYKSLMHLANANPEVLVRTIDHLSRRQAKQIVSSAKMLLHEKAEALQEEVEELLRLPSDFPGAVASSTDKA

SEQ ID NO: 37588 - protein, 489 aa, Homo sapiens
  Payload ID: 7464
  Gene Symbol: HELQ
  Gene Name: helicase, POLQ-like
  ENSP ID: ENSP00000424186
MDECGSRIRRRVSLPKRNRPSLGCIFGAPTAAELVPGDEGKEEEEMVAENRRRKTAGVLPVEVQPLLLSDSPECLVLGGGDTNPDLLRHMPTDRGVGDQPNDSEVDMFGDYDSFTENSFIAQVDDLEQKYMQLPEHKKHATDFATENLCSESIKNKLSITTIGNLTELQTDKHTENQSGYEGVTIEPGADLLYDVPSSQAIYFENLQNSSNDLGDHSMKERDWKSSSHNTVNEELPHNCIEQPQQNDESSSKVRTSSDMNRRKSIKDHLKNAMTGNAKAQTPIFSRSKQLKDTLLSEEINVAKKTVESSSNDLGPFYSLPSKVRDLYAQFKGIEKLYEWQHTCLTLNSVQERKNLIYSLPTSGGKTLVAEILMLQELLCCRKDVLMILPYVAIVQEKISGLSSFGIELGFFVEEYAGSKGRFPPTKRREKKSLYIATIEKGHSLVNSLIETGRIDSLGLVVVDELHMIGEGSRGATLEMTLAKILYTSS

SEQ ID NO: 37589 - protein, 1034 aa, Homo sapiens
  Payload ID: 7464
  Gene Symbol: HELQ
  Gene Name: helicase, POLQ-like
  ENSP ID: ENSP00000424539
MDECGSRIRRRVSLPKRNRPSLGCIFGAPTAAELVPGDEGKEEEEMVAENRRRKTAGVLPVEVQPLLLSDSPECLVLGGGDTNPDLLRHMPTDRGVGDQPNDSEVDMFGDYDSFTENSFIAQVDDLEQKYMQLPEHKKHATDFATENLCSESIKNKLSITTIGNLTELQTDKHTENQSGYEGVTIEPGADLLYDVPSSQAIYFENLQNSSNDLGDHSMKERDWKSSSHNTVNEELPHNCIEQPQQNDESSSKVRTSSDMNRRKSIKDHLKNAMTGNAKAQTPIFSRSKQLKDTLLSEEINVAKKTVESSSNDLGPFYSLPSKVRDLYAQFKGIEKLYEWQHTCLTLNSVQERKNLIYSLPTSGGKTLVAEILMLQELLCCRKDVLMILPYVAIVQEKLHMIGEGSRGATLEMTLAKILYTSKTTQIIGMSATLNNVEDLQKFLQAEYYTSQFRPVELKEYLKINDTIYEVDSKAENGMTFSRLLNYKYSDTLKKMDPDHLVALVTEVIPNYSCLVFCPSKKNCENVAEMICKFLSKEYLKHKEKEKCEVIKNLKNIGNGNLCPVLKRTIPFGVAYHHSGLTSDERKLLEEAYSTGVLCLFTCTSTLAAGVNLPARRVILRAPYVAKEFLKRNQYKQMIGRAGRAGIDTIGESILILQEKDKQQVLELITKPLENCYSHLVQEFTKGIQTLFLSLIGLKIATNLDDIYHFMNGTFFGVQQKVLLKEKSLWEITVESLRYLTEKGLLQKDTIYKSEEEVQYNFHITKLGRASFKGTIDLAYCDILYRDLKKGLEGLVLESLLHLIYLTTPYDLVSQCNPDWMIYFRQFSQLSPAEQNVAAILGVSESFIGKKASGQAIGKKVDKNVVNRLYLSFVLYTLLKETNIWTVSEKFNMPRGYIQNLLTGTASFSSCVLHFCEELEEFWVYRALLVELTKKLTYCVKAELIPLMEVTGVLEGRAKQLYSAGYKSLMHLANANPEVLVRTIDHLSRRQAKQIVSSAKMLLHEKAEALQEEVEELLRLPSDFPGAVASSTDKA

SEQ ID NO: 37590 - protein, 1009 aa, Homo sapiens
  Payload ID: 7465
  Gene Symbol: HLTF
  Gene Name: helicase-like transcription factor
  Uniprot ID: Q14527
  ENSP ID: ENSP00000308944
MSWMFKRDPVWKYLQTVQYGVHGNFPRLSYPTFFPRFEFQDVIPPDDFLTSDEEVDSVLFGSLRGHVVGLRYYTGVVNNNEMVALQRDPNNPYDKNAIKVNNVNGNQVGHLKKELAGALAYIMDNKLAQIEGVVPFGANNAFTMPLHMTFWGKEENRKAVSDQLKKHGFKLGPAPKTLGFNLESGWGSGRAGPSYSMPVHAAVQMTTEQLKTEFDKLFEDLKEDDKTHEMEPAEAIETPLLPHQKQALAWMVSRENSKELPPFWEQRNDLYYNTITNFSEKDRPENVHGGILADDMGLGKTLTAIAVILTNFHDGRPLPIERVKKNLLKKEYNVNDDSMKLGGNNTSEKADGLSKDASRCSEQPSISDIKEKSKFRMSELSSSRPKRRKTAVQYIESSDSEEIETSELPQKMKGKLKNVQSETKGRAKAGSSKVIEDVAFACALTSSVPTTKKKMLKKGACAVEGSKKTDVEERPRTTLIICPLSVLSNWIDQFGQHIKSDVHLNFYVYYGPDRIREPALLSKQDIVLTTYNILTHDYGTKGDSPLHSIRWLRVILDEGHAIRNPNAQQTKAVLDLESERRWVLTGTPIQNSLKDLWSLLSFLKLKPFIDREWWHRTIQRPVTMGDEGGLRRLQSLIKNITLRRTKTSKIKGKPVLELPERKVFIQHITLSDEERKIYQSVKNEGRATIGRYFNEGTVLAHYADVLGLLLRLRQICCHTYLLTNAVSSNGPSGNDTPEELRKKLIRKMKLILSSGSDEECAICLDSLTVPVITHCAHVFCKPCICQVIQNEQPHAKCPLCRNDIHEDNLLECPPEELARDSEKKSDMEWTSSSKINALMHALTDLRKKNPNIKSLVVSQFTTFLSLIEIPLKASGFVFTRLDGSMAQKKRVESIQCFQNTEAGSPTIMLLSLKAGGVGLNLSAASRVFLMDPAWNPAAEDQCFDRCHRLGQKQEVIITKFIVKDSVEENMLKIQNKKRELAAGAFGTKKPNADEMKQAKINEIRTLIDL

SEQ ID NO: 37591 - protein, 1009 aa, Homo sapiens; identical to SEQ ID NO: 37590
  Payload ID: 7465
  Gene Symbol: HLTF
  Gene Name: helicase-like transcription factor
  Uniprot ID: Q14527
  ENSP ID: ENSP00000376644

SEQ ID NO: 37592 - protein, 425 aa, Homo sapiens
  Payload ID: 7465
  Gene Symbol: HLTF
  Gene Name: helicase-like transcription factor
  ENSP ID: ENSP00000420106
DYGTKGDSPLHSIRWLRVILDEGHAIRNPNAQQTKAVLDLESERRWVLTGTPIQNSLKDLWSLLSFLKLKPFIDREWWHRTIQRPVTMGDEGGLRRLQSLIKNITLRRTKTSKIKGKPVLELPERKVFIQHITLSDEERKIYQSVKNEGRATIGRYFNEGTVLAHYADVLGLLLRLRQICCHTYLLTNAVSSNGPSAFSLGNDTPEELRKKLIRKMKLILSSGSDEECAICLDSLTVPVITHCAHVFCKPCICQVIQNEQPHAKCPLCRNDIHEDNLLECPPEELARDSEKKSDMEWTSSSKINALMHALTDLRKKNPNIKSLVVSQFTTFLSLIEIPLKASGFVFTRLDGSMAQKKRVESIQCFQNTEAGSPTIMLLSLKAGGVGLNLSAASRVFLMDPAWNPAAEDQCFDRCHRLGQKQEVII

SEQ ID NO: 37593 - protein, 1009 aa, Homo sapiens; identical to SEQ ID NO: 37590
  Payload ID: 7465
  Gene Symbol: HLTF
  Gene Name: helicase-like transcription factor
  Uniprot ID: Q14527
  ENSP ID: ENSP00000420429

SEQ ID NO: 37594 - protein, 1008 aa, Homo sapiens
  Payload ID: 7465
  Gene Symbol: HLTF
  Gene Name: helicase-like transcription factor
  ENSP ID: ENSP00000420745
MSWMFKRDPVWKYLQTVQYGVHGNFPRLSYPTFFPRFEFQDVIPPDDFLTSDEEVDSVLFGSLRGHVVGLRYYTGVVNNNEMVALQRDPNNPYDKNAIKVNNVNGNQVGHLKKELAGALAYIMDNKLAQIEGVVPFGANNAFTMPLHMTFWGKEENRKAVSDQLKKHGFKLGPAPKTLGFNLESGWGSGRAGPSYSMPVHAAVQMTTEQLKTEFDKLFEDLKEDDKTHEMEPAEAIETPLLPHQKQALAWMVSRENSKELPPFWEQRNDLYYNTITNFSEKDRPENVHGGILADDMGLGKTLTAIAVILTNFHDGRPLPIERVKKNLLKKEYNVNDDSMKLGGNNTSEKADGLSKDASRCSEQPSISDIKEKSKFRMSELSSSRPKRRKTAVQYIESSDSEEIETSELPQKMKGKLKNVQSETKGRAKGSSKVIEDVAFACALTSSVPTTKKKMLKKGACAVEGSKKTDVEERPRTTLIICPLSVLSNWIDQFGQHIKSDVHLNFYVYYGPDRIREPALLSKQDIVLTTYNILTHDYGTKGDSPLHSIRWLRVILDEGHAIRNPNAQQTKAVLDLESERRWVLTGTPIQNSLKDLWSLLSFLKLKPFIDREWWHRTIQRPVTMGDEGGLRRLQSLIKNITLRRTKTSKIKGKPVLELPERKVFIQHITLSDEERKIYQSVKNEGRATIGRYFNEGTVLAHYADVLGLLLRLRQICCHTYLLTNAVSSNGPSGNDTPEELRKKLIRKMKLILSSGSDEECAICLDSLTVPVITHCAHVFCKPCICQVIQNEQPHAKCPLCRNDIHEDNLLECPPEELARDSEKKSDMEWTSSSKINALMHALTDLRKKNPNIKSLVVSQFTTFLSLIEIPLKASGFVFTRLDGSMAQKKRVESIQCFQNTEAGSPTIMLLSLKAGGVGLNLSAASRVFLMDPAWNPAAEDQCFDRCHRLGQKQEVIITKFIVKDSVEENMLKIQNKKRELAAGAFGTKKPNADEMKQAKINEIRTLIDL

SEQ ID NO: 37595 - protein, 327 aa, Homo sapiens
  Payload ID: 7466
  Gene Symbol: HELT
  Gene Name: helt bHLH transcription factor
  ENSP ID: ENSP00000343464
MSDKLKERKVSRLSPNGTCALVVEASDSPTRHLGGPMAGKCPHGTLSVEESRVRTPVSHKVIEKRRRDRINRCLNELGKTVPMALAKQGEPQEALAQIRSRVRSLVLSSATVPDQQALGRCEGPFLLLQSSGKLEKAEILEMTVQYLRALHSADFPRGREKAELLAEFANYFHYGYHECMKNLVHYLTTVERMETKDTKYARILAFLQSKARLGAEPAFPPLGSLPEPDFSYQLHPAGPEFAGHSPGEAAVFPQGSGAGPFPWPPGAARSPALPYLPSAPVPLASPAQQHSPFLTPVQGLDRHYLNLIGHAHPNALNLHTPQHPPVL

SEQ ID NO: 37596 - protein, 241 aa, Homo sapiens
  Payload ID: 7466
  Gene Symbol: HELT
  Gene Name: helt bHLH transcription factor
  Uniprot ID: A6NFD8
  ENSP ID: ENSP00000422140
MSDKLKERKRTPVSHKVIEKRRRDRINRCLNELGKTVPMALAKQSSGKLEKAEILEMTVQYLRALHSADFPRGREKELLAEFANYFHYGYHECMKNLVHYLTTVERMETKDTKYARILAFLQSKARLGAEPAFPPLGSLPEPDFSYQLHPAGPEFAGHSPGEAAVFPQGSGAGPFPWPPGAARSPALPYLPSAPVPLASPAQQHSPFLTPVQGLDRHYLNLIGHAHPNALNLHTPQHPPVL

SEQ ID NO: 37597 - protein, 242 aa, Homo sapiens
  Payload ID: 7466
  Gene Symbol: HELT
  Gene Name: helt bHLH transcription factor
  Uniprot ID: A6NFD8
  ENSP ID: ENSP00000426033
MSDKLKERKRTPVSHKVIEKRRRDRINRCLNELGKTVPMALAKQSSGKLEKAEILEMTVQYLRALHSADFPRGREKAELLAEFANYFHYGYHECMKNLVHYLTTVERMETKDTKYARILAFLQSKARLGAEPAFPPLGSLPEPDFSYQLHPAGPEFAGHSPGEAAVFPQGSGAGPFPWPPGAARSPALPYLPSAPVPLASPAQQHSPFLTPVQGLDRHYLNLIGHAHPNALNLHTPQHPPVL

SEQ ID NO: 37598 - protein, 44 aa, Homo sapiens
  Payload ID: 7467
  Gene Symbol: HN1
  Gene Name: hematological and neurological expressed 1
  ENSP ID: ENSP00000303110
MTTTTTFKGVDPNSRNSSRDTGSCHVAQAGLELLGSSDDPALAS

SEQ ID NO: 37599 - protein, 181 aa, Homo sapiens
  Payload ID: 7467
  Gene Symbol: HN1
  Gene Name: hematological and neurological expressed 1
  Uniprot ID: Q9UK76
  ENSP ID: ENSP00000348316
MTTTTTFKGVDPNSRNSSRVLRPPGGGSNFSLGFDEPTEQPVRKNKMASNIFGTPEENQASWAKSAGAKSSGGREDLESSGLQRRNSSEASSGDFLDLKKMWTQTCQAAWGRVKRSPCLLRLCPARWPRPQCHPEEIPLAASPASSWVSSDCPERCRSVCFLHACELHNLSLTVHLLDLFH

SEQ ID NO: 37600 - protein, 154 aa, Homo sapiens
  Payload ID: 7467
  Gene Symbol: HN1
  Gene Name: hematological and neurological expressed 1
  Uniprot ID: Q9UK76
  ENSP ID: ENSP00000387059
MTTTTTFKGVDPNSRNSSRVLRPPGGGSNFSLGFDEPTEQPVRKNKMASNIFGTPEENQASWAKSAGAKSSGGREDLESSGLQRRNSSEASSGDFLDLKGEGDIHENVDTDLPGSLGQSEEKPVPAAPVPSPVAPAPVPSRRNPPGGKSSLVLG

SEQ ID NO: 37601 - protein, 108 aa, Homo sapiens
  Payload ID: 7467
  Gene Symbol: HN1
  Gene Name: hematological and neurological expressed 1
  Uniprot ID: Q9UK76
  ENSP ID: ENSP00000462478
MASNIFGTPEENQASWAKSAGAKSSGGREDLESSGLQRRNSSEASSGDFLDLKGEGDIHENVDTDLPGSLGQSEEKPVPAAPVPSPVAPAPVPSRRNPPGGKSSLVLG

SEQ ID NO: 37602 - protein, 93 aa, Homo sapiens
  Payload ID: 7467
  Gene Symbol: HN1
  Gene Name: hematological and neurological expressed 1
  ENSP ID: ENSP00000462493
MASNIFGTPEENQASWAKSAGAKSSGGREDLESSGLQRRNSSEASSGDFLDLKGEGDIHENVDTDLPGSLGQSEEKPVPAAPVPSPVAPAPVP

SEQ ID NO: 37603 - protein, 108 aa, Homo sapiens; identical to SEQ ID NO: 37601
  Payload ID: 7467
  Gene Symbol: HN1
  Gene Name: hematological and neurological expressed 1
  Uniprot ID: Q9UK76
  ENSP ID: ENSP00000462784

SEQ ID NO: 37604 - protein, 104 aa, Homo sapiens
  Payload ID: 7467
  Gene Symbol: HN1
  Gene Name: hematological and neurological expressed 1
  ENSP ID: ENSP00000462805
MTTTTTFKGVDPNSRNSSRVLRPPGGGSNFSLGFDEPTEQPVRKNKMASNIFGTPEENQASWAKSAGAKSSGGREDLESSGLQRRNSSEASSGDFLDLKVSVTA

SEQ ID NO: 37605 - protein, 108 aa, Homo sapiens; identical to SEQ ID NO: 37601
  Payload ID: 7467
  Gene Symbol: HN1
  Gene Name: hematological and neurological expressed 1
  Uniprot ID: Q9UK76
  ENSP ID: ENSP00000462834

SEQ ID NO: 37606 - protein, 108 aa, Homo sapiens; identical to SEQ ID NO: 37601
  Payload ID: 7467
  Gene Symbol: HN1
  Gene Name: hematological and neurological expressed 1
  Uniprot ID: Q9UK76
  ENSP ID: ENSP00000464266

SEQ ID NO: 37607 - protein, 190 aa, Homo sapiens
  Payload ID: 7468
  Gene Symbol: HN1L
  Gene Name: hematological and neurological expressed 1-like
  Uniprot ID: Q9H910
  ENSP ID: ENSP00000248098
MFQVPDSEGGRAGSRAMKPPGGESSNLFGSPEEATPSSRPNRMASNIFGPTEEPQNIPKRTNPPGGKGSGIFDESTPVQTRQHLNPPGGKTSDIFGSPVTATSRLAHPNKPKDHVFLCEGEEPKSDLKAARSIPAGAEPGEKGSARKAGPAKEQEPMPTVDSHEPRLGPRPRSHNKVLNPPGGKSSISFY

SEQ ID NO: 37608 - protein, 178 aa, Homo sapiens
  Payload ID: 7468
  Gene Symbol: HN1L
  Gene Name: hematological and neurological expressed 1-like
  ENSP ID: ENSP00000372157
MMRAMKPPGGESSNLFGSPEEATPSSRPNRMASNIFGPTEEPQNIPKRTNPPGGKGSGIFDESTPVQTRQHLNPPGGKTSDIFGSPVTATSRLAHPNKPKDHVFLCEGEEPKSDLKAARSIPAGAEPGEKGSARKAGPAKEQEPMPTVDSHEPRLGPRPRSHNKVLNPPGGKSSISFY

SEQ ID NO: 37609 - protein, 174 aa, Homo sapiens
  Payload ID: 7468
  Gene Symbol: HN1L
  Gene Name: hematological and neurological expressed 1-like
  Uniprot ID: Q9H910
  ENSP ID: ENSP00000372158
MKPPGGESSNLFGSPEEATPSSRPNRMASNIFGPTEEPQNIPKRTNPPGGKGSGIFDESTPVQTRQHLNPPGGKTSDIFGSPVTATSRLAHPNKPKDHVFLCEGEEPKSDLKAARSIPAGAEPGEKGSARKAGPAKEQEPMPTVDSHEPRLGPRPRSHNKVLNPPGGKSSISFY

SEQ ID NO: 37610 - protein, 70 aa, Homo sapiens
  Payload ID: 7468
  Gene Symbol: HN1L
  Gene Name: hematological and neurological expressed 1-like
  ENSP ID: ENSP00000454459
MFQVPDSEGGRAGSRAMKPPGGESSNLFGSPEEATPSSRPNRMASNIFGPTEEPQNIPKRTNPPGSCFLM

SEQ ID NO: 37611 - protein, 115 aa, Homo sapiens
  Payload ID: 7468
  Gene Symbol: HN1L
  Gene Name: hematological and neurological expressed 1-like
  ENSP ID: ENSP00000454529
MKPPGGESSNLFGSPEEATPSSRPNRMASNIFGPTEEPQNIPKRTNPPGGKGSGIFDESTPVQTRQHLNPPGGKTSDIFGSPVTATSRLAHPNKPKDHVFLCEGEEPKSDLKAAR

SEQ ID NO: 37612 - protein, 190 aa, Homo sapiens
  Payload ID: 7468
  Gene Symbol: HN1L
  Gene Name: hematological and neurological expressed 1-like
  ENSP ID: ENSP00000454567
MFQVPDSEGGRAGSRAMKPPGGESSNLFGSPEEATPSSRPNRMASNIFGPTEEPQNIPKRTNPPGGKGSGIFDESTPVQTRQHLNPPGGKTSDIFGSPVTATSRLAHPNKPKDHVFLCEGEEPKSDLKAARSIPAGAEPEKSQLFRYTKEEEELWRPPSTKLYRTSGSNSQTSFQKRLETLGQEMKEFSS

SEQ ID NO: 37613 - protein, 77 aa, Homo sapiens
  Payload ID: 7468
  Gene Symbol: HN1L
  Gene Name: hematological and neurological expressed 1-like
  ENSP ID: ENSP00000456487
MFQVPDSEGGRAGSRKWQLLTGSLASTSPSLLSGQGPWAPLQRSASTRLVSGGHEAPRRRIEQSFWKSRRSYSFQQA

SEQ ID NO: 37614 - protein, 116 aa, Homo sapiens
  Payload ID: 7468
  Gene Symbol: HN1L
  Gene Name: hematological and neurological expressed 1-like
  ENSP ID: ENSP00000457344
PSSRPNRMASNIFGPTEEPQNIPKRTNPPGGKGSGIFDESTPVQTRQHLNPPGGKTSDIFGSPVTATSRLAHPNKPKDHVFLCEGEEPKSDLKAARSIPAGAEPGIMWIQGKLLRL

SEQ ID NO: 37615 - protein, 167 aa, Homo sapiens
  Payload ID: 7468
  Gene Symbol: HN1L
  Gene Name: hematological and neurological expressed 1-like
  ENSP ID: ENSP00000457424
MKPPGGESSNLFGSPEEATPSSRPNRMASNIFGPTEEPQNIPKRTNPPGGKGSGIFDESTPVQTRQHLNPPGGKTSDIFGSPVTATSRLAHPNKPKDHVFLCEGEEPKSDLKAARSIPAGAEPGEKGSARKAGPAKEQEPMPTVDSHEPRLGPRPRSHNKVLNPPGG

SEQ ID NO: 37616 - protein, 98 aa, Homo sapiens
  Payload ID: 7468
  Gene Symbol: HN1L
  Gene Name: hematological and neurological expressed 1-like
  ENSP ID: ENSP00000457536
MFQVPDSEGGRAGSRKWQLLTGSLASTSPSLLSGQGPWAPLQRAMKPPGGESSNLFGSPEEATPSSRPNRMASNIFGPTEEPQNIPKRTNPPGSCFLM

SEQ ID NO: 37617 - protein, 218 aa, Homo sapiens
  Payload ID: 7468
  Gene Symbol: HN1L
  Gene Name: hematological and neurological expressed 1-like
  Uniprot ID: Q9H910
  ENSP ID: ENSP00000457694
MFQVPDSEGGRAGSRKWQLLTGSLASTSPSLLSGQGPWAPLQRAMKPPGGESSNLFGSPEEATPSSRPNRMASNIFGPTEEPQNIPKRTNPPGGKGSGIFDESTPVQTRQHLNPPGGKTSDIFGSPVTATSRLAHPNKPKDHVFLCEGEEPKSDLKAARSIPAGAEPGEKGSARKAGPAKEQEPMPTVDSHEPRLGPRPRSHNKVLNPPGGKSSISFY

SEQ ID NO: 37618 - protein, 93 aa, Homo sapiens
  Payload ID: 7469
  Gene Symbol: HCST
  Gene Name: hematopoietic cell signal transducer
  Uniprot ID: Q9UBK5
  ENSP ID: ENSP00000246551
MIHLGHILFLLLLPVAAAQTTPGERSSLPAFYPGTSGSCSGCGSLSLPLLAGLVAADAVASLLIVGAVFLCARPRRSPAQEDGKVYINMPGRG

SEQ ID NO: 37619 - protein, 92 aa, Homo sapiens
  Payload ID: 7469
  Gene Symbol: HCST
  Gene Name: hematopoietic cell signal transducer
  Uniprot ID: Q9UBK5
  ENSP ID: ENSP00000400516
MIHLGHILFLLLLPVAAAQTTPGERSSLPAFYPGTSGSCSGCGSLSLPLLAGLVAADAVASLLIVGAVFLCARPRRSPAQDGKVYINMPGRG

SEQ ID NO: 37620 - protein, 486 aa, Homo sapiens
  Payload ID: 7470
  Gene Symbol: HCLS1
  Gene Name: hematopoietic cell-specific Lyn substrate 1
  Uniprot ID: P14317
  ENSP ID: ENSP00000320176
MWKSVVGHDVSVSVETQGDDWDTDPDFVNDISEKEQRWGAKTIEGSGRTEHINIHQLRNKVSEEHDVLRKKEMESGPKASHGYGGRFGVERDRMDKSAVGHEYVAEVEKHSSQTDAAKGFGGKYGVERDRADKSAVGFDYKGEVEKHTSQKDYSRGFGGRYGVEKDKWDKAALGYDYKGETEKHESQRDYAKGFGGQYGIQKDRVDKSAVGFNEMEAPTTAYKKTTPIEAASSGTRGLKAKFESMAEEKRKREEEEKAQQVARRQQERKAVTKRSPEAPQPVIAMEEPAVPAPLPKKISSEAWPPVGTPPSSESEPVRTSREHPVPLLPIRQTLPEDNEEPPALPPRTLEGLQVEEEPVYEAEPEPEPEPEPEPENDYEDVEEMDRHEQEDEPEGDYEEVLEPEDSSFSSALAGSSGCPAGAGAGAVALGISAVAVYDYQGEGSDELSFDPDDVITDIEMVDEGWWRGRCHGHFGLFPANYVKLLE

SEQ ID NO: 37621 - protein, 449 aa, Homo sapiens
  Payload ID: 7470
  Gene Symbol: HCLS1
  Gene Name: hematopoietic cell-specific Lyn substrate 1
  ENSP ID: ENSP00000387645
MWKSVVGHDVSVSVETQGDDWDTDPDFVNDISEKEQRWGAKTIEGSGRTEHINIHQLRNKVSEEHDVLRKKEMESGPKASHGYGGRFGVERDRMDKSAVGHEYVAEVEKHSSQTDAAKGFGGKYGVERDRADKSAVGFDYKGEVEKHTSQKDYAKGFGGQYGIQKDRVDKSAVGFNEMEAPTTAYKKTTPIEAASSGTRGLKAKFESMAEEKRKREEEEKAQQVARRQQERKAVTKRSPEAPQPVIAMEEPAVPAPLPKKISSEAWPPVGTPPSSESEPVRTSREHPVPLLPIRQTLPEDNEEPPALPPRTLEGLQVEEEPVYEAEPEPEPEPEPEPENDYEDVEEMDRHEQEDEPEGDYEEVLEPEDSSFSSALAGSSGCPAGAGAGAVALGISAVAVYDYQGEGSDELSFDPDDVITDIEMVDEGWWRGRCHGHFGLFPANYVKLLE

SEQ ID NO: 37622 - protein, 209 aa, Homo sapiens
  Payload ID: 7470
  Gene Symbol: HCLS1
  Gene Name: hematopoietic cell-specific Lyn substrate 1
  Uniprot ID: P14317
  ENSP ID: ENSP00000418299
MWKSVVGHDVSVSVETQGDDWDTDPDFVNDISEKEQRWGAKTIEGSGRTEHINIHQLRNKVSEEHDVLRKKEMESGPKASHGYGGRFGVERDRMDKSAVGHEYVAEVEKHSSQTDAAKGFGGKYGVERDRADKITLVALVAGTGWRRINGTKQLWDMTTRERRRNTSPREIMPRALVASMESRRTEWIRALSASMKWRPRPQLIRRRRP

SEQ ID NO: 37623 - protein, 76 aa, Homo sapiens
  Payload ID: 7470
  Gene Symbol: HCLS1
  Gene Name: hematopoietic cell-specific Lyn substrate 1
  ENSP ID: ENSP00000419614
MWKSVVGHDVSVSVETQGDDWDTDPDFVNDISEKEQRWGAKTIEGSGRTEHIKIDEPWSCGFFQHPPAEEQSIRGA

SEQ ID NO: 37624 - protein, 75 aa, Homo sapiens
  Payload ID: 7470
  Gene Symbol: HCLS1
  Gene Name: hematopoietic cell-specific Lyn substrate 1
  ENSP ID: ENSP00000420507
MWKSVVGHDVSVSVETQGDDWDTDPDFVNDISEKEQRWGAKTIEGSGRTEHINIPWLWRSVWSRKRPNGQECSGP

SEQ ID NO: 37625 - protein, 199 aa, Homo sapiens
  Payload ID: 7471
  Gene Symbol: HPGDS
  Gene Name: hematopoietic prostaglandin D synthase
  Uniprot ID: O60760
  ENSP ID: ENSP00000295256
MPNYKLTYFNMRGRAEIIRYIFAYLDIQYEDHRIEQADWPEIKSTLPFGKIPILEVDGLTLHQSLAIARYLTKNTDLAGNTEMEQCHVDAIVDTLDDFMSCFPWAEKKQDVKEQMFNELLTYNAPHLMQDLDTYLGGREWLIGNSVTWADFYWEICSTTLLVFKPDLLDNHPRLVTLRKKVQAIPAVANWIKRRPQTKL

SEQ ID NO: 37626 - protein, 173 aa, Homo sapiens
  Payload ID: 7472
  Gene Symbol: HSH2D
  Gene Name: hematopoietic SH2 domain containing
  ENSP ID: ENSP00000467189
MTEAGKLPLPLPPRLDWDAENLLESQPLGSFLIRVSHSHVGYTLSYKAQSSCCHFMVKLLDDGTFMIPGEKVAHTSLDALVTFHQQKPIEPRRELLTQPCRQKDPANVDYEDLFLYSNAVAEEAACPVSAPEEASPKPVLCHQSKERKPSAEMNRITTKEATSSCPPKSPLGE

SEQ ID NO: 37627 - protein, 40 aa, Homo sapiens
  Payload ID: 7472
  Gene Symbol: HSH2D
  Gene Name: hematopoietic SH2 domain containing
  ENSP ID: ENSP00000468142
  MOD_RES (1)..(1): Any amino acid
XMLRTCWSHSHWDPFSSGSVTAMWATHSPTKPKAAAAISW

SEQ ID NO: 37628 - protein, 72 aa, Homo sapiens
  Payload ID: 7472
  Gene Symbol: HSH2D
  Gene Name: hematopoietic SH2 domain containing
  ENSP ID: ENSP00000468495
MTEAGKLPLPLPPRLDWFVHTQMGQLAQDGVPEWFHGAISREDAENLLESQPLGSFLIRVSHSHVGYTLSYK

SEQ ID NO: 37629 - protein, 69 aa, Homo sapiens
  Payload ID: 7472
  Gene Symbol: HSH2D
  Gene Name: hematopoietic SH2 domain containing
  ENSP ID: ENSP00000477674
MTEAGKLPLPLPPRLDWFVHTQMGQLAQDGVPEWFHGAISRDSLGSGVYSPLEEAEGQKGRDDCLRSHS

SEQ ID NO: 37630 - protein, 352 aa, Homo sapiens
  Payload ID: 7472
  Gene Symbol: HSH2D
  Gene Name: hematopoietic SH2 domain containing
  Uniprot ID: Q96JZ2
  ENSP ID: ENSP00000482604
MTEAGKLPLPLPPRLDWFVHTQMGQLAQDGVPEWFHGAISREDAENLLESQPLGSFLIRVSHSHVGYTLSYKAQSSCCHFMVKLLDDGTFMIPGEKVAHTSLDALVTFHQQKPIEPRRELLTQPCRQKDPANVDYEDLFLYSNAVAEEAACPVSAPEEASPKPVLCHQSKERKPSAEMNRITTKEATSSCPPKSPLGETRQKLWRSLKMLPERGQRVRQQLKSHLATVNLSSLLDVRRSTVISGPGTGKGSQDHSGDPTSGDRGYTDPCVATSLKSPSQPQAPKDRKVPTRKAERSVSCIEVTPGDRSWHQMVVRALSSQESKPEHQGLAEPENDQLPEEYQQPPPFAPGYC

SEQ ID NO: 37631 - protein, 352 aa, Homo sapiens; identical to SEQ ID NO: 37630
  Payload ID: 7472
  Gene Symbol: HSH2D
  Gene Name: hematopoietic SH2 domain containing
  Uniprot ID: Q96JZ2
  ENSP ID: ENSP00000483354

SEQ ID NO: 37632 - protein, 85 aa, Homo sapiens
  Payload ID: 7472
  Gene Symbol: HSH2D
  Gene Name: hematopoietic SH2 domain containing
  ENSP ID: ENSP00000483685
MTEAGKLPLPLPPRLDWFVHTQMGQLAQDGVPEWFHGAISREDAENLLESQPLGSFLIRVSHSHVGYTLSYNVSAEPKAAAAISW

SEQ ID NO: 37633 - protein, 270 aa, Homo sapiens
  Payload ID: 7473
  Gene Symbol: HHEX
  Gene Name: hematopoietically expressed homeobox
  Uniprot ID: Q03014
  ENSP ID: ENSP00000282728
MQYPHPGPAAGAVGVPLYAPTPLLQPAHPTPFYIEDILGRGPAAPTPAPTLPSPNSSFTSLVSPYRTPVYEPTPIHPAFSHHSAAALAAAYGPGGFGGPLYPFPRTVNDYTHALLRHDPLGKPLLWSPFLQRPLHKRKGGQVRFSNDQTIELEKKFETQKYLSPPERKRLAKMLQLSERQVKTWFQNRRAKWRRLKQENPQSNKKEELESLDSSCDQRQDLPSEQNKGASLDSSQCSPSPASQEDLESEISEDSDQEVDIEGDKSYFNAG

SEQ ID NO: 37634 - protein, 98 aa, Homo sapiens
  Payload ID: 7473
  Gene Symbol: HHEX
  Gene Name: hematopoietically expressed homeobox
  ENSP ID: ENSP00000447953
MLQLSERQVKTWFQNRRAKWRRLKQENPQSNKKEELESLDSSCDQRQDLPSEQNKGASLDSSQCSPSPASQEDLESEISEDSDQEVDIEGDKSYFNAG

SEQ ID NO: 37635 - protein, 98 aa, Homo sapiens; identical to SEQ ID NO: 37634
  Payload ID: 7473
  Gene Symbol: HHEX
  Gene Name: hematopoietically expressed homeobox
  ENSP ID: ENSP00000450017

SEQ ID NO: 37636 - protein, 189 aa, Homo sapiens
  Payload ID: 7474
  Gene Symbol: HEBP1
  Gene Name: heme binding protein 1
  Uniprot ID: Q9NRV9
  ENSP ID: ENSP00000014930
MLGMIKNSLFGSVETWPWQVLSKGDKEEVAYEERACEGGKFATVEVTDKPVDEALREAMPKVAKYAGGTNDKGIGMGMTVPISFAVFPNEDGSLQKKLKVWFRIPNQFQSDPPAPSDKSVKIEEREGITVYSMQFGGYAKEADYVAQATRLRAALEGTATYRGDIYFCTGYDPPMKPYGRRNEIWLLKT

SEQ ID NO: 37637 - protein, 133 aa, Homo sapiens
  Payload ID: 7474
  Gene Symbol: HEBP1
  Gene Name: heme binding protein 1
  ENSP ID: ENSP00000441678
MLGMIKNSLFGSVETWPWQVLSKGDKEEVAYEERACEGGKFATVEVTDKPVDEALREAMPKVAKYAGGTNDKGIGMGMTVPISFAVFPNEDGSLQKKLKVWFRIPNQFQSDPPAPSDKSVKIEEREGITVYSM

SEQ ID NO: 37638 - protein, 62 aa, Homo sapiens
  Payload ID: 7474
  Gene Symbol: HEBP1
  Gene Name: heme binding protein 1
  ENSP ID: ENSP00000442020
KGIGMGMTVPISFAVFPNEDGSLQKKLKVWFRIPNQFQSDPPAPSDKSVKIEEREGITVYSI

SEQ ID NO: 37639 - protein, 116 aa, Homo sapiens
  Payload ID: 7475
  Gene Symbol: HEBP2
  Gene Name: heme binding protein 2
  ENSP ID: ENSP00000356670
MAEPLQPDPGAAEDAAAQAVETPGWKAPEDAGPQPGSYEIRHYGPAKWVSTSVESMDWDSAIQTGFTKLNSYIQGKNEKEMKIKMTAPVTSYVEPGSGPFSLSMDFLVPKRIKNNF

SEQ ID NO: 37640 - protein, 127 aa, Homo sapiens
  Payload ID: 7475
  Gene Symbol: HEBP2
  Gene Name: heme binding protein 2
  ENSP ID: ENSP00000392101
MGVLWGAPEPCRVPAAGDSNAESAWPAERGCWGTEPHPTRLGKALPGSYEIRHYGPAKWVSTSVESMDWDSAIQTGFTKLNSYIQGKNEKEMKIKMTAPVTSYVEPGSGPFSLSMDFLVPKRIKNNF

SEQ ID NO: 37641 - protein, 45 aa, Homo sapiens
  Payload ID: 7475
  Gene Symbol: HEBP2
  Gene Name: heme binding protein 2
  ENSP ID: ENSP00000395958
  MOD_RES (1)..(1): Any amino acid
XMKIKMTAPVTSYVEPGSGPFREGKRGNVQVKIESGKGASTGVLV

SEQ ID NO: 37642 - protein, 205 aa, Homo sapiens
  Payload ID: 7475
  Gene Symbol: HEBP2
  Gene Name: heme binding protein 2
  Uniprot ID: Q9Y5Z4
  ENSP ID: ENSP00000475750
MAEPLQPDPGAAEDAAAQAVETPGWKAPEDAGPQPGSYEIRHYGPAKWVSTSVESMDWDSAIQTGFTKLNSYIQGKNEKEMKIKMTAPVTSYVEPGSGPFSESTITISLYIPSEQQFDPPRPLESDVFIEDRAEMTVFVRSFDGFSSAQKNQEQLLTLASILREDGKVFDEKVYYTAGYNSPVKLLNRNNEVWLIQKNEPTKENE

SEQ ID NO: 37643 - protein, 288 aa, Homo sapiens
  Payload ID: 7476
  Gene Symbol: HMOX1
  Gene Name: heme oxygenase 1
  Uniprot ID: P09601
  ENSP ID: ENSP00000216117
MERPQPDSMPQDLSEALKEATKEVHTQAENAEFMRNFQKGQVTRDGFKLVMASLYHIYVALEEEIERNKESPVFAPVYFPEELHRKAALEQDLAFWYGPRWQEVIPYTPAMQRYVKRLHEVGRTEPELLVAHAYTRYLGDLSGGQVLKKIAQKALDLPSSGEGLAFFTFPNIASATKFKQLYRSRMNSLEMTPAVRQRVIEEAKTAFLLNIQLFEELQELLTHDTKDQSPSRAPGLRQRASNKVQDSAPVETPRGKPPLNTRSQAPLLRWVLTLSFLVATVAVGLYAM

SEQ ID NO: 37644 - protein, 187 aa, Homo sapiens
  Payload ID: 7476
  Gene Symbol: HMOX1
  Gene Name: heme oxygenase 1
  ENSP ID: ENSP00000413316
MERPQPDSMPQDLSEALKEATKEVHTQAENAEFMRNFQKGQVTRDGFKLVMASLYHIYVALEEEIERNKESPVFAPVYFPEELHRKAALEQDLAFWYGPRWQEVIPYTPAMQRYVKRLHEVGRTEPELLVAHAYTRYLGDLSGGQVLKKIAQKALDLPSSGEGLAFFTFPNIASATKFKQLYRSRMN

SEQ ID NO: 37645 - protein, 316 aa, Homo sapiens
  Payload ID: 7477
  Gene Symbol: HMOX2
  Gene Name: heme oxygenase 2
  Uniprot ID: P30519
  ENSP ID: ENSP00000219700
MSAEVETSEGVDESEKKNSGALEKENQMRMADLSELLKEGTKEAHDRAENTQFVKDFLKGNIKKELFKLATTALYFTYSALEEEMERNKDHPAFAPLYFPMELHRKEALTKDMEYFFGENWEEQVQCPKAAQKYVERIHYIGQNEPELLVAHAYTRYMGDLSGGQVLKKVAQRALKLPSTGEGTQFYLFENVDNAQQFKQLYRARMNALDLNMKTKERIVEEANKAFEYNMQIFNELDQAGSTLARETLEDGFPVHDGKGDMRKCPFYAAEQDKGALEGSSCPFRTAMAVLRKPSLQFILAAGVALAAGLLAWYYM

SEQ ID NO: 37646 - protein, 316 aa, Homo sapiens; identical to SEQ ID NO: 37645
  Payload ID: 7477
  Gene Symbol: HMOX2
  Gene Name: heme oxygenase 2
  Uniprot ID: P30519
  ENSP ID: ENSP00000381595

SEQ ID NO: 37647 - protein, 316 aa, Homo sapiens; identical to SEQ ID NO: 37645
  Payload ID: 7477
  Gene Symbol: HMOX2
  Gene Name: heme oxygenase 2
  Uniprot ID: P30519
  ENSP ID: ENSP00000385100

SEQ ID NO: 37648 - protein, 316 aa, Homo sapiens; identical to SEQ ID NO: 37645
  Payload ID: 7477
  Gene Symbol: HMOX2
  Gene Name: heme oxygenase 2
  Uniprot ID: P30519
  ENSP ID: ENSP00000391637

SEQ ID NO: 37649 - protein, 316 aa, Homo sapiens; identical to SEQ ID NO: 37645
  Payload ID: 7477
  Gene Symbol: HMOX2
  Gene Name: heme oxygenase 2
  Uniprot ID: P30519
  ENSP ID: ENSP00000394103

SEQ ID NO: 37650 - protein, 229 aa, Homo sapiens
  Payload ID: 7477
  Gene Symbol: HMOX2
  Gene Name: heme oxygenase 2
  ENSP ID: ENSP00000458592
MSAEVETSEGVDESEKKNSGALEKENQMRMADLSELLKEGTKEAHDRAENTQFVKDFLKGNIKKELFKLATTALYFTYSALEEEMERNKDHPAFAPLYFPMELHRKEALTKDMEYFFGENWEEQVQCPKAAQKYVERIHYIGQNEPELLVAHAYTRYMGDLSGGQVLKKVAQRALKLPSTGEGTQFYLFENVDNAQQFKQLYRARMNALDLNMKTKERIVEEANKAFEY

SEQ ID NO: 37651 - protein, 238 aa, Homo sapiens
  Payload ID: 7477
  Gene Symbol: HMOX2
  Gene Name: heme oxygenase 2
  ENSP ID: ENSP00000458797
MSAEVETSEGVDESEKKNSGALEKENQMRMADLSELLKEGTKEAHDRAENTQFVKDFLKGNIKKELFKLATTALYFTYSALEEEMERNKDHPAFAPLYFPMELHRKEALTKDMEYFFGENWEEQVQCPKAAQKYVERIHYIGQNEPELLVAHAYTRYMGDLSGGQVLKKVAQRALKLPSTGEGTQFYLFENVDNAQQFKQLYRARMNALDLNMKTKERIVEEANKAFEYNMQIFNELD

SEQ ID NO: 37652 - protein, 131 aa, Homo sapiens
  Payload ID: 7477
  Gene Symbol: HMOX2
  Gene Name: heme oxygenase 2
  ENSP ID: ENSP00000458824
MSAEVETSEGVDESEKKNSGALEKENQMRMADLSELLKEGTKEAHDRAENTQFVKDFLKGNIKKELFKLATTALYFTYSALEEEMERNKDHPAFAPLYFPMELHRKEALTKDMEYFFGENWEEQVQCPKAA

SEQ ID NO: 37653 - protein, 110 aa, Homo sapiens
  Payload ID: 7477
  Gene Symbol: HMOX2
  Gene Name: heme oxygenase 2
  ENSP ID: ENSP00000459203
  MOD_RES (1)..(1): Any amino acid
XQFYLFENVDNAQQFKQLYRARMNALDLNMKTKERIVEEANKAFEYNMQIFNELDQAGSTLARETLEDGFPVHDGKGDMRKCPFYAAEQDKGRSVCPELPSWGRCSRRLH

SEQ ID NO: 37654 - protein, 316 aa, Homo sapiens; identical to SEQ ID NO: 37645
  Payload ID: 7477
  Gene Symbol: HMOX2
  Gene Name: heme oxygenase 2
  Uniprot ID: P30519
  ENSP ID: ENSP00000459214

SEQ ID NO: 37655 - protein, 110 aa, Homo sapiens
  Payload ID: 7477
  Gene Symbol: HMOX2
  Gene Name: heme oxygenase 2
  ENSP ID: ENSP00000459445
MSAEVETSEGVDESEKKNSGALEKENQMRMADLSELLKEGTKEAHDRAENTQFVKDFLKGNIKKELFKLATTALYFTYSALEEEMERNKDHPAFAPLYFPMELHRKEALT

SEQ ID NO: 37656 - protein, 287 aa, Homo sapiens
  Payload ID: 7477
  Gene Symbol: HMOX2
  Gene Name: heme oxygenase 2
  Uniprot ID: P30519
  ENSP ID: ENSP00000460926
MADLSELLKEGTKEAHDRAENTQFVKDFLKGNIKKELFKLATTALYFTYSALEEEMERNKDHPAFAPLYFPMELHRKEALTKDMEYFFGENWEEQVQCPKAAQKYVERIHYIGQNEPELLVAHAYTRYMGDLSGGQVLKKVAQRALKLPSTGEGTQFYLFENVDNAQQFKQLYRARMNALDLNMKTKERIVEEANKAFEYNMQIFNELDQAGSTLARETLEDGFPVHDGKGDMRKCPFYAAEQDKGALEGSSCPFRTAMAVLRKPSLQFILAAGVALAAGLLAWYYM

SEQ ID NO: 37657 - protein, 132 aa, Homo sapiens
  Payload ID: 7477
  Gene Symbol: HMOX2
  Gene Name: heme oxygenase 2
  ENSP ID: ENSP00000460992
MSAEVETSEGVDESEKKNSGALEKENQMRMADLSELLKEGTKEAHDRAENTQFVKDFLKGNIKKELFKLATTALYFTYSALEEEMERNKDHPAFAPLYFPMELHRKEALTKDMEYFFGENWEEQVQCPKAAQ

SEQ ID NO: 37658 - protein, 130 aa, Homo sapiens
  Payload ID: 7477
  Gene Symbol: HMOX2
  Gene Name: heme oxygenase 2
  ENSP ID: ENSP00000461428
MSAEVETSEGVDESEKKNSGALEKENQMRMADLSELLKEGTKEAHDRAENTQFVKDFLKGNIKKELFKLATTALYFTYSALEEEMERNKDHPAFAPLYFPMELHRKEALTKDMEYFFGENWEEQVQCPKA

SEQ ID NO: 37659 - protein, 370 aa, Homo sapiens
  Payload ID: 7477
  Gene Symbol: HMOX2
  Gene Name: heme oxygenase 2
  ENSP ID: ENSP00000477572
MESRSVAQAGVQWISLAHCSLHLLGSRDSPASASCVAGITGPEEREQQEPHPAAMSAEVETSEGVDESEKKNSGALEKENQMRMADLSELLKEGTKEAHDRAENTQFVKDFLKGNIKKELFKLATTALYFTYSALEEEMERNKDHPAFAPLYFPMELHRKEALTKDMEYFFGENWEEQVQCPKAAQKYVERIHYIGQNEPELLVAHAYTRYMGDLSGGQVLKKVAQRALKLPSTGEGTQFYLFENVDNAQQFKQLYRARMNALDLNMKTKERIVEEANKAFEYNMQIFNELDQAGSTLARETLEDGFPVHDGKGDMRKCPFYAAEQDKGALEGSSCPFRTAMAVLRKPSLQFILAAGVALAAGLLAWYYM

SEQ ID NO: 37660 - protein, 316 aa, Homo sapiens; identical to SEQ ID NO: 37645
  Payload ID: 7477
  Gene Symbol: HMOX2
  Gene Name: heme oxygenase 2
  Uniprot ID: P30519
  ENSP ID: ENSP00000478785

SEQ ID NO: 37661 - protein, 370 aa, Homo sapiens; identical to SEQ ID NO: 37659
  Payload ID: 7477
  Gene Symbol: HMOX2
  Gene Name: heme oxygenase 2
  ENSP ID: ENSP00000480515

SEQ ID NO: 37662 - protein, 316 aa, Homo sapiens; identical to SEQ ID NO: 37645
  Payload ID: 7477
  Gene Symbol: HMOX2
  Gene Name: heme oxygenase 2
  Uniprot ID: P30519
  ENSP ID: ENSP00000481295

SEQ ID NO: 37663 - protein, 316 aa, Homo sapiens; identical to SEQ ID NO: 37645
  Payload ID: 7477
  Gene Symbol: HMOX2
  Gene Name: heme oxygenase 2
  Uniprot ID: P30519
  ENSP ID: ENSP00000481811

SEQ ID NO: 37664 - protein, 316 aa, Homo sapiens; identical to SEQ ID NO: 37645
  Payload ID: 7477
  Gene Symbol: HMOX2
  Gene Name: heme oxygenase 2
  Uniprot ID: P30519
  ENSP ID: ENSP00000483319

SEQ ID NO: 37665 - protein, 316 aa, Homo sapiens; identical to SEQ ID NO: 37645
  Payload ID: 7477
  Gene Symbol: HMOX2
  Gene Name: heme oxygenase 2
  Uniprot ID: P30519
  ENSP ID: ENSP00000484422

SEQ ID NO: 37666 - protein, 316 aa, Homo sapiens; identical to SEQ ID NO: 37645
  Payload ID: 7477
  Gene Symbol: HMOX2
  Gene Name: heme oxygenase 2
  Uniprot ID: P30519
  ENSP ID: ENSP00000484423

SEQ ID NO: 37667 - protein, 316 aa, Homo sapiens; identical to SEQ ID NO: 37645
  Payload ID: 7477
  Gene Symbol: HMOX2
  Gene Name: heme oxygenase 2
  Uniprot ID: P30519
  ENSP ID: ENSP00000484467

SEQ ID NO: 37668 - protein, 130 aa, Homo sapiens; identical to SEQ ID NO: 37658
  Payload ID: 7477
  Gene Symbol: HMOX2
  Gene Name: heme oxygenase 2
  ENSP ID: ENSP00000487635

SEQ ID NO: 37669 - protein, 316 aa, Homo sapiens; identical to SEQ ID NO: 37645
  Payload ID: 7477
  Gene Symbol: HMOX2
  Gene Name: heme oxygenase 2
  Uniprot ID: P30519
  ENSP ID: ENSP00000487673

SEQ ID NO: 37670 - protein, 229 aa, Homo sapiens; identical to SEQ ID NO: 37650
  Payload ID: 7477
  Gene Symbol: HMOX2
  Gene Name: heme oxygenase 2
  ENSP ID: ENSP00000487781

SEQ ID NO: 37671 - protein, 238 aa, Homo sapiens; identical to SEQ ID NO: 37651
  Payload ID: 7477
  Gene Symbol: HMOX2
  Gene Name: heme oxygenase 2
  ENSP ID: ENSP00000488170

SEQ ID NO: 37672 - protein, 131 aa, Homo sapiens; identical to SEQ ID NO: 37652
  Payload ID: 7477
  Gene Symbol: HMOX2
  Gene Name: heme oxygenase 2
  ENSP ID: ENSP00000488477

SEQ ID NO: 37673 - protein, 110 aa, Homo sapiens; identical to SEQ ID NO: 37655
  Payload ID: 7477
  Gene Symbol: HMOX2
  Gene Name: heme oxygenase 2
  ENSP ID: ENSP00000488577

SEQ ID NO: 37674 - protein, 316 aa, Homo sapiens; identical to SEQ ID NO: 37645
  Payload ID: 7477
  Gene Symbol: HMOX2
  Gene Name: heme oxygenase 2
  Uniprot ID: P30519
  ENSP ID: ENSP00000488579

SEQ ID NO: 37675 - protein, 132 aa, Homo sapiens; identical to SEQ ID NO: 37657
  Payload ID: 7477
  Gene Symbol: HMOX2
  Gene Name: heme oxygenase 2
  ENSP ID: ENSP00000488598

SEQ ID NO: 37676 - protein, 287 aa, Homo sapiens; identical to SEQ ID NO: 37656
  Payload ID: 7477
  Gene Symbol: HMOX2
  Gene Name: heme oxygenase 2
  Uniprot ID: P30519
  ENSP ID: ENSP00000488769

SEQ ID NO: 37677 - protein, 316 aa, Homo sapiens; identical to SEQ ID NO: 37645
  Payload ID: 7477
  Gene Symbol: HMOX2
  Gene Name: heme oxygenase 2
  Uniprot ID: P30519
  ENSP ID: ENSP00000488880

SEQ ID NO: 37678 - protein, 110 aa, Homo sapiens; identical to SEQ ID NO: 37653
  Payload ID: 7477
  Gene Symbol: HMOX2
  Gene Name: heme oxygenase 2
  ENSP ID: ENSP00000488904
  MOD_RES (1)..(1): Any amino acid

SEQ ID NO: 37679 - protein, 5635 aa, Homo sapiens
  Payload ID: 7478
  Gene Symbol: HMCN1
  Gene Name: hemicentin 1
  Uniprot ID: Q96RW7
  ENSP ID: ENSP00000271588
MISWEVVHTVFLFALLYSSLAQDASPQSEIRAEEIPEGASTLAFVFDVTGSMYDDLVQVIEGASKILETSLKRPKRPLFNFALVPFHDPEIGPVTITTDPKKFQYELRELYVQGGGDCPEMSIGAIKIALEISLPGSFIYVFTDARSKDYRLTHEVLQLIQQKQSQVVFVLTGDCDDRTHIGYKVYEEIASTSSGQVFHLDKKQVNEVLKWVEEAVQASKVHLLSTDHLEQAVNTWRIPFDPSLKEVTVSLSGPSPMIEIRNPLGKLIKKGFGLHELLNIHNSAKVVNVKEPEAGMWTVKTSSSGRHSVRITGLSTIDFRAGFSRKPTLDFKKTVSRPVQGIPTYVLLNTSGISTPARIDLLELLSISGSSLKTIPVKYYPHRKPYGIWNISDFVPPNEAFFLKVTGYDKDDYLFQRVSSVSFSSIVPDAPKVTMPEKTPGYYLQPGQIPCSVDSLLPFTLSFVRNGVTLGVDQYLKESASVNLDIAKVTLSDEGFYECIAVSSAGTGRAQTFFDVSEPPPVIQVPNNVTVTPGERAVLTCLIISAVDYNLTWQRNDRDVRLAEPARIRTLANLSLELKSVKFNDAGEYHCMVSSEGGSSAASVFLTVQEPPKVTVMPKNQSFTGGSEVSIMCSATGYPKPKIAWTVNDMFIVGSHRYRMTSDGTLFIKNAAPKDAGIYGCLASNSAGTDKQNSTLRYIEAPKLMVVQSELLVALGDITVMECKTSGIPPPQVKWFKGDLELRPSTFLIIDPLLGLLKIQETQDLDAGDYTCVAINEAGRATGKITLDVGSPPVFIQEPADVSMEIGSNVTLPCYVQGYPEPTIKWRRLDNMPIFSRPFSVSSISQLRTGALFILNLWASDKGTYICEAENQFGKIQSETTVTVTGLVAPLIGISPSVANVIEGQQLTLPCTLLAGNPIPERRWIKNSAMLLQNPYITVRSDGSLHIERVQLQDGGEYTCVASNVAGTNNKTTSVVVHVLPTIQHGQQILSTIEGIPVTLPCKASGNPKPSVIWSKKGELISTSSAKFSAGADGSLYVVSPGGEESGEYVCTATNTAGYAKRKVQLTVYVRPRVFGDQRGLSQDKPVEISVLAGEEVTLPCEVKSLPPPIITWAKETQLISPFSPRHTFLPSGSMKITETRTSDSGMYLCVATNIAGNVTQAVKLNVHVPPKIQRGPKHLKVQVGQRVDIPCNAQGTPLPVITWSKGGSTMLVDGEHHVSNPDGTLSIDQATPSDAGIYTCVATNIAGTDETEITLHVQEPPTVEDLEPPYNTTFQERVANQRIEFPCPAKGTPKPTIKWLHNGRELTGREPGISILEDGTLLVIASVTPYDNGEYICVAVNEAGTTERKYNLKVHVPPVIKDKEQVTNVSVLLNQLTNLFCEVEGTPSPIIMWYKDNVQVTESSTIQTVNNGKILKLFRATPEDAGRYSCKAINIAGTSQKYFNIDVLVPPTIIGTNFPNEVSVVLNRDVALECQVKGTPFPDIHWFKDGKPLFLGDPNVELLDRGQVLHLKNARRNDKGRYQCTVSNAAGKQAKDIKLTIYIPPSIKGGNVTTDISVLINSLIKLECETRGLPMPAITWYKDGQPIMSSSQALYIDKGQYLHIPRAQVSDSATYTCHVANVAGTAEKSFHVDVYVPPMIEGNLATPLNKQVVIAHSLTLECKAAGNPSPILTWLKDGVPVKANDNIRIEAGGKKLEIMSAQEIDRGQYICVATSVAGEKEIKYEVDVLVPPAIEGGDETSYFIVMVNNLLELDCHVTGSPPPTIMWLKDGQLIDERDGFKILLNGRKLVIAQAQVSNTGLYRCMAANTAGDHKKEFEVTVHVPPTIKSSGLSERVVVKYKPVALQCIANGIPNPSITWLKDDQPVNTAQGNLKIQSSGRVLQIAKTLLEDAGRYTCVATNAAGETQQHIQLHVHEPPSLEDAGKMLNETVLVSNPVQLECKAAGNPVPVITWYKDNRLLSGSTSMTFLNRGQIIDIESAQISDAGIYKCVAINSAGATELFYSLQVHVAPSISGSNNMVAVVVNNPVRLECEARGIPAPSLTWLKDGSPVSSFSNGLQVLSGGRILALTSAQISDTGRYTCVAVNAAGEKQRDIDLRVYVPPNIMGEEQNVSVLISQAVELLCQSDAIPPPTLTWLKDGHPLLKKPGLSISENRSVLKIEDAQVQDTGRYTCEATNVAGKTEKNYNVNIWVPPNIGGSDELTQLTVIEGNLISLLCESSGIPPPNLIWKKKGSPVLTDSMGRVRILSGGRQLQISIAEKSDAALYSCVASNVAGTAKKEYNLQVYIRPTITNSGSHPTEIIVTRGKSISLECEVQGIPPPTVTWMKDGHPLIKAKGVEILDEGHILQLKNIHVSDTGRYVCVAVNVAGMTDKKYDLSVHAPPSIIGNHRSPENISVVEKNSVSLTCEASGIPLPSITWFKDGWPVSLSNSVRILSGGRMLRLMQTTMEDAGQYTCVVRNAAGEERKIFGLSVLVPPHIVGENTLEDVKVKEKQSVTLTCEVTGNPVPEITWHKDGQPLQEDEAHHIISGGRFLQITNVQVPHTGRYTCLASSPAGHKSRSFSLNVFVSPTIAGVGSDGNPEDVTVILNSPTSLVCEAYSYPPATITWFKDGTPLESNRNIRILPGGRTLQILNAQEDNAGRYSCVATNEAGEMIKHYEVKVYIPPIINKGDLWGPGLSPKEVKIKVNNTLTLECEAYAIPSASLSWYKDGQPLKSDDHVNIAANGHTLQIKEAQISDTGRYTCVASNIAGEDELDFDVNIQVPPSFQKLWEIGNMLDTGRNGEAKDVIINNPISLYCETNAAPPPTLTWYKDGHPLTSSDKVLILPGGRVLQIPRAKVEDAGRYTCVAVNEAGEDSLQYDVRVLVPPIIKGANSDLPEEVTVLVNKSALIECLSSGSPAPRNSWQKDGQPLLEDDHHKFLSNGRILQILNTQITDIGRYVCVAENTAGSAKKYFNLNVHVPPSVIGPKSENLTVVVNNFISLTCEVSGFPPPDLSWLKNEQPIKLNTNTLIVPGGRTLQIIRAKVSDGGEYTCIAINQAGESKKKFSLTVYVPPSIKDHDSESLSVVNVREGTSVSLECESNAVPPPVITWYKNGRMITESTHVEILADGQMLHIKKAEVSDTGQYVCRAINVAGRDDKNFHLNVYVPPSIEGPEREVIVETISNPVTLTCDATGIPPPTIAWLKNHKRIENSDSLEVRILSGGSKLQIARSQHSDSGNYTCIASNMEGKAQKYYFLSIQVPPSVAGAEIPSDVSVLLGENVELVCNANGIPTPLIQWLKDGKPIASGETERIRVSANGSTLNIYGALTSDTGKYTCVATNPAGEEDRIFNLNVYVTPTIRGNKDEAEKLMTLVDTSINIECRATGTPPPQINWLKNGLPLPLSSHIRLLAAGQVIRIVRAQVSDVAVYTCVASNRAGVDNKHYNLQVFAPPNMDNSMGTEEITVLKGSSTSMACITDGTPAPSMAWLRDGQPLGLDAHLTVSTHGMVLQLLKAETEDSGKYTCIASNEAGEVSKHFILKVLEPPHINGSEEHEEISVIVNNPLELTCIASGIPAPKMTWMKDGRPLPQTDQVQTLGGGEVLRISTAQVEDTGRYTCLASSPAGDDDKEYLVRVHVPPNIAGTDEPRDITVLRNRQVTLECKSDAVPPPVITWLRNGERLQATPRVRILSGGRYLQINNADLGDTANYTCVASNIAGKTTREFILTVNVPPNIKGGPQSLVILLNKSTVLECIAEGVPTPRITWRKDGAVLAGNHARYSILENGFLHIQSAHVTDTGRYLCMATNAAGTDRRRIDLQVHVPPSIAPGPTNMTVIVNVQTTLACEATGIPKPSINWRKNGHLLNVDQNQNSYRLLSSGSLVIISPSVDDTATYECTVTNGAGDDKRTVDLTVQVPPSIADEPTDFLVTKHAPAVITCTASGVPFPSIHWTKNGIRLLPRGDGYRILSSGAIEILATQLNHAGRYTCVARNAAGSAHRHVTLHVHEPPVIQPQPSELHVILNNPILLPCEATGTPSPFITWQKEGINVNTSGRNHAVLPSGGLQISRAVREDAGTYMCVAQNPAGTALGKIKLNVQVPPVISPHLKEYVIAVDKPITLSCEADGLPPPDITWHKDGRAIVESIRQRVLSSGSLQIAFVQPGDAGHYTCMAANVAGSSSTSTKLTVHVPPRIRSTEGHYTVNENSQAILPCVADGIPTPAINWKKDNVLLANLLGKYTAEPYGELILENVVLEDSGFYTCVANNAAGEDTHTVSLTVHVLPTFTELPGDVSLNKGEQLRLSCKATGIPLPKLTWTFNNNIIPAHFDSVNGHSELVIERVSKEDSGTYVCTAENSVGFVKAIGFVYVKEPPVFKGDYPSNWIEPLGGNAILNCEVKGDPTPTIQWNRKGVDIEISHRIRQLGNGSLAIYGTVNEDAGDYTCVATNEAGVVERSMSLTLQSPPIITLEPVETVINAGGKIILNCQATGEPQPTITWSRQGHSISWDDRVNVLSNNSLYIADAQKEDTSEFECVARNLMGSVLVRVPVIVQVHGGFSQWSAWRACSVTCGKGIQKRSRLCNQPLPANGGKPCQGSDLEMRNCQNKPCPVDGSWSEWSLWEECTRSCGRGNQTRTRTCNNPSVQHGGRPCEGNAVEIIMCNIRPCPVHGAWSAWQPWGTCSESCGKGTQTRARLCNNPPPAFGGSYCDGAETQMQVCNERNCPIHGKWATWASWSACSVSCGGGARQRTRGCSDPVPQYGGRKCEGSDVQSDFCNSDPCPTHGNWSPWSGWGTCSRTCNGGQMRRYRTCDNPPPSNGGRACGGPDSQIQRCNTDMCPVDGSWGSWHSWSQCSASCGGGEKTRKRLCDHPVPVKGGRPCPGDTTQVTRCNVQACPGGPQRARGSVIGNINDVEFGIAFLNATITDSPNSDTRIIRAKITNVPRSLGSAMRKIVSILNPIYWTTAKEIGEAVNGFTLTNAVFKRETQVEFATGEILQMSHIARGLDSDGSLLLDIVVSGYVLQLQSPAEVTVKDYTEDYIQTGPGQLYAYSTRLFTIDGISIPYTWNHTVFYDQAQGRMPFLVETLHASSVESDYNQIEETLGFKIHASISKGDRSNQCPSGFTLDSVGPFCADEDECAAGNPCSHSCHNAMGTYYCSCPKGLTIAADGRTCQDIDECALGRHTCHAGQDCDNTIGSYRCVVRCGSGFRRTSDGLSCQDINECQESSPCHQRCFNAIGSFHCGCEPGYQLKGRKCMDVNECRQNVCRPDQHCKNTRGGYKCIDLCPNGMTKAENGTCIDIDECKDGTHQCRYNQICENTRGSYRCVCPRGYRSQGVGRPCMDINECEQVPKPCAHQCSNTPGSFKCICPPGQHLLGDGKSCAGLERLPNYGTQYSSYNLARFSPVRNNYQPQQHYRQYSHLYSSYSEYRNSRTSLSRTRRTIRKTCPEGSEASHDTCVDIDECENTDACQHECKNTFGSYQCICPPGYQLTHNGKTCQDIDECLEQNVHCGPNRMCFNMRGSYQCIDTPCPPNYQRDPVSGFCLKNCPPNDLECALSPYALEYKLVSLPFGIATNQDLIRLVAYTQDGVMHPRTTFLMVDEEQTVPFALRDENLKGVVYTTRPLREAETYRMRVRASSYSANGTIEYQTTFIVYIAVSAYPY

SEQ ID NO: 37680 - protein, 240 aa, Homo sapiens
  Payload ID: 7478
  Gene Symbol: HMCN1
  Gene Name: hemicentin 1
  ENSP ID: ENSP00000406205
AIGSFHCGCEPGYQLKGRKCMDVNECRQNVCRPDQHCKNTRGGYKCIDLCPNGMTKAENGTCIDIDECKDGTHQCRYNQICENTRGSYRCVCPRGYRSQGVGRPCMDIDECENTDACQHECKNTFGSYQCICPPGYQLTHNGKTCQDIDECLEQNVHCGPNRMCFNMRGSYQCIDTPCPPNYQRDPVSGFCLKNCPPNDLECALSPYALEYKLVSLPFGIATNQDLIRLVAYTQDGVMHP

SEQ ID NO: 37681 - protein, 309 aa, Homo sapiens
  Payload ID: 7479
  Gene Symbol: HMCN2
  Gene Name: hemicentin 2
  ENSP ID: ENSP00000387564
  MOD_RES (1)..(1): Any amino acid
XPGQLFVGSTQRFFQGGLPSFLRCNHSIQYNAARGPQPQLVQHLRASAISSAFDPEAEALRFQLATALQAEENEVGCPEGFELDSQGAFCVDVDECAWDAHLCREGQRCVNLLGSYRCLPDCGPGFRVADGAGCEDVDECLEGLDDCHYNQLCENTPGGHRCSCPRGYRMQGPSLPCLDVNECLQLPKACAYQCHNLQGSYRCLCPPGQTLLRDGKACTSLERNGQNVTTVSHRGPLLPWLRPWASIPGTSYHAWVSLRPGPMALSSVGRAWCPPGFIRQNGVCTDLDECRVRNLCQHACRNTEGSYQC

SEQ ID NO: 37682 - protein, 595 aa, Homo sapiens
  Payload ID: 7479
  Gene Symbol: HMCN2
  Gene Name: hemicentin 2
  ENSP ID: ENSP00000481543
MILAPEGSSSGKLRIPAAQERDAGTYTCRAVNELGDASAEIQLAVGHAPQLTELPRDVTVELGRSALLACRATGRPPPTVTWRRGDGQPLGLRLGAGRGSRSRQPDSGVLFFESVAPEDQAPYVCEARNVFGKVQAEARLIVTGHAPPQIASSAPTVRVLEGQPVSLPCIVLAGRPLPERHWLKDGRPLPPGSRHSIRADGSLHLDRALQEHAGRYSCVATNTAGSQHRDVELVVQVPPRIHPTATHHITNEGVAASLPCVASGVPAPTITWTKETNALTSRGPHYNVSKEGTLLIAQPSAQDAGAYVCTATNTVGFSSQEMRLSVNTKPRIHMNGSRNADVPLQVTAKAGEEVTLDCEAKGSPPPLVTWTKDSRPVPPITNRYGLLPSGSLRLAQVQVGDSGHYECTASNPAGSASHRYVLGVQGRTSWQPQSLPVPHHPACLSGLSVPLLQPTPRSVRLCHLSLRAPLPPPFATPTSCLSQACLSSSTLSLHLSPYPLRGPGDAVQRPPTTQGRAQWGLGFGRTGVRGEPMKVGLRGSLPGTRGPAGSPGCGDGKRPVRCHRAPPAGSILMPPRGPSEPLLPPLPSTRHFVHL

SEQ ID NO: 37683 - protein, 5059 aa, Homo sapiens
  Payload ID: 7479
  Gene Symbol: HMCN2
  Gene Name: hemicentin 2
  ENSP ID: ENSP00000485357
MPGAPLLRLLTAVSAAVAVAVAGAPGTVMPPTTGDATLAFVFDVTGSMWDELMQVIDGASRILERSLSRRSQAIANYALVPFHDPDIGPVTLTADPTVFQRELRELYVQGGGDCPEMSVGAIKAAVEVANPGSFIYVFSDARAKDYHKKEELLRLLQLKQSQVVFVLTGDCGDRTHPGYLAYEEIAATSSGQVFHLDKQQVTEVLKWVESAIQASKVHLLSTDHEEEGEHTWRLPFDPSLKEVTISLSGPGPEIEVQDPLGRILQEDEGLNVLLNIPDSAKVVAFKPEHPGLWSIKVYSSGRHSVRITGVSNIDFRAGFSTQPLLDLNHTLEWPLQGVPISLVINSTGLKAPGRLDSVELAQSSGKPLLTLPTKPLSNGSTHQLWGGPPFHTPKERFYLKVKGKDHEGNPLLRVSGVSYSGVAPGAPLVSMAPRIHGYLHQPLLVSCSVHSALPFRLQLRRGEARLGEERHFQESGNSSWEILRASKAEEGTYECTAVSRAGTGRAKAQIVVTDPPPQLVPAPNVTVSPGETAVLSCRVLGEAPYNLTWVRDWRVLPASTGRVAQLADLSLEISGIIPTDGGRYQCVASNANGVTRASVWLLVREAPQVSIHTSSQHFSQGVEVKVSCSASGYPTPHISWSRESQALQEDSRIHVDAQGTLIIQGVAPEDAGNYSCQATNEVGTDQETVTLYYTDPPSVSAVNAVVLVAVGEEAVLVCEASGVPPPRVIWYRGGLEMILAPEGSSSGKLRIPAAQERDAGTYTCRAVNELGDASAEIQLAVGHAPQLTELPRDVTVELGRSALLACRATGRPPPTVTWRRGDGQPLGLRLGAGRGSRSRQPDSGVLFFESVAPEDQAPYVCEARNVFGKVQAEARLIVTGHAPPQIASSAPTVRVLEGQPVSLPCIVLAGRPLPERHWLKDGRPLPPGSRHSIRADGSLHLDRALQEHAGRYSCVATNTAGSQHRDVELVVQVPPRIHPTATHHITNEGVAASLPCVASGVPAPTITWTKETNALTSRGPHYNVSKEGTLLIAQPSAQDAGAYVCTATNTVGFSSQEMRLSVNTKPRIHMNGSRNADVPLQVTAKAGEEVTLDCEAKGSPPPLVTWTKDSRPVPPITNRYGLLPSGSLRLAQVQVGDSGHYECTASNPAGSASHRYVLGVQVPPQVQPGPRVLKVLVGEALDLNCVAEGNPEPQLSWSKDGVVLQGRGPQGSVHFAAIRTSDAGRYRCEASNSAGVDAWEVELRVLEPPHWGADETSGLLERVAGENASLPCPARGTPKPQVTWRKGPSSEPLHGQPGVAVLEEGSLFLASVSPADSGDYECQATNEVGSTSRRAKLVVYVPPSIREDGRKANVSGMAGQSLTLECDANGFPVPEIVWLKDAQLIPKVGGHRLLDEGQSLHFPRIQEGDSGLYSCRAENQAGTAQRDFHLLVLTPPSVLGAGAAQEVLGLAGADVELQCWTSGVPTPQVEWTKDRQPVLPGGPHLQVQEDGQVLRITGSHVGDEGRYQCVAFSPAGQQARDFQLRVHAPPTIWGSNETGEVAVMEDHLVQLLCEARGVPTPNITWFKDGALLPTSTKVVYTRGGRQLQLGRAQSSDAGVYTCKASNAVGAAEKATRLDVYVPPTIEGAGGRPYVVKAVAGRPVALECVARGHPSPTLSWHHEGLPVAESNESRLETDGSVLRLESPGEASSGLYSCVASSPAGEAVLQYSVEVQVPPQLLVAEGLGQVTTIVGQPLELPCQASGSPVPTIQWLQNGRPAEELAGVQVASQGTTLHIDHVELDHSGLFACQATNEAGTAGAEVEVSVHEFPSVSIIGGENITAPFLQPVTLQCIGDGVPTPSLRWWKDGVALAAFGGNLQIEKVDLRDEGIYTCAATNLAGESKREVALKVLVPPNIEPGPVNKAVLENASVTLECLASGVPPPDVSWFKGHQPVSSWMGVTVSVDGRVLRIEQAQLSDAGSYRCVASNVAGSTELRYGLRVNVPPRITLPPSLPGPVLVNTPVRLTCNATGAPSPTLMWLKDGNPVSPAGTPGLQVFPGGRVLTLASARASDSGRYSCVAVSAVGEDRQDVVLQVHMPPSILGEELNVSVVANESVALECQSHAMPPPVLSWWKDGRPLEPRPGVHLSADKALLQVDRADVWDAGHYTCEALNQAGHSEKHYNLNVWVAPVFPLRESHTLTVREGHPTRLSCECRGVPFPKISWRKDGQPLPGEGAGLQHVSAVGRLLYLGQAQLAQEGTYTCECSNVVGNSSQDLQLEVHVPPQIAGPREPPTQVSVVQDGVATLECNATGKPPPTVTWERDGQPVGAELGLQLQNQGQSLHVERAQAAHTGRYSCVAENLAGRAERKFELSVLVPPELIGDLDPLTNITAALHSPLTLLCEAMGIPPPAIRWFRGEEPVSPGEDTYLLAGGWMLKMTQTQEQDSGLYSCLASNEAGEARRNFSVEVLVPPSIENEDLEEVIKVLDGQTAHLMCNVTGHPQPKLTWFKDGRPLARGDAHHISPDGVLLQVLQANLSSAGHYSCIAANAVGEKTKHFQLSVLLAPTILGGAEDSADEEVTVTVNNPISLICEALAFPSPNITWMKDGAPFEASRNIQLLPGTHGLQILNAQKEDAGQYTCVVTNELGEAVKNYHVEVLIPPSISKDDPLAEVGVKEVKTKVNSTLTLECESWAVPPPTIRWYKDGQPVTPSSRLQVLGEGRLLQIQPTQVSDSGRYLCVATNVAGEDDQDFNVLIQVPPMFQKVGDFSAAFEILSREEEARGGVTEYREIVENNPAYLYCDTNAIPPPDLTWYREDQPLSAGDEVSVLQGGRVLQIPLVRAENAGRYSCKASNEVGEDWLHYELLVLTPPVILGDTEELVEEVTVNASSTVSLQCPALGNPVPTISWLQNGLPFSPSPRLQVLEDGQVLQVSTAEVADAASYMCVAENQAGSAEKLFTLRVQVPPRIAGLDLEQVTAILNSSVSLPCDVHAHPNPEVTWYKDSQALSLGEEVFLLPGTHTLQLGRARLSDSGMYTCEALNAAGRDQKLVQLSVLVPPAFRQAPRGPQDAVLVRVGDKAVLSCETDALPEPTVTWYKDGQPLVLAQRTQALRGGQRLEIQEAQVSDKGLYSCKVSNVAGEAVRTFTLTVQVPPTFENPKTETVSQVAGSPLVLTCDVSGVPAPTVTWLKDRMPVESSAVHGVVSRGGRLQLSRLQPAQAGTYTCVAENTQAEARKDFVVAVLVAPRIRSSGVAREHHVLEGQEVRLDCEADGQPPPDVAWLKDGSPLGQDMGPHLRFYLDGGSLVLKGLRASDAGAYTCVAHNPAGEDARLHTVNVLVPPTIKQGADGSGTLVSRPGELVTMVCPVRGSPPIHVSWLKDGLPLPLSQRTLLHGSGHTLRISKVQLADAGIFTCVAASPAGVADRNFTLQVQVPPVLEPVEFQNDVVVVRGSLVELPCEARGVPLPLVSWMKDGEPLLSQSLEQGPSLQLEAVGAGDSGTYSCVAVSEAGEARRHFQLTVMEPPHIEDSGQPTELSLTPGAPMELLCDAQGTPQPNITWHKDGQALTRLENNSRATRVLRVENVQVRDAGLYTCLAESPAGAIEKSFRVRVQAPPNIVGPRGPRFVVGLAPGQLVLECSVEAEPAPKITWHRDGIVLQEDAHTQFPERGRFLQLQALSTADSGDYSCTARNAAGSTSVAFRVEIHTVPTIRSGPPAVNVSVNQTALLPCQADGVPAPLVSWRKDRVPLDPRSPRFEILPEGSLRIQPVLAQDAGHYLCLASNSAGSDRQGRDLRVLALLPCEASGSPKPLVVWWKDGQKLDFRLQQGAYRLLPSNALLLTAPGPQDSAQFECVVSNEVGEAHRLYQVTVHVPPTIADDQTDFTVTMMAPVVLTCHSTGIPAPTVSWSKAGAQLGARGSGYRVSPSGALEIGQALPIHAGRYTCSARNSAGVAHKHVFLTVQASPVVKPLPSVVRAVAEEEVLLPCEASGIPRPTITWQKEGLNVATGVSTQVLPGGQLRIAHASPEDAGNYLCIAKNSAGSAMGKTRLVVQVPPVIENGLPDLSTTEGSHAFLPCKARGSPEPNITWDKDGQPVSGAEGKFTIQPSGELLVKNLEGQDAGTYTCTAENAVGRARRRVHLTILVLPVFTTLPGDRSLRLGDRLWLRCAARGSPTPRIGWTVNDRPVTEGVSEQDGGSTLQRAAVSREDSGTYVCWAENRVGRTQAVSFVHVKEAPVLQGEAFSYLVEPVGGSIQLDCVVRGDPVPDIHWIKDGLPLRGSHLRHQLQNGSLTIRRTERDDAGRYQCLAENEMGVAKKVVILVLQSAPVFQVEPQDMTVRSGDDVALRCQATGEPTPTIEWLQAGQPLRASRRLRTLPDGSLWLENVETGDAGTYDCVAHNLLGSATARAFLVVRGEPQGSWGSMTGVINGRKFGVATLNTSVMQEAHSGVSSIHSSIRHVPANVGPLMRVLVVTIAPIYWALARESGEALNGHSLTGGRFRQESHVEFATGELLTMTQVARGLDPDGLLLLDVVVNGVVPESLADADLQVQDFEEHYVQTGPGQLFVGSTQRFFQGGLPSFLRCNHSIQYNAARGPQPQLVQHLRASAISSAFDPEAEALRFQLATALQAEENEVGCPEGFELDSQGAFCVDRDECSGGPSPCSHACLNAPGRFSCTCPTGFALAWDDRNCRDVDECAWDAHLCREGQRCVNLLGSYRCLPDCGPGFRVADGAGCEDVDECLEGLDDCHYNQLCENTPGGHRCSCPRGYRMQGPSLPCLDVNECLQLPKACAYQCHNLQGSYRCLCPPGQTLLRDGKACTSLERNGQNVTTVSHRGPLLPWLRPWASIPGTSYHAWVSLRPGPMALSSVGRAWCPPGFIRQNGVCTDLDECRVRNLCQHACRNTEGSYQCLCPAGYRLLPSGKNCQDINECEEESIECGPGQMCFNTRGSYQCVDTPCPATYRQGPSPGTCFRRCSQDCGTGGPSTLQYRLLPLPLGVRAHHDVARLTAFSEVGVPANRTELSMLEPDPRSPFALRPLRAGLGAVYTRRALTRAGLYRLTVRAAAPRHQSVFVLLIAVSPYPY

SEQ ID NO: 37684 - protein, 479 aa, Homo sapiens
  Payload ID: 7479
  Gene Symbol: HMCN2
  Gene Name: hemicentin 2
  ENSP ID: ENSP00000485578
  MOD_RES (1)..(1): Any amino acid
XVHAHPNPEVTWYKDSQALSLGEEVFLLPGTHTLQLGRARLSDSGMYTCEALNAAGRDQKLVQLSVLVPPAFRQAPRGPQDAVLVRVGDKAVLSCETDALPEPTVTWYKDGQPLVLAQRTQALRGGQRLEIQEAQVSDKGLYSCKVSNVAGEAVRTFTLTVQVPPTFENPKTETVSQVAGSPLVLTCDVSGVPAPTVTWLKDRMPVESSAVHGVVSRGGRLQLSRLQPAQAGTYTCVAENTQAEARKDFVVAVLVAPRIRSSGVAREHHVLEGQEVRLDCEADGQPPPDVAWLKDGSPLGQDMGPHLRFYLDGGSLVLKGLRASDAGAYTCVAHNPAGEDARLHTVNVLVPPTIKQGADGSGTLVSRPGELVTMVCPVRGSPPIHVSWLKDGLPLPLSQRTLLHGSGHTLRISKVQLADAGIFTCVAASPAGVADRNFTLQCPLSWSRWSSRMTWWWFVAPWWNSRARPGAFPCLSCRG

SEQ ID NO: 37685 - protein, 338 aa, Homo sapiens
  Payload ID: 7480
  Gene Symbol: HEMK1
  Gene Name: HemK methyltransferase family member 1
  Uniprot ID: Q9Y5R4
  ENSP ID: ENSP00000232854
MELWGRMLWALLSGPGRRGSTRGWAFSSWQPQPPLAGLSSAIELVSHWTGVFEKRGIPEARESSEYIVAHVLGAKTFQSLRPALWTQPLTSQQLQCIRELSSRRLQRMPVQYILGEWDFQGLSLRMVPPVFIPRPETEELVEWVLEEVAQRSHAVGSPGSPLILEVGCGSGAISLSLLSQLPQSRVIAVDKREAAISLTHENAQRLRLQDRIWIIHLDMTSERSWTHLPWGPMDLIVSNPPYVFHQDMEQLAPEIRSYEDPAALDGGEEGMDIITHILALAPRLLKDSGSIFLEVDPRHPELVSSWLQSRPDLYLNLVAVRRDFCGRPRFLHIRRSGP

SEQ ID NO: 37686 - protein, 88 aa, Homo sapiens
  Payload ID: 7480
  Gene Symbol: HEMK1
  Gene Name: HemK methyltransferase family member 1
  ENSP ID: ENSP00000394027
MELWGRMLWALLSGPGRRGSTRGWAFSSWQPQPPLAGLSSAIELVSHWTGVFEKRGIPEARESISEPEAGTLDPALDLSATTVYPGAE

SEQ ID NO: 37687 - protein, 88 aa, Homo sapiens; identical to SEQ ID NO: 37686
  Payload ID: 7480
  Gene Symbol: HEMK1
  Gene Name: HemK methyltransferase family member 1
  ENSP ID: ENSP00000397966

SEQ ID NO: 37688 - protein, 124 aa, Homo sapiens
  Payload ID: 7480
  Gene Symbol: HEMK1
  Gene Name: HemK methyltransferase family member 1
  ENSP ID: ENSP00000404168
ILEVGCGSGAISLSLLSQLPQSRVIAVDKREAAISLTHENAQSYEDPAALDGGEEGMDIITHILALAPRLLKDSGSIFLEVDPRHPELVSSWLQSRPDLYLNLVAVRRDFCGRPRFLHIRRSGP

SEQ ID NO: 37689 - protein, 338 aa, Homo sapiens; identical to SEQ ID NO: 37685
  Payload ID: 7480
  Gene Symbol: HEMK1
  Gene Name: HemK methyltransferase family member 1
  Uniprot ID: Q9Y5R4
  ENSP ID: ENSP00000404334

SEQ ID NO: 37690 - protein, 338 aa, Homo sapiens; identical to SEQ ID NO: 37685
  Payload ID: 7480
  Gene Symbol: HEMK1
  Gene Name: HemK methyltransferase family member 1
  Uniprot ID: Q9Y5R4
  ENSP ID: ENSP00000404843

SEQ ID NO: 37691 - protein, 260 aa, Homo sapiens
  Payload ID: 7481
  Gene Symbol: HFE
  Gene Name: hemochromatosis
  Uniprot ID: Q30201
  ENSP ID: ENSP00000259699
MGPRARPALLLLMLLQTAVLQGRLLQSHTLQVILGCEMQEDNSTEGYWKYGYDGQDHLEFCPDTLDWRAAEPRAWPTKLEWERHKIRARQNRAYLERDCPAQLQQLLELGRGVLDQQVPPLVKVTHHVTSSVTTLRCRALNYYPQNITMKWLKDKQPMDAKEFEPKDVLPNGDGTYQGWITLAVPPGEEQRYTCQVEHPGLDQPLIVIWEPSPSGTLVIGVISGIAVFVVILFIGILFIILRKRQGSRGAMGHYVLAERE

SEQ ID NO: 37692 - protein, 337 aa, Homo sapiens
  Payload ID: 7481
  Gene Symbol: HFE
  Gene Name: hemochromatosis
  ENSP ID: ENSP00000311698
MGPRARPALLLLMLLQTAVLQGRLLRSHSLHYLFMGASEQDLGLSLFEALGYVDDQLFVFYDHESRRVEPRTPWVSSRISSQMWLQLSQSLKGWDHMFTVDFWTIMENHNHSKESHTLQVILGCEMQEDNSTEGYWKYGYDGQDHLEFCPDTLDWRAAEPRAWPTKLEWERHKIRARQNRAYLERDCPAQLQQLLELGRGVLDQQVPPLVKVTHHVTSSVTTLRCRALNYYPQNITMKWLKDKQPMDAKEFEPKDVLPNGDGTYQGWITLAVPPGEEQRYTCQVEHPGLDQPLIVIWEPSPSGTLVIGVISGIAVFVVILFIGILFIILRKRQGSSF

SEQ ID NO: 37693 - protein, 168 aa, Homo sapiens
  Payload ID: 7481
  Gene Symbol: HFE
  Gene Name: hemochromatosis
  Uniprot ID: Q30201
  ENSP ID: ENSP00000312342
MGPRARPALLLLMLLQTAVLQGRLLLPPLVKVTHHVTSSVTTLRCRALNYYPQNITMKWLKDKQPMDAKEFEPKDVLPNGDGTYQGWITLAVPPGEEQRYTCQVEHPGLDQPLIVIWEPSPSGTLVIGVISGIAVFVVILFIGILFIILRKRQGSRGAMGHYVLAERE

SEQ ID NO: 37694 - protein, 256 aa, Homo sapiens
  Payload ID: 7481
  Gene Symbol: HFE
  Gene Name: hemochromatosis
  Uniprot ID: Q30201
  ENSP ID: ENSP00000313776
MGPRARPALLLLMLLQTAVLQGRLLRSHSLHYLFMGASEQDLGLSLFEALGYVDDQLFVFYDHESRRVEPRTPWVSSRISSQMWLQLSQSLKGWDHMFTVDFWTIMENHNHSKVPPLVKVTHHVTSSVTTLRCRALNYYPQNITMKWLKDKQPMDAKEFEPKDVLPNGDGTYQGWITLAVPPGEEQRYTCQVEHPGLDQPLIVIWEPSPSGTLVIGVISGIAVFVVILFIGILFIILRKRQGSRGAMGHYVLAERE

SEQ ID NO: 37695 - protein, 76 aa, Homo sapiens
  Payload ID: 7481
  Gene Symbol: HFE
  Gene Name: hemochromatosis
  Uniprot ID: Q30201
  ENSP ID: ENSP00000315936
MGPRARPALLLLMLLQTAVLQGRLLQPSPSGTLVIGVISGIAVFVVILFIGILFIILRKRQGSRGAMGHYVLAERE

SEQ ID NO: 37696 - protein, 242 aa, Homo sapiens
  Payload ID: 7481
  Gene Symbol: HFE
  Gene Name: hemochromatosis
  Uniprot ID: Q30201
  ENSP ID: ENSP00000337819
MGPRARPALLLLMLLQTAVLQGRLLRSHSLHYLFMGASEQDLGLSLFEALGYVDDQLFVFYDHESRRVEPRTPWVSSRISSQMWLQLSQSLKGWDHMFTVDFWTIMENHNHSKVTTLRCRALNYYPQNITMKWLKDKQPMDAKEFEPKDVLPNGDGTYQGWITLAVPPGEEQRYTCQVEHPGLDQPLIVIWEPSPSGTLVIGVISGIAVFVVILFIGILFIILRKRQGSRGAMGHYVLAERE

SEQ ID NO: 37697 - protein, 325 aa, Homo sapiens
  Payload ID: 7481
  Gene Symbol: HFE
  Gene Name: hemochromatosis
  Uniprot ID: Q30201
  ENSP ID: ENSP00000380217
MGPRARPALLLLMLLQTAVLQGRLLPLGYVDDQLFVFYDHESRRVEPRTPWVSSRISSQMWLQLSQSLKGWDHMFTVDFWTIMENHNHSKESHTLQVILGCEMQEDNSTEGYWKYGYDGQDHLEFCPDTLDWRAAEPRAWPTKLEWERHKIRARQNRAYLERDCPAQLQQLLELGRGVLDQQVPPLVKVTHHVTSSVTTLRCRALNYYPQNITMKWLKDKQPMDAKEFEPKDVLPNGDGTYQGWITLAVPPGEEQRYTCQVEHPGLDQPLIVIWEPSPSGTLVIGVISGIAVFVVILFIGILFIILRKRQGSRGAMGHYVLAERE

SEQ ID NO: 37698 - protein, 348 aa, Homo sapiens
  Payload ID: 7481
  Gene Symbol: HFE
  Gene Name: hemochromatosis
  Uniprot ID: Q30201
  ENSP ID: ENSP00000417404
MGPRARPALLLLMLLQTAVLQGRLLRSHSLHYLFMGASEQDLGLSLFEALGYVDDQLFVFYDHESRRVEPRTPWVSSRISSQMWLQLSQSLKGWDHMFTVDFWTIMENHNHSKESHTLQVILGCEMQEDNSTEGYWKYGYDGQDHLEFCPDTLDWRAAEPRAWPTKLEWERHKIRARQNRAYLERDCPAQLQQLLELGRGVLDQQVPPLVKVTHHVTSSVTTLRCRALNYYPQNITMKWLKDKQPMDAKEFEPKDVLPNGDGTYQGWITLAVPPGEEQRYTCQVEHPGLDQPLIVIWEPSPSGTLVIGVISGIAVFVVILFIGILFIILRKRQGSRGAMGHYVLAERE

SEQ ID NO: 37699 - protein, 55 aa, Homo sapiens
  Payload ID: 7481
  Gene Symbol: HFE
  Gene Name: hemochromatosis
  ENSP ID: ENSP00000417534
IVIWEPSPSGTLVIGVISGIAVFVVILFIGILFIILRKRQGSRGAMGHYVLAERF

SEQ ID NO: 37700 - protein, 345 aa, Homo sapiens
  Payload ID: 7481
  Gene Symbol: HFE
  Gene Name: hemochromatosis
  ENSP ID: ENSP00000419725
MGPRARPALLLLMLLQTAVLQGRLLRSHSLHYLFMGASEQDLGLSLFEALGYVDDQLFVFYDHESRRVEPRTPWVSSRISSQMWLQLSQSLKGWDHMFTVDFWTIMENHNHSKESHTLQVILGCEMQEDNSTEGYWKYGYDGQDHLEFCPDTLDWRAAEPRAWPTKLEWERHKIRARQNRAYLERDCPAQLQQLLELGRGVLDQQEGSESSSLPGKVTTLRCRALNYYPQNITMKWLKDKQPMDAKEFEPKDVLPNGDGTYQGWITLAVPPGEEQRYTCQVEHPGLDQPLIVIWEPSPSGTLVIGVISGIAVFVVILFIGILFIILRKRQGSRGAMGHYVLAERE

SEQ ID NO: 37701 - protein, 246 aa, Homo sapiens
  Payload ID: 7481
  Gene Symbol: HFE
  Gene Name: hemochromatosis
  Uniprot ID: Q30201
  ENSP ID: ENSP00000420559
MGPRARPALLLLMLLQTAVLQGRLLQSHTLQVILGCEMQEDNSTEGYWKYGYDGQDHLEFCPDTLDWRAAEPRAWPTKLEWERHKIRARQNRAYLERDCPAQLQQLLELGRGVLDQQVTTLRCRALNYYPQNITMKWLKDKQPMDAKEFEPKDVLPNGDGTYQGWITLAVPPGEEQRYTCQVEHPGLDQPLIVIWEPSPSGTLVIGVISGIAVFVVILFIGILFIILRKRQGSRGAMGHYVLAERE

SEQ ID NO: 37702 - protein, 334 aa, Homo sapiens
  Payload ID: 7481
  Gene Symbol: HFE
  Gene Name: hemochromatosis
  Uniprot ID: Q30201
  ENSP ID: ENSP00000420802
MGPRARPALLLLMLLQTAVLQGRLLRSHSLHYLFMGASEQDLGLSLFEALGYVDDQLFVFYDHESRRVEPRTPWVSSRISSQMWLQLSQSLKGWDHMFTVDFWTIMENHNHSKESHTLQVILGCEMQEDNSTEGYWKYGYDGQDHLEFCPDTLDWRAAEPRAWPTKLEWERHKIRARQNRAYLERDCPAQLQQLLELGRGVLDQQVTTLRCRALNYYPQNITMKWLKDKQPMDAKEFEPKDVLPNGDGTYQGWITLAVPPGEEQRYTCQVEHPGLDQPLIVIWEPSPSGTLVIGVISGIAVFVVILFIGILFIILRKRQGSRGAMGHYVLAERE

SEQ ID NO: 37703 - protein, 426 aa, Homo sapiens
  Payload ID: 7482
  Gene Symbol: HFE2
  Gene Name: hemochromatosis type 2 (juvenile)
  Uniprot ID: Q6ZVN8
  ENSP ID: ENSP00000337014
MGEPGQSPSPRSSHGSPPTLSTLTLLLLLCGHAHSQCKILRCNAEYVSSTLSLRGGGSSGALRGGGGGGRGGGVGSGGLCRALRSYALCTRRTARTCRGDLAFHSAVHGIEDLMIQHNCSRQGPTAPPPPRGPALPGAGSGLPAPDPCDYEGRFSRLHGRPPGFLHCASFGDPHVRSFHHHFHTCRVQGAWPLLDNDFLFVQATSSPMALGANATATRKLTIIFKNMQECIDQKVYQAEVDNLPVAFEDGSINGGDRPGGSSLSIQTANPGNHVEIQAAYIGTTIIIRQTAGQLSFSIKVAEDVAMAFSAEQDLQLCVGGCPPSQRLSRSERNRRGAITIDTARRLCKEGLPVEDAYFHSCVFDVLISGDPNFTVAAQAALEDARAFLPDLEKLHLFPSDAGVPLSSATLLAPLLSGLFVLWLCIQ

SEQ ID NO: 37704 - protein, 313 aa, Homo sapiens
  Payload ID: 7482
  Gene Symbol: HFE2
  Gene Name: hemochromatosis type 2 (juvenile)
  Uniprot ID: Q6ZVN8
  ENSP ID: ENSP00000350495
MIQHNCSRQGPTAPPPPRGPALPGAGSGLPAPDPCDYEGRFSRLHGRPPGFLHCASFGDPHVRSFHHHFHTCRVQGAWPLLDNDFLFVQATSSPMALGANATATRKLTIIFKNMQECIDQKVYQAEVDNLPVAFEDGSINGGDRPGGSSLSIQTANPGNHVEIQAAYIGTTIIIRQTAGQLSFSIKVAEDVAMAFSAEQDLQLCVGGCPPSQRLSRSERNRRGAITIDTARRLCKEGLPVEDAYFHSCVFDVLISGDPNFTVAAQAALEDARAFLPDLEKLHLFPSDAGVPLSSATLLAPLLSGLFVLWLCIQ

SEQ ID NO: 37705 - protein, 93 aa, Homo sapiens
  Payload ID: 7482
  Gene Symbol: HFE2
  Gene Name: hemochromatosis type 2 (juvenile)
  ENSP ID: ENSP00000411863
MGEPGQSPSPRSSHGSPPTLSTLTLLLLLCGHAHSQCKILRCNAEYVSSTLSLRGGGSSGALRGGGGGGRGGGVGSGGLCRALRSYALCTRRT

SEQ ID NO: 37706 - protein, 200 aa, Homo sapiens
  Payload ID: 7482
  Gene Symbol: HFE2
  Gene Name: hemochromatosis type 2 (juvenile)
  Uniprot ID: Q6ZVN8
  ENSP ID: ENSP00000421820
MQECIDQKVYQAEVDNLPVAFEDGSINGGDRPGGSSLSIQTANPGNHVEIQAAYIGTTIIIRQTAGQLSFSIKVAEDVAMAFSAEQDLQLCVGGCPPSQRLSRSERNRRGAITIDTARRLCKEGLPVEDAYFHSCVFDVLISGDPNFTVAAQAALEDARAFLPDLEKLHLFPSDAGVPLSSATLLAPLLSGLFVLWLCIQ

SEQ ID NO: 37707 - protein, 200 aa, Homo sapiens; identical to SEQ ID NO: 37706
  Payload ID: 7482
  Gene Symbol: HFE2
  Gene Name: hemochromatosis type 2 (juvenile)
  Uniprot ID: Q6ZVN8
  ENSP ID: ENSP00000425716

SEQ ID NO: 37708 - protein, 70 aa, Homo sapiens
  Payload ID: 7482
  Gene Symbol: HFE2
  Gene Name: hemochromatosis type 2 (juvenile)
  ENSP ID: ENSP00000489347
MGEPGQSPSPRSSHGSPPTLSTLTLLLLLCGHAHSQCKILRCNADSPSYLRTCRNALIRRCIRLRWIIFL

SEQ ID NO: 37709 - protein, 484 aa, Homo sapiens
  Payload ID: 7483
  Gene Symbol: HEMGN
  Gene Name: hemogen
  Uniprot ID: Q9BXL5
  ENSP ID: ENSP00000259456
MDLGKDQSHLKHHQTPDPHQEENHSPEVIGTWSLRNRELLRKRKAEVHEKETSQWLFGEQKKRKQQRTGKGNRRGRKRQQNTELKVEPQPQIEKEIVEKALAPIEKKTEPPGSITKVFPSVASPQKVVPEEHFSEICQESNIYQENFSEYQEIAVQNHSSETCQHVSEPEDLSPKMYQEISVLQDNSSKICQDMKEPEDNSPNTCQVISVIQDHPFKMYQDMAKREDLAPKMCQEAAVPKILPCPTSEDTADLAGCSLQAYPKPDVPKGYILDTDQNPAEPEEYNETDQGIAETEGLFPKIQEIAEPKDLSTKTHQESAEPKYLPHKTCNEIIVPKAPSHKTIQETPHSEDYSIEINQETPGSEKYSPETYQEIPGLEEYSPEIYQETSQLEEYSPEIYQETPGPEDLSTETYKNKDVPKECFPEPHQETGGPQGQDPKAHQEDAKDAYTFPQEMKEKPKEEPGIPAILNESHPENDVYSYVLF

SEQ ID NO: 37710 - protein, 484 aa, Homo sapiens; identical to SEQ ID NO: 37709
  Payload ID: 7483
  Gene Symbol: HEMGN
  Gene Name: hemogen
  Uniprot ID: Q9BXL5
  ENSP ID: ENSP00000480020

SEQ ID NO: 37711 - protein, 142 aa, Homo sapiens
  Payload ID: 7484
  Gene Symbol: HBA1
  Gene Name: hemoglobin, alpha 1
  Uniprot ID: P69905
  ENSP ID: ENSP00000322421
MVLSPADKTNVKAAWGKVGAHAGEYGAEALERMFLSFPTTKTYFPHFDLSHGSAQVKGHGKKVADALTNAVAHVDDMPNALSALSDLHAHKLRVDPVNFKLLSHCLLVTLAAHLPAEFTPAVHASLDKFLASVSTVLTSKYR

SEQ ID NO: 37712 - protein, 110 aa, Homo sapiens
  Payload ID: 7484
  Gene Symbol: HBA1
  Gene Name: hemoglobin, alpha 1
  ENSP ID: ENSP00000380899
MFLSFPTTKTYFPHFDLSHGSAQVKGHGKKVADALTNAVAHVDDMPNALSALSDLHAHKLRVDPVNFKLLSHCLLVTLAAHLPAEFTPAVHASLDKFLASVSTVLTSKYR

SEQ ID NO: 37713 - protein, 142 aa, Homo sapiens; identical to SEQ ID NO: 37711
  Payload ID: 7485
  Gene Symbol: HBA2
  Gene Name: hemoglobin, alpha 2
  Uniprot ID: P69905
  ENSP ID: ENSP00000251595

SEQ ID NO: 37714 - protein, 110 aa, Homo sapiens; identical to SEQ ID NO: 37712
  Payload ID: 7485
  Gene Symbol: HBA2
  Gene Name: hemoglobin, alpha 2
  ENSP ID: ENSP00000380908

SEQ ID NO: 37715 - protein, 147 aa, Homo sapiens
  Payload ID: 7486
  Gene Symbol: HBB
  Gene Name: hemoglobin, beta
  Uniprot ID: P68871
  ENSP ID: ENSP00000333994
MVHLTPEEKSAVTALWGKVNVDEVGGEALGRLLVVYPWTQRFFESFGDLSTPDAVMGNPKVKAHGKKVLGAFSDGLAHLDNLKGTFATLSELHCDKLHVDPENFRLLGNVLVCVLAHHFGKEFTPPVQAAYQKVVAGVANALAHKYH

SEQ ID NO: 37716 - protein, 90 aa, Homo sapiens
  Payload ID: 7486
  Gene Symbol: HBB
  Gene Name: hemoglobin, beta
  ENSP ID: ENSP00000369671
MVHLTPEEKSAVTALWGKVNVDEVGGEALGRLLVVYPWTQRFFESFGDLSTPDAVMGNPKVKAHGKKVLGAFSDGLAHLDNLKGTFATLS

SEQ ID NO: 37717 - protein, 55 aa, Homo sapiens
  Payload ID: 7486
  Gene Symbol: HBB
  Gene Name: hemoglobin, beta
  ENSP ID: ENSP00000488004
MVHLTPEEKSAVTALWGKVNVDEVGGCWWSTLGPRGSLSPLGICPLLMLLWATLR

SEQ ID NO: 37718 - protein, 141 aa, Homo sapiens
  Payload ID: 7487
  Gene Symbol: HBD
  Gene Name: hemoglobin, delta
  ENSP ID: ENSP00000292901
MVHLTPEEKTAVNALWGKVNVDAVGGEALGRLLVVYPWTQRFFESFGDLSSPDAVMGNPKVKAHGKKVLGAFSDGLAHLDNLKGTFSQLSELHCDKLHVDPENFRVCKKVPEALQIGSTCLFYKEYMGKEKSKGTVQGING

SEQ ID NO: 37719 - protein, 147 aa, Homo sapiens
  Payload ID: 7487
  Gene Symbol: HBD
  Gene Name: hemoglobin, delta
  Uniprot ID: P02042
  ENSP ID: ENSP00000369654
MVHLTPEEKTAVNALWGKVNVDAVGGEALGRLLVVYPWTQRFFESFGDLSSPDAVMGNPKVKAHGKKVLGAFSDGLAHLDNLKGTFSQLSELHCDKLHVDPENFRLLGNVLVCVLARNFGKEFTPQMQAAYQKVVAGVANALAHKYH

SEQ ID NO: 37720 - protein, 104 aa, Homo sapiens
  Payload ID: 7487
  Gene Symbol: HBD
  Gene Name: hemoglobin, delta
  ENSP ID: ENSP00000393810
MVHLTPEEKTAVNALWGKVNVDAVGGEALGRLLVVYPWTQRFFESFGDLSSPDAVMGNPKVKAHGKKVLGAFSDGLAHLDNLKGTFSQLSELHCDKLHVDPENF

SEQ ID NO: 37721 - protein, 85 aa, Homo sapiens
  Payload ID: 7487
  Gene Symbol: HBD
  Gene Name: hemoglobin, delta
  ENSP ID: ENSP00000414741
MVHLTPEEKTAVNALWGKVNVDAVGGEALGSSWAMCWCVCWPATLARNSPHKCRLPIRRWWLVWLMPWLTSTIEILDCFLITIRR

SEQ ID NO: 37722 - protein, 147 aa, Homo sapiens
  Payload ID: 7488
  Gene Symbol: HBE1
  Gene Name: hemoglobin, epsilon 1
  Uniprot ID: P02100
  ENSP ID: ENSP00000292896
MVHFTAEEKAAVTSLWSKMNVEEAGGEALGRLLVVYPWTQRFFDSFGNLSSPSAILGNPKVKAHGKKVLTSFGDAIKNMDNLKPAFAKLSELHCDKLHVDPENFKLLGNVMVIILATHFGKEFTPEVQAAWQKLVSAVAIALAHKYH

SEQ ID NO: 37723 - protein, 147 aa, Homo sapiens; identical to SEQ ID NO: 37722
  Payload ID: 7488
  Gene Symbol: HBE1
  Gene Name: hemoglobin, epsilon 1
  Uniprot ID: P02100
  ENSP ID: ENSP00000369586

SEQ ID NO: 37724 - protein, 87 aa, Homo sapiens
  Payload ID: 7488
  Gene Symbol: HBE1
  Gene Name: hemoglobin, epsilon 1
  ENSP ID: ENSP00000380104
MVHFTAEEKAAVTSLWSKMNVEEAGGEALGRLLVVYPWTQRFFDSFGNLSSPSAILGNPKVKAHGKKVLTSFGDAIKNMDNLKPAFA

SEQ ID NO: 37725 - protein, 147 aa, Homo sapiens
  Payload ID: 7489
  Gene Symbol: HBG1
  Gene Name: hemoglobin, gamma A
  Uniprot ID: P69891
  ENSP ID: ENSP00000327431
MGHFTEEDKATITSLWGKVNVEDAGGETLGRLLVVYPWTQRFFDSFGNLSSASAIMGNPKVKAHGKKVLTSLGDATKHLDDLKGTFAQLSELHCDKLHVDPENFKLLGNVLVTVLAIHFGKEFTPEVQASWQKMVTAVASALSSRYH

SEQ ID NO: 37726 - protein, 30 aa, Homo sapiens
  Payload ID: 7489
  Gene Symbol: HBG1
  Gene Name: hemoglobin, gamma A
  ENSP ID: ENSP00000488759
MGHFTEEDKATITSLWGKAPGCLPMDPEVL

SEQ ID NO: 37727 - protein, 147 aa, Homo sapiens
  Payload ID: 7490
  Gene Symbol: HBG2
  Gene Name: hemoglobin, gamma G
  Uniprot ID: P69892
  ENSP ID: ENSP00000338082
MGHFTEEDKATITSLWGKVNVEDAGGETLGRLLVVYPWTQRFFDSFGNLSSASAIMGNPKVKAHGKKVLTSLGDAIKHLDDLKGTFAQLSELHCDKLHVDPENFKLLGNVLVTVLAIHFGKEFTPEVQASWQKMVTGVASALSSRYH

SEQ ID NO: 37728 - protein, 137 aa, Homo sapiens
  Payload ID: 7490
  Gene Symbol: HBG2
  Gene Name: hemoglobin, gamma G
  ENSP ID: ENSP00000369602
MVVLGEMKRKVLPLHFLPFMRLLVVYPWTQRFFDSFGNLSSASAIMGNPKVKAHGKKVLTSLGDAIKHLDDLKGTFAQLSELHCDKLHVDPENFKLLGNVLVTVLAIHFGKEFTPEVQASWQKMVTGVASALSSRYH

SEQ ID NO: 37729 - protein, 147 aa, Homo sapiens; identical to SEQ ID NO: 37727
  Payload ID: 7490
  Gene Symbol: HBG2
  Gene Name: hemoglobin, gamma G
  Uniprot ID: P69892
  ENSP ID: ENSP00000369609

SEQ ID NO: 37730 - protein, 147 aa, Homo sapiens
  Payload ID: 7490
  Gene Symbol: HBG2
  Gene Name: hemoglobin, gamma G
  ENSP ID: ENSP00000479637
MGHFTEEDKATITSLWGKVNVEDAGGETLGRLLVVYPWTQRFFDSFGNLSSASAIMGNPKVKAHGKKVLTSLGDAIKHLDDLKGTFAQLSELHCDKLHVDPENFKLLGNVLVTVLAIHFGKEFTPEVQASWQKMVTAVASALSSRYH

SEQ ID NO: 37731 - protein, 30 aa, Homo sapiens; identical to SEQ ID NO: 37726
  Payload ID: 7490
  Gene Symbol: HBG2
  Gene Name: hemoglobin, gamma G
  ENSP ID: ENSP00000488218

SEQ ID NO: 37732 - protein, 141 aa, Homo sapiens
  Payload ID: 7491
  Gene Symbol: HBM
  Gene Name: hemoglobin, mu
  Uniprot ID: Q6B0K9
  ENSP ID: ENSP00000349270
MLSAQERAQIAQVWDLIAGHEAQFGAELLLRLFTVYPSTKVYFPHLSACQDATQLLSHGQRMLAAVGAAVQHVDNLRAALSPLADLHALVLRVDPANFPLLIQCFHVVLASHLQDEFTVQMQAAWDKFLTGVAVVLTEKYR

SEQ ID NO: 37733 - protein, 142 aa, Homo sapiens
  Payload ID: 7492
  Gene Symbol: HBQ1
  Gene Name: hemoglobin, theta 1
  Uniprot ID: P09105
  ENSP ID: ENSP00000199708
MALSAEDRALVRALWKKLGSNVGVYTTEALERTFLAFPATKTYFSHLDLSPGSSQVRAHGQKVADALSLAVERLDDLPHALSALSHLHACQLRVDPASFQLLGHCLLVTLARHYPGDFSPALQASLDKFLSHVISALVSEYR

SEQ ID NO: 37734 - protein, 142 aa, Homo sapiens
  Payload ID: 7493
  Gene Symbol: HBZ
  Gene Name: hemoglobin, zeta
  Uniprot ID: P02008
  ENSP ID: ENSP00000252951
MSLTKTERTIIVSMWAKISTQADTIGTETLERLFLSHPQTKTYFPHFDLHPGSAQLRAHGSKVVAAVGDAVKSIDDIGGALSKLSELHAYILRVDPVNFKLLSHCLLVTLAARFPADFTAEAHAAWDKFLSVVSSVLTEKYR

SEQ ID NO: 37735 - protein, 462 aa, Homo sapiens
  Payload ID: 7494
  Gene Symbol: HPX
  Gene Name: hemopexin
  Uniprot ID: P02790
  ENSP ID: ENSP00000265983
MARVLGAPVALGLWSLCWSLAIATPLPPTSAHGNVAEGETKPDPDVTERCSDGWSFDATTLDDNGTMLFFKGEFVWKSHKWDRELISERWKNFPSPVDAAFRQGHNSVFLIKGDKVWVYPPEKKEKGYPKLLQDEFPGIPSPLDAAVECHRGECQAEGVLFFQGDREWFWDLATGTMKERSWPAVGNCSSALRWLGRYYCFQGNQFLRFDPVRGEVPPRYPRDVRDYFMPCPGRGHGHRNGTGHGNSTHHGPEYMRCSPHLVLSALTSDNHGATYAFSGTHYWRLDTSRDGWHSWPIAHQWPQGPSAVDAAFSWEEKLYLVQGTQVYVFLTKGGYTLVSGYPKRLEKEVGTPHGIILDSVDAAFICPGSSRLHIMAGRRLWWLDLKSGAQATWTELPWPHEKVDGALCMEKSLGPNSCSANGPGLYLIHGPNLYCYSDVEKLNAAKALPQPQNVTSLLGCTH

SEQ ID NO: 37736 - protein, 254 aa, Homo sapiens [sequence omitted]

SEQ ID NO: 37737 - protein, 424 aa, Homo sapiens
  Payload ID: 7495
  Gene Symbol: HENMT1
  Gene Name: HEN1 methyltransferase homolog 1 (Arabidopsis)
  ENSP ID: ENSP00000359048
MEENNLQCSSVVDGNFEEVPRETAIQFKPPLYRQRYQFVKNLVDQHEPKKVADLGCGDTSLLRLLKVNPCIELLVGVDINEDKLRWRGDSLAPFLGDFLKPRDLNLTITLYHGSVVERDSRLLGFDLITCIELIEHLDSGDLARFPEVVFGYLSPSMIVISTPNSEFNPLFPSVTLRDSDHKFEWTRMEFQTWALYVANRYDYSVEFTGVGEPPAGAENVGYCTQIGIFRKNGGKATESCLSEQHDQHVYKARQGLTMLPRLVLNFHPQAILLPHLPKMLRLQVFTTSYPSLQQERFFKLVLVNEVSQQVESLRVSHLPRRKEQAGERGDKPKDIGGSKAPVPCFGPVFTEVEKAKIENSPTPFCVGDKFFVPLQRLLAYPKLNRLCANEEMMRSVIADSIPLSSDGSAVVADLRNYFDEQFEF

SEQ ID NO: 37738 - protein, 393 aa, Homo sapiens
  Payload ID: 7495
  Gene Symbol: HENMT1
  Gene Name: HEN1 methyltransferase homolog 1 (Arabidopsis)
  Uniprot ID: Q5T8I9
  ENSP ID: ENSP00000359049
MEENNLQCSSVVDGNFEEVPRETAIQFKPPLYRQRYQFVKNLVDQHEPKKVADLGCGDTSLLRLLKVNPCIELLVGVDINEDKLRWRGDSLAPFLGDFLKPRDLNLTITLYHGSVVERDSRLLGFDLITCIELIEHLDSGDLARFPEVVFGYLSPSMIVISTPNSEFNPLFPSVTLRDSDHKFEWTRMEFQTWALYVANRYDYSVEFTGVGEPPAGAENVGYCTQIGIFRKNGGKATESCLSEQHDQHVYKAVFTTSYPSLQQERFFKLVLVNEVSQQVESLRVSHLPRRKEQAGERGDKPKDIGGSKAPVPCFGPVFTEVEKAKIENSPTPFCVGDKFFVPLQRLLAYPKLNRLCANEEMMRSVIADSIPLSSDGSAVVADLRNYFDEQFEF

SEQ ID NO: 37739 - protein, 393 aa, Homo sapiens; identical to SEQ ID NO: 37738
  Payload ID: 7495
  Gene Symbol: HENMT1
  Gene Name: HEN1 methyltransferase homolog 1 (Arabidopsis)
  Uniprot ID: Q5T8I9
  ENSP ID: ENSP00000385655

SEQ ID NO: 37740 - protein, 316 aa, Homo sapiens
  Payload ID: 7495
  Gene Symbol: HENMT1
  Gene Name: HEN1 methyltransferase homolog 1 (Arabidopsis)
  ENSP ID: ENSP00000403953
MEENNLQCSSVVDGNFEEVPRETAIQFKPPLYRQRYQFVKNLVDQHEPKKVADLGCGDTSLLRLLKVNPCIELLVGVDINEDKLRWRGDSLAPFLGDFLKPRDLNLTITLYHGSVVERDSRLLGFDLITCIELIEHLDSGDLARFPEVVFGYLSPSMIVISTPNSEFNPLFPSVTLRDSDHKFEWTRMEFQTWALYVANRYDYSVEFTGVGEPPAGAENVGYCTQIGIFRKNGGKATESCLSEQHDQHVYKAVFTTSYPSLQQERFFKLVLVNEVSQQVESLRVSHLPRRKEQAGERGDKPKDIGGSKAPVPCFGP

SEQ ID NO: 37741 - protein, 450 aa, Homo sapiens
  Payload ID: 7496
  Gene Symbol: HEPACAM2
  Gene Name: HEPACAM family member 2
  Uniprot ID: A8MVW5
  ENSP ID: ENSP00000340532
MWLKVFTTFLSFATGACSGLKVTVPSHTVHGVRGQALYLPVHYGFHTPASDIQIIWLFERPHTMPKYLLGSVNKSVVPDLEYQHKFTMMPPNASLLINPLQFPDEGNYIVKVNIQGNGTLSASQKIQVTVDDPVTKPVVQIHPPSGAVEYVGNMTLTCHVEGGTRLAYQWLKNGRPVHTSSTYSFSPQNNTLHIAPVTKEDIGNYSCLVRNPVSEMESDIIMPIIYYGPYGLQVNSDKGLKVGEVFTVDLGEAILFDCSADSHPPNTYSWIRRTDNTTYIIKHGPRLEVASEKVAQKTMDYVCCAYNNITGRQDETHFTVIITSVGLEKLAQKGKSLSPLASITGISLFLIISMCLLFLWKKYQPYKVIKQKLEGRPETEYRKAQTFSGHEDALDDFGIYEFVAFPDVSGVSRIPSRSVPASDCVSGQDLHSTVYEVIQHIPAQQQDHPE

SEQ ID NO: 37742 - protein, 462 aa, Homo sapiens
  Payload ID: 7496
  Gene Symbol: HEPACAM2
  Gene Name: HEPACAM family member 2
  Uniprot ID: A8MVW5
  ENSP ID: ENSP00000377980
MGQDAFMEPFGDTLGVFQCKIYLLLFGACSGLKVTVPSHTVHGVRGQALYLPVHYGFHTPASDIQIIWLFERPHTMPKYLLGSVNKSVVPDLEYQHKFTMMPPNASLLINPLQFPDEGNYIVKVNIQGNGTLSASQKIQVTVDDPVTKPVVQIHPPSGAVEYVGNMTLTCHVEGGTRLAYQWLKNGRPVHTSSTYSFSPQNNTLHIAPVTKEDIGNYSCLVRNPVSEMESDIIMPIIYYGPYGLQVNSDKGLKVGEVFTVDLGEAILFDCSADSHPPNTYSWIRRTDNTTYIIKHGPRLEVASEKVAQKTMDYVCCAYNNITGRQDETHFTVIITSVGLEKLAQKGKSLSPLASITGISLFLIISMCLLFLWKKYQPYKVIKQKLEGRPETEYRKAQTFSGHEDALDDFGIYEFVAFPDVSGVSRIPSRSVPASDCVSGQDLHSTVYEVIQHIPAQQQDHPE

SEQ ID NO: 37743 - protein, 455 aa, Homo sapiens
  Payload ID: 7496
  Gene Symbol: HEPACAM2
  Gene Name: HEPACAM family member 2
  ENSP ID: ENSP00000389592
MWLKVFTTFLSFATGACSGLKVTVPSHTVHGVRGQALYLPVHYGFHTPASDIQIIWLFERPHTMPKYLLGSVNKSVVPDLEYQHKFTMMPPNASLLINPLQFPDEGNYIVKVNIQGNGTLSASQKIQVTVDDPVTKPVVQIHPPSGAVEYVGNMTLTCHVEGGTRLAYQWLKNGRPVHTSSTYSFSPQNNTLHIAPVTKEDIGNYSCLVRNPVSEMESDIIMPIIYYGPYGLQVNSDKGLKVGEVFTVDLGEAILFDCSADSHPPNTYSWIRRTDNTTYIIKHGPRLEVASEKVAQKTMDYVCCAYNNITGRQDETHFTVIITSVGLEKLAQKGKSLSPLASITGISLFLIISMCLLFLWKKYQPYKGQKQNTGKLKHFQAMKMLWMTSEYMNLLLFQMFLVFPGSQAGLFQPLIVYRGKICTVQCMKLFSTSLPSSKTIQSELSWAKQYIRVKF

SEQ ID NO: 37744 - protein, 485 aa, Homo sapiens
  Payload ID: 7496
  Gene Symbol: HEPACAM2
  Gene Name: HEPACAM family member 2
  Uniprot ID: A8MVW5
  ENSP ID: ENSP00000390204
MGQDAFMEPFGDTLGVFQCKIYLLLFDIVANCLLLRFKLSVSSYEIWKKGACSGLKVTVPSHTVHGVRGQALYLPVHYGFHTPASDIQIIWLFERPHTMPKYLLGSVNKSVVPDLEYQHKFTMMPPNASLLINPLQFPDEGNYIVKVNIQGNGTLSASQKIQVTVDDPVTKPVVQIHPPSGAVEYVGNMTLTCHVEGGTRLAYQWLKNGRPVHTSSTYSFSPQNNTLHIAPVTKEDIGNYSCLVRNPVSEMESDIIMPIIYYGPYGLQVNSDKGLKVGEVFTVDLGEAILFDCSADSHPPNTYSWIRRTDNTTYIIKHGPRLEVASEKVAQKTMDYVCCAYNNITGRQDETHFTVIITSVGLEKLAQKGKSLSPLASITGISLFLIISMCLLFLWKKYQPYKVIKQKLEGRPETEYRKAQTFSGHEDALDDFGIYEFVAFPDVSGVSRIPSRSVPASDCVSGQDLHSTVYEVIQHIPAQQQDHPE

SEQ ID NO: 37745 - protein, 307 aa, Homo sapiens
  Payload ID: 7497
  Gene Symbol: HS3ST1
  Gene Name: heparan sulfate (glucosamine) 3-O-sulfotransferase 1
  Uniprot ID: O14792
  ENSP ID: ENSP00000002596
MAALLLGAVLLVAQPQLVPSRPAELGQQELLRKAGTLQDDVRDGVAPNGSAQQLPQTIIIGVRKGGTRALLEMLSLHPDVAAAENEVHFFDWEEHYSHGLGWYLSQMPFSWPHQLTVEKTPAYFTSPKVPERVYSMNPSIRLLLILRDPSERVLSDYTQVFYNHMQKHKPYPSIEEFLVRDGRLNVDYKALNRSLYHVHMQNWLRFFPLRHIHIVDGDRLIRDPFPEIQKVERFLKLSPQINASNFYFNKTKGFYCLRDSGRDRCLHESKGRAHPQVDPKLLNKLHEYFHEPNKKFFELVGRTFDWH

SEQ ID NO: 37746 - protein, 82 aa, Homo sapiens
  Payload ID: 7497
  Gene Symbol: HS3ST1
  Gene Name: heparan sulfate (glucosamine) 3-O-sulfotransferase 1
  ENSP ID: ENSP00000422629
MAALLLGAVLLVAQPQLVPSRPAELGQQELLRKAGTLQDDVRDGVAPNGSAQQLPQTIIIGVRKGGTRALLEMLSLHPDVAA

SEQ ID NO: 37747 - protein, 82 aa, Homo sapiens; identical to SEQ ID NO: 37746
  Payload ID: 7497
  Gene Symbol: HS3ST1
  Gene Name: heparan sulfate (glucosamine) 3-O-sulfotransferase 1
  ENSP ID: ENSP00000425673

SEQ ID NO: 37748 - protein, 367 aa, Homo sapiens
  Payload ID: 7498
  Gene Symbol: HS3ST2
  Gene Name: heparan sulfate (glucosamine) 3-O-sulfotransferase 2
  Uniprot ID: Q9Y278
  ENSP ID: ENSP00000261374
MAYRVLGRAGPPQPRRARRLLFAFTLSLSCTYLCYSFLCCCDDLGRSRLLGAPRCLRGPSAGGQKLLQKSRPCDPSGPTPSEPSAPSAPAAAVPAPRLSGSNHSGSPKLGTKRLPQALIVGVKKGGTRAVLEFIRVHPDVRALGTEPHFFDRNYGRGLDWYRSLMPRTLESQITLEKTPSYFVTQEAPRRIFNMSRDTKLIVVVRNPVTRAISDYTQTLSKKPDIPTFEGLSFRNRTLGLVDVSWNAIRIGMYVLHLESWLQYFPLAQIHFVSGERLITDPAGEMGRVQDFLGIKRFITDKHFYFNKTKGFPCLKKTESSLLPRCLGKSKGRTHVQIDPEVIDQLREFYRPYNIKFYETVGQDFRWE

SEQ ID NO: 37749 - protein, 162 aa, Homo sapiens
  Payload ID: 7498
  Gene Symbol: HS3ST2
  Gene Name: heparan sulfate (glucosamine) 3-O-sulfotransferase 2
  ENSP ID: ENSP00000454505
MAYRVLGRAGPPQPRRARRLLFAFTLSLSCTYLCYSFLCCCDDLGRSRLLGAPRCLRGPSAGGQKLLQKSRPCDPSGPTPSEPSAPSAPAAAVPAPRLSGSNHSGSPKLGTKRLPQALIVGVKKGGTRAVLEFIRVHPDVRALGTEPHFFDRNYGRGLDWYR

SEQ ID NO: 37750 - protein, 406 aa, Homo sapiens
  Payload ID: 7499
  Gene Symbol: HS3ST3A1
  Gene Name: heparan sulfate (glucosamine) 3-O-sulfotransferase 3A1
  Uniprot ID: Q9Y663
  ENSP ID: ENSP00000284110
MAPPGPASALSTSAEPLSRSIFRKFLLMLCSLLTSLYVFYCLAERCQTLSGPVVGLSGGGEEAGAPGGGVLAGGPRELAVWPAAAQRKRLLQLPQWRRRRPPAPRDDGEEAAWEEESPGLSGGPGGSGAGSTVAEAPPGTLALLLDEGSKQLPQAIIIGVKKGGTRALLEFLRVHPDVRAVGAEPHFFDRSYDKGLAWYRDLMPRTLDGQITMEKTPSYFVTREAPARISAMSKDTKLIVVVRDPVTRAISDYTQTLSKRPDIPTFESLTFKNRTAGLIDTSWSAIQIGIYAKHLEHWLRHFPIRQMLFVSGERLISDPAGELGRVQDFLGLKRIITDKHFYFNKTKGFPCLKKAEGSSRPHCLGKTKGRTHPEIDREVVRRLREFYRPFNLKFYQMTGHDFGWDG

SEQ ID NO: 37751 - protein, 204 aa, Homo sapiens
  Payload ID: 7499
  Gene Symbol: HS3ST3A1
  Gene Name: heparan sulfate (glucosamine) 3-O-sulfotransferase 3A1
  ENSP ID: ENSP00000462696
MPRTLDGQITMEKTPSYFVTREAPARISAMSKDTKLIVVVRDPVTRAISDYTQTLSKRPDIPTFESLTFKNRTAGLIDTSWSAIQIGIYAKHLEHWLRHFPIRQMLFVSGERLISDPAGELGRVQDFLGLKRIITDKHFYFNKTKGFPCLKKAEGSSRPHCLGKTKGRTHPEIDREVVRRLREFYRPFNLKFYQMTGHDFGWDG

SEQ ID NO: 37752 - protein, 390 aa, Homo sapiens
  Payload ID: 7500
  Gene Symbol: HS3ST3B1
  Gene Name: heparan sulfate (glucosamine) 3-O-sulfotransferase 3B1
  Uniprot ID: Q9Y662
  ENSP ID: ENSP00000354213
MGQRLSGGRSCLDVPGRLLPQPPPPPPPVRRKLALLFAMLCVWLYMFLYSCAGSCAAAPGLLLLGSGSRAAHDPPALATAPDGTPPRLPFRAPPATPLASGKEMAEGAASPEEQSPEVPDSPSPISSFFSGSGSKQLPQAIIIGVKKGGTRALLEFLRVHPDVRAVGAEPHFFDRSYDKGLAWYRDLMPRTLDGQITMEKTPSYFVTREAPARISAMSKDTKLIVVVRDPVTRAISDYTQTLSKRPDIPTFESLTFKNRTAGLIDTSWSAIQIGIYAKHLEHWLRHFPIRQMLFVSGERLISDPAGELGRVQDFLGLKRIITDKHFYFNKTKGFPCLKKAEGSSRPHCLGKTKGRTHPEIDREVVRRLREFYRPFNLKFYQMTGHDFGWD

SEQ ID NO: 37753 - protein, 390 aa, Homo sapiens; identical to SEQ ID NO: 37752
  Payload ID: 7500
  Gene Symbol: HS3ST3B1
  Gene Name: heparan sulfate (glucosamine) 3-O-sulfotransferase 3B1
  Uniprot ID: Q9Y662
  ENSP ID: ENSP00000436078

SEQ ID NO: 37754 - protein, 456 aa, Homo sapiens
  Payload ID: 7501
  Gene Symbol: HS3ST4
  Gene Name: heparan sulfate (glucosamine) 3-O-sulfotransferase 4
  Uniprot ID: Q9Y661
  ENSP ID: ENSP00000330606
MARWPAPPPPPPPPPPLAAPPPPGASAKGPPARKLLFMCTLSLSVTYLCYSLLGGSGSLQFPLALQESPGAAAEPPPSPPPPSLLPTPVRLGAPSQPPAPPPLDNASHGEPPEPPEQPAAPGTDGWGLPSGGGGAQDAWLRTPLAPSEMITAQSALPEREAQESSTTDEDLAGRRAANGSSERGGAVSTPDYGEKKLPQALIIGVKKGGTRALLEAIRVHPDVRAVGVEPHFFDRNYEKGLEWYRNVMPKTLDGQITMEKTPSYFVTNEAPKRIHSMAKDIKLIVVVRNPVTRAISDYTQTLSKKPEIPTFEVLAFKNRTLGLIDASWSAIRIGIYALHLENWLQYFPLSQILFVSGERLIVDPAGEMAKVQDFLGLKRVVTEKHFYFNKTKGFPCLKKPEDSSAPRCLGKSKGRTHPRIDPDVIHRLRKFYKPFNLMFYQMTGQDFQWEQEEGDK

SEQ ID NO: 37755 - protein, 346 aa, Homo sapiens
  Payload ID: 7502
  Gene Symbol: HS3ST5
  Gene Name: heparan sulfate (glucosamine) 3-O-sulfotransferase 5
  Uniprot ID: Q8IZT8
  ENSP ID: ENSP00000427888
MLFKQQAWLRQKLLVLGSLAVGSLLYLVARVGSLDRLQPICPIEGRLGGARTQAEFPLRALQFKRGLLHEFRKGNASKEQVRLHDLVQQLPKAIIIGVRKGGTRALLEMLNLHPAVVKASQEIHFFDNDENYGKGIEWYRKKMPFSYPQQITIEKSPAYFITEEVPERIYKMNSSIKLLIIVREPTTRAISDYTQVLEGKERKNKTYYKFEKLAIDPNTCEVNTKYKAVRTSIYTKHLERWLKYFPIEQFHVVDGDRLITEPLPELQLVEKFLNLPPRISQYNLYFNATRGFYCLRFNIIFNKCLAGSKGRIHPEVDPSVITKLRKFFHPFNQKFYQITGRTLNWP

SEQ ID NO: 37756 - protein, 346 aa, Homo sapiens; identical to SEQ ID NO: 37755
  Payload ID: 7502
  Gene Symbol: HS3ST5
  Gene Name: heparan sulfate (glucosamine) 3-O-sulfotransferase 5
  Uniprot ID: Q8IZT8
  ENSP ID: ENSP00000440332

SEQ ID NO: 37757 - protein, 342 aa, Homo sapiens
  Payload ID: 7503
  Gene Symbol: HS3ST6
  Gene Name: heparan sulfate (glucosamine) 3-O-sulfotransferase 6
  Uniprot ID: Q96QI5
  ENSP ID: ENSP00000293937
MAGSGGLGGGAGGGQGAGAGQGAALRASRAPMLLVALVLGAYCLCALPGRCPPAARAPAPAPAPSEPSSSVHRPGAPGLPLASGPGRRRFPQALIVGVKKGGTRALLEFLRLHPDVRALGSEPHFFDRCYERGLAWYRSLMPRTLDGQITMEKTPSYFVTREAPRRIHAMSPDTKLIVVVRNPVTRAISDYAQTLSKTPGLPSFRALAFRHGLGPVDTAWSAVRIGLYAQHLDHWLRYFPLSHFLFVSGERLVSDPAGEVGRVQDFLGLKRVVTDKHFYFNATKGFPCLKKAQGGSRPRCLGKSKGRPHPRVPQALVRRLQEFYRPFNRRFYQMTGQDFGWG

SEQ ID NO: 37758 - protein, 342 aa, Homo sapiens; identical to SEQ ID NO: 37757
  Payload ID: 7503
  Gene Symbol: HS3ST6
  Gene Name: heparan sulfate (glucosamine) 3-O-sulfotransferase 6
  Uniprot ID: Q96QI5
  ENSP ID: ENSP00000416741

SEQ ID NO: 37759 - protein, 356 aa, Homo sapiens
  Payload ID: 7504
  Gene Symbol: HS2ST1
  Gene Name: heparan sulfate 2-O-sulfotransferase 1
  Uniprot ID: Q7LGA3
  ENSP ID: ENSP00000359581
MGLLRIMMPPKLQLLAVVAFAVAMLFLENQIQKLEESRSKLERAIARHEVREIEQRHTMDGPRQDATLDEEEDMVIIYNRVPKTASTSFTNIAYDLCAKNKYHVLHINTTKNNPVMSLQDQVRFVKNITSWKEMKPGFYHGHVSYLDFAKFGVKKKPIYINVIRDPIERLVSYYYFLRFGDDYRPGLRRRKQGDKKTFDECVAEGGSDCAPEKLWLQIPFFCGHSSECWNVGSRWAMDQAKYNLINEYFLVGVTEELEDFIMLLEAALPRFFRGATELYRTGKKSHLRKTTEKKLPTKQTIAKLQQSDIWKMENEFYEFALEQFQFIRAHAVREKDGDLYILAQNFFYEKIYPKSN

SEQ ID NO: 37760 - protein, 229 aa, Homo sapiens
  Payload ID: 7504
  Gene Symbol: HS2ST1
  Gene Name: heparan sulfate 2-O-sulfotransferase 1
  Uniprot ID: Q7LGA3
  ENSP ID: ENSP00000359582
MGLLRIMMPPKLQLLAVVAFAVAMLFLENQIQKLEESRSKLERAIARHEVREIEQRHTMDGPRQDATLDEEEDMVIIYNRVPKTASTSFTNIAYDLCAKNKYHVLHINTTKNNPVMSLQDQVRFVKNITSWKEMKPGFYHGHVSYLDFAKFGVKKKPIYINVIRDPIERLVSYYYFLRFGDDYRPGLRRRKQGDKKTFDECVAEGGSDCAPEKLWLQIPFFCGHSSECW

SEQ ID NO: 37761 - protein, 111 aa, Homo sapiens
  Payload ID: 7504
  Gene Symbol: HS2ST1
  Gene Name: heparan sulfate 2-O-sulfotransferase 1
  ENSP ID: ENSP00000467253
MDGPRQDATLDEEEDMVIIYNRVPKTASTSFTNIAYDLCAKNKYHVLHINTTKNNPVMSLQDQVRFVKNITSWKEMKPGFYHGHVSYLDFAKFGVKKKPIYINVIRDPIER

SEQ ID NO: 37762 - protein, 411 aa, Homo sapiens
  Payload ID: 7505
  Gene Symbol: HS6ST1
  Gene Name: heparan sulfate 6-O-sulfotransferase 1
  Uniprot ID: O60243
  ENSP ID: ENSP00000259241
MRRRRAGGRTMVERASKFVLVVAGSVCFMLILYQYAGPGLSLGAPGGRAPPDDLDLFPTPDPHYEKKYYFPVRELERSLRFDMKGDDVIVFLHIQKTGGTTFGRHLVQNVRLEVPCDCRPGQKKCTCYRPNRRETWLFSRFSTGWSCGLHADWTELTNCVPGVLDRRDSAALRTPRKFYYITLLRDPVSRYLSEWRHVQRGATWKTSLHMCDGRTPTPEELPPCYEGTDWSGCTLQEFMDCPYNLANNRQVRMLADLSLVGCYNLSFIPEGKRAQLLLESAKKNLRGMAFFGLTEFQRKTQYLFERTFNLKFIRPFMQYNSTRAGGVEVDEDTIRRIEELNDLDMQLYDYAKDLFQQRYQYKRQLERREQRLRSREERLLHRAKEALPREDADEPGRVPTEDYMSHIIEKW

SEQ ID NO: 37763 - protein, 645 aa, Homo sapiens
  Payload ID: 7506
  Gene Symbol: HS6ST2
  Gene Name: heparan sulfate 6-O-sulfotransferase 2
  Uniprot ID: Q96MM7
  ENSP ID: ENSP00000359870
MALPACAVREFEPPRQPERGAPVRTTCPRRHSRVEAELAASRPGSVAASVRAGPPRGVSHGFHTRPLLDKPRKASSSLAGAACAPLFALLSRGRRRRMHVLRRRWDLGSLCRALLTRGLAALGHSLKHVLGAIFSKIFGPMASVGNMDEKSNKLLLALVMLFLFAVIVLQYVCPGTECQLLRLQAFSSPVPDPYRSEDESSARFVPRYNFTRGDLLRKVDFDIKGDDLIVFLHIQKTGGTTFGRHLVRNIQLEQPCECRVGQKKCTCHRPGKRETWLFSRFSTGWSCGLHADWTELTSCVPSVVDGKRDARLRPSRWRIFQILDAASKDKRGSPNTNAGANSPSSTKTRNTSKSGKNFHYITILRDPVSRYLSEWRHVQRGATWKASLHVCDGRPPTSEELPSCYTGDDWSGCPLKEFMDCPYNLANNRQVRMLSDLTLVGCYNLSVMPEKQRNKVLLESAKSNLKHMAFFGLTEFQRKTQYLFEKTFNMNFISPFTQYNTTRASSVEINEEIQKRIEGLNFLDMELYSYAKDLFLQRYQFMRQKEHQEARRKRQEQRKFLKGRLLQTHFQSQGQGQSQNPNQNQSQNPNPNANQNLTQNLMQNLTQSLSQKENRESPKQNSGKEQNDNTSNGTNDYIGSVEKWR

SEQ ID NO: 37764 - protein, 605 aa, Homo sapiens
  Payload ID: 7506
  Gene Symbol: HS6ST2
  Gene Name: heparan sulfate 6-O-sulfotransferase 2
  Uniprot ID: Q96MM7
  ENSP ID: ENSP00000359873
MALPACAVREFEPPRQPERGAPVRTTCPRRHSRVEAELAASRPGSVAASVRAGPPRGVSHGFHTRPLLDKPRKASSSLAGAACAPLFALLSRGRRRRMHVLRRRWDLGSLCRALLTRGLAALGHSLKHVLGAIFSKIFGPMASVGNMDEKSNKLLLALVMLFLFAVIVLQYVCPGTECQLLRLQAFSSPVPDPYRSEDESSARFVPRYNFTRGDLLRKVDFDIKGDDLIVFLHIQKTGGTTFGRHLVRNIQLEQPCECRVGQKKCTCHRPGKRETWLFSRFSTGWSCGLHADWTELTSCVPSVVDGKRDARLRPSRNFHYITILRDPVSRYLSEWRHVQRGATWKASLHVCDGRPPTSEELPSCYTGDDWSGCPLKEFMDCPYNLANNRQVRMLSDLTLVGCYNLSVMPEKQRNKVLLESAKSNLKHMAFFGLTEFQRKTQYLFEKTFNMNFISPFTQYNTTRASSVEINEEIQKRIEGLNFLDMELYSYAKDLFLQRYQFMRQKEHQEARRKRQEQRKFLKGRLLQTHFQSQGQGQSQNPNQNQSQNPNPNANQNLTQNLMQNLTQSLSQKENRESPKQNSGKEQNDNTSNGTNDYIGSVEKWR

SEQ ID NO: 37765 - protein, 605 aa, Homo sapiens; identical to SEQ ID NO: 37764
  Payload ID: 7506
  Gene Symbol: HS6ST2
  Gene Name: heparan sulfate 6-O-sulfotransferase 2
  Uniprot ID: Q96MM7
  ENSP ID: ENSP00000384013

SEQ ID NO: 37766 - protein, 645 aa, Homo sapiens; identical to SEQ ID NO: 37763
  Payload ID: 7506
  Gene Symbol: HS6ST2
  Gene Name: heparan sulfate 6-O-sulfotransferase 2
  Uniprot ID: Q96MM7
  ENSP ID: ENSP00000429473

SEQ ID NO: 37767 - protein, 471 aa, Homo sapiens
  Payload ID: 7507
  Gene Symbol: HS6ST3
  Gene Name: heparan sulfate 6-O-sulfotransferase 3
  Uniprot ID: Q8IZP7
  ENSP ID: ENSP00000365895
MDERFNKWLLTPVLTLLFVVIMYQYVSPSCTSSCTNFGEQPRAGEAGPPAVPGPARRAQAPPEEWERRPQLPPPPRGPPEGPRGAAAPEEEDEEPGDPREGEEEEEEDEPDPEAPENGSLPRFVPRFNFSLKDLTRFVDFNIKGRDVIVFLHIQKTGGTTFGRHLVKNIRLEQPCSCKAGQKKCTCHRPGKKETWLFSRFSTGWSCGLHADWTELTNCVPAIMEKKDCPRNHSHTRNFYYITMLRDPVSRYLSEWKHVQRGATWKTSLHMCDGRSPTPDELPTCYPGDDWSGVSLREFMDCTYNLANNRQVRMLADLSLVGCYNLTFMNESERNTILLQSAKNNLKNMAFFGLTEFQRKTQFLFERTFNLKFISPFTQFNITRASNVEINEGARQRIEDLNFLDMQLYEYAKDLFQQRYHHTKQLEHQRDRQKRREERRLQREHRDHQWPKEDGAAEGTVTEDYNSQVVRW

SEQ ID NO: 37768 - protein, 236 aa, Homo sapiens
  Payload ID: 7507
  Gene Symbol: HS6ST3
  Gene Name: heparan sulfate 6-O-sulfotransferase 3
  ENSP ID: ENSP00000483366
RNFYYITMLRDPVSRYLSEWKHVQRGATWKTSLHMCDGRSPTPDELPTCYPGDDWSGVSLREFMDCTYNLANNRQVRMLADLSLVGCYNLTFMNESERNTILLQSAKNNLKNMAFFGLTEFQRKTQFLFERTFNLKFISPFTQFNITRASNVEINEGARQRIEDLNFLDMQLYEYAKDLFQQRYHHTKQLEHQRDRQKRREERRLQREHRDHQWPKEDGAAEGTVTEDYNSQVVRW

SEQ ID NO: 37769 - protein, 109 aa, Homo sapiens
  Payload ID: 7508
  Gene Symbol: HSPG2
  Gene Name: heparan sulfate proteoglycan 2
  ENSP ID: ENSP00000363808
  MOD_RES (1)..(1): Any amino acid
XGTPPLTFQWSRVGSSLPGRATARNELLHFERAAPEDSGRYRCRVTNKVGSAEAFAQLLVQESRTWTRAAKGRIYARPMDLGGRPRPVPSWLSKVGGWLQASAKSREQR

SEQ ID NO: 37770 - protein, 4391 aa, Homo sapiens
  Payload ID: 7508
  Gene Symbol: HSPG2
  Gene Name: heparan sulfate proteoglycan 2
  Uniprot ID: P98160
  ENSP ID: ENSP00000363827
MGWRAAGALLLALLLHGRLLAVTHGLRAYDGLSLPEDIETVTASQMRWTHSYLSDDEDMLADSISGDDLGSGDLGSGDFQMVYFRALVNFTRSIEYSPQLEDAGSREFREVSEAVVDTLESEYLKIPGDQVVSVVFIKELDGWVFVELDVGSEGNADGAQIQEMLLRVISSGSVASYVTSPQGFQFRRLGTVPQFPRACTEAEFACHSYNECVALEYRCDRRPDCRDMSDELNCEEPVLGISPTFSLLVETTSLPPRPETTIMRQPPVTHAPQPLLPGSVRPLPCGPQEAACRNGHCIPRDYLCDGQEDCEDGSDELDCGPPPPCEPNEFPCGNGHCALKLWRCDGDFDCEDRTDEANCPTKRPEEVCGPTQFRCVSTNMCIPASFHCDEESDCPDRSDEFGCMPPQVVTPPRESIQASRGQTVTFTCVAIGVPTPIINWRLNWGHIPSHPRVTVTSEGGRGTLIIRDVKESDQGAYTCEAMNARGMVFGIPDGVLELVPQRGPCPDGHFYLEHSAACLPCFCFGITSVCQSTRRFRDQIRLRFDQPDDFKGVNVTMPAQPGTPPLSSTQLQIDPSLHEFQLVDLSRRFLVHDSFWALPEQFLGNKVDSYGGSLRYNVRYELARGMLEPVQRPDVVLMGAGYRLLSRGHTPTQPGALNQRQVQFSEEHWVHESGRPVQRAELLQVLQSLEAVLIQTVYNTKMASVGLSDIAMDTTVTHATSHGRAHSVEECRCPIGYSGLSCESCDAHFTRVPGGPYLGTCSGCNCNGHASSCDPVYGHCLNCQHNTEGPQCNKCKAGFFGDAMKATATSCRPCPCPYIDASRRFSDTCFLDTDGQATCDACAPGYTGRRCESCAPGYEGNPIQPGGKCRPVNQEIVRCDERGSMGTSGEACRCKNNVVGRLCNECADGSFHLSTRNPDGCLKCFCMGVSRHCTSSSWSRAQLHGASEEPGHFSLTNAASTHTTNEGIFSPTPGELGFSSFHRLLSGPYFWSLPSRFLGDKVTSYGGELRFTVTQRSQPGSTPLHGQPLVVLQGNNIILEHHVAQEPSPGQPSTFIVPFREQAWQRPDGQPATREHLLMALAGIDTLLIRASYAQQPAESRVSGISMDVAVPEETGQDPALEVEQCSCPPGYRGPSCQDCDTGYTRTPSGLYLGTCERCSCHGHSEACEPETGACQGCQHHTEGPRCEQCQPGYYGDAQRGTPQDCQLCPCYGDPAAGQAAHTCFLDTDGHPTCDACSPGHSGRHCERCAPGYYGNPSQGQPCQRDSQVPGPIGCNCDPQGSVSSQCDAAGQCQCKAQVEGLTCSHCRPHHFHLSASNPDGCLPCFCMGITQQCASSAYTRHLISTHFAPGDFQGFALVNPQRNSRLTGEFTVEPVPEGAQLSFGNFAQLGHESFYWQLPETYQGDKVAAYGGKLRYTLSYTAGPQGSPLSDPDVQITGNNIMLVASQPALQGPERRSYEIMFREEFWRRPDGQPATREHLLMALADLDELLIRATFSSVPLAASISAVSLEVAQPGPSNRPRALEVEECRCPPGYIGLSCQDCAPGYTRTGSGLYLGHCELCECNGHSDLCHPETGACSQCQHNAAGEFCELCAPGYYGDATAGTPEDCQPCACPLTNPENMFSRTCESLGAGGYRCTACEPGYTGQYCEQCGPGYVGNPSVQGGQCLPETNQAPLVVEVHPARSIVPQGGSHSLRCQVSGSPPHYFYWSREDGRPVPSGTQQRHQGSELHFPSVQPSDAGVYICTCRNLHQSNTSRAELLVTEAPSKPITVTVEEQRSQSVRPGADVTFICTAKSKSPAYTLVWTRLHNGKLPTRAMDFNGILTIRNVQLSDAGTYVCTGSNMFAMDQGTATLHVQASGTLSAPVVSIHPPQLTVQPGQLAEFRCSATGSPTPTLEWTGGPGGQLPAKAQIHGGILRLPAVEPTDQAQYLCRAHSSAGQQVARAVLHVHGGGGPRVQVSPERTQVHAGRTVRLYCRAAGVPSATITWRKEGGSLPPQARSERTDIATLLIPAITTADAGFYLCVATSPAGTAQARIQVVVLSASDASPPPVKIESSSPSVTEGQTLDLNCVVAGSAHAQVTWYRRGGSLPPHTQVHGSRLRLPQVSPADSGEYVCRVENGSGPKEASITVSVLHGTHSGPSYTPVPGSTRPIRIEPSSSHVAEGQTLDLNCVVPGQAHAQVTWHKRGGSLPARHQTHGSLLRLHQVTPADSGEYVCHVVGTSGPLEASVLVTIEASVIPGPIPPVRIESSSSTVAEGQTLDLSCVVAGQAHAQVTWYKRGGSLPARHQVRGSRLYIFQASPADAGQYVCRASNGMEASITVTVTGTQGANLAYPAGSTQPIRIEPSSSQVAEGQTLDLNCVVPGQSHAQVTWHKRGGSLPVRHQTHGSLLRLYQASPADSGEYVCRVLGSSVPLEASVLVTIEPAGSVPALGVTPTVRIESSSSQVAEGQTLDLNCLVAGQAHAQVTWHKRGGSLPARHQVHGSRLRLLQVTPADSGEYVCRVVGSSGTQEASVLVTIQQRLSGSHSQGVAYPVRIESSSASLANGHTLDLNCLVASQAPHTITWYKRGGSLPSRHQIVGSRLRIPQVTPADSGEYVCHVSNGAGSRETSLIVTIQGSGSSHVPSVSPPIRIESSSPTVVEGQTLDLNCVVARQPQAIITWYKRGGSLPSRHQTHGSHLRLHQMSVADSGEYVCRANNNIDALEASIVISVSPSAGSPSAPGSSMPIRIESSSSHVAEGETLDLNCVVPGQAHAQVTWHKRGGSLPSHHQTRGSRLRLHHVSPADSGEYVCRVMGSSGPLEASVLVTIEASGSSAVHVPAPGGAPPIRIEPSSSRVAEGQTLDLKCVVPGQAHAQVTWHKRGGNLPARHQVHGPLLRLNQVSPADSGEYSCQVTGSSGTLEASVLVTIEPSSPGPIPAPGLAQPIYIEASSSHVTEGQTLDLNCVVPGQAHAQVTWYKRGGSLPARHQTHGSQLRLHLVSPADSGEYVCRAASGPGPEQEASFTVTVPPSEGSSYRLRSPVISIDPPSSTVQQGQDASFKCLIHDGAAPISLEWKTRNQELEDNVHISPNGSIITIVGTRPSNHGTYRCVASNAYGVAQSVVNLSVHGPPTVSVLPEGPVWVKVGKAVTLECVSAGEPRSSARWTRISSTPAKLEQRTYGLMDSHAVLQISSAKPSDAGTYVCLAQNALGTAQKQVEVIVDTGAMAPGAPQVQAEEAELTVEAGHTATLRCSATGSPAPTIHWSKLRSPLPWQHRLEGDTLIIPRVAQQDSGQYICNATSPAGHAEATIILHVESPPYATTVPEHASVQAGETVQLQCLAHGTPPLTFQWSRVGSSLPGRATARNELLHFERAAPEDSGRYRCRVTNKVGSAEAFAQLLVQGPPGSLPATSIPAGSTPTVQVTPQLETKSIGASVEFHCAVPSDRGTQLRWFKEGGQLPPGHSVQDGVLRIQNLDQSCQGTYICQAHGPWGKAQASAQLVIQALPSVLINIRTSVQTVVVGHAVEFECLALGDPKPQVTWSKVGGHLRPGIVQSGGVVRIAHVELADAGQYRCTATNAAGTTQSHVLLLVQALPQISMPQEVRVPAGSAAVFPCIASGYPTPDISWSKLDGSLPPDSRLENNMLMLPSVRPQDAGTYVCTATNRQGKVKAFAHLQVPERVVPYFTQTPYSFLPLPTIKDAYRKFEIKITFRPDSADGMLLYNGQKRVPGSPTNLANRQPDFISFGLVGGRPEFRFDAGSGMATIRHPTPLALGHFHTVTLLRSLTQGSLIVGDLAPVNGTSQGKFQGLDLNEELYLGGYPDYGAIPKAGLSSGFIGCVRELRIQGEEIVFHDLNLTAHGISHCPTCRDRPCQNGGQCHDSESSSYVCVCPAGFTGSRCEHSQALHCHPEACGPDATCVNRPDGRGYTCRCHLGRSGLRCEEGVTVTTPSLSGAGSYLALPALTNTHHELRLDVEFKPLAPDGVLLFSGGKSGPVEDFVSLAMVGGHLEFRYELGSGLAVLRSAEPLALGRWHRVSAERLNKDGSLRVNGGRPVLRSSPGKSQGLNLHTLLYLGGVEPSVPLSPATNMSAHFRGCVGEVSVNGKRLDLTYSFLGSQGIGQCYDSSPCERQPCQHGATCMPAGEYEFQCLCRDGFKGDLCEHEENPCQLREPCLHGGTCQGTRCLCLPGFSGPRCQQGSGHGIAESDWHLEGSGGNDAPGQYGAYFHDDGFLAFPGHVFSRSLPEVPETIELEVRTSTASGLLLWQGVEVGEAGQGKDFISLGLQDGHLVFRYQLGSGEARLVSEDPINDGEWHRVTALREGRRGSIQVDGEELVSGRSPGPNVAVNAKGSVYIGGAPDVATLTGGRFSSGITGCVKNLVLHSARPGAPPPQPLDLQHRAQAGANTRPCPS

SEQ ID NO: 37771 - protein, 197 aa, Homo sapiens
  Payload ID: 7508
  Gene Symbol: HSPG2
  Gene Name: heparan sulfate proteoglycan 2
  ENSP ID: ENSP00000397573
  MOD_RES (1)..(1): Any amino acid
XTPSGLYLGTCERCSCHGHSEACEPETGACQGCQHHTEGPRCEQCQPGYYGDAQRGTPQDCQLCPCYGDPAAGQAAHTCFLDTDGHPTCDACSPGHSGRHCERCAPGYYGNPSQGQPCQRDSQVPGPIGCNCDPQGSVSSQCDAAGQCQCKVSPNPCPCGACSAPLPRPCGEIRQHLVEAETWAWGAGHGGQGRGCP

SEQ ID NO: 37772 - protein, 307 aa, Homo sapiens
  Payload ID: 7508
  Gene Symbol: HSPG2
  Gene Name: heparan sulfate proteoglycan 2
  ENSP ID: ENSP00000489161
  MOD_RES (1)..(1): Any amino acid
XNMLMLPSVRPQDAGTYVCTATNRQGKVKAFAHLQVPERVVPYFTQTPYSFLPLPTIKDAYRKFEIKITFRPDSADGLLLYSGMLLYNGQKRVPGSPTNLANRQPDFISFGLVGGRPEFRFDAGSGMATIRHPTPLALGHFHTVTLLRSLTQGSLIVGDLAPVNGTSQGKFQGLDLNEELYLGGYPDYGAIPKAGLSSGFIGCVRELRIQGEEIVFHDLNLTAHGISHCPTCRDRPCQNGGQCHDSESSSYVCVCPAGFTGSRCEHSQALHCHPEACGPDATCVNRPDGRGYTCRCHLGRSGLRCEE

SEQ ID NO: 37773 - protein, 635 aa, Homo sapiens
  Payload ID: 7509
  Gene Symbol: HGSNAT
  Gene Name: heparan-alpha-glucosaminide N-acetyltransferase
  Uniprot ID: Q68CP4
  ENSP ID: ENSP00000368965
MSGAGRALAALLLAASVLSAALLAPGGSSGRDAQAAPPRDLDKKRHAELKMDQALLLIHNELLWTNLTVYWKSECCYHCLFQVLVNVPQSPKAGKPSAAAASVSTQHGSILQLNDTLEEKEVCRLEYRFGEFGNYSLLVKNIHNGVSEIACDLAVNEDPVDSNLPVSIAFLIGLAVIIVISFLRLLLSLDDFNNWISKAISSRETDRLINSELGSPSRTDPLDGDVQPATWRLSALPPRLRSVDTFRGIALILMVFVNYGGGKYWYFKHASWNGLTVADLVFPWFVFIMGSSIFLSMTSILQRGCSKFRLLGKIAWRSFLLICIGIIIVNPNYCLGPLSWDKVRIPGVLQRLGVTYFVVAVLELLFAKPVPEHCASERSCLSLRDITSSWPQWLLILVLEGLWLGLTFLLPVPGCPTGYLGPGGIGDFGKYPNCTGGAAGYIDRLLLGDDHLYQHPSSAVLYHTEVAYDPEGILGTINSIVMAFLGVQAGKILLYYKARTKDILIRFTAWCCILGLISVALTKVSENEGFIPVNKNLWSLSYVTTLSSFAFFILLVLYPVVDVKGLWTGTPFFYPGMNSILVYVGHEVFENYFPFQWKLKDNQSHKEHLTQNIVATALWVLIAYILYRKKIFWKI

SEQ ID NO: 37774 - protein, 253 aa, Homo sapiens
  Payload ID: 7509
  Gene Symbol: HGSNAT
  Gene Name: heparan-alpha-glucosaminide N-acetyltransferase
  ENSP ID: ENSP00000428322
  MOD_RES (1)..(1): Any amino acid
XILQRGCSKFRLLGKIAWRSFLLICIGIIIVNPNYCLGPLSWDKVRIPGVLQRLGVTYFVVAVLELLFAKPVPEHCASERSCLSLRDITSSWPQWLLILVLEGLWLGLTFLLPVPGCPTGYLGPGGIGDFGKYPNCTGGAAGYIDRLLLGDDHLYQHPSSAVLYHTEVAYDPEGILGTINSIVMAFLGVQCCPDWVTKQACLTEPLSPLWRILFGPCLEVRATEPAQAGKILLYYKARTKDILIRFTAWCCIL

SEQ ID NO: 37775 - protein, 352 aa, Homo sapiens
  Payload ID: 7509
  Gene Symbol: HGSNAT
  Gene Name: heparan-alpha-glucosaminide N-acetyltransferase
  ENSP ID: ENSP00000429029
MAAGQRRSSLSRLGSQAEGLLTSQTMGGQAETLLTSQTGWLLGRGCNLGSPGGQVSWDKVRIPGVLQRLGVTYFVVAVLELLFAKPVPEHCASERSCLSLRDITSSWPQWLLILVLEGLWLGLTFLLPVPGCPTGYLGPGGIGDFGKYPNCTGGAAGYIDRLLLGDDHLYQHPSSAVLYHTEVAYDPEGILGTINSIVMAFLGVQAGKILLYYKARTKDILIRFTAWCCILGLISVALTKVSENEGFIPVNKNLWSLSYVTTLSSFAFFILLVLYPVVDVKGLWTGTPFFYPGMNSILVYVGHEVFENYFPFQWKLKDNQSHKEHLTQNIVATALWVLIAYILYRKKIFWKI

SEQ ID NO: 37776 - protein, 172 aa, Homo sapiens
  Payload ID: 7509
  Gene Symbol: HGSNAT
  Gene Name: heparan-alpha-glucosaminide N-acetyltransferase
  ENSP ID: ENSP00000429109
MDQALLLIHNELLWTNLTVYWKSECCYHCLFQVLVNVPQSPKAGKPSAAAASVSTQHGSILQLNDTLEEKEVCRLEYRFGEFGNYSLLVKNIHNGVSEIACDLAVNEDPVDSNLPVSIAFLIGLAVIIVISFLRLLLRVLLCHPGWSAVAPSRLTPSSASRVHTILLPQPPE

SEQ ID NO: 37777 - protein, 97 aa, Homo sapiens
  Payload ID: 7509
  Gene Symbol: HGSNAT
  Gene Name: heparan-alpha-glucosaminide N-acetyltransferase
  ENSP ID: ENSP00000430032
MSGAGRALAALLLAASVLSAALLAPGGSSGRDAQAAPPRDLDKKRHAELKMDQALLLIHNELLWTNLTVYWKSECCYHVGIQIWRIWKLFSLGKEHP

SEQ ID NO: 37778 - protein, 184 aa, Homo sapiens
  Payload ID: 7509
  Gene Symbol: HGSNAT
  Gene Name: heparan-alpha-glucosaminide N-acetyltransferase
  ENSP ID: ENSP00000430151
MVFVNYGGGKYWYFKHASWNGLTVADLVFPWFVFIMGSSIFLSMTSILQRGCSKFRLLGKIAWRSFLLICIGIIIVNPNYCLGPLSWDKVRIPGVLQRLGVTYFVVAVLELLFAKPVPEHCASTGPSLLASSDPPALATQSAGITGEELPFSSRHHVQLAPVAAHPGAGRPVAGLDIPPASPWV

SEQ ID NO: 37779 - protein, 543 aa, Homo sapiens
  Payload ID: 7510
  Gene Symbol: HPSE
  Gene Name: heparanase
  Uniprot ID: Q9Y251
  ENSP ID: ENSP00000308107
MLLRSKPALPPPLMLLLLGPLGPLSPGALPRPAQAQDVVDLDFFTQEPLHLVSPSFLSVTIDANLATDPRFLILLGSPKLRTLARGLSPAYLRFGGTKTDFLIFDPKKESTFEERSYWQSQVNQDICKYGSIPPDVEEKLRLEWPYQEQLLLREHYQKKFKNSTYSRSSVDVLYTFANCSGLDLIFGLNALLRTADLQWNSSNAQLLLDYCSSKGYNISWELGNEPNSFLKKADIFINGSQLGEDFIQLHKLLRKSTFKNAKLYGPDVGQPRRKTAKMLKSFLKAGGEVIDSVTWHHYYLNGRTATKEDFLNPDVLDIFISSVQKVFQVVESTRPGKKVWLGETSSAYGGGAPLLSDTFAAGFMWLDKLGLSARMGIEVVMRQVFFGAGNYHLVDENFDPLPDYWLSLLFKKLVGTKVLMASVQGSKRRKLRVYLHCTNTDNPRYKEGDLTLYAINLHNVTKYLRLPYPFSNKQVDKYLLRPLGPHGLLSKSVQLNGLTLKMVDDQTLPPLMEKPLRPGSSLGLPAFSYSFFVIRNAKVAACI

SEQ ID NO: 37780 - protein, 543 aa, Homo sapiens; identical to SEQ ID NO: 37779
  Payload ID: 7510
  Gene Symbol: HPSE
  Gene Name: heparanase
  Uniprot ID: Q9Y251
  ENSP ID: ENSP00000384262

SEQ ID NO: 37781 - protein, 380 aa, Homo sapiens
  Payload ID: 7510
  Gene Symbol: HPSE
  Gene Name: heparanase
  Uniprot ID: Q9Y251
  ENSP ID: ENSP00000421038
MLLRSKPALPPPLMLLLLGPLGPLSPGALPRPAQAQDVVDLDFFTQEPLHLVSPSFLSVTIDANLATDPRFLILLGSPKLRTLARGLSPAYLRFGGTKTDFLIFDPKKESTFEERSYWQSQVNQDICKYGSIPPDVEEKLRLEWPYQEQLLLREHYQKKFKNSTYSRSSVDVLYTFANCSGLDLIFGLNALLRTADLQWNSSNAQLLLDYCSSKGYNISWELGNEPNSFLKKADIFINGSQLGEDFIQLHKLLRKSTFKNAKLYGPDVGQPRRKTAKMLKSFLKAGGEVIDSVTWHHYYLNGRTATKEDFLNPDVLDIFISSVQKVFQVVESTRPGKKVWLGETSSAYGGGAPLLSDTFAAGFMIIGYLFCSRNWWAPRC

SEQ ID NO: 37782 - protein, 485 aa, Homo sapiens
  Payload ID: 7510
  Gene Symbol: HPSE
  Gene Name: heparanase
  Uniprot ID: Q9Y251
  ENSP ID: ENSP00000421365
MLLRSKPALPPPLMLLLLGPLGPLSPGALPRPAQAQDVVDLDFFTQEPLHLVSPSFLSVTIDANLATDPRFLILLGSPKLRTLARGLSPAYLRFGGTKTDFLIFDPKKESTFEERSYWQSQVNQDICKYGSIPPDVEEKLRLEWPYQEQLLLREHYQKKFKNSTYSKPNSFLKKADIFINGSQLGEDFIQLHKLLRKSTFKNAKLYGPDVGQPRRKTAKMLKSFLKAGGEVIDSVTWHHYYLNGRTATKEDFLNPDVLDIFISSVQKVFQVVESTRPGKKVWLGETSSAYGGGAPLLSDTFAAGFMWLDKLGLSARMGIEVVMRQVFFGAGNYHLVDENFDPLPDYWLSLLFKKLVGTKVLMASVQGSKRRKLRVYLHCTNTDNPRYKEGDLTLYAINLHNVTKYLRLPYPFSNKQVDKYLLRPLGPHGLLSKSVQLNGLTLKMVDDQTLPPLMEKPLRPGSSLGLPAFSYSFFVIRNAKVAACI

SEQ ID NO: 37783 - protein, 168 aa, Homo sapiens
  Payload ID: 7510
  Gene Symbol: HPSE
  Gene Name: heparanase
  ENSP ID: ENSP00000421827
MLLRSKPALPPPLMLLLLGPLGPLSPGALPRPAQAQDVVDLDFFTQEPLHLVSPSFLSVTIDANLATDPRFLILLGSPKLRTLARGLSPAYLRFGGTKTDFLIFDPKKESTFEERSYWQSQVNQDICKYGSIPPDVEEKLRLEWPYQEQLLLREHYQKKFKNSTYSTS

SEQ ID NO: 37784 - protein, 469 aa, Homo sapiens
  Payload ID: 7510
  Gene Symbol: HPSE
  Gene Name: heparanase
  Uniprot ID: Q9Y251
  ENSP ID: ENSP00000423265
MLLRSKPALPPPLMLLLLGPLGPLSPGALPRPAQAQDVVDLDFFTQEPLHLVSPSFLSVTIDANLATDPRFLILLGSPKLRTLARGLSPAYLRFGGTKTDFLIFDPKKESTFEERSYWQSQVNQDICKYGSIPPDVEEKLRLEWPYQEQLLLREHYQKKFKNSTYSRSSVDVLYTFANCSGLDLIFGLNALLRTADLQWNSSNAQLLLDYCSSKGYNISWELGNEPNSFLKKADIFINGSQLGEDFIQLHKLLRKSTFKNAKLYGPDVGQPRRKTAKMLKSFLKAGGEVIDSVTWHHYYLNGRTATKEDFLNPDVLDIFISSVQKVFQDYWLSLLFKKLVGTKVLMASVQGSKRRKLRVYLHCTNTDNPRYKEGDLTLYAINLHNVTKYLRLPYPFSNKQVDKYLLRPLGPHGLLSKSVQLNGLTLKMVDDQTLPPLMEKPLRPGSSLGLPAFSYSFFVIRNAKVAACI

SEQ ID NO: 37785 - protein, 226 aa, Homo sapiens
  Payload ID: 7510
  Gene Symbol: HPSE
  Gene Name: heparanase
  ENSP ID: ENSP00000426139
MLLRSKPALPPPLMLLLLGPLGPLSPGALPRPAQAQDVVDLDFFTQEPLHLVSPSFLSVTIDANLATDPRFLILLGSPKLRTLARGLSPAYLRFGGTKTDFLIFDPKKESTFEERSYWQSQVNQDICKYGSIPPDVEEKLRLEWPYQEQLLLREHYQKKFKNSTYSRSSVDVLYTFANCSGLDLIFGLNALLRTADLQWNSSNAQLLLDYCSSKGYNISWELGNAS

SEQ ID NO: 37786 - protein, 548 aa, Homo sapiens
  Payload ID: 7511
  Gene Symbol: HPSE2
  Gene Name: heparanase 2 (inactive)
  Uniprot ID: Q8WWQ2
  ENSP ID: ENSP00000359577
MRVLCAFPEAMPSSNSRPPACLAPGALYLALLLHLSLSSQAGDRRPLPVDRAAGLKEKTLILLDVSTKNPVRTVNENFLSLQLDPSIIHDGWLDFLSSKRLVTLARGLSPAFLRFGGKRTDFLQFQNLRNPAKSRGGPGPDYYLKNYEDDIVRSDVALDKQKGCKIAQHPDVMLELQREKAAQMHLVLLKEQFSNTYSNLILTARSLDKLYNFADCSGLHLIFALNALRRNPNNSWNSSSALSLLKYSASKKYNISWELGNEPNNYRTMHGRAVNGSQLGKDYIQLKSLLQPIRIYSRASLYGPNIGRPRKNVIALLDGFMKVAGSTVDAVTWQHCYIDGRVVKVMDFLKTRLLDTLSDQIRKIQKVVNTYTPGKKIWLEGVVTTSAGGTNNLSDSYAAGFLWLNTLGMLANQGIDVVIRHSFFDHGYNHLVDQNFNPLPDYWLSLLYKRLIGPKVLAVHVAGLQRKPRPGRVIRDKLRIYAHCTNHHNHNYVRGSITLFIINLHRSRKKIKLAGTLRDKLVHQYLLQPYGQEGLKSKTQRCQYCGII

SEQ ID NO: 37787 - protein, 534 aa, Homo sapiens
  Payload ID: 7511
  Gene Symbol: HPSE2
  Gene Name: heparanase 2 (inactive)
  Uniprot ID: Q8WWQ2
  ENSP ID: ENSP00000359580
MRVLCAFPEAMPSSNSRPPACLAPGALYLALLLHLSLSSQAGDRRPLPVDRAAGLKEKTLILLDVSTKNPVRTVNENFLSLQLDPSIIHDGWLDFLSSKRLVTLARGLSPAFLRFGGKRTDFLQFQNLRNPAKSRGGPGPDYYLKNYEDDIVRSDVALDKQKGCKIAQHPDVMLELQREKAAQMHLVLLKEQFSNTYSNLILTEPNNYRTMHGRAVNGSQLGKDYIQLKSLLQPIRIYSRASLYGPNIGRPRKNVIALLDGFMKVAGSTVDAVTWQHCYIDGRVVKVMDFLKTRLLDTLSDQIRKIQKVVNTYTPGKKIWLEGVVTTSAGGTNNLSDSYAAGFLWLNTLGMLANQGIDVVIRHSFFDHGYNHLVDQNFNPLPDYWLSLLYKRLIGPKVLAVHVAGLQRKPRPGRVIRDKLRIYAHCTNHHNHNYVRGSITLFIINLHRSRKKIKLAGTLRDKLVHQYLLQPYGQEGLKSKSVQLNGQPLVMVDDGTLPELKPRPLRAGRTLVIPPVTMGFYVVKNVNALACRYR

SEQ ID NO: 37788 - protein, 592 aa, Homo sapiens
  Payload ID: 7511
  Gene Symbol: HPSE2
  Gene Name: heparanase 2 (inactive)
  Uniprot ID: Q8WWQ2
  ENSP ID: ENSP00000359583
MRVLCAFPEAMPSSNSRPPACLAPGALYLALLLHLSLSSQAGDRRPLPVDRAAGLKEKTLILLDVSTKNPVRTVNENFLSLQLDPSIIHDGWLDFLSSKRLVTLARGLSPAFLRFGGKRTDFLQFQNLRNPAKSRGGPGPDYYLKNYEDDIVRSDVALDKQKGCKIAQHPDVMLELQREKAAQMHLVLLKEQFSNTYSNLILTARSLDKLYNFADCSGLHLIFALNALRRNPNNSWNSSSALSLLKYSASKKYNISWELGNEPNNYRTMHGRAVNGSQLGKDYIQLKSLLQPIRIYSRASLYGPNIGRPRKNVIALLDGFMKVAGSTVDAVTWQHCYIDGRVVKVMDFLKTRLLDTLSDQIRKIQKVVNTYTPGKKIWLEGVVTTSAGGTNNLSDSYAAGFLWLNTLGMLANQGIDVVIRHSFFDHGYNHLVDQNFNPLPDYWLSLLYKRLIGPKVLAVHVAGLQRKPRPGRVIRDKLRIYAHCTNHHNHNYVRGSITLFIINLHRSRKKIKLAGTLRDKLVHQYLLQPYGQEGLKSKSVQLNGQPLVMVDDGTLPELKPRPLRAGRTLVIPPVTMGFYVVKNVNALACRYR

SEQ ID NO: 37789 - protein, 389 aa, Homo sapiens
  Payload ID: 7511
  Gene Symbol: HPSE2
  Gene Name: heparanase 2 (inactive)
  ENSP ID: ENSP00000384384
ARSLDKLYNFADCSGLHLIFALNALRRNPNNSWNSSSALSLLKYSASKKYNISWELGNEPNNYRTMHGRAVNGSQLGKDYIQLKSLLQPIRIYSRASLYGPNIGRPRKNVIALLDGFMKVAGSTVDAVTWQHCYIDGRVVKVMDFLKTRLLDTLSDQIRKIQKVVNTYTPGKKIWLEGVVTTSAGGTNNLSDSYAAGFLWLNTLGMLANQGIDVVIRHSFFDHGYNHLVDQNFNPLPDYWLSLLYKRLIGPKVLAVHVAGLQRKPRPGRVIRDKLRIYAHCTNHHNHNYVRGSITLFIINLHRSRKKIKLAGTLRDKLVHQYLLQPYGQEGLKSKSVQLNGQPLVMVDDGTLPELKPRPLRAGRTLVIPPVTMGFYVVKNVNALACRYR

SEQ ID NO: 37790 - protein, 149 aa, Homo sapiens
  Payload ID: 7511
  Gene Symbol: HPSE2
  Gene Name: heparanase 2 (inactive)
  ENSP ID: ENSP00000484672
MRVLCAFPEAMPSSNSRPPACLAPGALYLALLLHLSLSSQAGDRRPLPVDRAAGLKEKTLILLDVSTKNPVRTVNENFLSLQLDPSIIHDGWLDFLSSKRLVTLARGLSPAFLRFGGKRTDFLQFQNLRNPAKSRGGPGPDYYLKNYED

SEQ ID NO: 37791 - protein, 480 aa, Homo sapiens
  Payload ID: 7511
  Gene Symbol: HPSE2
  Gene Name: heparanase 2 (inactive)
  Uniprot ID: Q8WWQ2
  ENSP ID: ENSP00000485916
MRVLCAFPEAMPSSNSRPPACLAPGALYLALLLHLSLSSQAGDRRPLPVDRAAGLKEKTLILLDVSTKNPVRTVNENFLSLQLDPSIIHDGWLDFLSSKRLVTLARGLSPAFLRFGGKRTDFLQFQNLRNPAKSRGGPGPDYYLKNYEDEPNNYRTMHGRAVNGSQLGKDYIQLKSLLQPIRIYSRASLYGPNIGRPRKNVIALLDGFMKVAGSTVDAVTWQHCYIDGRVVKVMDFLKTRLLDTLSDQIRKIQKVVNTYTPGKKIWLEGVVTTSAGGTNNLSDSYAAGFLWLNTLGMLANQGIDVVIRHSFFDHGYNHLVDQNFNPLPDYWLSLLYKRLIGPKVLAVHVAGLQRKPRPGRVIRDKLRIYAHCTNHHNHNYVRGSITLFIINLHRSRKKIKLAGTLRDKLVHQYLLQPYGQEGLKSKSVQLNGQPLVMVDDGTLPELKPRPLRAGRTLVIPPVTMGFYVVKNVNALACRYR

SEQ ID NO: 37792 - protein, 208 aa, Homo sapiens
  Payload ID: 7512
  Gene Symbol: HBEGF
  Gene Name: heparin-binding EGF-like growth factor
  Uniprot ID: Q99075
  ENSP ID: ENSP00000230990
MKLLPSVVLKLFLAAVLSALVTGESLERLRRGLAAGTSNPDPPTVSTDQLLPLGGGRDRKVRDLQEADLDLLRVTLSSKPQALATPNKEEHGKRKKKGKGLGKKRDPCLRKYKDFCIHGECKYVKELRAPSCICHPGYHGERCHGLSLPVENRLYTYDHTTILAVVAVVLSSVCLLVIVGLLMFRYHRRGGYDVENEEKVKLGMTNSH

SEQ ID NO: 37793 - protein, 416 aa, Homo sapiens
  Payload ID: 7513
  Gene Symbol: HEPACAM
  Gene Name: hepatic and glial cell adhesion molecule
  Uniprot ID: Q14CZ8
  ENSP ID: ENSP00000298251
MKRERGALSRASRALRLAPFVYLLLIQTDPLEGVNITSPVRLIHGTVGKSALLSVQYSSTSSDRPVVKWQLKRDKPVTVVQSIGTEVIGTLRPDYRDRIRLFENGSLLLSDLQLADEGTYEVEISITDDTFTGEKTINLTVDVPISRPQVLVASTTVLELSEAFTLNCSHENGTKPSYTWLKDGKPLLNDSRMLLSPDQKVLTITRVLMEDDDLYSCMVENPISQGRSLPVKITVYRRSSLYIILSTGGIFLLVTLVTVCACWKPSKRKQKKLEKQNSLEYMDQNDDRLKPEADTLPRSGEQERKNPMALYILKDKDSPETEENPAPEPRSATEPGPPGYSVSPAVPGRSPGLPIRSARRYPRSPARSPATGRTHSSPPRAPSSPGRSRSASRTLRTAGVHIIREQDEAGPVEISA

SEQ ID NO: 37794 - protein, 295 aa, Homo sapiens
  Payload ID: 7514
  Gene Symbol: HLF
  Gene Name: hepatic leukemia factor
  Uniprot ID: Q16534
  ENSP ID: ENSP00000226067
MEKMSRPLPLNPTFIPPPYGVLRSLLENPLKLPLHHEDAFSKDKDKEKKLDDESNSPTVPQSAFLGPTLWDKTLPYDGDTFQLEYMDLEEFLSENGIPPSPSQHDHSPHPPGLQPASSAAPSVMDLSSRASAPLHPGIPSPNCMQSPIRPGQLLPANRNTPSPIDPDTIQVPVGYEPDPADLALSSIPGQEMFDPRKRKFSEEELKPQPMIKKARKVFIPDDLKDDKYWARRRKNNMAAKRSRDARRLKENQIAIRASFLEKENSALRQEVADLRKELGKCKNILAKYEARHGPL

SEQ ID NO: 37795 - protein, 210 aa, Homo sapiens
  Payload ID: 7514
  Gene Symbol: HLF
  Gene Name: hepatic leukemia factor
  Uniprot ID: Q16534
  ENSP ID: ENSP00000402496
MDLEEFLSENGIPPSPSQHDHSPHPPGLQPASSAAPSVMDLSSRASAPLHPGIPSPNCMQSPIRPGQLLPANRNTPSPIDPDTIQVPVGYEPDPADLALSSIPGQEMFDPRKRKFSEEELKPQPMIKKARKVFIPDDLKDDKYWARRRKNNMAAKRSRDARRLKENQIAIRASFLEKENSALRQEVADLRKELGKCKNILAKYEARHGPL

SEQ ID NO: 37796 - protein, 77 aa, Homo sapiens
  Payload ID: 7514
  Gene Symbol: HLF
  Gene Name: hepatic leukemia factor
  ENSP ID: ENSP00000460265
MDLEEFLSENGIPPSPSQHDHSPHPPGLQPASSAAPSVMDLSSRASAPLHPGIPSPNCMQSPIRPAVASKPQYTKSH

SEQ ID NO: 37797 - protein, 210 aa, Homo sapiens; identical to SEQ ID NO: 37795
  Payload ID: 7514
  Gene Symbol: HLF
  Gene Name: hepatic leukemia factor
  Uniprot ID: Q16534
  ENSP ID: ENSP00000460296

SEQ ID NO: 37798 - protein, 210 aa, Homo sapiens; identical to SEQ ID NO: 37795
  Payload ID: 7514
  Gene Symbol: HLF
  Gene Name: hepatic leukemia factor
  Uniprot ID: Q16534
  ENSP ID: ENSP00000460572

SEQ ID NO: 37799 - protein, 236 aa, Homo sapiens
  Payload ID: 7514
  Gene Symbol: HLF
  Gene Name: hepatic leukemia factor
  ENSP ID: ENSP00000461455
QSAFLGPTLWDKTLPYDGDTFQLEYMDLEEFLSENGIPPSPSQHDHSPHPPGLQPASSAAPSVMDLSSRASAPLHPGIPSPNCMQSPIRPGQLLPANRNTPSPIDPDTIQVPVGYEPDPADLALSSIPGQEMFDPRKRKFSEEELKPQPMIKKARKVFIPDDLKQDDKYWARRRKNNMAAKRSRDARRLKENQIAIRASFLEKENSALRQEVADLRKELGKCKNILAKYEARHGPL

SEQ ID NO: 37800 - protein, 364 aa, Homo sapiens
  Payload ID: 7515
  Gene Symbol: HAVCR1
  Gene Name: hepatitis A virus cellular receptor 1
  Uniprot ID: Q96D42
  ENSP ID: ENSP00000344844
MHPQVVILSLILHLADSVAGSVKVGGEAGPSVTLPCHYSGAVTSMCWNRGSCSLFTCQNGIVWTNGTHVTYRKDTRYKLLGDLSRRDVSLTIENTAVSDSGVYCCRVEHRGWFNDMKITVSLEIVPPKVTTTPIVTTVPTVTTVRTSTTVPTTTTVPMTTVPTTTVPTTMSIPTTTTVLTTMTVSTTTSVPTTTSIPTTTSVPVTTTVSTFVPPMPLPRQNHEPVATSPSSPQPAETHPTTLQGAIRREPTSSPLYSYTTDGNDTVTESSDGLWNNNQTQLFLEHSLLTANTTKGIYAGVCISVLVLLALLGVIIAKKYFFKKEVQQLSVSFSSLQIKALQNAVEKEVQAEDNIYIENSLYATD

SEQ ID NO: 37801 - protein, 364 aa, Homo sapiens; identical to SEQ ID NO: 37800
  Payload ID: 7515
  Gene Symbol: HAVCR1
  Gene Name: hepatitis A virus cellular receptor 1
  Uniprot ID: Q96D42
  ENSP ID: ENSP00000427898

SEQ ID NO: 37802 - protein, 223 aa, Homo sapiens
  Payload ID: 7515
  Gene Symbol: HAVCR1
  Gene Name: hepatitis A virus cellular receptor 1
  ENSP ID: ENSP00000428422
MHPQVVILSLILHLADSVAGSVKVGGEAGPSVTLPCHYSGAVTSMCWNRGSCSLFTCQNGIVWTNGTHVTYRKDTRYKLLGDLSRRDVSLTIENTAVSDSGVYCCRVEHRGWFNDMKITVSLEIVPPKVTTTPIVTTVPTVTTVRTSTTVPTTTTVPMTTVPTTTVPTTMSIPTTTTVLTTMTVSTTTSVPTTTSIPTTTSVPVTTTVSTFVPPMPLPRQNHE

SEQ ID NO: 37803 - protein, 401 aa, Homo sapiens
  Payload ID: 7515
  Gene Symbol: HAVCR1
  Gene Name: hepatitis A virus cellular receptor 1
  ENSP ID: ENSP00000428524
MHPQVVILSLILHLADSVAGSVKVGGEAGPSVTLPCHYSGAVTSMCWNRGSCSLFTCQNGIVWTNGTHVTYRKDTRYKLLGDLSRRDVSLTIENTAVSDSGVYCCRVEHRGWFNDMKITVSLEIVPPKVTTTPIVTTVPTVTTVRTSTTVPTTTTVPMTTVPTTTVPTTMSIPTTTTVLTTMTVSTTTSVPTTTSIPTTTSVPVTTTVSTFVPPMPLPRQNHEPVATSPSSPQPAETHPTTLQGAIRREPTSSPLYSYTTDGNDTVTESSDGLWNNNQTQLFLEHSLLTANTTKGIYAGVCISVLVLLALLGVIIAKMFHLAAFKLKLCKMQLKRKSKQKTISTLRIVFMPRTKTQWCSLRVYAHECRRLNRHQHIRRLLDPKTIFLFQFHLAFQHVSDTG

SEQ ID NO: 37804 - protein, 401 aa, Homo sapiens; identical to SEQ ID NO: 37803
  Payload ID: 7515
  Gene Symbol: HAVCR1
  Gene Name: hepatitis A virus cellular receptor 1
  ENSP ID: ENSP00000487363

SEQ ID NO: 37805 - protein, 301 aa, Homo sapiens
  Payload ID: 7516
  Gene Symbol: HAVCR2
  Gene Name: hepatitis A virus cellular receptor 2
  Uniprot ID: Q8TDQ0
  ENSP ID: ENSP00000312002
MFSHLPFDCVLLLLLLLLTRSSEVEYRAEVGQNAYLPCFYTPAAPGNLVPVCWGKGACPVFECGNVVLRTDERDVNYWTSRYWLNGDFRKGDVSLTIENVTLADSGIYCCRIQIPGIMNDEKFNLKLVIKPAKVTPAPTRQRDFTAAFPRMLTTRGHGPAETQTLGSLPDINLTQISTLANELRDSRLANDLRDSGATIRIGIYIGAGICAGLALALIFGALIFKWYSHSKEKIQNLSLISLANLPPSGLANAVAEGIRSEENIYTIEENVYEVEEPNEYYCYVSSRQQPSQPLGCRFAMP

SEQ ID NO: 37806 - protein, 74 aa, Homo sapiens
  Payload ID: 7516
  Gene Symbol: HAVCR2
  Gene Name: hepatitis A virus cellular receptor 2
  ENSP ID: ENSP00000430328
MNDEKFNLKLVIKPAKVTPAPTRQRDFTAAFPRMLTTRGHGPAETQTLGSLPDINLTQISTLANELRDSRLAND

SEQ ID NO: 37807 - protein, 273 aa, Homo sapiens
  Payload ID: 7516
  Gene Symbol: HAVCR2
  Gene Name: hepatitis A virus cellular receptor 2
  ENSP ID: ENSP00000430873
MFSHLPFDCVLLLLLLLLTRSSEVEYRAEVGQNAYLPCFYTPAAPGNLVPVCWGKGACPVFECGNVVLRTDERDVNYWTSRYWLNGDFRKGDVSLTIENVTLADSGIYCCRIQIPGIMNDEKFNLKLVIKPAETQTLGSLPDINLTQISTLANELRDSRLANDLRDSGATIRIGIYIGAGICAGLALALIFGALIFKWYSHSKEKIQNLSLISLANLPPSGLANAVAEGIRSEENIYTIEENVYEVEEPNEYYCYVSSRQQPSQPLGCRFAMP

SEQ ID NO: 37808 - protein, 88 aa, Homo sapiens
  Payload ID: 7517
  Gene Symbol: HEPN1
  Gene Name: hepatocellular carcinoma, down-regulated 1
  Uniprot ID: Q6WQI6
  ENSP ID: ENSP00000386143
MGNWGLGIAPWVDGESELEFRRLGMQGPLEALRRREWNTQRASFSFSFLIALSPHTVDYCHSYELFNRRWHGHVLATQRPSLFILMLV

SEQ ID NO: 37809 - protein, 728 aa, Homo sapiens
  Payload ID: 7518
  Gene Symbol: HGF
  Gene Name: hepatocyte growth factor (hepapoietin A
  scatter factor)
  Uniprot ID: P14210
  ENSP ID: ENSP00000222390
MWVTKLLPALLLQHVLLHLLLLPIAIPYAEGQRKRRNTIHEFKKSAKTTLIKIDPALKIKTKKVNTADQCANRCTRNKGLPFTCKAFVFDKARKQCLWFPFNSMSSGVKKEFGHEFDLYENKDYIRNCIIGKGRSYKGTVSITKSGIKCQPWSSMIPHEHSFLPSSYRGKDLQENYCRNPRGEEGGPWCFTSNPEVRYEVCDIPQCSEVECMTCNGESYRGLMDHTESGKICQRWDHQTPHRHKFLPERYPDKGFDDNYCRNPDGQPRPWCYTLDPHTRWEYCAIKTCADNTMNDTDVPLETTECIQGQGEGYRGTVNTIWNGIPCQRWDSQYPHEHDMTPENFKCKDLRENYCRNPDGSESPWCFTTDPNIRVGYCSQIPNCDMSHGQDCYRGNGKNYMGNLSQTRSGLTCSMWDKNMEDLHRHIFWEPDASKLNENYCRNPDDDAHGPWCYTGNPLIPWDYCPISRCEGDTTPTIVNLDHPVISCAKTKQLRVVNGIPTRTNIGWMVSLRYRNKHICGGSLIKESWVLTARQCFPSRDLKDYEAWLGIHDVHGRGDEKCKQVLNVSQLVYGPEGSDLVLMKLARPAVLDDFVSTIDLPNYGCTIPEKTSCSVYGWGYTGLINYDGLLRVAHLYIMGNEKCSQHHRGKVTLNESEICAGAEKIGSGPCEGDYGGPLVCEQHKMRMVLGVIVPGRGCAIPNRPGIFVRVAYYAKWIHKIILTYKVPQS

SEQ ID NO: 37810 - protein, 184 aa, Homo sapiens
  Payload ID: 7518
  Gene Symbol: HGF
  Gene Name: hepatocyte growth factor (hepapoietin A
  scatter factor)
  ENSP ID: ENSP00000346164
MWVTKLLPALLLQHVLLHLLLLPIAIPYAEGQRKRRNTIHEFKKSAKTTLIKIDPALKIKTKKVNTADQCANRCTRNKGLPFTCKAFVFDKARKQCLWFPFNSMSSGVKKEFGHEFDLYENKDYIRNCIIGKGRSYKGTVSITKSGIKCQPWSSMIPHEHSGGDDCLVESTFYSIPFWGHNSAR

SEQ ID NO: 37811 - protein, 118 aa, Homo sapiens
  Payload ID: 7518
  Gene Symbol: HGF
  Gene Name: hepatocyte growth factor (hepapoietin A
  scatter factor)
  ENSP ID: ENSP00000388592
MWVTKLLPALLLQHVLLHLLLLPIAIPYAEGQRKRRNTIHEFKKSAKTTLIKIDPALKIKTKKVNTADQCANRCTRNKGLPFTCKAFVFDKARKQCLWFPFNSMSSGVKKEFGHEFDL

SEQ ID NO: 37812 - protein, 290 aa, Homo sapiens
  Payload ID: 7518
  Gene Symbol: HGF
  Gene Name: hepatocyte growth factor (hepapoietin A
  scatter factor)
  Uniprot ID: P14210
  ENSP ID: ENSP00000389854
MWVTKLLPALLLQHVLLHLLLLPIAIPYAEGQRKRRNTIHEFKKSAKTTLIKIDPALKIKTKKVNTADQCANRCTRNKGLPFTCKAFVFDKARKQCLWFPFNSMSSGVKKEFGHEFDLYENKDYIRNCIIGKGRSYKGTVSITKSGIKCQPWSSMIPHEHSFLPSSYRGKDLQENYCRNPRGEEGGPWCFTSNPEVRYEVCDIPQCSEVECMTCNGESYRGLMDHTESGKICQRWDHQTPHRHKFLPERYPDKGFDDNYCRNPDGQPRPWCYTLDPHTRWEYCAIKTCET

SEQ ID NO: 37813 - protein, 723 aa, Homo sapiens
  Payload ID: 7518
  Gene Symbol: HGF
  Gene Name: hepatocyte growth factor (hepapoietin A
  scatter factor)
  Uniprot ID: P14210
  ENSP ID: ENSP00000391238
MWVTKLLPALLLQHVLLHLLLLPIAIPYAEGQRKRRNTIHEFKKSAKTTLIKIDPALKIKTKKVNTADQCANRCTRNKGLPFTCKAFVFDKARKQCLWFPFNSMSSGVKKEFGHEFDLYENKDYIRNCIIGKGRSYKGTVSITKSGIKCQPWSSMIPHEHSYRGKDLQENYCRNPRGEEGGPWCFTSNPEVRYEVCDIPQCSEVECMTCNGESYRGLMDHTESGKICQRWDHQTPHRHKFLPERYPDKGFDDNYCRNPDGQPRPWCYTLDPHTRWEYCAIKTCADNTMNDTDVPLETTECIQGQGEGYRGTVNTIWNGIPCQRWDSQYPHEHDMTPENFKCKDLRENYCRNPDGSESPWCFTTDPNIRVGYCSQIPNCDMSHGQDCYRGNGKNYMGNLSQTRSGLTCSMWDKNMEDLHRHIFWEPDASKLNENYCRNPDDDAHGPWCYTGNPLIPWDYCPISRCEGDTTPTIVNLDHPVISCAKTKQLRVVNGIPTRTNIGWMVSLRYRNKHICGGSLIKESWVLTARQCFPSRDLKDYEAWLGIHDVHGRGDEKCKQVLNVSQLVYGPEGSDLVLMKLARPAVLDDFVSTIDLPNYGCTIPEKTSCSVYGWGYTGLINYDGLLRVAHLYIMGNEKCSQHHRGKVTLNESEICAGAEKIGSGPCEGDYGGPLVCEQHKMRMVLGVIVPGRGCAIPNRPGIFVRVAYYAKWIHKIILTYKVPQS

SEQ ID NO: 37814 - protein, 58 aa, Homo sapiens
  Payload ID: 7518
  Gene Symbol: HGF
  Gene Name: hepatocyte growth factor (hepapoietin A
  scatter factor)
  ENSP ID: ENSP00000395468
MSSGVKKEFGHEFDLYENKDYIRNCIIGKGRSYKGTVSITKSGIKCQPWSSMIPHEHR

SEQ ID NO: 37815 - protein, 141 aa, Homo sapiens
  Payload ID: 7518
  Gene Symbol: HGF
  Gene Name: hepatocyte growth factor (hepapoietin A
  scatter factor)
  ENSP ID: ENSP00000396307
MWVTKLLPALLLQHVLLHLLLLPIAIPYAEGQRKRRNTIHEFKKSAKTTLIKIDPALKIKTKKVNTADQCANRCTRNKGLPFTCKAFVFDKARKQCLWFPFNSMSSGVKKEFGHEFDLYENKDYIRNCIIGKGRSYKGTVS

SEQ ID NO: 37816 - protein, 285 aa, Homo sapiens
  Payload ID: 7518
  Gene Symbol: HGF
  Gene Name: hepatocyte growth factor (hepapoietin A
  scatter factor)
  Uniprot ID: P14210
  ENSP ID: ENSP00000408270
MWVTKLLPALLLQHVLLHLLLLPIAIPYAEGQRKRRNTIHEFKKSAKTTLIKIDPALKIKTKKVNTADQCANRCTRNKGLPFTCKAFVFDKARKQCLWFPFNSMSSGVKKEFGHEFDLYENKDYIRNCIIGKGRSYKGTVSITKSGIKCQPWSSMIPHEHSYRGKDLQENYCRNPRGEEGGPWCFTSNPEVRYEVCDIPQCSEVECMTCNGESYRGLMDHTESGKICQRWDHQTPHRHKFLPERYPDKGFDDNYCRNPDGQPRPWCYTLDPHTRWEYCAIKTCET

SEQ ID NO: 37817 - protein, 210 aa, Homo sapiens
  Payload ID: 7518
  Gene Symbol: HGF
  Gene Name: hepatocyte growth factor (hepapoietin A
  scatter factor)
  Uniprot ID: P14210
  ENSP ID: ENSP00000413829
MWVTKLLPALLLQHVLLHLLLLPIAIPYAEGQRKRRNTIHEFKKSAKTTLIKIDPALKIKTKKVNTADQCANRCTRNKGLPFTCKAFVFDKARKQCLWFPFNSMSSGVKKEFGHEFDLYENKDYIRNCIIGKGRSYKGTVSITKSGIKCQPWSSMIPHEHSFLPSSYRGKDLQENYCRNPRGEEGGPWCFTSNPEVRYEVCDIPQCSEGK

SEQ ID NO: 37818 - protein, 777 aa, Homo sapiens
  Payload ID: 7519
  Gene Symbol: HGS
  Gene Name: hepatocyte growth factor-regulated tyrosine kinase substrate
  Uniprot ID: O14964
  ENSP ID: ENSP00000331201
MGRGSGTFERLLDKATSQLLLETDWESILQICDLIRQGDTQAKYAVNSIKKKVNDKNPHVALYALEVMESVVKNCGQTVHDEVANKQTMEELKDLLKRQVEVNVRNKILYLIQAWAHAFRNEPKYKVVQDTYQIMKVEGHVFPEFKESDAMFAAERAPDWVDAEECHRCRVQFGVMTRKHHCRACGQIFCGKCSSKYSTIPKFGIEKEVRVCEPCYEQLNRKAEGKATSTTELPPEYLTSPLSQQSQLPPKRDETALQEEEELQLALALSQSEAEEKERLRQKSTYTSYPKAEPMPSASSAPPASSLYSSPVNSSAPLAEDIDPELARYLNRNYWEKKQEEARKSPTPSAPVPLTEPAAQPGEGHAAPTNVVENPLPETDSQPIPPSGGPFSEPQFHNGESEESHEQFLKALQNAVTTFVNRMKSNHMRGRSITNDSAVLSLFQSINGMHPQLLELLNQLDERRLYYEGLQDKLAQIRDARGALSALREEHREKLRRAAEEAERQRQIQLAQKLEIMRQKKQEYLEVQRQLAIQRLQEQEKERQMRLEQQKQTVQMRAQMPAFPLPYAQLQAMPAAGGVLYQPSGPASFPSTFSPAGSVEGSPMHGVYMSQPAPAAGPYPSMPSTAADPSMVSAYMYPAGATGAQAAPQAQAGPTASPAYSSYQPTPTAGYQNVASQAPQSLPAISQPPQSSTMGYMGSQSVSMGYQPYNMQNLMTTLPSQDASLPPQQPYIAGQQPMYQQMAPSGGPPQQQPPVAQQPQAQGPPAQGSEAQLISFD

SEQ ID NO: 37819 - protein, 71 aa, Homo sapiens
  Payload ID: 7519
  Gene Symbol: HGS
  Gene Name: hepatocyte growth factor-regulated tyrosine kinase substrate
  ENSP ID: ENSP00000458603
MESVVKNCGQTVHDEVANKQTMEELKDLLKRQVEVNVRNKILYLIQAWAHAFRNEPKYKVVQDTYQIMKVE

SEQ ID NO: 37820 - protein, 292 aa, Homo sapiens
  Payload ID: 7519
  Gene Symbol: HGS
  Gene Name: hepatocyte growth factor-regulated tyrosine kinase substrate
  ENSP ID: ENSP00000458775
RQKSTYTSYPKAEPMPSASSAPPASSLYSSPVNSSAPLAEDIDPELARYLNRNYWEKKQEEARKSPTPSAPVPLTEPAAQPGEGHAAPTNVVENPLPETDSQPIPPSGGPFSESINGMHPQLLELLNQLDERRLYYEGLQDKLAQIRDARGALSALREEHREKLRRAAEEAERQRQIQLAQKLEIMRQKKQEYLEVQRQLAIQRLQEQEKERQMRLEQQKQTVQMRAQMPAFPLPYAQLQAMPAAGGVLYQPSGPASFPSTFSPAGSVEGSPMHGVYMSQPAPAAGPYPSMP

SEQ ID NO: 37821 - protein, 63 aa, Homo sapiens
  Payload ID: 7519
  Gene Symbol: HGS
  Gene Name: hepatocyte growth factor-regulated tyrosine kinase substrate
  ENSP ID: ENSP00000458789
  MOD_RES (1)..(1): Any amino acid
XYQPYNMQNLMTTLPSQDASLPPQQPYIAGQQPMYQQQPPVAQQPQAQGPPAQGSEAQLISFD

SEQ ID NO: 37822 - protein, 263 aa, Homo sapiens
  Payload ID: 7519
  Gene Symbol: HGS
  Gene Name: hepatocyte growth factor-regulated tyrosine kinase substrate
  ENSP ID: ENSP00000458987
MGRGSGTFERLLDKATSQLLLETDWESILQICDLIRQGDTQAKYAVNSIKKKVNDKNPHVALYALEVMESVVKNCGQTVHDEVANKQTMEELKDLLKAWAHAFRNEPKYKVVQDTYQIMKVEGHVFPEFKESDAMFAAERAPDWVDAEECHRCRVQFGVMTRKHHCRACGQIFCGKCSSKYSTIPKFGIEKEVRVCEPCYEQLNRKAEGKATSTTELPPEYLTSPLSQQSQLPPKRDETALQEEEELQLALALSQSEAEEKER

SEQ ID NO: 37823 - protein, 59 aa, Homo sapiens
  Payload ID: 7519
  Gene Symbol: HGS
  Gene Name: hepatocyte growth factor-regulated tyrosine kinase substrate
  ENSP ID: ENSP00000459685
MESVVKNCGQTVHDEVANKQTMEELKDLLKRQVEVNVRNKILYLIQAWAHAFRNEPKYK

SEQ ID NO: 37824 - protein, 110 aa, Homo sapiens
  Payload ID: 7519
  Gene Symbol: HGS
  Gene Name: hepatocyte growth factor-regulated tyrosine kinase substrate
  ENSP ID: ENSP00000460130
PTAGYQNVASQAPQSLPAISQPPQSSTMGYMGSQSVSMGYQPYNMQNLMTTLPSQDASLPPQQPYIAGQQPMYQQGETHTRGPFSADRTRTQVSGQIRASASVDRKNREF

SEQ ID NO: 37825 - protein, 38 aa, Homo sapiens
  Payload ID: 7519
  Gene Symbol: HGS
  Gene Name: hepatocyte growth factor-regulated tyrosine kinase substrate
  ENSP ID: ENSP00000460165
  MOD_RES (1)..(1): Any amino acid
XQMAPSGGPPQQQPPVAQQPQAQGPPAQGSEAQLISFD

SEQ ID NO: 37826 - protein, 474 aa, Homo sapiens
  Payload ID: 7520
  Gene Symbol: HNF4A
  Gene Name: hepatocyte nuclear factor 4, alpha
  Uniprot ID: P41235
  ENSP ID: ENSP00000312987
MRLSKTLVDMDMADYSAALDPAYTTLEFENVQVLTMGNDTSPSEGTNLNAPNSLGVSALCAICGDRATGKHYGASSCDGCKGFFRRSVRKNHMYSCRFSRQCVVDKDKRNQCRYCRLKKCFRAGMKKEAVQNERDRISTRRSSYEDSSLPSINALLQAEVLSRQITSPVSGINGDIRAKKIASIADVCESMKEQLLVLVEWAKYIPAFCELPLDDQVALLRAHAGEHLLLGATKRSMVFKDVLLLGNDYIVPRHCPELAEMSRVSIRILDELVLPFQELQIDDNEYAYLKAIIFFDPDAKGLSDPGKIKRLRSQVQVSLEDYINDRQYDSRGRFGELLLLLPTLQSITWQMIEQIQFIKLFGMAKIDNLLQEMLLGGSPSDAPHAHHPLHPHLMQEHMGTNVIVANTMPTHLSNGQMCEWPRPRGQAATPETPQPSPPGGSGSEPYKLLPGAVATIVKPLSAIPQPTITKQEVI

SEQ ID NO: 37827 - protein, 452 aa, Homo sapiens
  Payload ID: 7520
  Gene Symbol: HNF4A
  Gene Name: hepatocyte nuclear factor 4, alpha
  Uniprot ID: P41235
  ENSP ID: ENSP00000315180
MVSVNAPLGAPVESSYDTSPSEGTNLNAPNSLGVSALCAICGDRATGKHYGASSCDGCKGFFRRSVRKNHMYSCRFSRQCVVDKDKRNQCRYCRLKKCFRAGMKKEAVQNERDRISTRRSSYEDSSLPSINALLQAEVLSRQITSPVSGINGDIRAKKIASIADVCESMKEQLLVLVEWAKYIPAFCELPLDDQVALLRAHAGEHLLLGATKRSMVFKDVLLLGNDYIVPRHCPELAEMSRVSIRILDELVLPFQELQIDDNEYAYLKAIIFFDPDAKGLSDPGKIKRLRSQVQVSLEDYINDRQYDSRGRFGELLLLLPTLQSITWQMIEQIQFIKLFGMAKIDNLLQEMLLGGSPSDAPHAHHPLHPHLMQEHMGTNVIVANTMPTHLSNGQMCEWPRPRGQAATPETPQPSPPGGSGSEPYKLLPGAVATIVKPLSAIPQPTITKQEVI

SEQ ID NO: 37828 - protein, 107 aa, Homo sapiens
  Payload ID: 7520
  Gene Symbol: HNF4A
  Gene Name: hepatocyte nuclear factor 4, alpha
  ENSP ID: ENSP00000362011
MRLSKTLVDMDMADYSAALDPAYTTLEFENVQVLTMGNDFVAAASRQIEASPPTSLEHIWRGGQFSTGRHVPIRRHQPQRAQQPGCQRPVCHLRGPGHGQTLRCLEL

SEQ ID NO: 37829 - protein, 442 aa, Homo sapiens
  Payload ID: 7520
  Gene Symbol: HNF4A
  Gene Name: hepatocyte nuclear factor 4, alpha
  Uniprot ID: P41235
  ENSP ID: ENSP00000396216
MVSVNAPLGAPVESSYDTSPSEGTNLNAPNSLGVSALCAICGDRATGKHYGASSCDGCKGFFRRSVRKNHMYSCRFSRQCVVDKDKRNQCRYCRLKKCFRAGMKKEAVQNERDRISTRRSSYEDSSLPSINALLQAEVLSRQITSPVSGINGDIRAKKIASIADVCESMKEQLLVLVEWAKYIPAFCELPLDDQVALLRAHAGEHLLLGATKRSMVFKDVLLLGNDYIVPRHCPELAEMSRVSIRILDELVLPFQELQIDDNEYAYLKAIIFFDPDAKGLSDPGKIKRLRSQVQVSLEDYINDRQYDSRGRFGELLLLLPTLQSITWQMIEQIQFIKLFGMAKIDNLLQEMLLGGSPSDAPHAHHPLHPHLMQEHMGTNVIVANTMPTHLSNGQMSTPETPQPSPPGGSGSEPYKLLPGAVATIVKPLSAIPQPTITKQEVI

SEQ ID NO: 37830 - protein, 417 aa, Homo sapiens
  Payload ID: 7520
  Gene Symbol: HNF4A
  Gene Name: hepatocyte nuclear factor 4, alpha
  Uniprot ID: P41235
  ENSP ID: ENSP00000410911
MRLSKTLVDMDMADYSAALDPAYTTLEFENVQVLTMGNDTSPSEGTNLNAPNSLGVSALCAICGDRATGKHYGASSCDGCKGFFRRSVRKNHMYSCRFSRQCVVDKDKRNQCRYCRLKKCFRAGMKKEAVQNERDRISTRRSSYEDSSLPSINALLQAEVLSRQITSPVSGINGDIRAKKIASIADVCESMKEQLLVLVEWAKYIPAFCELPLDDQVALLRAHAGEHLLLGATKRSMVFKDVLLLGNDYIVPRHCPELAEMSRVSIRILDELVLPFQELQIDDNEYAYLKAIIFFDPDAKGLSDPGKIKRLRSQVQVSLEDYINDRQYDSRGRFGELLLLLPTLQSITWQMIEQIQFIKLFGMAKIDNLLQEMLLGGPCQAQEGRGWSGDSPGDRPHTVSSPLSSLASPLCRFGQVA

SEQ ID NO: 37831 - protein, 464 aa, Homo sapiens
  Payload ID: 7520
  Gene Symbol: HNF4A
  Gene Name: hepatocyte nuclear factor 4, alpha
  Uniprot ID: P41235
  ENSP ID: ENSP00000412111
MRLSKTLVDMDMADYSAALDPAYTTLEFENVQVLTMGNDTSPSEGTNLNAPNSLGVSALCAICGDRATGKHYGASSCDGCKGFFRRSVRKNHMYSCRFSRQCVVDKDKRNQCRYCRLKKCFRAGMKKEAVQNERDRISTRRSSYEDSSLPSINALLQAEVLSRQITSPVSGINGDIRAKKIASIADVCESMKEQLLVLVEWAKYIPAFCELPLDDQVALLRAHAGEHLLLGATKRSMVFKDVLLLGNDYIVPRHCPELAEMSRVSIRILDELVLPFQELQIDDNEYAYLKAIIFFDPDAKGLSDPGKIKRLRSQVQVSLEDYINDRQYDSRGRFGELLLLLPTLQSITWQMIEQIQFIKLFGMAKIDNLLQEMLLGGSPSDAPHAHHPLHPHLMQEHMGTNVIVANTMPTHLSNGQMSTPETPQPSPPGGSGSEPYKLLPGAVATIVKPLSAIPQPTITKQEVI

SEQ ID NO: 37832 - protein, 103 aa, Homo sapiens
  Payload ID: 7520
  Gene Symbol: HNF4A
  Gene Name: hepatocyte nuclear factor 4, alpha
  ENSP ID: ENSP00000476310
MSDWGQGFPQDPPDTSPSEGTNLNAPNSLGVSALCAICGDRATGKHYGASSCDGCKGFFRRSVRKNHMYSCRFSRQCVVDKDKRNQCRYCRLKKCFRAGMKKE

SEQ ID NO: 37833 - protein, 395 aa, Homo sapiens
  Payload ID: 7520
  Gene Symbol: HNF4A
  Gene Name: hepatocyte nuclear factor 4, alpha
  Uniprot ID: P41235
  ENSP ID: ENSP00000476609
MVSVNAPLGAPVESSYDTSPSEGTNLNAPNSLGVSALCAICGDRATGKHYGASSCDGCKGFFRRSVRKNHMYSCRFSRQCVVDKDKRNQCRYCRLKKCFRAGMKKEAVQNERDRISTRRSSYEDSSLPSINALLQAEVLSRQITSPVSGINGDIRAKKIASIADVCESMKEQLLVLVEWAKYIPAFCELPLDDQVALLRAHAGEHLLLGATKRSMVFKDVLLLGNDYIVPRHCPELAEMSRVSIRILDELVLPFQELQIDDNEYAYLKAIIFFDPDAKGLSDPGKIKRLRSQVQVSLEDYINDRQYDSRGRFGELLLLLPTLQSITWQMIEQIQFIKLFGMAKIDNLLQEMLLGGPCQAQEGRGWSGDSPGDRPHTVSSPLSSLASPLCRFGQVA

SEQ ID NO: 37834 - protein, 449 aa, Homo sapiens
  Payload ID: 7520
  Gene Symbol: HNF4A
  Gene Name: hepatocyte nuclear factor 4, alpha
  ENSP ID: ENSP00000481331
MSDWGQGFPQDPPDTSPSEGTNLNAPNSLGVSALCAICGDRATGKHYGASSCDGCKGFFRRSVRKNHMYSCRFSRQCVVDKDKRNQCRYCRLKKCFRAGMKKEAVQNERDRISTRRSSYEDSSLPSINALLQAEVLSRQITSPVSGINGDIRAKKIASIADVCESMKEQLLVLVEWAKYIPAFCELPLDDQVALLRAHAGEHLLLGATKRSMVFKDVLLLGNDYIVPRHCPELAEMSRVSIRILDELVLPFQELQIDDNEYAYLKAIIFFDPDAKGLSDPGKIKRLRSQVQVSLEDYINDRQYDSRGRFGELLLLLPTLQSITWQMIEQIQFIKLFGMAKIDNLLQEMLLGGSPSDAPHAHHPLHPHLMQEHMGTNVIVANTMPTHLSNGQMCEWPRPRGQAATPETPQPSPPGGSGSEPYKLLPGAVATIVKPLSAIPQPTITKQEVI

SEQ ID NO: 37835 - protein, 408 aa, Homo sapiens
  Payload ID: 7521
  Gene Symbol: HNF4G
  Gene Name: hepatocyte nuclear factor 4, gamma
  Uniprot ID: Q14541
  ENSP ID: ENSP00000346339
MNTTDNGVNCLCAICGDRATGKHYGASSCDGCKGFFRRSIRKSHVYSCRFSRQCVVDKDKRNQCRYCRLRKCFRAGMKKEAVQNERDRISTRRSTFDGSNIPSINTLAQAEVRSRQISVSSPGSSTDINVKKIASIGDVCESMKQQLLVLVEWAKYIPAFCELPLDDQVALLRAHAGEHLLLGATKRSMMYKDILLLGNNYVIHRNSCEVEISRVANRVLDELVRPFQEIQIDDNEYACLKAIVFFDPDAKGLSDPVKIKNMRFQVQIGLEDYINDRQYDSRGRFGELLLLLPTLQSITWQMIEQIQFVKLFGMVKIDNLLQEMLLGGASNDGSHLHHPMHPHLSQDPLTGQTILLGPMSTLVHADQISTPETPLPSPPQGSGQEQYKIAANQASVISHQHLSKQKQL

SEQ ID NO: 37836 - protein, 445 aa, Homo sapiens
  Payload ID: 7521
  Gene Symbol: HNF4G
  Gene Name: hepatocyte nuclear factor 4, gamma
  Uniprot ID: Q14541
  ENSP ID: ENSP00000379701
MDMANYSEVLDPTYTTLEFETMQILYNSSDSSAPETSMNTTDNGVNCLCAICGDRATGKHYGASSCDGCKGFFRRSIRKSHVYSCRFSRQCVVDKDKRNQCRYCRLRKCFRAGMKKEAVQNERDRISTRRSTFDGSNIPSINTLAQAEVRSRQISVSSPGSSTDINVKKIASIGDVCESMKQQLLVLVEWAKYIPAFCELPLDDQVALLRAHAGEHLLLGATKRSMMYKDILLLGNNYVIHRNSCEVEISRVANRVLDELVRPFQEIQIDDNEYACLKAIVFFDPDAKGLSDPVKIKNMRFQVQIGLEDYINDRQYDSRGRFGELLLLLPTLQSITWQMIEQIQFVKLFGMVKIDNLLQEMLLGGASNDGSHLHHPMHPHLSQDPLTGQTILLGPMSTLVHADQISTPETPLPSPPQGSGQEQYKIAANQASVISHQHLSKQKQL

SEQ ID NO: 37837 - protein, 251 aa, Homo sapiens
  Payload ID: 7522
  Gene Symbol: HDGFL1
  Gene Name: hepatoma derived growth factor-like 1
  Uniprot ID: Q5TGJ6
  ENSP ID: ENSP00000442129
MSAYGMPMYKSGDLVFAKLKGYAHWPARIEHMTQPNRYQVFFFGTHETAFLSPKRLFPYKECKEKFGKPNKRRGFSAGLWEIENNPTVQASDCPLASEKGSGDGPWPEPEAAEGDEDKPTHAGGGGDELGKPDDDKPTEEEKGPLKRSAGDPPEDAPKRPKEAAPDQEEEAEAERAAEAERAAAAAAATAVDEESPFLVAVENGSAPSEPGLVCEPPQPEEEELREEEVADEEASQEWHAEAPGGGDRDSL

SEQ ID NO: 37838 - protein, 240 aa, Homo sapiens
  Payload ID: 7523
  Gene Symbol: HDGF
  Gene Name: hepatoma-derived growth factor
  Uniprot ID: P51858
  ENSP ID: ENSP00000349878
MSRSNRQKEYKCGDLVFAKMKGYPHWPARIDEMPEAAVKSTANKYQVFFFGTHETAFLGPKDLFPYEESKEKFGKPNKRKGFSEGLWEIENNPTVKASGYQSSQKKSCVEEPEPEPEAAEGDGDKKGNAEGSSDEEGKLVIDEPAKEKNEKGALKRRAGDLLEDSPKRPKEAENPEGEEKEAATLEVERPLPMEVEKNSTPSEPGSGRGPPQEEEEEEDEEEEATKEDAEAPGIRDHESL

SEQ ID NO: 37839 - protein, 256 aa, Homo sapiens
  Payload ID: 7523
  Gene Symbol: HDGF
  Gene Name: hepatoma-derived growth factor
  Uniprot ID: P51858
  ENSP ID: ENSP00000357189
MHPEGGQFVPQLLGHLLATKLKRFLLSKGGRRAQIPDVSRATPHTIDEMPEAAVKSTANKYQVFFFGTHETAFLGPKDLFPYEESKEKFGKPNKRKGFSEGLWEIENNPTVKASGYQSSQKKSCVEEPEPEPEAAEGDGDKKGNAEGSSDEEGKLVIDEPAKEKNEKGALKRRAGDLLEDSPKRPKEAENPEGEEKEAATLEVERPLPMEVEKNSTPSEPGSGRGPPQEEEEEEDEEEEATKEDAEAPGIRDHESL

SEQ ID NO: 37840 - protein, 233 aa, Homo sapiens
  Payload ID: 7523
  Gene Symbol: HDGF
  Gene Name: hepatoma-derived growth factor
  Uniprot ID: P51858
  ENSP ID: ENSP00000357192
MEQRAGGNRVQTSTLNCAGAAVIDEMPEAAVKSTANKYQVFFFGTHETAFLGPKDLFPYEESKEKFGKPNKRKGFSEGLWEIENNPTVKASGYQSSQKKSCVEEPEPEPEAAEGDGDKKGNAEGSSDEEGKLVIDEPAKEKNEKGALKRRAGDLLEDSPKRPKEAENPEGEEKEAATLEVERPLPMEVEKNSTPSEPGSGRGPPQEEEEEEDEEEEATKEDAEAPGIRDHESL

SEQ ID NO: 37841 - protein, 240 aa, Homo sapiens; identical to SEQ ID NO: 37838
  Payload ID: 7523
  Gene Symbol: HDGF
  Gene Name: hepatoma-derived growth factor
  Uniprot ID: P51858
  ENSP ID: ENSP00000443120

SEQ ID NO: 37842 - protein, 121 aa, Homo sapiens
  Payload ID: 7524
  Gene Symbol:
  Gene Name: Hepatoma-derived growth factor-related protein 2 [Source:UniProtKB/Swiss-Prot
  Acc:Q7Z4V5]
  ENSP ID: ENSP00000465267
MAVTAVTATAASDRMESDSDSDKSSDNSGLKRKTPALKMSVSKRARKASSDLDQASVSPSEEENSESSSESEKTSDQDFTPEKKAAVRAPRRGPLGGRKKKKAPSASDSDSKADSDGAKPE

SEQ ID NO: 37843 - protein, 153 aa, Homo sapiens
  Payload ID: 7524
  Gene Symbol:
  Gene Name: Hepatoma-derived growth factor-related protein 2 [Source:UniProtKB/Swiss-Prot
  Acc:Q7Z4V5]
  ENSP ID: ENSP00000467513
KVDSPDVKRCLNALEELGTLQVTSQILQKNTDVVATLKKIRRYKANKDVMEKAAEVYTRLKSRVLGPKIEAVQKVNKAGMEKEKAEEKLAGEELAGEEAPQEKAEDKPSTDLSAPVNGEATSQKGESAEDKEHEEGRDSEEGPRCGSSEDLHE

SEQ ID NO: 37844 - protein, 24 aa, Homo sapiens
  Payload ID: 7524
  Gene Symbol:
  Gene Name: Hepatoma-derived growth factor-related protein 2 [Source:UniProtKB/Swiss-Prot
  Acc:Q7Z4V5]
  ENSP ID: ENSP00000467617
MAVTAVTATAASDRMESDSDSDKS

SEQ ID NO: 37845 - protein, 175 aa, Homo sapiens
  Payload ID: 7524
  Gene Symbol:
  Gene Name: Hepatoma-derived growth factor-related protein 2 [Source:UniProtKB/Swiss-Prot
  Acc:Q7Z4V5]
  ENSP ID: ENSP00000468175
  MOD_RES (1)..(1): Any amino acid
XSTEPARKPGQKEKRVRPEEKQQAKPVKVERTRKRSEGFSMDRKVEKKKEPSVEEKLQKLHSEIKFALKVDSPDVKRCLNALEELGTLQVTSQILQKNTDVVATLKKIRRYKANKDVMEKAAEVYTRLKSRVLGPKIEAVQKVNKAQWSHSLTQQLPCAMPGWRQRGDPGDGCGL

SEQ ID NO: 37846 - protein, 97 aa, Homo sapiens
  Payload ID: 7524
  Gene Symbol:
  Gene Name: Hepatoma-derived growth factor-related protein 2 [Source:UniProtKB/Swiss-Prot
  Acc:Q7Z4V5]
  ENSP ID: ENSP00000471276
MPHAFKPGDLVFAKMKGYPHWPARIDDIADGAVKPPPNKYPIFFFGTHETAFLGPKDLFPYDKCKDKYGKPNKRKGFNEGLWEIQNNPHASYSAPPQ

SEQ ID NO: 37847 - protein, 473 aa, Homo sapiens
  Payload ID: 7524
  Gene Symbol:
  Gene Name: Hepatoma-derived growth factor-related protein 2 [Source:UniProtKB/Swiss-Prot
  Acc:Q7Z4V5]
  ENSP ID: ENSP00000477592
  MOD_RES (1)..(1): Any amino acid
XTAFLGPKDLFPYDKCKDKYGKPNKRKGFNEGLWEIQNNPHASYSAPPPVSSSDSEAPEANPADGSDADEDDEDRGVMAVTAVTATAASDRMESDSDSDKSSDNSGLKRKTPALKMSVSKRARKASSDLDQASVSPSEEENSESSSESEKTSDQDFTPEKKAAVRAPRRGPLGGRKKKKAPSASDSDSKADSDGAKPEPVAMARSASSSSSSSSSSDSDVSVKKPPRGRKPAEKPLPKPRGRKPKPERPPSSSSSDSDSDEVDRISEWKRRDEARRRELEARRRREQEEELRRLREQEKEEKERRRERADRGEAERGSGGSSGDELREDDEPVKKRGRKGRGRGPPSSSDSEPEAELEREAKKSAKKPQSSSTEPARKPGQKEKRVRPEEKQQAKLECNGVISAHCNLRLPGSSDSPASALPSSWDYRHPPPRLANFCCFSRHGVSSCWPGWSRSPDPVICPPQPPKVLGLQV

SEQ ID NO: 37848 - protein, 68 aa, Homo sapiens
  Payload ID: 7524
  Gene Symbol:
  Gene Name: Hepatoma-derived growth factor-related protein 2 [Source:UniProtKB/Swiss-Prot
  Acc:Q7Z4V5]
  ENSP ID: ENSP00000480754
EEKLAGEELAGEEAPQEKAEDKPSTDLSAPVNGEATSQKGESAEDKEHEEGRDSEEGPRCGSSEDLHD

SEQ ID NO: 37849 - protein, 71 aa, Homo sapiens
  Payload ID: 7524
  Gene Symbol:
  Gene Name: Hepatoma-derived growth factor-related protein 2 [Source:UniProtKB/Swiss-Prot
  Acc:Q7Z4V5]
  ENSP ID: ENSP00000482480
AESEQGWDGEGEGRGEAGRGGAGRGGGPPGEGGGQAQHRSVREGPDLDRPGSDRQERERARGDSEALDEES

SEQ ID NO: 37850 - protein, 671 aa, Homo sapiens
  Payload ID: 7524
  Gene Symbol:
  Gene Name: Hepatoma-derived growth factor-related protein 2 [Source:UniProtKB/Swiss-Prot
  Acc:Q7Z4V5]
  Uniprot ID: Q7Z4V5
  ENSP ID: ENSP00000483345
MPHAFKPGDLVFAKMKGYPHWPARIDDIADGAVKPPPNKYPIFFFGTHETAFLGPKDLFPYDKCKDKYGKPNKRKGFNEGLWEIQNNPHASYSAPPPVSSSDSEAPEANPADGSDADEDDEDRGVMAVTAVTATAASDRMESDSDSDKSSDNSGLKRKTPALKMSVSKRARKASSDLDQASVSPSEEENSESSSESEKTSDQDFTPEKKAAVRAPRRGPLGGRKKKKAPSASDSDSKADSDGAKPEPVAMARSASSSSSSSSSSDSDVSVKKPPRGRKPAEKPLPKPRGRKPKPERPPSSSSSDSDSDEVDRISEWKRRDEARRRELEARRRREQEEELRRLREQEKEEKERRRERADRGEAERGSGGSSGDELREDDEPVKKRGRKGRGRGPPSSSDSEPEAELEREAKKSAKKPQSSSTEPARKPGQKEKRVRPEEKQQAKPVKVERTRKRSEGFSMDRKVEKKKEPSVEEKLQKLHSEIKFALKVDSPDVKRCLNALEELGTLQVTSQILQKNTDVVATLKKIRRYKANKDVMEKAAEVYTRLKSRVLGPKIEAVQKVNKAGMEKEKAEEKLAGEELAGEEAPQEKAEDKPSTDLSAPVNGEATSQKGESAEDKEHEEGRDSEEGPRCGSSEDLHDSVREGPDLDRPGSDRQERERARGDSEALDEES

SEQ ID NO: 37851 - protein, 670 aa, Homo sapiens
  Payload ID: 7524
  Gene Symbol:
  Gene Name: Hepatoma-derived growth factor-related protein 2 [Source:UniProtKB/Swiss-Prot
  Acc:Q7Z4V5]
  ENSP ID: ENSP00000483702
MPHAFKPGDLVFAKMKGYPHWPARIDDIADGAVKPPPNKYPIFFFGTHETAFLGPKDLFPYDKCKDKYGKPNKRKGFNEGLWEIQNNPHASYSAPPPVSSSDSEAPEANPADGSDADEDDEDRGVMAVTAVTATAASDRMESDSDSDKSSDNSGLKRKTPALKMSVSKRARKASSDLDQASVSPSEEENSESSSESEKTSDQDFTPEKKAAVRAPRRGPLGGRKKKKAPSASDSDSKADSDGAKPEPVAMARSASSSSSSSSSSDSDVSVKKPPRGRKPAEKPLPKPRGRKPKPERPPSSSSSDSDSDEVDRISEWKRRDEARRRELEARRRREQEEELRRLREQEKEEKERRRERADRGEAERGSGGSSGDELREDDEPVKKRGRKGRGRGPPSSSDSEPEAELEREAKKSAKKPQSSSTEPARKPGQKEKRVRPEEKQQAKPVKVERTRKRSEGFSMDRKVEKKKEPSVEEKLQKLHSEIKFALKVDSPDVKRCLNALEELGTLQVTSQILQKNTDVVATLKKIRRYKANKDVMEKAAEVYTRLKSRVLGPKIEAVQKVNKAGMEKEKAEEKLAGEELAGEEAPQEKAEDKPSTDLSAPVNGEATSQKGESAEDKEHEEGRDSEEGPRCGSSEDLHDVREGPDLDRPGSDRQERERARGDSEALDEES

SEQ ID NO: 37852 - protein, 203 aa, Homo sapiens
  Payload ID: 7525
  Gene Symbol:
  Gene Name: Hepatoma-derived growth factor-related protein 3 [Source:UniProtKB/Swiss-Prot
  Acc:Q9Y3E1]
  Uniprot ID: Q9Y3E1
  ENSP ID: ENSP00000299633
MARPRPREYKAGDLVFAKMKGYPHWPARIDELPEGAVKPPANKYPIFFFGTHETAFLGPKDLFPYKEYKDKFGKSNKRKGFNEGLWEIENNPGVKFTGYQAIQQQSSSETEGEGGNTADASSEEEGDRVEEDGKGKRKNEKAGSKRKKSYTSKKSSKQSRKSPGDEDDKDCKEEENKSSSEGGDAGNDTRNTTSDLQKTSEGT

SEQ ID NO: 37853 - protein, 141 aa, Homo sapiens
  Payload ID: 7525
  Gene Symbol:
  Gene Name: Hepatoma-derived growth factor-related protein 3 [Source:UniProtKB/Swiss-Prot
  Acc:Q9Y3E1]
  ENSP ID: ENSP00000455388
FGKSNKRKGFNEGLWEIENNPGVKFTGYQAIQQQSSSETEGEGGNTADASSEEEGDRVEEDGKGKRKNEKAGSKRKKSYTSKKSSKQSRKSPGDEDDKDCKEEENKSSSEGGDAGNDTRNTTSDLQKTSEGKMLWTIIEID

SEQ ID NO: 37854 - protein, 44 aa, Homo sapiens
  Payload ID: 7525
  Gene Symbol:
  Gene Name: Hepatoma-derived growth factor-related protein 3 [Source:UniProtKB/Swiss-Prot
  Acc:Q9Y3E1]
  ENSP ID: ENSP00000455425
MARPRPREYKAGDLVFAKMKGYPHWPARIGTFGRKSKLSSYLYP

SEQ ID NO: 37855 - protein, 44 aa, Homo sapiens; identical to SEQ ID NO: 37854
  Payload ID: 7525
  Gene Symbol:
  Gene Name: Hepatoma-derived growth factor-related protein 3 [Source:UniProtKB/Swiss-Prot
  Acc:Q9Y3E1]
  ENSP ID: ENSP00000456699

SEQ ID NO: 37856 - protein, 84 aa, Homo sapiens
  Payload ID: 7526
  Gene Symbol: HAMP
  Gene Name: hepcidin antimicrobial peptide
  Uniprot ID: P81172
  ENSP ID: ENSP00000222304
MALSSQIWAACLLLLLLLASLTSGSVFPQQTGQLAELQPQDRAGARASWMPMFQRRRRRDTHFPICIFCCGCCHRSKCGMCCKT

SEQ ID NO: 37857 - protein, 84 aa, Homo sapiens; identical to SEQ ID NO: 37856
  Payload ID: 7526
  Gene Symbol: HAMP
  Gene Name: hepcidin antimicrobial peptide
  Uniprot ID: P81172
  ENSP ID: ENSP00000471894

SEQ ID NO: 37858 - protein, 891 aa, Homo sapiens
  Payload ID: 7527
  Gene Symbol: HEPH
  Gene Name: hephaestin
  Uniprot ID: Q9BQS7
  ENSP ID: ENSP00000337418
MHAINGFVFGNLPELNMCAQKRVAWHLFGMGNEIDVHTAFFHGQMLTTRGHHTDVANIFPATFVTAEMVPWEPGTWLISCQVNSHFRDGMQALYKVKSCSMAPPVDLLTGKVRQYFIEAHEIQWDYGPMGHDGSTGKNLREPGSISDKFFQKSSSRIGGTYWKVRYEAFQDETFQEKMHLEEDRHLGILGPVIRAEVGDTIQVVFYNRASQPFSMQPHGVFYEKDYEGTVYNDGSSYPGLVAKPFEKVTYRWTVPPHAGPTAQDPACLTWMYFSAADPIRDTNSGLVGPLLVCRAGALGADGKQKGVDKEFFLLFTVLDENKSWYSNANQAAAMLDFRLLSEDIEGFQDSNRMHAINGFLFSNLPRLDMCKGDTVAWHLLGLGTETDVHGVMFQGNTVQLQGMRKGAAMLFPHTFVMAIMQPDNLGTFEIYCQAGSHREAGMRAIYNVSQCPGHQATPRQRYQAARIYYIMAEEVEWDYCPDRSWEREWHNQSEKDSYGYIFLSNKDGLLGSRYKKAVFREYTDGTFRIPRPRTGPEEHLGILGPLIKGEVGDILTVVFKNNASRPYSVHAHGVLESTTVWPLAAEPGEVVTYQWNIPERSGPGPNDSACVSWIYYSAVDPIKDMYSGLVGPLAICQKGILEPHGGRSDMDREFALLFLIFDENKSWYLEENVATHGSQDPGSINLQDETFLESNKMHAINGKLYANLRGLTMYQGERVAWYMLAMGQDVDLHTIHFHAESFLYRNGENYRADVVDLFPGTFEVVEMVASNPGTWLMHCHVTDHVHAGMETLFTVFSRTEHLSPLTVITKETEKAVPPRDIEEGNVKMLGMQIPIKNVEMLASVLVAISVTLLLVVLALGGVVWYQHRQRKLRRNRRSILDDSFKLLSFKQ

SEQ ID NO: 37859 - protein, 1158 aa, Homo sapiens
  Payload ID: 7527
  Gene Symbol: HEPH
  Gene Name: hephaestin
  Uniprot ID: Q9BQS7
  ENSP ID: ENSP00000343939
MESGHLLWALLFMQSLWPQLTDGATRVYYLGIRDVQWNYAPKGRNVITNQPLDSDIVASSFLKSDKNRIGGTYKKTIYKEYKDDSYTDEVAQPAWLGFLGPVLQAEVGDVILIHLKNFATRPYTIHPHGVFYEKDSEGSLYPDGSSGPLKADDSVPPGGSHIYNWTIPEGHAPTDADPACLTWIYHSHVDAPRDIATGLIGPLITCKRGALDGNSPPQRQDVDHDFFLLFSVVDENLSWHLNENIATYCSDPASVDKEDETFQESNRMHAINGFVFGNLPELNMCAQKRVAWHLFGMGNEIDVHTAFFHGQMLTTRGHHTDVANIFPATFVTAEMVPWEPGTWLISCQVNSHFRDGMQALYKVKSCSMAPPVDLLTGKVRQYFIEAHEIQWDYGPMGHDGSTGKNLREPGSISDKFFQKSSSRIGGTYWKVRYEAFQDETFQEKMHLEEDRHLGILGPVIRAEVGDTIQVVFYNRASQPFSMQPHGVFYEKDYEGTVYNDGSSYPGLVAKPFEKVTYRWTVPPHAGPTAQDPACLTWMYFSAADPIRDTNSGLVGPLLVCRAGALGADGKQKGVDKEFFLLFTVLDENKSWYSNANQAAAMLDFRLLSEDIEGFQDSNRMHAINGFLFSNLPRLDMCKGDTVAWHLLGLGTETDVHGVMFQGNTVQLQGMRKGAAMLFPHTFVMAIMQPDNLGTFEIYCQAGSHREAGMRAIYNVSQCPGHQATPRQRYQAARIYYIMAEEVEWDYCPDRSWEREWHNQSEKDSYGYIFLSNKDGLLGSRYKKAVFREYTDGTFRIPRPRTGPEEHLGILGPLIKGEVGDILTVVFKNNASRPYSVHAHGVLESTTVWPLAAEPGEVVTYQWNIPERSGPGPNDSACVSWIYYSAVDPIKDMYSGLVGPLAICQKGILEPHGGRSDMDREFALLFLIFDENKSWYLEENVATHGSQDPGSINLQDETFLESNKMHAINGKLYANLRGLTMYQGERVAWYMLAMGQDVDLHTIHFHAESFLYRNGENYRADVVDLFPGTFEVVEMVASNPGTWLMHCHVTDHVHAGMETLFTVFSRTEHLSPLTVITKETEKAVPPRDIEEGNVKMLGMQIPIKNVEMLASVLVAISVTLLLVVLALGGVVWYQHRQRKLRRNRRSILDDSFKLLSFKQ

SEQ ID NO: 37860 - protein, 63 aa, Homo sapiens
  Payload ID: 7527
  Gene Symbol: HEPH
  Gene Name: hephaestin
  ENSP ID: ENSP00000392319
MWAMESGHLLWALLFMQSLWPQLTDGATRVYYLGIRDVQWNYAPKGRNVITNQPLDSDIYVKM

SEQ ID NO: 37861 - protein, 208 aa, Homo sapiens
  Payload ID: 7527
  Gene Symbol: HEPH
  Gene Name: hephaestin
  ENSP ID: ENSP00000396907
MESGHLLWALLFMQSLWPQLTDGATRVYYLGIRDVQWNYAPKGRNVITNQPLDSDIVASSFLKSDKNRIGGTYKKTIYKEYKDDSYTDEVAQPAWLGFLGPVLQAEVGDVILIHLKNFATRPYTIHPHGVFYEKDSEGSLYPDGSSGPLKADDSVPPGGSHIYNWTIPEGHAPTDADPACLTWIYHSHVDAPRDIATGLIGPLITCKR

SEQ ID NO: 37862 - protein, 811 aa, Homo sapiens
  Payload ID: 7527
  Gene Symbol: HEPH
  Gene Name: hephaestin
  ENSP ID: ENSP00000398078
MESGHLLWALLFMQSLWPQLTDGATRVYYLGIRDVQWNYAPKGRNVITNQPLDSDIVASSFLKSDKNRIGGTYKKTIYKEYKDDSYTDEVAQPAWLGFLGPVLQAEVGDVILIHLKNFATRPYTIHPHGVFYEKDSEGSLYPDGSSGPLKADDSVPPGGSHIYNWTIPEGHAPTDADPACLTWIYHSHVDAPRDIATGLIGPLITCKRGALDGNSPPQRQDVDHDFFLLFSVVDENLSWHLNENIATYCSDPASVDKEDETFQESNRMHAINGFVFGNLPELNMCAQKRVAWHLFGMGNEIDVHTAFFHGQMLTTRGHHTDVANIFPATFVTAEMVPWEPGTWLISCQVNSHFRDGMQALYKVKSCSMAPPVDLLTGKVRQYFIEAHEIQWDYGPMGHDGSTGKNLREPGSISDKFFQKSSSRIGGTYWKVRYEAFQDETFQEKMHLEEDRHLGILGPVIRAEVGDTIQVVFYNRASQPFSMQPHGVFYEKDYEGTVYNDDPIRDTNSGLVGPLLVCRAGALGADGKQKGVDKEFFLLFTVLDENKSWYSNANQAAAMLDFRLLSEDIEGFQDSNRMHAINGFLFSNLPRLDMCKGDTVAWHLLGLGTETDVHGVMFQGNTVQLQGMRKGAAMLFPHTFVMAIMQPDNLGTFEIYCQAGSHREAGMRAIYNVSQCPGHQATPRQRYQAARIYYIMAEEVEWDYCPDRSWEREWHNQSEKDSYGYIFLSNKDGLLGSRYKKAVFREYTDGTFRIPRPRTGPEEHLGILGPLIKGEVGDILTVVFKNNASRPYSVHAHGVLESTTVWPLAAEP

SEQ ID NO: 37863 - protein, 1160 aa, Homo sapiens
  Payload ID: 7527
  Gene Symbol: HEPH
  Gene Name: hephaestin
  ENSP ID: ENSP00000411687
MWAMESGHLLWALLFMQSLWPQLTDGATRVYYLGIRDVQWNYAPKGRNVITNQPLDSDIVASSFLKSDKNRIGGTYKKTIYKEYKDDSYTDEVAQPAWLGFLGPVLQAEVGDVILIHLKNFATRPYTIHPHGVFYEKDSEGSLYPDGSSGPLKADDSVPPGGSHIYNWTIPEGHAPTDADPACLTWIYHSHVDAPRDIATGLIGPLITCKRGALDGNSPPQRQDVDHDFFLLFSVVDENLSWHLNENIATYCSDPASVDKEDETFQESNRMHAINGFVFGNLPELNMCAQKRVAWHLFGMGNEIDVHTAFFHGQMLTTRGHHTDVANIFPATFVTAEMVPWEPGTWLISCQVNSHFRDGMQALYKVKSCSMAPPVDLLTGKVRQYFIEAHEIQWDYGPMGHDGSTGKNLREPGSISDKFFQKSSSRIGGTYWKVRYEAFQDETFQEKMHLEEDRHLGILGPVIRAEVGDTIQVVFYNRASQPFSMQPHGVFYEKDYEGTVYNDGSSYPGLVAKPFEKVTYRWTVPPHAGPTAQDPACLTWMYFSAADPIRDTNSGLVGPLLVCRAGALGADGKQKGVDKEFFLLFTVLDENKSWYSNANQAAAMLDFRLLSEDIEGFQDSNRMHAINGFLFSNLPRLDMCKGDTVAWHLLGLGTETDVHGVMFQGNTVQLQGMRKGAAMLFPHTFVMAIMQPDNLGTFEIYCQAGSHREAGMRAIYNVSQCPGHQATPRQRYQAARIYYIMAEEVEWDYCPDRSWEREWHNQSEKDSYGYIFLSNKDGLLGSRYKKAVFREYTDGTFRIPRPRTGPEEHLGILGPLIKGEVGDILTVVFKNNASRPYSVHAHGVLESTTVWPLAAEPGEVVTYQWNIPERSGPGPNDSACVSWIYYSAVDPIKDMYSGLVGPLAICQKGILEPHGGRSDMDREFALLFLIFDENKSWYLEENVATHGSQDPGSINLQDETFLESNKMHAINGKLYANLRGLTMYQGERVAWYMLAMGQDVDLHTIHFHAESFLYRNGENYRADVVDLFPGTFEVVEMVASNPGTWLMHCHVTDHVHAGMETLFTVFSRTEHLSPLTVITKETEKVPPRDIEEGNVKMLGMQIPIKNVEMLASVLVAISVTLLLVVLALGGVVWYQHRQRKLRRNRRSILDDSFKLLSFKQ

SEQ ID NO: 37864 - protein, 969 aa, Homo sapiens
  Payload ID: 7527
  Gene Symbol: HEPH
  Gene Name: hephaestin
  ENSP ID: ENSP00000413211
MWAMESGHLLWALLFMQSLWPQLTDGATRVYYLGIRDVQWNYAPKGRNVITNQPLDSDIVASSFLKSDKNRIGGTYKKTIYKEYKDDSYTDEVAQPAWLGFLGPVLQAEVGDVILIHLKNFATRPYTIHPHGVFYEKDSEGSLYPDGSSGPLKADDSVPPGGSHIYNWTIPEGHAPTDADPACLTWIYHSHVDAPRDIATGLIGPLITCKRGALDGNSPPQRQDVDHDFFLLFSVVDENLSWHLNENIATYCSDPASVDKEDETFQESNRMHAINGFVFGNLPELNMCAQKRVAWHLFGMGNEIDVHTAFFHGQMLTTRGHHTDVANIFPATFVTAEMVPWEPGTWLISCQVNSHFRDGMQALYKVKSCSMAPPVDLLTGKVRQYFIEAHEIQWDYGPMGHDGSTGKNLREPGSISDKFFQKSSSRIGGTYWKVRYEAFQDETFQEKMHLEEDRHLGILGPVIRAEVGDTIQVVFYNRASQPFSMQPHGVFYEKDYEGTVYNDGTFEIYCQAGSHREAGMRAIYNVSQCPGHQATPRQRYQAARIYYIMAEEVEWDYCPDRSWEREWHNQSEKDSYGYIFLSNKDGLLGSRYKKAVFREYTDGTFRIPRPRTGPEEHLGILGPLIKGEVGDILTVVFKNNASRPYSVHAHGVLESTTVWPLAAEPGEVVTYQWNIPERSGPGPNDSACVSWIYYSAVDPIKDMYSGLVGPLAICQKGILEPHGGRSDMDREFALLFLIFDENKSWYLEENVATHGSQDPGSINLQDETFLESNKMHAINGKLYANLRGLTMYQGERVAWYMLAMGQDVDLHTIHFHAESFLYRNGENYRADVVDLFPGTFEVVEMVASNPGTWLMHCHVTDHVHAGMETLFTVFSRTEHLSPLTVITKETEKAVPPRDIEEGNVKMLGMQIPIKNVEMLASVLVAISVTLLLVVLALGGVVWYQHRQRKLRRNRRSILDDSFKLLSFKQ

SEQ ID NO: 37865 - protein, 1212 aa, Homo sapiens
  Payload ID: 7527
  Gene Symbol: HEPH
  Gene Name: hephaestin
  Uniprot ID: Q9BQS7
  ENSP ID: ENSP00000430620
MTQTLPYHLSLLNVLFPGPCSRHFKFRRGKCAQPAWRKVSAPSQDLLITKVMWAMESGHLLWALLFMQSLWPQLTDGATRVYYLGIRDVQWNYAPKGRNVITNQPLDSDIVASSFLKSDKNRIGGTYKKTIYKEYKDDSYTDEVAQPAWLGFLGPVLQAEVGDVILIHLKNFATRPYTIHPHGVFYEKDSEGSLYPDGSSGPLKADDSVPPGGSHIYNWTIPEGHAPTDADPACLTWIYHSHVDAPRDIATGLIGPLITCKRGALDGNSPPQRQDVDHDFFLLFSVVDENLSWHLNENIATYCSDPASVDKEDETFQESNRMHAINGFVFGNLPELNMCAQKRVAWHLFGMGNEIDVHTAFFHGQMLTTRGHHTDVANIFPATFVTAEMVPWEPGTWLISCQVNSHFRDGMQALYKVKSCSMAPPVDLLTGKVRQYFIEAHEIQWDYGPMGHDGSTGKNLREPGSISDKFFQKSSSRIGGTYWKVRYEAFQDETFQEKMHLEEDRHLGILGPVIRAEVGDTIQVVFYNRASQPFSMQPHGVFYEKDYEGTVYNDGSSYPGLVAKPFEKVTYRWTVPPHAGPTAQDPACLTWMYFSAADPIRDTNSGLVGPLLVCRAGALGADGKQKGVDKEFFLLFTVLDENKSWYSNANQAAAMLDFRLLSEDIEGFQDSNRMHAINGFLFSNLPRLDMCKGDTVAWHLLGLGTETDVHGVMFQGNTVQLQGMRKGAAMLFPHTFVMAIMQPDNLGTFEIYCQAGSHREAGMRAIYNVSQCPGHQATPRQRYQAARIYYIMAEEVEWDYCPDRSWEREWHNQSEKDSYGYIFLSNKDGLLGSRYKKAVFREYTDGTFRIPRPRTGPEEHLGILGPLIKGEVGDILTVVFKNNASRPYSVHAHGVLESTTVWPLAAEPGEVVTYQWNIPERSGPGPNDSACVSWIYYSAVDPIKDMYSGLVGPLAICQKGILEPHGGRSDMDREFALLFLIFDENKSWYLEENVATHGSQDPGSINLQDETFLESNKMHAINGKLYANLRGLTMYQGERVAWYMLAMGQDVDLHTIHFHAESFLYRNGENYRADVVDLFPGTFEVVEMVASNPGTWLMHCHVTDHVHAGMETLFTVFSRTEHLSPLTVITKETEKAVPPRDIEEGNVKMLGMQIPIKNVEMLASVLVAISVTLLLVVLALGGVVWYQHRQRKLRRNRRSILDDSFKLLSFKQ

SEQ ID NO: 37866 - protein, 1159 aa, Homo sapiens
  Payload ID: 7528
  Gene Symbol: HEPHL1
  Gene Name: hephaestin-like 1
  Uniprot ID: Q6MZM0
  ENSP ID: ENSP00000313699
MPRKQPAGCIFLLTFLGLSGLVGTVTRTYYIGIVEEYWNYVPQGKNVITGKSFTEDKLATLFLERGPNRIGSIYKKAVYRRFTDGTYSIEIPKPPWLGFLGPILRAEVGDVIVIHLKNFASRPYSLHPHGVFYNKDSEGALYPDGTSGRNKNDDMVPPGKNYTYVWPVREEYAPTPADANCLTWVYHSHIDAPKDICSGLIGPLLVCKEGILNRYSGTRNDVDREFVIMFTLVDENQSWYLNENIKHFCTNPDSVDKKDAVFQRSNKMHALNGYLFGNFPEPDMCVGESVSWHLFGMGNEIDIHSIYFYGNTFISRGHRTDVVNLFPATFLTTEMIAENPGKWMITCQVSDHLQAGMLGQYNVDNCKSDIFYPKMKGQQRRYFIAAEKILWDYAPQGYNKFSGLPLNASGSDSDLYFTQGDNRIGGKYWKVRYTEFVDATFTKRKRLSAEEAHLGILGPVIKAEVGDTLLVTFANKADKVYSILPHGVIYDKASDAAPNLDGFVKPGAHVKPGETFTYKWTVPESVSPTAGDPPCLTYLYFSAVDPIKDTSSGLVGPLLVCKKGVLNADGTQKGIDKEFYLLFTVFDENLSRYFDENIQKFIWHPFSIDKEDKEFVKSNRMHAVNGYMYGNQPGLNMCKRDRVSWHLIGLGTDTDMHGIVFQGNTIHLRGTHRDSLALFPHMATTAFMQPDHAGIFRVFCATMPHLSRGMGQIYEVSSCDNRDPSEQRYGMIRTFYIAAEEVEWDYAPNKNWEFEKQHVDARGERHGDIFMNRTENWIGSQYKKVVYREYTDGEFVEIKARPPREEHLELLGPMIHAEVGNTVLIIFKNKASRPYSISAQGVEEMDSGKQFQVPMTKPGEVKTYRWNIPKRSGPGPSDPNCIPWVYYSTVNFVKDTYSGLMGPLITCRKGVLNEKGRRSDVDYEFALLFLVFNENESWYLDDNIKKYLNKDPRDFKRTDDFEESNRMHAINGKIFGNLHGLIMNEDTMTNWYLLGIGSEVDIHTIHYHAESFLFKIDKSYREDVYDLFPGTFQTIELFADHPGTWLLHCHVSDHIHAGMETTYTVLRNIDNRIPYSTTSPGVASHPATVPSNERPGKEQLYFFGKNLGPTGAKAALVILFIIGLLLLITTVILSLRLCSAMKQTDYQQVQSCALPTDAL

SEQ ID NO: 37867 - protein, 417 aa, Homo sapiens
  Payload ID: 7529
  Gene Symbol: HPN
  Gene Name: hepsin
  Uniprot ID: P05981
  ENSP ID: ENSP00000262626
MAQKEGGRTVPCCSRPKVAALTAGTLLLLTAIGAASWAIVAVLLRSDQEPLYPVQVSSADARLMVFDKTEGTWRLLCSSRSNARVAGLSCEEMGFLRALTHSELDVRTAGANGTSGFFCVDEGRLPHTQRLLEVISVCDCPRGRFLAAICQDCGRRKLPVDRIVGGRDTSLGRWPWQVSLRYDGAHLCGGSLLSGDWVLTAAHCFPERNRVLSRWRVFAGAVAQASPHGLQLGVQAVVYHGGYLPFRDPNSEENSNDIALVHLSSPLPLTEYIQPVCLPAAGQALVDGKICTVTGWGNTQYYGQQAGVLQEARVPIISNDVCNGADFYGNQIKPKMFCAGYPEGGIDACQGDSGGPFVCEDSISRTPRWRLCGIVSWGTGCALAQKPGVYTKVSDFREWIFQAIKTHSEASGMVTQL

SEQ ID NO: 37868 - protein, 417 aa, Homo sapiens; identical to SEQ ID NO: 37867
  Payload ID: 7529
  Gene Symbol: HPN
  Gene Name: hepsin
  Uniprot ID: P05981
  ENSP ID: ENSP00000376060

SEQ ID NO: 37869 - protein, 259 aa, Homo sapiens
  Payload ID: 7529
  Gene Symbol: HPN
  Gene Name: hepsin
  ENSP ID: ENSP00000470327
MAQKEVQVSSADARLMVFDKTEGTWRLLCSSRSNARVAGLSCEEMGFLRRNRVLSRWRVFAGAVAQASPHGLQLGVQAVVYHGGYLPFRDPNSEENSNDIALVHLSSPLPLTEYIQPVCLPAAGQALVDGKICTVTGWGNTQYYGQQAGVLQEARVPIISNDVCNGADFYGNQIKPKMFCAGYPEGGIDACQGDSGGPFVCEDSISRTPRWRLCGIVSWGTGCALAQKPGVYTKVSDFREWIFQAIKTHSEASGMVTQL

SEQ ID NO: 37870 - protein, 80 aa, Homo sapiens
  Payload ID: 7529
  Gene Symbol: HPN
  Gene Name: hepsin
  ENSP ID: ENSP00000472310
MAQKEGGRTVPCCSRPKVAALTAGTLLLLTAIGAASWAIVAVLLRSDQEPLYPVQVSSADARLMVFDKTEGTWRLLCSSR

SEQ ID NO: 37871 - protein, 700 aa, Homo sapiens [sequence omitted]

SEQ ID NO: 37872 - protein, 324 aa, Homo sapiens
  Payload ID: 7530
  Gene Symbol: HPS1
  Gene Name: Hermansky-Pudlak syndrome 1
  Uniprot ID: Q92902
  ENSP ID: ENSP00000343638
MKCVLVATEGAEVLFYWTDQEFEESLRLKFGQSENEEEELPALEDQLSTLLAPVIISSMTMLEKLSDTYTCFSTENGNFLYVLHLFGECLFIAINGDHTESEGDLRRKLYVLKYLFEVHFGLVTVDGHLIRKELRPPDLAQRVQLWEHFQSLLWTYSRLREQEQCFAVEALERLIHPQLCELCIEALERHVIQAVNTSPERGGEEALHAFLLVHSKLLAFYSSHSASSLRPADLLALILLVQDLYPSESTAEDDIQPSPRRARSSQNIPVQQAWSPHSTGPTGGSSAETETDSFSLPEEYFTPAPSPGDQSSGEDRRKAGGNNS

SEQ ID NO: 37873 - protein, 326 aa, Homo sapiens
  Payload ID: 7530
  Gene Symbol: HPS1
  Gene Name: Hermansky-Pudlak syndrome 1
  ENSP ID: ENSP00000352652
RLIHPQLCELCIEALERHVIQAVNTSPERGGEEALHAFLLVHSKLLAFYSSHSASSLRPADLLALILLVQDLYPSESTAEDDIQETDSFSLPEEYFTPAPSPGDQSSGSTIWLEGGTPPMDALQIAEDTLQTLVPHCPVPSGPRRIFLDANVKESYCPLVPHTMYCLPLWQGINLVLLTRSPSAPLALVLSQLMDGFSMLEKKLKEGPEPGASLRSQPLVGDLRQRMDKFVKNRGAQEIQSTWLEFKAKAFSKSEPGSSWELLQACGKLKRQLCAIYRLNFLTTAPSRGGPHLPQHLQDQVQRLMREKLTDWKDFLLVKSRRNITM

SEQ ID NO: 37874 - protein, 700 aa, Homo sapiens [sequence omitted]

SEQ ID NO: 37875 - protein, 159 aa, Homo sapiens
  Payload ID: 7530
  Gene Symbol: HPS1
  Gene Name: Hermansky-Pudlak syndrome 1
  ENSP ID: ENSP00000392462
  MOD_RES (1)..(1): Any amino acid
XLRPPDLAQRVQLWEHFQSLLWTYSRLREQEQCFAVEALERLIHPQLCELCIEALERHVIQAVNTSPERGGEEALHAFLLVHSKLLAFYSSHSASSLRPADLLALILLVQDLYPSESTAEDDIQETDSFSLPEEYFTPAPSPGDQSSGEDRRKAGGNNS

SEQ ID NO: 37876 - protein, 700 aa, Homo sapiens [sequence omitted]

SEQ ID NO: 37877 - protein, 1004 aa, Homo sapiens
  Payload ID: 7531
  Gene Symbol: HPS3
  Gene Name: Hermansky-Pudlak syndrome 3
  Uniprot ID: Q969F9
  ENSP ID: ENSP00000296051
MVQLYNLHPFGSQQVVPCKLEPDRFCGGGRDALFVAAGCKVEAFAVAGQELCQPRCAFSTLGRVLRLAYSEAGDYLVAIEEKNKATFLRAYVNWRNKRTENSRVCIRMIGHNVEGPFSKAFRDQMYIIEMPLSEAPLCISCCPVKGDLLVGCTNKLVLFSLKYQIINEEFSLLDFERSLIIHIDNITPVEVSFCVGYVAVMSDLEVLIVKLESGPKNGERVHHHPHKTNNRIRRTEEGISNEISQLESDDFVICQKPLELLGEKSEQSGLSVTLESTGLADEKRKYSHFQHLLYRRFAPDISSYVLSDDIKLHSLQLLPIYQTGSLTSDGKNLSQEKELLSLFCFFSLPHVGYLYMVVKSVELMSVYQYPEKSQQAVLTPQFLHVITSNNLQCFTVRCSAAAAREEDPYMDTTLKACPPVSMDVCALRIQLFIGLKAICHFKNHIILLTKAEPEAIPERRQSPKRLLSRKDTSVKIKIPPVAEAGWNLYIVNTISPVQLYKEMVDYSNTYKTVKTQSCIHLLSEAHLLVRAALMDASQLEPGEKAELLEAFKESCGHLGDCYSRLDSQHSHLTLPYYKMSGLSMAEVLARTDWTVEDGLQKYERGLIFYINHSLYENLDEELNEELAAKVVQMFYVAEPKQVPHILCSPSMKNINPLTAMSYLRKLDTSGFSSILVTLTKAAVALKMGDLDMHRNEMKSHSEMKLVCGFILEPRLLIQQRKGQIVPTELALHLKETQPGLLVASVLGLQKNNKIGIEEADSFFKVLCAKDEDTIPQLLVDFWEAQLVACLPDVVLQELFFKLTSQYIWRLSKRQPPDTTPLRTSEDLINACSHYGLIYPWVHVVISSDSLADKNYTEDLSKLQSLICGPSFDIASIIPFLEPLSEDTIAGLSVHVLCRTRLKEYEQCIDILLERCPEAVIPYANHELKEENRTLWWKKLLPELCQRIKCGGEKYQLYLSSLKETLSIVAVELELKDFMNVLPEDGTATFFLPYLLYCSRKKPLT

SEQ ID NO: 37878 - protein, 839 aa, Homo sapiens
  Payload ID: 7531
  Gene Symbol: HPS3
  Gene Name: Hermansky-Pudlak syndrome 3
  ENSP ID: ENSP00000418230
MVQLYNLHPFGSQQVVPCKLEPDRFCGGGRDALFVAAGCKVEAFAVAGQELCQPRCAFSTLGRVLRLAYSEAGISNEISQLESDDFVICQKPLELLGEKSEQSGLSVTLESTGLADEKRKYSHFQHLLYRRFAPDISSYVLSDDIKLHSLQLLPIYQTGSLTSDGKNLSQEKELLSLFCFFSLPHVGYLYMVVKSVELMSVYQYPEKSQQAVLTPQFLHVITSNNLQCFTVRCSAAAAREEDPYMDTTLKACPPVSMDVCALRIQLFIGLKAICHFKNHIILLTKAEPEAIPERRQSPKRLLSRKDTSVKIKIPPVAEAGWNLYIVNTISPVQLYKEMVDYSNTYKTVKTQSCIHLLSEAHLLVRAALMDASQLEPGEKAELLEAFKESCGHLGDCYSRLDSQHSHLTLPYYKMSGLSMAEVLARTDWTVEDGLQKYERGLIFYINHSLYENLDEELNEELAAKVVQMFYVAEPKQVPHILCSPSMKNINPLTAMSYLRKLDTSGFSSILVTLTKAAVALKMGDLDMHRNEMKSHSEMKLVCGFILEPRLLIQQRKGQIVPTELALHLKETQPGLLVASVLGLQKNNKIGIEEADSFFKVLCAKDEDTIPQLLVDFWEAQLVACLPDVVLQELFFKLTSQYIWRLSKRQPPDTTPLRTSEDLINACSHYGLIYPWVHVVISSDSLADKNYTEDLSKLQSLICGPSFDIASIIPFLEPLSEDTIAGLSVHVLCRTRLKEYEQCIDILLERCPEAVIPYANHELKEENRTLWWKKLLPELCQRIKCGGEKYQLYLSSLKETLSIVAVELELKDFMNVLPEDGTATFFLPYLLYCSRKKPLT

SEQ ID NO: 37879 - protein, 266 aa, Homo sapiens
  Payload ID: 7531
  Gene Symbol: HPS3
  Gene Name: Hermansky-Pudlak syndrome 3
  ENSP ID: ENSP00000419824
ELAAKVVQMFYVAEPKQVPHILCSPSMKNINPLTAMSYLRKLDTSGFSSILVTLTKAAVALKMGDLDMHRNEMKSHSEMKLVCGFILEPRLLIQQRKGQIVPTELALHLKETQPGLLVASVLGLQKNNKIGIEEADSFFKVLCAKDEDTIPQLLVDFWEAQLVACLPDVVLQELFFKLTSQYIWRLSKRQPPDTTPLRTSEDLINACSHYGLIYPWVHVVISSDSLADKNYTEDLSKLQLPLFRSWSHFQKTLLPASVSMFCVVHA

SEQ ID NO: 37880 - protein, 708 aa, Homo sapiens
  Payload ID: 7532
  Gene Symbol: HPS4
  Gene Name: Hermansky-Pudlak syndrome 4
  Uniprot ID: Q9NQG7
  ENSP ID: ENSP00000338457
MATSTSTEAKSASWWNYFFLYDGSKVKEEGDPTRAGICYFYPSQTLLDQQELLCGQIAGVVRCVSDISDSPPTLVRLRKLKFAIKVDGDYLWVLGCAVELPDVSCKRFLDQLVGFFNFYNGPVSLAYENCSQEELSTEWDTFIEQILKNTSDLHKIFNSLWNLDQTKVEPLLLLKAARILQTCQRSPHILAGCILYKGLIVSTQLPPSLTAKVLLHRTAPQEQRLPTGEDAPQEHGAALPPNVQIIPVFVTKEEAISLHEFPVEQMTRSLASPAGLQDGSAQHHPKGGSTSALKENATGHVESMAWTTPDPTSPDEACPDGRKENGCLSGHDLESIRPAGLHNSARGEVLGLSSSLGKELVFLQEELDLSEIHIPEAQEVEMASGHFAFLHVPVPDGRAPYCKASLSASSSLEPTPPEDTAISSLRPPSAPEMLTQHGAQEQLEDHPGHSSQAPIPRADPLPRRTRRPLLLPRLDPGQRGNKLPTGEQGLDEDVDGVCESHAAPGLECSSGSANCQGAGPSADGISSRLTPAESCMGLVRMNLYTHCVKGLVLSLLAEEPLLGDSAAIEEVYHSSLASLNGLEVHLKETLPRDEAASTSSTYNFTHYDRIQSLLMANLPQVATPQDRRFLQAVSLMHSEFAQLPALYEMTVRNASTAVYACCNPIQETYFQQLAPAARSSGFPNPQDGAFSLSGKAKQKLLKHGVNLL

SEQ ID NO: 37881 - protein, 708 aa, Homo sapiens; identical to SEQ ID NO: 37880
  Payload ID: 7532
  Gene Symbol: HPS4
  Gene Name: Hermansky-Pudlak syndrome 4
  Uniprot ID: Q9NQG7
  ENSP ID: ENSP00000381213

SEQ ID NO: 37882 - protein, 703 aa, Homo sapiens
  Payload ID: 7532
  Gene Symbol: HPS4
  Gene Name: Hermansky-Pudlak syndrome 4
  Uniprot ID: Q9NQG7
  ENSP ID: ENSP00000384185
MAPLCSLARWNYFFLYDGSKVKEEGDPTRAGICYFYPSQTLLDQQELLCGQIAGVVRCVSDISDSPPTLVRLRKLKFAIKVDGDYLWVLGCAVELPDVSCKRFLDQLVGFFNFYNGPVSLAYENCSQEELSTEWDTFIEQILKNTSDLHKIFNSLWNLDQTKVEPLLLLKAARILQTCQRSPHILAGCILYKGLIVSTQLPPSLTAKVLLHRTAPQEQRLPTGEDAPQEHGAALPPNVQIIPVFVTKEEAISLHEFPVEQMTRSLASPAGLQDGSAQHHPKGGSTSALKENATGHVESMAWTTPDPTSPDEACPDGRKENGCLSGHDLESIRPAGLHNSARGEVLGLSSSLGKELVFLQEELDLSEIHIPEAQEVEMASGHFAFLHVPVPDGRAPYCKASLSASSSLEPTPPEDTAISSLRPPSAPEMLTQHGAQEQLEDHPGHSSQAPIPRADPLPRRTRRPLLLPRLDPGQRGNKLPTGEQGLDEDVDGVCESHAAPGLECSSGSANCQGAGPSADGISSRLTPAESCMGLVRMNLYTHCVKGLVLSLLAEEPLLGDSAAIEEVYHSSLASLNGLEVHLKETLPRDEAASTSSTYNFTHYDRIQSLLMANLPQVATPQDRRFLQAVSLMHSEFAQLPALYEMTVRNASTAVYACCNPIQETYFQQLAPAARSSGFPNPQDGAFSLSGKAKQKLLKHGVNLL

SEQ ID NO: 37883 - protein, 191 aa, Homo sapiens
  Payload ID: 7532
  Gene Symbol: HPS4
  Gene Name: Hermansky-Pudlak syndrome 4
  ENSP ID: ENSP00000399705
MAPLCSLARWNYFFLYDGSKVKEEGDPTRAGICYFYPSQTLLDQQELLCGQIAGVVRCVSDISDSPPTLVRLRKLKFAIKVDGDYLWVLGCAVELPDVSCKRFLDQLVGFFNFYNGPVSLAYENCSQEELSTEWDTFIEQILKNTSDLHKIFNSLWNLDQTKALSYTLSSCSVQPFPLFSLPDCEHADGWA

SEQ ID NO: 37884 - protein, 196 aa, Homo sapiens
  Payload ID: 7532
  Gene Symbol: HPS4
  Gene Name: Hermansky-Pudlak syndrome 4
  ENSP ID: ENSP00000406764
MATSTSTEAKSASWWNYFFLYDGSKVKEEGDPTRAGICYFYPSQTLLDQQELLCGQIAGVVRCVSDISDSPPTLVRLRKLKFAIKVDGDYLWVLGCAVELPDVSCKRFLDQLVGFFNFYNGPVSLAYENCSQEELSTEWDTFIEQILKNTSDLHKIFNSLWNLDQTKALSYTLSSCSVQPFPLFSLPDCEHADGWA

SEQ ID NO: 37885 - protein, 481 aa, Homo sapiens
  Payload ID: 7532
  Gene Symbol: HPS4
  Gene Name: Hermansky-Pudlak syndrome 4
  ENSP ID: ENSP00000415081
MATSTSTEAKSASWWNYFFLYDGSKVKEEGDPTRAGICYFYPSQTLLDQQELLCGQIAGVVRCVSDISDSPPTLVRLRKLKFAIKVDGDYLWVLGCAVELPDVSCKRFLDQLVGFFNFYNGPVSLAYENCSQEELSTEWDTFIEQILKNTSDLHKIFNSLWNLDQTKVEPLLLLKAARILQTCQRSPHILAGCILYKGLIVSTQLPPSLTAKVLLHRTAPQEQRLPTGEDAPQEHGKWMLWSFKNRVTHQNPNGAALPPNVQIIPVFVTKEEAISLHEFPVEQMTRSLASPAGLQDGSAQHHPKGGSTSALKENATGHVESMAWTTPDPTSPDEACPDGRKENGCLSGHDLESIRPAGLHNSARGEVLGLSSSLGKELVFLQEELDLSEIHIPEAQEVEMASGHFAFLHVPVPDGRAPYCKASLSASSSLEPTPPEDTAISSLRPPSAPEMLTQHGAQEQLEDHPGHSSQAPIPRADPLPR

SEQ ID NO: 37886 - protein, 167 aa, Homo sapiens
  Payload ID: 7532
  Gene Symbol: HPS4
  Gene Name: Hermansky-Pudlak syndrome 4
  ENSP ID: ENSP00000430291
MAPLCSLARWNYFFLYDGSKVKEEGDPTRAGICYFYPSQTLLDQQELLCGQIAGVVRCVSDISDSPPTLVRLRKLKFAIKVDGDYLWVLGCAVELPDVSCKRFLDQLVGFFNFYNGPVSLAYENCSQEELSTEWDTFIEQILKNTSDLHKIFNSLWNLDQTKGLLGP

SEQ ID NO: 37887 - protein, 1129 aa, Homo sapiens
  Payload ID: 7533
  Gene Symbol: HPS5
  Gene Name: Hermansky-Pudlak syndrome 5
  Uniprot ID: Q9UPZ3
  ENSP ID: ENSP00000265967
MAFVPVIPESYSHVLAEFESLDPLLSALRLDSSRLKCTSIAVSRKWLALGSSGGGLHLIQKEGWKHRLFLSHREGAISQVACCLHDDDYVAVATSQGLVVVWELNQERRGKPEQMYVSSEHKGRRVTALCWDTAILRVFVGDHAGKVSAIKLNTSKQAKAAAAFVMFPVQTITTVDSCVVQLDYLDGRLLISSLTRSFLCDTEREKFWKIGNKERDGEYGACFFPGRCSGGQQPLIYCARPGSRMWEVNFDGEVISTHQFKKLLSLPPLPVITLRSEPQYDHTAGSSQSLSFPKLLHLSEHCVLTWTERGIYIFIPQNVQVLLWSEVKDIQDVAVCRNELFCLHLNGKVSHLSLISVERCVERLLRRGLWNLAARTCCLFQNSVIASRARKTLTADKLEHLKSQLDHGTYNDLISQLEELILKFEPLDSACSSRRSSISSHESFSILDSGIYRIISSRRGSQSDEDSCSLHSQTLSEDERFKEFTSQQEEDLPDQCCGSHGNEDNVSHAPVMFETDKNETFLPFGIPLPFRSPSPLVSLQAVKESVSSFVRKTTEKIGTLHTSPDLKVRPELRGDEQSCEEDVSSDTCPKEEDTEEEKEVTSPPPEEDRFQELKVATAEAMTKLQDPLVLFESESLRMVLQEWLSHLEKTFAMKDFSGVSDTDNSSMKLNQDVLLVNESKKGILDEDNEKEKRDSLGNEESVDKTACECVRSPRESLDDLFQICSPCAIASGLRNDLAELTTLCLELNVLNSKIKSTSGHVDHTLQQYSPEILACQFLKKYFFLLNLKRAKESIKLSYSNSPSVWDTFIEGLKEMASSNPVYMEMEKGDLPTRLKLLDDEVPFDSPLLVVYATRLYEKFGESALRSLIKFFPSILPSDIIQLCHHHPAEFLAYLDSLVKSRPEDQRSSFLESLLQPESLRLDWLLLAVSLDAPPSTSTMDDEGYPRPHSHLLSWGYSQLILHLIKLPADFITKEKMTDICRSCGFWPGYLILCLELERRREAFTNIVYLNDMSLMEGDNGWIPETVEEWKLLLHLIQSKSTRPAPQESLNGSLSDGPSPINVENVALLLAKAMGPDRAWSLLQECGLALELSEKFTRTCDILRIAEKRQRALIQSMLEKCDRFLWSQQA

SEQ ID NO: 37888 - protein, 1015 aa, Homo sapiens
  Payload ID: 7533
  Gene Symbol: HPS5
  Gene Name: Hermansky-Pudlak syndrome 5
  Uniprot ID: Q9UPZ3
  ENSP ID: ENSP00000379552
MYVSSEHKGRRVTALCWDTAILRVFVGDHAGKVSAIKLNTSKQAKAAAAFVMFPVQTITTVDSCVVQLDYLDGRLLISSLTRSFLCDTEREKFWKIGNKERDGEYGACFFPGRCSGGQQPLIYCARPGSRMWEVNFDGEVISTHQFKKLLSLPPLPVITLRSEPQYDHTAGSSQSLSFPKLLHLSEHCVLTWTERGIYIFIPQNVQVLLWSEVKDIQDVAVCRNELFCLHLNGKVSHLSLISVERCVERLLRRGLWNLAARTCCLFQNSVIASRARKTLTADKLEHLKSQLDHGTYNDLISQLEELILKFEPLDSACSSRRSSISSHESFSILDSGIYRIISSRRGSQSDEDSCSLHSQTLSEDERFKEFTSQQEEDLPDQCCGSHGNEDNVSHAPVMFETDKNETFLPFGIPLPFRSPSPLVSLQAVKESVSSFVRKTTEKIGTLHTSPDLKVRPELRGDEQSCEEDVSSDTCPKEEDTEEEKEVTSPPPEEDRFQELKVATAEAMTKLQDPLVLFESESLRMVLQEWLSHLEKTFAMKDFSGVSDTDNSSMKLNQDVLLVNESKKGILDEDNEKEKRDSLGNEESVDKTACECVRSPRESLDDLFQICSPCAIASGLRNDLAELTTLCLELNVLNSKIKSTSGHVDHTLQQYSPEILACQFLKKYFFLLNLKRAKESIKLSYSNSPSVWDTFIEGLKEMASSNPVYMEMEKGDLPTRLKLLDDEVPFDSPLLVVYATRLYEKFGESALRSLIKFFPSILPSDIIQLCHHHPAEFLAYLDSLVKSRPEDQRSSFLESLLQPESLRLDWLLLAVSLDAPPSTSTMDDEGYPRPHSHLLSWGYSQLILHLIKLPADFITKEKMTDICRSCGFWPGYLILCLELERRREAFTNIVYLNDMSLMEGDNGWIPETVEEWKLLLHLIQSKSTRPAPQESLNGSLSDGPSPINVENVALLLAKAMGPDRAWSLLQECGLALELSEKFTRTCDILRIAEKRQRALIQSMLEKCDRFLWSQQA

SEQ ID NO: 37889 - protein, 1015 aa, Homo sapiens; identical to SEQ ID NO: 37888
  Payload ID: 7533
  Gene Symbol: HPS5
  Gene Name: Hermansky-Pudlak syndrome 5
  Uniprot ID: Q9UPZ3
  ENSP ID: ENSP00000399590

SEQ ID NO: 37890 - protein, 400 aa, Homo sapiens
  Payload ID: 7533
  Gene Symbol: HPS5
  Gene Name: Hermansky-Pudlak syndrome 5
  ENSP ID: ENSP00000431758
MYVSSEHKGRRVTALCWDTAILRVFVGDHAGKVSAIKLNTSKQAKAAAAFVMFPVQTITTVDSCVVQLDYLDGRLLISSLTRSFLCDTEREKFWKIGNKERDGEYGACFFPGRCSGGQQPLIYCARPGSRMWEVNFDGEVISTHQFKKLLSLPPLPVITLRSEPQYDHTAGSSQSLSFPKLLHLSEHCVLTWTERGIYIFIPQNVQVLLWSEVKDIQDVAVCRNELFCLHLNGKVSHLSLISVERCVERLLRRGLWNLAARTCCLFQNSVIASRARKTLTADKLEHLKSQLDHGTYNDLISQLEELILKFEPLDSACSSRRSSISSHESFSILDSGIYRIISSRRGSQSDEDSCSLHSQTLSEDERFKEFTSQQEEDLPDQCCGSHGNEGDECVCCWFLM

SEQ ID NO: 37891 - protein, 263 aa, Homo sapiens
  Payload ID: 7533
  Gene Symbol: HPS5
  Gene Name: Hermansky-Pudlak syndrome 5
  ENSP ID: ENSP00000437437
MKIGDFFPQLSLRSSFLESLLQPESLRLDWLLLAVSLDAPPSTSTMDDEGYPRPHSHLLSWGYSQLILHLIKLPADFITKEKMTDICRSCGFWPGYLILCLELERRREAFTNIVYLNDMSLMEGDNGWIPETVEEWKLLLHLIQSKSTRPAPQESLNGSLSDGPSPINVENVALLLAKAMGPDRAWSLLQECGLALELSEKFTRTCDILRIAEKRQRHLNCFHFLAIVNNAAMNMSIQICLPDTAFSSFGYIPESGILESYGP

SEQ ID NO: 37892 - protein, 160 aa, Homo sapiens
  Payload ID: 7533
  Gene Symbol: HPS5
  Gene Name: Hermansky-Pudlak syndrome 5
  ENSP ID: ENSP00000441781
MASSNPVYMEMEKGDLPTRLKLLDDEVPFDSPLLVVYATRLYEKFGESALRSLIKFFPSILPSDIIQLCHHHPAEFLAYLDSLVKSRPEDQRSSFLESLLQPESLRLDWLLLAVSLDAPPSTSTMDDEGYPRPHSHLLSWGYSQLILHLIKLPADFITKE

SEQ ID NO: 37893 - protein, 775 aa, Homo sapiens
  Payload ID: 7534
  Gene Symbol: HPS6
  Gene Name: Hermansky-Pudlak syndrome 6
  Uniprot ID: Q86YV9
  ENSP ID: ENSP00000299238
MKRSGTLRLLSDLSAFGGAARLRELVAGDSAVRVRGSPDGRHLLLLRPPGAVAPQLLVASRGPGAELERAWPAGQPSPLDAFFLPWPARPALVLVWESGLAEVWGAGVGPGWRPLQSTELCPGGGARVVAVAALRGRLVWCEERQARAEGPSGSPAAAFSHCVCVRTLEPSGEASTSLGRTHVLLHHCPAFGLLASCRQLFLVPTATTWPGVAHVLLIWSPGKGKVMVAAPRLGLSYSKSLNPGRGDTWDFRTLLRGLPGLLSPREPLAVHTWAPTPQGLLLLDFGGTVSLLQSHGGTRAVGTLQEAPVGPWGSAALGTFQGTLACVLGSTLELLDMGSGQLLERKVLSTDRVHLLEPPAPGMEDEEELETRGNLRLLSALGLFCVGWEAPQGVELPSAKDLVFEEACGYYQRRSLRGAQLTPEELRHSSTFRAPQALASILQGHLPPSALLTMLRTELRDYRGLEQLKAQLVAGDDEEAGWTELAEQEVARLLRTELIGDQLAQLNTVFQALPTAAWGATLRALQLQLDGNGKLRSQAPPDVWKKVLGGITAGKEPPNGILPPFELLCQCLCQLEPRWLPPFVELAQQQGGPGWGAGGPGLPLYRRALAVLGEEGTRPEALELELLLSSGRPKAVLQAVGQLVQKEQWDRALDAGLALGPSSPLLRSEIFKLLLAEFAQHRRLDAHLPLLCRLCPPELAPAELLLLLRTYLPDEVGPPTPFPEPGAEPPLTVGLLKALLEQTGAQGWLSGPVLSPYEDILWDPSTPPPTPPRDL

SEQ ID NO: 37894 - protein, 406 aa, Homo sapiens
  Payload ID: 7535
  Gene Symbol: HERPUD2
  Gene Name: HERPUD family member 2
  Uniprot ID: Q9BSE4
  ENSP ID: ENSP00000310729
MDQSGMEIPVTLIIKAPNQKYSDQTISCFLNWTVGKLKTHLSNVYPSKPLTKDQRLVYSGRLLPDHLQLKDILRKQDEYHMVHLVCTSRTPPSSPKSSTNRESHEALASSSNSSSDHSGSTTPSSGQETLSLAVGSSSEGLRQRTLPQAQTDQAQSHQFPYVMQGNVDNQFPGQAAPPGFPVYPAFSPLQMLWWQQMYAHQYYMQYQAAVSAQATSNVNPTQPTTSQPLNLAHVPGEEPPPAPNLVAQENRPMNENVQMNAQGGPVLNEEDFNRDWLDWMYTFSRAAILLSIVYFYSSFSRFIMVMGAMLLVYLHQAGWFPFRQEGGHQQAPNNNAEVNNDGQNANNLELEEMERLMDDGLEDESGEDGGEDASAIQRPGLMASAWSFITTFFTSLIPEGPPQVAN

SEQ ID NO: 37895 - protein, 406 aa, Homo sapiens; identical to SEQ ID NO: 37894
  Payload ID: 7535
  Gene Symbol: HERPUD2
  Gene Name: HERPUD family member 2
  Uniprot ID: Q9BSE4
  ENSP ID: ENSP00000379390

SEQ ID NO: 37896 - protein, 190 aa, Homo sapiens
  Payload ID: 7535
  Gene Symbol: HERPUD2
  Gene Name: HERPUD family member 2
  ENSP ID: ENSP00000391015
MDQSGMEIPVTLIIKAPNQKYSDQTISCFLNWTVGKLKTHLSNVYPSKPQDEYHMVHLVCTSRTPPSSPKSSTNRESHEALASSSNSSSDHSGSTTPSSGQETLSLAVGSSSEGLRQRTLPQAQTDQAQSHQFPYVMQGNVDNQFPGQAAPPGFPVYPAFSPLQMLWWQQMYAHQYYMQYQAAVSAQATS

SEQ ID NO: 37897 - protein, 60 aa, Homo sapiens
  Payload ID: 7535
  Gene Symbol: HERPUD2
  Gene Name: HERPUD family member 2
  ENSP ID: ENSP00000412895
MDQSGMEIPVTLIIKAPNQKYSDQTISCFLNWTVGKLKTHLSNVYPSKPSSDHSGSTTPS

SEQ ID NO: 37898 - protein, 180 aa, Homo sapiens
  Payload ID: 7535
  Gene Symbol: HERPUD2
  Gene Name: HERPUD family member 2
  ENSP ID: ENSP00000415475
MDQSGMEIPVTLIIKAPNQKYSDQTISCFLNWTVGKLKTHLSNVYPSKPSSDHSGSTTPSSGQETLSLAVGSSSEGLRQRTLPQAQTDQAQSHQFPYVMQGNVDNQFPGQAAPPGFPVYPAFSPLQMLWWQQMYAHQYYMQYQAAVSAQATSNVNPTQPTTSQPLNLAHVPGEEPPPAPN

SEQ ID NO: 37899 - protein, 18 aa, Homo sapiens
  Payload ID: 7535
  Gene Symbol: HERPUD2
  Gene Name: HERPUD family member 2
  ENSP ID: ENSP00000474978
MDQSGMEIPVTLIIKAPN

SEQ ID NO: 37900 - protein, 531 aa, Homo sapiens
  Payload ID: 7536
  Gene Symbol: HHLA1
  Gene Name: HERV-H LTR-associating 1
  Uniprot ID: C9JL84
  ENSP ID: ENSP00000388322
MLGFLSRGPSMKLCMGLACVLSLWNTVSGIKGEAKKEKGMTFLPTTVSGLREEERKEKGVAFLATTELPARSIDLSALNLTELVNGMLSRALKDSKKFFSLLSVTSYSSFAFHKFSVAVYNISNLKTVDPAKFPTRYCYCLNNRTNDLSDFTALLVDIIGNSTSYLTEIFKSTSILSVNQSNESDCIFICVMTGKSGRNLSDFWEIEEKYPIINYTFTSGLSGVLGAATRGTARTSKPTTKSQKTLPSTSPGHWTQSTPWASALRSSPWTETAAPSETEETLNTGRPPELPARATATWFSASHTLPALATRRVARTQWLTADRQTWASISSVPWAQTISEKKPGGSLWETRSSPPTTAGTEEAMNTTSLLAPAAEIMATPGSPSQASPTLGAFTHGTQTPSPTKATAPRYPQTGDLSAEWPFTAGEEPVLVPRPHQVSRCPQPLFKVGAMAAAPLTLAIQRLNPCLMELCQFFQQCLCMSQRSPRTEDMRYCLEYYSWFLKNATYICQRVKRVSHSHTLKQKCLENICKSV

SEQ ID NO: 37901 - protein, 543 aa, Homo sapiens
  Payload ID: 7536
  Gene Symbol: HHLA1
  Gene Name: HERV-H LTR-associating 1
  ENSP ID: ENSP00000407107
MLGFLSRGPSMKLCMGLACVLSLWNTVSGIKGEAKKEKGMTFLPTTGKWVIRAPFQLTCLEIKMLRRKKMGHSRAALNPDLLLSGLREEERKEKGVAFLATTELPARSIDLSALNLTELVNGMLSRALKDSKKFFSLLSVTSYSSFAFHKFSVAVYNISNLKTVDPAKFPTRYCYCLNNRTNDLSDFTALLVDIIGNSTSYLTEIFKSTSILSVNQSNESDCIFICVMTGKSGRNLSDFWEIEEKYPIINYTFTSGLSGVLGAATRGTARTSKPTTKSQKTLPSTSPGHWTQSTPWASALRSSPWTETAAPSETEETLNTGRPPELPARATATWFSASHTLPALATRRVARTQWLTADRQTWASISSVPWAQTISEKKPGGSLWETRSSPPTTAGTEEAMNTTSLLAPAAEIMATPGSPSQASPTLGAFTHGTQTPSPTKATAPRYPQTGDLSAEWPFTAGEEPVLVPRPHQVSRCPQPLFKVGAMAAAPLTLAIQRLNPCLMELCQFFQQCLCMSQRSPRTEDMSSFINPYQSSTSKISWKT

SEQ ID NO: 37902 - protein, 414 aa, Homo sapiens
  Payload ID: 7537
  Gene Symbol: HHLA2
  Gene Name: HERV-H LTR-associating 2
  Uniprot ID: Q9UM44
  ENSP ID: ENSP00000350402
MKAQTALSFFLILITSLSGSQGIFPLAFFIYVPMNEQIVIGRLDEDIILPSSFERGSEVVIHWKYQDSYKVHSYYKGSDHLESQDPRYANRTSLFYNEIQNGNASLFFRRVSLLDEGIYTCYVGTAIQVITNKVVLKVGVFLTPVMKYEKRNTNSFLICSVLSVYPRPIITWKMDNTPISENNMEETGSLDSFSINSPLNITGSNSSYECTIENSLLKQTWTGRWTMKDGLHKMQSEHVSLSCQPVNDYFSPNQDFKVTWSRMKSGTFSVLAYYLSSSQNTIINESRFSWNKELINQSDFSMNLMDLNLSDSGEYLCNISSDEYTLLTIHTVHVEPSQETASHNKGLWILVPSAILAAFLLIWSVKCCRAQLEARRSRHPADGAQQERCCVPPGERCPSAPDNGEENVPLSGKV

SEQ ID NO: 37903 - protein, 414 aa, Homo sapiens; identical to SEQ ID NO: 37902
  Payload ID: 7537
  Gene Symbol: HHLA2
  Gene Name: HERV-H LTR-associating 2
  Uniprot ID: Q9UM44
  ENSP ID: ENSP00000417856

SEQ ID NO: 37904 - protein, 136 aa, Homo sapiens
  Payload ID: 7537
  Gene Symbol: HHLA2
  Gene Name: HERV-H LTR-associating 2
  ENSP ID: ENSP00000418174
MKAQTALSFFLILITSLSGSQGIFPLAFFIYVPMNEQIVIGRLDEDIILPSSFERGSEVVIHWKYQDSYKVHSYYKGSDHLESQDPRYANRTSLFYNEIQNGNASLFFRRVSLLDEGIYTCYVGTAIQVITNKVVL

SEQ ID NO: 37905 - protein, 397 aa, Homo sapiens
  Payload ID: 7537
  Gene Symbol: HHLA2
  Gene Name: HERV-H LTR-associating 2
  ENSP ID: ENSP00000418284
MKAQTALSFFLILITSLSGSQGIFPLAFFIYVPMNEQIVIGRLDEDIILPSSFERGSEVVIHWKYQDSYKVHSYYKGSDHLESQDPRYANRTSLFYNEIQNGNASLFFRRVSLLDEGIYTCYVGTAIQVITNKVVLKVGVFLTPVMKYEKRNTNSFLICSVLSVYPRPIITWKMDNTPISENNMEETGSLDSFSINSPLNITGSNSSYECTIENSLLKQTWTGRWTMKDGLHKMQSEHVSLSCQPVNDYFSPNQDFKVTWSRMKSGTFSVLAYYLSSSQNTIINESRFSWNKELINQSDFSMNLMDLNLSDSGEYLCNISSDEYTLLTIHTVHVEPSQETASHNKGLWILVPSAILAAFLLIWSVKCCRERCCVPPGERCPSAPDNGEENVPLSGKV

SEQ ID NO: 37906 - protein, 350 aa, Homo sapiens
  Payload ID: 7537
  Gene Symbol: HHLA2
  Gene Name: HERV-H LTR-associating 2
  Uniprot ID: Q9UM44
  ENSP ID: ENSP00000418345
MVMWNILKPRTHLLCMTNMFCTRHEGTDSTVFLPHSHNISEWISRRVSLLDEGIYTCYVGTAIQVITNKVVLKVGVFLTPVMKYEKRNTNSFLICSVLSVYPRPIITWKMDNTPISENNMEETGSLDSFSINSPLNITGSNSSYECTIENSLLKQTWTGRWTMKDGLHKMQSEHVSLSCQPVNDYFSPNQDFKVTWSRMKSGTFSVLAYYLSSSQNTIINESRFSWNKELINQSDFSMNLMDLNLSDSGEYLCNISSDEYTLLTIHTVHVEPSQETASHNKGLWILVPSAILAAFLLIWSVKCCRAQLEARRSRHPADGAQQERCCVPPGERCPSAPDNGEENVPLSGKV

SEQ ID NO: 37907 - protein, 328 aa, Homo sapiens
  Payload ID: 7537
  Gene Symbol: HHLA2
  Gene Name: HERV-H LTR-associating 2
  ENSP ID: ENSP00000418797
  MOD_RES (1)..(1): Any amino acid
XIQNGNASLFFRRVSLLDEGIYTCYVGTAIQVITNKVVLKVGVFLTPVMKYEKRNTNSFLICSVLSVYPRPIITWKMDNTPISENNMEETGSLDSFSINSPLNITGSNSSYECTIENSLLKQTWTGRWTMKDGLHKMQSEHVSLSCQPVNDYFSPNQDFKVTWSRMKSGTFSVLAYYLSSSQNTIINESRFSWNKELINQSDFSMNLMDLNLSDSGEYLCNISSDEYTLLTIHTVHVEPSQETASHNKGLWILVPSAILAAFLLIWSVKCCRAQLEARRSRHPADGAQQERCCVPPGERCPSAPDNGEENVVRHYFLYQTIYSIKMLL

SEQ ID NO: 37908 - protein, 414 aa, Homo sapiens; identical to SEQ ID NO: 37902
  Payload ID: 7537
  Gene Symbol: HHLA2
  Gene Name: HERV-H LTR-associating 2
  Uniprot ID: Q9UM44
  ENSP ID: ENSP00000419207

SEQ ID NO: 37909 - protein, 97 aa, Homo sapiens
  Payload ID: 7537
  Gene Symbol: HHLA2
  Gene Name: HERV-H LTR-associating 2
  ENSP ID: ENSP00000419911
MKAQTALSFFLILITSLSGSQGIFPLAFFIYVPMNEQIVIGRLDEDIILPSSFERGSEVVIHWKYQDSYKVHSYYKGSDHLESQDPRYANRTSLFYN

SEQ ID NO: 37910 - protein, 144 aa, Homo sapiens
  Payload ID: 7537
  Gene Symbol: HHLA2
  Gene Name: HERV-H LTR-associating 2
  ENSP ID: ENSP00000419940
MKAQTALSFFLILITSLSGSQGIFPLAFFIYVPMNEQIVIGRLDEDIILPSSFERGSEVVIHWKYQDSYKVHSYYKGSDHLESQDPRYANRTSLFYNEIQNGNASLFFRRVSLLDEGIYTCYVGTAIQVITNKVVLKVGVFLTP

SEQ ID NO: 37911 - protein, 128 aa, Homo sapiens
  Payload ID: 7537
  Gene Symbol: HHLA2
  Gene Name: HERV-H LTR-associating 2
  ENSP ID: ENSP00000420622
MNEQIVIGRLDEDIILPSSFERGSEVVIHWKYQDSYKVHSYYKGSDHLESQDPRYANRTSLFYNEIQNGNASLFFRRVSLLDEGIYTCYVGTAIQVITNKVVLKVGVFLTPVMKYEKRNTNSFLICSV

SEQ ID NO: 37912 - protein, 414 aa, Homo sapiens; identical to SEQ ID NO: 37902
  Payload ID: 7537
  Gene Symbol: HHLA2
  Gene Name: HERV-H LTR-associating 2
  Uniprot ID: Q9UM44
  ENSP ID: ENSP00000482187

SEQ ID NO: 37913 - protein, 114 aa, Homo sapiens
  Payload ID: 7538
  Gene Symbol: HHLA3
  Gene Name: HERV-H LTR-associating 3
  Uniprot ID: Q9XRX5
  ENSP ID: ENSP00000352938
MFGACYKQPLKPSGSEPPAEECRMTPRHAGCDVTEMQRILSQPTFTEHLLRAVCTKLANMYSTSTDCREHCRRGMKAKQLKAEAGRSCQRKGVPIQTPREHSWISCKKEFEANP

SEQ ID NO: 37914 - protein, 76 aa, Homo sapiens
  Payload ID: 7538
  Gene Symbol: HHLA3
  Gene Name: HERV-H LTR-associating 3
  Uniprot ID: Q9XRX5
  ENSP ID: ENSP00000354815
MFGACYKQPLKPSGSEPPAEECRMTPRHAGCDVTEMQRILSQPTFTEHLLRAVLSTERGPYPDPKRAFLDLLQERI

SEQ ID NO: 37915 - protein, 121 aa, Homo sapiens
  Payload ID: 7538
  Gene Symbol: HHLA3
  Gene Name: HERV-H LTR-associating 3
  Uniprot ID: Q9XRX5
  ENSP ID: ENSP00000359978
MFGACYKQPLKPSGSEPPAEECRMTPRHAGCDVTEMQRILSQPTFTEHLLRAVCLVNGKGSLSRPQESILGSLARKNLRRIHRVSLVMCVRPLSPSKAIISPVTCMYTSRWPEASEESQKK

SEQ ID NO: 37916 - protein, 114 aa, Homo sapiens; identical to SEQ ID NO: 37913
  Payload ID: 7538
  Gene Symbol: HHLA3
  Gene Name: HERV-H LTR-associating 3
  Uniprot ID: Q9XRX5
  ENSP ID: ENSP00000431678

SEQ ID NO: 37917 - protein, 76 aa, Homo sapiens; identical to SEQ ID NO: 37914
  Payload ID: 7538
  Gene Symbol: HHLA3
  Gene Name: HERV-H LTR-associating 3
  Uniprot ID: Q9XRX5
  ENSP ID: ENSP00000432048

SEQ ID NO: 37918 - protein, 74 aa, Homo sapiens
  Payload ID: 7538
  Gene Symbol: HHLA3
  Gene Name: HERV-H LTR-associating 3
  ENSP ID: ENSP00000434063
MFGACYKQPLKPSGSEPPAEECRMTPRHAGCDVTEMQRILSQPTFTEHLLRAIDSFRRHLVFRLATLLTPQPFV

SEQ ID NO: 37919 - protein, 280 aa, Homo sapiens
  Payload ID: 7539
  Gene Symbol: HES1
  Gene Name: hes family bHLH transcription factor 1
  Uniprot ID: Q14469
  ENSP ID: ENSP00000232424
MPADIMEKNSSSPVAATPASVNTTPDKPKTASEHRKSSKPIMEKRRRARINESLSQLKTLILDALKKDSSRHSKLEKADILEMTVKHLRNLQRAQMTAALSTDPSVLGKYRAGFSECMNEVTRFLSTCEGVNTEVRTRLLGHLANCMTQINAMTYPGQPHPALQAPPPPPPGPGGPQHAPFAPPPPLVPIPGGAAPPPGGAPCKLGSQAGEAAKVFGGFQVVPAPDGQFAFLIPNGAFAHSGPVIPVYTSNSGTSVGPNAVSPSSGPSLTADSMWRPWRN

SEQ ID NO: 37920 - protein, 173 aa, Homo sapiens
  Payload ID: 7540
  Gene Symbol: HES2
  Gene Name: hes family bHLH transcription factor 2
  Uniprot ID: Q9Y543
  ENSP ID: ENSP00000367065
MGLPRRAGDAAELRKSLKPLLEKRRRARINQSLSQLKGLILPLLGRENSNCSKLEKADVLEMTVRFLQELPASSWPTAAPLPCDSYREGYSACVARLARVLPACRVLEPAVSARLLEHLWRRAASATLDGGRAGDSSGPSAPAPAPASAPEPASAPVPSPPSPPCGPGLWRPW

SEQ ID NO: 37921 - protein, 76 aa, Homo sapiens
  Payload ID: 7540
  Gene Symbol: HES2
  Gene Name: hes family bHLH transcription factor 2
  Uniprot ID: Q9Y543
  ENSP ID: ENSP00000367067
MGLPRRAGDAAELRKSLKPLLEKRRRARINQSLSQLKGLILPLLGREDASGWHTWLPLHAQNCFLLYIQAPEQPPA

SEQ ID NO: 37922 - protein, 76 aa, Homo sapiens; identical to SEQ ID NO: 37921
  Payload ID: 7540
  Gene Symbol: HES2
  Gene Name: hes family bHLH transcription factor 2
  Uniprot ID: Q9Y543
  ENSP ID: ENSP00000367068

SEQ ID NO: 37923 - protein, 77 aa, Homo sapiens
  Payload ID: 7540
  Gene Symbol: HES2
  Gene Name: hes family bHLH transcription factor 2
  ENSP ID: ENSP00000465248
MGLPRRAGDAAELRKSLKPLLEKRRRARINQSLSQLKGLILPLLGRECLATATARATAPVWRAWPACCPPAVSWSPP

SEQ ID NO: 37924 - protein, 82 aa, Homo sapiens
  Payload ID: 7540
  Gene Symbol: HES2
  Gene Name: hes family bHLH transcription factor 2
  ENSP ID: ENSP00000465270
MGLPRRAGDAAELRKSLKPLLEKRRRARINQSLSQLKGLILPLLGRENSNCSKLEKADVLEMTVRFLQELPASSWPTAAPRE

SEQ ID NO: 37925 - protein, 186 aa, Homo sapiens
  Payload ID: 7541
  Gene Symbol: HES3
  Gene Name: hes family bHLH transcription factor 3
  Uniprot ID: Q5TGS1
  ENSP ID: ENSP00000367130
MEKKRRARINVSLEQLKSLLEKHYSHQIRKRKLEKADILELSVKYMRSLQNSLQGLWPVPRGAEQPSGFRSCLPGVSQLLRRGDEVGSGLRCPLVPESAAGSTMDSAGLGQEAPALFRPCTPAVWAPAPAAGGPRSPPPLLLLPESLPGSSASVPPPQPASSRCAESPGLGLRVWRPWGSPGDDLN

SEQ ID NO: 37926 - protein, 221 aa, Homo sapiens
  Payload ID: 7542
  Gene Symbol: HES4
  Gene Name: hes family bHLH transcription factor 4
  Uniprot ID: Q9HCC6
  ENSP ID: ENSP00000304595
MAADTPGKPSASPMAGAPASASRTPDKPRSAAEHRKSSKPVMEKRRRARINESLAQLKTLILDALRKESSRHSKLEKADILEMTVRHLRSLRRVQVTAALSADPAVLGKYRAGFHECLAEVNRFLAGCEGVPADVRSRLLGHLAACLRQLGPSRRPASLSPAAPAEAPAPEVYAGRPLLPSLGGPFPLLAPPLLPGLTRALPAAPRAGPQGPGGPWRPWLR

SEQ ID NO: 37927 - protein, 247 aa, Homo sapiens
  Payload ID: 7542
  Gene Symbol: HES4
  Gene Name: hes family bHLH transcription factor 4
  ENSP ID: ENSP00000393198
MAADTPGKPSASPMAGAPASASRTPDKPRSAAEHRKVGSRPGVRGATGGREGRGTQPVPDPQSSKPVMEKRRRARINESLAQLKTLILDALRKESSRHSKLEKADILEMTVRHLRSLRRVQVTAALSADPAVLGKYRAGFHECLAEVNRFLAGCEGVPADVRSRLLGHLAACLRQLGPSRRPASLSPAAPAEAPAPEVYAGRPLLPSLGGPFPLLAPPLLPGLTRALPAAPRAGPQGPGGPWRPWLR

SEQ ID NO: 37928 - protein, 189 aa, Homo sapiens
  Payload ID: 7542
  Gene Symbol: HES4
  Gene Name: hes family bHLH transcription factor 4
  ENSP ID: ENSP00000425085
MAADTPGKPSASPMAGAPASASRTPDKPRSAAEHRKSSRHSKLEKADILEMTVRHLRSLRRVQVTAALSADPAVLGKYRAGFHECLAEVNRFLAGCEGVPADVRSRLLGHLAACLRQLGPSRRPASLSPAAPAEAPAPEVYAGRPLLPSLGGPFPLLAPPLLPGLTRALPAAPRAGPQGPGGPWRPWLR

SEQ ID NO: 37929 - protein, 166 aa, Homo sapiens
  Payload ID: 7543
  Gene Symbol: HES5
  Gene Name: hes family bHLH transcription factor 5
  Uniprot ID: Q5TA89
  ENSP ID: ENSP00000367714
MAPSTVAVELLSPKEKNRLRKPVVEKMRRDRINSSIEQLKLLLEQEFARHQPNSKLEKADILEMAVSYLKHSKAFVAAAGPKSLHQDYSEGYSWCLQEAVQFLTLHAASDTQMKLLYHFQRPPAAPAAPAKEPKAPGAAPPPALSAKATAAAAAAHQPACGLWRPW

SEQ ID NO: 37930 - protein, 166 aa, Homo sapiens; identical to SEQ ID NO: 37929
  Payload ID: 7543
  Gene Symbol: HES5
  Gene Name: hes family bHLH transcription factor 5
  Uniprot ID: Q5TA89
  ENSP ID: ENSP00000482150

SEQ ID NO: 37931 - protein, 224 aa, Homo sapiens
  Payload ID: 7544
  Gene Symbol: HES6
  Gene Name: hes family bHLH transcription factor 6
  Uniprot ID: Q96HZ4
  ENSP ID: ENSP00000272937
MAPPAAPGRDRVGREDEDGWETRGDRKARKPLVEKKRRARINESLQELRLLLAGAEVQAKLENAEVLELTVRRVQGVLRGRAREREQLQAEASERFAAGYIQCMHEVHTFVSTCQAIDATVAAELLNHLLESMPLREGSSFQDLLGDALAGPPRAPGRSGWPAGGAPGSPIPSPPGPGDDLCSDLEEAPEAELSQAPAEGPDLVPAALGSLTTAQIARSVWRPW

SEQ ID NO: 37932 - protein, 112 aa, Homo sapiens
  Payload ID: 7544
  Gene Symbol: HES6
  Gene Name: hes family bHLH transcription factor 6
  Uniprot ID: Q96HZ4
  ENSP ID: ENSP00000387008
MAPPAAPGRDRVGREDEDGWETRGDRKARKPLVEKKRRARINESLQELRLLLAGAEVQAKLENAEVLELTSASSCRRKRASASLPATSSACTRCTRSCPRARPSTLPSLPSS

SEQ ID NO: 37933 - protein, 94 aa, Homo sapiens
  Payload ID: 7544
  Gene Symbol: HES6
  Gene Name: hes family bHLH transcription factor 6
  ENSP ID: ENSP00000387107
MAPPAAPGRDRVGREDEDGWETRGDRKVRAGAMGEQAGGRPCGAGIQCPAPRRPGSPWWRRSGARGSTRACRSCGCCWRAPRCRPSWRTPKCWS

SEQ ID NO: 37934 - protein, 222 aa, Homo sapiens
  Payload ID: 7544
  Gene Symbol: HES6
  Gene Name: hes family bHLH transcription factor 6
  Uniprot ID: Q96HZ4
  ENSP ID: ENSP00000387155
MAPPAAPGRDRVGREDEDGWETRGDRKARKPLVEKKRRARINESLQELRLLLAGAEAKLENAEVLELTVRRVQGVLRGRAREREQLQAEASERFAAGYIQCMHEVHTFVSTCQAIDATVAAELLNHLLESMPLREGSSFQDLLGDALAGPPRAPGRSGWPAGGAPGSPIPSPPGPGDDLCSDLEEAPEAELSQAPAEGPDLVPAALGSLTTAQIARSVWRPW

SEQ ID NO: 37935 - protein, 214 aa, Homo sapiens
  Payload ID: 7544
  Gene Symbol: HES6
  Gene Name: hes family bHLH transcription factor 6
  Uniprot ID: Q96HZ4
  ENSP ID: ENSP00000387215
MAPPAAPGRDRVGREDEDGWETRGDRKARKPLVEKKRRARINESLQELRLLLAGAEVQAKLENAEVLELTVRRVQGVLRGRARGEWRRGGRGRRPRAPVTPARRRTSLPAPLSCRRRGLPPEQGAPPRLLGEPRPRGPGGLGHAVAAHRAGRGSLPPTLGPRARAAAGGSERALRCRLHPVHARGAHVRVHVPGHRRYRRCRAPEPSARVHAAA

SEQ ID NO: 37936 - protein, 195 aa, Homo sapiens
  Payload ID: 7544
  Gene Symbol: HES6
  Gene Name: hes family bHLH transcription factor 6
  ENSP ID: ENSP00000387343
MAPPAAPGRDRVGREDEDGWETRGDRKVQAKLENAEVLELTVRRVQGVLRGRAREREQLQAEASERFAAGYIQCMHEVHTFVSTCQAIDATVAAELLNHLLESMPLREGSSFQDLLGDALAGPPRAPGRSGWPAGGAPGSPIPSPPGPGDDLCSDLEEAPEAELSQAPAEGPDLVPAALGSLTTAQIARSVWRPW

SEQ ID NO: 37937 - protein, 144 aa, Homo sapiens
  Payload ID: 7544
  Gene Symbol: HES6
  Gene Name: hes family bHLH transcription factor 6
  ENSP ID: ENSP00000390870
MAPPAAPGRDRVGREDEDGWETRGDRKVQAKLENAEVLELTVRRVQGVLRGRARGEWRRGGRGRRPRAPVTPARRRTSLPAPLSCRRRGLPPEQGAPPRLLGEPRPRGPGGLGHAVAAHRAGRGSLPPTLGPRARAAAGGSERA

SEQ ID NO: 37938 - protein, 170 aa, Homo sapiens
  Payload ID: 7544
  Gene Symbol: HES6
  Gene Name: hes family bHLH transcription factor 6
  ENSP ID: ENSP00000392596
VLAEGGVGGPARRLDESGRNSGAAPPPLPNGPCLPGAWQPPQPGPETPLGPETADLTVALHTRDASPGASGPSAQLWRRHRRRREMNELMGPEAPGGEEAARADQREPAGAAAAAGGRRGAGQAGERRSAGADGAAGPGCAAGPGARARAAAGGSERALRCRLHPVHARG

SEQ ID NO: 37939 - protein, 16 aa, Homo sapiens
  Payload ID: 7544
  Gene Symbol: HES6
  Gene Name: hes family bHLH transcription factor 6
  ENSP ID: ENSP00000401797
RAPRCRPSWRTPKCWS

SEQ ID NO: 37940 - protein, 225 aa, Homo sapiens
  Payload ID: 7545
  Gene Symbol: HES7
  Gene Name: hes family bHLH transcription factor 7
  Uniprot ID: Q9BYE0
  ENSP ID: ENSP00000314774
MVTRDRAENRDGPKMLKPLVEKRRRDRINRSLEELRLLLLERTRDQNLRNPKLEKAEILEFAVGYLRERSRVEPPGVPRSPVQDAEALASCYLSGFRECLLRLAAFAHDASPAARAQLFSALHGYLRPKPPRPKPVDPRPPAPRPSLDPAAPALGPALHQRPPVHQGHPSPRCAWSPSLCSPRAGDSGAPAPLTGLLPPPPPPHRQDGAPKAPLPPPPAFWRPWP

SEQ ID NO: 37941 - protein, 230 aa, Homo sapiens
  Payload ID: 7545
  Gene Symbol: HES7
  Gene Name: hes family bHLH transcription factor 7
  Uniprot ID: Q9BYE0
  ENSP ID: ENSP00000446205
MVTRDRAENRDGPKMLKPLVEKRRRDRINRSLEELRLLLLERTRDQNLRNPKLEKAEILEFAVGYLRERSRVEPPAAAAPGVPRSPVQDAEALASCYLSGFRECLLRLAAFAHDASPAARAQLFSALHGYLRPKPPRPKPVDPRPPAPRPSLDPAAPALGPALHQRPPVHQGHPSPRCAWSPSLCSPRAGDSGAPAPLTGLLPPPPPPHRQDGAPKAPLPPPPAFWRPWP

SEQ ID NO: 37942 - protein, 145 aa, Homo sapiens
  Payload ID: 7545
  Gene Symbol: HES7
  Gene Name: hes family bHLH transcription factor 7
  ENSP ID: ENSP00000462491
MRRSGEMLKPLVEKRRRDRINRSLEELRLLLLERTRDQNLRNPKLEKAEILEFAVGYLRERSRVEPPAAAAPGVPRSPVQDAEALASCYLSGFRECLLRLAAFAHDASPAARAQLFSALHGYLRPKPPRPKPVDPRPPAPRPSLD

SEQ ID NO: 37943 - protein, 308 aa, Homo sapiens
  Payload ID: 7546
  Gene Symbol: HEY1
  Gene Name: hes-related family bHLH transcription factor with YRPW motif 1
  Uniprot ID: Q9Y5J3
  ENSP ID: ENSP00000338272
MKRAHPEYSSSDSELDETIEVEKESADENGNLSSALGSMSPTTSSQILARKRRRGIIEKRRRDRINNSLSELRRLVPSAFEKQVMEQGSAKLEKAEILQMTVDHLKMLHTAGGKGYFDAHALAMDYRSLGFRECLAEVARYLSIIEGLDASDPLRVRLVSHLNNYASQREAASGAHAGLGHIPWGTVFGHHPHIAHPLLLPQNGHGNAGTTASPTEPHHQGRLGSAHPEAPALRAPPSGSLGPVLPVVTSASKLSPPLLSSVASLSAFPFSFGSFHLLSPNALSPSAPTQAANLGKPYRPWGTEIGAF

SEQ ID NO: 37944 - protein, 304 aa, Homo sapiens
  Payload ID: 7546
  Gene Symbol: HEY1
  Gene Name: hes-related family bHLH transcription factor with YRPW motif 1
  Uniprot ID: Q9Y5J3
  ENSP ID: ENSP00000346761
MKRAHPEYSSSDSELDETIEVEKESADENGNLSSALGSMSPTTSSQILARKRRRGIIEKRRRDRINNSLSELRRLVPSAFEKQGSAKLEKAEILQMTVDHLKMLHTAGGKGYFDAHALAMDYRSLGFRECLAEVARYLSIIEGLDASDPLRVRLVSHLNNYASQREAASGAHAGLGHIPWGTVFGHHPHIAHPLLLPQNGHGNAGTTASPTEPHHQGRLGSAHPEAPALRAPPSGSLGPVLPVVTSASKLSPPLLSSVASLSAFPFSFGSFHLLSPNALSPSAPTQAANLGKPYRPWGTEIGAF

SEQ ID NO: 37945 - protein, 186 aa, Homo sapiens
  Payload ID: 7546
  Gene Symbol: HEY1
  Gene Name: hes-related family bHLH transcription factor with YRPW motif 1
  ENSP ID: ENSP00000429705
MSPTTSSQILARKRRRGIIEKRRRDRINNSLSELRRLVPSAFEKQGSAKLEKAEILQMTVDHLKMLHTAGGKGYFDAHALAMDYRSLGFRECLAEVARYLSIIEGLDASDPLRVRLVSHLNNYASQREAASGAHAGLGHIPWGTVFGHHPHIAHPLLLPQNGHGNAGTTASPTEPHHQGRLGSAHP

SEQ ID NO: 37946 - protein, 214 aa, Homo sapiens
  Payload ID: 7546
  Gene Symbol: HEY1
  Gene Name: hes-related family bHLH transcription factor with YRPW motif 1
  ENSP ID: ENSP00000429792
MPLEERNVFWLSKGNLTGDQGYFDAHALAMDYRSLGFRECLAEVARYLSIIEGLDASDPLRVRLVSHLNNYASQREAASGAHAGLGHIPWGTVFGHHPHIAHPLLLPQNGHGNAGTTASPTEPHHQGRLGSAHPEAPALRAPPSGSLGPVLPVVTSASKLSPPLLSSVASLSAFPFSFGSFHLLSPNALSPSAPTQAANLGKPYRPWGTEIGAF

SEQ ID NO: 37947 - protein, 337 aa, Homo sapiens
  Payload ID: 7547
  Gene Symbol: HEY2
  Gene Name: hes-related family bHLH transcription factor with YRPW motif 2
  Uniprot ID: Q9UBP5
  ENSP ID: ENSP00000357348
MKRPCEETTSESDMDETIDVGSENNYSGQSTSSVIRLNSPTTTSQIMARKKRRGIIEKRRRDRINNSLSELRRLVPTAFEKQGSAKLEKAEILQMTVDHLKMLQATGGKGYFDAHALAMDFMSIGFRECLTEVARYLSSVEGLDSSDPLRVRLVSHLSTCATQREAAAMTSSMAHHHHPLHPHHWAAAFHHLPAALLQPNGLHASESTPCRLSTTSEVPPAHGSALLTATFAHADSALRMPSTGSVAPCVPPLSTSLLSLSATVHAAAAAATAAAHSFPLSFAGAFPMLPPNAAAAVAAATAISPPLSVSATSSPQQTSSGTNNKPYRPWGTEVGAF

SEQ ID NO: 37948 - protein, 291 aa, Homo sapiens
  Payload ID: 7547
  Gene Symbol: HEY2
  Gene Name: hes-related family bHLH transcription factor with YRPW motif 2
  ENSP ID: ENSP00000357349
MARKKRRGIIEKRRRDRINNSLSELRRLVPTAFEKQGSAKLEKAEILQMTVDHLKMLQATGGKGYFDAHALAMDFMSIGFRECLTEVARYLSSVEGLDSSDPLRVRLVSHLSTCATQREAAAMTSSMAHHHHPLHPHHWAAAFHHLPAALLQPNGLHASESTPCRLSTTSEVPPAHGSALLTATFAHADSALRMPSTGSVAPCVPPLSTSLLSLSATVHAAAAAATAAAHSFPLSFAGAFPMLPPNAAAAVAAATAISPPLSVSATSSPQQTSSGTNNKPYRPWGTEVGAF

SEQ ID NO: 37949 - protein, 328 aa, Homo sapiens
  Payload ID: 7548
  Gene Symbol: HEYL
  Gene Name: hes-related family bHLH transcription factor with YRPW motif-like
  Uniprot ID: Q9NQ87
  ENSP ID: ENSP00000361943
MKRPKEPSGSDGESDGPIDVGQEGQLSQMARPLSTPSSSQMQARKKHRGIIEKRRRDRINSSLSELRRLVPTAFEKQGSSKLEKAEVLQMTVDHLKMLHATGGTGFFDARALAVDFRSIGFRECLTEVIRYLGVLEGPSSRADPVRIRLLSHLNSYAAEMEPSPTPTGPLAFPAWPWSFFHSCPGLPALSNQLAILGRVPSPVLPGVSSPAYPIPALRTAPLRRATGIILPARRNVLPSRGASSTRRARPLERPATPVPVAPSSRAARSSHIAPLLQSSSPTPPGPTGSAAYVAVPTPNSSSPGPAGRPAGAMLYHSWVSEITEIGAF

SEQ ID NO: 37950 - protein, 185 aa, Homo sapiens
  Payload ID: 7549
  Gene Symbol: HESX1
  Gene Name: HESX homeobox 1
  Uniprot ID: Q9UBX0
  ENSP ID: ENSP00000295934
MSPSLQEGAQLGENKPSTCSFSIERILGLDQKKDCVPLMKPHRPWADTCSSSGKDGNLCLHVPNPPSGISFPSVVDHPMPEERASKYENYFSASERLSLKRELSWYRGRRPRTAFTQNQIEVLENVFRVNCYPGIDIREDLAQKLNLEEDRIQIWFQNRRAKLKRSHRESQFLMAKKNFNTNLLE

SEQ ID NO: 37951 - protein, 151 aa, Homo sapiens
  Payload ID: 7549
  Gene Symbol: HESX1
  Gene Name: HESX homeobox 1
  ENSP ID: ENSP00000418918
MSPSLQEGAQLGENKPSTCSFSIERILGLDQKKDCVPLMKPHRPWADTCSSSGKDGNLCLHVPNPPSGISFPSVVDHPMPEERASKYENYFSASERLSLKRELSWYRGRRPRTAFTQNQIWFQNRRAKLKRSHRESQFLMAKKNFNTNLLE

SEQ ID NO: 37952 - protein, 107 aa, Homo sapiens
  Payload ID: 7549
  Gene Symbol: HESX1
  Gene Name: HESX homeobox 1
  ENSP ID: ENSP00000419615
MSPSLQEGAQLGENKPSTCSFSIERILGLDQKKDCVPLMKPHRPWADTCSSSGKDGNLCLHVPNPPSGISFPSVVDHPMPEERASKYENYFSASERLSLKRELSWYR

SEQ ID NO: 37953 - protein, 553 aa, Homo sapiens
  Payload ID: 7550
  Gene Symbol: HP1BP3
  Gene Name: heterochromatin protein 1, binding protein 3
  Uniprot ID: Q5SSJ5
  ENSP ID: ENSP00000312625
MATDTSQGELVHPKALPLIVGAQLIHADKLGEKVEDSTMPIRRTVNSTRETPPKSKLAEGEEEKPEPDISSEESVSTVEEQENETPPATSSEAEQPKGEPENEEKEENKSSEETKKDEKDQSKEKEKKVKKTIPSWATLSASQLARAQKQTPMASSPRPKMDAILTEAIKACFQKSGASVVAIRKYIIHKYPSLELERRGYLLKQALKRELNRGVIKQVKGKGASGSFVVVQKSRKTPQKSRNRKNRSSAVDPEPQVKLEDVLPLAFTRLCEPKEASYSLIRKYVSQYYPKLRVDIRPQLLKNALQRAVERGQLEQITGKGASGTFQLKKSGEKPLLGGSLMEYAILSAIAAMNEPKTCSTTALKKYVLENHPGTNSNYQMHLLKKTLQKCEKNGWMEQISGKGFSGTFQLCFPYYPSPGVLFPKKEPDDSRDEDEDEDESSEEDSEDEEPPPKRRLQKKTPAKSPGKAASVKQRGSKPAPKVSAAQRGKARPLPKKAPPKAKTPAKKTRPSSTVIKKPSGGSSKKPATSARKEVKLPGKGKSTMKKSFRVKK

SEQ ID NO: 37954 - protein, 133 aa, Homo sapiens
  Payload ID: 7550
  Gene Symbol: HP1BP3
  Gene Name: heterochromatin protein 1, binding protein 3
  Uniprot ID: Q5SSJ5
  ENSP ID: ENSP00000364139
MATDTSQGELVHPKALPLIVGAQLIHADKLGEKVEDSTMPIRRTVNSTRETPPKSKLAEGEEEKPEPDISSEESVSTVEEQENETPPATSSEAEQPKGEPENEEKEENKSSEETKKERADSIHSTLFIIGQNS

SEQ ID NO: 37955 - protein, 401 aa, Homo sapiens
  Payload ID: 7550
  Gene Symbol: HP1BP3
  Gene Name: heterochromatin protein 1, binding protein 3
  Uniprot ID: Q5SSJ5
  ENSP ID: ENSP00000364142
MASSPRPKMDAILTEAIKACFQKSGASVVAIRKYIIHKYPSLELERRGYLLKQALKRELNRGVIKQVKGKGASGSFVVVQKSRKTPQKSRNRKNRSSAVDPEPQVKLEDVLPLAFTRLCEPKEASYSLIRKYVSQYYPKLRVDIRPQLLKNALQRAVERGQLEQITGKGASGTFQLKKSGEKPLLGGSLMEYAILSAIAAMNEPKTCSTTALKKYVLENHPGTNSNYQMHLLKKTLQKCEKNGWMEQISGKGFSGTFQLCFPYYPSPGVLFPKKEPDDSRDEDEDEDESSEEDSEDEEPPPKRRLQKKTPAKSPGKAASVKQRGSKPAPKVSAAQRGKARPLPKKAPPKAKTPAKKTRPSSTVIKKPSGGSSKKPATSARKEVKLPGKGKSTMKKSFRVKK

SEQ ID NO: 37956 - protein, 124 aa, Homo sapiens
  Payload ID: 7550
  Gene Symbol: HP1BP3
  Gene Name: heterochromatin protein 1, binding protein 3
  ENSP ID: ENSP00000391281
MATDTSQGELVHPKALPLIVGAQLIHADKLGEKVEDSTMPIRRTVNSTRETPPKSKLAEGEEEKPEPDISSEESVSTVEEQENETPPATSSEAEQPKGEPENEEKEENKSSEETKKDEKDQSKE

SEQ ID NO: 37957 - protein, 253 aa, Homo sapiens
  Payload ID: 7550
  Gene Symbol: HP1BP3
  Gene Name: heterochromatin protein 1, binding protein 3
  ENSP ID: ENSP00000391721
KKDEKDQSKEKEKKVKKTIPSWATLSASQLARAQKQTPMASSPRPKMDAILTEAIKACFQKSGASVVAIRKYIIHKYPSLELERRGYLLKQALKRELNRGVIKQNRSSAVDPEPQVKLEDVLPLAFTRLCEPKEASYSLIRKYVSQYYPKLRVDIRPQLLKNALQRAVERGQLEQITGKGASGTFQLKKSGEKPLLGGSLMEYAILSAIAAMNEPKTCSTTALKKYVLENHPGTNSNYQMHLLKKTLQKCEKN

SEQ ID NO: 37958 - protein, 40 aa, Homo sapiens
  Payload ID: 7550
  Gene Symbol: HP1BP3
  Gene Name: heterochromatin protein 1, binding protein 3
  ENSP ID: ENSP00000397656
MPIRRTVNSTRETPPKSKLAEGEEEKPEPDISSEESVSTV

SEQ ID NO: 37959 - protein, 19 aa, Homo sapiens
  Payload ID: 7550
  Gene Symbol: HP1BP3
  Gene Name: heterochromatin protein 1, binding protein 3
  ENSP ID: ENSP00000401874
MPIRRTVNSTRETPPKSKL

SEQ ID NO: 37960 - protein, 45 aa, Homo sapiens
  Payload ID: 7550
  Gene Symbol: HP1BP3
  Gene Name: heterochromatin protein 1, binding protein 3
  ENSP ID: ENSP00000402096
MPIRRTVNSTRETPPKSKLAEGEEEKPEPDISSEESVSTVEEQEN

SEQ ID NO: 37961 - protein, 278 aa, Homo sapiens
  Payload ID: 7550
  Gene Symbol: HP1BP3
  Gene Name: heterochromatin protein 1, binding protein 3
  ENSP ID: ENSP00000402754
MPIRRTVNSTRETPPKSKLAEGEEEKPEPDISSEESVSTVEEQENETPPATSSEAEQPKGEPENEEKEENKSSEETKKDEKDQSKEKEKKVKKTIPSWATLSASQLARAQKQTPMASSPRPKMDAILTEAIKACFQKSGASVVAIRKYIIHKYPSLELERRGYLLKQALKRELNRGVIKQVKGKGASGSFVVVQKSRKTPQKSRNRKNRSSAVDPEPQVKLEDVLPLAFTRLCEPKEASYSLIRKYVSQYYPKLRVDIRPQLLKNALQRAVERGQLEQ

SEQ ID NO: 37962 - protein, 327 aa, Homo sapiens
  Payload ID: 7550
  Gene Symbol: HP1BP3
  Gene Name: heterochromatin protein 1, binding protein 3
  ENSP ID: ENSP00000403039
MATDTSQGELVHPKALPLIVGAQLIHADKLGEKVEDSTMPIRRTVNSTRETPPKSKLAEGEEEKPEPDISSEESVSTVEEQENETPPATSSEAEQPKGEPENEEKEENKSSEETKKDEKDQSKEKEKKVKKTIPSWATLSASQLARAQKQTPMASSPRPKMDAILTEAIKACFQKSGASVVAIRKYIIHKYPSLELERRGYLLKQALKRELNRGVIKQVKGKGASGSFVVVQKSRKTPQKSRNRKNRSSAVDPEPQVKLEDVLPLAFTRLCEPKEASYSLIRKYVSQYYPKLRVDIRPQLLKNALQRAVERGQLEQITGKGASGTFQ

SEQ ID NO: 37963 - protein, 75 aa, Homo sapiens
  Payload ID: 7550
  Gene Symbol: HP1BP3
  Gene Name: heterochromatin protein 1, binding protein 3
  ENSP ID: ENSP00000405362
MATDTSQGELVHPKALPLIVGAQLIHADKLGEKVEDSTMPIRRTVNSTRETPPKSKLAEGEEEKPEPDISSEESV

SEQ ID NO: 37964 - protein, 285 aa, Homo sapiens
  Payload ID: 7551
  Gene Symbol: HNRNPAB
  Gene Name: heterogeneous nuclear ribonucleoprotein A/B
  Uniprot ID: Q99729
  ENSP ID: ENSP00000348093
MSEAGEEQPMETTGATENGHEAVPEGESPAGAGTGAAAGAGGATAAPPSGNQNGAEGDQINASKNEEDAGKMFVGGLSWDTSKKDLKDYFTKFGEVVDCTIKMDPNTGRSRGFGFILFKDAASVEKVLDQKEHRLDGRVIDPKKAMAMKKDPVKKIFVGGLNPEATEEKIREYFGEFGEIEAIELPMDPKLNKRRGFVFITFKEEEPVKKVLEKKFHTVSGSKCEIKVAQPKEVYQQQQYGSGGRGNRNRGNRGSGGGGGGGGQGSTNYGKSQRRGGHQNNYKPY

SEQ ID NO: 37965 - protein, 332 aa, Homo sapiens
  Payload ID: 7551
  Gene Symbol: HNRNPAB
  Gene Name: heterogeneous nuclear ribonucleoprotein A/B
  Uniprot ID: Q99729
  ENSP ID: ENSP00000351108
MSEAGEEQPMETTGATENGHEAVPEGESPAGAGTGAAAGAGGATAAPPSGNQNGAEGDQINASKNEEDAGKMFVGGLSWDTSKKDLKDYFTKFGEVVDCTIKMDPNTGRSRGFGFILFKDAASVEKVLDQKEHRLDGRVIDPKKAMAMKKDPVKKIFVGGLNPEATEEKIREYFGEFGEIEAIELPMDPKLNKRRGFVFITFKEEEPVKKVLEKKFHTVSGSKCEIKVAQPKEVYQQQQYGSGGRGNRNRGNRGSGGGGGGGGQSQSWNQGYGNYWNQGYGYQQGYGPGYGGYDYSPYGYYGYGPGYDYSQGSTNYGKSQRRGGHQNNYKPY

SEQ ID NO: 37966 - protein, 327 aa, Homo sapiens
  Payload ID: 7551
  Gene Symbol: HNRNPAB
  Gene Name: heterogeneous nuclear ribonucleoprotein A/B
  ENSP ID: ENSP00000422501
MSEAGEEQPMETTGATENGHEAVPEGESPAGAGTGAAAGAGGATAAPPSGNQNGAEGDQINASKNEEDAGKMFVGGLSWDTSKKDLKDYFTKFGEVVDCTIKMDPNTGRSRGFGFILFKDAASVEKVLDQKEHRLDGRVIDPKKAMAMKKDPVKKIFVGGLNPEATEEKIREYFGEFGEIEAIELPMDPKLNKRRGFVFITFKEEEPVKKVLEKKFHTVSGSKCEIKVAQPKEVYQQQQYGSGGRGNRNRGNRGSGGGQSQSWNQGYGNYWNQGYGYQQGYGPGYGGYDYSPYGYYGYGPGYDYSQGSTNYGKSQRRGGHQNNYKPY

SEQ ID NO: 37967 - protein, 280 aa, Homo sapiens
  Payload ID: 7551
  Gene Symbol: HNRNPAB
  Gene Name: heterogeneous nuclear ribonucleoprotein A/B
  ENSP ID: ENSP00000423495
MSEAGEEQPMETTGATENGHEAVPEGESPAGAGTGAAAGAGGATAAPPSGNQNGAEGDQINASKNEEDAGKMFVGGLSWDTSKKDLKDYFTKFGEVVDCTIKMDPNTGRSRGFGFILFKDAASVEKVLDQKEHRLDGRVIDPKKAMAMKKDPVKKIFVGGLNPEATEEKIREYFGEFGEIEAIELPMDPKLNKRRGFVFITFKEEEPVKKVLEKKFHTVSGSKCEIKVAQPKEVYQQQQYGSGGRGNRNRGNRGSGGGQGSTNYGKSQRRGGHQNNYKPY

SEQ ID NO: 37968 - protein, 332 aa, Homo sapiens; identical to SEQ ID NO: 37965
  Payload ID: 7551
  Gene Symbol: HNRNPAB
  Gene Name: heterogeneous nuclear ribonucleoprotein A/B
  Uniprot ID: Q99729
  ENSP ID: ENSP00000425031

SEQ ID NO: 37969 - protein, 283 aa, Homo sapiens
  Payload ID: 7551
  Gene Symbol: HNRNPAB
  Gene Name: heterogeneous nuclear ribonucleoprotein A/B
  ENSP ID: ENSP00000427110
MSEAGEEQPMETTGATENGHEAVPEGESPAGAGTGAAAGAGGATAAPPSGNQNGAEGDQINASKNEEDAGKMFVGGLSWDTSKKDLKDYFTKFGEVVDCTIKMDPNTGRSRGFGFILFKDAASVEKVLDQKEHRLDGRVIDPKKAMAMKKDPVKKIFVGGLNPEATEEKIREYFGEFGEIEAIELPMDPKLNKRRGFVFITFKEEEPVKKVLEKKFHTVSGSKCEIKVAQPKEVYQQQQYGSGGRGNRNRGNRGSGGGGGGQGSTNYGKSQRRGGHQNNYKPY

SEQ ID NO: 37970 - protein, 285 aa, Homo sapiens; identical to SEQ ID NO: 37964
  Payload ID: 7551
  Gene Symbol: HNRNPAB
  Gene Name: heterogeneous nuclear ribonucleoprotein A/B
  Uniprot ID: Q99729
  ENSP ID: ENSP00000427465

SEQ ID NO: 37971 - protein, 330 aa, Homo sapiens
  Payload ID: 7551
  Gene Symbol: HNRNPAB
  Gene Name: heterogeneous nuclear ribonucleoprotein A/B
  ENSP ID: ENSP00000482908
MSEAGEEQPMETTGATENGHEAVPEASRGRGWTGAAAGLEARPRRPRAGIRTAPRDQINASKNEEDAGKMFVGGLSWDTSKKDLKDYFTKFGEVVDCTIKMDPNTGRSRGFGFILFKDAASVEKVLDQKEHRLDGRVIDPKKAMAMKKDPVKKIFVGGLNPEATEEKIREYFGEFGEIEAIELPMDPKLNKRRGFVFITFKEEEPVKKVLEKKFHTVSGSKCEIKVAQPKEVYQQQQYGSGGRGNRNRGNRGSGGGGGGGGQSQSWNQGYGNYWNQGYGYQQGYGPGYGGYDYSPYGYYGYGPGYDYSQGSTNYGKSQRRGGHQNNYKPY

SEQ ID NO: 37972 - protein, 305 aa, Homo sapiens
  Payload ID: 7552
  Gene Symbol: HNRNPA0
  Gene Name: heterogeneous nuclear ribonucleoprotein A0
  Uniprot ID: Q13151
  ENSP ID: ENSP00000316042
MENSQLCKLFIGGLNVQTSESGLRGHFEAFGTLTDCVVVVNPQTKRSRCFGFVTYSNVEEADAAMAASPHAVDGNTVELKRAVSREDSARPGAHAKVKKLFVGGLKGDVAEGDLIEHFSQFGTVEKAEIIADKQSGKKRGFGFVYFQNHDAADKAAVVKFHPIQGHRVEVKKAVPKEDIYSGGGGGGSRSSRGGRGGRGRGGGRDQNGLSKGGGGGYNSYGGYGGGGGGGYNAYGGGGGGSSYGGSDYGNGFGGFGSYSQHQSSYGPMKSGGGGGGGGSSWGGRSNSGPYRGGYGGGGGYGGSSF

SEQ ID NO: 37973 - protein, 307 aa, Homo sapiens
  Payload ID: 7553
  Gene Symbol: HNRNPA1
  Gene Name: heterogeneous nuclear ribonucleoprotein A1
  ENSP ID: ENSP00000333504
MSKSESPKEPEQLRKLFIGGLSFETTDESLRSHFEQWGTLTDCVVMRDPNTKRSRGFGFVTYATVEEVDAAMNARPHKVDGRVVEPKRAVSREDSQRPGAHLTVKKIFVGGIKEDTEEHHLRDYFEQYGKIEVIEIMTDRGSGKKRGFAFVTFDDHDSVDKIVIQKYHTVNGHNCEVRKALSKQEMASASSSQRGRSGSGNFGGGRGGGFGGNDNFGRGGNFSGRGIGDGYNGFGNDGSNFGGGGSYNDFGNYNNQSSNFGPMKGGNFGGRSSGPYGGGGQYFAKPRNQGGYGGSSSSSSYGSGRRF

SEQ ID NO: 37974 - protein, 372 aa, Homo sapiens
  Payload ID: 7553
  Gene Symbol: HNRNPA1
  Gene Name: heterogeneous nuclear ribonucleoprotein A1
  Uniprot ID: P09651
  ENSP ID: ENSP00000341826
MSKSESPKEPEQLRKLFIGGLSFETTDESLRSHFEQWGTLTDCVVMRDPNTKRSRGFGFVTYATVEEVDAAMNARPHKVDGRVVEPKRAVSREDSQRPGAHLTVKKIFVGGIKEDTEEHHLRDYFEQYGKIEVIEIMTDRGSGKKRGFAFVTFDDHDSVDKIVIQKYHTVNGHNCEVRKALSKQEMASASSSQRGRSGSGNFGGGRGGGFGGNDNFGRGGNFSGRGGFGGSRGGGGYGGSGDGYNGFGNDGGYGGGGPGYSGGSRGYGSGGQGYGNQGSGYGGSGSYDSYNNGGGGGFGGGSGSNFGGGGSYNDFGNYNNQSSNFGPMKGGNFGGRSSGPYGGGGQYFAKPRNQGGYGGSSSSSSYGSGRRF

SEQ ID NO: 37975 - protein, 191 aa, Homo sapiens
  Payload ID: 7553
  Gene Symbol: HNRNPA1
  Gene Name: heterogeneous nuclear ribonucleoprotein A1
  ENSP ID: ENSP00000446486
KIEVIEIMTDRGSGKKRGFAFVTFDDHDSVDKIVIQKYHTVNGHNCEVRKALSKQEMASASSSQRGRSGSGNFGGGRGGGFGGNDNFGRGGNFSGRGGFGGSRGGGGYGGSGDGYNGFGNDGSNFGGGGSYNDFGNYNNQSSNFGPMKGGNFGGRSSGPYGGGGQYFAKPRNQGGYGGSSSSSSYGSGRRF

SEQ ID NO: 37976 - protein, 267 aa, Homo sapiens
  Payload ID: 7553
  Gene Symbol: HNRNPA1
  Gene Name: heterogeneous nuclear ribonucleoprotein A1
  Uniprot ID: P09651
  ENSP ID: ENSP00000447260
MSKSESPKEPEQLRKLFIGGLSFETTDESLRSHFEQWGTLTDCVVMRDPNTKRSRGFGFVTYATVEEVDAAMNARPHKVDGRVVEPKRAVSREDSQRPGAHLTVKKIFVGGIKEDTEEHHLRDYFEQYGKIEVIEIMTDRGSGKKRGFAFVTFDDHDSVDKIVIQKYHTVNGHNCEVRKALSKQEMASASSSQRGRSGSGNFGGGSYNDFGNYNNQSSNFGPMKGGNFGGRSSGPYGGGGQYFAKPRNQGGYGGSSSSSSYGSGRRF

SEQ ID NO: 37977 - protein, 231 aa, Homo sapiens
  Payload ID: 7553
  Gene Symbol: HNRNPA1
  Gene Name: heterogeneous nuclear ribonucleoprotein A1
  ENSP ID: ENSP00000447782
MRDSLLVAKFLGTQDLCLFLNLALSPKEPEQLRKLFIGGLSFETTDESLRSHFEQWGTLTDCVVMRDPNTKRSRGFGFVTYATVEEVDAAMNARPHKVDGRVVEPKRAVSREDSQRPGAHLTVKKIFVGGIKEDTEEHHLRDYFEQYGKIEVIEIMTDRGSGKKRGFAFVTFDDHDSVDKIVIQKYHTVNGHNCEVRKALSKQEMASASSSQRGRSGSGNFGGGRGGGFGG

SEQ ID NO: 37978 - protein, 145 aa, Homo sapiens
  Payload ID: 7553
  Gene Symbol: HNRNPA1
  Gene Name: heterogeneous nuclear ribonucleoprotein A1
  ENSP ID: ENSP00000448117
MSKSESPKEPEQLRKLFIGGLSFETTDESLRSHFEQWGTLTDCVDSQRPGAHLTVKKIFVGGIKEDTEEHHLRDYFEQYGKIEVIEIMTDRGSGKKRGFAFVTFDDHDSVDKIVIQKYHTVNGHNCEVRKALSKQEMASASSSQR

SEQ ID NO: 37979 - protein, 156 aa, Homo sapiens
  Payload ID: 7553
  Gene Symbol: HNRNPA1
  Gene Name: heterogeneous nuclear ribonucleoprotein A1
  ENSP ID: ENSP00000448229
MSKSESPKEPEQLRKLFIGGLSFETTDESLRSHFEQWGTLTDCVVMRDPNTKRSRGFGFVTYATVEEVDAAMNARPHKVDGRVVEPKRAVSREDSQRPGAHLTVKKIFVGGFGGSRGGGGYGGSGDGYNGFGNDGSNFGGGGSYNDFGNYNNQSSN

SEQ ID NO: 37980 - protein, 320 aa, Homo sapiens
  Payload ID: 7553
  Gene Symbol: HNRNPA1
  Gene Name: heterogeneous nuclear ribonucleoprotein A1
  Uniprot ID: P09651
  ENSP ID: ENSP00000448617
MSKSESPKEPEQLRKLFIGGLSFETTDESLRSHFEQWGTLTDCVVMRDPNTKRSRGFGFVTYATVEEVDAAMNARPHKVDGRVVEPKRAVSREDSQRPGAHLTVKKIFVGGIKEDTEEHHLRDYFEQYGKIEVIEIMTDRGSGKKRGFAFVTFDDHDSVDKIVIQKYHTVNGHNCEVRKALSKQEMASASSSQRGRSGSGNFGGGRGGGFGGNDNFGRGGNFSGRGGFGGSRGGGGYGGSGDGYNGFGNDGSNFGGGGSYNDFGNYNNQSSNFGPMKGGNFGGRSSGPYGGGGQYFAKPRNQGGYGGSSSSSSYGSGRRF

SEQ ID NO: 37981 - protein, 113 aa, Homo sapiens
  Payload ID: 7553
  Gene Symbol: HNRNPA1
  Gene Name: heterogeneous nuclear ribonucleoprotein A1
  ENSP ID: ENSP00000448917
MRDPNTKRSRGFGFVTYATVEEVDAAMNARPHKVDGRVVEPKRAVSREDSQRPGAHLTVKKIFVGGIKEDTEEHHLRDYFEQYGKIEVIEIMTDRGSGKKRGFAFVTFDDHDS

SEQ ID NO: 37982 - protein, 320 aa, Homo sapiens; identical to SEQ ID NO: 37980
  Payload ID: 7553
  Gene Symbol: HNRNPA1
  Gene Name: heterogeneous nuclear ribonucleoprotein A1
  Uniprot ID: P09651
  ENSP ID: ENSP00000449913

SEQ ID NO: 37983 - protein, 320 aa, Homo sapiens
  Payload ID: 7554
  Gene Symbol: HNRNPA1L2
  Gene Name: heterogeneous nuclear ribonucleoprotein A1-like 2
  Uniprot ID: Q32P51
  ENSP ID: ENSP00000350090
MSKSASPKEPEQLRKLFIGGLSFETTDESLRSHFEQWGTLTDCVVMRDPNTKRSRGFGFVTYATVEEVDAAMNTTPHKVDGRVVEPKRAVSREDSQRPGAHLTVKKIFVGGIKEDTEEHHLRDYFEQYGKIEVIEIMTDRGSGKKRGFAFVTFDDHDSVDKIVIQKYHTVKGHNCEVRKALPKQEMASASSSQRGRRGSGNFGGGRGDGFGGNDNFGRGGNFSGRGGFGGSCGGGGYGGSGDGYNGFGNDGSNFGGGGSYNDFGNYNNQSSNFGPMKGGNFGGRSSGPYGGGGQYFAKPQNQGGYGVSSSSSSYGSGRRF

SEQ ID NO: 37984 - protein, 353 aa, Homo sapiens
  Payload ID: 7555
  Gene Symbol: HNRNPA2B1
  Gene Name: heterogeneous nuclear ribonucleoprotein A2/B1
  Uniprot ID: P22626
  ENSP ID: ENSP00000346694
MEKTLETVPLERKKREKEQFRKLFIGGLSFETTEESLRNYYEQWGKLTDCVVMRDPASKRSRGFGFVTFSSMAEVDAAMAARPHSIDGRVVEPKRAVAREESGKPGAHVTVKKLFVGGIKEDTEEHHLRDYFEEYGKIDTIEIITDRQSGKKRGFGFVTFDDHDPVDKIVLQKYHTINGHNAEVRKALSRQEMQEVQSSRSGRGGNFGFGDSRGGGGNFGPGPGSNFRGGSDGYGSGRGFGDGYNGYGGGPGGGNFGGSPGYGGGRGGYGGGGPGYGNQGGGYGGGYDNYGGGNYGSGNYNDFGNYNQQPSNYGPMKSGNFGGSRNMGGPYGGGNYGPGGSGGSGGYGGRSRY

SEQ ID NO: 37985 - protein, 341 aa, Homo sapiens
  Payload ID: 7555
  Gene Symbol: HNRNPA2B1
  Gene Name: heterogeneous nuclear ribonucleoprotein A2/B1
  Uniprot ID: P22626
  ENSP ID: ENSP00000349101
MEREKEQFRKLFIGGLSFETTEESLRNYYEQWGKLTDCVVMRDPASKRSRGFGFVTFSSMAEVDAAMAARPHSIDGRVVEPKRAVAREESGKPGAHVTVKKLFVGGIKEDTEEHHLRDYFEEYGKIDTIEIITDRQSGKKRGFGFVTFDDHDPVDKIVLQKYHTINGHNAEVRKALSRQEMQEVQSSRSGRGGNFGFGDSRGGGGNFGPGPGSNFRGGSDGYGSGRGFGDGYNGYGGGPGGGNFGGSPGYGGGRGGYGGGGPGYGNQGGGYGGGYDNYGGGNYGSGNYNDFGNYNQQPSNYGPMKSGNFGGSRNMGGPYGGGNYGPGGSGGSGGYGGRSRY

SEQ ID NO: 37986 - protein, 353 aa, Homo sapiens; identical to SEQ ID NO: 37984
  Payload ID: 7555
  Gene Symbol: HNRNPA2B1
  Gene Name: heterogeneous nuclear ribonucleoprotein A2/B1
  Uniprot ID: P22626
  ENSP ID: ENSP00000354021

SEQ ID NO: 37987 - protein, 261 aa, Homo sapiens
  Payload ID: 7555
  Gene Symbol: HNRNPA2B1
  Gene Name: heterogeneous nuclear ribonucleoprotein A2/B1
  ENSP ID: ENSP00000478691
MEKTLETVPLERKKREKEQFRKLFIGGLSFETTEESLRNYYEQWGKLTDCVVMRDPASKRSRGFGFVTFSSMAEVDAAMAARPHSIDGRVVEPKRAVAREESGKPGAHVTVKKLFVGGIKEDTEEHHLRDYFEEYGKIDTIEIITDRQSGKKRGFGFVTFDDHDPVDKIVLQKYHTINGHNAEVRKALSRQEMQEDLEVAILEVAPVMEEEEEDMVVEDLDMATRVGATEVVMTTMEEEIMEVEITMILEIITSNLLTTVQ

SEQ ID NO: 37988 - protein, 378 aa, Homo sapiens
  Payload ID: 7556
  Gene Symbol: HNRNPA3
  Gene Name: heterogeneous nuclear ribonucleoprotein A3
  Uniprot ID: P51991
  ENSP ID: ENSP00000376309
MEVKPPPGRPQPDSGRRRRRRGEEGHDPKEPEQLRKLFIGGLSFETTDDSLREHFEKWGTLTDCVVMRDPQTKRSRGFGFVTYSCVEEVDAAMCARPHKVDGRVVEPKRAVSREDSVKPGAHLTVKKIFVGGIKEDTEEYNLRDYFEKYGKIETIEVMEDRQSGKKRGFAFVTFDDHDTVDKIVVQKYHTINGHNCEVKKALSKQEMQSAGSQRGRGGGSGNFMGRGGNFGGGGGNFGRGGNFGGRGGYGGGGGGSRGSYGGGDGGYNGFGGDGGNYGGGPGYSSRGGYGGGGPGYGNQGGGYGGGGGYDGYNEGGNFGGGNYGGGGNYNDFGNYSGQQQSNYGPMKGGSFGGRSSGSPYGGGYGSGGGSGGYGSRRF

SEQ ID NO: 37989 - protein, 115 aa, Homo sapiens
  Payload ID: 7556
  Gene Symbol: HNRNPA3
  Gene Name: heterogeneous nuclear ribonucleoprotein A3
  ENSP ID: ENSP00000400688
GHNCEVKKALSKQEMQSAGSQRGRGGGSGNFMGRGGNFGGGGGNFGRDGGYNGFGGDGNYGGGGNYNDFGNYSGQQQSNYGPMKGGSFGGRSSGSPYGGGYGSGGGSGGYGSRRF

SEQ ID NO: 37990 - protein, 356 aa, Homo sapiens
  Payload ID: 7556
  Gene Symbol: HNRNPA3
  Gene Name: heterogeneous nuclear ribonucleoprotein A3
  Uniprot ID: P51991
  ENSP ID: ENSP00000408487
MEGHDPKEPEQLRKLFIGGLSFETTDDSLREHFEKWGTLTDCVVMRDPQTKRSRGFGFVTYSCVEEVDAAMCARPHKVDGRVVEPKRAVSREDSVKPGAHLTVKKIFVGGIKEDTEEYNLRDYFEKYGKIETIEVMEDRQSGKKRGFAFVTFDDHDTVDKIVVQKYHTINGHNCEVKKALSKQEMQSAGSQRGRGGGSGNFMGRGGNFGGGGGNFGRGGNFGGRGGYGGGGGGSRGSYGGGDGGYNGFGGDGGNYGGGPGYSSRGGYGGGGPGYGNQGGGYGGGGGYDGYNEGGNFGGGNYGGGGNYNDFGNYSGQQQSNYGPMKGGSFGGRSSGSPYGGGYGSGGGSGGYGSRRF

SEQ ID NO: 37991 - protein, 378 aa, Homo sapiens; identical to SEQ ID NO: 37988
  Payload ID: 7556
  Gene Symbol: HNRNPA3
  Gene Name: heterogeneous nuclear ribonucleoprotein A3
  Uniprot ID: P51991
  ENSP ID: ENSP00000416340

SEQ ID NO: 37992 - protein, 288 aa, Homo sapiens
  Payload ID: 7557
  Gene Symbol: HNRNPC
  Gene Name: heterogeneous nuclear ribonucleoprotein C (C1/C2)
  ENSP ID: ENSP00000338095
MASNVTNKTDPRSMNSRVFIGNLNTLVVKKSDVEAIFSKYGKIVGCSVHKGFAFVQYVNERNARAAVAGEDGRMIAGQVLDINLAAEPKVNRGKAGVKRSAAEMYGSSFDLDYDFQRDYYDRMYSYPARVPPPPPIARAVVPSKRQRVSGNTSRRGKSGFNSKSGQRGSSKSGKLKGDDLQAIKKELTQIKQKVDSLLENLEKIEKEQSKQAVEMKNDKSEEEQSSSSVKKDETNVKMESEGGADDSAEEGDLLDDDDNEDRGDDQVKTTGKERKRWWRGAQGHMECL

SEQ ID NO: 37993 - protein, 290 aa, Homo sapiens [sequence omitted]

SEQ ID NO: 37994 - protein, 306 aa, Homo sapiens
  Payload ID: 7557
  Gene Symbol: HNRNPC
  Gene Name: heterogeneous nuclear ribonucleoprotein C (C1/C2)
  Uniprot ID: P07910
  ENSP ID: ENSP00000404848
MASNVTNKTDPRSMNSRVFIGNLNTLVVKKSDVEAIFSKYGKIVGCSVHKGFAFVQYVNERNARAAVAGEDGRMIAGQVLDINLAAEPKVNRGKAGVKRSAAEMYGSVTEHPSPSPLLSSSFDLDYDFQRDYYDRMYSYPARVPPPPPIARAVVPSKRQRVSGNTSRRGKSGFNSKSGQRGSSKSGKLKGDDLQAIKKELTQIKQKVDSLLENLEKIEKEQSKQAVEMKNDKSEEEQSSSSVKKDETNVKMESEGGADDSAEEGDLLDDDDNEDRGDDQLELIKDDEKEAEEGEDDRDSANGEDDS

SEQ ID NO: 37995 - protein, 293 aa, Homo sapiens
  Payload ID: 7557
  Gene Symbol: HNRNPC
  Gene Name: heterogeneous nuclear ribonucleoprotein C (C1/C2)
  Uniprot ID: P07910
  ENSP ID: ENSP00000442816
MASNVTNKTDPRSMNSRVFIGNLNTLVVKKSDVEAIFSKYGKIVGCSVHKGFAFVQYVNERNARAAVAGEDGRMIAGQVLDINLAAEPKVNRGKAGVKRSAAEMYGSSFDLDYDFQRDYYDRMYSYPARVPPPPPIARAVVPSKRQRVSGNTSRRGKSGFNSKSGQRGSSKSGKLKGDDLQAIKKELTQIKQKVDSLLENLEKIEKEQSKQAVEMKNDKSEEEQSSSSVKKDETNVKMESEGGADDSAEEGDLLDDDDNEDRGDDQLELIKDDEKEAEEGEDDRDSANGEDDS

SEQ ID NO: 37996 - protein, 126 aa, Homo sapiens
  Payload ID: 7557
  Gene Symbol: HNRNPC
  Gene Name: heterogeneous nuclear ribonucleoprotein C (C1/C2)
  ENSP ID: ENSP00000450467
MASNVTNKTDPRSMNSRVFIGNLNTLVVKKSDVEAIFSKYGKIVGCSVHKGFAFVQYVNERNARAAVAGEDGRMIAGQVLDINLAAEPKVNRGKAGVKRSAAEMYGSSFDLDYDFQRDYYDRMYSY

SEQ ID NO: 37997 - protein, 293 aa, Homo sapiens; identical to SEQ ID NO: 37995
  Payload ID: 7557
  Gene Symbol: HNRNPC
  Gene Name: heterogeneous nuclear ribonucleoprotein C (C1/C2)
  Uniprot ID: P07910
  ENSP ID: ENSP00000450544

SEQ ID NO: 37998 - protein, 288 aa, Homo sapiens; identical to SEQ ID NO: 37992
  Payload ID: 7557
  Gene Symbol: HNRNPC
  Gene Name: heterogeneous nuclear ribonucleoprotein C (C1/C2)
  ENSP ID: ENSP00000450548

SEQ ID NO: 37999 - protein, 214 aa, Homo sapiens
  Payload ID: 7557
  Gene Symbol: HNRNPC
  Gene Name: heterogeneous nuclear ribonucleoprotein C (C1/C2)
  ENSP ID: ENSP00000450601
MNINLAAEPKVNRGKAGVKRSAAEMYGSSFDLDYDFQRDYYDRMYSYPARVPPPPPIARAVVPSKRQRVSGNTSRRGKSGFNSKSGQRGSSKSGKLKGDDLQAIKKELTQIKQKVDSLLENLEKIEKEQSKQAVEMKNDKSEEEQSSSSVKKDETNVKMESEGGADDSAEEGDLLDDDDNEDRGDDQLELIKDDEKEAEEGEDDRDSANGEDDS

SEQ ID NO: 38000 - protein, 250 aa, Homo sapiens
  Payload ID: 7557
  Gene Symbol: HNRNPC
  Gene Name: heterogeneous nuclear ribonucleoprotein C (C1/C2)
  Uniprot ID: P07910
  ENSP ID: ENSP00000450629
MASNVTNKTDPRSMNSRVFIGNLNTLVVKKSDVEAIFSKYGKIVGCSVHKGFAFVQYVNERNARAAVAGEDGRMIAGQVLDINLAAEPKVNRGKAGVKRSAAEMYGSSFDLDYDFQRDYYDRMYSYPARVPPPPPIARAIKKELTQIKQKVDSLLENLEKIEKEQSKQAVEMKNDKSEEEQSSSSVKKDETNVKMESEGGADDSAEEGDLLDDDDNEDRGDDQLELIKDDEKEAEEGEDDRDSANGEDDS

SEQ ID NO: 38001 - protein, 54 aa, Homo sapiens
  Payload ID: 7557
  Gene Symbol: HNRNPC
  Gene Name: heterogeneous nuclear ribonucleoprotein C (C1/C2)
  ENSP ID: ENSP00000450669
MASNVTNKTDPRSMNSRVFIGNLNTLVVKKSDVEAIFSKYGKIVGCSVHKGFAF

SEQ ID NO: 38002 - protein, 293 aa, Homo sapiens; identical to SEQ ID NO: 37995
  Payload ID: 7557
  Gene Symbol: HNRNPC
  Gene Name: heterogeneous nuclear ribonucleoprotein C (C1/C2)
  Uniprot ID: P07910
  ENSP ID: ENSP00000450725

SEQ ID NO: 38003 - protein, 305 aa, Homo sapiens
  Payload ID: 7557
  Gene Symbol: HNRNPC
  Gene Name: heterogeneous nuclear ribonucleoprotein C (C1/C2)
  ENSP ID: ENSP00000450790
MASNVTNKTDPRSMNSRVFIGNLNTLVVKKSDVEAIFSKYGKIVGCSVHKGFAFVQYVNERNARAAVAGEDGRMIAGQVLDINLAAEPKVNRGKAGVKRSAAEMYGSVTEHPSPSPLLSSSFDLDYDFQRDYYDRMYSYPARVPPPPPIARAVVPSKRQRVSGNTSRRGKSGFNSKSGQRGSSKSGKLKGDDLQAIKKELTQIKQKVDSLLENLEKIEKEQSKQAEMKNDKSEEEQSSSSVKKDETNVKMESEGGADDSAEEGDLLDDDDNEDRGDDQLELIKDDEKEAEEGEDDRDSANGEDDS

SEQ ID NO: 38004 - protein, 293 aa, Homo sapiens; identical to SEQ ID NO: 37995
  Payload ID: 7557
  Gene Symbol: HNRNPC
  Gene Name: heterogeneous nuclear ribonucleoprotein C (C1/C2)
  Uniprot ID: P07910
  ENSP ID: ENSP00000451176

SEQ ID NO: 38005 - protein, 231 aa, Homo sapiens
  Payload ID: 7557
  Gene Symbol: HNRNPC
  Gene Name: heterogeneous nuclear ribonucleoprotein C (C1/C2)
  ENSP ID: ENSP00000451187
MASNVTNKTDPRSMNSRVFIGNLNTLVVKKSDVEAIFSKYGKIVGCSVHKGFAFVQYVNERNARAAVAGEDGRMIAGQVLDINLAAEPKVNRGKAGVKRSAAEMYGSVTEHPSPSPLLSSSFDLDYDFQRDYYDRMYSYPARVPPPPPIARAVVPSKRQRVSGNTSRRGKSGFNSKSGQRGSSKSGKLKGDDLQAIKKELTQIKQKVDSLLENLEKIEKEQSKQAAGVDQG

SEQ ID NO: 38006 - protein, 306 aa, Homo sapiens; identical to SEQ ID NO: 37994
  Payload ID: 7557
  Gene Symbol: HNRNPC
  Gene Name: heterogeneous nuclear ribonucleoprotein C (C1/C2)
  Uniprot ID: P07910
  ENSP ID: ENSP00000451291

SEQ ID NO: 38007 - protein, 121 aa, Homo sapiens
  Payload ID: 7557
  Gene Symbol: HNRNPC
  Gene Name: heterogeneous nuclear ribonucleoprotein C (C1/C2)
  ENSP ID: ENSP00000451292
MASNVTNKTDPRSMNSRVFIGNLNTLVVKKSDVEAIFSKYGKIVGCSVHKGFAFVQYVNERNARAAVAGEDGRMIAGQVLDINLAAEPKVNRGKAGVKRSAAEMYGSSFDLDYDFQRDYYD

SEQ ID NO: 38008 - protein, 226 aa, Homo sapiens
  Payload ID: 7557
  Gene Symbol: HNRNPC
  Gene Name: heterogeneous nuclear ribonucleoprotein C (C1/C2)
  Uniprot ID: P07910
  ENSP ID: ENSP00000451652
MASNVTNKTDPRSMNSRVFIGNLNTLVVKKSDVEAIFSNSSFDLDYDFQRDYYDRMYSYPARVPPPPPIARAVVPSKRQRVSGNTSRRGKSGFNSKSGQRGSSKSGKLKGDDLQAIKKELTQIKQKVDSLLENLEKIEKEQSKQAVEMKNDKSEEEQSSSSVKKDETNVKMESEGGADDSAEEGDLLDDDDNEDRGDDQLELIKDDEKEAEEGEDDRDSANGEDDS

SEQ ID NO: 38009 - protein, 292 aa, Homo sapiens
  Payload ID: 7557
  Gene Symbol: HNRNPC
  Gene Name: heterogeneous nuclear ribonucleoprotein C (C1/C2)
  ENSP ID: ENSP00000451708
MASNVTNKTDPRSMNSRVFIGNLNTLVVKKSDVEAIFSKYGKIVGCSVHKGFAFVQYVNERNARAAVAGEDGRMIAGQVLDINLAAEPKVNRGKAGVKRSAAEMYGSSFDLDYDFQRDYYDRMYSYPARVPPPPPIARAVVPSKRQRVSGNTSRRGKSGFNSKSGQRGSSKSGKLKGDDLQAIKKELTQIKQKVDSLLENLEKIEKEQSKQAEMKNDKSEEEQSSSSVKKDETNVKMESEGGADDSAEEGDLLDDDDNEDRGDDQLELIKDDEKEAEEGEDDRDSANGEDDS

SEQ ID NO: 38010 - protein, 66 aa, Homo sapiens
  Payload ID: 7557
  Gene Symbol: HNRNPC
  Gene Name: heterogeneous nuclear ribonucleoprotein C (C1/C2)
  ENSP ID: ENSP00000451892
MASNVTNKTDPRSMNSRVFIGNLNTLVVKKSDVEAIFSKYGKIVGCSVHKGFAFVQYVNERNARAA

SEQ ID NO: 38011 - protein, 262 aa, Homo sapiens
  Payload ID: 7557
  Gene Symbol: HNRNPC
  Gene Name: heterogeneous nuclear ribonucleoprotein C (C1/C2)
  ENSP ID: ENSP00000452021
MASNVTNKTDPRSMNSRVFIGNLNTLVVKKSDVEAIFSKYGKIVGCSVHKGFAFVQYVNERNARAAVAGEDGRMIAGQVLDINLAAEPKVNRGKAGVKRSAAEMYGSSFDLDYDFQRDYYDRMYSYPARVPPPPPIARAVVPSKRQRVSGNTSRRGKSGFNSKSGQRGSSKSGKLKGDDLQAIKKELTQIKQKVDSLLENLEKIEKEQSKQAVEMKNDKSEEEQSSSSVKKDETNVKMESEGGADDSAEEGDLLDDDDNEDR

SEQ ID NO: 38012 - protein, 175 aa, Homo sapiens
  Payload ID: 7557
  Gene Symbol: HNRNPC
  Gene Name: heterogeneous nuclear ribonucleoprotein C (C1/C2)
  ENSP ID: ENSP00000452185
MASNVTNKTDPRSMNSRVFIGNLNTLVVKKSDVEAIFSKYGKIVGCSVHKGFAFVQYVNERNARAAVAGEDGRMIAGQVLDINLAAEPKVNRGKAGVKRSAAEMYGSVTEHPSPSPLLSSSFDLDYDFQRDYYDRMYSYPARVPPPPPIARAVVPSKRQRVSGNTSRRGKSGFNS

SEQ ID NO: 38013 - protein, 187 aa, Homo sapiens
  Payload ID: 7557
  Gene Symbol: HNRNPC
  Gene Name: heterogeneous nuclear ribonucleoprotein C (C1/C2)
  ENSP ID: ENSP00000452213
MASNVTNKTDPRSMNSRVFIGNLNTLVVKKSDVEAIFSKYGKIVGCSVHKGFAFVQYVNERNARAAVAGEDGRMIAGQVLDINLAAEPKVNRGKAGVKRSAAEMYGSVTEHPSPSPLLSSSFDLDYDFQRDYYDRMYSYPARVPPPPPIARAVVPSKRQRVSGNTSRRGKSGFNSKSGQRGSSKSGK

SEQ ID NO: 38014 - protein, 231 aa, Homo sapiens; identical to SEQ ID NO: 38005
  Payload ID: 7557
  Gene Symbol: HNRNPC
  Gene Name: heterogeneous nuclear ribonucleoprotein C (C1/C2)
  ENSP ID: ENSP00000452214

SEQ ID NO: 38015 - protein, 306 aa, Homo sapiens; identical to SEQ ID NO: 37994
  Payload ID: 7557
  Gene Symbol: HNRNPC
  Gene Name: heterogeneous nuclear ribonucleoprotein C (C1/C2)
  Uniprot ID: P07910
  ENSP ID: ENSP00000452276

SEQ ID NO: 38016 - protein, 180 aa, Homo sapiens
  Payload ID: 7557
  Gene Symbol: HNRNPC
  Gene Name: heterogeneous nuclear ribonucleoprotein C (C1/C2)
  ENSP ID: ENSP00000452545
MYGSSFDLDYDFQRDYYDRMYSYPARVPPPPPIARAVVPSKRQRVSGNTSRRGKSGFNSKSGQRGSSKSGKLKGDDLQAIKKELTQIKQKVDSLLENLEKIEKEQSKQAVEMKNDKSEEEQSSSSVKKDETNVKMESEGGADDSAEEGDLLDDDDNEDRGDDQLELIKDDEKEAEEGEDD

SEQ ID NO: 38017 - protein, 117 aa, Homo sapiens
  Payload ID: 7557
  Gene Symbol: HNRNPC
  Gene Name: heterogeneous nuclear ribonucleoprotein C (C1/C2)
  ENSP ID: ENSP00000452573
MASNVTNKTDPRSMNSRVFIGNLNTLVVKKSDVEAIFSKYGKIVGCSVHKGFAFVQYVNERNARAAVAGEDGRMIAGQVLDINLAAEPKVNRGKAGVKRSAAEMYGSSFDLDYDFQR

SEQ ID NO: 38018 - protein, 147 aa, Homo sapiens
  Payload ID: 7557
  Gene Symbol: HNRNPC
  Gene Name: heterogeneous nuclear ribonucleoprotein C (C1/C2)
  ENSP ID: ENSP00000452599
MASNVTNKTDPRSMNSRVFIGNLNTLVVKKSDVEAIFSKYGKIVGCSVHKGFAFVQYVNERNARAAVAGEDGRMIAGQVLDINLAAEPKVNRGKAGVKRSAAEMYGSVTEHPSPSPLLSVYQETLHEGAKVASILRVDSGDLPSLES

SEQ ID NO: 38019 - protein, 293 aa, Homo sapiens
  Payload ID: 7558
  Gene Symbol: HNRNPCL1
  Gene Name: heterogeneous nuclear ribonucleoprotein C-like 1
  Uniprot ID: O60812
  ENSP ID: ENSP00000365370
MASNVTNKMDPHSMNSRVFIGNLNTLVVKKSDVEAIFSKYGKIAGCSVHKGFAFVQYDKEKNARAAVAGEDGRMIASQVVDINLAAEPKVNRGNAGVKRSAAEMYGSSFDLDYGFQRDYYDGMYSFPARVPPPPPIALAVVPSKRQRLSGNTSRRGKSGFNSKSGKRGSSKSGKLKGDDLQAIKQELTQIKQKVDSLLENLEKIEKEQSKQEVEVKNAKSEEEQSSSSMKKDETHVKMESEGGAEDSAEEGDPLDDDVNEDQGDDQLELIKDDEKEAEEGEDDRDSTNGQDDS

SEQ ID NO: 38020 - protein, 293 aa, Homo sapiens; identical to SEQ ID NO: 38019
  Payload ID: 7558
  Gene Symbol: HNRNPCL1
  Gene Name: heterogeneous nuclear ribonucleoprotein C-like 1
  Uniprot ID: O60812
  ENSP ID: ENSP00000479365

SEQ ID NO: 38021 - protein, 293 aa, Homo sapiens; identical to SEQ ID NO: 38019
  Payload ID: 7558
  Gene Symbol: HNRNPCL1
  Gene Name: heterogeneous nuclear ribonucleoprotein C-like 1
  Uniprot ID: O60812
  ENSP ID: ENSP00000488130

SEQ ID NO: 38022 - protein, 293 aa, Homo sapiens; identical to SEQ ID NO: 38019
  Payload ID: 7558
  Gene Symbol: HNRNPCL1
  Gene Name: heterogeneous nuclear ribonucleoprotein C-like 1
  Uniprot ID: O60812
  ENSP ID: ENSP00000488781

SEQ ID NO: 38023 - protein, 293 aa, Homo sapiens
  Payload ID: 7559
  Gene Symbol: HNRNPCL2
  Gene Name: heterogeneous nuclear ribonucleoprotein C-like 2
  Uniprot ID: B2RXH8
  ENSP ID: ENSP00000479203
MASNVTNKMDPHSVNSRVFIGNLNTLVVKKSDVEAIFSKYGKIAGCSVHKGFAFVQYDKEKNARAAVAGEDGRMIASQVAVINLAAEPKVNRGNAGVKRSAAEMYGSSFDLDYGFQRDYYDGMYSFPARVPPPPPIALAVVPSKRQRISGNTSRRGKSGFNSKSGKRGSSKSGKLKGDDLQAIKQELTQIKQKVDSLLENLEKIEKEQSKQEVEVKNAKSEEEQSSSSMKKDETHVKMESEGGAEDSAEEGDPLDDDDNEDQGDNQLHLIKNNEKDAEEGEDNRDSTNGQDDS

SEQ ID NO: 38024 - protein, 293 aa, Homo sapiens
  Payload ID: 7559
  Gene Symbol: HNRNPCL2
  Gene Name: heterogeneous nuclear ribonucleoprotein C-like 2
  ENSP ID: ENSP00000481869
MASNVTNKMDPHSVNSRVFIGNLNTLVVKKSDVEAIFSKYGKIAGCSVHKGFAFVQYDKEKNARAAVAGEDGRMIASQVAVINLAAEPKVNRGNAGVKRSAAEMYGSSFDLDYGFQRDYYDGMYSFPARVPPPPPIALAVVPSKHQRISGNTSRRGKSGFNSKSGKRGSSKSGKLKGDDLQAIKQELTQIKQKVDSLLENLEKIEKEQSKQEVEVKNAKSEEEQSSSSMKKDETHVKMESEGGAEDSAEEGDPLDDDDNEDQGDNQLHLIKNNEKDAEEGEDNRDSTNGQDDS

SEQ ID NO: 38025 - protein, 293 aa, Homo sapiens; identical to SEQ ID NO: 38023
  Payload ID: 7559
  Gene Symbol: HNRNPCL2
  Gene Name: Heterogeneous nuclear ribonucleoprotein C-like 2
  ENSP ID: ENSP00000488742

SEQ ID NO: 38026 - protein, 293 aa, Homo sapiens
  Payload ID: 7560
  Gene Symbol: HNRNPCL3
  Gene Name: heterogeneous nuclear ribonucleoprotein C-like 3
  Uniprot ID: B7ZW38
  ENSP ID: ENSP00000478017
MASNVTNKMDPHSMNSRVFIGNLNTLVVKKSDVEAIFSKYGKIAGCSVHKGFAFVQYDKEKNARAAVAGEDGRMIASQVVDINLAAEPKVNRGNAGVKRSAAEMYGSSFDLDYNLQRDYYGGMYSFPARVPPPPPIALAVVPSKRQRISGNTSRRGKSGFNSKSGKRGSSKSGKLKGDDLQAIKQELTQIKQKVDSLLENLEKIEKEHCKQGVEVKNAKSEEEQTSSSSKKDKTHVKMESEGGADDSVEEGDLLCDDDNEDQGDNQLELIKDDEKGAEEGEDDRDRANGQDDS

SEQ ID NO: 38027 - protein, 293 aa, Homo sapiens; identical to SEQ ID NO: 38026
  Payload ID: 7560
  Gene Symbol: HNRNPCL3
  Gene Name: Heterogeneous nuclear ribonucleoprotein C-like 3
  ENSP ID: ENSP00000488124

SEQ ID NO: 38028 - protein, 293 aa, Homo sapiens
  Payload ID: 7561
  Gene Symbol: HNRNPCL4
  Gene Name: heterogeneous nuclear ribonucleoprotein C-like 4
  ENSP ID: ENSP00000483545
MASNVTNKMDPHSMNSRVFIGNLNTLVVKKSDVEAIFSKYGKIAGCSVHKGFAFVQYDKEKNARAAVAGEDGRMIASQVVDINLAAEPKVNRGNAGVKRSAAEMYGSSFDLDYNLQRDYYGGMYSFPARVPPPPPIALAVVPSKRQRISGNTSRRGKSGFNSKSGKRGSSKSGKLKGDDLQAIKQELTQIKQKVDSLLENLEKIEKEHCKQGVEVKNAKSEEEQTSSSSKKDKTHVKMESEGGADDSVEEGDLLCDDDNEDQGDNQLELIKDDEKGVEEGEDDRDRANGQDDS

SEQ ID NO: 38029 - protein, 293 aa, Homo sapiens; identical to SEQ ID NO: 38026
  Payload ID: 7561
  Gene Symbol: HNRNPCL4
  Gene Name: heterogeneous nuclear ribonucleoprotein C-like 4
  Uniprot ID: P0DMR1
  ENSP ID: ENSP00000485450

SEQ ID NO: 38030 - protein, 293 aa, Homo sapiens; identical to SEQ ID NO: 38026
  Payload ID: 7561
  Gene Symbol: HNRNPCL4
  Gene Name: Heterogeneous nuclear ribonucleoprotein C-like 4
  ENSP ID: ENSP00000488276

SEQ ID NO: 38031 - protein, 336 aa, Homo sapiens
  Payload ID: 7562
  Gene Symbol: HNRNPD
  Gene Name: heterogeneous nuclear ribonucleoprotein D (AU-rich element RNA binding protein 1, 37kDa)
  Uniprot ID: Q14103
  ENSP ID: ENSP00000305860
MSEEQFGGDGAAAAATAAVGGSAGEQEGAMVAATQGAAAAAGSGAGTGGGTASGGTEGGSAESEGAKIDASKNEEDEGKMFIGGLSWDTTKKDLKDYFSKFGEVVDCTLKLDPITGRSRGFGFVLFKESESVDKVMDQKEHKLNGKVIDPKRAKAMKTKEPVKKIFVGGLSPDTPEEKIREYFGGFGEVESIELPMDNKTNKRRGFCFITFKEEEPVKKIMEKKYHNVGLSKCEIKVAMSKEQYQQQQQWGSRGGFAGRARGRGGGPSQNWNQGYSNYWNQGYGNYGYNSQGYGGYGGYDYTGYNNYYGYGDYSNQQSGYGKVSRRGGHQNSYKPY

SEQ ID NO: 38032 - protein, 355 aa, Homo sapiens
  Payload ID: 7562
  Gene Symbol: HNRNPD
  Gene Name: heterogeneous nuclear ribonucleoprotein D (AU-rich element RNA binding protein 1, 37kDa)
  Uniprot ID: Q14103
  ENSP ID: ENSP00000313199
MSEEQFGGDGAAAAATAAVGGSAGEQEGAMVAATQGAAAAAGSGAGTGGGTASGGTEGGSAESEGAKIDASKNEEDEGHSNSSPRHSEAATAQREEWKMFIGGLSWDTTKKDLKDYFSKFGEVVDCTLKLDPITGRSRGFGFVLFKESESVDKVMDQKEHKLNGKVIDPKRAKAMKTKEPVKKIFVGGLSPDTPEEKIREYFGGFGEVESIELPMDNKTNKRRGFCFITFKEEEPVKKIMEKKYHNVGLSKCEIKVAMSKEQYQQQQQWGSRGGFAGRARGRGGGPSQNWNQGYSNYWNQGYGNYGYNSQGYGGYGGYDYTGYNNYYGYGDYSNQQSGYGKVSRRGGHQNSYKPY

SEQ ID NO: 38033 - protein, 306 aa, Homo sapiens
  Payload ID: 7562
  Gene Symbol: HNRNPD
  Gene Name: heterogeneous nuclear ribonucleoprotein D (AU-rich element RNA binding protein 1, 37kDa)
  Uniprot ID: Q14103
  ENSP ID: ENSP00000313327
MSEEQFGGDGAAAAATAAVGGSAGEQEGAMVAATQGAAAAAGSGAGTGGGTASGGTEGGSAESEGAKIDASKNEEDEGHSNSSPRHSEAATAQREEWKMFIGGLSWDTTKKDLKDYFSKFGEVVDCTLKLDPITGRSRGFGFVLFKESESVDKVMDQKEHKLNGKVIDPKRAKAMKTKEPVKKIFVGGLSPDTPEEKIREYFGGFGEVESIELPMDNKTNKRRGFCFITFKEEEPVKKIMEKKYHNVGLSKCEIKVAMSKEQYQQQQQWGSRGGFAGRARGRGGDQQSGYGKVSRRGGHQNSYKPY

SEQ ID NO: 38034 - protein, 260 aa, Homo sapiens
  Payload ID: 7562
  Gene Symbol: HNRNPD
  Gene Name: heterogeneous nuclear ribonucleoprotein D (AU-rich element RNA binding protein 1, 37kDa)
  ENSP ID: ENSP00000420926
SRQDFFPPVVGHSNSSPRHSEAATAQREEWKMFIGGLSWDTTKKDLKDYFSKFGEVVDCTLKLDPITGRSRGFGFVLFKESESVDKVMDQKEHKLNGKVIDPKRAKAMKTKEPVKKIFVGGLSPDTPEEKIREYFGGFGEVESIELPMDNKTNKRRGFCFITFKEEEPVKKIMEKKYHNVGLSKCEIKVAMSKEQYQQQQQWGSRGGFAGRARGRGGGPSQNWNQGYSNYWNQGYGNYGYNSQGYGGYGGYDYTGYNNYY

SEQ ID NO: 38035 - protein, 221 aa, Homo sapiens
  Payload ID: 7562
  Gene Symbol: HNRNPD
  Gene Name: heterogeneous nuclear ribonucleoprotein D (AU-rich element RNA binding protein 1, 37kDa)
  ENSP ID: ENSP00000421952
MSEEQFGGDGAAAAATAAVGGSAGEQEGAMVAATQGAAAAAGSGAGTGGGTASGGTEGGSAESEGAKIDASKNEEDEGHSNSSPRHSEAATAQREEWKMFIGGLSWDTTKKDLKDYFSKFGEVVDCTLKLDPITGRSRGFGFVLFKESESVDKVMDQKEHKLNGKVIDPKRAKAMKTKEPVKKIFVGGLSPDTPEEKIREYFGGFGEVESIELPMDNKTNK

SEQ ID NO: 38036 - protein, 155 aa, Homo sapiens
  Payload ID: 7562
  Gene Symbol: HNRNPD
  Gene Name: heterogeneous nuclear ribonucleoprotein D (AU-rich element RNA binding protein 1, 37kDa)
  ENSP ID: ENSP00000422615
MSEEQFGGDGAAAAATAAVGGSAGEQEGAMVAATQGAAAAAGSGAGTGGGTASGGTEGGSAESEGAKIDASKNEEDEGKMFIGGLSWDTTKKDLKDYFSKFGEVVDCTLKLDPITGRSRGFGFVLFKESESVDKVMDQKEHKLNGKVIDPKRAKA

SEQ ID NO: 38037 - protein, 86 aa, Homo sapiens
  Payload ID: 7562
  Gene Symbol: HNRNPD
  Gene Name: heterogeneous nuclear ribonucleoprotein D (AU-rich element RNA binding protein 1, 37kDa)
  ENSP ID: ENSP00000424002
MSEEQFGGDGAAAAATAAVGGSAGEQEGAMVAATQGAAAAAGSGAGTGGGTASGGTEGGSAESEGAKIDASKNEEDEGSWIKKNIN

SEQ ID NO: 38038 - protein, 92 aa, Homo sapiens
  Payload ID: 7562
  Gene Symbol: HNRNPD
  Gene Name: heterogeneous nuclear ribonucleoprotein D (AU-rich element RNA binding protein 1, 37kDa)
  ENSP ID: ENSP00000425439
MSEEQFGGDGAAAAATAAGAKIDASKNEEDEGHSNSSPRHSEAATAQREEWKMFIGGLSWDTTKKDLKDYFSKFGEVVDCTLKLDPITGRSR

SEQ ID NO: 38039 - protein, 210 aa, Homo sapiens
  Payload ID: 7562
  Gene Symbol: HNRNPD
  Gene Name: heterogeneous nuclear ribonucleoprotein D (AU-rich element RNA binding protein 1, 37kDa)
  ENSP ID: ENSP00000426446
  MOD_RES (1)..(1): Any amino acid
XKMFIGGLSWDTTKKDLKDYFSKFGEVVDCTLKLDPITGRSRGFGFVLFKESESVDKVMDQKEHKLNGKVIDPKRAKAMKTKEPVKKIFVGGLSPDTPEEKIREYFGGFGEVESIELPMDNKTNKRRGFCFITFKEEEPVKKIMEKKYHNVGLSKCEIKVAMSKEQYQQQQQWGSRGGFAGRARGRGGDQQSGYGKVSRRGGHQNSYKPY

SEQ ID NO: 38040 - protein, 111 aa, Homo sapiens
  Payload ID: 7562
  Gene Symbol: HNRNPD
  Gene Name: heterogeneous nuclear ribonucleoprotein D (AU-rich element RNA binding protein 1, 37kDa)
  ENSP ID: ENSP00000426666
MFIGGLSWDTTKKDLKDYFSKFGEVVDCTLKLDPITGRSRGFGFVLFKESESVDKVMDQKEHKLNGKVIDPKRAKAMKTKEPVKKIFVGGLSPDTPEEKIREYFGGFGEVE

SEQ ID NO: 38041 - protein, 420 aa, Homo sapiens
  Payload ID: 7563
  Gene Symbol: HNRNPDL
  Gene Name: heterogeneous nuclear ribonucleoprotein D-like
  Uniprot ID: O14979
  ENSP ID: ENSP00000295470
MEVPPRLSHVPPPLFPSAPATLASRSLSHWRPRPPRQLAPLLPSLAPSSARQGARRAQRHVTAQQPSRLAGGAAIKGGRRRRPDLFRRHFKSSSIQRSAAAAAATRTARQHPPADSSVTMEDMNEYSNIEEFAEGSKINASKNQQDDGKMFIGGLSWDTSKKDLTEYLSRFGEVVDCTIKTDPVTGRSRGFGFVLFKDAASVDKVLELKEHKLDGKLIDPKRAKALKGKEPPKKVFVGGLSPDTSEEQIKEYFGAFGEIENIELPMDTKTNERRGFCFITYTDEEPVKKLLESRYHQIGSGKCEIKVAQPKEVYRQQQQQQKGGRGAAAGGRGGTRGRGRGQGQNWNQGFNNYYDQGYGNYNSAYGGDQNYSGYGGYDYTGYNYGNYGYGQGYADYSGQQSTYGKASRGGGNHQNNYQPY

SEQ ID NO: 38042 - protein, 301 aa, Homo sapiens
  Payload ID: 7563
  Gene Symbol: HNRNPDL
  Gene Name: heterogeneous nuclear ribonucleoprotein D-like
  Uniprot ID: O14979
  ENSP ID: ENSP00000338552
MEDMNEYSNIEEFAEGSKINASKNQQDDGKMFIGGLSWDTSKKDLTEYLSRFGEVVDCTIKTDPVTGRSRGFGFVLFKDAASVDKVLELKEHKLDGKLIDPKRAKALKGKEPPKKVFVGGLSPDTSEEQIKEYFGAFGEIENIELPMDTKTNERRGFCFITYTDEEPVKKLLESRYHQIGSGKCEIKVAQPKEVYRQQQQQQKGGRGAAAGGRGGTRGRGRGQGQNWNQGFNNYYDQGYGNYNSAYGGDQNYSGYGGYDYTGYNYGNYGYGQGYADYSGQQSTYGKASRGGGNHQNNYQPY

SEQ ID NO: 38043 - protein, 420 aa, Homo sapiens; identical to SEQ ID NO: 38041
  Payload ID: 7563
  Gene Symbol: HNRNPDL
  Gene Name: heterogeneous nuclear ribonucleoprotein D-like
  Uniprot ID: O14979
  ENSP ID: ENSP00000422040

SEQ ID NO: 38044 - protein, 301 aa, Homo sapiens; identical to SEQ ID NO: 38042
  Payload ID: 7563
  Gene Symbol: HNRNPDL
  Gene Name: heterogeneous nuclear ribonucleoprotein D-like
  Uniprot ID: O14979
  ENSP ID: ENSP00000473677

SEQ ID NO: 38045 - protein, 57 aa, Homo sapiens
  Payload ID: 7563
  Gene Symbol: HNRNPDL
  Gene Name: heterogeneous nuclear ribonucleoprotein D-like
  ENSP ID: ENSP00000478269
MEDMNEYSNIEEFAEGSKINASKNQQDDGLKILNFPWIQKQMKEEDFVLSHILMKSQ

SEQ ID NO: 38046 - protein, 363 aa, Homo sapiens
  Payload ID: 7563
  Gene Symbol: HNRNPDL
  Gene Name: heterogeneous nuclear ribonucleoprotein D-like
  ENSP ID: ENSP00000478723
MEVPPRLSHVPPPLFPSAPATLASRSLSHWRPRPPRQLAPLLPSLAPSSARQGARRAQRHVTAQQPSRLAGGAAIKGGRRRRPDLFRRHFKSSSIQRSAAAAAATRTARQHPPADSSVTMEDMNEYSNIEEFAEGSKINASKNQQDDGKMFIGGLSWDTSKKDLTEYLSRFGEVVDCTIKTDPVTGRSRGFGFVLFKDAASVDKVLELKEHKLDGKLIDPKRAKALKGKEPPKKVFVGGLSPDTSEEQIKEYFGAFGEIENIELPMDTKTNERRGFCFITYTDEEPVKKLLESRYHQIGSGKCEIKVAQPKEVYRQQQQQQKGGRGAAAGGRGGTRGRGRGQQSTYGKASRGGGNHQNNYQPY

SEQ ID NO: 38047 - protein, 301 aa, Homo sapiens; identical to SEQ ID NO: 38042
  Payload ID: 7563
  Gene Symbol: HNRNPDL
  Gene Name: heterogeneous nuclear ribonucleoprotein D-like
  Uniprot ID: O14979
  ENSP ID: ENSP00000480156

SEQ ID NO: 38048 - protein, 420 aa, Homo sapiens; identical to SEQ ID NO: 38041
  Payload ID: 7563
  Gene Symbol: HNRNPDL
  Gene Name: heterogeneous nuclear ribonucleoprotein D-like
  Uniprot ID: O14979
  ENSP ID: ENSP00000483254

SEQ ID NO: 38049 - protein, 301 aa, Homo sapiens; identical to SEQ ID NO: 38042
  Payload ID: 7563
  Gene Symbol: HNRNPDL
  Gene Name: heterogeneous nuclear ribonucleoprotein D-like
  Uniprot ID: O14979
  ENSP ID: ENSP00000485954

SEQ ID NO: 38050 - protein, 301 aa, Homo sapiens; identical to SEQ ID NO: 38042
  Payload ID: 7563
  Gene Symbol: HNRNPDL
  Gene Name: heterogeneous nuclear ribonucleoprotein D-like
  Uniprot ID: O14979
  ENSP ID: ENSP00000486452

SEQ ID NO: 38051 - protein, 415 aa, Homo sapiens
  Payload ID: 7564
  Gene Symbol: HNRNPF
  Gene Name: heterogeneous nuclear ribonucleoprotein F
  Uniprot ID: P52597
  ENSP ID: ENSP00000338477
MMLGPEGGEGFVVKLRGLPWSCSVEDVQNFLSDCTIHDGAAGVHFIYTREGRQSGEAFVELGSEDDVKMALKKDRESMGHRYIEVFKSHRTEMDWVLKHSGPNSADSANDGFVRLRGLPFGCTKEEIVQFFSGLEIVPNGITLPVDPEGKITGEAFVQFASQELAEKALGKHKERIGHRYIEVFKSSQEEVRSYSDPPLKFMSVQRPGPYDRPGTARRYIGIVKQAGLERMRPGAYSTGYGGYEEYSGLSDGYGFTTDLFGRDLSYCLSGMYDHRYGDSEFTVQSTTGHCVHMRGLPYKATENDIYNFFSPLNPVRVHIEIGPDGRVTGEADVEFATHEEAVAAMSKDRANMQHRYIELFLNSTTGASNGAYSSQVMQGMGVSAAQATYSGLESQSVSGCYGAGYSGQNSMGGYD

SEQ ID NO: 38052 - protein, 415 aa, Homo sapiens; identical to SEQ ID NO: 38051
  Payload ID: 7564
  Gene Symbol: HNRNPF
  Gene Name: heterogeneous nuclear ribonucleoprotein F
  Uniprot ID: P52597
  ENSP ID: ENSP00000348345

SEQ ID NO: 38053 - protein, 415 aa, Homo sapiens; identical to SEQ ID NO: 38051
  Payload ID: 7564
  Gene Symbol: HNRNPF
  Gene Name: heterogeneous nuclear ribonucleoprotein F
  Uniprot ID: P52597
  ENSP ID: ENSP00000349573

SEQ ID NO: 38054 - protein, 415 aa, Homo sapiens; identical to SEQ ID NO: 38051
  Payload ID: 7564
  Gene Symbol: HNRNPF
  Gene Name: heterogeneous nuclear ribonucleoprotein F
  Uniprot ID: P52597
  ENSP ID: ENSP00000400433

SEQ ID NO: 38055 - protein, 415 aa, Homo sapiens; identical to SEQ ID NO: 38051
  Payload ID: 7564
  Gene Symbol: HNRNPF
  Gene Name: heterogeneous nuclear ribonucleoprotein F
  Uniprot ID: P52597
  ENSP ID: ENSP00000438061

SEQ ID NO: 38056 - protein, 472 aa, Homo sapiens
  Payload ID: 7565
  Gene Symbol: HNRNPH1
  Gene Name: heterogeneous nuclear ribonucleoprotein H1 (H)
  ENSP ID: ENSP00000327539
MMLGTEGGEGFVVKVRGLPWSCSADEVQRFFSDCKIQNGAQGIRFIYTREGRPSGEAFVELESEDEVKLALKKDRETMGHRYVEVFKSNNVEMDWVLKHTGPNSPDTANDGFVRLRGLPFGCSKEEIVQFFSGLEIVPNGITLPVDFQGRSTGEAFVQFASQEIAEKALKKHKERIGHRYIEIFKSSRAEVRTHYDPPRKLMAMQRPGPYDRPGAGRGYNSIGRGAGFERMRRGAYGGGYGGYDDYNGYNDGYGFGSDRFGRDLNYCFSGMSDHRYGDGGSTFQSTTGHCVHMRGLPYRATENDIYNFFSPLNPVRVHIEIGPDGRVTGEADVEFATHEDAVAAMSKDKANMQHRYVELFLNSTAGASGGAYEHRYVELFLNSTAGASGGAYGSQMMGGMGLSNQSSYGGPASQQLSGGYGGGYGGQSSMSGYGNQGAVNSSYYSSGSRASMGVNGMGGLSSMSSMSGGWGM

SEQ ID NO: 38057 - protein, 449 aa, Homo sapiens
  Payload ID: 7565
  Gene Symbol: HNRNPH1
  Gene Name: heterogeneous nuclear ribonucleoprotein H1 (H)
  Uniprot ID: P31943
  ENSP ID: ENSP00000349168
MMLGTEGGEGFVVKVRGLPWSCSADEVQRFFSDCKIQNGAQGIRFIYTREGRPSGEAFVELESEDEVKLALKKDRETMGHRYVEVFKSNNVEMDWVLKHTGPNSPDTANDGFVRLRGLPFGCSKEEIVQFFSGLEIVPNGITLPVDFQGRSTGEAFVQFASQEIAEKALKKHKERIGHRYIEIFKSSRAEVRTHYDPPRKLMAMQRPGPYDRPGAGRGYNSIGRGAGFERMRRGAYGGGYGGYDDYNGYNDGYGFGSDRFGRDLNYCFSGMSDHRYGDGGSTFQSTTGHCVHMRGLPYRATENDIYNFFSPLNPVRVHIEIGPDGRVTGEADVEFATHEDAVAAMSKDKANMQHRYVELFLNSTAGASGGAYEHRYVELFLNSTAGASGGAYGSQMMGGMGLSNQSSYGGPASQQLSGGYGGGYGGQSSMSGYDQVLQENSSDFQSNIA

SEQ ID NO: 38058 - protein, 449 aa, Homo sapiens; identical to SEQ ID NO: 38057
  Payload ID: 7565
  Gene Symbol: HNRNPH1
  Gene Name: heterogeneous nuclear ribonucleoprotein H1 (H)
  Uniprot ID: P31943
  ENSP ID: ENSP00000377082

SEQ ID NO: 38059 - protein, 449 aa, Homo sapiens; identical to SEQ ID NO: 38057
  Payload ID: 7565
  Gene Symbol: HNRNPH1
  Gene Name: heterogeneous nuclear ribonucleoprotein H1 (H)
  Uniprot ID: P31943
  ENSP ID: ENSP00000397797

SEQ ID NO: 38060 - protein, 171 aa, Homo sapiens
  Payload ID: 7565
  Gene Symbol: HNRNPH1
  Gene Name: heterogeneous nuclear ribonucleoprotein H1 (H)
  ENSP ID: ENSP00000420850
MMLGTEGGEGFVVKVRGLPWSCSADEVQRFFSDCKIQNGAQGIRFIYTREGRPSGEAFVELESEDEVKLALKKDRETMGHRYVEVFKSNNVEMDWVLKHTGPNSPDTANDGFVRLRGLPFGCSKEEIVQFFSGILKSLRAVELKLELIMIHHESLWPCSGQVLMTDLGLVE

SEQ ID NO: 38061 - protein, 130 aa, Homo sapiens
  Payload ID: 7565
  Gene Symbol: HNRNPH1
  Gene Name: heterogeneous nuclear ribonucleoprotein H1 (H)
  ENSP ID: ENSP00000421695
MMLGTEGGEGFVVKVRGLPWSCSADEVQRFFSDCKIQNGAQGIRFIYTREGRPSGEAFVELESEDEVKLALKKDRETMGHRYVEVFKSNNVEMDWVLKHTGPNSPDTANDGFVRLRGLPFGCSKEEIVQF

SEQ ID NO: 38062 - protein, 40 aa, Homo sapiens
  Payload ID: 7565
  Gene Symbol: HNRNPH1
  Gene Name: heterogeneous nuclear ribonucleoprotein H1 (H)
  ENSP ID: ENSP00000422955
MMLGTEGGEGFVVKVRGLPWSCSADEVQRFFSALVTESDL

SEQ ID NO: 38063 - protein, 161 aa, Homo sapiens
  Payload ID: 7565
  Gene Symbol: HNRNPH1
  Gene Name: heterogeneous nuclear ribonucleoprotein H1 (H)
  ENSP ID: ENSP00000423140
MMLGTEGGEGFVVKVRGLPWSCSADEVQRFFSDCKIQNGAQGIRFIYTREGRPSGEAFVELESEDEVKLALKKDRETMGHRYVEVFKSNNVEMDWVLKHTGPNSPDTANDGFVRLRGLPFGCSKEEIVQFFSGILKSLRAVELKLELIMIHHESLWPCSGQ

SEQ ID NO: 38064 - protein, 212 aa, Homo sapiens
  Payload ID: 7565
  Gene Symbol: HNRNPH1
  Gene Name: heterogeneous nuclear ribonucleoprotein H1 (H)
  ENSP ID: ENSP00000424087
MMLGTEGGEGFVVKVRGLPWSCSADEVQRFFSDCKIQNGAQGIRFIYTREGRPSGEAFVELESEDEVKLALKKDRETMGHRYVEVFKSNNVEMDWVLKHTGPNSPDTANDGFVRLRGLPFGCSKEEIVQFFSGLEIVPNGITLPVDFQGRSTGEAFVQFASQEIAEKALKKHKERIGHRYIEIFKSSRAEVRTHYDPPRKLMAMQRPGPYDR

SEQ ID NO: 38065 - protein, 84 aa, Homo sapiens
  Payload ID: 7565
  Gene Symbol: HNRNPH1
  Gene Name: heterogeneous nuclear ribonucleoprotein H1 (H)
  ENSP ID: ENSP00000425343
MMLGTEGGEGFVVKVRGLPWSCSADEVQRFFSDCKIQNGAQGIRFIYTREGRPSGEAFVELESEDEVKLALKKDRETMGHRYVE

SEQ ID NO: 38066 - protein, 172 aa, Homo sapiens
  Payload ID: 7565
  Gene Symbol: HNRNPH1
  Gene Name: heterogeneous nuclear ribonucleoprotein H1 (H)
  ENSP ID: ENSP00000425732
MMLGTEGGEGFVVKVRGLPWSCSADEVQRFFSDCKIQNGAQGIRFIYTREGRPSGEAFVELESEDEVKLALKKDRETMGHRYVEVFKSNNVEMDWVLKHTGPNSPDTANDGFVRLRGLPFGCSKEEIVQFFSGILKSLRAVELKLELIMIHHESLWPCSGQVLMTDLGLVEG

SEQ ID NO: 38067 - protein, 184 aa, Homo sapiens
  Payload ID: 7565
  Gene Symbol: HNRNPH1
  Gene Name: heterogeneous nuclear ribonucleoprotein H1 (H)
  ENSP ID: ENSP00000425851
MMLGTEGGEGFVVKVRGLPWSCSADEVQRFFSDCKIQNGAQGIRFIYTREGRPSGEAFVELESEDEVKLALKKDRETMGHRYVEVFKSNNVEMDWVLKHTGPNSPDTANDGFVRLRGLPFGCSKEEIVQFFSGILKSLRAVELKLELIMIHHESLWPCSGQVLMTDLGLVEGITALAEELALRG

SEQ ID NO: 38068 - protein, 429 aa, Homo sapiens
  Payload ID: 7565
  Gene Symbol: HNRNPH1
  Gene Name: heterogeneous nuclear ribonucleoprotein H1 (H)
  ENSP ID: ENSP00000426275
MMLGTEGGEGFVVKVRGLPWSCSADEVQRFFSDCKIQNGAQGIRFIYTREGRPSGEAFVELESEDEVKLALKKDRETMGHRYVEVFKSNNVEMDWVLKHTGPNSPDTANDGFVRLRGLPFGCSKEEIVQFFSGLEIVPNGITLPVDFQGRSTGEAFVQFASQEIAEKALKKHKERIGHRYIEIFKSSRAEVRTHYDPPRKLMAMQRPGPYDRPGAGRGYNSIGRGAGFERMRRGAYGGGYGGYDDYNGYNDGYGFGSDRFGRDLNYCFSGMSDHRYGDGGSTFQSTTGHCVHMRGLPYRATENDIYNFFSPLNPVRVHIEIGPDGRVTGEADVEFATHEDAVAAMSKDKANMQHRYVELFLNSTAGASGGAYGSQMLGGMGLSNQSSYGGPASQQLSGGYGGGYGGQSSMSGYDQVLQENSSDFQSNIA

SEQ ID NO: 38069 - protein, 163 aa, Homo sapiens
  Payload ID: 7565
  Gene Symbol: HNRNPH1
  Gene Name: heterogeneous nuclear ribonucleoprotein H1 (H)
  ENSP ID: ENSP00000426518
MMLGTEGGEGFVVKVRGLPWSCSADEVQRFFSDCKIQNGAQGIRFIYTREGRPSGEAFVELESEDEVKLALKKDRETMGHRYVEVFKSNNVEMDWVLKHTGPNSPDTANDGFVRLRGLPFGCSKEEIVQFFSGLEIVPNGITLPVDFQGRSTGEAFVQFASQE

SEQ ID NO: 38070 - protein, 49 aa, Homo sapiens
  Payload ID: 7565
  Gene Symbol: HNRNPH1
  Gene Name: heterogeneous nuclear ribonucleoprotein H1 (H)
  ENSP ID: ENSP00000426726
MMLGTEGGEGFVVKVRGLPWSCSADEVQRFFSDCKIQNGAQGIRFIYTR

SEQ ID NO: 38071 - protein, 40 aa, Homo sapiens; identical to SEQ ID NO: 38062
  Payload ID: 7565
  Gene Symbol: HNRNPH1
  Gene Name: heterogeneous nuclear ribonucleoprotein H1 (H)
  ENSP ID: ENSP00000427351

SEQ ID NO: 38072 - protein, 168 aa, Homo sapiens
  Payload ID: 7565
  Gene Symbol: HNRNPH1
  Gene Name: heterogeneous nuclear ribonucleoprotein H1 (H)
  ENSP ID: ENSP00000427388
MMLGTEGGEGFVVKVRGLPWSCSADEVQRFFSDCKIQNGAQGIRFIYTREGRPSGEAFVELESEDEVKLALKKDRETMGHRYVEVFKSNNVEMDWVLKHTGPNSPDTANDGFVRLRGLPFGCSKEEIVQFFSGLEIVPNGITLPVDFQGRSTGEAFVQFASQEIAEKA

SEQ ID NO: 38073 - protein, 164 aa, Homo sapiens
  Payload ID: 7565
  Gene Symbol: HNRNPH1
  Gene Name: heterogeneous nuclear ribonucleoprotein H1 (H)
  ENSP ID: ENSP00000427408
MMLGTEGGEGFVVKVRGLPWSCSADEVQRFFSDCKIQNGAQGIRFIYTREGRPSGEAFVELESEDEVKLALKKDRETMGHRYVEVFKSNNVEMDWVLKHTGPNSPDTANDGFVRLRGLPFGCSKEEIVQFFSGMSDHRYGDGGSTFQSTTGHCVHMRGLPYRAT

SEQ ID NO: 38074 - protein, 131 aa, Homo sapiens
  Payload ID: 7565
  Gene Symbol: HNRNPH1
  Gene Name: heterogeneous nuclear ribonucleoprotein H1 (H)
  ENSP ID: ENSP00000427845
SGEAFVELESEDEVKLALKKDRETMGHRYVEVFKSNNVEMDWVLKHTGPNSPDTANDGFVRLRGLPFGCSKEEIVQFFSGILKSLRAVELKLELIMIHHESLWPCSGQVLMTDLGLVEGITALAEELALRG

SEQ ID NO: 38075 - protein, 166 aa, Homo sapiens
  Payload ID: 7565
  Gene Symbol: HNRNPH1
  Gene Name: heterogeneous nuclear ribonucleoprotein H1 (H)
  ENSP ID: ENSP00000427986
MMLGTEGGEGFVVKVRGLPWSCSADEVQRFFSDCKIQNGAQGIRFIYTREGRPSGEAFVELESEDEVKLALKKDRETMGHRYVEGLEIVPNGITLPVDFQGRSTGEAFVQFASQEIAEKALKKHKERIGHRYIEIFKSSRAEVRTHYDPPRKLMAMQRPGPYDRPG

SEQ ID NO: 38076 - protein, 277 aa, Homo sapiens
  Payload ID: 7565
  Gene Symbol: HNRNPH1
  Gene Name: heterogeneous nuclear ribonucleoprotein H1 (H)
  ENSP ID: ENSP00000428620
  MOD_RES (1)..(1): Any amino acid
XALYGLEDFPLDVARKKLFSSSQGRSTGEAFVQFASQEIAEKALKKHKERIGHRYIEIFKSSRAEVRTHYDPPRKLMAMQRPGPYDRPGAGRGYNSIGRGAGFERMRRGAYGGGYGGYDDYNGYNDGYGFGSDRFGRDLNYCFSGMSDHRYGDGGSTFQSTTGHCVHMRGLPYRATENDIYNFFSPLNPVRVHIEIGPDGRVTGEADVEFATHEDAVAAMSKDKANMQHRYVELFLNSTAGASGGAYEHRYVELFLNSTAGASGGAYGSQMMGGMGL

SEQ ID NO: 38077 - protein, 28 aa, Homo sapiens
  Payload ID: 7565
  Gene Symbol: HNRNPH1
  Gene Name: heterogeneous nuclear ribonucleoprotein H1 (H)
  ENSP ID: ENSP00000429179
MMLGTEGGEGFVVKVRGLPWSCSADEVQ

SEQ ID NO: 38078 - protein, 194 aa, Homo sapiens
  Payload ID: 7565
  Gene Symbol: HNRNPH1
  Gene Name: heterogeneous nuclear ribonucleoprotein H1 (H)
  ENSP ID: ENSP00000429270
SRAEVRTHYDPPRKLMAMQRPGPYDRPGAGRGYNSIGRGAGFERMRRGAYGGGYGGYDDYNGYNDGYGFGSDRFGRDLNYCFSGMSDHRYGDGGSTFQSTTGHCVHMRGLPYRATENDIYNFFSPLNPVRVHIEIGPDGRVTGEADVEFATHEDAVAAMSKDKANMQHRYVELFLNSTAGASGGAYGSQMMGGM

SEQ ID NO: 38079 - protein, 185 aa, Homo sapiens
  Payload ID: 7565
  Gene Symbol: HNRNPH1
  Gene Name: heterogeneous nuclear ribonucleoprotein H1 (H)
  ENSP ID: ENSP00000429481
DYNGYNDGYGFGSDRFGRDLNYCFSGMSDHRYGDGGSTFQSTTGHCVHMRGLPYRATENDIYNFFSPLNPVRVHIEIGPDGRVTGEADVEFATHEDAVAAMSKDKANMQHRYVELFLNSTAGASGGAYGSQMLGGMGLSNQSSYGGPASQQLSGGYGGGYGGQSSMSGYDQVLQENSSDFQSNIA

SEQ ID NO: 38080 - protein, 115 aa, Homo sapiens
  Payload ID: 7565
  Gene Symbol: HNRNPH1
  Gene Name: heterogeneous nuclear ribonucleoprotein H1 (H)
  ENSP ID: ENSP00000429661
MMLGTEGGEGFVVKVRGLPWSCSADEVQRFFSDCKIQNGAQGIRFIYTREGRPSGEAFVELESEDEVKLALKKDRETMGHRYVEVFKSNNVEMDWVLKHTGPNSPDTANDGFVRL

SEQ ID NO: 38081 - protein, 117 aa, Homo sapiens
  Payload ID: 7565
  Gene Symbol: HNRNPH1
  Gene Name: heterogeneous nuclear ribonucleoprotein H1 (H)
  ENSP ID: ENSP00000429673
  MOD_RES (1)..(1): Any amino acid
XADVEFATHEDAVAAMSKDKANMQHRYVELFLNSTAGASGEHRYVELFLNSTAGASGGAYGSQMMGGMGLSNQSSYGGPASQQLSGGYGGGYGGQSSMSGYDQVLQENSSDFQSNIA

SEQ ID NO: 38082 - protein, 100 aa, Homo sapiens
  Payload ID: 7565
  Gene Symbol: HNRNPH1
  Gene Name: heterogeneous nuclear ribonucleoprotein H1 (H)
  ENSP ID: ENSP00000430156
MGHRYVEVFKSNNVEMDWVLKHTGPNSPDTANDGFVRLRGLPFGCSKEEIVQFFSGLEIVPNGITLPVDFQGRSTGEAFVQFASQEIAEKALKKHKERIG

SEQ ID NO: 38083 - protein, 48 aa, Homo sapiens
  Payload ID: 7565
  Gene Symbol: HNRNPH1
  Gene Name: heterogeneous nuclear ribonucleoprotein H1 (H)
  ENSP ID: ENSP00000430445
  MOD_RES (1)..(1): Any amino acid
XAGASGGAYGSQMMGGMGLCKYPNQSSYGGPASQQLSGGYGGGYGGQS

SEQ ID NO: 38084 - protein, 155 aa, Homo sapiens
  Payload ID: 7565
  Gene Symbol: HNRNPH1
  Gene Name: heterogeneous nuclear ribonucleoprotein H1 (H)
  ENSP ID: ENSP00000430970
MMLGTEGGEGFVVKVRGLPWSCSADEVQRFFSVFKSNNVEMDWVLKHTGPNSPDTANDGFVRLRGLPFGCSKEEIVQFFSGLEIVPNGITLPVDFQGRSTGEAFVQFASQEIAEKALKKHKERIGHRYIEIFKSSRAEVRTHYDPPRKLMAMQRP

SEQ ID NO: 38085 - protein, 40 aa, Homo sapiens; identical to SEQ ID NO: 38062
  Payload ID: 7565
  Gene Symbol: HNRNPH1
  Gene Name: heterogeneous nuclear ribonucleoprotein H1 (H)
  ENSP ID: ENSP00000486889

SEQ ID NO: 38086 - protein, 449 aa, Homo sapiens
  Payload ID: 7566
  Gene Symbol: HNRNPH2
  Gene Name: heterogeneous nuclear ribonucleoprotein H2 (H')
  Uniprot ID: P55795
  ENSP ID: ENSP00000361927
MMLSTEGREGFVVKVRGLPWSCSADEVMRFFSDCKIQNGTSGIRFIYTREGRPSGEAFVELESEEEVKLALKKDRETMGHRYVEVFKSNSVEMDWVLKHTGPNSPDTANDGFVRLRGLPFGCSKEEIVQFFSGLEIVPNGMTLPVDFQGRSTGEAFVQFASQEIAEKALKKHKERIGHRYIEIFKSSRAEVRTHYDPPRKLMAMQRPGPYDRPGAGRGYNSIGRGAGFERMRRGAYGGGYGGYDDYGGYNDGYGFGSDRFGRDLNYCFSGMSDHRYGDGGSSFQSTTGHCVHMRGLPYRATENDIYNFFSPLNPMRVHIEIGPDGRVTGEADVEFATHEDAVAAMAKDKANMQHRYVELFLNSTAGTSGGAYDHSYVELFLNSTAGASGGAYGSQMMGGMGLSNQSSYGGPASQQLSGGYGGGYGGQSSMSGYDQVLQENSSDYQSNLA

SEQ ID NO: 38087 - protein, 346 aa, Homo sapiens
  Payload ID: 7567
  Gene Symbol: HNRNPH3
  Gene Name: heterogeneous nuclear ribonucleoprotein H3 (2H9)
  Uniprot ID: P31942
  ENSP ID: ENSP00000265866
MDWVMKHNGPNDASDGTVRLRGLPFGCSKEEIVQFFQGLEIVPNGITLTMDYQGRSTGEAFVQFASKEIAENALGKHKERIGHRYIEIFRSSRSEIKGFYDPPRRLLGQRPGPYDRPIGGRGGYYGAGRGSMYDRMRRGGDGYDGGYGGFDDYGGYNNYGYGNDGFDDRMRDGRGMGGHGYGGAGDASSGFHGGHFVHMRGLPFRATENDIANFFSPLNPIRVHIDIGADGRATGEADVEFVTHEDAVAAMSKDKNNMQHRYIELFLNSTPGGGSGMGGSGMGGYGRDGMDNQGGYGSVGRMGMGNNYSGGYGTPDGLGGYGRGGGGSGGYYGQGGMSGGGWRGMY

SEQ ID NO: 38088 - protein, 331 aa, Homo sapiens
  Payload ID: 7567
  Gene Symbol: HNRNPH3
  Gene Name: heterogeneous nuclear ribonucleoprotein H3 (2H9)
  Uniprot ID: P31942
  ENSP ID: ENSP00000346726
MDWVMKHNGPNDASDGTVRLRGLPFGCSKEEIVQFFQGLEIVPNGITLTMDYQGRSTGEAFVQFASKEIAENALGKHKERIGHRYIEIFRSSRSEIKGFYDPPRRLLGQRPGPYDRPIGGRGGYYGAGRGSYGGFDDYGGYNNYGYGNDGFDDRMRDGRGMGGHGYGGAGDASSGFHGGHFVHMRGLPFRATENDIANFFSPLNPIRVHIDIGADGRATGEADVEFVTHEDAVAAMSKDKNNMQHRYIELFLNSTPGGGSGMGGSGMGGYGRDGMDNQGGYGSVGRMGMGNNYSGGYGTPDGLGGYGRGGGGSGGYYGQGGMSGGGWRGMY

SEQ ID NO: 38089 - protein, 463 aa, Homo sapiens
  Payload ID: 7568
  Gene Symbol: HNRNPK
  Gene Name: heterogeneous nuclear ribonucleoprotein K
  Uniprot ID: P61978
  ENSP ID: ENSP00000317788
METEQPEETFPNTETNGEFGKRPAEDMEEEQAFKRSRNTDEMVELRILLQSKNAGAVIGKGGKNIKALRTDYNASVSVPDSSGPERILSISADIETIGEILKKIIPTLEEGLQLPSPTATSQLPLESDAVECLNYQHYKGSDFDCELRLLIHQSLAGGIIGVKGAKIKELRENTQTTIKLFQECCPHSTDRVVLIGGKPDRVVECIKIILDLISESPIKGRAQPYDPNFYDETYDYGGFTMMFDDRRGRPVGFPMRGRGGFDRMPPGRGGRPMPPSRRDYDDMSPRRGPPPPPPGRGGRGGSRARNLPLPPPPPPRGGDLMAYDRRGRPGDRYDGMVGFSADETWDSAIDTWSPSEWQMAYEPQGGSGYDYSYAGGRGSYGDLGGPIITTQVTIPKDLAGSIIGKGGQRIKQIRHESGASIKIDEPLEGSEDRIITITGTQDQIQNAQYLLQNSVKQYSGKFF

SEQ ID NO: 38090 - protein, 463 aa, Homo sapiens; identical to SEQ ID NO: 38089
  Payload ID: 7568
  Gene Symbol: HNRNPK
  Gene Name: heterogeneous nuclear ribonucleoprotein K
  Uniprot ID: P61978
  ENSP ID: ENSP00000353552

SEQ ID NO: 38091 - protein, 464 aa, Homo sapiens
  Payload ID: 7568
  Gene Symbol: HNRNPK
  Gene Name: heterogeneous nuclear ribonucleoprotein K
  Uniprot ID: P61978
  ENSP ID: ENSP00000365439
METEQPEETFPNTETNGEFGKRPAEDMEEEQAFKRSRNTDEMVELRILLQSKNAGAVIGKGGKNIKALRTDYNASVSVPDSSGPERILSISADIETIGEILKKIIPTLEEGLQLPSPTATSQLPLESDAVECLNYQHYKGSDFDCELRLLIHQSLAGGIIGVKGAKIKELRENTQTTIKLFQECCPHSTDRVVLIGGKPDRVVECIKIILDLISESPIKGRAQPYDPNFYDETYDYGGFTMMFDDRRGRPVGFPMRGRGGFDRMPPGRGGRPMPPSRRDYDDMSPRRGPPPPPPGRGGRGGSRARNLPLPPPPPPRGGDLMAYDRRGRPGDRYDGMVGFSADETWDSAIDTWSPSEWQMAYEPQGGSGYDYSYAGGRGSYGDLGGPIITTQVTIPKDLAGSIIGKGGQRIKQIRHESGASIKIDEPLEGSEDRIITITGTQDQIQNAQYLLQNSVKQYADVEGF

SEQ ID NO: 38092 - protein, 464 aa, Homo sapiens; identical to SEQ ID NO: 38091
  Payload ID: 7568
  Gene Symbol: HNRNPK
  Gene Name: heterogeneous nuclear ribonucleoprotein K
  Uniprot ID: P61978
  ENSP ID: ENSP00000365458

SEQ ID NO: 38093 - protein, 379 aa, Homo sapiens
  Payload ID: 7568
  Gene Symbol: HNRNPK
  Gene Name: heterogeneous nuclear ribonucleoprotein K
  ENSP ID: ENSP00000409456
METEQPEETFPNTETNGEFGKRPAEDMEEEQAFKRSRNTDEMVELRILLQSKNAGAVIGKGGKNIKALRTDYNASVSVPDSSGPERILSISADIETIGEILKKIIPTLEEYQHYKGSDFDCELRLLIHQSLAGGIIGVKGAKIKELRENTQTTIKLFQECCPHSTDRVVLIGGKPDRVVECIKIILDLISESPIKGRAQPYDPNFYDETYDYGGFTMMFDDRRGRPVGFPMRGRGGFDRMPPGRGGRPMPPSRRDYDDMSPRRGPPPPPPGRGGRGGSRARNLPLPPPPPPRGGDLMAYDRRGRPGDRYDGMVGFSADETWDSAIDTWSPSEWQMAYEPQGGSGYDYSYAGGRGSYGDLGGPIITTQVTIPKDLAGSII

SEQ ID NO: 38094 - protein, 100 aa, Homo sapiens
  Payload ID: 7568
  Gene Symbol: HNRNPK
  Gene Name: heterogeneous nuclear ribonucleoprotein K
  ENSP ID: ENSP00000473957
  MOD_RES (1)..(1): Any amino acid
XQMAYEPQGGSGYDYSYAGGRGSYGDLGGPIITTQVTIPKDLAGSIIGKGGQRIKQIRHESGASIKIDEPLEGSEDRIITITGTQDQIQNAQYLLQNRSV

SEQ ID NO: 38095 - protein, 77 aa, Homo sapiens
  Payload ID: 7568
  Gene Symbol: HNRNPK
  Gene Name: heterogeneous nuclear ribonucleoprotein K
  ENSP ID: ENSP00000475098
METEQPEETFPNTETNGEFGKRPAEDMEEEQAFKRSRNTDEMVELRILLQSKNAGAVIGKGGKNIKALRTDHIEYQC

SEQ ID NO: 38096 - protein, 589 aa, Homo sapiens
  Payload ID: 7569
  Gene Symbol: HNRNPL
  Gene Name: heterogeneous nuclear ribonucleoprotein L
  Uniprot ID: P14866
  ENSP ID: ENSP00000221419
MSRRLLPRAEKRRRRLEQRQQPDEQRRRSGAMVKMAAAGGGGGGGRYYGGGSEGGRAPKRLKTDNAGDQHGGGGGGGGGAGAAGGGGGGENYDDPHKTPASPVVHIRGLIDGVVEADLVEALQEFGPISYVVVMPKKRQALVEFEDVLGACNAVNYAADNQIYIAGHPAFVNYSTSQKISRPGDSDDSRSVNSVLLFTILNPIYSITTDVLYTICNPCGPVQRIVIFRKNGVQAMVEFDSVQSAQRAKASLNGADIYSGCCTLKIEYAKPTRLNVFKNDQDTWDYTNPNLSGQGDPGSNPNKRQRQPPLLGDHPAEYGGPHGGYHSHYHDEGYGPPPPHYEGRRMGPPVGGHRRGPSRYGPQYGHPPPPPPPPEYGPHADSPVLMVYGLDQSKMNCDRVFNVFCLYGNVEKVKFMKSKPGAAMVEMADGYAVDRAITHLNNNFMFGQKLNVCVSKQPAIMPGQSYGLEDGSCSYKDFSESRNNRFSTPEQAAKNRIQHPSNVLHFFNAPLEVTEENFFEICDELGVKRPSSVKVFSGKSERSSSGLLEWESKSDALETLGFLNHYQMKNPNGPYPYTLKLCFSTAQHAS

SEQ ID NO: 38097 - protein, 179 aa, Homo sapiens
  Payload ID: 7569
  Gene Symbol: HNRNPL
  Gene Name: heterogeneous nuclear ribonucleoprotein L
  ENSP ID: ENSP00000373401
MPKKRQALVEFEDVLGACNAVNYAADNQIYIAGHPAFVNYSTSQKISRPGDSDDSRSVNSVLLFTILNPIYSITTDVLYTICNPCGPVQRIVIFRKNGVQAMVEFDSVQSAQRAKASLNGADIYSGCCTLKIEYAKPTRLNVFKNDQDTWDYTNPNLSGQGSQCMFDGTPSFRTVLTHC

SEQ ID NO: 38098 - protein, 530 aa, Homo sapiens
  Payload ID: 7569
  Gene Symbol: HNRNPL
  Gene Name: heterogeneous nuclear ribonucleoprotein L
  ENSP ID: ENSP00000469349
  MOD_RES (1)..(1): Any amino acid
XCCTGRLVGGHPLQGRGQDLLWCSEGSSCQENYDDPHKTPASPVVHIRGLIDGVVEADLVEALQEFGPISYVVVMPKKRQALVEFEDVLGACNAVNYAADNQIYIAGHPAFVNYSTSQKISRPGDSDDSRSVNSVLLFTILNPIYSITTDVLYTICNPCGPVQRIVIFRKNGVQAMVEFDSVQSAQRAKASLNGADIYSGCCTLKIEYAKPTRLNVFKNDQDTWDYTNPNLSGQGDPGSNPNKRQRQPPLLGDHPAEYGGPHGGYHSHYHDEGYGPPPPHYEGRRMGPPVGGHRRGPSRYGPQYGHPPPPPPPPEYGPHADSPVLMVYGLDQSKMNCDRVFNVFCLYGNVEKVKFMKSKPGAAMVEMADGYAVDRAITHLNNNFMFGQKLNVCVSKQPAIMPGQSYGLEDGSCSYKDFSESRNNRFSTPEQAAKNRIQHPSNVLHFFNAPLEVTEENFFEICDELGVKRPSSVKVFSGKSERSSSGLLEWESKSDALETLGFLNHYQMKNPNGPYPYTLKLCFSTAQHAS

SEQ ID NO: 38099 - protein, 198 aa, Homo sapiens
  Payload ID: 7569
  Gene Symbol: HNRNPL
  Gene Name: heterogeneous nuclear ribonucleoprotein L
  ENSP ID: ENSP00000469913
  MOD_RES (1)..(1): Any amino acid
XEKRRRRLEQRQQPDEQRRRSGAMENYDDPHKTPASPVVHIRGLIDGVVEADLVEALQEFGPISYVVVMPKKRQALVEFEDVLGACNAVNYAADNQIYIAGHPAFVNYSTSQKISRPGDSDDSRSVNSVLLFTILNPIYSITTDVLYTICNPCGPVQRIVIFRKNGVQAMVEFDSVQSAQRAKASLNGADIYSGCCTL

SEQ ID NO: 38100 - protein, 456 aa, Homo sapiens
  Payload ID: 7569
  Gene Symbol: HNRNPL
  Gene Name: heterogeneous nuclear ribonucleoprotein L
  Uniprot ID: P14866
  ENSP ID: ENSP00000470231
MPKKRQALVEFEDVLGACNAVNYAADNQIYIAGHPAFVNYSTSQKISRPGDSDDSRSVNSVLLFTILNPIYSITTDVLYTICNPCGPVQRIVIFRKNGVQAMVEFDSVQSAQRAKASLNGADIYSGCCTLKIEYAKPTRLNVFKNDQDTWDYTNPNLSGQGDPGSNPNKRQRQPPLLGDHPAEYGGPHGGYHSHYHDEGYGPPPPHYEGRRMGPPVGGHRRGPSRYGPQYGHPPPPPPPPEYGPHADSPVLMVYGLDQSKMNCDRVFNVFCLYGNVEKVKFMKSKPGAAMVEMADGYAVDRAITHLNNNFMFGQKLNVCVSKQPAIMPGQSYGLEDGSCSYKDFSESRNNRFSTPEQAAKNRIQHPSNVLHFFNAPLEVTEENFFEICDELGVKRPSSVKVFSGKSERSSSGLLEWESKSDALETLGFLNHYQMKNPNGPYPYTLKLCFSTAQHAS

SEQ ID NO: 38101 - protein, 220 aa, Homo sapiens
  Payload ID: 7569
  Gene Symbol: HNRNPL
  Gene Name: heterogeneous nuclear ribonucleoprotein L
  ENSP ID: ENSP00000472150
  MOD_RES (1)..(1): Any amino acid
XGSMRRRSVPARPRGRLGERLENYDDPHKTPASPVVHIRGLIDGVVEADLVEALQEFGPISYVVVMPKKRQALVEFEDVLGACNAVNYAADNQIYIAGHPAFVNYSTSQKISRPGDSDDSRSVNSVLLFTILNPIYSITTDVLYTICNPCGPVQRIVIFRKNGVQAMVEFDSVQSAQRAKASLNGADIYSGCCTLKIEYAKPTRLNVFKNDQDTWDYTNP

SEQ ID NO: 38102 - protein, 220 aa, Homo sapiens; identical to SEQ ID NO: 38101
  Payload ID: 7569
  Gene Symbol: HNRNPL
  Gene Name: Heterogeneous nuclear ribonucleoprotein L
  ENSP ID: ENSP00000488987
  MOD_RES (1)..(1): Any amino acid

SEQ ID NO: 38103 - protein, 589 aa, Homo sapiens; identical to SEQ ID NO: 38096
  Payload ID: 7569
  Gene Symbol: HNRNPL
  Gene Name: Heterogeneous nuclear ribonucleoprotein L
  ENSP ID: ENSP00000489021

SEQ ID NO: 38104 - protein, 456 aa, Homo sapiens; identical to SEQ ID NO: 38100
  Payload ID: 7569
  Gene Symbol: HNRNPL
  Gene Name: Heterogeneous nuclear ribonucleoprotein L
  ENSP ID: ENSP00000489244

SEQ ID NO: 38105 - protein, 198 aa, Homo sapiens; identical to SEQ ID NO: 38099
  Payload ID: 7569
  Gene Symbol: HNRNPL
  Gene Name: Heterogeneous nuclear ribonucleoprotein L
  ENSP ID: ENSP00000489437
  MOD_RES (1)..(1): Any amino acid

SEQ ID NO: 38106 - protein, 530 aa, Homo sapiens; identical to SEQ ID NO: 38098
  Payload ID: 7569
  Gene Symbol: HNRNPL
  Gene Name: Heterogeneous nuclear ribonucleoprotein L
  ENSP ID: ENSP00000489507
  MOD_RES (1)..(1): Any amino acid

SEQ ID NO: 38107 - protein, 179 aa, Homo sapiens; identical to SEQ ID NO: 38097
  Payload ID: 7569
  Gene Symbol: HNRNPL
  Gene Name: Heterogeneous nuclear ribonucleoprotein L
  ENSP ID: ENSP00000489603

SEQ ID NO: 38108 - protein, 217 aa, Homo sapiens
  Payload ID: 7570
  Gene Symbol: HNRNPLL
  Gene Name: heterogeneous nuclear ribonucleoprotein L-like
  ENSP ID: ENSP00000272249
  MOD_RES (1)..(1): Any amino acid
XGSHHKVSVSPVVHVRGLCESVVEADLVEALEKFGTICYVMMMPFKRQALVEFENIDSAKECVTFAADEPVYIAGQQAFFNYSTSKRITRPGNTDDPSGGNKVLLLSIQNPLYPITVDVLYTVCNPVGKVQRIVIFKRNGIQAMVEFESVLCAQKAKAALNGADIYAGCCTLKIEYARPTRLNVIRNDNDSWDYTKPYLGRRGCCWLMLKLLERSPL

SEQ ID NO: 38109 - protein, 537 aa, Homo sapiens
  Payload ID: 7570
  Gene Symbol: HNRNPLL
  Gene Name: heterogeneous nuclear ribonucleoprotein L-like
  ENSP ID: ENSP00000351136
MLARETYEEDREYESQAKRLKTEEGEIDYSAEEGENRREATPRGGGDGGGGGRSFSQPEAGGSHHKVSVSPVVHVRGLCESVVEADLVEALEKFGTICYVMMMPFKRQALVEFENIDSAKECVTFAADEPVYIAGQQAFFNYSTSKRITRPGNTDDPSGGNKVLLLSIQNPLYPITVDVLYTVCNPVGKVQRIVIFKRNGIQAMLMFESVLCAQKAKAALNGADIYAGCCTLKIEYARPTRLNVIRNDNDSWDYTKPYLGRRDRGKGRQRQAILGEHPSSFRHDGYGSHGPLLPLPSRYRMGSRDTPELVAYPLPQASSSYMHGGNPSGSVVMVSGLHQLKMNCSRVFNLFCLYGNIEKVKFMKTIPGTALVEMGDEYAVERAVTHLNNVKLFGKRLNVCVSKQHSVVPSQIFELEDGTSSYKDFAMSKNNRFTSAGQASKNIIQPPSCVLHYYNVPLCVTEETFTKLCNDHEVLTFIKYKVFDAKPSAKTLSGLLEWECKTDAVEALTALNHYQIRVPNGSNPYTLKLCFSTSSHL

SEQ ID NO: 38110 - protein, 508 aa, Homo sapiens
  Payload ID: 7570
  Gene Symbol: HNRNPLL
  Gene Name: heterogeneous nuclear ribonucleoprotein L-like
  ENSP ID: ENSP00000368195
MSSSSSSPRETYEEDREYESQAKRLKTEEGEIDYSAEEGENRREATPRGGGDGGGGGRSFSQPEAGGSHHKVSVSPVVHVRGLCESVVEADLVEALEKFGTICYVMMMPFKRQALVEFENIDSAKECVTFAADEPVYIAGQQAFFNYSTSKRITRPGNTDDPSGGNKVLLLSIQNPLYPITVDVLYTVCNPVGKVQRIVIFKRNGIQAMPTRLNVIRNDNDSWDYTKPYLGRRDRGKGRQRQAILGEHPSSFRHDGYGSHGPLLPLPSRYRMGSRDTPELVAYPLPQASSSYMHGGNPSGSVVMVSGLHQLKMNCSRVFNLFCLYGNIEKVKFMKTIPGTALVEMGDEYAVERAVTHLNNVKLFGKRLNVCVSKQHSVVPSQIFELEDGTSSYKDFAMSKNNRFTSAGQASKNIIQPPSCVLHYYNVPLCVTEETFTKLCNDHEVLTFIKYKVFDAKPSAKTLSGLLEWECKTDAVEALTALNHYQIRVPNGSNPYTLKLCFSTSSHL

SEQ ID NO: 38111 - protein, 508 aa, Homo sapiens
  Payload ID: 7570
  Gene Symbol: HNRNPLL
  Gene Name: heterogeneous nuclear ribonucleoprotein L-like
  Uniprot ID: Q8WVV9
  ENSP ID: ENSP00000386575
MSSSSSSPRETYEEDREYESQAKRLKTEEGEIDYSAEEGENRREATPRGGGDGGGGGRSFSQPEAGGSHHKVSVSPVVHVRGLCESVVEADLVEALEKFGTICYVMMMPFKRQALVEFENIDSAKECVTFAADEPVYIAGQQAFFNYSTSKRITRPGNTDDPSGGNKVLLLSIQNPLYPITVDVLYTVCNPVGKVQRIVIFKRNGIQAMVDRLNVIRNDNDSWDYTKPYLGRRDRGKGRQRQAILGEHPSSFRHDGYGSHGPLLPLPSRYRMGSRDTPELVAYPLPQASSSYMHGGNPSGSVVMVSGLHQLKMNCSRVFNLFCLYGNIEKVKFMKTIPGTALVEMGDEYAVERAVTHLNNVKLFGKRLNVCVSKQHSVVPSQIFELEDGTSSYKDFAMSKNNRFTSAGQASKNIIQPPSCVLHYYNVPLCVTEETFTKLCNDHEVLTFIKYKVFDAKPSAKTLSGLLEWECKTDAVEALTALNHYQIRVPNGSNPYTLKLCFSTSSHL

SEQ ID NO: 38112 - protein, 275 aa, Homo sapiens
  Payload ID: 7570
  Gene Symbol: HNRNPLL
  Gene Name: heterogeneous nuclear ribonucleoprotein L-like
  Uniprot ID: Q8WVV9
  ENSP ID: ENSP00000386695
MLARETYEEDREYESQAKRLKTEEGEIDYSAEEGENRREATPRGGGDGGGGGRSFSQPEAGGSHHKVSVSPVVHVRGLCESVVEADLVEALEKFGTICYVMMMPFKRQALVEFENIDSAKECVTFAADEPVYIAGQQAFFNYSTSKRITRPGNTDDPSGGNKVLLLSIQNPLYPITVDVLYTVCNPVGKVQRIVIFKRNGIQAMVEFESVLCAQKAKAALNGADIYAGCCTLKIEYARPTRLNVIRNDNDSWDYTKPYLGRRGRYFIHFRMYLIC

SEQ ID NO: 38113 - protein, 537 aa, Homo sapiens
  Payload ID: 7570
  Gene Symbol: HNRNPLL
  Gene Name: heterogeneous nuclear ribonucleoprotein L-like
  Uniprot ID: Q8WVV9
  ENSP ID: ENSP00000387088
MLARETYEEDREYESQAKRLKTEEGEIDYSAEEGENRREATPRGGGDGGGGGRSFSQPEAGGSHHKVSVSPVVHVRGLCESVVEADLVEALEKFGTICYVMMMPFKRQALVEFENIDSAKECVTFAADEPVYIAGQQAFFNYSTSKRITRPGNTDDPSGGNKVLLLSIQNPLYPITVDVLYTVCNPVGKVQRIVIFKRNGIQAMVEFESVLCAQKAKAALNGADIYAGCCTLKIEYARPTRLNVIRNDNDSWDYTKPYLGRRDRGKGRQRQAILGEHPSSFRHDGYGSHGPLLPLPSRYRMGSRDTPELVAYPLPQASSSYMHGGNPSGSVVMVSGLHQLKMNCSRVFNLFCLYGNIEKVKFMKTIPGTALVEMGDEYAVERAVTHLNNVKLFGKRLNVCVSKQHSVVPSQIFELEDGTSSYKDFAMSKNNRFTSAGQASKNIIQPPSCVLHYYNVPLCVTEETFTKLCNDHEVLTFIKYKVFDAKPSAKTLSGLLEWECKTDAVEALTALNHYQIRVPNGSNPYTLKLCFSTSSHL

SEQ ID NO: 38114 - protein, 542 aa, Homo sapiens
  Payload ID: 7570
  Gene Symbol: HNRNPLL
  Gene Name: heterogeneous nuclear ribonucleoprotein L-like
  Uniprot ID: Q8WVV9
  ENSP ID: ENSP00000390625
MSSSSSSPRETYEEDREYESQAKRLKTEEGEIDYSAEEGENRREATPRGGGDGGGGGRSFSQPEAGGSHHKVSVSPVVHVRGLCESVVEADLVEALEKFGTICYVMMMPFKRQALVEFENIDSAKECVTFAADEPVYIAGQQAFFNYSTSKRITRPGNTDDPSGGNKVLLLSIQNPLYPITVDVLYTVCNPVGKVQRIVIFKRNGIQAMVEFESVLCAQKAKAALNGADIYAGCCTLKIEYARPTRLNVIRNDNDSWDYTKPYLGRRDRGKGRQRQAILGEHPSSFRHDGYGSHGPLLPLPSRYRMGSRDTPELVAYPLPQASSSYMHGGNPSGSVVMVSGLHQLKMNCSRVFNLFCLYGNIEKVKFMKTIPGTALVEMGDEYAVERAVTHLNNVKLFGKRLNVCVSKQHSVVPSQIFELEDGTSSYKDFAMSKNNRFTSAGQASKNIIQPPSCVLHYYNVPLCVTEETFTKLCNDHEVLTFIKYKVFDAKPSAKTLSGLLEWECKTDAVEALTALNHYQIRVPNGSNPYTLKLCFSTSSHL

SEQ ID NO: 38115 - protein, 149 aa, Homo sapiens
  Payload ID: 7570
  Gene Symbol: HNRNPLL
  Gene Name: heterogeneous nuclear ribonucleoprotein L-like
  ENSP ID: ENSP00000396669
MQEAGGSHHKVSVSPVVHVRGLCESVVEADLVEALEKFGTICYVMMMPFKRQALVEFENIDSAKECVTFAADEPVYIAGQQAFFNYSTSKRITRPGNTDDPSGGNKVLLLSIQNPLYPITVDVLYTVCNPVGKVQRIVIFKRNGIQAMV

SEQ ID NO: 38116 - protein, 133 aa, Homo sapiens
  Payload ID: 7570
  Gene Symbol: HNRNPLL
  Gene Name: heterogeneous nuclear ribonucleoprotein L-like
  ENSP ID: ENSP00000415766
  MOD_RES (1)..(1): Any amino acid
XVKLFGKRLNVCVSKQHSVVPSQIFELEDGTSSYKDFAMSKNNRFTSAGQASKNIIQPPSCVLHYYNVPLCVTEETFTKLCNDHEVLTFIKYKVFDAKPSAKTLSGLLEWECKTDAVEALTALNHYQIRVPSK

SEQ ID NO: 38117 - protein, 542 aa, Homo sapiens
  Payload ID: 7570
  Gene Symbol: HNRNPLL
  Gene Name: heterogeneous nuclear ribonucleoprotein L-like
  ENSP ID: ENSP00000476852
MSSSSSSPRETYEEDREYESQAKRLKTEEGEIDYSAEEGENRREATPRGGGDGGGGGRSFSQPEAGGSHHKVSVSPVVHVRGLCESVVEADLVEALEKFGTICYVMMMPFKRQALVEFENIDSAKECVTFAADEPVYIAGQQAFFNYSTSKRITRPGNTDDPSGGNKVLLLSIQNPLYPITVDVLYTVCNPVGKVQRIVIFKRNGIQAMLMFESVLCAQKAKAALNGADIYAGCCTLKIEYARPTRLNVIRNDNDSWDYTKPYLGRRDRGKGRQRQAILGEHPSSFRHDGYGSHGPLLPLPSRYRMGSRDTPELVAYPLPQASSSYMHGGNPSGSVVMVSGLHQLKMNCSRVFNLFCLYGNIEKVKFMKTIPGTALVEMGDEYAVERAVTHLNNVKLFGKRLNVCVSKQHSVVPSQIFELEDGTSSYKDFAMSKNNRFTSAGQASKNIIQPPSCVLHYYNVPLCVTEETFTKLCNDHEVLTFIKYKVFDAKPSAKTLSGLLEWECKTDAVEALTALNHYQIRVPNGSNPYTLKLCFSTSSHL

SEQ ID NO: 38118 - protein, 730 aa, Homo sapiens
  Payload ID: 7571
  Gene Symbol: HNRNPM
  Gene Name: heterogeneous nuclear ribonucleoprotein M
  Uniprot ID: P52272
  ENSP ID: ENSP00000325376
MAAGVEAAAEVAATEIKMEEESGAPGVPSGNGAPGPKGEGERPAQNEKRKEKNIKRGGNRFEPYANPTKRYRAFITNIPFDVKWQSLKDLVKEKVGEVTYVELLMDAEGKSRGCAVVEFKMEESMKKAAEVLNKHSLSGRPLKVKEDPDGEHARRAMQKVMATTGGMGMGPGGPGMITIPPSILNNPNIPNEIIHALQAGRLGSTVFVANLDYKVGWKKLKEVFSMAGVVVRADILEDKDGKSRGIGTVTFEQSIEAVQAISMFNGQLLFDRPMHVKMDERALPKGDFFPPERPQQLPHGLGGIGMGLGPGGQPIDANHLNKGIGMGNIGPAGMGMEGIGFGINKMGGMEGPFGGGMENMGRFGSGMNMGRINEILSNALKRGEIIAKQGGGGGGGSVPGIERMGPGIDRLGGAGMERMGAGLGHGMDRVGSEIERMGLVMDRMGSVERMGSGIERMGPLGLDHMASSIERMGQTMERIGSGVERMGAGMGFGLERMAAPIDRVGQTIERMGSGVERMGPAIERMGLSMERMVPAGMGAGLERMGPVMDRMATGLERMGANNLERMGLERMGANSLERMGLERMGANSLERMGPAMGPALGAGIERMGLAMGGGGGASFDRAIEMERGNFGGSFAGSFGGAGGHAPGVARKACQIFVRNLPFDFTWKMLKDKFNECGHVLYADIKMENGKSKGCGVVKFESPEVAERACRMMNGMKLSGREIDVRIDRNA

SEQ ID NO: 38119 - protein, 691 aa, Homo sapiens
  Payload ID: 7571
  Gene Symbol: HNRNPM
  Gene Name: heterogeneous nuclear ribonucleoprotein M
  Uniprot ID: P52272
  ENSP ID: ENSP00000325732
MAAGVEAAAEVAATEIKMEEESGAPGVPSGNGAPGPKGEGERPAQNEKRKEKNIKRGGNRFEPYANPTKRYRAFITNIPFDVKWQSLKDLVKEKVGEVTYVELLMDAEGKSRGCAVVEFKMEESMKKAAEVLNKHSLSGRPLKVKEDPDGEHARRAMQKAGRLGSTVFVANLDYKVGWKKLKEVFSMAGVVVRADILEDKDGKSRGIGTVTFEQSIEAVQAISMFNGQLLFDRPMHVKMDERALPKGDFFPPERPQQLPHGLGGIGMGLGPGGQPIDANHLNKGIGMGNIGPAGMGMEGIGFGINKMGGMEGPFGGGMENMGRFGSGMNMGRINEILSNALKRGEIIAKQGGGGGGGSVPGIERMGPGIDRLGGAGMERMGAGLGHGMDRVGSEIERMGLVMDRMGSVERMGSGIERMGPLGLDHMASSIERMGQTMERIGSGVERMGAGMGFGLERMAAPIDRVGQTIERMGSGVERMGPAIERMGLSMERMVPAGMGAGLERMGPVMDRMATGLERMGANNLERMGLERMGANSLERMGLERMGANSLERMGPAMGPALGAGIERMGLAMGGGGGASFDRAIEMERGNFGGSFAGSFGGAGGHAPGVARKACQIFVRNLPFDFTWKMLKDKFNECGHVLYADIKMENGKSKGCGVVKFESPEVAERACRMMNGMKLSGREIDVRIDRNA

SEQ ID NO: 38120 - protein, 116 aa, Homo sapiens
  Payload ID: 7571
  Gene Symbol: HNRNPM
  Gene Name: heterogeneous nuclear ribonucleoprotein M
  ENSP ID: ENSP00000469681
  MOD_RES (1)..(1): Any amino acid
XRMGLERMGANSLERMGPAMGPALGAGIERMGLAMGGGGGASFDRAIEMERGNFGGSFAGSFGGAGGHAPGVARKACQIFVRNLPFDFTWKMLKDKFNECGKCWERLCRCFPRACW

SEQ ID NO: 38121 - protein, 99 aa, Homo sapiens
  Payload ID: 7571
  Gene Symbol: HNRNPM
  Gene Name: heterogeneous nuclear ribonucleoprotein M
  ENSP ID: ENSP00000469906
GCAVVEFKMEESMKKAAERPQQLPHGLGGIGMGLGPGGQPIDANHLNKGIGMGNIGPAGMGMEGIGFGINKMGGMEGPFGGGMENMGRFGSGMNMGRIN

SEQ ID NO: 38122 - protein, 219 aa, Homo sapiens
  Payload ID: 7571
  Gene Symbol: HNRNPM
  Gene Name: heterogeneous nuclear ribonucleoprotein M
  ENSP ID: ENSP00000470017
MAAGVEAAAEVAATEIKMEEESGAPGVPSGNGAPGPKGEGERPAQNEKRKEKNIKRGGNRFEPYANPTKRYRAFITNIPFDVKWQSLKDLVKEKGIVVEFKMEESMKKAAEVLNKHSLSGRPLKVKEDPDGEHARRAMQKAGRLGSTVFVANLDYKVGWKKLKEVFSMAGVVVRADILEDKDGKSRGIGTVTFEQSIEAVQAISMFNGQLLFDRPMHVK

SEQ ID NO: 38123 - protein, 383 aa, Homo sapiens
  Payload ID: 7571
  Gene Symbol: HNRNPM
  Gene Name: heterogeneous nuclear ribonucleoprotein M
  ENSP ID: ENSP00000470635
  MOD_RES (1)..(1): Any amino acid
XGWKKLKEVFSMAGVVVRADILEDKDGKSRGIGTVTFEQSIEAVQAISMFNGQLLFDRPMHVKMDERALPKGDFFPPERPQQLPHGLGGIGMGLGPGGQPIDANHLNKGIGMGNIGPAGMGMEGIGFGINKMGGMEGPFGGGMENMGRFGSGMNMGRINGGGGGSVPGIERMGPGIDRLGGAGMERMGAGLGHGMDRVGSEIERMGLVMDRMGSVERMGSGIERMGPLGLDHMASSIERMGQTMERIGSGVERMGAGMGFGLERMAAPIDRVGQTIERMGSGVERMGPAIERMGLSMERMVPAGMGAGLERMGPVMDRMATGLERMGANNLERMGLERMGANSLERMGLERMGANSLERMGPAMGPALGAGIERMGLAMGGGG

SEQ ID NO: 38124 - protein, 352 aa, Homo sapiens
  Payload ID: 7571
  Gene Symbol: HNRNPM
  Gene Name: heterogeneous nuclear ribonucleoprotein M
  ENSP ID: ENSP00000470932
MAAGVEAAAEVAATEIKMEEESGAPGVPSGNGAPGPKGEGERPAQNEKRKEKNIKRGGNRFEPYANPTKRYRAFITNIPFDVKWQSLKDLVKEKVGEVTYVELLMDAEGKSRGCAVVEFKMEESMKKAAEVLNKHSLSGRPLKVKEDPDGEHARRAMQKAGRLGSTVFVANLDYKVGWKKLKEVFSMAGVVVRADILEDKDGKSRGIGTVTFEQSIEAVQAISMFNGQLLFDRPMHVKMDERALPKGDFFPPERPQQLPHGLGGIGMGLGPGGQPIDANHLNKGIGMGNIGPAGMEGPFGGGMENMGRFGSGMNMGRINEILSNALKRGEIIAKQGGGGGGGSVPGIERMGP

SEQ ID NO: 38125 - protein, 275 aa, Homo sapiens
  Payload ID: 7571
  Gene Symbol: HNRNPM
  Gene Name: heterogeneous nuclear ribonucleoprotein M
  ENSP ID: ENSP00000471339
MAAGVEAAAEVAATEIKMEEESGAPGVPSGNGAPGPKGEGERPAQNEKRKEKNIKRGGNRFEPYANPTKRYRAFITNIPFDVKWQSLKDLVKEKVGEVTYVELLMDAEGKSRGCAVVEFKMEESMKKAAEVLNKHSLSGRPLKVKEDPDGEHARRAMQKLDYKVGWKKLKEVFSMAGVVVRADILEDKDGKSRGIGTVTFEQSIEAVQAISMFNGQLLFDRPMHVKMDERALPKGDFFPPERPQQLPHGLGGIGMGLGPGGQPIDANHLNKGIGM

SEQ ID NO: 38126 - protein, 99 aa, Homo sapiens
  Payload ID: 7571
  Gene Symbol: HNRNPM
  Gene Name: heterogeneous nuclear ribonucleoprotein M
  ENSP ID: ENSP00000471530
MAAGVEAAAEVAATEIKMEEESGAPGVPSGNGAPGPKGEGERPAQNEKRKEKNIKRGGNRFEPYANPTKRYRAFITNIPFDVKWQSLKDLVKEKGMCCC

SEQ ID NO: 38127 - protein, 214 aa, Homo sapiens
  Payload ID: 7571
  Gene Symbol: HNRNPM
  Gene Name: heterogeneous nuclear ribonucleoprotein M
  ENSP ID: ENSP00000472599
  MOD_RES (1)..(1): Any amino acid
XIGSGVERMGAGMGFGLERMAAPIDRVGQTIERMGSGVERMGPAIERMGLSMERMVPAGMGAGLERMGPVMDRMATGLERMGANNLERMGLERMGANSLERMGLERMGANSLERMGPAMGPALGAGIERMGLAMGGGGGASFDRAIEMERGNFGGSFAGSFGGAGGHAPGVARKACQIFVRNLPFDFTWKMLKDKFNECEPERQVLHVSRNALV

SEQ ID NO: 38128 - protein, 357 aa, Homo sapiens
  Payload ID: 7571
  Gene Symbol: HNRNPM
  Gene Name: heterogeneous nuclear ribonucleoprotein M
  ENSP ID: ENSP00000472789
MAAGVEAAAEVAATEIKMEEESGAPGVPSGNGAPGPKGEGERPAQNEKRKEKNIKRGGNRFEPYANPTKRYRAFITNIPFDVKWQSLKDLVKEKVGEVTYVELLMDAEGKSRGCAVVEFKMEESMKKAAEVLNKHSLSGRPLKVKEDPDGEHARRAMQKVMATTGGMGMGPGGPGMITIPPSILNNPNIPNEIIHALQAGRLGSTVFVANLDYKVGWKKLKEVFSMAGVVVRADILEDKDGKSRGIGTVTFEQSIEAVQAISMFNGQLLFDRPMHVKMDERALPKGDFFPPERPQQLPQILSNALKRGEIIAKQGGGGGGGSVPGIERMGPGIDRLGGAGMERMGAGLGHGMDRVGS

SEQ ID NO: 38129 - protein, 730 aa, Homo sapiens [sequence omitted]

SEQ ID NO: 38130 - protein, 633 aa, Homo sapiens
  Payload ID: 7572
  Gene Symbol: HNRNPR
  Gene Name: heterogeneous nuclear ribonucleoprotein R
  Uniprot ID: O43390
  ENSP ID: ENSP00000304405
MANQVNGNAVQLKEEEEPMDTSSVTHTEHYKTLIEAGLPQKVAERLDEIFQTGLVAYVDLDERAIDALREFNEEGALSVLQQFKESDLSHVQNKSAFLCGVMKTYRQREKQGSKVQESTKGPDEAKIKALLERTGYTLDVTTGQRKYGGPPPDSVYSGVQPGIGTEVFVGKIPRDLYEDELVPLFEKAGPIWDLRLMMDPLSGQNRGYAFITFCGKEAAQEAVKLCDSYEIRPGKHLGVCISVANNRLFVGSIPKNKTKENILEEFSKVTEGLVDVILYHQPDDKKKNRGFCFLEYEDHKSAAQARRRLMSGKVKVWGNVVTVEWADPVEEPDPEVMAKVKVLFVRNLATTVTEEILEKSFSEFGKLERVKKLKDYAFVHFEDRGAAVKAMDEMNGKEIEGEEIEIVLAKPPDKKRKERQAARQASRSTAYEDYYYHPPPRMPPPIRGRGRGGGRGGYGYPPDYYGYEDYYDDYYGYDYHDYRGGYEDPYYGYDDGYAVRGRGGGRGGRGAPPPPRGRGAPPPRGRAGYSQRGAPLGPPRGSRGGRGGPAQQQRGRGSRGSRGNRGGNVGGKRKADGYNQPDSKRRQTNNQQNWGSQPIAQQPLQQGGDYSGNYGYNNDNQEFYQDTYGQQWK

SEQ ID NO: 38131 - protein, 633 aa, Homo sapiens; identical to SEQ ID NO: 38130
  Payload ID: 7572
  Gene Symbol: HNRNPR
  Gene Name: heterogeneous nuclear ribonucleoprotein R
  Uniprot ID: O43390
  ENSP ID: ENSP00000363741

SEQ ID NO: 38132 - protein, 636 aa, Homo sapiens
  Payload ID: 7572
  Gene Symbol: HNRNPR
  Gene Name: heterogeneous nuclear ribonucleoprotein R
  Uniprot ID: O43390
  ENSP ID: ENSP00000363745
MANQVNGNAVQLKEEEEPMDTSSVTHTEHYKTLIEAGLPQKVAERLDEIFQTGLVAYVDLDERAIDALREFNEEGALSVLQQFKESDLSHVQNKSAFLCGVMKTYRQREKQGSKVQESTKGPDEAKIKALLERTGYTLDVTTGQRKYGGPPPDSVYSGVQPGIGTEVFVGKIPRDLYEDELVPLFEKAGPIWDLRLMMDPLSGQNRGYAFITFCGKEAAQEAVKLCDSYEIRPGKHLGVCISVANNRLFVGSIPKNKTKENILEEFSKVTGLTEGLVDVILYHQPDDKKKNRGFCFLEYEDHKSAAQARRRLMSGKVKVWGNVVTVEWADPVEEPDPEVMAKVKVLFVRNLATTVTEEILEKSFSEFGKLERVKKLKDYAFVHFEDRGAAVKAMDEMNGKEIEGEEIEIVLAKPPDKKRKERQAARQASRSTAYEDYYYHPPPRMPPPIRGRGRGGGRGGYGYPPDYYGYEDYYDDYYGYDYHDYRGGYEDPYYGYDDGYAVRGRGGGRGGRGAPPPPRGRGAPPPRGRAGYSQRGAPLGPPRGSRGGRGGPAQQQRGRGSRGSRGNRGGNVGGKRKADGYNQPDSKRRQTNNQQNWGSQPIAQQPLQQGGDYSGNYGYNNDNQEFYQDTYGQQWK

SEQ ID NO: 38133 - protein, 595 aa, Homo sapiens
  Payload ID: 7572
  Gene Symbol: HNRNPR
  Gene Name: heterogeneous nuclear ribonucleoprotein R
  Uniprot ID: O43390
  ENSP ID: ENSP00000392799
MANQVNGNAVQLKEEEEPMDTSSVTHTEHYKTLIEAGLPQKVAERLDEIFQTGLVAYVDLDERAIDALREFNEEGALSVLQQFKESDLSHVQNKSAFLCGVMKTYRQREKQGSKVQESTKGPDEAKIKVFVGKIPRDLYEDELVPLFEKAGPIWDLRLMMDPLSGQNRGYAFITFCGKEAAQEAVKLCDSYEIRPGKHLGVCISVANNRLFVGSIPKNKTKENILEEFSKVTEGLVDVILYHQPDDKKKNRGFCFLEYEDHKSAAQARRRLMSGKVKVWGNVVTVEWADPVEEPDPEVMAKVKVLFVRNLATTVTEEILEKSFSEFGKLERVKKLKDYAFVHFEDRGAAVKAMDEMNGKEIEGEEIEIVLAKPPDKKRKERQAARQASRSTAYEDYYYHPPPRMPPPIRGRGRGGGRGGYGYPPDYYGYEDYYDDYYGYDYHDYRGGYEDPYYGYDDGYAVRGRGGGRGGRGAPPPPRGRGAPPPRGRAGYSQRGAPLGPPRGSRGGRGGPAQQQRGRGSRGSRGNRGGNVGGKRKADGYNQPDSKRRQTNNQQNWGSQPIAQQPLQQGGDYSGNYGYNNDNQEFYQDTYGQQWK

SEQ ID NO: 38134 - protein, 535 aa, Homo sapiens
  Payload ID: 7572
  Gene Symbol: HNRNPR
  Gene Name: heterogeneous nuclear ribonucleoprotein R
  Uniprot ID: O43390
  ENSP ID: ENSP00000474437
MKTYRQREKQGSKVQESTKGPDEAKIKALLERTGYTLDVTTGQRKYGGPPPDSVYSGVQPGIGTEVFVGKIPRDLYEDELVPLFEKAGPIWDLRLMMDPLSGQNRGYAFITFCGKEAAQEAVKLCDSYEIRPGKHLGVCISVANNRLFVGSIPKNKTKENILEEFSKVTGLTEGLVDVILYHQPDDKKKNRGFCFLEYEDHKSAAQARRRLMSGKVKVWGNVVTVEWADPVEEPDPEVMAKVKVLFVRNLATTVTEEILEKSFSEFGKLERVKKLKDYAFVHFEDRGAAVKAMDEMNGKEIEGEEIEIVLAKPPDKKRKERQAARQASRSTAYEDYYYHPPPRMPPPIRGRGRGGGRGGYGYPPDYYGYEDYYDDYYGYDYHDYRGGYEDPYYGYDDGYAVRGRGGGRGGRGAPPPPRGRGAPPPRGRAGYSQRGAPLGPPRGSRGGRGGPAQQQRGRGSRGSRGNRGGNVGGKRKADGYNQPDSKRRQTNNQQNWGSQPIAQQPLQQGGDYSGNYGYNNDNQEFYQDTYGQQWK

SEQ ID NO: 38135 - protein, 494 aa, Homo sapiens
  Payload ID: 7572
  Gene Symbol: HNRNPR
  Gene Name: heterogeneous nuclear ribonucleoprotein R
  ENSP ID: ENSP00000475760
MKTYRQREKQGSKVQESTKGPDEAKIKVFVGKIPRDLYEDELVPLFEKAGPIWDLRLMMDPLSGQNRGYAFITFCGKEAAQEAVKLCDSYEIRPGKHLGVCISVANNRLFVGSIPKNKTKENILEEFSKVTEGLVDVILYHQPDDKKKNRGFCFLEYEDHKSAAQARRRLMSGKVKVWGNVVTVEWADPVEEPDPEVMAKVKVLFVRNLATTVTEEILEKSFSEFGKLERVKKLKDYAFVHFEDRGAAVKAMDEMNGKEIEGEEIEIVLAKPPDKKRKERQAARQASRSTAYEDYYYHPPPRMPPPIRGRGRGGGRGGYGYPPDYYGYEDYYDDYYGYDYHDYRGGYEDPYYGYDDGYAVRGRGGGRGGRGAPPPPRGRGAPPPRGRAGYSQRGAPLGPPRGSRGGRGGPAQQQRGRGSRGSRGNRGGNVGGKRKADGYNQPDSKRRQTNNQQNWGSQPIAQQPLQQGGDYSGNYGYNNDNQEFYQDTYGQQWK

SEQ ID NO: 38136 - protein, 595 aa, Homo sapiens; identical to SEQ ID NO: 38133
  Payload ID: 7572
  Gene Symbol: HNRNPR
  Gene Name: Heterogeneous nuclear ribonucleoprotein R
  ENSP ID: ENSP00000488941

SEQ ID NO: 38137 - protein, 636 aa, Homo sapiens; identical to SEQ ID NO: 38132
  Payload ID: 7572
  Gene Symbol: HNRNPR
  Gene Name: Heterogeneous nuclear ribonucleoprotein R
  ENSP ID: ENSP00000488945

SEQ ID NO: 38138 - protein, 633 aa, Homo sapiens; identical to SEQ ID NO: 38130
  Payload ID: 7572
  Gene Symbol: HNRNPR
  Gene Name: Heterogeneous nuclear ribonucleoprotein R
  ENSP ID: ENSP00000489252

SEQ ID NO: 38139 - protein, 535 aa, Homo sapiens; identical to SEQ ID NO: 38134
  Payload ID: 7572
  Gene Symbol: HNRNPR
  Gene Name: Heterogeneous nuclear ribonucleoprotein R
  ENSP ID: ENSP00000489275

SEQ ID NO: 38140 - protein, 633 aa, Homo sapiens; identical to SEQ ID NO: 38130
  Payload ID: 7572
  Gene Symbol: HNRNPR
  Gene Name: Heterogeneous nuclear ribonucleoprotein R
  ENSP ID: ENSP00000489371

SEQ ID NO: 38141 - protein, 494 aa, Homo sapiens; identical to SEQ ID NO: 38135
  Payload ID: 7572
  Gene Symbol: HNRNPR
  Gene Name: Heterogeneous nuclear ribonucleoprotein R
  ENSP ID: ENSP00000489386

SEQ ID NO: 38142 - protein, 825 aa, Homo sapiens
  Payload ID: 7573
  Gene Symbol: HNRNPU
  Gene Name: heterogeneous nuclear ribonucleoprotein U (scaffold attachment factor A)
  Uniprot ID: Q00839
  ENSP ID: ENSP00000283179
MSSSPVNVKKLKVSELKEELKKRRLSDKGLKAELMERLQAALDDEEAGGRPAMEPGNGSLDLGGDSAGRSGAGLEQEAAAGGDEEEEEEEEEEEGISALDGDQMELGEENGAAGAADSGPMEEEEAASEDENGDDQGFQEGEDELGDEEEGAGDENGHGEQQPQPPATQQQQPQQQRGAAKEAAGKSSGPTSLFAVTVAPPGARQGQQQAGGKKKAEGGGGGGRPGAPAAGDGKTEQKGGDKKRGVKRPREDHGRGYFEYIEENKYSRAKSPQPPVEEEDEHFDDTVVCLDTYNCDLHFKISRDRLSASSLTMESFAFLWAGGRASYGVSKGKVCFEMKVTEKIPVRHLYTKDIDIHEVRIGWSLTTSGMLLGEEEFSYGYSLKGIKTCNCETEDYGEKFDENDVITCFANFESDEVELSYAKNGQDLGVAFKISKEVLAGRPLFPHVLCHNCAVEFNFGQKEKPYFPIPEEYTFIQNVPLEDRVRGPKGPEEKKDCEVVMMIGLPGAGKTTWVTKHAAENPGKYNILGTNTIMDKMMVAGFKKQMADTGKLNTLLQRAPQCLGKFIEIAARKKRNFILDQTNVSAAAQRRKMCLFAGFQRKAVVVCPKDEDYKQRTQKKAEVEGKDLPEHAVLKMKGNFTLPEVAECFDEITYVELQKEEAQKLLEQYKEESKKALPPEKKQNTGSKKSNKNKSGKNQFNRGGGHRGRGGFNMRGGNFRGGAPGNRGGYNRRGNMPQRGGGGGGSGGIGYPYPRAPVFPGRGSYSNRGNYNRGGMPNRGNYNQNFRGRGNNRGYKNQSQGYNQWQQGQFWGQKPWSQHYHQGYY

SEQ ID NO: 38143 - protein, 806 aa, Homo sapiens
  Payload ID: 7573
  Gene Symbol: HNRNPU
  Gene Name: heterogeneous nuclear ribonucleoprotein U (scaffold attachment factor A)
  Uniprot ID: Q00839
  ENSP ID: ENSP00000393151
MSSSPVNVKKLKVSELKEELKKRRLSDKGLKAELMERLQAALDDEEAGGRPAMEPGNGSLDLGGDSAGRSGAGLEQEAAAGGDEEEEEEEEEEEGISALDGDQMELGEENGAAGAADSGPMEEEEAASEDENGDDQGFQEGEDELGDEEEGAGDENGHGEQQPQPPATQQQQPQQQRGAAKEAAGKSSGPTSLFAVTVAPPGARQGQQQAGGDGKTEQKGGDKKRGVKRPREDHGRGYFEYIEENKYSRAKSPQPPVEEEDEHFDDTVVCLDTYNCDLHFKISRDRLSASSLTMESFAFLWAGGRASYGVSKGKVCFEMKVTEKIPVRHLYTKDIDIHEVRIGWSLTTSGMLLGEEEFSYGYSLKGIKTCNCETEDYGEKFDENDVITCFANFESDEVELSYAKNGQDLGVAFKISKEVLAGRPLFPHVLCHNCAVEFNFGQKEKPYFPIPEEYTFIQNVPLEDRVRGPKGPEEKKDCEVVMMIGLPGAGKTTWVTKHAAENPGKYNILGTNTIMDKMMVAGFKKQMADTGKLNTLLQRAPQCLGKFIEIAARKKRNFILDQTNVSAAAQRRKMCLFAGFQRKAVVVCPKDEDYKQRTQKKAEVEGKDLPEHAVLKMKGNFTLPEVAECFDEITYVELQKEEAQKLLEQYKEESKKALPPEKKQNTGSKKSNKNKSGKNQFNRGGGHRGRGGFNMRGGNFRGGAPGNRGGYNRRGNMPQRGGGGGGSGGIGYPYPRAPVFPGRGSYSNRGNYNRGGMPNRGNYNQNFRGRGNNRGYKNQSQGYNQWQQGQFWGQKPWSQHYHQGYY

SEQ ID NO: 38144 - protein, 241 aa, Homo sapiens
  Payload ID: 7573
  Gene Symbol: HNRNPU
  Gene Name: heterogeneous nuclear ribonucleoprotein U (scaffold attachment factor A)
  ENSP ID: ENSP00000410728
MGLVCVLGDGKTEQKGGDKKRGVKRPREDHGRGYFEYIEENKYSRAKSPQPPVEEEDEHFDDTVVCLDTYNCDLHFKISRDRLSASSLTMESFAFLWAGGRASYGVSKGKVCFEMKVTEKIPVRHLYTKDIDIHEVRIGWSLTTSGMLLGEEEFSYGYSLKGIKTCNCETEDYGEKFDENDVITCFANFESDEVELSYAKNGQDLGVAFKISKEVLAGRPLFPHVLCHNCAVEFNFGQKEK

SEQ ID NO: 38145 - protein, 767 aa, Homo sapiens
  Payload ID: 7574
  Gene Symbol: HNRNPUL1
  Gene Name: heterogeneous nuclear ribonucleoprotein U-like 1
  ENSP ID: ENSP00000263367
MRSWAFSYLDAMDNITRQNQFYDTQVIKQENESGYERRPLEMEQQQAYRPEMKTEMKQGAPTSFLPPEASQLKPDRQQFQSRKRPYEENRGRGYFEHREDRRGRSPQPPAEEDEDDFDDTLVAIDTYNCDLHFKVARDRSSGYPLTIEGFAYLWSGARASYGVRRGRVCFEMKINEEISVKHLPSTEPDPHVVRIGWSLDSCSTQLGEEPFSYGYGGTGKKSTNSRFENYGDKFAENDVIGCFADFECGNDVELSFTKNGKWMGIAFRIQKEALGGQALYPHVLVKNCAVEFNFGQRAEPYCSVLPGFTFIQHLPLSERIRGTVGPKSKAECEILMMVGLPAAGKTTWAIKHAASNPSKKYNILGTNAIMDKMRVMGLRRQRNYAGRWDVLIQQATQCLNRLIQIAARKKRNYILDQTNVYGSAQRRKMRPFEGFQRKAIVICPTDEDLKDRTIKRTDEEGKDVPDHAVLEMKANFTLPDVGDFLDEVLFIELQREEADKLVRQYNEEGRKAGPPPEKRFDNRGGGGFRGRGGGGGFQRYENRGPPGGNRGGFQNRGGGSGGGGNYRGGFNRSGGGGYSQNRWGNNNRDNNNSNNRGSYNRAPQQQPPPQQPPPPQPPPQQPPPPPSYSPARNPPGASTYNKNSNIPGSSANTSTPTVSSYSPPQPSYSQPPYNQGGYSQGYTAPPPPPPPPPAYNYGSYGGYNPAPYTPPPPPTAQTYPQPSYNQYQQYAQQWNQYYQNQGQWPPYYGNYDYGSYSGNTQGGTSTQ

SEQ ID NO: 38146 - protein, 766 aa, Homo sapiens
  Payload ID: 7574
  Gene Symbol: HNRNPUL1
  Gene Name: heterogeneous nuclear ribonucleoprotein U-like 1
  ENSP ID: ENSP00000340857
MDNITRQNQFYDTQVIKQENESGYERRPLEMEQQQAYRPEMKTEMKQGAPTSFLPPEASQLKPDRQQFQSRKRPYEENRGRGYFEHREDRRGRSPQPPAEEDEDDFDDTLVAIDTYNCDLHFKVARDRSSGYPLTIEGFAYLWSGARASYGVRRGRVCFEMKINEEISVKHLPSTEPDPHVVRIGWSLDSCSTQLGEEPFSYGYGGTGKKSTNSRFENYGDKFAENDVIGCFADFECGNDVELSFTKNGKWMGIAFRIQKEALGGQALYPHVLVKNCAVEFNFGQRAEPYCSVLPGFTFIQHLPLSERIRGTVGPKSKAECEILMMVGLPAAGKTTWAIKHAASNPSKKYNILGTNAIMDKMRVMGLRRQRNYAGRWDVLIQQATQCLNRLIQIAARKKRNYILDQTNVYGSAQRRKMRPFEGFQRKAIVICPTDEDLKDRTIKRTDEEGKDVPDHAVLEMKANFTLPDVGDFLDEVLFIELQREEADKLVRQYNEEGRKAGPPPEKRFDNRGGGGFRGRGGGGGFQRYENRGPPGGNRGGFQNRGGGSGGGGNYRGGFNRSGGGGYSQNRWGNNNRDNNNSNNRGSYNRAPQQQPPPQQPPPPQPPPQQPPPPPSYSPARNPPGASTYNKNSNIPGSSANTSTPTVSSYSPPQSFGFFPSTFQPSYSQPPYNQGGYSQGYTAPPPPPPPPPAYNYGSYGGYNPAPYTPPPPPTAQTYPQPSYNQYQQYAQQWNQYYQNQGQWPPYYGNYDYGSYSGNTQGGTSTQ

SEQ ID NO: 38147 - protein, 752 aa, Homo sapiens
  Payload ID: 7574
  Gene Symbol: HNRNPUL1
  Gene Name: heterogeneous nuclear ribonucleoprotein U-like 1
  Uniprot ID: Q9BUJ2
  ENSP ID: ENSP00000367460
MDVRRLKVNELREELQRRGLDTRGLKAELAERLQPPPPGLQPHAEPGGYSGPDGHYAMDNITRQNQFYDTQVIKQENESGYERRPLEMEQQQAYRPEMKTEMKQGAPTSFLPPEASQLKPDRQQFQSRKRPYEENRGRGYFEHREDRRGRSPQPPAEEDEDDFDDTLVAIDTYNCDLHFKVARDRSSGYPLTIEGFAYLWSGARASYGVRRGRVCFEMKDFECGNDVELSFTKNGKWMGIAFRIQKEALGGQALYPHVLVKNCAVEFNFGQRAEPYCSVLPGFTFIQHLPLSERIRGTVGPKSKAECEILMMVGLPAAGKTTWAIKHAASNPSKKYNILGTNAIMDKMRVMGLRRQRNYAGRWDVLIQQATQCLNRLIQIAARKKRNYILDQTNVYGSAQRRKMRPFEGFQRKAIVICPTDEDLKDRTIKRTDEEGKDVPDHAVLEMKANFTLPDVGDFLDEVLFIELQREEADKLVRQYNEEGRKAGPPPEKRFDNRGGGGFRGRGGGGGFQRYENRGPPGGNRGGFQNRGGGSGGGGNYRGGFNRSGGGGYSQNRWGNNNRDNNNSNNRGSYNRAPQQQPPPQQPPPPQPPPQQPPPPPSYSPARNPPGASTYNKNSNIPGSSANTSTPTVSSYSPPQSFGFFPSTFQPSYSQPPYNQGGYSQGYTAPPPPPPPPPAYNYGSYGGYNPAPYTPPPPPTAQTYPQPSYNQYQQYAQQWNQYYQNQGQWPPYYGNYDYGSYSGNTQGGTSTQ

SEQ ID NO: 38148 - protein, 856 aa, Homo sapiens
  Payload ID: 7574
  Gene Symbol: HNRNPUL1
  Gene Name: heterogeneous nuclear ribonucleoprotein U-like 1
  Uniprot ID: Q9BUJ2
  ENSP ID: ENSP00000375863
MDVRRLKVNELREELQRRGLDTRGLKAELAERLQAALEAEEPDDERELDADDEPGRPGHINEEVETEGGSELEGTAQPPPPGLQPHAEPGGYSGPDGHYAMDNITRQNQFYDTQVIKQENESGYERRPLEMEQQQAYRPEMKTEMKQGAPTSFLPPEASQLKPDRQQFQSRKRPYEENRGRGYFEHREDRRGRSPQPPAEEDEDDFDDTLVAIDTYNCDLHFKVARDRSSGYPLTIEGFAYLWSGARASYGVRRGRVCFEMKINEEISVKHLPSTEPDPHVVRIGWSLDSCSTQLGEEPFSYGYGGTGKKSTNSRFENYGDKFAENDVIGCFADFECGNDVELSFTKNGKWMGIAFRIQKEALGGQALYPHVLVKNCAVEFNFGQRAEPYCSVLPGFTFIQHLPLSERIRGTVGPKSKAECEILMMVGLPAAGKTTWAIKHAASNPSKKYNILGTNAIMDKMRVMGLRRQRNYAGRWDVLIQQATQCLNRLIQIAARKKRNYILDQTNVYGSAQRRKMRPFEGFQRKAIVICPTDEDLKDRTIKRTDEEGKDVPDHAVLEMKANFTLPDVGDFLDEVLFIELQREEADKLVRQYNEEGRKAGPPPEKRFDNRGGGGFRGRGGGGGFQRYENRGPPGGNRGGFQNRGGGSGGGGNYRGGFNRSGGGGYSQNRWGNNNRDNNNSNNRGSYNRAPQQQPPPQQPPPPQPPPQQPPPPPSYSPARNPPGASTYNKNSNIPGSSANTSTPTVSSYSPPQPSYSQPPYNQGGYSQGYTAPPPPPPPPPAYNYGSYGGYNPAPYTPPPPPTAQTYPQPSYNQYQQYAQQWNQYYQNQGQWPPYYGNYDYGSYSGNTQGGTSTQ

SEQ ID NO: 38149 - protein, 26 aa, Homo sapiens
  Payload ID: 7574
  Gene Symbol: HNRNPUL1
  Gene Name: heterogeneous nuclear ribonucleoprotein U-like 1
  ENSP ID: ENSP00000469816
  MOD_RES (1)..(1): Any amino acid
XRGRVCFEMKVSRSKRRGRDREVHPL

SEQ ID NO: 38150 - protein, 172 aa, Homo sapiens
  Payload ID: 7574
  Gene Symbol: HNRNPUL1
  Gene Name: heterogeneous nuclear ribonucleoprotein U-like 1
  ENSP ID: ENSP00000469858
MKTEMKQGAPTSFLPPEASQLKPDRQQFQSRKRPYEENRGRGYFEHREDRRGRSPQPPAEEDEDDFDDTLVAIDTYNCDLHFKVARDRSSGYPLTIEGFAYLWSGARASYGVRRGRVCFEMKINEEISVKHLPSTEPDPHVVRIGWSLDSCSTQLGEEPFSYGYGGTGKKST

SEQ ID NO: 38151 - protein, 90 aa, Homo sapiens
  Payload ID: 7574
  Gene Symbol: HNRNPUL1
  Gene Name: heterogeneous nuclear ribonucleoprotein U-like 1
  ENSP ID: ENSP00000469934
  MOD_RES (1)..(1): Any amino acid
XTLVAIDTYNCDLHFKVARDRSSGYPLTIEGFAYLWSGARASYGVRRGRVCFEMKINEEISVKHLPSTEPDPHVVRIGWSLDSCSTQLGF

SEQ ID NO: 38152 - protein, 371 aa, Homo sapiens
  Payload ID: 7574
  Gene Symbol: HNRNPUL1
  Gene Name: heterogeneous nuclear ribonucleoprotein U-like 1
  ENSP ID: ENSP00000470172
MDNITRQNQFYDTQVIKQENESGYERRPLEMEQQQAYRPEMKTEMKQGAPTSFLPPEASQLKPDRQQFQSRKRPYEENRGRGYFEHREDRRGRSPQPPAEEDEDDFDDTLVAIDTYNCDLHFKVARDRSSGYPLTIEGFAYLWSGARASYGVRRGRVCFEMKINEEISVKHLPSTEPDPHVVRIGWSLDSCSTQLGEEPFSYGYGGTGKKSTNSRFENYGDKFAENDVIGCFADFECGNDVELSFTKNGKWMGIAFRIQKEALGGQALYPHVLVKNCAVEFNFGQRAEPYCSVLPGFTFIQHLPLSERIRGTVGPKSKAECEILMMVGLPAAGKTTWAIKHAASNPSKKYNILGTNAIMDKMRVMGLRRQR

SEQ ID NO: 38153 - protein, 804 aa, Homo sapiens
  Payload ID: 7574
  Gene Symbol: HNRNPUL1
  Gene Name: heterogeneous nuclear ribonucleoprotein U-like 1
  Uniprot ID: Q9BUJ2
  ENSP ID: ENSP00000470687
MDVRRLKVNELREELQRRGLDTRGLKAELAERLQAALEAEEPDDERELDADDEPGRPGHINEEVETEGGSELEGTAQPPPPGLQPHAEPGGYSGPDGHYAMDNITRQNQFYDTQVIKQENESGYERRPLEMEQQQAYRPEMKTEMKQGAPTSFLPPEASQLKPDRQQFQSRKRPYEENRGRGYFEHREDRRGRSPQPPAEEDEDDFDDTLVAIDTYNCDLHFKVARDRSSGYPLTIEGFAYLWSGARASYGVRRGRVCFEMKINEEISVKHLPSTEPDPHVVRIGWSLDSCSTQLGEEPFSYGYGGTGKKSTNSRFENYGDKFAENDVIGCFADFECGNDVELSFTKNGKWMGIAFRIQKEALGGQALYPHVLVKNCAVEFNFGQRAEPYCSVLPGFTFIQHLPLSERIRGTVGPKSKAECEILMMVGLPAAGKTTWAIKHAASNPSKKYNILGTNAIMDKMRVMGLRRQRNYAGRWDVLIQQATQCLNRLIQIAARKKRNYILDQTNVYGSAQRRKMRPFEGFQRKAIVICPTDEDLKDRTIKRTDEEGKDVPDHAVLEMKANFTLPDVGDFLDEVLFIELQREEADKLVRQYNEEGRKAGPPPEKRFDNRGGGGFRGRGGGGGFQRYENRGPPGGNRGGFQNRGGGSGGGGNYRGGFNRSGGGGYSQNRWGNNNRDNNNSNNRGSYNRAPQQQPPPQQPPPPQPPPQQPPPPPSYSPARNPPGASTYNKNSNIPGSSANTSTPTVSSYSPPQTYPQPSYNQYQQYAQQWNQYYQNQGQWPPYYGNYDYGSYSGNTQGGTSTQ

SEQ ID NO: 38154 - protein, 118 aa, Homo sapiens
  Payload ID: 7574
  Gene Symbol: HNRNPUL1
  Gene Name: heterogeneous nuclear ribonucleoprotein U-like 1
  ENSP ID: ENSP00000470793
MDNITRQNQFYDTQVIKQENESGYERRPLEMEQQQAYRPEMKTEMKQGAPTSFLPPEASQLKPDRQQFQSRKRPYEENRGRGYFEHREDRRGRSPQPPAEEDEDDFDDTLVAIDTYNC

SEQ ID NO: 38155 - protein, 158 aa, Homo sapiens
  Payload ID: 7574
  Gene Symbol: HNRNPUL1
  Gene Name: heterogeneous nuclear ribonucleoprotein U-like 1
  ENSP ID: ENSP00000471302
MDNITRQNQFYDTQVIKQENESGYERRPLEMEQQQAYRPEMKTEMKQGAPTSFLPPEASQLKPDRQQFQSRKRPYEENRGRGYFEHREDRRGRSPQPPAEEDEDDFDDTLVAIDTYNCDLHFKVARDRSSGYPLTIEGFAYLWSGARASYGVRRGRVC

SEQ ID NO: 38156 - protein, 81 aa, Homo sapiens
  Payload ID: 7574
  Gene Symbol: HNRNPUL1
  Gene Name: heterogeneous nuclear ribonucleoprotein U-like 1
  ENSP ID: ENSP00000472221
MDNITRQNQFYDTQVIKQENESGYERRPLEMEQQQAYRPEMKTEMKQGAPTSFLPPEASQLKPDRQQFQSRKRPYEENRGR

SEQ ID NO: 38157 - protein, 105 aa, Homo sapiens
  Payload ID: 7574
  Gene Symbol: HNRNPUL1
  Gene Name: heterogeneous nuclear ribonucleoprotein U-like 1
  ENSP ID: ENSP00000472315
MDVRRLKVNELREELQRRGLDTRGLKAELAERLQAALEAEEPDDERELDADDEPGRPGHINEEMPWTILPGRTNSTIPKSSNKKTSQATRGDHWKWSSSRPIVQK

SEQ ID NO: 38158 - protein, 756 aa, Homo sapiens
  Payload ID: 7574
  Gene Symbol: HNRNPUL1
  Gene Name: heterogeneous nuclear ribonucleoprotein U-like 1
  Uniprot ID: Q9BUJ2
  ENSP ID: ENSP00000472629
MDNITRQNQFYDTQVIKQENESGYERRPLEMEQQQAYRPEMKTEMKQGAPTSFLPPEASQLKPDRQQFQSRKRPYEENRGRGYFEHREDRRGRSPQPPAEEDEDDFDDTLVAIDTYNCDLHFKVARDRSSGYPLTIEGFAYLWSGARASYGVRRGRVCFEMKINEEISVKHLPSTEPDPHVVRIGWSLDSCSTQLGEEPFSYGYGGTGKKSTNSRFENYGDKFAENDVIGCFADFECGNDVELSFTKNGKWMGIAFRIQKEALGGQALYPHVLVKNCAVEFNFGQRAEPYCSVLPGFTFIQHLPLSERIRGTVGPKSKAECEILMMVGLPAAGKTTWAIKHAASNPSKKYNILGTNAIMDKMRVMGLRRQRNYAGRWDVLIQQATQCLNRLIQIAARKKRNYILDQTNVYGSAQRRKMRPFEGFQRKAIVICPTDEDLKDRTIKRTDEEGKDVPDHAVLEMKANFTLPDVGDFLDEVLFIELQREEADKLVRQYNEEGRKAGPPPEKRFDNRGGGGFRGRGGGGGFQRYENRGPPGGNRGGFQNRGGGSGGGGNYRGGFNRSGGGGYSQNRWGNNNRDNNNSNNRGSYNRAPQQQPPPQQPPPPQPPPQQPPPPPSYSPARNPPGASTYNKNSNIPGSSANTSTPTVSSYSPPQPSYSQPPYNQGGYSQGYTAPPPPPPPPPAYNYGSYGGYNPAPYTPPPPPTAQTYPQPSYNQYQQYAQQWNQYYQNQGQWPPYYGNYDYGSYSGNTQGGTSTQ

SEQ ID NO: 38159 - protein, 756 aa, Homo sapiens; identical to SEQ ID NO: 38158
  Payload ID: 7574
  Gene Symbol: HNRNPUL1
  Gene Name: heterogeneous nuclear ribonucleoprotein U-like 1
  Uniprot ID: Q9BUJ2
  ENSP ID: ENSP00000473132

SEQ ID NO: 38160 - protein, 641 aa, Homo sapiens
  Payload ID: 7574
  Gene Symbol: HNRNPUL1
  Gene Name: heterogeneous nuclear ribonucleoprotein U-like 1
  ENSP ID: ENSP00000473178
  MOD_RES (1)..(1): Any amino acid
XFLPPEASQLKPDRQQFQSRKRPYEENRGRGYFEHREDRRGRSPQPPAEEDEDDFDDTLVAIDTYNCDLHFKVARDRSSGYPLTIEGFAYLWSGARASYGVRRGRVCFEMKINEEISVKHLPSTEPDPHVVRIGWSLDSCSTQLGEEPFSYGYGGTGKKSTNSRFENYGDKFAENDVIGCFADFECGNDVELSFTKNGKWMGIAFRIQKEALGGQALYPHVLVKNCAVEFNFGQRAEPYCSVLPGFTFIQHLPLSERIRGTVGPKSKAECEILMMVGLPAAGKTTWAIKHAASNPSKKYNILGTNAIMDKMRVMGLRRQRNYAGRWDVLIQQATQCLNRLIQIAARKKRNYILDQTNVYGSAQRRKMRPFEGFQRKAIVICPTDEDLKDRTIKRTDEEGKDVPDHAVLEMKANFTLPDVGDFLDEVLFIELQREEADKLVRQYNEEGRKAGPPPEKRFDNRGGGGFRGRGGGGGFQRYENRGPPGGNRGGFQNRGGGSGGGGNYRGGFNRSGGGGYSQNRWGNNNRDNNNSNNRGSYNRAPQQQPPPQQPPPPQPPPQQPPPPPSYSPARNPPGASTYNKNSNIPGSSANTSTPTVSSYSPPQYAQQWNQYYQNQGQWPPYYGNYDYGSYSGNTQGGTSTQ

SEQ ID NO: 38161 - protein, 122 aa, Homo sapiens
  Payload ID: 7574
  Gene Symbol: HNRNPUL1
  Gene Name: heterogeneous nuclear ribonucleoprotein U-like 1
  ENSP ID: ENSP00000478946
MDVRRLKVNELREELQRRGLDTRGLKAELAERLQAALEAEEPDDERELDADDEPGRPGHINEEAELQPATLQPGRLQPGLHSPTASTSTTTCLQLWELRRLQPGPLYPTATPHCTDLPSAQL

SEQ ID NO: 38162 - protein, 122 aa, Homo sapiens; identical to SEQ ID NO: 38161
  Payload ID: 7574
  Gene Symbol: HNRNPUL1
  Gene Name: heterogeneous nuclear ribonucleoprotein U-like 1
  ENSP ID: ENSP00000484226

SEQ ID NO: 38163 - protein, 747 aa, Homo sapiens
  Payload ID: 7575
  Gene Symbol: HNRNPUL2
  Gene Name: heterogeneous nuclear ribonucleoprotein U-like 2
  Uniprot ID: Q1KMD3
  ENSP ID: ENSP00000301785
MEVKRLKVTELRSELQRRGLDSRGLKVDLAQRLQEALDAEMLEDEAGGGGAGPGGACKAEPRPVAASGGGPGGDEEEDEEEEEEDEEALLEDEDEEPPPAQALGQAAQPPPEPPEAAAMEAAAEPDASEKPAEATAGSGGVNGGEEQGLGKREEDEPEERSGDETPGSEVPGDKAAEEQGDDQDSEKSKPAGSDGERRGVKRQRDEKDEHGRAYYEFREEAYHSRSKSPLPPEEEAKDEEEDQTLVNLDTYTSDLHFQVSKDRYGGQPLFSEKFPTLWSGARSTYGVTKGKVCFEAKVTQNLPMKEGCTEVSLLRVGWSVDFSRPQLGEDEFSYGFDGRGLKAENGQFEEFGQTFGENDVIGCFANFETEEVELSFSKNGEDLGVAFWISKDSLADRALLPHVLCKNCVVELNFGQKEEPFFPPPEEFVFIHAVPVEERVRTAVPPKTIEECEVILMVGLPGSGKTQWALKYAKENPEKRYNVLGAETVLNQMRMKGLEEPEMDPKSRDLLVQQASQCLSKLVQIASRTKRNFILDQCNVYNSGQRRKLLLFKTFSRKVVVVVPNEEDWKKRLELRKEVEGDDVPESIMLEMKANFSLPEKCDYMDEVTYGELEKEEAQPIVTKYKEEARKLLPPSEKRTNRRNNRNKRNRQNRSRGQGYVGGQRRGYDNRAYGQQYWGQPGNRGGYRNFYDRYRGDYDRFYGRDYEYNRYRDYYRQYNRDWQSYYYHHPQDRDRYYRNYYGYQGYR

SEQ ID NO: 38164 - protein, 359 aa, Homo sapiens
  Payload ID: 7576
  Gene Symbol: HEXIM1
  Gene Name: hexamethylene bis-acetamide inducible 1
  Uniprot ID: O94992
  ENSP ID: ENSP00000328773
MAEPFLSEYQHQPQTSNCTGAAAVQEELNPERPPGAEERVPEEDSRWQSRAFPQLGGRPGPEGEGSLESQPPPLQTQACPESSCLREGEKGQNGDDSSAGGDFPPPAEVEPTPEAELLAQPCHDSEASKLGAPAAGGEEEWGQQQRQLGKKKHRRRPSKKKRHWKPYYKLTWEEKKKFDEKQSLRASRIRAEMFAKGQPVAPYNTTQFLMDDHDQEEPDLKTGLYSKRAAAKSDDTSDDDFMEEGGEEDGGSDGMGGDGSEFLQRDFSETYERYHTESLQNMSKQELIKEYLELEKCLSRMEDENNRLRLESKRLGGDDARVRELELELDRLRAENLQLLTENELHRQQERAPLSKFGD

SEQ ID NO: 38165 - protein, 286 aa, Homo sapiens
  Payload ID: 7577
  Gene Symbol: HEXIM2
  Gene Name: hexamethylene bis-acetamide inducible 2
  Uniprot ID: Q96MH2
  ENSP ID: ENSP00000302276
MMATPNQTACNAESPVALEEAKTSGAPGSPQTPPERHDSGGSLPLTPRMESHSEDEDLAGAVGGLGWNSRSPRTQSPGGCSAEAVLARKKHRRRPSKRKRHWRPYLELSWAEKQQRDERQSQRASRVREEMFAKGQPVAPYNTTQFLMNDRDPEEPNLDVPHGISHPGSSGESEAGDSDGRGRAHGEFQRKDFSETYERFHTESLQGRSKQELVRDYLELEKRLSQAEEETRRLQQLQACTGQQSCRQVEELAAEVQRLRTENQRLRQENQMWNREGCRCDEEPGT

SEQ ID NO: 38166 - protein, 79 aa, Homo sapiens
  Payload ID: 7577
  Gene Symbol: HEXIM2
  Gene Name: hexamethylene bis-acetamide inducible 2
  ENSP ID: ENSP00000464807
MMATPNQTACNAESPVALEEAKTSGAPGSPQTPPERHDSGGSLPLTPRMESHSEDEDLAGAVGGLGWNSRSPRTQSPGG

SEQ ID NO: 38167 - protein, 144 aa, Homo sapiens
  Payload ID: 7577
  Gene Symbol: HEXIM2
  Gene Name: hexamethylene bis-acetamide inducible 2
  ENSP ID: ENSP00000465086
MMATPNQTACNAESPVALEEAKTSGAPGSPQTPPERHDSGGSLPLTPRMESHSEDEDLAGAVGGLGWNSRSPRTQSPGGCSAEAVLARKKHRRRPSKRKRHWRPYLELSWAEKQQRDERQSQRASRVREEMFAKGQPVAPYNTT

SEQ ID NO: 38168 - protein, 286 aa, Homo sapiens; identical to SEQ ID NO: 38165
  Payload ID: 7577
  Gene Symbol: HEXIM2
  Gene Name: hexamethylene bis-acetamide inducible 2
  Uniprot ID: Q96MH2
  ENSP ID: ENSP00000465727

SEQ ID NO: 38169 - protein, 139 aa, Homo sapiens
  Payload ID: 7577
  Gene Symbol: HEXIM2
  Gene Name: hexamethylene bis-acetamide inducible 2
  ENSP ID: ENSP00000466200
MMATPNQTACNAESPVALEEAKTSGAPGSPQTPPERHDSGGSLPLTPRMESHSEDEDLAGAVGGLGWNSRSPRTQSPGGCSAEAVLARKKHRRRPSKRKRHWRPYLELSWAEKQQRDERQSQRASRVREEMFAKGQPVA

SEQ ID NO: 38170 - protein, 286 aa, Homo sapiens; identical to SEQ ID NO: 38165
  Payload ID: 7577
  Gene Symbol: HEXIM2
  Gene Name: hexamethylene bis-acetamide inducible 2
  Uniprot ID: Q96MH2
  ENSP ID: ENSP00000467517

SEQ ID NO: 38171 - protein, 203 aa, Homo sapiens
  Payload ID: 7577
  Gene Symbol: HEXIM2
  Gene Name: hexamethylene bis-acetamide inducible 2
  ENSP ID: ENSP00000468251
MALWCKRGVTSSRRLLKDLEQKMMATPNQTACNAESPVALEEAKTSGAPGSPQTPPERHDSGGSLPLTPRMESHSEDEDLAGAVGGLGWNSRSPRTQSPGGCSAEAVLARKKHRRRPSKRKRHWRPYLELSWAEKQQRDERQSQRASRVREEMFAKGQPVAPYNTTQFLMNDRDPEEPNLDVPHGISHPGSSGESEAGDSDGR

SEQ ID NO: 38172 - protein, 122 aa, Homo sapiens
  Payload ID: 7577
  Gene Symbol: HEXIM2
  Gene Name: hexamethylene bis-acetamide inducible 2
  ENSP ID: ENSP00000468773
MMATPNQTACNAESPVALEEAKTSGAPGSPQTPPERHDSGGSLPLTPRMESHSEDEDLAGAVGGLGWNSRSPRTQSPGGCSAEAVLARKKHRRRPSKRKRHWRPYLELSWAEKQQRDERQSQ

SEQ ID NO: 38173 - protein, 916 aa, Homo sapiens
  Payload ID: 7578
  Gene Symbol: HK1
  Gene Name: hexokinase 1
  Uniprot ID: P19367
  ENSP ID: ENSP00000298649
MDCEHSLSLPCRGAEAWEIGIDKYLYAMRLSDETLIDIMTRFRKEMKNGLSRDFNPTATVKMLPTFVRSIPDGSEKGDFIALDLGGSSFRILRVQVNHEKNQNVHMESEVYDTPENIVHGSGSQLFDHVAECLGDFMEKRKIKDKKLPVGFTFSFPCQQSKIDEAILITWTKRFKASGVEGADVVKLLNKAIKKRGDYDANIVAVVNDTVGTMMTCGYDDQHCEVGLIIGTGTNACYMEELRHIDLVEGDEGRMCINTEWGAFGDDGSLEDIRTEFDREIDRGSLNPGKQLFEKMVSGMYLGELVRLILVKMAKEGLLFEGRITPELLTRGKFNTSDVSAIEKNKEGLHNAKEILTRLGVEPSDDDCVSVQHVCTIVSFRSANLVAATLGAILNRLRDNKGTPRLRTTVGVDGSLYKTHPQYSRRFHKTLRRLVPDSDVRFLLSESGSGKGAAMVTAVAYRLAEQHRQIEETLAHFHLTKDMLLEVKKRMRAEMELGLRKQTHNNAVVKMLPSFVRRTPDGTENGDFLALDLGGTNFRVLLVKIRSGKKRTVEMHNKIYAIPIEIMQGTGEELFDHIVSCISDFLDYMGIKGPRMPLGFTFSFPCQQTSLDAGILITWTKGFKATDCVGHDVVTLLRDAIKRREEFDLDVVAVVNDTVGTMMTCAYEEPTCEVGLIVGTGSNACYMEEMKNVEMVEGDQGQMCINMEWGAFGDNGCLDDIRTHYDRLVDEYSLNAGKQRYEKMISGMYLGEIVRNILIDFTKKGFLFRGQISETLKTRGIFETKFLSQIESDRLALLQVRAILQQLGLNSTCDDSILVKTVCGVVSRRAAQLCGAGMAAVVDKIRENRGLDRLNVTVGVDGTLYKLHPHFSRIMHQTVKELSPKCNVSFLLSEDGSGKGAALITAVGVRLRTEASS

SEQ ID NO: 38174 - protein, 917 aa, Homo sapiens
  Payload ID: 7578
  Gene Symbol: HK1
  Gene Name: hexokinase 1
  Uniprot ID: P19367
  ENSP ID: ENSP00000352398
MIAAQLLAYYFTELKDDQVKKIDKYLYAMRLSDETLIDIMTRFRKEMKNGLSRDFNPTATVKMLPTFVRSIPDGSEKGDFIALDLGGSSFRILRVQVNHEKNQNVHMESEVYDTPENIVHGSGSQLFDHVAECLGDFMEKRKIKDKKLPVGFTFSFPCQQSKIDEAILITWTKRFKASGVEGADVVKLLNKAIKKRGDYDANIVAVVNDTVGTMMTCGYDDQHCEVGLIIGTGTNACYMEELRHIDLVEGDEGRMCINTEWGAFGDDGSLEDIRTEFDREIDRGSLNPGKQLFEKMVSGMYLGELVRLILVKMAKEGLLFEGRITPELLTRGKFNTSDVSAIEKNKEGLHNAKEILTRLGVEPSDDDCVSVQHVCTIVSFRSANLVAATLGAILNRLRDNKGTPRLRTTVGVDGSLYKTHPQYSRRFHKTLRRLVPDSDVRFLLSESGSGKGAAMVTAVAYRLAEQHRQIEETLAHFHLTKDMLLEVKKRMRAEMELGLRKQTHNNAVVKMLPSFVRRTPDGTENGDFLALDLGGTNFRVLLVKIRSGKKRTVEMHNKIYAIPIEIMQGTGEELFDHIVSCISDFLDYMGIKGPRMPLGFTFSFPCQQTSLDAGILITWTKGFKATDCVGHDVVTLLRDAIKRREEFDLDVVAVVNDTVGTMMTCAYEEPTCEVGLIVGTGSNACYMEEMKNVEMVEGDQGQMCINMEWGAFGDNGCLDDIRTHYDRLVDEYSLNAGKQRYEKMISGMYLGEIVRNILIDFTKKGFLFRGQISETLKTRGIFETKFLSQIESDRLALLQVRAILQQLGLNSTCDDSILVKTVCGVVSRRAAQLCGAGMAAVVDKIRENRGLDRLNVTVGVDGTLYKLHPHFSRIMHQTVKELSPKCNVSFLLSEDGSGKGAALITAVGVRLRTEASS

SEQ ID NO: 38175 - protein, 905 aa, Homo sapiens
  Payload ID: 7578
  Gene Symbol: HK1
  Gene Name: hexokinase 1
  Uniprot ID: P19367
  ENSP ID: ENSP00000353433
MAKRALHDFIDKYLYAMRLSDETLIDIMTRFRKEMKNGLSRDFNPTATVKMLPTFVRSIPDGSEKGDFIALDLGGSSFRILRVQVNHEKNQNVHMESEVYDTPENIVHGSGSQLFDHVAECLGDFMEKRKIKDKKLPVGFTFSFPCQQSKIDEAILITWTKRFKASGVEGADVVKLLNKAIKKRGDYDANIVAVVNDTVGTMMTCGYDDQHCEVGLIIGTGTNACYMEELRHIDLVEGDEGRMCINTEWGAFGDDGSLEDIRTEFDREIDRGSLNPGKQLFEKMVSGMYLGELVRLILVKMAKEGLLFEGRITPELLTRGKFNTSDVSAIEKNKEGLHNAKEILTRLGVEPSDDDCVSVQHVCTIVSFRSANLVAATLGAILNRLRDNKGTPRLRTTVGVDGSLYKTHPQYSRRFHKTLRRLVPDSDVRFLLSESGSGKGAAMVTAVAYRLAEQHRQIEETLAHFHLTKDMLLEVKKRMRAEMELGLRKQTHNNAVVKMLPSFVRRTPDGTENGDFLALDLGGTNFRVLLVKIRSGKKRTVEMHNKIYAIPIEIMQGTGEELFDHIVSCISDFLDYMGIKGPRMPLGFTFSFPCQQTSLDAGILITWTKGFKATDCVGHDVVTLLRDAIKRREEFDLDVVAVVNDTVGTMMTCAYEEPTCEVGLIVGTGSNACYMEEMKNVEMVEGDQGQMCINMEWGAFGDNGCLDDIRTHYDRLVDEYSLNAGKQRYEKMISGMYLGEIVRNILIDFTKKGFLFRGQISETLKTRGIFETKFLSQIESDRLALLQVRAILQQLGLNSTCDDSILVKTVCGVVSRRAAQLCGAGMAAVVDKIRENRGLDRLNVTVGVDGTLYKLHPHFSRIMHQTVKELSPKCNVSFLLSEDGSGKGAALITAVGVRLRTEASS

SEQ ID NO: 38176 - protein, 114 aa, Homo sapiens
  Payload ID: 7578
  Gene Symbol: HK1
  Gene Name: hexokinase 1
  ENSP ID: ENSP00000398316
MAKRALHDFIDKYLYAMRLSDETLIDIMTRFRKEMKNGLSRDFNPTATVKMLPTFVRSIPDGSEKGDFIALDLGGSSFRILRVQVNHEKNQNVHMESEVYDTPENIVHGSGSQL

SEQ ID NO: 38177 - protein, 921 aa, Homo sapiens
  Payload ID: 7578
  Gene Symbol: HK1
  Gene Name: hexokinase 1
  Uniprot ID: P19367
  ENSP ID: ENSP00000402103
MGQICQRESATAAEKPKLHLLAESEIDKYLYAMRLSDETLIDIMTRFRKEMKNGLSRDFNPTATVKMLPTFVRSIPDGSEKGDFIALDLGGSSFRILRVQVNHEKNQNVHMESEVYDTPENIVHGSGSQLFDHVAECLGDFMEKRKIKDKKLPVGFTFSFPCQQSKIDEAILITWTKRFKASGVEGADVVKLLNKAIKKRGDYDANIVAVVNDTVGTMMTCGYDDQHCEVGLIIGTGTNACYMEELRHIDLVEGDEGRMCINTEWGAFGDDGSLEDIRTEFDREIDRGSLNPGKQLFEKMVSGMYLGELVRLILVKMAKEGLLFEGRITPELLTRGKFNTSDVSAIEKNKEGLHNAKEILTRLGVEPSDDDCVSVQHVCTIVSFRSANLVAATLGAILNRLRDNKGTPRLRTTVGVDGSLYKTHPQYSRRFHKTLRRLVPDSDVRFLLSESGSGKGAAMVTAVAYRLAEQHRQIEETLAHFHLTKDMLLEVKKRMRAEMELGLRKQTHNNAVVKMLPSFVRRTPDGTENGDFLALDLGGTNFRVLLVKIRSGKKRTVEMHNKIYAIPIEIMQGTGEELFDHIVSCISDFLDYMGIKGPRMPLGFTFSFPCQQTSLDAGILITWTKGFKATDCVGHDVVTLLRDAIKRREEFDLDVVAVVNDTVGTMMTCAYEEPTCEVGLIVGTGSNACYMEEMKNVEMVEGDQGQMCINMEWGAFGDNGCLDDIRTHYDRLVDEYSLNAGKQRYEKMISGMYLGEIVRNILIDFTKKGFLFRGQISETLKTRGIFETKFLSQIESDRLALLQVRAILQQLGLNSTCDDSILVKTVCGVVSRRAAQLCGAGMAAVVDKIRENRGLDRLNVTVGVDGTLYKLHPHFSRIMHQTVKELSPKCNVSFLLSEDGSGKGAALITAVGVRLRTEASS

SEQ ID NO: 38178 - protein, 139 aa, Homo sapiens
  Payload ID: 7578
  Gene Symbol: HK1
  Gene Name: hexokinase 1
  ENSP ID: ENSP00000409761
MGQICQRESATAAEKPKLHLLAESEIDKYLYAMRLSDETLIDIMTRFRKEMKNGLSRDFNPTATVKMLPTFVRSIPDGSEKGDFIALDLGGSSFRILRVQVNHEKNQNVHMESEVYDTPENIVHGSGSQLFDHVAECLG

SEQ ID NO: 38179 - protein, 290 aa, Homo sapiens
  Payload ID: 7578
  Gene Symbol: HK1
  Gene Name: hexokinase 1
  ENSP ID: ENSP00000415949
MDCEHSLSLPCRGAEAWEIGIDKYLYAMRLSDETLIDIMTRFRKEMKNGLSRDFNPTATVKMLPTFVRSIPDGSEKGDFIALDLGGSSFRILRVQVNHEKNQNVHMESEVYDTPENIVHGSGSQLFDHVAECLGDFMEKRKIKDKKLPVGFTFSFPCQQSKIDEAILITWTKRFKASGVEGADVVKLLNKAIKKRGDYDANIVAVVNDTVGTMMTCGYDDQHCEVGLIIGTGTNACYMEELRHIDLVEGDEGRMCINTEWGAFGDDGSLEDIRTEFDREIDRGSLNPGKQ

SEQ ID NO: 38180 - protein, 917 aa, Homo sapiens
  Payload ID: 7579
  Gene Symbol: HK2
  Gene Name: hexokinase 2
  Uniprot ID: P52789
  ENSP ID: ENSP00000290573
MIASHLLAYFFTELNHDQVQKVDQYLYHMRLSDETLLEISKRFRKEMEKGLGATTHPTAAVKMLPTFVRSTPDGTEHGEFLALDLGGTNFRVLWVKVTDNGLQKVEMENQIYAIPEDIMRGSGTQLFDHIAECLANFMDKLQIKDKKLPLGFTFSFPCHQTKLDESFLVSWTKGFKSSGVEGRDVVALIRKAIQRRGDFDIDIVAVVNDTVGTMMTCGYDDHNCEIGLIVGTGSNACYMEEMRHIDMVEGDEGRMCINMEWGAFGDDGSLNDIRTEFDQEIDMGSLNPGKQLFEKMISGMYMGELVRLILVKMAKEELLFGGKLSPELLNTGRFETKDISDIEGEKDGIRKAREVLMRLGLDPTQEDCVATHRICQIVSTRSASLCAATLAAVLQRIKENKGEERLRSTIGVDGSVYKKHPHFAKRLHKTVRRLVPGCDVRFLRSEDGSGKGAAMVTAVAYRLADQHRARQKTLEHLQLSHDQLLEVKRRMKVEMERGLSKETHASAPVKMLPTYVCATPDGTEKGDFLALDLGGTNFRVLLVRVRNGKWGGVEMHNKIYAIPQEVMHGTGDELFDHIVQCIADFLEYMGMKGVSLPLGFTFSFPCQQNSLDESILLKWTKGFKASGCEGEDVVTLLKEAIHRREEFDLDVVAVVNDTVGTMMTCGFEDPHCEVGLIVGTGSNACYMEEMRNVELVEGEEGRMCVNMEWGAFGDNGCLDDFRTEFDVAVDELSLNPGKQRFEKMISGMYLGEIVRNILIDFTKRGLLFRGRISERLKTRGIFETKFLSQIESDCLALLQVRAILQHLGLESTCDDSIIVKEVCTVVARRAAQLCGAGMAAVVDRIRENRGLDALKVTVGVDGTLYKLHPHFAKVMHETVKDLAPKCDVSFLQSEDGSGKGAALITAVACRIREAGQR

SEQ ID NO: 38181 - protein, 889 aa, Homo sapiens
  Payload ID: 7579
  Gene Symbol: HK2
  Gene Name: hexokinase 2
  ENSP ID: ENSP00000387140
MRLSDETLLEISKRFRKEMEKGLGATTHPTAAVKMLPTFVRSTPDGTEHGEFLALDLGGTNFRVLWVKVTDNGLQKVEMENQIYAIPEDIMRGSGTQLFDHIAECLANFMDKLQIKDKKLPLGFTFSFPCHQTKLDESFLVSWTKGFKSSGVEGRDVVALIRKAIQRRGDFDIDIVAVVNDTVGTMMTCGYDDHNCEIGLIVGTGSNACYMEEMRHIDMVEGDEGRMCINMEWGAFGDDGSLNDIRTEFDQEIDMGSLNPGKQLFEKMISGMYMGELVRLILVKMAKEELLFGGKLSPELLNTGRFETKDISDIEGEKDGIRKAREVLMRLGLDPTQEDCVATHRICQIVSTRSASLCAATLAAVLQRIKENKGEERLRSTIGVDGSVYKKHPHFAKRLHKTVRRLVPGCDVRFLRSEDGSGKGAAMVTAVAYRLADQHRARQKTLEHLQLSHDQLLEVKRRMKVEMERGLSKETHASAPVKMLPTYVCATPDGTEKGDFLALDLGGTNFRVLLVRVRNGKWGGVEMHNKIYAIPQEVMHGTGDELFDHIVQCIADFLEYMGMKGVSLPLGFTFSFPCQQNSLDESILLKWTKGFKASGCEGEDVVTLLKEAIHRREEFDLDVVAVVNDTVGTMMTCGFEDPHCEVGLIVGTGSNACYMEEMRNVELVEGEEGRMCVNMEWGAFGDNGCLDDFRTEFDVAVDELSLNPGKQRFEKMISGMYLGEIVRNILIDFTKRGLLFRGRISERLKTRGIFETKFLSQIESDCLALLQVRAILQHLGLESTCDDSIIVKEVCTVVARRAAQLCGAGMAAVVDRIRENRGLDALKVTVGVDGTLYKLHPHFAKVMHETVKDLAPKCDVSFLQSEDGSGKGAALITAVACRIREAGQR

SEQ ID NO: 38182 - protein, 923 aa, Homo sapiens
  Payload ID: 7580
  Gene Symbol: HK3
  Gene Name: hexokinase 3 (white cell)
  Uniprot ID: P52790
  ENSP ID: ENSP00000292432
MDSIGSSGLRQGEETLSCSEEGLPGPSDSSELVQECLQQFKVTRAQLQQIQASLLGSMEQALRGQASPAPAVRMLPTYVGSTPHGTEQGDFVVLELGATGASLRVLWVTLTGIEGHRVEPRSQEFVIPQEVMLGAGQQLFDFAAHCLSEFLDAQPVNKQGLQLGFSFSFPCHQTGLDRSTLISWTKGFRCSGVEGQDVVQLLRDAIRRQGAYNIDVVAVVNDTVGTMMGCEPGVRPCEVGLVVDTGTNACYMEEARHVAVLDEDRGRVCVSVEWGSFSDDGALGPVLTTFDHTLDHESLNPGAQRFEKMIGGLYLGELVRLVLAHLARCGVLFGGCTSPALLSQGSILLEHVAEMEDPSTGAARVHAILQDLGLSPGASDVELVQHVCAAVCTRAAQLCAAALAAVLSCLQHSREQQTLQVAVATGGRVCERHPRFCSVLQGTVMLLAPECDVSLIPSVDGGGRGVAMVTAVAARLAAHRRLLEETLAPFRLNHDQLAAVQAQMRKAMAKGLRGEASSLRMLPTFVRATPDGSERGDFLALDLGGTNFRVLLVRVTTGVQITSEIYSIPETVAQGSGQQLFDHIVDCIVDFQQKQGLSGQSLPLGFTFSFPCRQLGLDQGILLNWTKGFKASDCEGQDVVSLLREAITRRQAVELNVVAIVNDTVGTMMSCGYEDPRCEIGLIVGTGTNACYMEELRNVAGVPGDSGRMCINMEWGAFGDDGSLAMLSTRFDASVDQASINPGKQRFEKMISGMYLGEIVRHILLHLTSLGVLFRGQQIQRLQTRDIFKTKFLSEIESDSLALRQVRAILEDLGLPLTSDDALMVLEVCQAVSQRAAQLCGAGVAAVVEKIRENRGLEELAVSVGVDGTLYKLHPRFSSLVAATVRELAPRCVVTFLQSEDGSGKGAALVTAVACRLAQLTRV

SEQ ID NO: 38183 - protein, 106 aa, Homo sapiens
  Payload ID: 7580
  Gene Symbol: HK3
  Gene Name: hexokinase 3 (white cell)
  ENSP ID: ENSP00000422169
LQQFKVTRAQLQQIQASLLGSMEQALRGQASPAPAVRMLPTYVGSTPHGTDFAGLRNLGSGQRALVLPAAWLSVTCLPSRARRLRGAGAGGHRGLTACFVGDSNWH

SEQ ID NO: 38184 - protein, 131 aa, Homo sapiens
  Payload ID: 7580
  Gene Symbol: HK3
  Gene Name: hexokinase 3 (white cell)
  ENSP ID: ENSP00000424632
GILLNWTKGFKASDCEGQDVVSLLREAITRRQAVELNVVAIVNDTVGTMMSCGYEDPRCEIGLIVASTLSGLSAGTGTNACYMEELRNVAGVPGDSGRMCINMEWGAFGDDGSLAMLSTRFDASVDQASIN

SEQ ID NO: 38185 - protein, 57 aa, Homo sapiens
  Payload ID: 7580
  Gene Symbol: HK3
  Gene Name: hexokinase 3 (white cell)
  ENSP ID: ENSP00000427000
TDFAGLRNLGSGQRALVLPAAWLSVTCLPSRARRLRGAGAGGHRGLTACFVGDSNWH

SEQ ID NO: 38186 - protein, 917 aa, Homo sapiens
  Payload ID: 7581
  Gene Symbol: HKDC1
  Gene Name: hexokinase domain containing 1
  Uniprot ID: Q2TB90
  ENSP ID: ENSP00000346643
MFAVHLMAFYFSKLKEDQIKKVDRFLYHMRLSDDTLLDIMRRFRAEMEKGLAKDTNPTAAVKMLPTFVRAIPDGSENGEFLSLDLGGSKFRVLKVQVAEEGKRHVQMESQFYPTPNEIIRGNGTELFEYVADCLADFMKTKDLKHKKLPLGLTFSFPCRQTKLEEGVLLSWTKKFKARGVQDTDVVSRLTKAMRRHKDMDVDILALVNDTVGTMMTCAYDDPYCEVGVIIGTGTNACYMEDMSNIDLVEGDEGRMCINTEWGAFGDDGALEDIRTEFDRELDLGSLNPGKQLFEKMISGLYLGELVRLILLKMAKAGLLFGGEKSSALHTKGKIETRHVAAMEKYKEGLANTREILVDLGLEPSEADCIAVQHVCTIVSFRSANLCAAALAAILTRLRENKKVERLRTTVGMDGTLYKIHPQYPKRLHKVVRKLVPSCDVRFLLSESGSTKGAAMVTAVASRVQAQRKQIDRVLALFQLTREQLVDVQAKMRAELEYGLKKKSHGLATVRMLPTYVCGLPDGTEKGKFLALDLGGTNFRVLLVKIRSGRRSVRMYNKIFAIPLEIMQGTGEELFDHIVQCIADFLDYMGLKGASLPLGFTFSFPCRQMSIDKGTLIGWTKGFKATDCEGEDVVDMLREAIKRRNEFDLDIVAVVNDTVGTMMTCGYEDPNCEIGLIAGTGSNMCYMEDMRNIEMVEGGEGKMCINTEWGGFGDNGCIDDIWTRYDTEVDEGSLNPGKQRYEKMTSGMYLGEIVRQILIDLTKQGLLFRGQISERLRTRGIFETKFLSQIESDRLALLQVRRILQQLGLDSTCEDSIVVKEVCGAVSRRAAQLCGAGLAAIVEKRREDQGLEHLRITVGVDGTLYKLHPHFSRILQETVKELAPRCDVTFMLSEDGSGKGAALITAVAKRLQQAQKEN

SEQ ID NO: 38187 - protein, 486 aa, Homo sapiens
  Payload ID: 7582
  Gene Symbol: HEXDC
  Gene Name: hexosaminidase (glycosyl hydrolase family 20, catalytic domain) containing
  Uniprot ID: Q8WVB3
  ENSP ID: ENSP00000332634
MSGSTPFQMRLVHLDLKGAPPKVSYLSEIFPLFRALGANGLLIEYEDMFPYEGPLRLLRAKYAYSPSEIKEILHLAGLNELEVIPLVQTFGHMEFVLKHTAFAHLREVGSFPCTLNPHEAESLALVGAMIDQVLELHPGAQRLHIGCDEVYYLGEGEASRRWLQQEQNSTGKLCLSHMRAVASGVKARRPSVTPLVWDDMLRDLPEDQLAASGVPQLVEPVLWDYTADLDVHGKVLLMQKYRRCGFPQLWAASAFKGATGPSQAVPPVEHHLRNHVQWLQVAGSGPTDSLQGIILTGWQRYDHYSVLCELLPAGVPSLAACLQLLLRGGFDEDVKAKVENLLGISSLEKTDPVREGAGSFPGSNILALVTQVSLHLRSSVDALLEGNRYVTGWFSPYHRQRKLIHPVMVQHIQPAALSLLAQWSTLVQELEAALQLAFYPDAVEEWLEENVHPSLQRLQALLQDLSEVSAPPLPPTSPGRDVAQDP

SEQ ID NO: 38188 - protein, 585 aa, Homo sapiens
  Payload ID: 7582
  Gene Symbol: HEXDC
  Gene Name: hexosaminidase (glycosyl hydrolase family 20, catalytic domain) containing
  Uniprot ID: Q8WVB3
  ENSP ID: ENSP00000337854
MSGSTPFQMRLVHLDLKGAPPKVSYLSEIFPLFRALGANGLLIEYEDMFPYEGPLRLLRAKYAYSPSEIKEILHLAGLNELEVIPLVQTFGHMEFVLKHTAFAHLREVGSFPCTLNPHEAESLALVGAMIDQVLELHPGAQRLHIGCDEVYYLGEGEASRRWLQQEQNSTGKLCLSHMRAVASGVKARRPSVTPLVWDDMLRDLPEDQLAASGVPQLVEPVLWDYTADLDVHGKVLLMQKYRRCGFPQLWAASAFKGATGPSQAVPPVEHHLRNHVQWLQVAGSGPTDSLQGIILTGWQRYDHYSVLCELLPAGVPSLAACLQLLLRGGFDEDVKAKVENLLGISSLEKTDPVRQAPCSPPCPLLPLPFPRPWRQLFSAGLSAGRGPAPSLAATSLPLSHKSASICAALWMRCWRATGMSLAGSAPTTASGSSSTRSWFSTSSPQRSASWHSGAPSCRSWRLPCSWLSTRMPWRSGWRKTCTPACSGCKLCCRTSARCLPPRCHPPALAGTLLRTPEGRAHARGLLLEAGGALHCQMAWAIRAHVGVVPSGPAVSCPHSVPEGPGQPLGERLENTEGSSTGRPAL

SEQ ID NO: 38189 - protein, 214 aa, Homo sapiens
  Payload ID: 7582
  Gene Symbol: HEXDC
  Gene Name: hexosaminidase (glycosyl hydrolase family 20, catalytic domain) containing
  ENSP ID: ENSP00000462000
HGKVLLMQKYRRCGFPQLWAASAFKGATGPSQAVPPVEHHLRNHVQWLQVAGSGPTDSLQGIILTGWQRYDHYSVLCELLPAGVPSLAACLQLLLRGGFDEDVKAKVENLLGISSLEKTDPVSPYHRQRKLIHPVMVQHIQPAALSLLAQWSTLVQELEAALQLAFYPDAVEEWLEENVHPSLQRLQALLQDLSEVSAPPLPPTSPGRDVAQDP

SEQ ID NO: 38190 - protein, 76 aa, Homo sapiens
  Payload ID: 7582
  Gene Symbol: HEXDC
  Gene Name: hexosaminidase (glycosyl hydrolase family 20, catalytic domain) containing
  ENSP ID: ENSP00000462303
GLLIEYEDMFPYEGPLRLLRAKYAYRLECSGAILAHRELCLPGSSDSPASASRVAGITAPLKSKRSCIWLDSMSWR

SEQ ID NO: 38191 - protein, 117 aa, Homo sapiens
  Payload ID: 7582
  Gene Symbol: HEXDC
  Gene Name: hexosaminidase (glycosyl hydrolase family 20, catalytic domain) containing
  ENSP ID: ENSP00000462856
MEFVLKHTAFAHLREVGSFPCTLNPHEAESLALVGAMIDQVLELHPGAQRLHIGCDEVYYLGEGEASRRWLQQEQNSTGKLCLSHMRAVASGVKARRPSVTPLVWDDMLRDLPEDQL

SEQ ID NO: 38192 - protein, 47 aa, Homo sapiens
  Payload ID: 7582
  Gene Symbol: HEXDC
  Gene Name: hexosaminidase (glycosyl hydrolase family 20, catalytic domain) containing
  ENSP ID: ENSP00000462923
MSGSTPFQMRLVHLDLKGAPPKVSYLSEAGVQWCDLGSPRTLPPGFK

SEQ ID NO: 38193 - protein, 544 aa, Homo sapiens
  Payload ID: 7582
  Gene Symbol: HEXDC
  Gene Name: hexosaminidase (glycosyl hydrolase family 20, catalytic domain) containing
  ENSP ID: ENSP00000463129
MSGSTPFQMRLVHLDLKGAPPKVSYLSEIFPLFRALGANGLLIEYEDMFPYEGPLRLLRAKYAYSPSEIKEILHLAGLNELEVIPLVQTFGHMEFVLKHTAFAHLREVGSFPCTLNPHEAESLALVGAMIDQVLELHPGAQRLHIGCDEVYYLGEGEASRRWLQQEQNSTGKLCLSHMRAVASGVKARRPSVTPLVWDDMLRDLPEDQLAASGVPQLVEPVLWDYTADLDVHGKVLLMQKYRRCGFPQLWAASAFKGATGPSQAVPPVEHHLRNHVQWLQVAGSGPTDSLQGIILTGWQRYDHYSVLCELLPAGVPSLAACLQLLLRGGFDEDVKAKVENLLGISSLEKTDPGSPQGGGRLLPWQQHPCPCHTSQPPSAQLCGCAAGGQQVCHWLVQPLPPPAEAHPPGHGSAHPARSAQPPGTVEHPRAGAGGCPAAGFLPGCRGGVAGGKRAPQPAAAASSAAGPQRGVCPPAATHQPWQGRCSGPLRGELMPGGSCWRLGGLCTAKWPGQYGPTWASCPLAQQCLAHTQFLRALGSPWGRD

SEQ ID NO: 38194 - protein, 88 aa, Homo sapiens
  Payload ID: 7582
  Gene Symbol: HEXDC
  Gene Name: hexosaminidase (glycosyl hydrolase family 20, catalytic domain) containing
  ENSP ID: ENSP00000463241
AASAFKGATGPSQAVPPVEHHLRNHVQWLQVAGSGPTDSLQGIILTGWQRYDHYSVLCELLPAGVPSLAACLQLLLRVSLAHGPIRHP

SEQ ID NO: 38195 - protein, 78 aa, Homo sapiens
  Payload ID: 7582
  Gene Symbol: HEXDC
  Gene Name: hexosaminidase (glycosyl hydrolase family 20, catalytic domain) containing
  ENSP ID: ENSP00000463625
MFPYEGPLRLLRAKYAYSPSEIKEILHLAGLNELEVIPLVQTFGHMEFVLKHTAFAHLREVGSFPCTLNPHEAESLAL

SEQ ID NO: 38196 - protein, 46 aa, Homo sapiens
  Payload ID: 7582
  Gene Symbol: HEXDC
  Gene Name: hexosaminidase (glycosyl hydrolase family 20, catalytic domain) containing
  ENSP ID: ENSP00000464497
MSGSTPFQMRLVHLDLKGAPPKVSYLSEVQTASSLSMKTCFPTRAL

SEQ ID NO: 38197 - protein, 361 aa, Homo sapiens
  Payload ID: 7582
  Gene Symbol: HEXDC
  Gene Name: hexosaminidase (glycosyl hydrolase family 20, catalytic domain) containing
  ENSP ID: ENSP00000464912
  MOD_RES (1)..(1): Any amino acid
XLHIGCDEVYYLGEGEASRRWLQQEQNSTGKLCLSHMRAVASGVKARRPSVTPLVWDDMLRDLPEDQLAASGVPQLVEPVLWDYTADLDVHGKVLLMQKYRRCGFPQLWAASAFKGATGPSQAVPPVEHHLRNHVQWLQVAGSGPTDSLQGIILTGWQRYDHYSVLCELLPAGVPSLAACLQLLLRGMSGLATPSPTGPSPKDPEGRRPSTQCSNHPAGLWWSSQSEDGLTAPAQPPTCPEVHPGWACVWVSRPKPKAGWRVTREAPLRHSESAEMHAGRRWGTAPPLLHTRPAHLAEQVWGSGARPWKAPHPGPSTHTSRSPEGAAGPMGRGRHRGTPWGRQGAWPEELCVWKLAGHTGN

SEQ ID NO: 38198 - protein, 80 aa, Homo sapiens
  Payload ID: 7582
  Gene Symbol: HEXDC
  Gene Name: hexosaminidase (glycosyl hydrolase family 20, catalytic domain) containing
  ENSP ID: ENSP00000465465
  MOD_RES (1)..(1): Any amino acid
XGTAPPLLHTRPAHLAEQVWGSGARPWKAPHPGPSTHTSRSPEGAAGPMGRGRHRGTPWGRQGAWPEELCVWKLAGHTGN

SEQ ID NO: 38199 - protein, 529 aa, Homo sapiens
  Payload ID: 7583
  Gene Symbol: HEXA
  Gene Name: hexosaminidase A (alpha polypeptide)
  Uniprot ID: P06865
  ENSP ID: ENSP00000268097
MTSSRLWFSLLLAAAFAGRATALWPWPQNFQTSDQRYVLYPNNFQFQYDVSSAAQPGCSVLDEAFQRYRDLLFGSGSWPRPYLTGKRHTLEKNVLVVSVVTPGCNQLPTLESVENYTLTINDDQCLLLSETVWGALRGLETFSQLVWKSAEGTFFINKTEIEDFPRFPHRGLLLDTSRHYLPLSSILDTLDVMAYNKLNVFHWHLVDDPSFPYESFTFPELMRKGSYNPVTHIYTAQDVKEVIEYARLRGIRVLAEFDTPGHTLSWGPGIPGLLTPCYSGSEPSGTFGPVNPSLNNTYEFMSTFFLEVSSVFPDFYLHLGGDEVDFTCWKSNPEIQDFMRKKGFGEDFKQLESFYIQTLLDIVSSYGKGYVVWQEVFDNKVKIQPDTIIQVWREDIPVNYMKELELVTKAGFRALLSAPWYLNRISYGPDWKDFYIVEPLAFEGTPEQKALVIGGEACMWGEYVDNTNLVPRLWPRAGAVAERLWSNKLTSDLTFAYERLSHFRCELLRRGVQAQPLNVGFCEQEFEQT

SEQ ID NO: 38200 - protein, 540 aa, Homo sapiens
  Payload ID: 7583
  Gene Symbol: HEXA
  Gene Name: hexosaminidase A (alpha polypeptide)
  ENSP ID: ENSP00000455114
MTSSRLWFSLLLAAAFAGRATALWPWPQNFQTSDQRYVLYPNNFQFQYDVSSAAQPGCSVLDEAFQRYRDLLFGSGSWPRPYLTGWPHQAYPVFLGKRHTLEKNVLVVSVVTPGCNQLPTLESVENYTLTINDDQCLLLSETVWGALRGLETFSQLVWKSAEGTFFINKTEIEDFPRFPHRGLLLDTSRHYLPLSSILDTLDVMAYNKLNVFHWHLVDDPSFPYESFTFPELMRKGSYNPVTHIYTAQDVKEVIEYARLRGIRVLAEFDTPGHTLSWGPGIPGLLTPCYSGSEPSGTFGPVNPSLNNTYEFMSTFFLEVSSVFPDFYLHLGGDEVDFTCWKSNPEIQDFMRKKGFGEDFKQLESFYIQTLLDIVSSYGKGYVVWQEVFDNKVKIQPDTIIQVWREDIPVNYMKELELVTKAGFRALLSAPWYLNRISYGPDWKDFYIVEPLAFEGTPEQKALVIGGEACMWGEYVDNTNLVPRLWPRAGAVAERLWSNKLTSDLTFAYERLSHFRCELLRRGVQAQPLNVGFCEQEFEQT

SEQ ID NO: 38201 - protein, 143 aa, Homo sapiens
  Payload ID: 7583
  Gene Symbol: HEXA
  Gene Name: hexosaminidase A (alpha polypeptide)
  ENSP ID: ENSP00000455545
MTSSRLWFSLLLAAAFAGRATALWPWPQNFQTSDQRYVLYPNNFQFQYDVSSAAQPGCSVLDEAFQRYRDLLFGSGSWPRPYLTGKRHTLEKNVLVVSVVTPGCNQLPTLESVENYTLTINDDQCLLLSETVWGALRVLYQQD

SEQ ID NO: 38202 - protein, 88 aa, Homo sapiens
  Payload ID: 7583
  Gene Symbol: HEXA
  Gene Name: hexosaminidase A (alpha polypeptide)
  ENSP ID: ENSP00000456346
MTSSRLWFSLLLAAAFAGRATALWPWPQNFQTSDQRYVLYPNNFQFQYDVSSAAQPGCSVLDEAFQRYRDLLFGSGSWPRPYLTANMY

SEQ ID NO: 38203 - protein, 509 aa, Homo sapiens
  Payload ID: 7583
  Gene Symbol: HEXA
  Gene Name: hexosaminidase A (alpha polypeptide)
  ENSP ID: ENSP00000456489
MTSSRLWFSLLLAAAFAGRATALWPWPQNFQTSDQRYVLYPNNFQFQYDVSSAAQPGCSVLDEAFQRYRDLLFGSGSWPRPYLTGKRHTLEKNVLVVSVVTPGCNQLPTLESVENYTLTINDDQCLLLSETVWGALRGLETFSQLVWKSAEGTFFINKTEIEDFPRFPHRGLLLDTSRHYLPLSSILDTLDVMAYNKLNVFHWHLVDDPSFPYESFTFPELMRKGSYNPVTHIYTAQDVKEVIEYARLRGIRVLAEFDTPGHTLSWGPGIPGLLTPCYSGSEPSGTFGPVNPSLNNTYEFMSTFFLEVSSVFPDFYLHLGGDEVDFTCWKSNPEIQDFMRKKGFGEDFKQLESFYIQTLLDIVSSYGKGYVVWQEVFDNKVKIQPDTIIQVWREDIPVNYMKELELVTKAGFRALLSAPWYLNRISYGPDWKDFYIVEPLAFEGTPEQKALVIGGEACMWGEYVDNTNLVPRLWPRAGAVAERLWSNKLTSDLTFAYERLSHFRCELLR

SEQ ID NO: 38204 - protein, 143 aa, Homo sapiens
  Payload ID: 7583
  Gene Symbol: HEXA
  Gene Name: hexosaminidase A (alpha polypeptide)
  ENSP ID: ENSP00000457037
MTSSRLWFSLLLAAAFAGRATALWPWPQNFQTSDQRYVLYPNNFQFQYDVSSAAQPGCSVLDEAFQRYRDLLFGSGSWPRPYLTGKRHTLEKNVLVVSVVTPGCNQLPTLESVENYTLTINDDQCLLLSETVWGALRGCHGVQ

SEQ ID NO: 38205 - protein, 373 aa, Homo sapiens
  Payload ID: 7583
  Gene Symbol: HEXA
  Gene Name: hexosaminidase A (alpha polypeptide)
  ENSP ID: ENSP00000457125
MTSSRLWFSLLLAAAFAGRATALWPWPQNFQTSDQRYVLYPNNFQFQYDVSSAAQPGCSVLDEAFQRYRDLLFGSGSWPRPYLTGKRHTLEKNVLVVSVVTPGCNQLPTLESVENYTLTINDDQCLLLSETVWGALRGLETFSQLVWKSAEGTFFINKTEIEDFPRFPHRGLLLDTSRHYLPLSSILDTLDVMAYNKLNVFHWHLVDDPSFPYESFTFPELMRKGSYNPVTHIYTAQDVKEVIEYARLRGIRVLAEFDTPGHTLSWGPGIPGLLTPCYSGSEPSGTFGPVNPSLNNTYEFMSTFFLEVSSVFPDFYLHLGGDEVDFTCWKSNPEIQDFMRKKGFGEDFKQLESFYIQTFSQTQSYRCGERIFQ

SEQ ID NO: 38206 - protein, 318 aa, Homo sapiens
  Payload ID: 7583
  Gene Symbol: HEXA
  Gene Name: hexosaminidase A (alpha polypeptide)
  ENSP ID: ENSP00000457521
  MOD_RES (1)..(1): Any amino acid
XFQFQYDVSSAAQPGCSVLDEAFQRYRDLLFGSGSWPRPYLTGKRHTLEKNVLVVSVVTPGCNQLPTLESVENYTLTINDDQCLLLSETVWGALRGLETFSQLVWKSAEGTFFINKTEIEDFPRFPHRGLLLDTSRHYLPLSSILDTLDVMAYNKLNVFHWHLVDDPSFPYESFTFPELMRKGSYNPVTHIYTAQDVKEVIEYARLRGIRVLAEFDTPGHTLSWGPGIPGLLTPCYSGSEPSGTFGPVNPSLNNTYEFMSTFFLEVSSVFPDFYLHLGGDEVDFTCWKSNPEIQDFMRKKGFGEDFKQLESFYIQTYP

SEQ ID NO: 38207 - protein, 128 aa, Homo sapiens
  Payload ID: 7583
  Gene Symbol: HEXA
  Gene Name: hexosaminidase A (alpha polypeptide)
  ENSP ID: ENSP00000458128
  MOD_RES (1)..(1): Any amino acid
XFSLLLAAAFAGRATALWPWPQNFQTSDQRYVLYPNNFQFQYDVSSAAQPGCSVLDEAFQRYRDLLFGSGSWPRPYLTGKRHTLEKNVLVVSVVTPGCNQLPTLESVENCIPVPFARRRLLSSFCCGN

SEQ ID NO: 38208 - protein, 119 aa, Homo sapiens
  Payload ID: 7583
  Gene Symbol: HEXA
  Gene Name: hexosaminidase A (alpha polypeptide)
  ENSP ID: ENSP00000478217
MTSSRLWFSLLLAAAFAGRATALWPWPQNFQTSDQRYVLYPNNFQFQYDVSSAAQPGCSVLDEAFQRYRDLLFGSGSWPRPYLTGLSLSFRLECSGVITAYSNLELQDSSSLPASLMSS

SEQ ID NO: 38209 - protein, 556 aa, Homo sapiens
  Payload ID: 7584
  Gene Symbol: HEXB
  Gene Name: hexosaminidase B (beta polypeptide)
  Uniprot ID: P07686
  ENSP ID: ENSP00000261416
MELCGLGLPRPPMLLALLLATLLAAMLALLTQVALVVQVAEAARAPSVSAKPGPALWPLPLLVKMTPNLLHLAPENFYISHSPNSTAGPSCTLLEEAFRRYHGYIFGFYKWHHEPAEFQAKTQVQQLLVSITLQSECDAFPNISSDESYTLLVKEPVAVLKANRVWGALRGLETFSQLVYQDSYGTFTINESTIIDSPRFSHRGILIDTSRHYLPVKIILKTLDAMAFNKFNVLHWHIVDDQSFPYQSITFPELSNKGSYSLSHVYTPNDVRMVIEYARLRGIRVLPEFDTPGHTLSWGKGQKDLLTPCYSRQNKLDSFGPINPTLNTTYSFLTTFFKEISEVFPDQFIHLGGDEVEFKCWESNPKIQDFMRQKGFGTDFKKLESFYIQKVLDIIATINKGSIVWQEVFDDKAKLAPGTIVEVWKDSAYPEELSRVTASGFPVILSAPWYLDLISYGQDWRKYYKVEPLDFGGTQKQKQLFIGGEACLWGEYVDATNLTPRLWPRASAVGERLWSSKDVRDMDDAYDRLTRHRCRMVERGIAAQPLYAGYCNHENM

SEQ ID NO: 38210 - protein, 202 aa, Homo sapiens
  Payload ID: 7584
  Gene Symbol: HEXB
  Gene Name: hexosaminidase B (beta polypeptide)
  ENSP ID: ENSP00000423713
  MOD_RES (1)..(1): Any amino acid
XNTTYSFLTTFFKEISEVFPDQFIHLGGDEVEFKCWVLDIIATINKGSIVWQEVFDDKAKLAPGTIVEVWKDSAYPEELSRVTASGFPVILSAPWYLDLISYGQDWRKYYKVEPLDFGGTQKQKQLFIGGEACLWGEYVDATNLTPRLWPRASAVGERLWSSKDVRDMDDAYDRLTRHRCRMVERGIAAQPLYAGYCNHENM

SEQ ID NO: 38211 - protein, 52 aa, Homo sapiens
  Payload ID: 7584
  Gene Symbol: HEXB
  Gene Name: hexosaminidase B (beta polypeptide)
  ENSP ID: ENSP00000424550
  MOD_RES (1)..(1): Any amino acid
XDATNLTPRLWPRASAVGERLWSSKDVRDMDDAYDRLTRHRCRMVEGLASFL

SEQ ID NO: 38212 - protein, 35 aa, Homo sapiens
  Payload ID: 7584
  Gene Symbol: HEXB
  Gene Name: hexosaminidase B (beta polypeptide)
  ENSP ID: ENSP00000424939
MDDAYDRLTRHRCRMVERGIAAQPLYAGYCNHENM

SEQ ID NO: 38213 - protein, 331 aa, Homo sapiens
  Payload ID: 7584
  Gene Symbol: HEXB
  Gene Name: hexosaminidase B (beta polypeptide)
  ENSP ID: ENSP00000426285
MAFNKFNVLHWHIVDDQSFPYQSITFPELSNKGSYSLSHVYTPNDVRMVIEYARLRGIRVLPEFDTPGHTLSWGKGQKDLLTPCYSRQNKLDSFGPINPTLNTTYSFLTTFFKEISEVFPDQFIHLGGDEVEFKCWESNPKIQDFMRQKGFGTDFKKLESFYIQKVLDIIATINKGSIVWQEVFDDKAKLAPGTIVEVWKDSAYPEELSRVTASGFPVILSAPWYLDLISYGQDWRKYYKVEPLDFGGTQKQKQLFIGGEACLWGEYVDATNLTPRLWPRASAVGERLWSSKDVRDMDDAYDRLTRHRCRMVERGIAAQPLYAGYCNHENM

SEQ ID NO: 38214 - protein, 170 aa, Homo sapiens
  Payload ID: 7584
  Gene Symbol: HEXB
  Gene Name: hexosaminidase B (beta polypeptide)
  ENSP ID: ENSP00000426384
  MOD_RES (1)..(1): Any amino acid
XFGTDFKKLESFYIQKVLDIIATINKGSIVWQEVFDDKAKLAPGTIVEVWKDSAYPEELSRVTASGFPVILSAPWYLDLISYGQDWRKYYKVEPLDFGGTQKQKQLFIGGEACLWGEYVDATNLTPRLWPRASAVGERLWSSKDVRDMDDAYDRLTRHRCRMVEGLASFL

SEQ ID NO: 38215 - protein, 791 aa, Homo sapiens
  Payload ID: 7585
  Gene Symbol: H6PD
  Gene Name: hexose-6-phosphate dehydrogenase (glucose 1-dehydrogenase)
  Uniprot ID: O95479
  ENSP ID: ENSP00000366620
MWNMLIVAMCLALLGCLQAQELQGHVSIILLGATGDLAKKYLWQGLFQLYLDEAGRGHSFSFHGAALTAPKQGQELMAKALESLSCPKDMAPSHCAEHKDQFLQLSQYRQLKTAEDYQALNKDIEAQLQHAGLREAGRIFYFSVPPFAYEDIARNINSSCRPGPGAWLRVVLEKPFGHDHFSAQQLATELGTFFQEEEMYRVDHYLGKQAVAQILPFRDQNRKALDGLWNRHHVERVEIIMKETVDAEGRTSFYEEYGVIRDVLQNHLTEVLTLVAMELPHNVSSAEAVLRHKLQVFQALRGLQRGSAVVGQYQSYSEQVRRELQKPDSFHSLTPTFAAVLVHIDNLRWEGVPFILMSGKALDERVGYARILFKNQACCVQSEKHWAAAQSQCLPRQLVFHIGHGDLGSPAVLVSRNLFRPSLPSSWKEMEGPPGLRLFGSPLSDYYAYSPVRERDAHSVLLSHIFHGRKNFFITTENLLASWNFWTPLLESLAHKAPRLYPGGAENGRLLDFEFSSGRLFFSQQQPEQLVPGPGPAPMPSDFQVLRAKYRESPLVSAWSEELISKLANDIEATAVRAVRRFGQFHLALSGGSSPVALFQQLATAHYGFPWAHTHLWLVDERCVPLSDPESNFQGLQAHLLQHVRIPYYNIHPMPVHLQQRLCAEEDQGAQIYAREISALVANSSFDLVLLGMGADGHTASLFPQSPTGLDGEQLVVLTTSPSQPHRRMSLSLPLINRAKKVAVLVMGRMKREITTLVSRVGHEPKKWPISGVLPHSGQLVWYMDYDAFLG

SEQ ID NO: 38216 - protein, 802 aa, Homo sapiens
  Payload ID: 7585
  Gene Symbol: H6PD
  Gene Name: hexose-6-phosphate dehydrogenase (glucose 1-dehydrogenase)
  ENSP ID: ENSP00000473348
MLAEPFNWHPGMWNMLIVAMCLALLGCLQAQELQGHVSIILLGATGDLAKKYLWQGLFQLYLDEAGRGHSFSFHGAALTAPKQGQELMAKALESLSCPKDMAPSHCAEHKDQFLQLSQYRQLKTAEDYQALNKDIEAQLQHAGLREAGRIFYFSVPPFAYEDIARNINSSCRPGPGAWLRVVLEKPFGHDHFSAQQLATELGTFFQEEEMYRVDHYLGKQAVAQILPFRDQNRKALDGLWNRHHVERVEIIMKETVDAEGRTSFYEEYGVIRDVLQNHLTEVLTLVAMELPHNVSSAEAVLRHKLQVFQALRGLQRGSAVVGQYQSYSEQVRRELQKPDSFHSLTPTFAAVLVHIDNLRWEGVPFILMSGKALDERVGYARILFKNQACCVQSEKHWAAAQSQCLPRQLVFHIGHGDLGSPAVLVSRNLFRPSLPSSWKEMEGPPGLRLFGSPLSDYYAYSPVRERDAHSVLLSHIFHGRKNFFITTENLLASWNFWTPLLESLAHKAPRLYPGGAENGRLLDFEFSSGRLFFSQQQPEQLVPGPGPAPMPSDFQVLRAKYRESPLVSAWSEELISKLANDIEATAVRAVRRFGQFHLALSGGSSPVALFQQLATAHYGFPWAHTHLWLVDERCVPLSDPESNFQGLQAHLLQHVRIPYYNIHPMPVHLQQRLCAEEDQGAQIYAREISALVANSSFDLVLLGMGADGHTASLFPQSPTGLDGEQLVVLTTSPSQPHRRMSLSLPLINRAKKVAVLVMGRMKREITTLVSRVGHEPKKWPISGVLPHSGQLVWYMDYDAFLG

SEQ ID NO: 38217 - protein, 1435 aa, Homo sapiens
  Payload ID: 7586
  Gene Symbol: HFM1
  Gene Name: HFM1, ATP-dependent DNA helicase homolog
  Uniprot ID: A2PYH4
  ENSP ID: ENSP00000359454
MLKSNDCLFSLENLFFEKPDEVENHPDNEKSLDWFLPPAPLISEIPDTQELEEELESHKLLGQEKRPKMLTSNLKITNEDTNYISLTQKFQFAFPSDKYEQDDLNLEGVGNNDLSHIAGKLTYASQKYKNHIGTEIAPEKSVPDDTKLVNFAEDKGESTSVFRKRLFKISDNIHGSAYSNDNELDSHIGSVKIVQTEMNKGKSRNYSNSKQKFQYSANVFTANNAFSASEIGEGMFKAPSFSVAFQPHDIQEVTENGLGSLKAVTEIPAKFRSIFKEFPYFNYIQSKAFDDLLYTDRNFVICAPTGSGKTVVFELAITRLLMEVPLPWLNIKIVYMAPIKALCSQRFDDWKEKFGPIGLNCKELTGDTVMDDLFEIQHAHIIMTTPEKWDSMTRKWRDNSLVQLVRLFLIDEVHIVKDENRGPTLEVVVSRMKTVQSVSQTLKNTSTAIPMRFVAVSATIPNAEDIAEWLSDGERPAVCLKMDESHRPVKLQKVVLGFPCSSNQTEFKFDLTLNYKIASVIQMYSDQKPTLVFCATRKGVQQAASVLVKDAKFIMTVEQKQRLQKYAYSVRDSKLRDILKDGAAYHHAGMELSDRKVVEGAFTVGDLPVLFTTSTLAMGVNLPAHLVVIKSTMHYAGGLFEEYSETDILQMIGRAGRPQFDTTATAVIMTRLSTRDKYIQMLACRDTVESSLHRHLIEHLNAEIVLHTITDVNIAVEWIRSTLLYIRALKNPSHYGFASGLNKDGIEAKLQELCLKNLNDLSSLDLIKMDEGVNFKPTEAGRLMAWYYITFETVKKFYTISGKETLSDLVTLIAGCKEFLDIQLRINEKKTLNTLNKDPNRITIRFPMEGRIKTREMKVNCLIQAQLGCIPIQDFALTQDTAKIFRHGSRITRWLSDFVAAQEKKFAVLLNSLILAKCFRCKLWENSLHVSKQLEKIGITLSNAIVNAGLTSFKKIEETDARELELILNRHPPFGTQIKETVMYLPKYELKVEQITRYSDTTAEILVTVILRNFEQLQTKRTASDSHYVTLIIGDADNQVVYLHKITDSVLLKAGSWAKKIAVKRALKSEDLSINLISSEFVGLDIQQKLTVFYLEPKRFGNQITMQRKSETQISHSKHSDISTIAGPNKGTTASKKPGNRECNHLCKSKHTCGHDCCKIGVAQKSEIKESTISSYLSDLRNRNAVSSVPPVKRLKIQMNKSQSVDLKEFGFTPKPSLPSISRSEYLNISELPIMEQWDQPEIYGKVRQEPSEYQDKEVLNVNFELGNEVWDDFDDENLEVTSFSTDTEKTKISGFGNTLSSSTRGSKLPLQESKSKFQREMSNSFVSSHEMSDISLSNSAMPKFSASSMTKLPQQAGNAVIVHFQERKPQNLSPEIEKQCFTFSEKNPNSSNYKKVDFFIRNSECKKEVDFSMYHPDDEADEMKSLLGIFDGIF

SEQ ID NO: 38218 - protein, 625 aa, Homo sapiens
  Payload ID: 7586
  Gene Symbol: HFM1
  Gene Name: HFM1, ATP-dependent DNA helicase homolog
  ENSP ID: ENSP00000387661
  MOD_RES (1)..(1): Any amino acid
XIEAKLQELCLKNLNDLSSLDLIKMDEGVNFKPTEAGRLMAWYYITFETVKKFYTISGKETLSDLVTLIAGCKEFLDIQLRINEKKTLNTLNKDPNRITIRFPMEGRIKTREMKVNCLIQAQLGCIPIQDFALTQDTAKIFRHGSRITRCITLSNAIVNAGLTSFKKIEETDARELELILNRHPPFGTQIKETVMYLPKYELKVEQITRYSDTTAEILVTVILRNFEQLQTKRTASDSHYVTLIIGDADNQVVYLHKITDSVLLKAGSWAKKIAVKRALKSEDLSINLISSEFVGLDIQQKLTVFYLEPKRFGNQITMQRKSETQISHSKHSDISTIAGPNKGTTASKKPGNRECNHLCKSKHTCGHDCCKIGVAQKSEIKESTISSYLSDLRNRNAVSSVPPVKRLKIQMNKSQSVDLKEFGFTPKPSLPSISRSEYLNISELPIMEQWDQPEIYGKVRQEPSEYQDKEVLNVNFELGNEVWDDFDDENLEVTSFSTDTEKTKISGFGNTLSSSTRGSKLPLQESKSKFQREMSNSFVSSHEMSDISLSNSAMPKFSASSMTKLPQQAGNAVIVHFQERKPQNLSPEIEKQCFTFSEKNPNSSNYKKVDFFIRNSECKKEVDFR

SEQ ID NO: 38219 - protein, 196 aa, Homo sapiens
  Payload ID: 7586
  Gene Symbol: HFM1
  Gene Name: HFM1, ATP-dependent DNA helicase homolog
  ENSP ID: ENSP00000388900
MIACFLWKICFLKNQMKLKSQEKRPKMLTSNLKITNEDTNYISLTQKFQFAFPSDKYEQDDLNLEGVGNNDLSHIAGKLTYASQKYKNHIGTEIAPEKSVPDDTKLVNFAEDKGESTSVFRKRLFKISDNIHGSAYSNDNELDSHIGSVKIVQTEMNKGKSRNYSNSKQKFQYSANVFTANNAFSASEIGEGMFKA

SEQ ID NO: 38220 - protein, 151 aa, Homo sapiens
  Payload ID: 7586
  Gene Symbol: HFM1
  Gene Name: HFM1, ATP-dependent DNA helicase homolog
  ENSP ID: ENSP00000397369
MLKSNDCLFSLENLFFEKPDEVEKLFKISDNIHGSAYSNDNELDSHIGSVKIVQTEMNKGKSRNYSNSKQKFQYSANVFTANNAFSASEIGEGMFKAPSFSVAFQPHDIQEVTENGLGSLKAVTEIPAKFRSIFKEFPYFNYIQSKAFDDL

SEQ ID NO: 38221 - protein, 138 aa, Homo sapiens
  Payload ID: 7586
  Gene Symbol: HFM1
  Gene Name: HFM1, ATP-dependent DNA helicase homolog
  ENSP ID: ENSP00000409827
MLKSNDCLFSLENLFFEKPDEVENHPDNEKSLDWFLPPAPLISEIPDTQELEEELESHKLLGQEKRPKMLTSNLKITNEDTNYISLTQKFQFAFPSDKYEQDDLNLEGVGNNDLSHIAGKLTYASQKYKNHIGTEIAP

SEQ ID NO: 38222 - protein, 655 aa, Homo sapiens
  Payload ID: 7587
  Gene Symbol: HGFAC
  Gene Name: HGF activator
  Uniprot ID: Q04756
  ENSP ID: ENSP00000372224
MGRWAWVPSPWPPPGLGPFLLLLLLLLLLPRGFQPQPGGNRTESPEPNATATPAIPTILVTSVTSETPATSAPEAEGPQSGGLPPPPRAVPSSSSPQAQALTEDGRPCRFPFRYGGRMLHACTSEGSAHRKWCATTHNYDRDRAWGYCVEATPPPGGPAALDPCASGPCLNGGSCSNTQDPQSYHCSCPRAFTGKDCGTEKCFDETRYEYLEGGDRWARVRQGHVEQCECFGGRTWCEGTRHTACLSSPCLNGGTCHLIVATGTTVCACPPGFAGRLCNIEPDERCFLGNGTGYRGVASTSASGLSCLAWNSDLLYQELHVDSVGAAALLGLGPHAYCRNPDNDERPWCYVVKDSALSWEYCRLEACESLTRVQLSPDLLATLPEPASPGRQACGRRHKKRTFLRPRIIGGSSSLPGSHPWLAAIYIGDSFCAGSLVHTCWVVSAAHCFSHSPPRDSVSVVLGQHFFNRTTDVTQTFGIEKYIPYTLYSVFNPSDHDLVLIRLKKKGDRCATRSQFVQPICLPEPGSTFPAGHKCQIAGWGHLDENVSGYSSSLREALVPLVADHKCSSPEVYGADISPNMLCAGYFDCKSDACQGDSGGPLACEKNGVAYLYGIISWGDGCGRLHKPGVYTRVANYVDWINDRIRPPRRLVAPS

SEQ ID NO: 38223 - protein, 662 aa, Homo sapiens
  Payload ID: 7587
  Gene Symbol: HGFAC
  Gene Name: HGF activator
  ENSP ID: ENSP00000421801
MGRWAWVPSPWPPPGLGPFLLLLLLLLLLPRGFQPQPGGNRTESPEPNATATPAIPTILVTSVTSETPATSAPEAEGPQSGGLPPPPRAVPSSSSPQAQALTEDGRPCRFPFRYGGRMLHACTSEGSAHRKWCATTHNYDRDRAWGYCVEATPPPGGPAALDPCASGPCLNGGSCSNTQDPQSYHCSCPRAFTGKDCGTEKCFDETRYEYLEGGDRWARVRQGHVEQCECFGGRTWCEGTRHTACLSSPCLNGGTCHLIVATGTTVCACPPGFAGRLCNIEPDERCFLGNGTGYRGVASTSASGLSCLAWNSDLLYQELHVDSVGAAALLGLGPHAYCRNPDNDERPWCYVVKDSALSWEYCRLEACDLETEGRESLTRVQLSPDLLATLPEPASPGRQACGRRHKKRTFLRPRIIGGSSSLPGSHPWLAAIYIGDSFCAGSLVHTCWVVSAAHCFSHSPPRDSVSVVLGQHFFNRTTDVTQTFGIEKYIPYTLYSVFNPSDHDLVLIRLKKKGDRCATRSQFVQPICLPEPGSTFPAGHKCQIAGWGHLDENVSGYSSSLREALVPLVADHKCSSPEVYGADISPNMLCAGYFDCKSDACQGDSGGPLACEKNGVAYLYGIISWGDGCGRLHKPGVYTRVANYVDWINDRIRPPRRLVAPS

SEQ ID NO: 38224 - protein, 390 aa, Homo sapiens
  Payload ID: 7588
  Gene Symbol: HGH1
  Gene Name: HGH1 homolog
  Uniprot ID: Q9BTY7
  ENSP ID: ENSP00000321320
MGEAGAGAGASGGPEASPEAEVVKLLPFLAPGARADLQAAAVRHVLALTGCGPGRALLAGQAALLQALMELAPASAPARDAARALVNLAADPGLHETLLAADPGLPARLMGRALDPQWPWAEEAAAALANLSREPAPCAALMAALAAAEPADSGLERLVRALCTPGYNARAPLHYLAPLLSNLSQRPAARAFLLDPDRCVVQRLLPLTQYPDSSVRRGGVVGTLRNCCFEHRHHEWLLGPEVDILPFLLLPLAGPEDFSEEEMERLPVDLQYLPPDKQREPDADIRKMLVEAIMLLTATAPGRQQVRDQGAYLILRELHSWEPEPDVRTACEKLIQVLIGDEPERGMENLLEVQVPEDVEQQLQQLDCREQEQLERELAPEPWVERATPT

SEQ ID NO: 38225 - protein, 85 aa, Homo sapiens
  Payload ID: 7588
  Gene Symbol: HGH1
  Gene Name: HGH1 homolog
  ENSP ID: ENSP00000431970
MGEAGAGAGASGGPEASPEAEVVKLLPFLAPGARADLQAAAVRHVLALTGCGPGRALLAGQTRAWSGWCARCARPATTPARPCTT

SEQ ID NO: 38226 - protein, 85 aa, Homo sapiens; identical to SEQ ID NO: 38225
  Payload ID: 7588
  Gene Symbol: HGH1
  Gene Name: HGH1 homolog
  ENSP ID: ENSP00000486087

SEQ ID NO: 38227 - protein, 782 aa, Homo sapiens
  Payload ID: 7589
  Gene Symbol: HHIPL1
  Gene Name: HHIP-like 1
  Uniprot ID: Q96JK4
  ENSP ID: ENSP00000330601
MARARAGALLALWVLGAAAHPQCLDFRPPFRPTQPLRLCAQYSDFGCCDEGRDAELTRRFWALASRVDAAEWAACAGYARDLLCQECSPYAAHLYDAEDPFTPLRTVPGLCQDYCLDMWHKCRGLFRHLSTDQELWALEGNLARFCRYLSLDDTDYCFPYLLVNKNLNSNLGHVVADAKGCLQLCLEEVANGLRNPVAMVHARDGTHRFFVAEQVGLVWAYLPDRSRLGKPFLNISRVVLTSPWEGDERGFLGIAFHPSFQHNRRLYVYYSVGIRSSEWIRISEFRVSEDDENAVDHSSERIILEVKEPASNHNGGQLLFGDDGYLYIFTGDGGMAGDPFGTFGNAQNKSALLGKVLRIDVDRKERGLPYGIPPDNPFVGDPAAQPEVYALGVRNMWRCSFDRGDPSSGTGRGRLFCGDVGQNKFEEVDVVERGGNYGWRAREGFECYDRSLCANTSLNDLLPIFAYPHTVGKSVTGGYVYRGCEYPNLNGLYIFGDFMSGRLMSLQENPGTGQWQYSEICMGHGQTCEFPGLINNYYPYIISFGEDEAGELYFMSTGEPSATAPRGVVYKIIDASRRAPPGKCQIQPAQVKIRSRLIPFVPKEKFIPKTRSTPRPTARAPTRAPRRGRPTAAPPAPTPRPARPTQQPGSRRGGGRRRGRLNSASRAFRDGEVRLVRPAGLSSGSGRVEVFVGGRWGTVCDDSWNISGAAVVCRQLGFAYAVRAVKRAEFGQGGSLPILLDDVRCAGWERNLLECQHNGVGTHNCEHDEDAGVVCSHQNPDL

SEQ ID NO: 38228 - protein, 608 aa, Homo sapiens
  Payload ID: 7589
  Gene Symbol: HHIPL1
  Gene Name: HHIP-like 1
  Uniprot ID: Q96JK4
  ENSP ID: ENSP00000349757
MARARAGALLALWVLGAAAHPQCLDFRPPFRPTQPLRLCAQYSDFGCCDEGRDAELTRRFWALASRVDAAEWAACAGYARDLLCQECSPYAAHLYDAEDPFTPLRTVPGLCQDYCLDMWHKCRGLFRHLSTDQELWALEGNLARFCRYLSLDDTDYCFPYLLVNKNLNSNLGHVVADAKGCLQLCLEEVANGLRNPVAMVHARDGTHRFFVAEQVGLVWAYLPDRSRLGKPFLNISRVVLTSPWEGDERGFLGIAFHPSFQHNRRLYVYYSVGIRSSEWIRISEFRVSEDDENAVDHSSERIILEVKEPASNHNGGQLLFGDDGYLYIFTGDGGMAGDPFGTFGNAQNKSALLGKVLRIDVDRKERGLPYGIPPDNPFVGDPAAQPEVYALGVRNMWRCSFDRGDPSSGTGRGRLFCGDVGQNKFEEVDVVERGGNYGWRAREGFECYDRSLCANTSLNDLLPIFAYPHTVGKSVTGGYVYRGCEYPNLNGLYIFGDFMSGRLMSLQENPGTGQWQYSEICMGHGQTCEFPGLINNYYPYIISFGEDEAGELYFMSTGEPSATAPRGVVYKIIDASSCKARSAMPGYVPAPSVCSSLTSQPFILQWWK

SEQ ID NO: 38229 - protein, 724 aa, Homo sapiens
  Payload ID: 7590
  Gene Symbol: HHIPL2
  Gene Name: HHIP-like 2
  Uniprot ID: Q6UWX4
  ENSP ID: ENSP00000342118
MLRTSTPNLCGGLHCRAPWLSSGILCLCLIFLLGQVGLLQGHPQCLDYGPPFQPPLHLEFCSDYESFGCCDQHKDRRIAARYWDIMEYFDLKRHELCGDYIKDILCQECSPYAAHLYDAENTQTPLRNLPGLCSDYCSAFHSNCHSAISLLTNDRGLQESHGRDGTRFCHLLDLPDKDYCFPNVLRNDYLNRHLGMVAQDPQGCLQLCLSEVANGLRNPVSMVHAGDGTHRFFVAEQVGVVWVYLPDGSRLEQPFLDLKNIVLTTPWIGDERGFLGLAFHPKFRHNRKFYIYYSCLDKKKVEKIRISEMKVSRADPNKADLKSERVILEIEEPASNHNGGQLLFGLDGYMYIFTGDGGQAGDPFGLFGNAQNKSSLLGKVLRIDVNRAGSHGKRYRVPSDNPFVSEPGAHPAIYAYGIRNMWRCAVDRGDPITRQGRGRIFCGDVGQNRFEEVDLILKGGNYGWRAKEGFACYDKKLCHNASLDDVLPIYAYGHAVGKSVTGGYVYRGCESPNLNGLYIFGDFMSGRLMALQEDRKNKKWKKQDLCLGSTTSCAFPGLISTHSKFIISFAEDEAGELYFLATSYPSAYAPRGSIYKFVDPSRRAPPGKCKYKPVPVRTKSKRIPFRPLAKTVLDLLKEQSEKAARKSSSATLASGPAQGLSEKGSSKKLASPTSSKNTLRGPGTKKKARVGPHVRQGKRRKSLKSHSGRMRPSAEQKRAGRSLP

SEQ ID NO: 38230 - protein, 249 aa, Homo sapiens
  Payload ID: 7591
  Gene Symbol: HID1
  Gene Name: HID1 domain containing
  ENSP ID: ENSP00000317795
  MOD_RES (1)..(1): Any amino acid
XDSASSASPTVDGTTTGTAMDDADPPGPENLFVNYLSRIHREEDFQFILKGIARLLSNPLLQTYLPNSTKKIQFHQELLVLFWKLCDFNKKFLFFVLKSSDVLDILVPILFFLNDARADQSRVGLMHIGVFILLLLSGERNFGVRLNKPYSIRVPMDIPVFTGTHADLLIVVFHKIITSGHQRLQPLFDCLLTIVVNGRGPELALPALTTRWCQATGQPATCSRFQAPPAHRKNASLCTLHSSHIKKKG

SEQ ID NO: 38231 - protein, 788 aa, Homo sapiens
  Payload ID: 7591
  Gene Symbol: HID1
  Gene Name: HID1 domain containing
  Uniprot ID: Q8IV36
  ENSP ID: ENSP00000413520
MGSTDSKLNFRKAVIQLTTKTQPVEATDDAFWDQFWADTATSVQDVFALVPAAEIRAVREESPSNLATLCYKAVEKLVQGAESGCHSEKEKQIVLNCSRLLTRVLPYIFEDPDWRGFFWSTVPGAGRGGQGEEDDEHARPLAESLLLAIADLLFCPDFTVQSHRRSTVDSAEDVHSLDSCEYIWEAGVGFAHSPQPNYIHDMNRMELLKLLLTCFSEAMYLPPAPESGSTNPWVQFFCSTENRHALPLFTSLLNTVCAYDPVGYGIPYNHLLFSDYREPLVEEAAQVLIVTLDHDSASSASPTVDGTTTGTAMDDADPPGPENLFVNYLSRIHREEDFQFILKGIARLLSNPLLQTYLPNSTKKIQFHQELLVLFWKLCDFNKKFLFFVLKSSDVLDILVPILFFLNDARADQSRVGLMHIGVFILLLLSGERNFGVRLNKPYSIRVPMDIPVFTGTHADLLIVVFHKIITSGHQRLQPLFDCLLTIVVNVSPYLKSLSMVTANKLLHLLEAFSTTWFLFSAAQNHHLVFFLLEVFNNIIQYQFDGNSNLVYAIIRKRSIFHQLANLPTDPPTIHKALQRRRRTPEPLSRTGSQEGTSMEGSRPAAPAEPGTLKTSLVATPGIDKLTEKSQVSEDGTLRSLEPEPQQSLEDGSPAKGEPSQAWREQRRPSTSSASGQWSPTPEWVLSWKSKLPLQTIMRLLQVLVPQVEKICIDKGLTDESEILRFLQHGTLVGLLPVPHPILIRKYQANSGTAMWFRTYMWGVIYLRNVDPPVWYDTDVKLFEIQRV

SEQ ID NO: 38232 - protein, 253 aa, Homo sapiens
  Payload ID: 7591
  Gene Symbol: HID1
  Gene Name: HID1 domain containing
  ENSP ID: ENSP00000431131
MGSTDSKLNFRKAVIQLTTKTQGEEDDEHARPLAESLLLAIADLLFCPDFTVQSHRRSTVDSAEDVHSLDSCEYIWEAGVGFAHSPQPNYIHDMNRMELLKLLLTCFSEAMYLPPAPESGSTNPWVQFFCSTENRHALPLFTSLLNTVCAYDPVGYGIPYNHLLFSDYREPLVEEAAQVLIVTLDHDSASSASPTVDGTTTGTAMDDADPPGPENLFVNYLSRIHREEDFQFILKGIARLLSNPLLQTYLPNS

SEQ ID NO: 38233 - protein, 191 aa, Homo sapiens
  Payload ID: 7591
  Gene Symbol: HID1
  Gene Name: HID1 domain containing
  ENSP ID: ENSP00000435751
MGSTDSKLNFRKAVIQLTTKTQPVEATDDAFWDQFWADTATSVQDVFALVPAAEIRAVREESPSNLATLCYKAVEKLVQGAESGCHSEKEKQIVLNCSRLLTRVLPYIFEDPDWRGFFCREKRMMSMPGPWPSPCSWPLLTCSSARTSRFRATGGALWTRQRTSTPWTAVNTSGRLVWASLTPPSLTTSTI

SEQ ID NO: 38234 - protein, 114 aa, Homo sapiens
  Payload ID: 7591
  Gene Symbol: HID1
  Gene Name: HID1 domain containing
  ENSP ID: ENSP00000462457
MGSTDSKLNFRKAVIQLTTKTQAVEKLVQGAESGCHSEKEKQIVLNCSRLLTRVLPYIFEDPDWRGFFWSTVPGAGRGGGEEDDEHARPLAESLLLAIADLLFCPDFTVQSHRR

SEQ ID NO: 38235 - protein, 93 aa, Homo sapiens [sequence omitted]

SEQ ID NO: 38236 - protein, 107 aa, Homo sapiens
  Payload ID: 7592
  Gene Symbol: HIGD1A
  Gene Name: HIG1 hypoxia inducible domain family, member 1A
  Uniprot ID: Q9Y241
  ENSP ID: ENSP00000398064
MEQKLVEEILQAITMSTDTGVSLPSYEEDQGSKLIRKAKEAPFVPVGIAGFAAIVAYGLYKLKSRGNTKMSIHLIHMRVAAQGFVVGAMTVGMGYSMYREFWAKPKP

SEQ ID NO: 38237 - protein, 93 aa, Homo sapiens [sequence omitted]

SEQ ID NO: 38238 - protein, 96 aa, Homo sapiens
  Payload ID: 7592
  Gene Symbol: HIGD1A
  Gene Name: HIG1 hypoxia inducible domain family, member 1A
  ENSP ID: ENSP00000408289
MSTDTGVSLPSYEEDQGSKLIRKAKEAPFVPVGIAGFAAIVAYGLYKLKSRGNTKMSIHLIHMRVAAQGFVVGAMTVAFFFFRYGLFHVSGILGKT

SEQ ID NO: 38239 - protein, 99 aa, Homo sapiens
  Payload ID: 7593
  Gene Symbol: HIGD1B
  Gene Name: HIG1 hypoxia inducible domain family, member 1B
  Uniprot ID: Q9P298
  ENSP ID: ENSP00000253410
MSANRRWWVPPDDEDCVSEKLLRKTRESPLVPIGLGGCLVVAAYRIYRLRSRGSTKMSIHLIHTRVAAQACAVGAIMLGAVYTMYSDYVKRMAQDAGEK

SEQ ID NO: 38240 - protein, 54 aa, Homo sapiens
  Payload ID: 7593
  Gene Symbol: HIGD1B
  Gene Name: HIG1 hypoxia inducible domain family, member 1B
  ENSP ID: ENSP00000464703
MSANRRWWVPPDDEDCVSEKLLRKTRESPLVPIGAVYTMYSDYVKRMAQDAGEK

SEQ ID NO: 38241 - protein, 40 aa, Homo sapiens
  Payload ID: 7593
  Gene Symbol: HIGD1B
  Gene Name: HIG1 hypoxia inducible domain family, member 1B
  ENSP ID: ENSP00000465657
  MOD_RES (1)..(1): Any amino acid
XLLRKTRESPLVPIGPPQRPPPATRCCIKPAVYPDAQPAW

SEQ ID NO: 38242 - protein, 99 aa, Homo sapiens; identical to SEQ ID NO: 38239
  Payload ID: 7593
  Gene Symbol: HIGD1B
  Gene Name: HIG1 hypoxia inducible domain family, member 1B
  Uniprot ID: Q9P298
  ENSP ID: ENSP00000468511

SEQ ID NO: 38243 - protein, 97 aa, Homo sapiens
  Payload ID: 7594
  Gene Symbol: HIGD1C
  Gene Name: HIG1 hypoxia inducible domain family, member 1C
  Uniprot ID: A8MV81
  ENSP ID: ENSP00000381473
MSSDNQWSADEDEGQLSRLIRKSRDSPFVPIGIAGFVTVVSCGLYKLKYRRDQKMSIHLIHMRVAAQGFVVGAVTLGVLYSMYKDYIRPRFFSESKK

SEQ ID NO: 38244 - protein, 106 aa, Homo sapiens
  Payload ID: 7595
  Gene Symbol: HIGD2A
  Gene Name: HIG1 hypoxia inducible domain family, member 2A
  Uniprot ID: Q9BW72
  ENSP ID: ENSP00000274787
MATPGPVIPEVPFEPSKPPVIEGLSPTVYRNPESFKEKFVRKTRENPVVPIGCLATAAALTYGLYSFHRGNSQRSQLMMRTRIAAQGFTVAAILLGLAVTAMKSRP

SEQ ID NO: 38245 - protein, 106 aa, Homo sapiens
  Payload ID: 7596
  Gene Symbol: HIGD2B
  Gene Name: HIG1 hypoxia inducible domain family, member 2B
  Uniprot ID: Q4VC39
  ENSP ID: ENSP00000307951
MATLGFVTPEAPFESSKPPIFEGLSPTVYSNPEGFKEKFLRKTRENPVVPIGFLCTAAVLTNGLYCFHQGNSQCSRLMMHTQIAAQGFTIAAILLGLAATAMKSPP

SEQ ID NO: 38246 - protein, 1268 aa, Homo sapiens
  Payload ID: 7597
  Gene Symbol: HDLBP
  Gene Name: high density lipoprotein binding protein
  ENSP ID: ENSP00000312042
MSSVAVLTQESFAEHRSGLVPQQIKVATLNSEEESDPPTYKDAFPPLPEKAACLESAQEPAGAWGNKIRPIKASVITQVFHVPLEERKYKDMNQFGEGEQAKICLEIMQRTGAHLELSLAKDQGLSIMVSGKLDAVMKARKDIVARLQTQASATVAIPKEHHRFVIGKNGEKLQDLELKTATKIQIPRPDDPSNQIKITGTKEGIEKARHEVLLISAEQDKRAVERLEVEKAFHPFIAGPYNRLVGEIMQETGTRINIPPPSVNRTEIVFTGEKEQLAQAVARIKKIYEEKKKKTTTIAVEVKKSQHKYVIGPKGNSLQEILERTGVSVEIPPSDSISETVILRGEPEKLGQALTEVYAKANSFTVSSVAAPSWLHRFIIGKKGQNLAKITQQMPKVHIEFTEGEDKITLEGPTEDVNVAQEQIEGMVKDLINRMDYVEINIDHKFHRHLIGKSGANINRIKDQYKVSVRIPPDSEKSNLIRIEGDPQGVQQAKRELLELASRMENERTKDLIIEQRFHRTIIGQKGERIREIRDKFPEVIINFPDPAQKSDIVQLRGPKNEVEKCTKYMQKMVADLVENSYSISVPIFKQFHKNIIGKGGANIKKIREESNTKIDLPAENSNSETIIITGKRANCEAARSRILSIQKDLANIAEVEVSIPAKLHNSLIGTKGRLIRSIMEECGGVHIHFPVEGSGSDTVVIRGPSSDVEKAKKQLLHLAEEKQTKSFTVDIRAKPEYHKFLIGKGGGKIRKVRDSTGARVIFPAAEDKDQDLITIIGKEDAVREAQKELEALIQNLDNVVEDSMLVDPKHHRHFVIRRGQVLREIAEEYGGVMVSFPRSGTQSDKVTLKGAKDCVEAAKKRIQEIIEDLEAQVTLECAIPQKFHRSVMGPKGSRIQQITRDFSVQIKFPDREENAVHSTEPVVQENGDEAGEGREAKDCDPGSPRRCDIIIISGRKEKCEAAKEALEALVPVTIEVEVPFDLHRYVIGQKGSGIRKMMDEFEVNIHVPAPELQSDIIAITGLAANLDRAKAGLLERVKELQAEQEDRALRSFKLSVTVDPKYHPKIIGRKGAVITQIRLEHDVNIQFPDKDDGNQPQDQITITGYEKNTEAARDAILRIVGELEQMVSEDVPLDHRVHARIIGARGKAIRKIMDEFKVDIRFPQSGAPDPNCVTVTGLPENVEEAIDHILNLEEEYLADVVDSEALQVYMKPPAHEEAKAPSRGFVVRDAPWTASSSEKAPDMSSSEEFPSFGAQVAPKTLPWGPKR

SEQ ID NO: 38247 - protein, 973 aa, Homo sapiens
  Payload ID: 7597
  Gene Symbol: HDLBP
  Gene Name: high density lipoprotein binding protein
  ENSP ID: ENSP00000362389
  MOD_RES (1)..(1): Any amino acid
XGLSIMVSGKLDAVMKARKDIVARLQTQASATVAIPKEHHRFVIGKNGEKLQDLELKTATKIQIPRPDDPSNQIKITGTKEGIEKARHEVLLISAEQDKRAVERLEVEKAFHPFIAGPYNRLVGEIMQETGTRINIPPPSVNRTEIVFTGEKEQLAQAVARIKKIYEEKANSFTVSSVAAPSWLHRFIIGKKGQNLAKITQQMPKVHIEFTEGEDKITLEGPTEDVNVAQEQIEGMVKDLINRMDYVEINIDHKFHRHLIGKSGANINRIKDQYKVSVRIPPDSEKSNLIRIEGDPQGVQQAKRELLELASRMENERTKDLIIEQRFHRTIIGQKGERIREIRDKFPEVIINFPDPAQKSDIVQLRGPKNEVEKCTKYMQKMVADLVENSYSISVPIFKQFHKNIIGKGGANIKKIREESNTKIDLPAENSNSETIIITGKRANCEAARSRILSIQKDLANIAEVEVSIPAKLHNSLIGTKGRLIRSIMEECGGVHIHFPVEGSGSDTVVIRGPSSDVEKAKKQLLHLAEEKQTKSFTVDIRAKPEYHKFLIGKGGGKIRKVRDSTGARVIFPAAEDKDQDLITIIGKEDAVREAQKELEALIQNLDNVVEDSMLVDPKHHRHFVIRRGQVLREIAEEYGGVMVSFPRSGTQSDKVTLKGAKDCVEAAKKRIQEIIEDLEAQVTLECAIPQKFHRSVMGPKGSRIQQITRDFSVQIKFPDREENAVHSTEPVVQENGDEAGEGREAKDCDPGSPRRCDIIIISGRKEKCEAAKEALEALVPVTIEVEVPFDLHRYVIGQKGSGIRKMMDEFEVNIHVPAPELQSDIIAITGLAANLDRAKAGLLERVKELQAEQEDRALRSFKLSVTVDPKYHPKIIGRKGAVITQIRLEHDVNILNLEEEYLADVVDSEALQVYMKPPAHEEAKAPSRGFVVRDAPWTASSSEKAPDMSSSEEFPSFGAQVAPKTLPWGPKR

SEQ ID NO: 38248 - protein, 1268 aa, Homo sapiens; identical to SEQ ID NO: 38246
  Payload ID: 7597
  Gene Symbol: HDLBP
  Gene Name: high density lipoprotein binding protein
  ENSP ID: ENSP00000375836

SEQ ID NO: 38249 - protein, 1268 aa, Homo sapiens; identical to SEQ ID NO: 38246
  Payload ID: 7597
  Gene Symbol: HDLBP
  Gene Name: high density lipoprotein binding protein
  ENSP ID: ENSP00000375837

SEQ ID NO: 38250 - protein, 164 aa, Homo sapiens
  Payload ID: 7597
  Gene Symbol: HDLBP
  Gene Name: high density lipoprotein binding protein
  ENSP ID: ENSP00000387782
MSSVAVLTQESFAEHRSGLVPQQIKVATLNSEEESDPPTYKDAFPPLPEKAACLESAQEPAGAWGNKIRPIKASVITQVFHVPLEERKYKDMNQFGEGEQAKICLEIMQRTGAHLELSLAKDQGLSIMVSGKLDAVMKARKDIVARLQTQASATVAIPKEHHRF

SEQ ID NO: 38251 - protein, 267 aa, Homo sapiens
  Payload ID: 7597
  Gene Symbol: HDLBP
  Gene Name: high density lipoprotein binding protein
  ENSP ID: ENSP00000388876
HTCLCQAVSTLASENERTKDLIIEQRFHRTIIGQKGERIREIRDKFPEVIINFPDPAQKSDIVQLRGPKNEVEKCTKYMQKMVADLVENSYSISVPIFKQFHKNIIGKGGANIKKIREESNTKIDLPAENSNSETIIITGKRANCEAARSRILSIQKDLANIAEVEVSIPAKLHNSLIGTKGRLIRSIMEECGGVHIHFPVEGSGSDTVVIRGPSSDVEKAKKQLLHLAEEKQTKSFTVDIRAKPEYHKFLIGKGGGKIRKVRDSTG

SEQ ID NO: 38252 - protein, 81 aa, Homo sapiens
  Payload ID: 7597
  Gene Symbol: HDLBP
  Gene Name: high density lipoprotein binding protein
  ENSP ID: ENSP00000390290
MSSVAVLTQESFAEHRSGLVPQQIKVATLNSEEESDPPTYKDAFPPLPEKAACLESAQEPAGAWGNKIRPIKASVITQVFH

SEQ ID NO: 38253 - protein, 79 aa, Homo sapiens
  Payload ID: 7597
  Gene Symbol: HDLBP
  Gene Name: high density lipoprotein binding protein
  ENSP ID: ENSP00000390942
MSSVAVLTQESFAEHRSGLVPQQIKVATLNSEEESDPPTYKDAFPPLPEKAACLESAQEPAGAWGNKIRPIKASVITQV

SEQ ID NO: 38254 - protein, 14 aa, Homo sapiens
  Payload ID: 7597
  Gene Symbol: HDLBP
  Gene Name: high density lipoprotein binding protein
  ENSP ID: ENSP00000391773
MSSVAVLTQESFAE

SEQ ID NO: 38255 - protein, 332 aa, Homo sapiens
  Payload ID: 7597
  Gene Symbol: HDLBP
  Gene Name: high density lipoprotein binding protein
  ENSP ID: ENSP00000393766
  MOD_RES (1)..(1): Any amino acid
XAKICLEIMQRTGAHLELSLAKDQGLSIMVSGKLDAVMKARKDIVARLQTQASATVAIPKEHHRFVIGKNGEKLQDLELKTATKIQIPRPDDPSNQIKITGTKEGIEKARHEVLLISAEQDKRAVERLEVEKAFHPFIAGPYNRLVGEIMQETGTRINIPPPSVNRTEIVFTGEKEQLAQAVARIKKIYEEKGNSLQEILERTGVSVEIPPSDSISETVILRGEPEKLGQALTEVYAKANSFTVSSVAAPSWLHRFIIGKKGQNLAKITQQMPKVHIEFTEGEDKITLEGPTEDVNVAQEQIEGMVKDLINRMDYVEINIDHKFHRHLIGKS

SEQ ID NO: 38256 - protein, 96 aa, Homo sapiens
  Payload ID: 7597
  Gene Symbol: HDLBP
  Gene Name: high density lipoprotein binding protein
  ENSP ID: ENSP00000394205
MSSVAVLTQESFAEHRSGLVPQQIKVATLNSEEESDPPTYKDAFPPLPEKAACLESAQEPAGAWGNKIRPIKASVITQVFHVPLEERKYKDMNQFG

SEQ ID NO: 38257 - protein, 36 aa, Homo sapiens
  Payload ID: 7597
  Gene Symbol: HDLBP
  Gene Name: high density lipoprotein binding protein
  ENSP ID: ENSP00000396202
MPSLHFLRKLLAWKVPRNPLEPGGTRSDPSRLLSSL

SEQ ID NO: 38258 - protein, 17 aa, Homo sapiens
  Payload ID: 7597
  Gene Symbol: HDLBP
  Gene Name: high density lipoprotein binding protein
  ENSP ID: ENSP00000396959
MSSVAVLTQESFAEHRS

SEQ ID NO: 38259 - protein, 126 aa, Homo sapiens
  Payload ID: 7597
  Gene Symbol: HDLBP
  Gene Name: high density lipoprotein binding protein
  ENSP ID: ENSP00000396964
MSSVAVLTQESFAEHRSGLVPQQIKVATLNSEEESDPPTYKDAFPPLPEKAACLESAQEPAGAWGNKIRPIKASVITQVFHVPLEERKYKDMNQFGEGEQAKICLEIMQRTGAHLELSLAKDQGLS

SEQ ID NO: 38260 - protein, 19 aa, Homo sapiens
  Payload ID: 7597
  Gene Symbol: HDLBP
  Gene Name: high density lipoprotein binding protein
  ENSP ID: ENSP00000397799
MSSVAVLTQESFAEHRSGL

SEQ ID NO: 38261 - protein, 1235 aa, Homo sapiens
  Payload ID: 7597
  Gene Symbol: HDLBP
  Gene Name: high density lipoprotein binding protein
  Uniprot ID: Q00341
  ENSP ID: ENSP00000399139
MHLAERDRWLFVATVMMHFVSIKSGFPGLCVGVRSTMSSVAVLTQESFAEHRSGLVPQQIKVATLNSEEESDPPTYKDAFPPLPEKAACLESAQEPAGAWGNKIRPIKASVITQVFHVPLEERKYKDMNQFGEGEQAKICLEIMQRTGAHLELSLAKDQGLSIMVSGKLDAVMKARKDIVARLQTQASATVAIPKEHHRFVIGKNGEKLQDLELKTATKIQIPRPDDPSNQIKITGTKEGIEKARHEVLLISAEQDKRAVERLEVEKAFHPFIAGPYNRLVGEIMQETGTRINIPPPSVNRTEIVFTGEKEQLAQAVARIKKIYEEKANSFTVSSVAAPSWLHRFIIGKKGQNLAKITQQMPKVHIEFTEGEDKITLEGPTEDVNVAQEQIEGMVKDLINRMDYVEINIDHKFHRHLIGKSGANINRIKDQYKVSVRIPPDSEKSNLIRIEGDPQGVQQAKRELLELASRMENERTKDLIIEQRFHRTIIGQKGERIREIRDKFPEVIINFPDPAQKSDIVQLRGPKNEVEKCTKYMQKMVADLVENSYSISVPIFKQFHKNIIGKGGANIKKIREESNTKIDLPAENSNSETIIITGKRANCEAARSRILSIQKDLANIAEVEVSIPAKLHNSLIGTKGRLIRSIMEECGGVHIHFPVEGSGSDTVVIRGPSSDVEKAKKQLLHLAEEKQTKSFTVDIRAKPEYHKFLIGKGGGKIRKVRDSTGARVIFPAAEDKDQDLITIIGKEDAVREAQKELEALIQNLDNVVEDSMLVDPKHHRHFVIRRGQVLREIAEEYGGVMVSFPRSGTQSDKVTLKGAKDCVEAAKKRIQEIIEDLEAQVTLECAIPQKFHRSVMGPKGSRIQQITRDFSVQIKFPDREENAVHSTEPVVQENGDEAGEGREAKDCDPGSPRRCDIIIISGRKEKCEAAKEALEALVPVTIEVEVPFDLHRYVIGQKGSGIRKMMDEFEVNIHVPAPELQSDIIAITGLAANLDRAKAGLLERVKELQAEQEDRALRSFKLSVTVDPKYHPKIIGRKGAVITQIRLEHDVNIQFPDKDDGNQPQDQITITGYEKNTEAARDAILRIVGELEQMVSEDVPLDHRVHARIIGARGKAIRKIMDEFKVDIRFPQSGAPDPNCVTVTGLPENVEEAIDHILNLEEEYLADVVDSEALQVYMKPPAHEEAKAPSRGFVVRDAPWTASSSEKAPDMSSSEEFPSFGAQVAPKTLPWGPKR

SEQ ID NO: 38262 - protein, 69 aa, Homo sapiens
  Payload ID: 7597
  Gene Symbol: HDLBP
  Gene Name: high density lipoprotein binding protein
  ENSP ID: ENSP00000403693
MSSVAVLTQESFAEHRSGLVPQQIKVATLNSEEESDPPTYKDAFPPLPEKAACLESAQEPAGAWGNKIR

SEQ ID NO: 38263 - protein, 224 aa, Homo sapiens
  Payload ID: 7597
  Gene Symbol: HDLBP
  Gene Name: high density lipoprotein binding protein
  ENSP ID: ENSP00000403807
MSSVAVLTQESFAEHRSGLVPQQIKVATLNSEEESDPPTYKDAFPPLPEKAACLESAQEPAGAWGNKIRPIKASVITQVFHVPLEERKYKDMNQFGEGEQAKICLEIMQRTGAHLELSLAKDQGLSIMVSGKLDAVMKARKDIVARLQTQASATVAIPKEHHRFVIGKNGEKLQDLELKTATKIQIPRPDDPSNQIKITGTKEGIEKARHEVLLISAEQDKRAV

SEQ ID NO: 38264 - protein, 141 aa, Homo sapiens
  Payload ID: 7597
  Gene Symbol: HDLBP
  Gene Name: high density lipoprotein binding protein
  ENSP ID: ENSP00000403913
MSSVAVLTQESFAEHRSGLVPQQIKVATLNSEEESDPPTYKDAFPPLPEKAACLESAQEPAGAWGNKIRPIKASVITQVFHVPLEERKYKDMNQFGEGEQAKICLEIMQRTGAHLELSLAKDQGLSIMVSGKLDAVMKARK

SEQ ID NO: 38265 - protein, 221 aa, Homo sapiens
  Payload ID: 7597
  Gene Symbol: HDLBP
  Gene Name: high density lipoprotein binding protein
  ENSP ID: ENSP00000405109
MSSVAVLTQESFAEHRSGLVPQQIKVATLNSEEESDPPTYKDAFPPLPEKAACLESAQEPAGAWGNKIRPIKASVITQVFHVPLEERKYKDMNQFGEGEQAKICLEIMQRTGAHLELSLAKDQGLSIMVSGKLDAVMKARKDIVARLQTQASATVAIPKEHHRFVIGKNGEKLQDLELKTATKIQIPRPDDPSNQIKITGTKEGIEKARHEVLLISAEQDK

SEQ ID NO: 38266 - protein, 308 aa, Homo sapiens
  Payload ID: 7597
  Gene Symbol: HDLBP
  Gene Name: high density lipoprotein binding protein
  ENSP ID: ENSP00000405180
  MOD_RES (1)..(1): Any amino acid
XKIDLPAENSNSETIIITGKRANCEAARSRILSIQKDLANIAEVEVSIPAKLHNSLIGTKGRLIRSIMEECGGVHIHFPVEGSGSDTVVIRGPSSDVEKAKKQLLHLAEEKARGVRLTQWDWFLQQTKSFTVDIRAKPEYHKFLIGKGGGKIRKVRDSTGARVIFPAAEDKDQDLITIIGKEDAVREAQKELEALIQNLDNVVEDSMLVDPKHHRHFVIRRGQVLREIAEEYGGVMVSFPRSGTQSDKVTLKGAKDCVEAAKKRIQEIIEDLEAQVTLECAIPQKFHRSVMGPKGSRIQQITRDFSVQ

SEQ ID NO: 38267 - protein, 46 aa, Homo sapiens
  Payload ID: 7597
  Gene Symbol: HDLBP
  Gene Name: high density lipoprotein binding protein
  ENSP ID: ENSP00000408582
MSSVAVLTQESFAEHRSGLVPQQIKVATLNSEEESDPPTYKDAFPP

SEQ ID NO: 38268 - protein, 53 aa, Homo sapiens
  Payload ID: 7597
  Gene Symbol: HDLBP
  Gene Name: high density lipoprotein binding protein
  ENSP ID: ENSP00000409868
MSSVAVLTQESFAEHRSGLVPQQIKVATLNSEEESDPPTYKDAFPPLPEKAAC

SEQ ID NO: 38269 - protein, 126 aa, Homo sapiens
  Payload ID: 7597
  Gene Symbol: HDLBP
  Gene Name: high density lipoprotein binding protein
  ENSP ID: ENSP00000411211
RVHARIIGARGKAIRKIMDEFKVDIRFPQSGAPDPNCVTVTGLPENVEEAIDHILNLEEEYLADVVDSEALQVYMKPPAHEEAKAPSRGFVVRDAPWTASSSEKVRCGLLPSWVPGRVGGQAGLVS

SEQ ID NO: 38270 - protein, 81 aa, Homo sapiens; identical to SEQ ID NO: 38252
  Payload ID: 7597
  Gene Symbol: HDLBP
  Gene Name: high density lipoprotein binding protein
  ENSP ID: ENSP00000413805

SEQ ID NO: 38271 - protein, 128 aa, Homo sapiens
  Payload ID: 7597
  Gene Symbol: HDLBP
  Gene Name: high density lipoprotein binding protein
  ENSP ID: ENSP00000413891
MSSVAVLTQESFAEHRSGLVPQQIKVATLNSEEESDPPTYKDAFPPLPEKAACLESAQEPAGAWGNKIRPIKASVITQVFHVPLEERKYKDMNQFGEGLSNCCHSQRTPSLCYWQKWRETARLGAKNC

SEQ ID NO: 38272 - protein, 147 aa, Homo sapiens
  Payload ID: 7597
  Gene Symbol: HDLBP
  Gene Name: high density lipoprotein binding protein
  ENSP ID: ENSP00000416559
MSSVAVLTQESFAEHRSGLVPQQIKVATLNSEEESDPPTYKDAFPPLPEKAACLESAQEPAGAWGNKIRPIKASVITQVFHVPLEERKYKDMNQFGEGEQAKICLEIMQRTGAHLELSLAKDQGLSIMVSGKLDAVMKARKDIVARL

SEQ ID NO: 38273 - protein, 347 aa, Homo sapiens
  Payload ID: 7598
  Gene Symbol: HMG20A
  Gene Name: high mobility group 20A
  Uniprot ID: Q9NP66
  ENSP ID: ENSP00000336856
MENLMTSSTLPPLFADEDGSKESNDLATTGLNHPEVPYSSGATSSTNNPEFVEDLSQGQLLQSESSNAAEGNEQRHEDEQRSKRGGWSKGRKRKKPLRDSNAPKSPLTGYVRFMNERREQLRAKRPEVPFPEITRMLGNEWSKLPPEEKQRYLDEADRDKERYMKELEQYQKTEAYKVFSRKTQDRQKGKSHRQDAARQATHDHEKETEVKERSVFDIPIFTEEFLNHSKAREAELRQLRKSNMEFEERNAALQKHVESMRTAVEKLEVDVIQERSRNTVLQQHLETLRQVLTSSFASMPLPGSGETPTVDTIDSYMNRLHSIILANPQDNENFIATVREVVNRLDR

SEQ ID NO: 38274 - protein, 347 aa, Homo sapiens; identical to SEQ ID NO: 38273
  Payload ID: 7598
  Gene Symbol: HMG20A
  Gene Name: high mobility group 20A
  Uniprot ID: Q9NP66
  ENSP ID: ENSP00000371133

SEQ ID NO: 38275 - protein, 26 aa, Homo sapiens
  Payload ID: 7598
  Gene Symbol: HMG20A
  Gene Name: high mobility group 20A
  ENSP ID: ENSP00000452665
MNERREQLRAKRPEVPFPEITRMLGN

SEQ ID NO: 38276 - protein, 118 aa, Homo sapiens
  Payload ID: 7598
  Gene Symbol: HMG20A
  Gene Name: high mobility group 20A
  ENSP ID: ENSP00000452847
  MOD_RES (1)..(1): Any amino acid
XAREAELRQLRKSNMEFEERNAALQKHVESMRTAVEKLEVDVIQERSRNTVLQQHLETLRQVLTSSFASMPLPGSGETPTVDTIDSYMNRLHSIILANPQDNENFIATVREVVNRLDR

SEQ ID NO: 38277 - protein, 162 aa, Homo sapiens
  Payload ID: 7598
  Gene Symbol: HMG20A
  Gene Name: high mobility group 20A
  ENSP ID: ENSP00000452864
MENLMTSSTLPPLFADEDGSKESNDLATTGLNHPEVPYSSGATSSTNNPEFVEDLSQGQLLQSESSNAAEGNEQRHEDEQRSKRGGWSKGRKRKKPLRDSNAPKSPLTGYVRFMNERREQLRAKRPEVPFPEITRMLGNEWSKLPPEEKQRYLDEADRDKER

SEQ ID NO: 38278 - protein, 100 aa, Homo sapiens
  Payload ID: 7598
  Gene Symbol: HMG20A
  Gene Name: high mobility group 20A
  ENSP ID: ENSP00000453498
MENLMTSSTLPPLFADEDGSKESNDLATTGLNHPEVPYSSGATSSTNNPEFVEDLSQGQLLQSESSNAAEGNEQRHEDEQRSKRGGWSKGRKRKKPLRDS

SEQ ID NO: 38279 - protein, 84 aa, Homo sapiens
  Payload ID: 7598
  Gene Symbol: HMG20A
  Gene Name: high mobility group 20A
  ENSP ID: ENSP00000453592
MENLMTSSTLPPLFADEDGSKESNDLATTGLNHPEVPYSSGATSSTNNPEFVEDLSQGQLLQSESSNAAEGNEQRHEDEDMFGS

SEQ ID NO: 38280 - protein, 29 aa, Homo sapiens
  Payload ID: 7598
  Gene Symbol: HMG20A
  Gene Name: high mobility group 20A
  ENSP ID: ENSP00000453727
MNERREQLRAKRPEVPFPEITRMLGNEWS

SEQ ID NO: 38281 - protein, 156 aa, Homo sapiens
  Payload ID: 7598
  Gene Symbol: HMG20A
  Gene Name: high mobility group 20A
  ENSP ID: ENSP00000454136
MENLMTSSTLPPLFADEDGSKESNDLATTGLNHPEVPYSSGATSSTNNPEFVEDLSQGQLLQSESSNAAEGNEQRHEDEQRSKRGGWSKGRKRKKPLRDSNAPKSPLTGYVRFMNERREQLRAKRPEVPFPEITRMLGNEWSKLPPEEKQRYLDEA

SEQ ID NO: 38282 - protein, 286 aa, Homo sapiens
  Payload ID: 7599
  Gene Symbol: HMG20B
  Gene Name: high mobility group 20B
  ENSP ID: ENSP00000262949
MSHGPKQPGAAAAPAGGKAPGQHGGFVVTVKQERGEGPRAGEKGSHEEEPGSAAGEETRLAQGQEAEEDSAEWAQGTGHGLRALPERAARADPHAPPGSALSRDHQDAGRRVEQAAANGKAGFPCFKPSGAAPQRYLDEAEREKQQYMKELRAYQQSEAYKMCTEKIQEKKIKKEDSSSGLMNTLLNGHKGGDCDGFSTFDVPIFTEEFLDQNKAREAELRRLRKMNVAFEEQNAVLQRHTQSMSSARERLEQELALEERRTLALQQQLQAVRQALTASFASLPVP

SEQ ID NO: 38283 - protein, 317 aa, Homo sapiens
  Payload ID: 7599
  Gene Symbol: HMG20B
  Gene Name: high mobility group 20B
  Uniprot ID: Q9P0W2
  ENSP ID: ENSP00000328269
MSHGPKQPGAAAAPAGGKAPGQHGGFVVTVKQERGEGPRAGEKGSHEEEPVKKRGWPKGKKRKKILPNGPKAPVTGYVRFLNERREQIRTRHPDLPFPEITKMLGAEWSKLQPTEKQRYLDEAEREKQQYMKELRAYQQSEAYKMCTEKIQEKKIKKEDSSSGLMNTLLNGHKGGDCDGFSTFDVPIFTEEFLDQNKAREAELRRLRKMNVAFEEQNAVLQRHTQSMSSARERLEQELALEERRTLALQQQLQAVRQALTASFASLPVPGTGETPTLGTLDFYMARLHGAIERDPAQHEKLIVRIKEILAQVASEHL

SEQ ID NO: 38284 - protein, 125 aa, Homo sapiens
  Payload ID: 7599
  Gene Symbol: HMG20B
  Gene Name: high mobility group 20B
  ENSP ID: ENSP00000393481
MSHGPKQPGAAAAPAGGKAPGQHGGFVVTVKQERGEGPRAGEKGSHEEEPGSAAGEETRLAQGQEAEEDSAEWAQGTGHGLRALPERAARADPHAPPGSALSRDHQDAGRRVEQAAANGKAAVPG

SEQ ID NO: 38285 - protein, 165 aa, Homo sapiens
  Payload ID: 7599
  Gene Symbol: HMG20B
  Gene Name: high mobility group 20B
  ENSP ID: ENSP00000393904
MSHGPKQPGAAAAPAGGKAPGQHGGFVVTVKQERGEGPRAGEKGSHEEEYARPPSQRRSPVLQPVKKRGWPKGKKRKKILPNGPKAPVTGYVRFLNERREQIRTRHPDLPFPEITKMLGAEWSKLQPTEKQRYLDEAEREKQQYMKELRAYQQSEAYKMCTEKIQ

SEQ ID NO: 38286 - protein, 142 aa, Homo sapiens
  Payload ID: 7599
  Gene Symbol: HMG20B
  Gene Name: high mobility group 20B
  ENSP ID: ENSP00000402877
MSHGPKQPGAAAAPAGGKAPGQHGGFVVTVKQERGEGPRAGEKGSHEEEPVKKRGWPKGKKRKKILPNGPKAPVTGYVRFLNERREQIRTRHPDLPFPEITKMLGAEWSKLQPTEKQRYLDEAEREKQQYMKELRAYQQSEA

SEQ ID NO: 38287 - protein, 215 aa, Homo sapiens
  Payload ID: 7599
  Gene Symbol: HMG20B
  Gene Name: high mobility group 20B
  ENSP ID: ENSP00000410924
MSHGPKQPGAAAAPAGGKAPGQHGGFVVTVKQERGEGPRAGEKGSHEEEPVKKRGWPKGKKRKKILPNGPKAPVTGYVRFLNERREQIRTRHPDLPFPEITKMLGAEWSKLQPTEKQRYLDEAEREKQQYMKELRAYQQSEAYKMCTEKIQEKKIKKEDSSSGLMNTLLNGHKGGDCDGFSTFDVPIFTEEFLDQNKAREAELRRLRKMNVAFEE

SEQ ID NO: 38288 - protein, 184 aa, Homo sapiens
  Payload ID: 7599
  Gene Symbol: HMG20B
  Gene Name: high mobility group 20B
  ENSP ID: ENSP00000465293
QNKAREAELRRLRKMNVAFEEQNAVLQRHTQSMSSARERLEQELALEERRTLALQQQLQAVRQALTASFASLPVPGTGETPTLGTLDFYMARLHGAIERDPAQHEKLIVRIKEILAQVASPLNPEKALAARYTQKNLTAEGAPPRRTATRYTGSPGHPQDTGQTKPTPSTRQDPPNYSLRGAVP

SEQ ID NO: 38289 - protein, 96 aa, Homo sapiens
  Payload ID: 7600
  Gene Symbol: HMGA1
  Gene Name: high mobility group AT-hook 1
  Uniprot ID: P17096
  ENSP ID: ENSP00000288245
MSESSSKSSQPLASKQEKDGTEKRGRGRPRKQPPKEPSEVPTPKRPRGRPKGSKNKGAAKTRKTTTTPGRKPRGRPKKLEKEEEEGISQESSEEEQ

SEQ ID NO: 38290 - protein, 107 aa, Homo sapiens
  Payload ID: 7600
  Gene Symbol: HMGA1
  Gene Name: high mobility group AT-hook 1
  Uniprot ID: P17096
  ENSP ID: ENSP00000308227
MSESSSKSSQPLASKQEKDGTEKRGRGRPRKQPPVSPGTALVGSQKEPSEVPTPKRPRGRPKGSKNKGAAKTRKTTTTPGRKPRGRPKKLEKEEEEGISQESSEEEQ

SEQ ID NO: 38291 - protein, 96 aa, Homo sapiens; identical to SEQ ID NO: 38289
  Payload ID: 7600
  Gene Symbol: HMGA1
  Gene Name: high mobility group AT-hook 1
  Uniprot ID: P17096
  ENSP ID: ENSP00000363230

SEQ ID NO: 38292 - protein, 96 aa, Homo sapiens; identical to SEQ ID NO: 38289
  Payload ID: 7600
  Gene Symbol: HMGA1
  Gene Name: high mobility group AT-hook 1
  Uniprot ID: P17096
  ENSP ID: ENSP00000385693

SEQ ID NO: 38293 - protein, 107 aa, Homo sapiens; identical to SEQ ID NO: 38290
  Payload ID: 7600
  Gene Symbol: HMGA1
  Gene Name: high mobility group AT-hook 1
  Uniprot ID: P17096
  ENSP ID: ENSP00000399888

SEQ ID NO: 38294 - protein, 106 aa, Homo sapiens
  Payload ID: 7601
  Gene Symbol: HMGA2
  Gene Name: high mobility group AT-hook 2
  Uniprot ID: P52926
  ENSP ID: ENSP00000346658
MSARGEGAGQPSTSAQGQPAAPAPQKRGRGRPRKQQQEPTGEPSPKRPRGRPKGSKNKSPSKAAQKKAEATGEKRPRGRPRKWDNLLPRTSSKKKTSLGNSTKRSH

SEQ ID NO: 38295 - protein, 118 aa, Homo sapiens
  Payload ID: 7601
  Gene Symbol: HMGA2
  Gene Name: high mobility group AT-hook 2
  ENSP ID: ENSP00000377205
MSARGEGAGQPSTSAQGQPAAPAPQKRGRGRPRKQQQEPTGEPSPKRPRGRPKGSKNKSPSKAAQKKAEATGEKRPRGRPRKWPQQVVQKKPAQVNVALPGKDHPGNLIYLLFSKNAT

SEQ ID NO: 38296 - protein, 90 aa, Homo sapiens
  Payload ID: 7601
  Gene Symbol: HMGA2
  Gene Name: high mobility group AT-hook 2
  Uniprot ID: P52926
  ENSP ID: ENSP00000377206
MSARGEGAGQPSTSAQGQPAAPAPQKRGRGRPRKQQQEPTGEPSPKRPRGRPKGSKNKSPSKAAQKKAEATGEKRPRGRPRKWEEFYIAA

SEQ ID NO: 38297 - protein, 109 aa, Homo sapiens
  Payload ID: 7601
  Gene Symbol: HMGA2
  Gene Name: high mobility group AT-hook 2
  Uniprot ID: P52926
  ENSP ID: ENSP00000384026
MSARGEGAGQPSTSAQGQPAAPAPQKRGRGRPRKQQQEPTGEPSPKRPRGRPKGSKNKSPSKAAQKKAEATGEKRPRGRPRKWPQQVVQKKPAQEETEETSSQESAEED

SEQ ID NO: 38298 - protein, 92 aa, Homo sapiens
  Payload ID: 7601
  Gene Symbol: HMGA2
  Gene Name: high mobility group AT-hook 2
  Uniprot ID: P52926
  ENSP ID: ENSP00000407306
MSARGEGAGQPSTSAQGQPAAPAPQKRGRGRPRKQQQEPTGEPSPKRPRGRPKGSKNKSPSKAAQKKAEATGEKRPRGRPRKWWLLMKSPCW

SEQ ID NO: 38299 - protein, 147 aa, Homo sapiens
  Payload ID: 7601
  Gene Symbol: HMGA2
  Gene Name: high mobility group AT-hook 2
  ENSP ID: ENSP00000437621
MSARGEGAGQPSTSAQGQPAAPAPQKRGRGRPRKQQQEPTGEPSPKRPRGRPKGSKNKSPSKAAQKKAEATGEKRPRGRPRKWAGVQWYNLGSLQPPPPRFKQFSCLRLLSSWDYRHPPPHPANFCIFSRDRVSPCWPGWSRTPDLR

SEQ ID NO: 38300 - protein, 103 aa, Homo sapiens
  Payload ID: 7601
  Gene Symbol: HMGA2
  Gene Name: high mobility group AT-hook 2
  Uniprot ID: P52926
  ENSP ID: ENSP00000437747
MSARGEGAGQPSTSAQGQPAAPAPQKRGRGRPRKQQQEPTGEPSPKRPRGRPKGSKNKSPSKAAQKKAEATGEKRPRGRPRKWLRAQALDSDGLGSNSGPSLS

SEQ ID NO: 38301 - protein, 99 aa, Homo sapiens
  Payload ID: 7601
  Gene Symbol: HMGA2
  Gene Name: high mobility group AT-hook 2
  ENSP ID: ENSP00000439317
MSARGEGAGQPSTSAQGQPAAPAPQKRGRGRPRKQQQEPTGEPSPKRPRGRPKGSKNKSPSKAAQKKAEATGEKRPRGRPRKWPQQVVQKKPAQVRHSH

SEQ ID NO: 38302 - protein, 55 aa, Homo sapiens
  Payload ID: 7601
  Gene Symbol: HMGA2
  Gene Name: high mobility group AT-hook 2
  ENSP ID: ENSP00000440919
EPTGEPSPKRPRGRPKGSKNKSPSKAAQKKAEATGEKRPRGRPRKWWLLMKSPCW

SEQ ID NO: 38303 - protein, 86 aa, Homo sapiens
  Payload ID: 7601
  Gene Symbol: HMGA2
  Gene Name: high mobility group AT-hook 2
  Uniprot ID: P52926
  ENSP ID: ENSP00000443372
MSARGEGAGQPSTSAQGQPAAPAPQKRGRGRPRKQQQEPTGEPSPKRPRGRPKGSKNKSPSKAAQKKAEATGEKRPRGRPRKWLQN

SEQ ID NO: 38304 - protein, 215 aa, Homo sapiens
  Payload ID: 7602
  Gene Symbol: HMGB1
  Gene Name: high mobility group box 1
  Uniprot ID: P09429
  ENSP ID: ENSP00000343040
MGKGDPKKPRGKMSSYAFFVQTCREEHKKKHPDASVNFSEFSKKCSERWKTMSAKEKGKFEDMAKADKARYEREMKTYIPPKGETKKKFKDPNAPKRPPSAFFLFCSEYRPKIKGEHPGLSIGDVAKKLGEMWNNTAADDKQPYEKKAAKLKEKYEKDIAAYRAKGKPDAAKKGVVKAEKSKKKKEEEEDEEDEEDEEEEEDEEDEDEEEDDDDE

SEQ ID NO: 38305 - protein, 215 aa, Homo sapiens; identical to SEQ ID NO: 38304
  Payload ID: 7602
  Gene Symbol: HMGB1
  Gene Name: high mobility group box 1
  Uniprot ID: P09429
  ENSP ID: ENSP00000345347

SEQ ID NO: 38306 - protein, 158 aa, Homo sapiens
  Payload ID: 7602
  Gene Symbol: HMGB1
  Gene Name: high mobility group box 1
  ENSP ID: ENSP00000369904
MGKGDPKKPRGKMSSYAFFVQTCREEHKKKHPDASVNFSEFSKKCSERWKTMSAKEKGKFEDMAKADKARYEREMKTYIPPKGETKKKFKDPNAPKRPPSAFFLFCSEYRPKIKGEHPGLSIGDVAKKLGEMWNNTAADDKQPYEKKAAKLKEKYEKF

SEQ ID NO: 38307 - protein, 158 aa, Homo sapiens; identical to SEQ ID NO: 38306
  Payload ID: 7602
  Gene Symbol: HMGB1
  Gene Name: high mobility group box 1
  ENSP ID: ENSP00000382412

SEQ ID NO: 38308 - protein, 215 aa, Homo sapiens; identical to SEQ ID NO: 38304
  Payload ID: 7602
  Gene Symbol: HMGB1
  Gene Name: high mobility group box 1
  Uniprot ID: P09429
  ENSP ID: ENSP00000382417

SEQ ID NO: 38309 - protein, 215 aa, Homo sapiens; identical to SEQ ID NO: 38304
  Payload ID: 7602
  Gene Symbol: HMGB1
  Gene Name: high mobility group box 1
  Uniprot ID: P09429
  ENSP ID: ENSP00000384678

SEQ ID NO: 38310 - protein, 209 aa, Homo sapiens
  Payload ID: 7603
  Gene Symbol: HMGB2
  Gene Name: high mobility group box 2
  Uniprot ID: P26583
  ENSP ID: ENSP00000296503
MGKGDPNKPRGKMSSYAFFVQTCREEHKKKHPDSSVNFAEFSKKCSERWKTMSAKEKSKFEDMAKSDKARYDREMKNYVPPKGDKKGKKKDPNAPKRPPSAFFLFCSEHRPKIKSEHPGLSIGDTAKKLGEMWSEQSAKDKQPYEQKAAKLKEKYEKDIAAYRAKGKSEAGKKGPGRPTGSKKKNEPEDEEEEEEEEDEDEEEEDEDEE

SEQ ID NO: 38311 - protein, 209 aa, Homo sapiens; identical to SEQ ID NO: 38310
  Payload ID: 7603
  Gene Symbol: HMGB2
  Gene Name: high mobility group box 2
  Uniprot ID: P26583
  ENSP ID: ENSP00000393448

SEQ ID NO: 38312 - protein, 209 aa, Homo sapiens; identical to SEQ ID NO: 38310
  Payload ID: 7603
  Gene Symbol: HMGB2
  Gene Name: high mobility group box 2
  Uniprot ID: P26583
  ENSP ID: ENSP00000404912

SEQ ID NO: 38313 - protein, 134 aa, Homo sapiens
  Payload ID: 7603
  Gene Symbol: HMGB2
  Gene Name: high mobility group box 2
  ENSP ID: ENSP00000423001
MGKGDPNKPRGKMSSYAFFVQTCREEHKKKHPDSSVNFAEFSKKCSERWKTMSAKEKSKFEDMAKSDKARYDREMKNYVPPKGDKKGKKKDPNAPKRPPSAFFLFCSEHRPKIKSEHPGLSIGDTAKKLGEMWS

SEQ ID NO: 38314 - protein, 200 aa, Homo sapiens
  Payload ID: 7604
  Gene Symbol: HMGB3
  Gene Name: high mobility group box 3
  Uniprot ID: O15347
  ENSP ID: ENSP00000359393
MAKGDPKKPKGKMSAYAFFVQTCREEHKKKNPEVPVNFAEFSKKCSERWKTMSGKEKSKFDEMAKADKVRYDREMKDYGPAKGGKKKKDPNAPKRPPSGFFLFCSEFRPKIKSTNPGISIGDVAKKLGEMWNNLNDSEKQPYITKAAKLKEKYEKDVADYKSKGKFDGAKGPAKVARKKVEEEDEEEEEEEEEEEEEEDE

SEQ ID NO: 38315 - protein, 193 aa, Homo sapiens
  Payload ID: 7604
  Gene Symbol: HMGB3
  Gene Name: high mobility group box 3
  ENSP ID: ENSP00000405601
MAKGDPKKPKGKMSAYAFFVQTCREEHKKKNPEVPVNFAEFSKKCSERWKTMSGKEKSKFDEMAKADKVRYDREMKDYGPAKGGKKKKDPNAPKRPPSGFFLFCSEFRPKIKSTNPGISIGDVAKKLGEMWNNLNDSEKQPYITKAAKLKEKYEKDVADYKSKGKFDGAKGPAKVARKKVEEEDEEEEEEEEE

SEQ ID NO: 38316 - protein, 188 aa, Homo sapiens
  Payload ID: 7604
  Gene Symbol: HMGB3
  Gene Name: high mobility group box 3
  ENSP ID: ENSP00000410354
MAKGDPKKPKGKMSAYAFFVQTCREEHKKKNPEVPVNFAEFSKKCSERWKTMSGKEKSKFDEMAKADKVRYDREMKDYGPAKGGKKKKDPNAPKRPPSGFFLFCSEFRPKIKSTNPGISIGDVAKKLGEMWNNLNDSEKQPYITKAAKLKEKYEKDVADYKSKGKFDGAKGPAKVARKKVEEEDEEEE

SEQ ID NO: 38317 - protein, 153 aa, Homo sapiens
  Payload ID: 7604
  Gene Symbol: HMGB3
  Gene Name: high mobility group box 3
  ENSP ID: ENSP00000417027
MAKGDPKKPKGKMSAYAFFVQTCREEHKKKNPEVPVNFAEFSKKCSERWKTMSGKEKSKFDEMAKADKVRYDREMKDYGPAKGGKKKKDPNAPKRPPSGFFLFCSEFRPKIKSTNPGISIGDVAKKLGEMWNNLNDSEKQPYITKAAKLKEKY

SEQ ID NO: 38318 - protein, 200 aa, Homo sapiens; identical to SEQ ID NO: 38314
  Payload ID: 7604
  Gene Symbol: HMGB3
  Gene Name: high mobility group box 3
  Uniprot ID: O15347
  ENSP ID: ENSP00000442758

SEQ ID NO: 38319 - protein, 186 aa, Homo sapiens
  Payload ID: 7605
  Gene Symbol: HMGB4
  Gene Name: high mobility group box 4
  Uniprot ID: Q8WW32
  ENSP ID: ENSP00000429214
MGKEIQLKPKANVSSYVHFLLNYRNKFKEQQPNTYVGFKEFSRKCSEKWRSISKHEKAKYEALAKLDKARYQEEMMNYVGKRKKRRKRDPQEPRRPPSSFLLFCQDHYAQLKRENPNWSVVQVAKATGKMWSTATDLEKHPYEQRVALLRAKYFEELELYRKQCNARKKYRMSARNRCRGKRVRQS

SEQ ID NO: 38320 - protein, 186 aa, Homo sapiens; identical to SEQ ID NO: 38319
  Payload ID: 7605
  Gene Symbol: HMGB4
  Gene Name: high mobility group box 4
  Uniprot ID: Q8WW32
  ENSP ID: ENSP00000430919

SEQ ID NO: 38321 - protein, 90 aa, Homo sapiens
  Payload ID: 7606
  Gene Symbol: HMGN2
  Gene Name: high mobility group nucleosomal binding domain 2
  Uniprot ID: P05204
  ENSP ID: ENSP00000355228
MPKRKAEGDAKGDKAKVKDEPQRRSARLSAKPAPPKPEPKPKKAPAKKGEKVPKGKKGKADAGKEGNNPAENGDAKTDQAQKAEGAGDAK

SEQ ID NO: 38322 - protein, 90 aa, Homo sapiens; identical to SEQ ID NO: 38321
  Payload ID: 7606
  Gene Symbol: HMGN2
  Gene Name: high mobility group nucleosomal binding domain 2
  Uniprot ID: P05204
  ENSP ID: ENSP00000481160

SEQ ID NO: 38323 - protein, 77 aa, Homo sapiens
  Payload ID: 7607
  Gene Symbol: HMGN3
  Gene Name: high mobility group nucleosomal binding domain 3
  Uniprot ID: Q15651
  ENSP ID: ENSP00000275036
MPKRKSPENTEGKDGSKVTKQEPTRRSARLSAKPAPPKPEPKPRKTSAKKEPGAKISRGAKGKKEEKQEAGKEGTEN

SEQ ID NO: 38324 - protein, 99 aa, Homo sapiens
  Payload ID: 7607
  Gene Symbol: HMGN3
  Gene Name: high mobility group nucleosomal binding domain 3
  Uniprot ID: Q15651
  ENSP ID: ENSP00000341267
MPKRKSPENTEGKDGSKVTKQEPTRRSARLSAKPAPPKPEPKPRKTSAKKEPGAKISRGAKGKKEEKQEAGKEGTAPSENGETKAEEAQKTESVDNEGE

SEQ ID NO: 38325 - protein, 130 aa, Homo sapiens
  Payload ID: 7607
  Gene Symbol: HMGN3
  Gene Name: high mobility group nucleosomal binding domain 3
  ENSP ID: ENSP00000482613
MPKRKSPENTEGKDGSKVTKQEPTRRSARLSAKPAPPKPEPKPRKTSAKKEPGAKISRGAKGKKEEKQEAGKEGTAPSENGETKAEEIHISRSTVNVSTSRGTPPSTLSVKGQIETVRAQKTESVDNEGE

SEQ ID NO: 38326 - protein, 90 aa, Homo sapiens
  Payload ID: 7608
  Gene Symbol: HMGN4
  Gene Name: high mobility group nucleosomal binding domain 4
  Uniprot ID: O00479
  ENSP ID: ENSP00000366798
MPKRKAKGDAKGDKAKVKDEPQRRSARLSAKPAPPKPEPRPKKASAKKGEKLPKGRKGKADAGKDGNNPAKNRDASTLQSQKAEGTGDAK

SEQ ID NO: 38327 - protein, 48 aa, Homo sapiens
  Payload ID: 7609
  Gene Symbol: HMGN1
  Gene Name: high mobility group nucleosome binding domain 1
  ENSP ID: ENSP00000288344
MPKRKVSSAEGAAKEEPKRRSARLSAKPPAKVEAKPKKAAAKILQTPK

SEQ ID NO: 38328 - protein, 116 aa, Homo sapiens
  Payload ID: 7609
  Gene Symbol: HMGN1
  Gene Name: high mobility group nucleosome binding domain 1
  ENSP ID: ENSP00000370123
MFEPNSPRRGGARYQWPEGAQVSSAEGAAKEEPKRRSARLSAKPPAKVEAKPKKAAAKDKSSDKKVQTKGKRGAKGKQAEVANQETKEDLPAENGETKTEESPASDEAGEKEAKSD

SEQ ID NO: 38329 - protein, 90 aa, Homo sapiens
  Payload ID: 7609
  Gene Symbol: HMGN1
  Gene Name: high mobility group nucleosome binding domain 1
  ENSP ID: ENSP00000370124
MPKRKVSSAEGAAKEEKPPAKVEAKPKKAAAKDKSSDKKVQTKGKRGAKGKQAEVANQETKEDLPAENGETKTEESPASDEAGEKEAKSD

SEQ ID NO: 38330 - protein, 100 aa, Homo sapiens
  Payload ID: 7609
  Gene Symbol: HMGN1
  Gene Name: high mobility group nucleosome binding domain 1
  Uniprot ID: P05114
  ENSP ID: ENSP00000370125
MPKRKVSSAEGAAKEEPKRRSARLSAKPPAKVEAKPKKAAAKDKSSDKKVQTKGKRGAKGKQAEVANQETKEDLPAENGETKTEESPASDEAGEKEAKSD

SEQ ID NO: 38331 - protein, 45 aa, Homo sapiens
  Payload ID: 7609
  Gene Symbol: HMGN1
  Gene Name: high mobility group nucleosome binding domain 1
  ENSP ID: ENSP00000395291
MPKRKVSSAEGAAKEEPKRRSARLSAKPPAKVEAKPKKAAAKVEV

SEQ ID NO: 38332 - protein, 44 aa, Homo sapiens
  Payload ID: 7609
  Gene Symbol: HMGN1
  Gene Name: high mobility group nucleosome binding domain 1
  ENSP ID: ENSP00000395787
MPKRKVSSAEGAAKEEPKRRSARLSAKPPAKVEAKPKKAAAKCR

SEQ ID NO: 38333 - protein, 45 aa, Homo sapiens; identical to SEQ ID NO: 38331
  Payload ID: 7609
  Gene Symbol: HMGN1
  Gene Name: high mobility group nucleosome binding domain 1
  ENSP ID: ENSP00000396693

SEQ ID NO: 38334 - protein, 44 aa, Homo sapiens; identical to SEQ ID NO: 38332
  Payload ID: 7609
  Gene Symbol: HMGN1
  Gene Name: high mobility group nucleosome binding domain 1
  ENSP ID: ENSP00000414421

SEQ ID NO: 38335 - protein, 282 aa, Homo sapiens
  Payload ID: 7610
  Gene Symbol: HMGN5
  Gene Name: high mobility group nucleosome binding domain 5
  Uniprot ID: P82970
  ENSP ID: ENSP00000350848
MPKRKAAGQGDMRQEPKRRSARLSAMLVPVTPEVKPKRTSSSRKMKTKSDMMEENIDTSAQAVAETKQEAVVEEDYNENAKNGEAKITEAPASEKEIVEVKEENIEDATEKGGEKKEAVAAEVKNEEEDQKEDEEDQNEEKGEAGKEDKDEKGEEDGKEDKNGNEKGEDAKEKEDGKKGEDGKGNGEDGKEKGEDEKEEEDRKETGDGKENEDGKEKGDKKEGKDVKVKEDEKEREDGKEDEGGNEEEAGKEKEDLKEEEEGKEEDEIKEDDGKKEEPQSIV

SEQ ID NO: 38336 - protein, 161 aa, Homo sapiens
  Payload ID: 7610
  Gene Symbol: HMGN5
  Gene Name: high mobility group nucleosome binding domain 5
  ENSP ID: ENSP00000362347
MPKRKPKRRSARLSAMLVPVTPEVKPKRTSSSRKMKTKSDMMEENIDTSAQAVAETKQEAVVEEDYNENAKNGEAKITEAPASEKEIVEVKEENIEDATEKGGEKKEAVAAEVKNEEEDQKEDEEDQNEEKGEAGKEDKDEKGEEDGKEDKNGNEKGEDAK

SEQ ID NO: 38337 - protein, 148 aa, Homo sapiens
  Payload ID: 7610
  Gene Symbol: HMGN5
  Gene Name: high mobility group nucleosome binding domain 5
  ENSP ID: ENSP00000399626
MPKRKAAGQGDMRQEPKRRSARLSAMLVPVTPEVKPKRTSSSRKMKTKSDMMEENIDTSAQAVAETKQEAVVEEDYNENAKNGEAKITEAPASEKEIVEVKEENIEDATEKGGEKKEAVAAEVKNEEEDQKEDEEDQNEEKGEAGKED

SEQ ID NO: 38338 - protein, 89 aa, Homo sapiens
  Payload ID: 7610
  Gene Symbol: HMGN5
  Gene Name: high mobility group nucleosome binding domain 5
  ENSP ID: ENSP00000404810
MPKRKAAGQGDMRQEPKRRSARLSAMLVPVTPEVKPKRTSSSRKMKTKSDMMEENIDTSAQAVAETKQEAVVEEDYNENAKNGEAKITE

SEQ ID NO: 38339 - protein, 201 aa, Homo sapiens
  Payload ID: 7610
  Gene Symbol: HMGN5
  Gene Name: high mobility group nucleosome binding domain 5
  ENSP ID: ENSP00000408060
MPKRKMLVPVTPEVKPKRTSSSRKMKTKSDMMEENIDTSAQAVAETKQEAVVEEDYNENAKNGEAKITEAPASEKEIVEVKEENIEDATEKGGEKKEAVAAEVKNEEEDQKEDEEDQNEEKGEAGKEDKDEKGEEDGKEDKNGNEKGEDAKEKEDGKKGEDGKGNGEDGKEKGEDEKEEEDRKETGDGKENEDGKEKGDKK

SEQ ID NO: 38340 - protein, 102 aa, Homo sapiens
  Payload ID: 7610
  Gene Symbol: HMGN5
  Gene Name: high mobility group nucleosome binding domain 5
  ENSP ID: ENSP00000413402
MPKRKAAGQGDMRQEPKRRSARLSAMLVPVTPEVKPKRTSSSRKMKTKSDMMEENIDTSAQAVAETKQEAVVEEDYNENAKNGEAKITEAPASEKEIVEVKE

SEQ ID NO: 38341 - protein, 690 aa, Homo sapiens
  Payload ID: 7611
  Gene Symbol: HDX
  Gene Name: highly divergent homeobox
  Uniprot ID: Q7Z353
  ENSP ID: ENSP00000297977
MNLRSVFTVEQQRILQRYYENGMTNQSKNCFQLILQCAQETKLDFSVVRTWVGNKRRKMSSKNSESGTATTGTSLSAPDITVRNVVNIARPSSQQSSWTSANNDVIVTGIYSPASSSSRQGTNKHTDTQITEAHKIPIQKTATKNDTEFQLHIPVQRQVAHCKNASLLLGEKTIILSRQTSVLNAGNSVFNHAKKNYGNSSVQASEMTVPQKPSVCHRPCKIEPVGIQRSYKPEHTGPALHNLCGQKPTIRDPYCRTQNLEIREVFSLAVSDYPQRILGGNAPQKPSSAEGNCLSIAMETGDAEDEYAREEELASMRAQIPSYSRFYESGSSLRAENQSTTLPGPGRNMPNSQMVNIRDMSDNVLYQNRNYHLTPRTSLHTASSTMYSNTNPLRSNFSPHFASSNQLRLSQNQNNYQISGNLTVPWITGCSRKRALQDRTQFSDRDLATLKKYWDNGMTSLGSVCREKIEAVATELNVDCEIVRTWIGNRRRKYRLMGIEVPPPRGGPADFSEQPESGSLSALTPGEEAGPEVGEDNDRNDEVSICLSEGSSQEEPNEVVPNDARAHKEEDHHAVTTDNVKIEIIDDEESDMISNSEVEQVNSFLDYKNEEVKFIENELEIQKQKYFKLQTFVRSLILAMKADDKEQQQALLSDLPPELEEMDFNHASLEPDDTSFSVSSLSEKNVSESL

SEQ ID NO: 38342 - protein, 690 aa, Homo sapiens; identical to SEQ ID NO: 38341
  Payload ID: 7611
  Gene Symbol: HDX
  Gene Name: highly divergent homeobox
  Uniprot ID: Q7Z353
  ENSP ID: ENSP00000362272

SEQ ID NO: 38343 - protein, 207 aa, Homo sapiens
  Payload ID: 7611
  Gene Symbol: HDX
  Gene Name: highly divergent homeobox
  ENSP ID: ENSP00000387790
MSSKNSESGTATTGTSLSAPDITVRNVVNIARPSSQQSSWTSANNDVIVTGIYSPASSSSRQGTNKHTDTQITEAHKIPIQKTATKNDTEFQLHIPVQRQVAHCKNASLLLGEKTIILSRQTSVLNAGNSVFNHAKKNYGNSSVQASEMTVPQKPSVCHRPCKIEPVGIQRSYKPEHTGPALHNLCGQKPTIRDPYCRTQNLEIREV

SEQ ID NO: 38344 - protein, 632 aa, Homo sapiens
  Payload ID: 7611
  Gene Symbol: HDX
  Gene Name: highly divergent homeobox
  Uniprot ID: Q7Z353
  ENSP ID: ENSP00000423670
MSSKNSESGTATTGTSLSAPDITVRNVVNIARPSSQQSSWTSANNDVIVTGIYSPASSSSRQGTNKHTDTQITEAHKIPIQKTATKNDTEFQLHIPVQRQVAHCKNASLLLGEKTIILSRQTSVLNAGNSVFNHAKKNYGNSSVQASEMTVPQKPSVCHRPCKIEPVGIQRSYKPEHTGPALHNLCGQKPTIRDPYCRTQNLEIREVFSLAVSDYPQRILGGNAPQKPSSAEGNCLSIAMETGDAEDEYAREEELASMRAQIPSYSRFYESGSSLRAENQSTTLPGPGRNMPNSQMVNIRDMSDNVLYQNRNYHLTPRTSLHTASSTMYSNTNPLRSNFSPHFASSNQLRLSQNQNNYQISGNLTVPWITGCSRKRALQDRTQFSDRDLATLKKYWDNGMTSLGSVCREKIEAVATELNVDCEIVRTWIGNRRRKYRLMGIEVPPPRGGPADFSEQPESGSLSALTPGEEAGPEVGEDNDRNDEVSICLSEGSSQEEPNEVVPNDARAHKEEDHHAVTTDNVKIEIIDDEESDMISNSEVEQVNSFLDYKNEEVKFIENELEIQKQKYFKLQTFVRSLILAMKADDKEQQQALLSDLPPELEEMDFNHASLEPDDTSFSVSSLSEKNVSESL

SEQ ID NO: 38345 - protein, 193 aa, Homo sapiens
  Payload ID: 7612
  Gene Symbol: HPCA
  Gene Name: hippocalcin
  Uniprot ID: P84074
  ENSP ID: ENSP00000362566
MGKQNSKLRPEMLQDLRENTEFSELELQEWYKGFLKDCPTGILNVDEFKKIYANFFPYGDASKFAEHVFRTFDTNSDGTIDFREFIIALSVTSRGRLEQKLMWAFSMYDLDGNGYISREEMLEIVQAIYKMVSSVMKMPEDESTPEKRTEKIFRQMDTNNDGKLSLEEFIRGAKSDPSIVRLLQCDPSSASQF

SEQ ID NO: 38346 - protein, 191 aa, Homo sapiens
  Payload ID: 7613
  Gene Symbol: HPCAL4
  Gene Name: hippocalcin like 4
  Uniprot ID: Q9UM19
  ENSP ID: ENSP00000361935
MGKTNSKLAPEVLEDLVQNTEFSEQELKQWYKGFLKDCPSGILNLEEFQQLYIKFFPYGDASKFAQHAFRTFDKNGDGTIDFREFICALSVTSRGSFEQKLNWAFEMYDLDGDGRITRLEMLEIIEAIYKMVGTVIMMRMNQDGLTPQQRVDKIFKKMDQDKDDQITLEEFKEAAKSDPSIVLLLQCDMQK

SEQ ID NO: 38347 - protein, 191 aa, Homo sapiens; identical to SEQ ID NO: 38346
  Payload ID: 7613
  Gene Symbol: HPCAL4
  Gene Name: hippocalcin like 4
  Uniprot ID: Q9UM19
  ENSP ID: ENSP00000481834

SEQ ID NO: 38348 - protein, 119 aa, Homo sapiens
  Payload ID: 7613
  Gene Symbol: HPCAL4
  Gene Name: hippocalcin like 4
  ENSP ID: ENSP00000484070
MGKTNSKLAPEVLEDLVQNTEFSEQELKQWYKGFLKDCPSGILNLEEFQQLYIKAIYKMVGTVIMMRMNQDGLTPQQRVDKIFKKMDQDKDDQITLEEFKEAAKSDPSIVLLLQCDMQK

SEQ ID NO: 38349 - protein, 193 aa, Homo sapiens
  Payload ID: 7614
  Gene Symbol: HPCAL1
  Gene Name: hippocalcin-like 1
  Uniprot ID: P37235
  ENSP ID: ENSP00000310749
MGKQNSKLRPEVLQDLRENTEFTDHELQEWYKGFLKDCPTGHLTVDEFKKIYANFFPYGDASKFAEHVFRTFDTNGDGTIDFREFIIALSVTSRGKLEQKLKWAFSMYDLDGNGYISRSEMLEIVQAIYKMVSSVMKMPEDESTPEKRTDKIFRQMDTNNDGKLSLEEFIRGAKSDPSIVRLLQCDPSSASQF

SEQ ID NO: 38350 - protein, 193 aa, Homo sapiens; identical to SEQ ID NO: 38349
  Payload ID: 7614
  Gene Symbol: HPCAL1
  Gene Name: hippocalcin-like 1
  Uniprot ID: P37235
  ENSP ID: ENSP00000371184

SEQ ID NO: 38351 - protein, 103 aa, Homo sapiens
  Payload ID: 7614
  Gene Symbol: HPCAL1
  Gene Name: hippocalcin-like 1
  ENSP ID: ENSP00000388856
  MOD_RES (1)..(1): Any amino acid
XLSVTSRGKLEQKLKWAFSMYDLDGNGYISRSEMLEIVQAIYKMVSSVMKMPEDESTPEKRTDKIFRQMDTNNDVSLGKPPMVTRCPNLPPGLALPTSSEGIF

SEQ ID NO: 38352 - protein, 30 aa, Homo sapiens
  Payload ID: 7614
  Gene Symbol: HPCAL1
  Gene Name: hippocalcin-like 1
  ENSP ID: ENSP00000413689
MGKQNSKLRPEVLQDLRENTEFTDHELQEW

SEQ ID NO: 38353 - protein, 175 aa, Homo sapiens
  Payload ID: 7614
  Gene Symbol: HPCAL1
  Gene Name: hippocalcin-like 1
  ENSP ID: ENSP00000416359
MGKQNSKLRPEVLQDLRENTEFTDHELQEWYKGFLKDCPTGHLTVDEFKKIYANFFPYGDASKFAEHVFRTFDTNGDGTIDFREFIIALSVTSRGKLEQKLKWAFSMYDLDGNGYISRSEMLEIVQAIYKMVSSVMKMPEDESTPEKRTDKIFRQMDTNNDGSAGWGRGCMCTPR

SEQ ID NO: 38354 - protein, 193 aa, Homo sapiens; identical to SEQ ID NO: 38349
  Payload ID: 7614
  Gene Symbol: HPCAL1
  Gene Name: hippocalcin-like 1
  Uniprot ID: P37235
  ENSP ID: ENSP00000478231

SEQ ID NO: 38355 - protein, 193 aa, Homo sapiens; identical to SEQ ID NO: 38349
  Payload ID: 7614
  Gene Symbol: HPCAL1
  Gene Name: hippocalcin-like 1
  Uniprot ID: P37235
  ENSP ID: ENSP00000482993

SEQ ID NO: 38356 - protein, 193 aa, Homo sapiens; identical to SEQ ID NO: 38349
  Payload ID: 7614
  Gene Symbol: HPCAL1
  Gene Name: hippocalcin-like 1
  Uniprot ID: P37235
  ENSP ID: ENSP00000483786

SEQ ID NO: 38357 - protein, 490 aa, Homo sapiens
  Payload ID: 7615
  Gene Symbol: HIAT1
  Gene Name: hippocampus abundant transcript 1
  Uniprot ID: Q96MC6
  ENSP ID: ENSP00000359171
MTQGKKKKRAANRSIMLAKKIIIKDGGTPQGIGSPSVYHAVIVIFLEFFAWGLLTAPTLVVLHETFPKHTFLMNGLIQGVKGLLSFLSAPLIGALSDVWGRKSFLLLTVFFTCAPIPLMKISPWWYFAVISVSGVFAVTFSVVFAYVADITQEHERSMAYGLVSATFAASLVTSPAIGAYLGRVYGDSLVVVLATAIALLDICFILVAVPESLPEKMRPASWGAPISWEQADPFASLKKVGQDSIVLLICITVFLSYLPEAGQYSSFFLYLRQIMKFSPESVAAFIAVLGILSIIAQTIVLSLLMRSIGNKNTILLGLGFQILQLAWYGFGSEPWMMWAAGAVAAMSSITFPAVSALVSRTADADQQGVVQGMITGIRGLCNGLGPALYGFIFYIFHVELKELPITGTDLGTNTSPQHHFEQNSIIPGPPFLFGACSVLLALLVALFIPEHTNLSLRSSSWRKHCGSHSHPHNTQAPGEAKEPLLQDTNV

SEQ ID NO: 38358 - protein, 120 aa, Homo sapiens
  Payload ID: 7615
  Gene Symbol: HIAT1
  Gene Name: hippocampus abundant transcript 1
  ENSP ID: ENSP00000411185
  MOD_RES (1)..(1): Any amino acid
XHETFPKHTFLMNGLIQGVKGLLSFLSAPLIGALSDVWGRKSFLLLTVFFTCAPIPLMKISPWWYFAVISVSGVFAVTFSVVFAYVADITQEHERSMAYGLVCMFILYLLYLLRNALFLR

SEQ ID NO: 38359 - protein, 506 aa, Homo sapiens
  Payload ID: 7616
  Gene Symbol: HIATL1
  Gene Name: hippocampus abundant transcript-like 1
  Uniprot ID: Q5SR56
  ENSP ID: ENSP00000364493
MSVEPPPELEEKAASEPEAGAMPEKRAGAQAAGSTWLQGFGRPSVYHAAIVIFLEFFAWGLLTTPMLTVLHETFSQHTFLMNGLIQGVKGLLSFLSAPLIGALSDVWGRKPFLLGTVFFTCFPIPLMRISPWWYFAMISVSGVFSVTFSVIFAYVADVTQEHERSTAYGWVSATFAASLVSSPAIGAYLSASYGDSLVVLVATVVALLDICFILVAVPESLPEKMRPVSWGAQISWKQADPFASLKKVGKDSTVLLICITVFLSYLPEAGQYSSFFLYLRQVIGFGSVKIAAFIAMVGILSIVAQTAFLSILMRSLGNKNTVLLGLGFQMLQLAWYGFGSQAWMMWAAGTVAAMSSITFPAISALVSRNAESDQQGVAQGIITGIRGLCNGLGPALYGFIFYMFHVELTELGPKLNSNNVPLQGAVIPGPPFLFGACIVLMSFLVALFIPEYSKASGVQKHSNSSSGSLTNTPERGSDEDIEPLLQDSSIWELSSFEEPGNQCTEL

SEQ ID NO: 38360 - protein, 157 aa, Homo sapiens
  Payload ID: 7616
  Gene Symbol: HIATL1
  Gene Name: hippocampus abundant transcript-like 1
  ENSP ID: ENSP00000405909
MVGILSIVAQTAFLSILMRSLGNKNTVLLGLGFQMLQLAWYGFGSQAWMMWAAGTVAAMSSITFPAISALVSRNAESDQQGFRSCPGDHNWNKRTMQWPGPALYGFIFYMFHVELTELGPKLNSNNVPLQGSCHPRPAVFIWGMYSPYVFSGCLIHS

SEQ ID NO: 38361 - protein, 134 aa, Homo sapiens
  Payload ID: 7617
  Gene Symbol: HIATL2
  Gene Name: hippocampus abundant transcript-like 2
  Uniprot ID: Q5VZR4
  ENSP ID: ENSP00000364371
MSVEPPPELEEKAASEPEAGAMPEKRAGAQAAGSTWLQGFGPPSVYHAAIVIFLEFFAWGLLTTPMLTVLHETFSQHTFLMNGLIQGVKGLLSFLSAPLIGALSDVWGRKPFLLGTVFFTCFPIPLMRISPCQA

SEQ ID NO: 38362 - protein, 150 aa, Homo sapiens
  Payload ID: 7617
  Gene Symbol: HIATL2
  Gene Name: hippocampus abundant transcript-like 2
  ENSP ID: ENSP00000473444
MSVEPPPELEEKAASEPEAGAMPEKRAGAQAAGSTWLQGFGPPSVYHAAIVIFLEFFAWGLLTTPMLTVLHETFSQHTFLMNGLIQGVKGLLSFLSAPLIGALSDVWGRKPFLLGTVFFTCFPIPLMRISPCRVWWRAPVVPATCGRRMA

SEQ ID NO: 38363 - protein, 556 aa, Homo sapiens
  Payload ID: 7618
  Gene Symbol: HIRIP3
  Gene Name: HIRA interacting protein 3
  Uniprot ID: Q9BW71
  ENSP ID: ENSP00000279392
MAREKEMQEFTRSFFRGRPDLSTLTHSIVRRRYLAHSGRSHLEPEEKQALKRLVEEELLKMQVDEAASREDKLDLTKKGKRPPTPCSDPERKRFRFNSESESGSEASSPDYFGPPAKNGVAAEVSPAKEENPRRASKAVEESSDEERQRDLPAQRGEESSEEEEKGYKGKTRKKPVVKKQAPGKASVSRKQAREESEESEAEPVQRTAKKVEGNKGTKSLKESEQESEEEILAQKKEQREEEVEEEEKEEDEEKGDWKPRTRSNGRRKSAREERSCKQKSQAKRLLGDSDSEEEQKEAASSGDDSGRDREPPVQRKSEDRTQLKGGKRLSGSSEDEEDSGKGEPTAKGSRKMARLGSTSGEESDLEREVSDSEAGGGPQGERKNRSSKKSSRKGRTRSSSSSSDGSPEAKGGKAGSGRRGEDHPAVMRLKRYIRACGAHRNYKKLLGSCCSHKERLSILRAELEALGMKGTPSLGKCRALKEQREEAAEVASLDVANIISGSGRPRRRTAWNPLGEAAPPGELYRRTLDSDEERPRPAPPDWSHMRGIISSDGESN

SEQ ID NO: 38364 - protein, 175 aa, Homo sapiens
  Payload ID: 7618
  Gene Symbol: HIRIP3
  Gene Name: HIRA interacting protein 3
  Uniprot ID: Q9BW71
  ENSP ID: ENSP00000456824
MAREKEMQEFTRSFFRGRPDLSTLTHSIVRRRYLAHSGRSHLEPEEKQALKRLVEEELLKMQVDEAASREDKLDLTKKGKRPPTPCSDPERKRFRFNSESGWLRSPWRGPPGCDEAEALHSGLWCPSKLQEAVGLLLLTQGAPEYPPGRTGSARHEGYPFPREVSGPEGAEGGGS

SEQ ID NO: 38365 - protein, 51 aa, Homo sapiens
  Payload ID: 7619
  Gene Symbol: HNMT
  Gene Name: histamine N-methyltransferase
  Uniprot ID: P50135
  ENSP ID: ENSP00000280096
MASSMRSLFSDHGKYVESFRRFLNHSTEHQCMQEFMDKKLPGIIGRYQNCC

SEQ ID NO: 38366 - protein, 292 aa, Homo sapiens
  Payload ID: 7619
  Gene Symbol: HNMT
  Gene Name: histamine N-methyltransferase
  Uniprot ID: P50135
  ENSP ID: ENSP00000280097
MASSMRSLFSDHGKYVESFRRFLNHSTEHQCMQEFMDKKLPGIIGRIGDTKSEIKILSIGGGAGEIDLQILSKVQAQYPGVCINNEVVEPSAEQIAKYKELVAKTSNLENVKFAWHKETSSEYQSRMLEKKELQKWDFIHMIQMLYYVKDIPATLKFFHSLLGTNAKMLIIVVSGSSGWDKLWKKYGSRFPQDDLCQYITSDDLTQMLDNLGLKYECYDLLSTMDISDCFIDGNENGDLLWDFLTETCNFNATAPPDLRAELGKDLQEPEFSAKKEGKVLFNNTLSFIVIEA

SEQ ID NO: 38367 - protein, 126 aa, Homo sapiens
  Payload ID: 7619
  Gene Symbol: HNMT
  Gene Name: histamine N-methyltransferase
  Uniprot ID: P50135
  ENSP ID: ENSP00000333259
MASSMRSLFSDHGKYVESFRRFLNHSTEHQCMQEFMDKKLPGIIGRIGDTKSEIKILSIGGGADCLIRGSSRVLKRNSCFILCSTRQKDKPGMRIHDERSSELPFGAARLESKSAFPSFLVSFILF

SEQ ID NO: 38368 - protein, 292 aa, Homo sapiens; identical to SEQ ID NO: 38366
  Payload ID: 7619
  Gene Symbol: HNMT
  Gene Name: histamine N-methyltransferase
  Uniprot ID: P50135
  ENSP ID: ENSP00000386940

SEQ ID NO: 38369 - protein, 51 aa, Homo sapiens; identical to SEQ ID NO: 38365
  Payload ID: 7619
  Gene Symbol: HNMT
  Gene Name: histamine N-methyltransferase
  Uniprot ID: P50135
  ENSP ID: ENSP00000419415

SEQ ID NO: 38370 - protein, 487 aa, Homo sapiens
  Payload ID: 7620
  Gene Symbol: HRH1
  Gene Name: histamine receptor H1
  Uniprot ID: P35367
  ENSP ID: ENSP00000380247
MSLPNSSCLLEDKMCEGNKTTMASPQLMPLVVVLSTICLVTVGLNLLVLYAVRSERKLHTVGNLYIVSLSVADLIVGAVVMPMNILYLLMSKWSLGRPLCLFWLSMDYVASTASIFSVFILCIDRYRSVQQPLRYLKYRTKTRASATILGAWFLSFLWVIPILGWNHFMQQTSVRREDKCETDFYDVTWFKVMTAIINFYLPTLLMLWFYAKIYKAVRQHCQHRELINRSLPSFSEIKLRPENPKGDAKKPGKESPWEVLKRKPKDAGGGSVLKSPSQTPKEMKSPVVFSQEDDREVDKLYCFPLDIVHMQAAAEGSSRDYVAVNRSHGQLKTDEQGLNTHGASEISEDQMLGDSQSFSRTDSDTTTETAPGKGKLRSGSNTGLDYIKFTWKRLRSHSRQYVSGLHMNRERKAAKQLGFIMAAFILCWIPYFIFFMVIAFCKNCCNEHLHMFTIWLGYINSTLNPLIYPLCNENFKKTFKRILHIRS

SEQ ID NO: 38371 - protein, 12 aa, Homo sapiens
  Payload ID: 7620
  Gene Symbol: HRH1
  Gene Name: histamine receptor H1
  ENSP ID: ENSP00000392383
MSLPNSSCLLED

SEQ ID NO: 38372 - protein, 487 aa, Homo sapiens; identical to SEQ ID NO: 38370
  Payload ID: 7620
  Gene Symbol: HRH1
  Gene Name: histamine receptor H1
  Uniprot ID: P35367
  ENSP ID: ENSP00000397028

SEQ ID NO: 38373 - protein, 487 aa, Homo sapiens; identical to SEQ ID NO: 38370
  Payload ID: 7620
  Gene Symbol: HRH1
  Gene Name: histamine receptor H1
  Uniprot ID: P35367
  ENSP ID: ENSP00000406705

SEQ ID NO: 38374 - protein, 359 aa, Homo sapiens
  Payload ID: 7621
  Gene Symbol: HRH2
  Gene Name: histamine receptor H2
  Uniprot ID: P25021
  ENSP ID: ENSP00000231683
MAPNGTASSFCLDSTACKITITVVLAVLILITVAGNVVVCLAVGLNRRLRNLTNCFIVSLAITDLLLGLLVLPFSAIYQLSCKWSFGKVFCNIYTSLDVMLCTASILNLFMISLDRYCAVMDPLRYPVLVTPVRVAISLVLIWVISITLSFLSIHLGWNSRNETSKGNHTTSKCKVQVNEVYGLVDGLVTFYLPLLIMCITYYRIFKVARDQAKRINHISSWKAATIREHKATVTLAAVMGAFIICWFPYFTAFVYRGLRGDDAINEVLEAIVLWLGYANSALNPILYAALNRDFRTGYQQLFCCRLANRNSHKTSLRSNASQLSRTQSREPRQQEEKPLKLQVWSGTEVTAPQGATDR

SEQ ID NO: 38375 - protein, 397 aa, Homo sapiens
  Payload ID: 7621
  Gene Symbol: HRH2
  Gene Name: histamine receptor H2
  Uniprot ID: P25021
  ENSP ID: ENSP00000366506
MAPNGTASSFCLDSTACKITITVVLAVLILITVAGNVVVCLAVGLNRRLRNLTNCFIVSLAITDLLLGLLVLPFSAIYQLSCKWSFGKVFCNIYTSLDVMLCTASILNLFMISLDRYCAVMDPLRYPVLVTPVRVAISLVLIWVISITLSFLSIHLGWNSRNETSKGNHTTSKCKVQVNEVYGLVDGLVTFYLPLLIMCITYYRIFKVARDQAKRINHISSWKAATIREHKATVTLAAVMGAFIICWFPYFTAFVYRGLRGDDAINEVLEAIVLWLGYANSALNPILYAALNRDFRTGYQQLFCCRLANRNSHKTSLRSNASQLSRTQSREPRQQEEKPLKLQVWSGTEVTAPQGATDRPWLCLPECWSVELTHSFIHLFIHSFANIHPIPTTCQEL

SEQ ID NO: 38376 - protein, 373 aa, Homo sapiens
  Payload ID: 7622
  Gene Symbol: HRH3
  Gene Name: histamine receptor H3
  ENSP ID: ENSP00000321482
MERAPPDGPLNASGALAGEAAAAGGARGFSAAWTAVLAALMALLIVATVLGNALVMLAFVADSSLRTQNNFFLLNLAISDFLVGAFCIPLYVPYVLTGRWTFGRGLCKLWLVVDYLLCTSSAFNIVLISYDRFLSVTRAVSYRAQQGDTRRAVRKMLLVWVLAFLLYGPAILSWEYLSGGSSIPEGHCYAEFFYNWYFLITASTLEFFTPFLSVTFFNLSIYLNIQRRTRLRLDGAREAAGPEPPPEAQPSPPPPPGCWGCWQKGHGEAMPLHRKVAKSLAVIVSIFGLCWAPYTLLMIIRAACHGHCVPDYWYETSFWLLWANSAVNPVLYPLCHHSFRRAFTKLLCPQKLKIQPHSSLEHCWKKMKKKTCL

SEQ ID NO: 38377 - protein, 445 aa, Homo sapiens
  Payload ID: 7622
  Gene Symbol: HRH3
  Gene Name: histamine receptor H3
  Uniprot ID: Q9Y5N1
  ENSP ID: ENSP00000342560
MERAPPDGPLNASGALAGEAAAAGGARGFSAAWTAVLAALMALLIVATVLGNALVMLAFVADSSLRTQNNFFLLNLAISDFLVGAFCIPLYVPYVLTGRWTFGRGLCKLWLVVDYLLCTSSAFNIVLISYDRFLSVTRAVSYRAQQGDTRRAVRKMLLVWVLAFLLYGPAILSWEYLSGGSSIPEGHCYAEFFYNWYFLITASTLEFFTPFLSVTFFNLSIYLNIQRRTRLRLDGAREAAGPEPPPEAQPSPPPPPGCWGCWQKGHGEAMPLHRYGVGEAAVGAEAGEATLGGGGGGGSVASPTSSSGSSSRGTERPRSLKRGSKPSASSASLEKRMKMVSQSFTQRFRLSRDRKVAKSLAVIVSIFGLCWAPYTLLMIIRAACHGHCVPDYWYETSFWLLWANSAVNPVLYPLCHHSFRRAFTKLLCPQKLKIQPHSSLEHCWK

SEQ ID NO: 38378 - protein, 200 aa, Homo sapiens
  Payload ID: 7622
  Gene Symbol: HRH3
  Gene Name: histamine receptor H3
  ENSP ID: ENSP00000482567
MERAPPDGPLNASGALAGEAAAAGGARGFSAAWTAVLAALMALLIVATVLGNALVMLAFVADSSLRTQNNFFLLNLAISDFLVGAFCIPLYVPYVLTGRWTFGRGLCKLWLVVDYLLCTSSAFNIVLISYDRFLSVTRAVSYRAQQGDTRRAVRKMLLVWVLAFLLYGPAPAAPRGALRGRAHSRGAPSRRRPRPRWRSA

SEQ ID NO: 38379 - protein, 390 aa, Homo sapiens
  Payload ID: 7623
  Gene Symbol: HRH4
  Gene Name: histamine receptor H4
  Uniprot ID: Q9H3N8
  ENSP ID: ENSP00000256906
MPDTNSTINLSLSTRVTLAFFMSLVAFAIMLGNALVILAFVVDKNLRHRSSYFFLNLAISDFFVGVISIPLYIPHTLFEWDFGKEICVFWLTTDYLLCTASVYNIVLISYDRYLSVSNAVSYRTQHTGVLKIVTLMVAVWVLAFLVNGPMILVSESWKDEGSECEPGFFSEWYILAITSFLEFVIPVILVAYFNMNIYWSLWKRDHLSRCQSHPGLTAVSSNICGHSFRGRLSSRRSLSASTEVPASFHSERQRRKSSLMFSSRTKMNSNTIASKMGSFSQSDSVALHQREHVELLRARRLAKSLAILLGVFAVCWAPYSLFTIVLSFYSSATGPKSVWYRIAFWLQWFNSFVNPLLYPLCHKRFQKAFLKIFCIKKQPLPSQHSRSVSS

SEQ ID NO: 38380 - protein, 302 aa, Homo sapiens
  Payload ID: 7623
  Gene Symbol: HRH4
  Gene Name: histamine receptor H4
  Uniprot ID: Q9H3N8
  ENSP ID: ENSP00000402526
MPDTNSTINLSLSTRVTLAFFMSLVAFAIMLGNALVILAFVVDKNLRHRSSYFFLNLAISDFFVVSESWKDEGSECEPGFFSEWYILAITSFLEFVIPVILVAYFNMNIYWSLWKRDHLSRCQSHPGLTAVSSNICGHSFRGRLSSRRSLSASTEVPASFHSERQRRKSSLMFSSRTKMNSNTIASKMGSFSQSDSVALHQREHVELLRARRLAKSLAILLGVFAVCWAPYSLFTIVLSFYSSATGPKSVWYRIAFWLQWFNSFVNPLLYPLCHKRFQKAFLKIFCIKKQPLPSQHSRSVSS

SEQ ID NO: 38381 - protein, 57 aa, Homo sapiens
  Payload ID: 7624
  Gene Symbol: HTN1
  Gene Name: histatin 1
  Uniprot ID: P15515
  ENSP ID: ENSP00000246896
MKFFVFALVLALMISMISADSHEKRHHGYRRKFHEKHHSHREFPFYGDYGSNYLYDN

SEQ ID NO: 38382 - protein, 57 aa, Homo sapiens; identical to SEQ ID NO: 38381
  Payload ID: 7624
  Gene Symbol: HTN1
  Gene Name: histatin 1
  Uniprot ID: P15515
  ENSP ID: ENSP00000424501

SEQ ID NO: 38383 - protein, 57 aa, Homo sapiens; identical to SEQ ID NO: 38381
  Payload ID: 7624
  Gene Symbol: HTN1
  Gene Name: histatin 1
  Uniprot ID: P15515
  ENSP ID: ENSP00000482787

SEQ ID NO: 38384 - protein, 57 aa, Homo sapiens; identical to SEQ ID NO: 38381
  Payload ID: 7624
  Gene Symbol: HTN1
  Gene Name: histatin 1
  ENSP ID: ENSP00000489198

SEQ ID NO: 38385 - protein, 57 aa, Homo sapiens; identical to SEQ ID NO: 38381
  Payload ID: 7624
  Gene Symbol: HTN1
  Gene Name: histatin 1
  ENSP ID: ENSP00000489349

SEQ ID NO: 38386 - protein, 57 aa, Homo sapiens; identical to SEQ ID NO: 38381
  Payload ID: 7624
  Gene Symbol: HTN1
  Gene Name: histatin 1
  ENSP ID: ENSP00000489510

SEQ ID NO: 38387 - protein, 41 aa, Homo sapiens
  Payload ID: 7625
  Gene Symbol: HTN3
  Gene Name: histatin 3
  ENSP ID: ENSP00000370445
MKFFVFALILALMLSMTGADSHAKEKHHSHRGYRSNYLYDN

SEQ ID NO: 38388 - protein, 51 aa, Homo sapiens
  Payload ID: 7625
  Gene Symbol: HTN3
  Gene Name: histatin 3
  Uniprot ID: P15516
  ENSP ID: ENSP00000432561
MKFFVFALILALMLSMTGADSHAKRHHGYKRKFHEKHHSHRGYRSNYLYDN

SEQ ID NO: 38389 - protein, 51 aa, Homo sapiens; identical to SEQ ID NO: 38388
  Payload ID: 7625
  Gene Symbol: HTN3
  Gene Name: histatin 3
  Uniprot ID: P15516
  ENSP ID: ENSP00000437158

SEQ ID NO: 38390 - protein, 51 aa, Homo sapiens; identical to SEQ ID NO: 38388
  Payload ID: 7625
  Gene Symbol: HTN3
  Gene Name: histatin 3
  ENSP ID: ENSP00000489290

SEQ ID NO: 38391 - protein, 51 aa, Homo sapiens; identical to SEQ ID NO: 38388
  Payload ID: 7625
  Gene Symbol: HTN3
  Gene Name: histatin 3
  ENSP ID: ENSP00000489520

SEQ ID NO: 38392 - protein, 41 aa, Homo sapiens; identical to SEQ ID NO: 38387
  Payload ID: 7625
  Gene Symbol: HTN3
  Gene Name: histatin 3
  ENSP ID: ENSP00000489537

SEQ ID NO: 38393 - protein, 657 aa, Homo sapiens
  Payload ID: 7626
  Gene Symbol: HAL
  Gene Name: histidine ammonia-lyase
  Uniprot ID: P42357
  ENSP ID: ENSP00000261208
MPRYTVHVRGEWLAVPCQDAQLTVGWLGREAVRRYIKNKPDNGGFTSVDDAHFLVRRCKGLGLLDNEDRLEVALENNEFVEVVIEGDAMSPDFIPSQPEGVYLYSKYREPEKYIELDGDRLTTEDLVNLGKGRYKIKLTPTAEKRVQKSREVIDSIIKEKTVVYGITTGFGKFARTVIPINKLQELQVNLVRSHSSGVGKPLSPERCRMLLALRINVLAKGYSGISLETLKQVIEMFNASCLPYVPEKGTVGASGDLAPLSHLALGLVGEGKMWSPKSGWADAKYVLEAHGLKPVILKPKEGLALINGTQMITSLGCEAVERASAIARQADIVAALTLEVLKGTTKAFDTDIHALRPHRGQIEVAFRFRSLLDSDHHPSEIAESHRFCDRVQDAYTLRCCPQVHGVVNDTIAFVKNIITTELNSATDNPMVFANRGETVSGGNFHGEYPAKALDYLAIGIHELAAISERRIERLCNPSLSELPAFLVAEGGLNSGFMIAHCTAAALVSENKALCHPSSVDSLSTSAATEDHVSMGGWAARKALRVIEHVEQVLAIELLAACQGIEFLRPLKTTTPLEKVYDLVRSVVRPWIKDRFMAPDIEAAHRLLLEQKVWEVAAPYIEKYRMEHIPESRPLSPTAFSLQFLHKKSTKIPESEDL

SEQ ID NO: 38394 - protein, 167 aa, Homo sapiens
  Payload ID: 7626
  Gene Symbol: HAL
  Gene Name: histidine ammonia-lyase
  ENSP ID: ENSP00000439385
MPRYTVHVRGEWLAVPCQDAQLTVGWLGREAVRRYIKNKPDNGGFTSVDDAHFLVRRCKGLGLLDNEDRLEVALENNEFVEVVIEGDAMSPDFIPSQPEGVYLYSKYREPEKYIELDGDRLTTEDLVNLGKGRYKIKLTPTAEKRVQKSREVIDSIIKEKTGSFRST

SEQ ID NO: 38395 - protein, 591 aa, Homo sapiens
  Payload ID: 7626
  Gene Symbol: HAL
  Gene Name: histidine ammonia-lyase
  Uniprot ID: P42357
  ENSP ID: ENSP00000440861
MPRYTVHVRGEWLAVPCQDAQLTVGWLGREAVRRYIKNKPDNGGFTSVDDAHFLVRRCKGLGLLDNEDRLEVALENNEFVEVVIEGDAMSPDFIPSQPEGVYLYSKYREPEKYIELDGDRLTTEDLVNLGKGRYKIKLTPTAEKRVQKSREVIDSIIKEKTVVYGITTGFGKFARTVIPINKLQELQVNLVRSHSSGVGKPLSPERCRMLLALRINVLAKGYSGISLETLKQVIEMFNASCLPYVPEKGTVGASGDLAPLSHLALGLVGEGKMWSPKSGWADAKYVLEAHGLKPVILKPKEGLALINGTQMITSLGCEAVERASAIARQADIVAALTLEVLKGTTKAFDTDIHALRPHRGQIEVAFRFRSLLDSDHHPSEIAESHRFCDRVQDAYTLRCCPQVHGVVNDTIAFVKNIITTELNSATDNPMVFANRGETVSGGNFHGEYPAKALDYLAIGIHELAAISERRIERLCNPSLSELPAFLVAEGGLNSGFMIAHCTAAALVSENKALCHPSSVDSLSTSAATEDHVSMGGWAARKALRVIEHVEQVLAIELLAACQGIEFLRPLKTTTPLEKVYDLVRSVVRFGK

SEQ ID NO: 38396 - protein, 449 aa, Homo sapiens
  Payload ID: 7626
  Gene Symbol: HAL
  Gene Name: histidine ammonia-lyase
  Uniprot ID: P42357
  ENSP ID: ENSP00000446364
MLLALRINVLAKGYSGISLETLKQVIEMFNASCLPYVPEKGTVGASGDLAPLSHLALGLVGEGKMWSPKSGWADAKYVLEAHGLKPVILKPKEGLALINGTQMITSLGCEAVERASAIARQADIVAALTLEVLKGTTKAFDTDIHALRPHRGQIEVAFRFRSLLDSDHHPSEIAESHRFCDRVQDAYTLRCCPQVHGVVNDTIAFVKNIITTELNSATDNPMVFANRGETVSGGNFHGEYPAKALDYLAIGIHELAAISERRIERLCNPSLSELPAFLVAEGGLNSGFMIAHCTAAALVSENKALCHPSSVDSLSTSAATEDHVSMGGWAARKALRVIEHVEQVLAIELLAACQGIEFLRPLKTTTPLEKVYDLVRSVVRPWIKDRFMAPDIEAAHRLLLEQKVWEVAAPYIEKYRMEHIPESRPLSPTAFSLQFLHKKSTKIPESEDL

SEQ ID NO: 38397 - protein, 154 aa, Homo sapiens
  Payload ID: 7626
  Gene Symbol: HAL
  Gene Name: histidine ammonia-lyase
  ENSP ID: ENSP00000446678
  MOD_RES (1)..(1): Any amino acid
XRIERLCNPSLSELPAFLVAEGGLNSGFMIAHCTAAALVSENKALCHPSSVDSLSTSAATEDHVSMGGWAARKALRVIEHVEQVLAIELLAACQGIEFLRPLKTTTPLEKVYDLVRSVVRPWIKDRFMAPDIEAAHRLLLEQKASWLLGLFLNF

SEQ ID NO: 38398 - protein, 157 aa, Homo sapiens
  Payload ID: 7626
  Gene Symbol: HAL
  Gene Name: histidine ammonia-lyase
  ENSP ID: ENSP00000447543
MSPDFIPSQPEGVYLKYREPEKYIELDGDRLTTEDLVNLGKGRYKIKLTPTAEKRVQKSREVIDSIIKEKTVVYGITTGFGKFARTVIPINKLQELQVNLVRSHSSGVGKPLSPERCRMLLALRINVLAKGYSGISLETLKQVIEMFNASCLPYVPE

SEQ ID NO: 38399 - protein, 167 aa, Homo sapiens; identical to SEQ ID NO: 38394
  Payload ID: 7626
  Gene Symbol: HAL
  Gene Name: histidine ammonia-lyase
  ENSP ID: ENSP00000447675

SEQ ID NO: 38400 - protein, 336 aa, Homo sapiens
  Payload ID: 7626
  Gene Symbol: HAL
  Gene Name: histidine ammonia-lyase
  ENSP ID: ENSP00000450372
MPRYTVHVRGEWLAVPCQDAQLTVGWLGREAVRRYIKNKPDNGGFTSVDDAHFLVRRCKGLGLLDNEDRLEVALENNEFVEVVIEGDAMSPDFIPSQPEGVYLYSKYREPEKYIELDGDRLTTEDLVNLGKGRYKIKLTPTAEKRVQKSREVIDSIIKEKTDQRMRLGLPCMELQVNLVRSHSSGVGKPLSPERCRMLLALRINVLAKGYSGISLETLKQVIEMFNASCLPYVPEKGTVGASGDLAPLSHLALGLVGEGKMWSPKSGWADAKYVLEAHGLKPVILKPKEGLALINGTQMITSLGCEAVERASAIARQADIVAALTLEVLKGTTKAF

SEQ ID NO: 38401 - protein, 662 aa, Homo sapiens
  Payload ID: 7627
  Gene Symbol: HDC
  Gene Name: histidine decarboxylase
  Uniprot ID: P19113
  ENSP ID: ENSP00000267845
MMEPEEYRERGREMVDYICQYLSTVRERRVTPDVQPGYLRAQLPESAPEDPDSWDSIFGDIERIIMPGVVHWQSPHMHAYYPALTSWPSLLGDMLADAINCLGFTWASSPACTELEMNVMDWLAKMLGLPEHFLHHHPSSQGGGVLQSTVSESTLIALLAARKNKILEMKTSEPDADESCLNARLVAYASDQAHSSVEKAGLISLVKMKFLPVDDNFSLRGEALQKAIEEDKQRGLVPVFVCATLGTTGVCAFDCLSELGPICAREGLWLHIDAAYAGTAFLCPEFRGFLKGIEYADSFTFNPSKWMMVHFDCTGFWVKDKYKLQQTFSVNPIYLRHANSGVATDFMHWQIPLSRRFRSVKLWFVIRSFGVKNLQAHVRHGTEMAKYFESLVRNDPSFEIPAKRHLGLVVFRLKGPNCLTENVLKEIAKAGRLFLIPATIQDKLIIRFTVTSQFTTRDDILRDWNLIRDAATLILSQHCTSQPSPRVGNLISQIRGARAWACGTSLQSVSGAGDDPVQARKIIKQPQRVGAGPMKRENGLHLETLLDPVDDCFSEEAPDATKHKLSSFLFSYLSVQTKKKTVRSLSCNSVPVSAQKPLPTEASVKNGGSSRVRIFSRFPEDMMMLKKSAFKKLIKFYSVPSFPECSSQCGLQLPCCPLQAMV

SEQ ID NO: 38402 - protein, 629 aa, Homo sapiens
  Payload ID: 7627
  Gene Symbol: HDC
  Gene Name: histidine decarboxylase
  Uniprot ID: P19113
  ENSP ID: ENSP00000440252
MMEPEEYRERGREMVDYICQYLSTVRERRVTPDVQPGYLRAQLPESAPEDPDSWDSIFGDIERIIMPGVVHWQSPHMHAYYPALTSWPSLLGDMLADAINCLGFTWASSPACTELEMNVMDWLAKMLGLPEHFLHHHPSSQGGGVLQSTVSESTLIALLAARKNKILEMKTSEPDADESCLNARLVAYASDQAHSSVEKAGLISLVKMKFLPVDDNFSLRGEALQKAIEEDKQRGLVPVFVCATLGTTGVCAFDCLSELGPICAREGLWLHIDAAYAGTAFLCPEFRGFLKGIEYADSFTFNPSKWMMVHFDCTGFWVKDKYKLQQTFSVNPIYLRHANSGVATDFMGTEMAKYFESLVRNDPSFEIPAKRHLGLVVFRLKGPNCLTENVLKEIAKAGRLFLIPATIQDKLIIRFTVTSQFTTRDDILRDWNLIRDAATLILSQHCTSQPSPRVGNLISQIRGARAWACGTSLQSVSGAGDDPVQARKIIKQPQRVGAGPMKRENGLHLETLLDPVDDCFSEEAPDATKHKLSSFLFSYLSVQTKKKTVRSLSCNSVPVSAQKPLPTEASVKNGGSSRVRIFSRFPEDMMMLKKSAFKKLIKFYSVPSFPECSSQCGLQLPCCPLQAMV

SEQ ID NO: 38403 - protein, 178 aa, Homo sapiens
  Payload ID: 7627
  Gene Symbol: HDC
  Gene Name: histidine decarboxylase
  ENSP ID: ENSP00000453183
MSLLGREMVDYICQYLSTVRERRVTPDVQPGYLRAQLPESAPEDPDSWDSIFGDIERIIMPGVVHWQSPHMHAYYPALTSWPSLLGDMLADAINCLGFTWASSPACTELEMNVMDWLAKMLGLPEHFLHHHPSSQGGGVLQSTVSESTLIALLAARKNKILEMKTSEPDADESCLNAR

SEQ ID NO: 38404 - protein, 699 aa, Homo sapiens
  Payload ID: 7628
  Gene Symbol: HRC
  Gene Name: histidine rich calcium binding protein
  Uniprot ID: P23327
  ENSP ID: ENSP00000252825
MGHHRPWLHASVLWAGVASLLLPPAMTQQLRGDGLGFRNRNNSTGVAGLSEEASAELRHHLHSPRDHPDENKDVSTENGHHFWSHPDREKEDEDVSKEYGHLLPGHRSQDHKVGDEGVSGEEVFAEHGGQARGHRGHGSEDTEDSAEHRHHLPSHRSHSHQDEDEDEVVSSEHHHHILRHGHRGHDGEDDEGEEEEEEEEEEEEASTEYGHQAHRHRGHGSEEDEDVSDGHHHHGPSHRHQGHEEDDDDDDDDDDDDDDDDVSIEYRHQAHRHQGHGIEEDEDVSDGHHHRDPSHRHRSHEEDDNDDDDVSTEYGHQAHRHQDHRKEEVEAVSGEHHHHVPDHRHQGHRDEEEDEDVSTERWHQGPQHVHHGLVDEEEEEEEITVQFGHYVASHQPRGHKSDEEDFQDEYKTEVPHHHHHRVPREEDEEVSAELGHQAPSHRQSHQDEETGHGQRGSIKEMSHHPPGHTVVKDRSHLRKDDSEEEKEKEEDPGSHEEDDESSEQGEKGTHHGSRDQEDEEDEEEGHGLSLNQEEEEEEDKEEEEEEEDEERREERAEVGAPLSPDHSEEEEEEEEGLEEDEPRFTIIPNPLDRREEAGGASSEEESGEDTGPQDAQEYGNYQPGSLCGYCSFCNRCTECESCHCDEENMGEHCDQCQHCQFCYLCPLVCETVCAPGSYVDYFSSSLYQALADMLETPEP

SEQ ID NO: 38405 - protein, 96 aa, Homo sapiens
  Payload ID: 7628
  Gene Symbol: HRC
  Gene Name: histidine rich calcium binding protein
  ENSP ID: ENSP00000469659
  MOD_RES (1)..(1): Any amino acid
XSEEESGEDTGPQDAQEYGNYQPGSLCGYCSFCNRCTECESCHCDEENMGEHCDQCQGPGRHAGNAGTLTQSLDCDAGVPPPAFQPLSTSYIYFSE

SEQ ID NO: 38406 - protein, 676 aa, Homo sapiens
  Payload ID: 7628
  Gene Symbol: HRC
  Gene Name: histidine rich calcium binding protein
  ENSP ID: ENSP00000470288
MGHHRPWLHASVLWAGVASLLLPPAMTQQLRGDGLGFRNRNNSTGVAGLSEEASAELRHHLHSPRDHPDENKDVSTENGHHFWSHPDREKEDEDVSKEYGHLLPGHRSQDHKVGDEGVSGEEVFAEHGGQARGHRGHGSEDTEDSAEHRHHLPSHRSHSHQDEDEDEVVSSEHHHHILRHGHRGHDGEDDEGEEEEEEEEEEEEASTEYGHQAHRHRGHGSEEDEDVSDGHHHHGPSHRHQGHEEDDDDDDDDDDDDDDDDVSIEYRHQAHRHQGHGIEEDEDVSDGHHHRDPSHRHRSHEEDDNDDDDVSTEYGHQAHRHQDHRKEEVEAVSGEHHHHVPDHRHQGHRDEEEDEDVSTERWHQGPQHVHHGLVDEEEEEEEITVQFGHYVASHQPRGHKSDEEDFQDEYKTEVPHHHHHRVPREEDEEVSAELGHQAPSHRQSHQDEETGHGQRGSIKEMSHHPPGHTVVKDRSHLRKDDSEEEKEKEEDPGSHEEDDESSEQGEKGTHHGSRDQEDEEDEEEGHGLSLNQEEEEEEDKEEEEEEEDEERREERAEVGAPLSPDHSEEEEEEEEGLEEDEPRFTIIPNPLDRREEAGGASSEEESGEDTGPQDAQEYGNYQPGSLCGYCSFCNHCQFCYLCPLVCETVCAPGSYVDYFSSSLYQALADMLETPEP

SEQ ID NO: 38407 - protein, 115 aa, Homo sapiens
  Payload ID: 7629
  Gene Symbol: HRCT1
  Gene Name: histidine rich carboxyl terminus 1
  Uniprot ID: Q6UXD1
  ENSP ID: ENSP00000346283
MLGLLGSTALVGWITGAAVAVLLLLLLLATCLFHGRQDCDVERNRTAAGGNRVRRAQPWPFRRRGHLGIFHHHRHPGHVSHVPNVGLHHHHHPRHTPHHLHHHHHPHRHHPRHAR

SEQ ID NO: 38408 - protein, 126 aa, Homo sapiens
  Payload ID: 7630
  Gene Symbol: HINT1
  Gene Name: histidine triad nucleotide binding protein 1
  Uniprot ID: P49773
  ENSP ID: ENSP00000304229
MADEIAKAQVARPGGDTIFGKIIRKEIPAKIIFEDDRCLAFHDISPQAPTHFLVIPKKHISQISVAEDDDESLLGHLMIVGKKCAADLGLNKGYRMVVNEGSDGGQSVYHVHLHVLGGRQMHWPPG

SEQ ID NO: 38409 - protein, 65 aa, Homo sapiens
  Payload ID: 7630
  Gene Symbol: HINT1
  Gene Name: histidine triad nucleotide binding protein 1
  ENSP ID: ENSP00000421608
MADEIAKAQVARPGGDTIFGKIIRKEIPAKIIFEDDRVGTGHHLSRLLSALLSMTFPLKHQHIFW

SEQ ID NO: 38410 - protein, 65 aa, Homo sapiens; identical to SEQ ID NO: 38409
  Payload ID: 7630
  Gene Symbol: HINT1
  Gene Name: histidine triad nucleotide binding protein 1
  ENSP ID: ENSP00000422444

SEQ ID NO: 38411 - protein, 78 aa, Homo sapiens
  Payload ID: 7630
  Gene Symbol: HINT1
  Gene Name: histidine triad nucleotide binding protein 1
  ENSP ID: ENSP00000424974
MADEIAKAQVARPGGDTIFGKIIRKEIPAKIIFEDDRCLAFHDISPQAPTHFLVIPKKHISQISVAEDDDESSVEYLM

SEQ ID NO: 38412 - protein, 65 aa, Homo sapiens; identical to SEQ ID NO: 38409
  Payload ID: 7630
  Gene Symbol: HINT1
  Gene Name: histidine triad nucleotide binding protein 1
  ENSP ID: ENSP00000425260

SEQ ID NO: 38413 - protein, 78 aa, Homo sapiens
  Payload ID: 7630
  Gene Symbol: HINT1
  Gene Name: histidine triad nucleotide binding protein 1
  ENSP ID: ENSP00000426860
MADEIAKAQVARPGGDTIFGKIIRKEIPAKIIFEDDRCLAFHDISPQAPTHFLVIPKKHISQISVAEDDDESVSTFLT

SEQ ID NO: 38414 - protein, 103 aa, Homo sapiens
  Payload ID: 7630
  Gene Symbol: HINT1
  Gene Name: histidine triad nucleotide binding protein 1
  ENSP ID: ENSP00000427008
MADEIAKAQVARPGGDTIFGKIIRKEIPAKIIFEDDRCLAFHDISPQAPTHFLVIPKKHISQISVAEDDDESVITKEKPEKPLGLQLPSCFPKLLHHFVSHQQ

SEQ ID NO: 38415 - protein, 103 aa, Homo sapiens; identical to SEQ ID NO: 38414
  Payload ID: 7630
  Gene Symbol: HINT1
  Gene Name: histidine triad nucleotide binding protein 1
  ENSP ID: ENSP00000427499

SEQ ID NO: 38416 - protein, 27 aa, Homo sapiens
  Payload ID: 7630
  Gene Symbol: HINT1
  Gene Name: histidine triad nucleotide binding protein 1
  ENSP ID: ENSP00000430909
  MOD_RES (1)..(1): Any amino acid
XIPKKHISQISVAEDDDESCCHIFIFL

SEQ ID NO: 38417 - protein, 163 aa, Homo sapiens
  Payload ID: 7631
  Gene Symbol: HINT2
  Gene Name: histidine triad nucleotide binding protein 2
  Uniprot ID: Q9BX68
  ENSP ID: ENSP00000259667
MAAAVVLAAGLRAARRAVAATGVRGGQVRGAAGVTDGNEVAKAQQATPGGAAPTIFSRILDKSLPADILYEDQQCLVFRDVAPQAPVHFLVIPKKPIPRISQAEEEDQQLLGHLLLVAKQTAKAEGLGDGYRLVINDGKLGAQSVYHLHIHVLGGRQLQWPPG

SEQ ID NO: 38418 - protein, 182 aa, Homo sapiens
  Payload ID: 7632
  Gene Symbol: HINT3
  Gene Name: histidine triad nucleotide binding protein 3
  Uniprot ID: Q9NQE9
  ENSP ID: ENSP00000229633
MAEEQVNRSAGLAPDCEASATAETTVSSVGTCEAAGKSPEPKDYDSTCVFCRIAGRQDPGTELLHCENEDLICFKDIKPAATHHYLVVPKKHIGNCRTLRKDQVELVENMVTVGKTILERNNFTDFTNVRMGFHMPPFCSISHLHLHVLAPVDQLGFLSKLVYRVNSYWFITADHLIEKLRT

SEQ ID NO: 38419 - protein, 525 aa, Homo sapiens
  Payload ID: 7633
  Gene Symbol: HRG
  Gene Name: histidine-rich glycoprotein
  Uniprot ID: P04196
  ENSP ID: ENSP00000232003
MKALIAALLLITLQYSCAVSPTDCSAVEPEAEKALDLINKRRRDGYLFQLLRIADAHLDRVENTTVYYLVLDVQESDCSVLSRKYWNDCEPPDSRRPSEIVIGQCKVIATRHSHESQDLRVIDFNCTTSSVSSALANTKDSPVLIDFFEDTERYRKQANKALEKYKEENDDFASFRVDRIERVARVRGGEGTGYFVDFSVRNCPRHHFPRHPNVFGFCRADLFYDVEALDLESPKNLVINCEVFDPQEHENINGVPPHLGHPFHWGGHERSSTTKPPFKPHGSRDHHHPHKPHEHGPPPPPDERDHSHGPPLPQGPPPLLPMSCSSCQHATFGTNGAQRHSHNNNSSDLHPHKHHSHEQHPHGHHPHAHHPHEHDTHRQHPHGHHPHGHHPHGHHPHGHHPHGHHPHCHDFQDYGPCDPPPHNQGHCCHGHGPPPGHLRRRGPGKGPRPFHCRQIGSVYRLPPLRKGEVLPLPEANFPSFPLPHHKHPLKPDNQPFPQSVSESCPGKFKSGFPQVSMFFTHTFPK

SEQ ID NO: 38420 - protein, 449 aa, Homo sapiens
  Payload ID: 7634
  Gene Symbol: HARS
  Gene Name: histidyl-tRNA synthetase
  Uniprot ID: P12081
  ENSP ID: ENSP00000304668
MAERAALEELVKLQGERVRGLKQQKASAELIEEEVAKLLKLKAQLGPDESKQKFVLKTPKETLMGKYGEDSKLIYDLKDQGGELLSLRYDLTVPFARYLAMNKLTNIKRYHIAKDFDIAGNFDPMIPDAECLKIMCEILSSLQIGDFLVKVNDRRILDGMFAICGVSDSKFRTICSSVDKLDKVSWEEVKNEMVGEKGLAPEVADRIGDYVQQHGGVSLVEQLLQDPKLSQNKQALEGLGDLKLLFEYLTLFGIDDKISFDLSLARGLDYYTGVIYEAVLLQTPAQAGEEPLGVGSVAAGGRYDGLVGMFDPKGRKVPCVGLSIGVERIFSIVEQRLEALEEKIRTTETQVLVASAQKKLLEERLKLVSELWDAGIKAELLYKKNPKLLNQLQYCEEAGIPLVAIIGEQELKDGVIKLRSVTSREEVDVRREDLVEEIKRRTGQPLCIC

SEQ ID NO: 38421 - protein, 489 aa, Homo sapiens
  Payload ID: 7634
  Gene Symbol: HARS
  Gene Name: histidyl-tRNA synthetase
  Uniprot ID: P12081
  ENSP ID: ENSP00000387893
MAERAALEELVKLQGERVRGLKQQKASAELIEEEVAKLLKLKAQLGPDESKQKFVLKTPKGTRDYSPRQMAVREKVFDVIIRCFKRHGAEVIDTPVFELKETLMGKYGEDSKLIYDLKDQGGELLSLRYDLTVPFARYLAMNKLTNIKRYHIAKDFDIAGNFDPMIPDAECLKIMCEILSSLQIGDFLVKVNDRRILDGMFAICGVSDSKFRTICSSVDKLDKVSWEEVKNEMVGEKGLAPEVADRIGDYVQQHGGVSLVEQLLQDPKLSQNKQALEGLGDLKLLFEYLTLFGIDDKISFDLSLARGLDYYTGVIYEAVLLQTPAQAGEEPLGVGSVAAGGRYDGLVGMFDPKGRKVPCVGLSIGVERIFSIVEQRLEALEEKIRTTETQVLVASAQKKLLEERLKLVSELWDAGIKAELLYKKNPKLLNQLQYCEEAGIPLVAIIGEQELKDGVIKLRSVTSREEVDVRREDLVEEIKRRTGQPLCIC

SEQ ID NO: 38422 - protein, 395 aa, Homo sapiens
  Payload ID: 7634
  Gene Symbol: HARS
  Gene Name: histidyl-tRNA synthetase
  ENSP ID: ENSP00000393244
MAERAALEELVKLQGERVRGLKQQKASAELIEEEVAKLLKLKAQLGPDESKQKFVLKTPKDFDIAGNFDPMIPDAECLKIMCEILSSLQIGDFLVKVNDRRILDGMFAICGVSDSKFRTICSSVDKLDKVSWEEVKNEMVGEKGLAPEVADRIGDYVQQHGGVSLVEQLLQDPKLSQNKQALEGLGDLKLLFEYLTLFGIDDKISFDLSLARGLDYYTGVIYEAVLLQTPAQAGEEPLGVGSVAAGGRYDGLVGMFDPKGRKVPCVGLSIGVERIFSIVEQRLEALEEKIRTTETQVLVASAQKKLLEERLKLVSELWDAGIKAELLYKKNPKLLNQLQYCEEAGIPLVAIIGEQELKDGVIKLRSVTSREEVDVRREDLVEEIKRRTGQPLCIC

SEQ ID NO: 38423 - protein, 435 aa, Homo sapiens
  Payload ID: 7634
  Gene Symbol: HARS
  Gene Name: histidyl-tRNA synthetase
  ENSP ID: ENSP00000411085
MAERAALEELVKLQGERVRGLKQQKASAELIEEEVAKLLKLKAQLGPDESKQKFVLKTPKGTRDYSPRQMAVREKVFDVIIRCFKRHGAEVIDTPVFELKDFDIAGNFDPMIPDAECLKIMCEILSSLQIGDFLVKVNDRRILDGMFAICGVSDSKFRTICSSVDKLDKVSWEEVKNEMVGEKGLAPEVADRIGDYVQQHGGVSLVEQLLQDPKLSQNKQALEGLGDLKLLFEYLTLFGIDDKISFDLSLARGLDYYTGVIYEAVLLQTPAQAGEEPLGVGSVAAGGRYDGLVGMFDPKGRKVPCVGLSIGVERIFSIVEQRLEALEEKIRTTETQVLVASAQKKLLEERLKLVSELWDAGIKAELLYKKNPKLLNQLQYCEEAGIPLVAIIGEQELKDGVIKLRSVTSREEVDVRREDLVEEIKRRTGQPLCIC

SEQ ID NO: 38424 - protein, 469 aa, Homo sapiens
  Payload ID: 7634
  Gene Symbol: HARS
  Gene Name: histidyl-tRNA synthetase
  Uniprot ID: P12081
  ENSP ID: ENSP00000411511
MAERAALEELVKLQGERVRGLKQQKASAELIEEEVAKLLKLKAQLGPDESKQKFVLKTPKETLMGKYGEDSKLIYDLKDQGGELLSLRYDLTVPFARYLAMNKLTNIKRYHIAKVYRRDNPAMTRGRYREFYQCDFDIAGNFDPMIPDAECLKIMCEILSSLQIGDFLVKVNDRRILDGMFAICGVSDSKFRTICSSVDKLDKVSWEEVKNEMVGEKGLAPEVADRIGDYVQQHGGVSLVEQLLQDPKLSQNKQALEGLGDLKLLFEYLTLFGIDDKISFDLSLARGLDYYTGVIYEAVLLQTPAQAGEEPLGVGSVAAGGRYDGLVGMFDPKGRKVPCVGLSIGVERIFSIVEQRLEALEEKIRTTETQVLVASAQKKLLEERLKLVSELWDAGIKAELLYKKNPKLLNQLQYCEEAGIPLVAIIGEQELKDGVIKLRSVTSREEVDVRREDLVEEIKRRTGQPLCIC

SEQ ID NO: 38425 - protein, 60 aa, Homo sapiens
  Payload ID: 7634
  Gene Symbol: HARS
  Gene Name: histidyl-tRNA synthetase
  ENSP ID: ENSP00000421576
MAERAALEELVKLQGERVRGLKQQKASAELIEEEVAKLLKLKAQLGPDESKQKFVLKTPK

SEQ ID NO: 38426 - protein, 509 aa, Homo sapiens
  Payload ID: 7634
  Gene Symbol: HARS
  Gene Name: histidyl-tRNA synthetase
  Uniprot ID: P12081
  ENSP ID: ENSP00000425634
MAERAALEELVKLQGERVRGLKQQKASAELIEEEVAKLLKLKAQLGPDESKQKFVLKTPKGTRDYSPRQMAVREKVFDVIIRCFKRHGAEVIDTPVFELKETLMGKYGEDSKLIYDLKDQGGELLSLRYDLTVPFARYLAMNKLTNIKRYHIAKVYRRDNPAMTRGRYREFYQCDFDIAGNFDPMIPDAECLKIMCEILSSLQIGDFLVKVNDRRILDGMFAICGVSDSKFRTICSSVDKLDKVSWEEVKNEMVGEKGLAPEVADRIGDYVQQHGGVSLVEQLLQDPKLSQNKQALEGLGDLKLLFEYLTLFGIDDKISFDLSLARGLDYYTGVIYEAVLLQTPAQAGEEPLGVGSVAAGGRYDGLVGMFDPKGRKVPCVGLSIGVERIFSIVEQRLEALEEKIRTTETQVLVASAQKKLLEERLKLVSELWDAGIKAELLYKKNPKLLNQLQYCEEAGIPLVAIIGEQELKDGVIKLRSVTSREEVDVRREDLVEEIKRRTGQPLCIC

SEQ ID NO: 38427 - protein, 288 aa, Homo sapiens
  Payload ID: 7634
  Gene Symbol: HARS
  Gene Name: histidyl-tRNA synthetase
  ENSP ID: ENSP00000425889
MAERAALEELVKLQGERVRGLKQQKASAELIEEEVAKLLKLKAQLGPDESKQKFVLKTPKGTRDYSPRQMAVREKVFDVIIRCFKRHGAEVIDTPVFELKVNDRRILDGMFAICGVSDSKFRTICSSVDKLDKVSWEEVKNEMVGEKGLAPEVADRIGDYVQQHGGVSLVEQLLQDPKLSQNKQALEGLGDLKLLFEYLTLFGIDDKISFDLSLARGLDYYTGVIYEAVLLQTPAQAGEEPLGVGSVAAGGRYDGLVGMFDPKGRKVPCVGLSIGVERIFSIVEQRLE

SEQ ID NO: 38428 - protein, 440 aa, Homo sapiens
  Payload ID: 7634
  Gene Symbol: HARS
  Gene Name: histidyl-tRNA synthetase
  ENSP ID: ENSP00000430063
MAVREKVFDVIIRCFKRHGAEVIDTPVFELKETLMGKYGEDSKLIYDLKDQGGELLSLRYDLTVPFARYLAMNKLTNIKRYHIAKVYRRDNPAMTRGRYREFYQCDFDIAGNFDPMIPDAECLKIMCEILSSLQIGDFLVKVNDRRILDGMFAICGVSDSKFRTICSSVDKLDKVSWEEVKNEMVGEKGLAPEVADRIGDYVQQHGGVSLVEQLLQDPKLSQNKQALEGLGDLKLLFEYLTLFGIDDKISFDLSLARGLDYYTGVIYEAVLLQTPAQAGEEPLGVGSVAAGGRYDGLVGMFDPKGRKVPCVGLSIGVERIFSIVEQRLEALEEKIRTTETQVLVASAQKKLLEERLKLVSELWDAGIKAELLYKKNPKLLNQLQYCEEAGIPLVAIIGEQELKDGVIKLRSVTSREEVDVRREDLVEEIKRRTGQPLCIC

SEQ ID NO: 38429 - protein, 506 aa, Homo sapiens
  Payload ID: 7635
  Gene Symbol: HARS2
  Gene Name: histidyl-tRNA synthetase 2, mitochondrial
  Uniprot ID: P49590
  ENSP ID: ENSP00000230771
MPLLGLLPRRAWASLLSQLLRPPCASCTGAVRCQSQVAEAVLTSQLKAHQEKPNFIIKTPKGTRDLSPQHMVVREKILDLVISCFKRHGAKGMDTPAFELKETLTEKYGEDSGLMYDLKDQGGELLSLRYDLTVPFARYLAMNKVKKMKRYHVGKVWRRESPTIVQGRYREFCQCDFDIAGQFDPMIPDAECLKIMCEILSGLQLGDFLIKVNDRRIVDGMFAVCGVPESKFRAICSSIDKLDKMAWKDVRHEMVVKKGLAPEVADRIGDYVQCHGGVSLVEQMFQDPRLSQNKQALEGLGDLKLLFEYLTLFGIADKISFDLSLARGLDYYTGVIYEAVLLQTPTQAGEEPLNVGSVAAGGRYDGLVGMFDPKGHKVPCVGLSIGVERIFYIVEQRMKTKGEKVRTTETQVFVATPQKNFLQERLKLIAELWDSGIKAEMLYKNNPKLLTQLHYCESTGIPLVVIIGEQELKEGVIKIRSVASREEVAIKRENFVAEIQKRLSES

SEQ ID NO: 38430 - protein, 334 aa, Homo sapiens
  Payload ID: 7635
  Gene Symbol: HARS2
  Gene Name: histidyl-tRNA synthetase 2, mitochondrial
  ENSP ID: ENSP00000407105
MPLLGLLPRRAWASLLSQLLRPPCASCTGAVRCQSQDFDIAGQFDPMIPDAECLKIMCEILSGLQLGDFLIKMAWKDVRHEMVVKKGLAPEVADRIGDYVQCHGGVSLVEQMFQDPRLSQNKQALEGLGDLKLLFEYLTLFGIADKISFDLSLARGLDYYTGVIYEAVLLQTPTQAGEEPLNVGSVAAGGRYDGLVGMFDPKGHKVPCVGLSIGVERIFYIVEQRMKTKGEKVRTTETQVFVATPQKNFLQERLKLIAELWDSGIKAEMLYKNNPKLLTQLHYCESTGIPLVVIIGEQELKEGVIKIRSVASREEVAIKRENFVAEIQKRLSES

SEQ ID NO: 38431 - protein, 99 aa, Homo sapiens
  Payload ID: 7635
  Gene Symbol: HARS2
  Gene Name: histidyl-tRNA synthetase 2, mitochondrial
  ENSP ID: ENSP00000423530
MPLLGLLPRRAWASLLSQLLRPPCASCTGAVRCQSQGEESLQVGGQQGQRCHRSGQCPEKPHLTFILLPGCRGSVNIPTESTSRETKFYYQDPKGYQGS

SEQ ID NO: 38432 - protein, 481 aa, Homo sapiens
  Payload ID: 7635
  Gene Symbol: HARS2
  Gene Name: histidyl-tRNA synthetase 2, mitochondrial
  Uniprot ID: P49590
  ENSP ID: ENSP00000423616
MPLLGLLPRRAWASLLSQLLRPPCASCTGAVRCQSQGTRDLSPQHMVVREKILDLVISCFKRHGAKGMDTPAFELKETLTEKYGEDSGLMYDLKDQGGELLSLRYDLTVPFARYLAMNKVKKMKRYHVGKVWRRESPTIVQGRYREFCQCDFDIAGQFDPMIPDAECLKIMCEILSGLQLGDFLIKVNDRRIVDGMFAVCGVPESKFRAICSSIDKLDKMAWKDVRHEMVVKKGLAPEVADRIGDYVQCHGGVSLVEQMFQDPRLSQNKQALEGLGDLKLLFEYLTLFGIADKISFDLSLARGLDYYTGVIYEAVLLQTPTQAGEEPLNVGSVAAGGRYDGLVGMFDPKGHKVPCVGLSIGVERIFYIVEQRMKTKGEKVRTTETQVFVATPQKNFLQERLKLIAELWDSGIKAEMLYKNNPKLLTQLHYCESTGIPLVVIIGEQELKEGVIKIRSVASREEVAIKRENFVAEIQKRLSES

SEQ ID NO: 38433 - protein, 116 aa, Homo sapiens
  Payload ID: 7635
  Gene Symbol: HARS2
  Gene Name: histidyl-tRNA synthetase 2, mitochondrial
  ENSP ID: ENSP00000424516
MPLLGLLPRRAWASLLSQLLRPPCASCTGAVRCQSQGEESLQVAEAVLTSQLKAHQEKPNFIIKTPKGTRDLSPQHMVVREKILDLVISCFKRHGAKGMDTPAFELKETLTEKYGE

SEQ ID NO: 38434 - protein, 181 aa, Homo sapiens
  Payload ID: 7635
  Gene Symbol: HARS2
  Gene Name: histidyl-tRNA synthetase 2, mitochondrial
  ENSP ID: ENSP00000425695
MPLLGLLPRRAWASLLSQLLRPPCASCTGAVRCQSQGEESLQVAEAVLTSQLKAHQEKPNFIIKTPKGTRDLSPQHMVVREKILDLVISCFKRHGAKGMDTPAFELKETLTEKYGEDSGLMYDLKDQGGELLSLRYDLTVPFARYLAMNKVKKMKRYHVGKVWRRESPTIVQGRYREFCQC

SEQ ID NO: 38435 - protein, 99 aa, Homo sapiens; identical to SEQ ID NO: 38431
  Payload ID: 7635
  Gene Symbol: HARS2
  Gene Name: histidyl-tRNA synthetase 2, mitochondrial
  ENSP ID: ENSP00000429220

SEQ ID NO: 38436 - protein, 394 aa, Homo sapiens
  Payload ID: 7636
  Gene Symbol: HM13
  Gene Name: histocompatibility (minor) 13
  Uniprot ID: Q8TCT9
  ENSP ID: ENSP00000335294
MDSALSDPHNGSAEAGGPTNSTTRPPSTPEGIALAYGSLLLMALLPIFFGALRSVRCARGKNASDMPETITSRDAARFPIIASCTLLGLYLFFKIFSQEYINLLLSMYFFVLGILALSHTISPFMNKFFPASFPNRQYQLLFTQGSGENKEEIINYEFDTKDLVCLGLSSIVGVWYLLRKHWIANNLFGLAFSLNGVELLHLNNVSTGCILLGGLFIYDVFWVFGTNVMVTVAKSFEAPIKLVFPQDLLEKGLEANNFAMLGLGDVVIPGIFIALLLRFDISLKKNTHTYFYTSFAAYIFGLGLTIFIMHIFKHAQPALLYLVPACIGFPVLVALAKGEVTEMFSYESSAEILPHTPRLTHFPTVSGSPASLADSMQQKLAGPRRRRPQNPSAM

SEQ ID NO: 38437 - protein, 272 aa, Homo sapiens
  Payload ID: 7636
  Gene Symbol: HM13
  Gene Name: histocompatibility (minor) 13
  ENSP ID: ENSP00000341347
MDSALSDPHNGSAEAGGPTNSTTRPPSTPEGIALAYGSLLLMALLPIFFGALRSVRCARGKNASDMPETITSRDAARFPIIASCTLLGLYLFFKIFSQEYINLLLSMYFFVLGILALSHTISPFMNKFFPASFPNRQYQLLFTQGSGENKEEIINYEFDTKDLVCLGLSSIVGVWYLLRKVFGTNVMVTVAKSFEAPIKLVFPQDLLEKGLEANNFAMLGLGDVVIPGIFIALLLRFDISLKKNTHTYFYTSFAAYIFGLGLTIFIMHIFKH

SEQ ID NO: 38438 - protein, 377 aa, Homo sapiens
  Payload ID: 7636
  Gene Symbol: HM13
  Gene Name: histocompatibility (minor) 13
  Uniprot ID: Q8TCT9
  ENSP ID: ENSP00000343032
MDSALSDPHNGSAEAGGPTNSTTRPPSTPEGIALAYGSLLLMALLPIFFGALRSVRCARGKNASDMPETITSRDAARFPIIASCTLLGLYLFFKIFSQEYINLLLSMYFFVLGILALSHTISPFMNKFFPASFPNRQYQLLFTQGSGENKEEIINYEFDTKDLVCLGLSSIVGVWYLLRKHWIANNLFGLAFSLNGVELLHLNNVSTGCILLGGLFIYDVFWVFGTNVMVTVAKSFEAPIKLVFPQDLLEKGLEANNFAMLGLGDVVIPGIFIALLLRFDISLKKNTHTYFYTSFAAYIFGLGLTIFIMHIFKHAQPALLYLVPACIGFPVLVALAKGEVTEMFSYEESNPKDPAAVTESKEGTEASASKGLEKKEK

SEQ ID NO: 38439 - protein, 426 aa, Homo sapiens
  Payload ID: 7636
  Gene Symbol: HM13
  Gene Name: histocompatibility (minor) 13
  Uniprot ID: Q8TCT9
  ENSP ID: ENSP00000381237
MDSALSDPHNGSAEAGGPTNSTTRPPSTPEGIALAYGSLLLMALLPIFFGALRSVRCARGKNASDMPETITSRDAARFPIIASCTLLGLYLFFKIFSQEYINLLLSMYFFVLGILALSHTISPFMNKFFPASFPNRQYQLLFTQGSGENKEEIINYEFDTKDLVCLGLSSIVGVWYLLRKHWIANNLFGLAFSLNGVELLHLNNVSTGCILLGGLFIYDVFWVFGTNVMVTVAKSFEAPIKLVFPQDLLEKGLEANNFAMLGLGDVVIPGIFIALLLRFDISLKKNTHTYFYTSFAAYIFGLGLTIFIMHIFKHAQPALLYLVPACIGFPVLVALAKGEVTEMFSYESSAEILPHTPRLTHFPTVSGSPASLADSMQQKLAGPRRRRPQNPSAIYEESNPKDPAAVTESKEGTEASASKGLEKKEK

SEQ ID NO: 38440 - protein, 143 aa, Homo sapiens
  Payload ID: 7636
  Gene Symbol: HM13
  Gene Name: histocompatibility (minor) 13
  ENSP ID: ENSP00000479020
MDSALSDPHNGSAEAGGPTNSTTRPPSTPEGIALAYGSLLLMALLPIFFGALRSVRCARGKNASDMPETITSRDAARFPIIASCTLLGLYLFFKIFSQEYINLLLSMYFFVLGILALSHTIRSEGISLQHLKQLSREPVQGLG

SEQ ID NO: 38441 - protein, 50 aa, Homo sapiens
  Payload ID: 7636
  Gene Symbol: HM13
  Gene Name: histocompatibility (minor) 13
  ENSP ID: ENSP00000479443
FIALLLRFDISLKKNTHTYFYTSFAAYIFGLGLTIFIMHIFKHAQVLGLH

SEQ ID NO: 38442 - protein, 1136 aa, Homo sapiens
  Payload ID: 7637
  Gene Symbol: HMHA1
  Gene Name: histocompatibility (minor) HA-1
  Uniprot ID: Q92619
  ENSP ID: ENSP00000316772
MFSRKKRELMKTPSISKKNRAGSPSPQPSGELPRKDGADAVFPGPSLEPPAGSSGVKATGTLKRPTSLSRHASAAGFPLSGAASWTLGRSHRSPLTAASPGELPTEGAGPDVVEDISHLLADVARFAEGLEKLKECVLRDDLLEARRPRAHECLGEALRVMHQIISKYPLLNTVETLTAAGTLIAKVKAFHYESNNDLEKQEFEKALETIAVAFSSTVSEFLMGEVDSSTLLAVPPGDSSQSMESLYGPGSEGTPPSLEDCDAGCLPAEEVDVLLQRCEGGVDAALLYAKNMAKYMKDLISYLEKRTTLEMEFAKGLQKIAHNCRQSVMQEPHMPLLSIYSLALEQDLEFGHSMVQAVGTLQTQTFMQPLTLRRLEHEKRRKEIKEAWHRAQRKLQEAESNLRKAKQGYVQRCEDHDKARFLVAKAEEEQAGSAPGAGSTATKTLDKRRRLEEEAKNKAEEAMATYRTCVADAKTQKQELEDTKVTALRQIQEVIRQSDQTIKSATISYYQMMHMQTAPLPVHFQMLCESSKLYDPGQQYASHVRQLQRDQEPDVHYDFEPHVSANAWSPVMRARKSSFNVSDVARPEAAGSPPEEGGCTEGTPAKDHRAGRGHQVHKSWPLSISDSDSGLDPGPGAGDFKKFERTSSSGTMSSTEELVDPDGGAGASAFEQADLNGMTPELPVAVPSGPFRHEGLSKAARTHRLRKLRTPAKCRECNSYVYFQGAECEECCLACHKKCLETLAIQCGHKKLQGRLQLFGQDFSHAARSAPDGVPFIVKKCVCEIERRALRTKGIYRVNGVKTRVEKLCQAFENGKELVELSQASPHDISNVLKLYLRQLPEPLISFRLYHELVGLAKDSLKAEAEAKAASRGRQDGSESEAVAVALAGRLRELLRDLPPENRASLQYLLRHLRRIVEVEQDNKMTPGNLGIVFGPTLLRPRPTEATVSLSSLVDYPHQARVIETLIVHYGLVFEEEPEETPGGQDESSNQRAEVVVQVPYLEAGEAVVYPLQEAAADGCRESRVVSNDSDSDLEEASELLSSSEASALGHLSFLEQQQSEASLEVASGSHSGSEEQLEATAREDGDGDEDGPAQQLSGFNTNQSNNVLQAPLPPMRLRGGRMTLGSCRERQPEFV

SEQ ID NO: 38443 - protein, 1019 aa, Homo sapiens
  Payload ID: 7637
  Gene Symbol: HMHA1
  Gene Name: histocompatibility (minor) HA-1
  ENSP ID: ENSP00000438979
MCICGTAHPVLDEGPVRCRAGPRDLLEARRPRAHECLGEALRVMHQIISKYPLLNTVETLTAAGTLIAKVKAFHYESNNDLEKQEFEKALETIAVAFSSTVSEFLMGEVDSSTLLAVPPGDSSQSMESLYGPGSEGTPPSLEDCDAGCLPAEEVDVLLQRCEGGVDAALLYAKNMAKYMKDLISYLEKRTTLEMEFAKGLQKIAHNCRQSVMQEPHMPLLSIYSLALEQDLEFGHSMVQAVGTLQTQTFMQPLTLRRLEHEKRRKEIKEAWHRAQRKLQEAESNLRKAKQGYVQRCEDHDKARFLVAKAEEEQAGSAPGAGSTATKTLDKRRRLEEEAKNKAEEAMATYRTCVADAKTQKQELEDTKVTALRQIQEVIRQSDQTIKSATISYYQMMHMQTAPLPVHFQMLCESSKLYDPGQQYASHVRQLQRDQEPDVHYDFEPHVSANAWSPVMRARKSSFNVSDVARPEAAGSPPEEGGCTEGTPAKDHRAGRGHQVHKSWPLSISDSDSGLDPGPGAGDFKKFERTSSSGTMSSTEELVDPDGGAGASAFEQADLNGMTPELPVAVPSGPFRHEGLSKAARTHRLRKLRTPAKCRECNSYVYFQGAECEECCLACHKKCLETLAIQCGHKKLQGRLQLFGQDFSHAARSAPDGVPFIVKKCVCEIERRALRTKGIYRVNGVKTRVEKLCQAFENGKELVELSQASPHDISNVLKLYLRQLPEPLISFRLYHELVGLAKDSLKAEAEAKAASRGRQDGSESEAVAVALAGRLRELLRDLPPENRASLQYLLRHLRRIVEVEQDNKMTPGNLGIVFGPTLLRPRPTEATVSLSSLVDYPHQARVIETLIVHYGLVFEEEPEETPGGQDESSNQRAEVVVQVPYLEAGEAVVYPLQEAAADGCRESRVVSNDSDSDLEEASELLSSSEASALGHLSFLEQQQSEASLEVASGSHSGSEEQLEATAREDGDGDEDGPAQQLSGFNTNQSNNVLQAPLPPMRLRGGRMTLGSCRERQPEFV

SEQ ID NO: 38444 - protein, 1152 aa, Homo sapiens
  Payload ID: 7637
  Gene Symbol: HMHA1
  Gene Name: histocompatibility (minor) HA-1
  Uniprot ID: Q92619
  ENSP ID: ENSP00000439601
MSRGQRVLKGLLGWVCTWTWAWRARLGARGCGLHVLCPRDLPLPPEELPRKDGADAVFPGPSLEPPAGSSGVKATGTLKRPTSLSRHASAAGFPLSGAASWTLGRSHRSPLTAASPGELPTEGAGPDVVEDISHLLADVARFAEGLEKLKECVLRDDLLEARRPRAHECLGEALRVMHQIISKYPLLNTVETLTAAGTLIAKVKAFHYESNNDLEKQEFEKALETIAVAFSSTVSEFLMGEVDSSTLLAVPPGDSSQSMESLYGPGSEGTPPSLEDCDAGCLPAEEVDVLLQRCEGGVDAALLYAKNMAKYMKDLISYLEKRTTLEMEFAKGLQKIAHNCRQSVMQEPHMPLLSIYSLALEQDLEFGHSMVQAVGTLQTQTFMQPLTLRRLEHEKRRKEIKEAWHRAQRKLQEAESNLRKAKQGYVQRCEDHDKARFLVAKAEEEQAGSAPGAGSTATKTLDKRRRLEEEAKNKAEEAMATYRTCVADAKTQKQELEDTKVTALRQIQEVIRQSDQTIKSATISYYQMMHMQTAPLPVHFQMLCESSKLYDPGQQYASHVRQLQRDQEPDVHYDFEPHVSANAWSPVMRARKSSFNVSDVARPEAAGSPPEEGGCTEGTPAKDHRAGRGHQVHKSWPLSISDSDSGLDPGPGAGDFKKFERTSSSGTMSSTEELVDPDGGAGASAFEQADLNGMTPELPVAVPSGPFRHEGLSKAARTHRLRKLRTPAKCRECNSYVYFQGAECEECCLACHKKCLETLAIQCGHKKLQGRLQLFGQDFSHAARSAPDGVPFIVKKCVCEIERRALRTKGIYRVNGVKTRVEKLCQAFENGKELVELSQASPHDISNVLKLYLRQLPEPLISFRLYHELVGLAKDSLKAEAEAKAASRGRQDGSESEAVAVALAGRLRELLRDLPPENRASLQYLLRHLRRIVEVEQDNKMTPGNLGIVFGPTLLRPRPTEATVSLSSLVDYPHQARVIETLIVHYGLVFEEEPEETPGGQDESSNQRAEVVVQVPYLEAGEAVVYPLQEAAADGCRESRVVSNDSDSDLEEASELLSSSEASALGHLSFLEQQQSEASLEVASGSHSGSEEQLEATAREDGDGDEDGPAQQLSGFNTNQSNNVLQAPLPPMRLRGGRMTLGSCRERQPEFV

SEQ ID NO: 38445 - protein, 60 aa, Homo sapiens
  Payload ID: 7637
  Gene Symbol: HMHA1
  Gene Name: histocompatibility (minor) HA-1
  ENSP ID: ENSP00000466365
MFSRKKRELMKTPSISKKNRAGSPSPQPSGTSLRPAARGPTSAWVRLCVSCIRSSPSTRC

SEQ ID NO: 38446 - protein, 1163 aa, Homo sapiens
  Payload ID: 7637
  Gene Symbol: HMHA1
  Gene Name: histocompatibility (minor) HA-1
  ENSP ID: ENSP00000466401
MFSRKKRELMKTPSISKKNRAGSPSPQPSGPHFISGETEAVSRPENPFNELPSDLPKELPRKDGADAVFPGPSLEPPAGSSGVKATGTLKRPTSLSRHASAAGFPLSGAASWTLGRSHRSPLTAASPGELPTEGAGPDVVEDISHLLADVARFAEGLEKLKECVLRDDLLEARRPRAHECLGEALRVMHQIISKYPLLNTVETLTAAGTLIAKVKAFHYESNNDLEKQEFEKALETIAVAFSSTVSEFLMGEVDSSTLLAVPPGDSSQSMESLYGPGSEGTPPSLEDCDAGCLPAEEVDVLLQRCEGGVDAALLYAKNMAKYMKDLISYLEKRTTLEMEFAKGLQKIAHNCRQSVMQEPHMPLLSIYSLALEQDLEFGHSMVQAVGTLQTQTFMQPLTLRRLEHEKRRKEIKEAWHRAQRKLQEAESNLRKAKQGYVQRCEDHDKARFLVAKAEEEQAGSAPGAGSTATKTLDKRRRLEEEAKNKAEEAMATYRTCVADAKTQKQELEDTKVTALRQIQEVIRQSDQTIKSATISYYQMMHMQTAPLPVHFQMLCESSKLYDPGQQYASHVRQLQRDQEPDVHYDFEPHVSANAWSPVMRARKSSFNVSDVARPEAAGSPPEEGGCTEGTPAKDHRAGRGHQVHKSWPLSISDSDSGLDPGPGAGDFKKFERTSSSGTMSSTEELVDPDGGAGASAFEQADLNGMTPELPVAVPSGPFRHEGLSKAARTHRLRKLRTPAKCRECNSYVYFQGAECEECCLACHKKCLETLAIQCGHKKLQGRLQLFGQDFSHAARSAPDGVPFIVKKCVCEIERRALRTKGIYRVNGVKTRVEKLCQAFENGKELVELSQASPHDISNVLKLYLRQLPEPLISFRLYHELVGLAKDSLKAEAEAKAASRGRQDGSESEAVAVALAGRLRELLRDLPPENRASLQYLLRHLRRIVEVEQDNKMTPGNLGIVFGPTLLRPRPTEATVSLSSLVDYPHQARVIETLIVHYGLVFEEEPEETPGGQDESSNQRAEVVVQVPYLEAGEAVVYPLQEAAADGCRESRVVSNDSDSDLEEASELLSSSEASALGHLSFLEQQQSEASLEVASGSHSGSEEQLEATAREDGDGDEDGPAQQLSGFNTNQSNNVLQAPLPPMRLRGGRMTLGSCRERQPEFV

SEQ ID NO: 38447 - protein, 170 aa, Homo sapiens
  Payload ID: 7637
  Gene Symbol: HMHA1
  Gene Name: histocompatibility (minor) HA-1
  ENSP ID: ENSP00000467741
MVGSTPHFGDPCAGSPGPGGRGDPDGRGDPDGQGPELPRKDGADAVFPGPSLEPPAGSSGVKATGTLKRPTSLSRHASAAGFPLSGAASWTLGRSHRSPLTAASPGELPTEGAGPDVVEDISHLLADVARFAEGLEKLKECVLRDDLLEARRPRAHECLGEALRVMHQII

SEQ ID NO: 38448 - protein, 771 aa, Homo sapiens
  Payload ID: 7637
  Gene Symbol: HMHA1
  Gene Name: histocompatibility (minor) HA-1
  ENSP ID: ENSP00000468607
MGVGRKGGAGETESHPRIGLELASWLPHPQQEAESNLRKAKQGYVQRCEDHDKARFLVAKAEEEQAGSAPGAGSTATKTLDKRRRLEEEAKNKAEEAMATYRTCVADAKTQKQELEDTKVTALRQIQEVIRQSDQTIKSATISYYQMMHMQTAPLPVHFQMLCESSKLYDPGQQYASHVRQLQRDQEPDVHYDFEPHVSANAWSPVMRARKSSFNVSDVARPEAAGSPPEEGGCTEGTPAKDHRAGRGHQVHKSWPLSISDSDSGLDPGPGAGDFKKFERTSSSGTMSSTEELVDPDGGAGASAFEQADLNGMTPELPVAVPSGPFRHEGLSKAARTHRLRKLRTPAKCRECNSYVYFQGAECEECCLACHKKCLETLAIQCGHKKLQGRLQLFGQDFSHAARSAPDGVPFIVKKCVCEIERRALRTKGIYRVNGVKTRVEKLCQAFENGKELVELSQASPHDISNVLKLYLRQLPEPLISFRLYHELVGLAKDSLKAEAEAKAASRGRQDGSESEAVAVALAGRLRELLRDLPPENRASLQYLLRHLRRIVEVEQDNKMTPGNLGIVFGPTLLRPRPTEATVSLSSLVDYPHQARVIETLIVHYGLVFEEEPEETPGGQDESSNQRAEVVVQVPYLEAGEAVVYPLQEAAADGCRESRVVSNDSDSDLEEASELLSSSEASALGHLSFLEQQQSEASLEVASGSHSGSEEQLEATAREDGDGDEDGPAQQLSGFNTNQSNNVLQAPLPPMRLRGGRMTLGSCRERQPEFV

SEQ ID NO: 38449 - protein, 1140 aa, Homo sapiens
  Payload ID: 7637
  Gene Symbol: HMHA1
  Gene Name: histocompatibility (minor) HA-1
  ENSP ID: ENSP00000468615
MLGRRLGARASYSPYRAGRQGPQQRGRDPGIQLTELPRKDGADAVFPGPSLEPPAGSSGVKATGTLKRPTSLSRHASAAGFPLSGAASWTLGRSHRSPLTAASPGELPTEGAGPDVVEDISHLLADVARFAEGLEKLKECVLRDDLLEARRPRAHECLGEALRVMHQIISKYPLLNTVETLTAAGTLIAKVKAFHYESNNDLEKQEFEKALETIAVAFSSTVSEFLMGEVDSSTLLAVPPGDSSQSMESLYGPGSEGTPPSLEDCDAGCLPAEEVDVLLQRCEGGVDAALLYAKNMAKYMKDLISYLEKRTTLEMEFAKGLQKIAHNCRQSVMQEPHMPLLSIYSLALEQDLEFGHSMVQAVGTLQTQTFMQPLTLRRLEHEKRRKEIKEAWHRAQRKLQEAESNLRKAKQGYVQRCEDHDKARFLVAKAEEEQAGSAPGAGSTATKTLDKRRRLEEEAKNKAEEAMATYRTCVADAKTQKQELEDTKVTALRQIQEVIRQSDQTIKSATISYYQMMHMQTAPLPVHFQMLCESSKLYDPGQQYASHVRQLQRDQEPDVHYDFEPHVSANAWSPVMRARKSSFNVSDVARPEAAGSPPEEGGCTEGTPAKDHRAGRGHQVHKSWPLSISDSDSGLDPGPGAGDFKKFERTSSSGTMSSTEELVDPDGGAGASAFEQADLNGMTPELPVAVPSGPFRHEGLSKAARTHRLRKLRTPAKCRECNSYVYFQGAECEECCLACHKKCLETLAIQCGHKKLQGRLQLFGQDFSHAARSAPDGVPFIVKKCVCEIERRALRTKGIYRVNGVKTRVEKLCQAFENGKELVELSQASPHDISNVLKLYLRQLPEPLISFRLYHELVGLAKDSLKAEAEAKAASRGRQDGSESEAVAVALAGRLRELLRDLPPENRASLQYLLRHLRRIVEVEQDNKMTPGNLGIVFGPTLLRPRPTEATVSLSSLVDYPHQARVIETLIVHYGLVFEEEPEETPGGQDESSNQRAEVVVQVPYLEAGEAVVYPLQEAAADGCRESRVVSNDSDSDLEEASELLSSSEASALGHLSFLEQQQSEASLEVASGSHSGSEEQLEATAREDGDGDEDGPAQQLSGFNTNQSNNVLQAPLPPMRLRGGRMTLGSCRERQPEFV

SEQ ID NO: 38450 - protein, 78 aa, Homo sapiens
  Payload ID: 7637
  Gene Symbol: HMHA1
  Gene Name: histocompatibility (minor) HA-1
  ENSP ID: ENSP00000484008
GRQDGSESEAVAVALAGRLRELLRDLPPENRASLQYLLRHLRRPASSRLSSSTTAWSSRRSRRRPPGARTSHPTSELR

SEQ ID NO: 38451 - protein, 41 aa, Homo sapiens
  Payload ID: 7638
  Gene Symbol: HMHB1
  Gene Name: histocompatibility (minor) HB-1
  Uniprot ID: O97980
  ENSP ID: ENSP00000289448
LEEQPECREEKRGSLHVWKSELVEVEDDVYLRHSSSLTYRL

SEQ ID NO: 38452 - protein, 139 aa, Homo sapiens
  Payload ID: 7639
  Gene Symbol: HMSD
  Gene Name: histocompatibility (minor) serpin domain containing
  Uniprot ID: A8MTL9
  ENSP ID: ENSP00000386207
MSISSALAMVFMGAKGNTAAQMSQALCFSKIGGEDGDIHRGFQSLLVAINRTDTEYVLRTANGLFGEKSYDFLTGFTDSCGKFYQATIKQLDFVNDTEKSTTRVNSWVADKTKGENILLFYFDNILNSFIVSSLQNCQI

SEQ ID NO: 38453 - protein, 53 aa, Homo sapiens
  Payload ID: 7639
  Gene Symbol: HMSD
  Gene Name: histocompatibility (minor) serpin domain containing
  Uniprot ID: P0C7T4
  ENSP ID: ENSP00000431632
MEIFIEVFSHFLLQLTELTLNMCLELPTGSLEKSLMISSQVLQIPVANSTKQR

SEQ ID NO: 38454 - protein, 419 aa, Homo sapiens
  Payload ID: 7640
  Gene Symbol: HAT1
  Gene Name: histone acetyltransferase 1
  Uniprot ID: O14929
  ENSP ID: ENSP00000264108
MAGFGAMEKFLVEYKSAVEKKLAEYKCNTNTAIELKLVRFPEDLENDIRTFFPEYTHQLFGDDETAFGYKGLKILLYYIAGSLSTMFRVEYASKVDENFDCVEADDVEGKIRQIIPPGFCTNTNDFLSLLEKEVDFKPFGTLLHTYSVLSPTGGENFTFQIYKADMTCRGFREYHERLQTFLMWFIETASFIDVDDERWHYFLVFEKYNKDGATLFATVGYMTVYNYYVYPDKTRPRVSQMLILTPFQGQGHGAQLLETVHRYYTEFPTVLDITAEDPSKSYVKLRDFVLVKLCQDLPCFSREKLMQGFNEDMVIEAQQKFKINKQHARRVYEILRLLVTDMSDAEQYRSYRLDIKRRLISPYKKKQRDLAKMRKCLRPEELTNQMNQIEISMQHEQLEESFQELVEDYRRVIERLAQE

SEQ ID NO: 38455 - protein, 125 aa, Homo sapiens
  Payload ID: 7640
  Gene Symbol: HAT1
  Gene Name: histone acetyltransferase 1
  ENSP ID: ENSP00000403466
MAGFGAMEKFLVEYKSAVEKKLAEYKCNTNTAIELKLVRFPEDLENDIRTFFPEYTHQLFGDEQMMLRAKLDKSFHLDFAQTRMISFLYWKRKLISSHSEPYFIPTQFSVQQEEKTLPFRYIRLT

SEQ ID NO: 38456 - protein, 46 aa, Homo sapiens
  Payload ID: 7640
  Gene Symbol: HAT1
  Gene Name: histone acetyltransferase 1
  ENSP ID: ENSP00000407921
MAGFGAMEKFLVEYKSAVEKKLAEYKCNTNTAIELKLVKLLLVTRV

SEQ ID NO: 38457 - protein, 1017 aa, Homo sapiens
  Payload ID: 7641
  Gene Symbol: HIRA
  Gene Name: histone cell cycle regulator
  Uniprot ID: P54198
  ENSP ID: ENSP00000263208
MKLLKPTWVNHNGKPIFSVDIHPDGTKFATGGQGQDSGKVVIWNMSPVLQEDDEKDENIPKMLCQMDNHLACVNCVRWSNSGMYLASGGDDKLIMVWKRATYIGPSTVFGSSGKLANVEQWRCVSILRNHSGDVMDVAWSPHDAWLASCSVDNTVVIWNAVKFPEILATLRGHSGLVKGLTWDPVGKYIASQADDRSLKVWRTLDWQLETSITKPFDECGGTTHVLRLSWSPDGHYLVSAHAMNNSGPTAQIIEREGWKTNMDFVGHRKAVTVVKFNPKIFKKKQKNGSSAKPSCPYCCCAVGSKDRSLSVWLTCLKRPLVVIHELFDKSIMDISWTLNGLGILVCSMDGSVAFLDFSQDELGDPLSEEEKSRIHQSTYGKSLAIMTEAQLSTAVIENPEMLKYQRRQQQQQLDQKSAATREMGSATSVAGVVNGESLEDIRKNLLKKQVETRTADGRRRITPLCIAQLDTGDFSTAFFNSIPLSGSLAGTMLSSHSSPQLLPLDSSTPNSFGASKPCTEPVVAASARPAGDSVNKDSMNATSTPAALSPSVLTTPSKIEPMKAFDSRFTERSKATPGAPALTSMTPTAVERLKEQNLVKELRPRDLLESSSDSDEKVPLAKASSLSKRKLELEVETVEKKKKGRPRKDSRLMPVSLSVQSPAALTAEKEAMCLSAPALALKLPIPSPQRAFTLQVSSDPSMYIEVENEVTVVGGVKLSRLKCNREGKEWETVLTSRILTAAGSCDVVCVACEKRMLSVFSTCGRRLLSPILLPSPISTLHCTGSYVMALTAAATLSVWDVHRQVVVVKEESLHSILAGSDMTVSQILLTQHGIPVMNLSDGKAYCFNPSLSTWNLVSDKQDSLAQCADFRSSLPSQDAMLCSGPLAIIQGRTSNSGRQAARLFSVPHVVQQETTLAYLENQVAAALTLQSSHEYRHWLLVYARYLVNEGFEYRLREICKDLLGPVHYSTGSQWESTVVGLRKRELLKELLPVIGQNLRFQRLFTECQEQLDILRDK

SEQ ID NO: 38458 - protein, 810 aa, Homo sapiens
  Payload ID: 7641
  Gene Symbol: HIRA
  Gene Name: histone cell cycle regulator
  Uniprot ID: P54198
  ENSP ID: ENSP00000345350
MKLLKPTWVNHNGKPIFSVDIHPDGTKFATGGQGQDSGKVVIWNMSPVLQEDDEKDENIPKMLCQMDNHLACVNCVRWSNSGMYLASGGDDKLIMVWKRATYIGPSTVFGSSGKLANVEQWRCVSILRNHSGDVMDVAWSPHDAWLASCSVDNTVVIWNAVKFPEILATLRGHSGLVKGLTWDPVGKYIASQADDRSLKVWRTLDWQLETSITKPFDECGGTTHVLRLSWSPDGHYLVSAHAMNNSGPTAQIIEREGWKTNMDFVGHRKAVTVVKFNPKIFKKKQKNGSSAKPSCPYCCCAVGSKDRSLSVWLTCLKRPLVVIHELFDKSIMDISWTLNGLGILVCSMDGSVAFLDFSQDELGDPLSEEEKSRIHQSTYGKSLAIMTEAQLSTAVIENPEMLKYQRRQQQQQLDQKSAATREMGSATSVAGVVNGESLEDIRKNLLKKQVETRTADGRRRITPLCIAQLDTGDFSTAFFNSIPLSGSLAGTMLSSHSSPQLLPLDSSTPNSFGASKPCTEPVVAASARPAGDSVNKDSMNATSTPAALSPSVLTTPSKIEPMKAFDSRFTERSKATPGAPALTSMTPTAVERDVHRQVVVVKEESLHSILAGSDMTVSQILLTQHGIPVMNLSDGKAYCFNPSLSTWNLVSDKQDSLAQCADFRSSLPSQDAMLCSGPLAIIQGRTSNSGRQAARLFSVPHVVQQETTLAYLENQVAAALTLQSSHEYRHWLLVYARYLVNEGFEYRLREICKDLLGPVHYSTGSQWESTVVGLRKRELLKELLPVIGQNLRFQRLFTECQEQLDILRDK

SEQ ID NO: 38459 - protein, 53 aa, Homo sapiens
  Payload ID: 7641
  Gene Symbol: HIRA
  Gene Name: histone cell cycle regulator
  ENSP ID: ENSP00000404792
  MOD_RES (1)..(1): Any amino acid
XACEQWQRDLASCRDWEERRNAEAQASRFFQLIFTLTGPSSQLEDKGRILGRL

SEQ ID NO: 38460 - protein, 215 aa, Homo sapiens
  Payload ID: 7642
  Gene Symbol: HIST1H1A
  Gene Name: histone cluster 1, H1a
  Uniprot ID: Q02539
  ENSP ID: ENSP00000244573
MSETVPPAPAASAAPEKPLAGKKAKKPAKAAAASKKKPAGPSVSELIVQAASSSKERGGVSLAALKKALAAAGYDVEKNNSRIKLGIKSLVSKGTLVQTKGTGASGSFKLNKKASSVETKPGASKVATKTKATGASKKLKKATGASKKSVKTPKKAKKPAATRKSSKNPKKPKTVKPKKVAKSPAKAKAVKPKAAKARVTKPKTAKPKKAAPKKK

SEQ ID NO: 38461 - protein, 226 aa, Homo sapiens
  Payload ID: 7643
  Gene Symbol: HIST1H1B
  Gene Name: histone cluster 1, H1b
  Uniprot ID: P16401
  ENSP ID: ENSP00000330074
MSETAPAETATPAPVEKSPAKKKATKKAAGAGAAKRKATGPPVSELITKAVAASKERNGLSLAALKKALAAGGYDVEKNNSRIKLGLKSLVSKGTLVQTKGTGASGSFKLNKKAASGEAKPKAKKAGAAKAKKPAGATPKKAKKAAGAKKAVKKTPKKAKKPAAAGVKKVAKSPKKAKAAAKPKKATKSPAKPKAVKPKAAKPKAAKPKAAKPKAAKAKKAAAKKK

SEQ ID NO: 38462 - protein, 213 aa, Homo sapiens [sequence omitted]

SEQ ID NO: 38463 - protein, 221 aa, Homo sapiens
  Payload ID: 7645
  Gene Symbol: HIST1H1D
  Gene Name: histone cluster 1, H1d
  Uniprot ID: P16402
  ENSP ID: ENSP00000244534
MSETAPLAPTIPAPAEKTPVKKKAKKAGATAGKRKASGPPVSELITKAVAASKERSGVSLAALKKALAAAGYDVEKNNSRIKLGLKSLVSKGTLVQTKGTGASGSFKLNKKAASGEGKPKAKKAGAAKPRKPAGAAKKPKKVAGAATPKKSIKKTPKKVKKPATAAGTKKVAKSAKKVKTPQPKKAAKSPAKAKAPKPKAAKPKSGKPKVTKAKKAAPKKK

SEQ ID NO: 38464 - protein, 219 aa, Homo sapiens
  Payload ID: 7646
  Gene Symbol: HIST1H1E
  Gene Name: histone cluster 1, H1e
  Uniprot ID: P10412
  ENSP ID: ENSP00000307705
MSETAPAAPAAPAPAEKTPVKKKARKSAGAAKRKASGPPVSELITKAVAASKERSGVSLAALKKALAAAGYDVEKNNSRIKLGLKSLVSKGTLVQTKGTGASGSFKLNKKAASGEAKPKAKKAGAAKAKKPAGAAKKPKKATGAATPKKSAKKTPKKAKKPAAAAGAKKAKSPKKAKAAKPKKAPKSPAKAKAVKPKAAKPKTAKPKAAKPKKAAAKKK

SEQ ID NO: 38465 - protein, 207 aa, Homo sapiens
  Payload ID: 7647
  Gene Symbol: HIST1H1T
  Gene Name: histone cluster 1, H1t
  Uniprot ID: P22492
  ENSP ID: ENSP00000341214
MSETVPAASASAGVAAMEKLPTKKRGRKPAGLISASRKVPNLSVSKLITEALSVSQERVGMSLVALKKALAAAGYDVEKNNSRIKLSLKSLVNKGILVQTRGTGASGSFKLSKKVIPKSTRSKAKKSVSAKTKKLVLSRDSKSPKTAKTNKRAKKPRATTPKTVRSGRKAKGAKGKQQQKSPVKARASKSKLTQHHEVNVRKATSKK

SEQ ID NO: 38466 - protein, 131 aa, Homo sapiens
  Payload ID: 7648
  Gene Symbol: HIST1H2AA
  Gene Name: histone cluster 1, H2aa
  Uniprot ID: Q96QV6
  ENSP ID: ENSP00000297012
MSGRGKQGGKARAKSKSRSSRAGLQFPVGRIHRLLRKGNYAERIGAGAPVYLAAVLEYLTAEILELAGNASRDNKKTRIIPRHLQLAIRNDEELNKLLGGVTIAQGGVLPNIQAVLLPKKTESHHHKAQSK

SEQ ID NO: 38467 - protein, 130 aa, Homo sapiens
  Payload ID: 7649
  Gene Symbol: HIST1H2AB
  Gene Name: histone cluster 1, H2ab
  Uniprot ID: P04908
  ENSP ID: ENSP00000483842
MSGRGKQGGKARAKAKTRSSRAGLQFPVGRVHRLLRKGNYSERVGAGAPVYLAAVLEYLTAEILELAGNAARDNKKTRIIPRHLQLAIRNDEELNKLLGRVTIAQGGVLPNIQAVLLPKKTESHHKAKGK

SEQ ID NO: 38468 - protein, 130 aa, Homo sapiens
  Payload ID: 7650
  Gene Symbol: HIST1H2AC
  Gene Name: histone cluster 1, H2ac
  Uniprot ID: Q93077
  ENSP ID: ENSP00000321389
MSGRGKQGGKARAKAKSRSSRAGLQFPVGRVHRLLRKGNYAERVGAGAPVYLAAVLEYLTAEILELAGNAARDNKKTRIIPRHLQLAIRNDEELNKLLGRVTIAQGGVLPNIQAVLLPKKTESHHKAKGK

SEQ ID NO: 38469 - protein, 130 aa, Homo sapiens; identical to SEQ ID NO: 38468
  Payload ID: 7650
  Gene Symbol: HIST1H2AC
  Gene Name: histone cluster 1, H2ac
  Uniprot ID: Q93077
  ENSP ID: ENSP00000367022

SEQ ID NO: 38470 - protein, 130 aa, Homo sapiens; identical to SEQ ID NO: 38468
  Payload ID: 7650
  Gene Symbol: HIST1H2AC
  Gene Name: histone cluster 1, H2ac
  Uniprot ID: Q93077
  ENSP ID: ENSP00000473534

SEQ ID NO: 38471 - protein, 130 aa, Homo sapiens
  Payload ID: 7651
  Gene Symbol: HIST1H2AD
  Gene Name: histone cluster 1, H2ad
  Uniprot ID: P20671
  ENSP ID: ENSP00000341094
MSGRGKQGGKARAKAKTRSSRAGLQFPVGRVHRLLRKGNYSERVGAGAPVYLAAVLEYLTAEILELAGNAARDNKKTRIIPRHLQLAIRNDEELNKLLGKVTIAQGGVLPNIQAVLLPKKTESHHKAKGK

SEQ ID NO: 38472 - protein, 130 aa, Homo sapiens; identical to SEQ ID NO: 38467
  Payload ID: 7652
  Gene Symbol: HIST1H2AE
  Gene Name: histone cluster 1, H2ae
  Uniprot ID: P04908
  ENSP ID: ENSP00000303373

SEQ ID NO: 38473 - protein, 130 aa, Homo sapiens
  Payload ID: 7653
  Gene Symbol: HIST1H2AG
  Gene Name: histone cluster 1, H2ag
  Uniprot ID: P0C0S8
  ENSP ID: ENSP00000352119
MSGRGKQGGKARAKAKTRSSRAGLQFPVGRVHRLLRKGNYAERVGAGAPVYLAAVLEYLTAEILELAGNAARDNKKTRIIPRHLQLAIRNDEELNKLLGKVTIAQGGVLPNIQAVLLPKKTESHHKAKGK

SEQ ID NO: 38474 - protein, 128 aa, Homo sapiens
  Payload ID: 7654
  Gene Symbol: HIST1H2AH
  Gene Name: histone cluster 1, H2ah
  Uniprot ID: Q96KK5
  ENSP ID: ENSP00000366679
MSGRGKQGGKARAKAKTRSSRAGLQFPVGRVHRLLRKGNYAERVGAGAPVYLAAVLEYLTAEILELAGNAARDNKKTRIIPRHLQLAIRNDEELNKLLGKVTIAQGGVLPNIQAVLLPKKTESHHKAK

SEQ ID NO: 38475 - protein, 130 aa, Homo sapiens; identical to SEQ ID NO: 38473
  Payload ID: 7655
  Gene Symbol: HIST1H2AI
  Gene Name: histone cluster 1, H2ai
  Uniprot ID: P0C0S8
  ENSP ID: ENSP00000351589

SEQ ID NO: 38476 - protein, 128 aa, Homo sapiens
  Payload ID: 7656
  Gene Symbol: HIST1H2AJ
  Gene Name: histone cluster 1, H2aj
  Uniprot ID: Q99878
  ENSP ID: ENSP00000328484
MSGRGKQGGKARAKAKTRSSRAGLQFPVGRVHRLLRKGNYAERVGAGAPVYLAAVLEYLTAEILELAGNAARDNKKTRIIPRHLQLAIRNDEELNKLLGKVTIAQGGVLPNIQAVLLPKKTESHHKTK

SEQ ID NO: 38477 - protein, 130 aa, Homo sapiens; identical to SEQ ID NO: 38473
  Payload ID: 7657
  Gene Symbol: HIST1H2AK
  Gene Name: histone cluster 1, H2ak
  Uniprot ID: P0C0S8
  ENSP ID: ENSP00000482431

SEQ ID NO: 38478 - protein, 130 aa, Homo sapiens; identical to SEQ ID NO: 38473
  Payload ID: 7658
  Gene Symbol: HIST1H2AL
  Gene Name: histone cluster 1, H2al
  Uniprot ID: P0C0S8
  ENSP ID: ENSP00000482538

SEQ ID NO: 38479 - protein, 130 aa, Homo sapiens; identical to SEQ ID NO: 38473
  Payload ID: 7659
  Gene Symbol: HIST1H2AM
  Gene Name: histone cluster 1, H2am
  Uniprot ID: P0C0S8
  ENSP ID: ENSP00000352627

SEQ ID NO: 38480 - protein, 127 aa, Homo sapiens
  Payload ID: 7660
  Gene Symbol: HIST1H2BA
  Gene Name: histone cluster 1, H2ba
  Uniprot ID: Q96A08
  ENSP ID: ENSP00000274764
MPEVSSKGATISKKGFKKAVVKTQKKEGKKRKRTRKESYSIYIYKVLKQVHPDTGISSKAMSIMNSFVTDIFERIASEASRLAHYSKRSTISSREIQTAVRLLLPGELAKHAVSEGTKAVTKYTSSK

SEQ ID NO: 38481 - protein, 126 aa, Homo sapiens
  Payload ID: 7661
  Gene Symbol: HIST1H2BB
  Gene Name: histone cluster 1, H2bb
  Uniprot ID: P33778
  ENSP ID: ENSP00000482674
MPEPSKSAPAPKKGSKKAITKAQKKDGKKRKRSRKESYSIYVYKVLKQVHPDTGISSKAMGIMNSFVNDIFERIAGEASRLAHYNKRSTITSREIQTAVRLLLPGELAKHAVSEGTKAVTKYTSSK

SEQ ID NO: 38482 - protein, 126 aa, Homo sapiens
  Payload ID: 7661
  Gene Symbol: HIST1H2BB
  Gene Name: histone cluster 1, H2bb
  ENSP ID: ENSP00000486472
MPEPAKSAPAPKKGSKKAVTKAQKKDGKKRKRSRKESYSVYVYKVLKQVHPDTGISSKAMGIMNSFVNDIFERIAGEASRLAHYNKRSTITSREIQTAVRLLLPGELAKHAVSEGTKAVTKYTSSK

SEQ ID NO: 38483 - protein, 126 aa, Homo sapiens; identical to SEQ ID NO: 38482
  Payload ID: 7662
  Gene Symbol: HIST1H2BC
  Gene Name: histone cluster 1, H2bc
  Uniprot ID: P62807
  ENSP ID: ENSP00000321744

SEQ ID NO: 38484 - protein, 126 aa, Homo sapiens; identical to SEQ ID NO: 38482
  Payload ID: 7662
  Gene Symbol: HIST1H2BC
  Gene Name: histone cluster 1, H2bc
  Uniprot ID: P62807
  ENSP ID: ENSP00000380180

SEQ ID NO: 38485 - protein, 126 aa, Homo sapiens
  Payload ID: 7663
  Gene Symbol: HIST1H2BD
  Gene Name: histone cluster 1, H2bd
  Uniprot ID: P58876
  ENSP ID: ENSP00000289316
MPEPTKSAPAPKKGSKKAVTKAQKKDGKKRKRSRKESYSVYVYKVLKQVHPDTGISSKAMGIMNSFVNDIFERIAGEASRLAHYNKRSTITSREIQTAVRLLLPGELAKHAVSEGTKAVTKYTSSK

SEQ ID NO: 38486 - protein, 126 aa, Homo sapiens; identical to SEQ ID NO: 38485
  Payload ID: 7663
  Gene Symbol: HIST1H2BD
  Gene Name: histone cluster 1, H2bd
  Uniprot ID: P58876
  ENSP ID: ENSP00000367008

SEQ ID NO: 38487 - protein, 126 aa, Homo sapiens; identical to SEQ ID NO: 38482
  Payload ID: 7664
  Gene Symbol: HIST1H2BE
  Gene Name: histone cluster 1, H2be
  Uniprot ID: P62807
  ENSP ID: ENSP00000483237

SEQ ID NO: 38488 - protein, 126 aa, Homo sapiens; identical to SEQ ID NO: 38482
  Payload ID: 7664
  Gene Symbol: HIST1H2BE
  Gene Name: histone cluster 1, H2be
  ENSP ID: ENSP00000489317

SEQ ID NO: 38489 - protein, 126 aa, Homo sapiens; identical to SEQ ID NO: 38482
  Payload ID: 7665
  Gene Symbol: HIST1H2BF
  Gene Name: histone cluster 1, H2bf
  Uniprot ID: P62807
  ENSP ID: ENSP00000348924

SEQ ID NO: 38490 - protein, 126 aa, Homo sapiens; identical to SEQ ID NO: 38482
  Payload ID: 7666
  Gene Symbol: HIST1H2BG
  Gene Name: histone cluster 1, H2bg
  Uniprot ID: P62807
  ENSP ID: ENSP00000445633

SEQ ID NO: 38491 - protein, 126 aa, Homo sapiens
  Payload ID: 7667
  Gene Symbol: HIST1H2BH
  Gene Name: histone cluster 1, H2bh
  Uniprot ID: Q93079
  ENSP ID: ENSP00000479169
MPDPAKSAPAPKKGSKKAVTKAQKKDGKKRKRSRKESYSVYVYKVLKQVHPDTGISSKAMGIMNSFVNDIFERIAGEASRLAHYNKRSTITSREIQTAVRLLLPGELAKHAVSEGTKAVTKYTSSK

SEQ ID NO: 38492 - protein, 126 aa, Homo sapiens; identical to SEQ ID NO: 38482
  Payload ID: 7668
  Gene Symbol: HIST1H2BI
  Gene Name: histone cluster 1, H2bi
  Uniprot ID: P62807
  ENSP ID: ENSP00000366962

SEQ ID NO: 38493 - protein, 126 aa, Homo sapiens [sequence omitted]

SEQ ID NO: 38494 - protein, 21 aa, Homo sapiens
  Payload ID: 7669
  Gene Symbol: HIST1H2BJ
  Gene Name: histone cluster 1, H2bj
  ENSP ID: ENSP00000475213
  MOD_RES (1)..(1): Any amino acid
XDIFERIAGGVAETSQQAHLH

SEQ ID NO: 38495 - protein, 126 aa, Homo sapiens [sequence omitted]

SEQ ID NO: 38496 - protein, 126 aa, Homo sapiens
  Payload ID: 7670
  Gene Symbol: HIST1H2BK
  Gene Name: histone cluster 1, H2bk
  Uniprot ID: O60814
  ENSP ID: ENSP00000349430
MPEPAKSAPAPKKGSKKAVTKAQKKDGKKRKRSRKESYSVYVYKVLKQVHPDTGISSKAMGIMNSFVNDIFERIAGEASRLAHYNKRSTITSREIQTAVRLLLPGELAKHAVSEGTKAVTKYTSAK

SEQ ID NO: 38497 - protein, 126 aa, Homo sapiens
  Payload ID: 7671
  Gene Symbol: HIST1H2BL
  Gene Name: histone cluster 1, H2bl
  Uniprot ID: Q99880
  ENSP ID: ENSP00000366618
MPELAKSAPAPKKGSKKAVTKAQKKDGKKRKRSRKESYSVYVYKVLKQVHPDTGISSKAMGIMNSFVNDIFERIASEASRLAHYNKRSTITSREIQTAVRLLLPGELAKHAVSEGTKAVTKYTSSK

SEQ ID NO: 38498 - protein, 126 aa, Homo sapiens
  Payload ID: 7672
  Gene Symbol: HIST1H2BM
  Gene Name: histone cluster 1, H2bm
  Uniprot ID: Q99879
  ENSP ID: ENSP00000477907
MPEPVKSAPVPKKGSKKAINKAQKKDGKKRKRSRKESYSVYVYKVLKQVHPDTGISSKAMGIMNSFVNDIFERIAGEASRLAHYNKRSTITSREIQTAVRLLLPGELAKHAVSEGTKAVTKYTSSK

SEQ ID NO: 38499 - protein, 126 aa, Homo sapiens
  Payload ID: 7673
  Gene Symbol: HIST1H2BN
  Gene Name: histone cluster 1, H2bn
  Uniprot ID: Q99877
  ENSP ID: ENSP00000380177
MPEPSKSAPAPKKGSKKAVTKAQKKDGKKRKRSRKESYSVYVYKVLKQVHPDTGISSKAMGIMNSFVNDIFERIAGEASRLAHYNKRSTITSREIQTAVRLLLPGELAKHAVSEGTKAVTKYTSSK

SEQ ID NO: 38500 - protein, 126 aa, Homo sapiens; identical to SEQ ID NO: 38499
  Payload ID: 7673
  Gene Symbol: HIST1H2BN
  Gene Name: histone cluster 1, H2bn
  Uniprot ID: Q99877
  ENSP ID: ENSP00000446031

SEQ ID NO: 38501 - protein, 166 aa, Homo sapiens
  Payload ID: 7673
  Gene Symbol: HIST1H2BN
  Gene Name: histone cluster 1, H2bn
  ENSP ID: ENSP00000475942
MPEPSKSAPAPKKGSKKAVTKAQKKDGKKRKRSRKESYSVYVYKVLKQVHPDTGISSKAMGIMNSFVNDIFERIAGEASRLAHYNKRSTITSREIQTAVRLLLPGELAKHAVSEGTKAVTKYTSSKKRKRRFTESIKKAHGFRKLKIWLKLRVSNQSPDDIYIARD

SEQ ID NO: 38502 - protein, 126 aa, Homo sapiens; identical to SEQ ID NO: 38499
  Payload ID: 7673
  Gene Symbol: HIST1H2BN
  Gene Name: histone cluster 1, H2bn
  Uniprot ID: Q99877
  ENSP ID: ENSP00000483903

SEQ ID NO: 38503 - protein, 126 aa, Homo sapiens
  Payload ID: 7674
  Gene Symbol: HIST1H2BO
  Gene Name: histone cluster 1, H2bo
  Uniprot ID: P23527
  ENSP ID: ENSP00000477527
MPDPAKSAPAPKKGSKKAVTKAQKKDGKKRKRSRKESYSIYVYKVLKQVHPDTGISSKAMGIMNSFVNDIFERIAGEASRLAHYNKRSTITSREIQTAVRLLLPGELAKHAVSEGTKAVTKYTSSK

SEQ ID NO: 38504 - protein, 136 aa, Homo sapiens
  Payload ID: 7675
  Gene Symbol: HIST1H3A
  Gene Name: histone cluster 1, H3a
  Uniprot ID: P68431
  ENSP ID: ENSP00000480826
MARTKQTARKSTGGKAPRKQLATKAARKSAPATGGVKKPHRYRPGTVALREIRRYQKSTELLIRKLPFQRLVREIAQDFKTDLRFQSSAVMALQEACEAYLVGLFEDTNLCAIHAKRVTIMPKDIQLARRIRGERA

SEQ ID NO: 38505 - protein, 136 aa, Homo sapiens; identical to SEQ ID NO: 38504
  Payload ID: 7676
  Gene Symbol: HIST1H3B
  Gene Name: histone cluster 1, H3b
  Uniprot ID: P68431
  ENSP ID: ENSP00000484841

SEQ ID NO: 38506 - protein, 136 aa, Homo sapiens; identical to SEQ ID NO: 38504
  Payload ID: 7677
  Gene Symbol: HIST1H3C
  Gene Name: histone cluster 1, H3c
  Uniprot ID: P68431
  ENSP ID: ENSP00000484658

SEQ ID NO: 38507 - protein, 136 aa, Homo sapiens; identical to SEQ ID NO: 38504
  Payload ID: 7678
  Gene Symbol: HIST1H3D
  Gene Name: histone cluster 1, H3d
  Uniprot ID: P68431
  ENSP ID: ENSP00000366999

SEQ ID NO: 38508 - protein, 136 aa, Homo sapiens; identical to SEQ ID NO: 38504
  Payload ID: 7679
  Gene Symbol: HIST1H3E
  Gene Name: histone cluster 1, H3e
  Uniprot ID: P68431
  ENSP ID: ENSP00000482271

SEQ ID NO: 38509 - protein, 136 aa, Homo sapiens; identical to SEQ ID NO: 38504
  Payload ID: 7679
  Gene Symbol: HIST1H3E
  Gene Name: histone cluster 1, H3e
  ENSP ID: ENSP00000489282

SEQ ID NO: 38510 - protein, 136 aa, Homo sapiens; identical to SEQ ID NO: 38504
  Payload ID: 7680
  Gene Symbol: HIST1H3F
  Gene Name: histone cluster 1, H3f
  Uniprot ID: P68431
  ENSP ID: ENSP00000484095

SEQ ID NO: 38511 - protein, 136 aa, Homo sapiens; identical to SEQ ID NO: 38504
  Payload ID: 7681
  Gene Symbol: HIST1H3G
  Gene Name: histone cluster 1, H3g
  Uniprot ID: P68431
  ENSP ID: ENSP00000484638

SEQ ID NO: 38512 - protein, 136 aa, Homo sapiens; identical to SEQ ID NO: 38504
  Payload ID: 7682
  Gene Symbol: HIST1H3H
  Gene Name: histone cluster 1, H3h
  Uniprot ID: P68431
  ENSP ID: ENSP00000358160

SEQ ID NO: 38513 - protein, 136 aa, Homo sapiens; identical to SEQ ID NO: 38504
  Payload ID: 7683
  Gene Symbol: HIST1H3I
  Gene Name: histone cluster 1, H3i
  Uniprot ID: P68431
  ENSP ID: ENSP00000483283

SEQ ID NO: 38514 - protein, 136 aa, Homo sapiens; identical to SEQ ID NO: 38504
  Payload ID: 7684
  Gene Symbol: HIST1H3J
  Gene Name: histone cluster 1, H3j
  Uniprot ID: P68431
  ENSP ID: ENSP00000352252

SEQ ID NO: 38515 - protein, 103 aa, Homo sapiens [sequence omitted]

SEQ ID NO: 38516 - protein, 103 aa, Homo sapiens [sequence omitted]

SEQ ID NO: 38517 - protein, 103 aa, Homo sapiens [sequence omitted]

SEQ ID NO: 38518 - protein, 103 aa, Homo sapiens [sequence omitted]

SEQ ID NO: 38519 - protein, 103 aa, Homo sapiens [sequence omitted]

SEQ ID NO: 38520 - protein, 103 aa, Homo sapiens [sequence omitted]

SEQ ID NO: 38521 - protein, 98 aa, Homo sapiens
  Payload ID: 7691
  Gene Symbol: HIST1H4G
  Gene Name: histone cluster 1, H4g
  Uniprot ID: Q99525
  ENSP ID: ENSP00000477870
MSVRGKAGKGLGKGGAKCHRKVLSDNIQGITKCTIRRLARHGGVKRILGLIYEETRRVFKVFLENVIWYAVTNTEHAKRKTVTAMAVVYVLKRQGRTL

SEQ ID NO: 38522 - protein, 103 aa, Homo sapiens [sequence omitted]

SEQ ID NO: 38523 - protein, 103 aa, Homo sapiens [sequence omitted]

SEQ ID NO: 38524 - protein, 103 aa, Homo sapiens [sequence omitted]

SEQ ID NO: 38525 - protein, 103 aa, Homo sapiens [sequence omitted]

SEQ ID NO: 38526 - protein, 103 aa, Homo sapiens [sequence omitted]

SEQ ID NO: 38527 - protein, 103 aa, Homo sapiens [sequence omitted]

SEQ ID NO: 38528 - protein, 103 aa, Homo sapiens [sequence omitted]

SEQ ID NO: 38529 - protein, 103 aa, Homo sapiens [sequence omitted]

SEQ ID NO: 38530 - protein, 130 aa, Homo sapiens
  Payload ID: 7697
  Gene Symbol: HIST2H2AA3
  Gene Name: histone cluster 2, H2aa3
  Uniprot ID: Q6FI13
  ENSP ID: ENSP00000358155
MSGRGKQGGKARAKAKSRSSRAGLQFPVGRVHRLLRKGNYAERVGAGAPVYMAAVLEYLTAEILELAGNAARDNKKTRIIPRHLQLAIRNDEELNKLLGKVTIAQGGVLPNIQAVLLPKKTESHHKAKGK

SEQ ID NO: 38531 - protein, 130 aa, Homo sapiens; identical to SEQ ID NO: 38530
  Payload ID: 7698
  Gene Symbol: HIST2H2AA4
  Gene Name: histone cluster 2, H2aa4
  Uniprot ID: Q6FI13
  ENSP ID: ENSP00000475814

SEQ ID NO: 38532 - protein, 130 aa, Homo sapiens
  Payload ID: 7699
  Gene Symbol: HIST2H2AB
  Gene Name: histone cluster 2, H2ab
  Uniprot ID: Q8IUE6
  ENSP ID: ENSP00000332790
MSGRGKQGGKARAKAKSRSSRAGLQFPVGRVHRLLRKGNYAERVGAGAPVYLAAVLEYLTAEILELAGNAARDNKKTRIIPRHLQLAVRNDEELNKLLGGVTIAQGGVLPNIQAVLLPKKTESHKPGKNK

SEQ ID NO: 38533 - protein, 129 aa, Homo sapiens
  Payload ID: 7700
  Gene Symbol: HIST2H2AC
  Gene Name: histone cluster 2, H2ac
  Uniprot ID: Q16777
  ENSP ID: ENSP00000332194
MSGRGKQGGKARAKAKSRSSRAGLQFPVGRVHRLLRKGNYAERVGAGAPVYMAAVLEYLTAEILELAGNAARDNKKTRIIPRHLQLAIRNDEELNKLLGKVTIAQGGVLPNIQAVLLPKKTESHKAKSK

SEQ ID NO: 38534 - protein, 126 aa, Homo sapiens
  Payload ID: 7701
  Gene Symbol: HIST2H2BE
  Gene Name: histone cluster 2, H2be
  Uniprot ID: Q16778
  ENSP ID: ENSP00000358151
MPEPAKSAPAPKKGSKKAVTKAQKKDGKKRKRSRKESYSIYVYKVLKQVHPDTGISSKAMGIMNSFVNDIFERIAGEASRLAHYNKRSTITSREIQTAVRLLLPGELAKHAVSEGTKAVTKYTSSK

SEQ ID NO: 38535 - protein, 126 aa, Homo sapiens; identical to SEQ ID NO: 38534
  Payload ID: 7701
  Gene Symbol: HIST2H2BE
  Gene Name: histone cluster 2, H2be
  Uniprot ID: Q16778
  ENSP ID: ENSP00000375736

SEQ ID NO: 38536 - protein, 126 aa, Homo sapiens
  Payload ID: 7702
  Gene Symbol: HIST2H2BF
  Gene Name: histone cluster 2, H2bf
  Uniprot ID: Q5QNW6
  ENSP ID: ENSP00000358164
MPDPAKSAPAPKKGSKKAVTKVQKKDGKKRKRSRKESYSVYVYKVLKQVHPDTGISSKAMGIMNSFVNDIFERIAGEASRLAHYNKRSTITSREIQTAVRLLLPGELAKHAVSEGTKAVTKYTSSK

SEQ ID NO: 38537 - protein, 134 aa, Homo sapiens
  Payload ID: 7702
  Gene Symbol: HIST2H2BF
  Gene Name: histone cluster 2, H2bf
  Uniprot ID: Q5QNW6
  ENSP ID: ENSP00000445831
MPDPAKSAPAPKKGSKKAVTKVQKKDGKKRKRSRKESYSVYVYKVLKQVHPDTGISSKAMGIMNSFVNDIFERIAGEASRLAHYNKRSTITSREIQTAVRLLLPGELAKHAVSEGTKAVTKYTSSKLIGPILWK

SEQ ID NO: 38538 - protein, 136 aa, Homo sapiens
  Payload ID: 7703
  Gene Symbol: HIST2H3PS2
  Gene Name: histone cluster 2, H3, pseudogene 2
  ENSP ID: ENSP00000476960
MARTKQTARKSTGGKAPRKQLATKAARKSAPATGGVKKPHRYRPGTVALREIRRYQKSTELLIRKLPFQRLVREIAQEFKTDLRFQSSAVMALQEAREAYLVGLFEDTNLCAIHAKRVTIMPKDIQLVSRIRGERA

SEQ ID NO: 38539 - protein, 136 aa, Homo sapiens [sequence omitted]

SEQ ID NO: 38540 - protein, 136 aa, Homo sapiens [sequence omitted]

SEQ ID NO: 38541 - protein, 136 aa, Homo sapiens [sequence omitted]

SEQ ID NO: 38542 - protein, 103 aa, Homo sapiens [sequence omitted]

SEQ ID NO: 38543 - protein, 103 aa, Homo sapiens [sequence omitted]

SEQ ID NO: 38544 - protein, 103 aa, Homo sapiens [sequence omitted]

SEQ ID NO: 38545 - protein, 103 aa, Homo sapiens [sequence omitted]

SEQ ID NO: 38546 - protein, 103 aa, Homo sapiens [sequence omitted]

SEQ ID NO: 38547 - protein, 103 aa, Homo sapiens [sequence omitted]

SEQ ID NO: 38548 - protein, 103 aa, Homo sapiens [sequence omitted]

SEQ ID NO: 38549 - protein, 130 aa, Homo sapiens
  Payload ID: 7709
  Gene Symbol: HIST3H2A
  Gene Name: histone cluster 3, H2a
  Uniprot ID: Q7L7L0
  ENSP ID: ENSP00000355656
MSGRGKQGGKARAKAKSRSSRAGLQFPVGRVHRLLRKGNYSERVGAGAPVYLAAVLEYLTAEILELAGNAARDNKKTRIIPRHLQLAIRNDEELNKLLGRVTIAQGGVLPNIQAVLLPKKTESHHKAKGK

SEQ ID NO: 38550 - protein, 126 aa, Homo sapiens
  Payload ID: 7710
  Gene Symbol: HIST3H2BB
  Gene Name: histone cluster 3, H2bb
  Uniprot ID: Q8N257
  ENSP ID: ENSP00000479284
MPDPSKSAPAPKKGSKKAVTKAQKKDGKKRKRGRKESYSIYVYKVLKQVHPDTGISSKAMGIMNSFVNDIFERIASEASRLAHYNKRSTITSREVQTAVRLLLPGELAKHAVSEGTKAVTKYTSSK

SEQ ID NO: 38551 - protein, 136 aa, Homo sapiens
  Payload ID: 7711
  Gene Symbol: HIST3H3
  Gene Name: histone cluster 3, H3
  Uniprot ID: Q16695
  ENSP ID: ENSP00000355657
MARTKQTARKSTGGKAPRKQLATKVARKSAPATGGVKKPHRYRPGTVALREIRRYQKSTELLIRKLPFQRLMREIAQDFKTDLRFQSSAVMALQEACESYLVGLFEDTNLCVIHAKRVTIMPKDIQLARRIRGERA

SEQ ID NO: 38552 - protein, 103 aa, Homo sapiens [sequence omitted]

SEQ ID NO: 38553 - protein, 103 aa, Homo sapiens [sequence omitted]

SEQ ID NO: 38554 - protein, 482 aa, Homo sapiens
  Payload ID: 7713
  Gene Symbol: HDAC1
  Gene Name: histone deacetylase 1
  Uniprot ID: Q13547
  ENSP ID: ENSP00000362649
MAQTQGTRRKVCYYYDGDVGNYYYGQGHPMKPHRIRMTHNLLLNYGLYRKMEIYRPHKANAEEMTKYHSDDYIKFLRSIRPDNMSEYSKQMQRFNVGEDCPVFDGLFEFCQLSTGGSVASAVKLNKQQTDIAVNWAGGLHHAKKSEASGFCYVNDIVLAILELLKYHQRVLYIDIDIHHGDGVEEAFYTTDRVMTVSFHKYGEYFPGTGDLRDIGAGKGKYYAVNYPLRDGIDDESYEAIFKPVMSKVMEMFQPSAVVLQCGSDSLSGDRLGCFNLTIKGHAKCVEFVKSFNLPMLMLGGGGYTIRNVARCWTYETAVALDTEIPNELPYNDYFEYFGPDFKLHISPSNMTNQNTNEYLEKIKQRLFENLRMLPHAPGVQMQAIPEDAIPEESGDEDEDDPDKRISICSSDKRIACEEEFSDSEEEGEGGRKNSSNFKKAKRVKTEDEKEKDPEEKKEVTEEEKTKEEKPEAKGVKEEVKLA

SEQ ID NO: 38555 - protein, 211 aa, Homo sapiens
  Payload ID: 7713
  Gene Symbol: HDAC1
  Gene Name: histone deacetylase 1
  ENSP ID: ENSP00000407859
MAQTQGTRRKVCYYYDGDVGNYYYGQGHPMKPHRIRMTHNLLLNYGLYRKMEIYRPHKANAEEMTKYHSDDYIKFLRSIRPDNMSEYSKQMQRSSAVKLNKQQTDIAVNWAGGLHHAKKSEASGFCYVNDIVLAILELLKYHQRVLYIDIDIHHGDGVEEAFYTTDRVMTVSFHKYGEYFPGTGDLRDIGAGKGKYYAVNYPLRDGIDDES

SEQ ID NO: 38556 - protein, 669 aa, Homo sapiens
  Payload ID: 7714
  Gene Symbol: HDAC10
  Gene Name: histone deacetylase 10
  Uniprot ID: Q969S8
  ENSP ID: ENSP00000216271
MGTALVYHEDMTATRLLWDDPECEIERPERLTAALDRLRQRGLEQRCLRLSAREASEEELGLVHSPEYVSLVRETQVLGKEELQALSGQFDAIYFHPSTFHCARLAAGAGLQLVDAVLTGAVQNGLALVRPPGHHGQRAAANGFCVFNNVAIAAAHAKQKHGLHRILVVDWDVHHGQGIQYLFEDDPSVLYFSWHRYEHGRFWPFLRESDADAVGRGQGLGFTVNLPWNQVGMGNADYVAAFLHLLLPLAFEFDPELVLVSAGFDSAIGDPEGQMQATPECFAHLTQLLQVLAGGRVCAVLEGGYHLESLAESVCMTVQTLLGDPAPPLSGPMAPCQSALESIQSARAAQAPHWKSLQQQDVTAVPMSPSSHSPEGRPPPLLPGGPVCKAAASAPSSLLDQPCLCPAPSVRTAVALTTPDITLVLPPDVIQQEASALREETEAWARPHESLAREEALTALGKLLYLLDGMLDGQVNSGIAATPASAAAATLDVAVRRGLSHGAQRLLCVALGQLDRPPDLAHDGRSLWLNIRGKEAAALSMFHVSTPLPVMTGGFLSCILGLVLPLAYGFQPDLVLVALGPGHGLQGPHAALLAAMLRGLAGGRVLALLEENSTPQLAGILARVLNGEAPPSLGPSSVASPEDVQALMYLRGQLEPQWKMLQCHPHLVA

SEQ ID NO: 38557 - protein, 649 aa, Homo sapiens
  Payload ID: 7714
  Gene Symbol: HDAC10
  Gene Name: histone deacetylase 10
  Uniprot ID: Q969S8
  ENSP ID: ENSP00000343540
MGTALVYHEDMTATRLLWDDPECEIERPERLTAALDRLRQRGLEQRCLRLSAREASEEELGLVHSPEYVSLVRETQVLGKEELQALSGQFDAIYFHPSTFHCARLAAGAGLQLVDAVLTGAVQNGLALVRPPGHHGQRAAANGFCVFNNVAIAAAHAKQKHGLHRILVVDWDVHHGQGIQYLFEDDPSVLYFSWHRYEHGRFWPFLRESDADAVGRGQGLGFTVNLPWNQVGMGNADYVAAFLHLLLPLAFEGQMQATPECFAHLTQLLQVLAGGRVCAVLEGGYHLESLAESVCMTVQTLLGDPAPPLSGPMAPCQSALESIQSARAAQAPHWKSLQQQDVTAVPMSPSSHSPEGRPPPLLPGGPVCKAAASAPSSLLDQPCLCPAPSVRTAVALTTPDITLVLPPDVIQQEASALREETEAWARPHESLAREEALTALGKLLYLLDGMLDGQVNSGIAATPASAAAATLDVAVRRGLSHGAQRLLCVALGQLDRPPDLAHDGRSLWLNIRGKEAAALSMFHVSTPLPVMTGGFLSCILGLVLPLAYGFQPDLVLVALGPGHGLQGPHAALLAAMLRGLAGGRVLALLEENSTPQLAGILARVLNGEAPPSLGPSSVASPEDVQALMYLRGQLEPQWKMLQCHPHLVA

SEQ ID NO: 38558 - protein, 96 aa, Homo sapiens
  Payload ID: 7714
  Gene Symbol: HDAC10
  Gene Name: histone deacetylase 10
  ENSP ID: ENSP00000397517
MGTALVYHEDMTATRLLWDDPECEIERPERLTAALDRLRQRGLEQRCLRLSAREASEEELGLVHRVPFTARGWPQGLDCSWWTLCSLELCKMGLPW

SEQ ID NO: 38559 - protein, 619 aa, Homo sapiens
  Payload ID: 7714
  Gene Symbol: HDAC10
  Gene Name: histone deacetylase 10
  ENSP ID: ENSP00000397542
MGTALVYHEDMTATRLLWDDPECEIERPERLTAALDRLRQRGLEQRCLRLSAREASEEELGLVHSPEYVSLVRETQVLGKEELQALSGQFDAIYFHPSTFHCARLAAGAGLQLVDAVLTGAVQNGLALVRPPGHHGQRAAANGFCVFNNVAIAAAHAKQKHGLHRILVVDWDVHHGQGIQYLFEDDPSVLYFSWHRYEHGRFWPFLRESDADAVGRGQGLGFTVNLPWNQVGMGNADYVAAFLHLLLPLAFEGGYHLESLAESVCMTVQTLLGDPAPPLSGPMAPCQSALESIQSARAAQAPHWKSLQQQDVTAVPMSPSSHSPEGRPPPLLPGGPVCKAAASAPSSLLDQPCLCPAPSVRTAVALTTPDITLVLPPDVIQQEASALREETEAWARPHESLAREEALTALGKLLYLLDGMLDGQVNSGIAATPASAAAATLDVAVRRGLSHGAQRLLCVALGQLDRPPDLAHDGRSLWLNIRGKEAAALSMFHVSTPLPVMTGGFLSCILGLVLPLAYGFQPDLVLVALGPGHGLQGPHAALLAAMLRGLAGGRVLALLEENSTPQLAGILARVLNGEAPPSLGPSSVASPEDVQALMYLRGQLEPQWKMLQCHPHLVA

SEQ ID NO: 38560 - protein, 396 aa, Homo sapiens
  Payload ID: 7714
  Gene Symbol: HDAC10
  Gene Name: histone deacetylase 10
  Uniprot ID: Q969S8
  ENSP ID: ENSP00000406150
MGTALVYHEDMTATRLLWDDPECEIERPERLTAALDRLRQRGLEQRCLRLSAREASEEELGLVHSPEYVSLVRETQVLGKEELQALSGQFDAIYFHPSTFHCARLAAGAGLQLVDAVLTGAVQNGLALVRPPGHHGQRAAANGFCVFNNVAIAAAHAKQKHGLHRILVVDWDVHHGQGIQYLFEDDPSVLYFSWHRYEHGRFWPFLRESDADAVGRGQGLGFTVNLPWNQVGMGNADYVAAFLHLLLPLAFEGGYHLESLAESVCMTVQTLLGDPAPPLSGPMAPCQSALESIQSARAAQAPHWKSLQQQDVTAVPMSPSSHSPEGRPPPLLPGGPVCKAAASAPSSLLDQPCLCPAPSVRTAVALTTPDITLVLPPDVIQQEASALREETEAWAR

SEQ ID NO: 38561 - protein, 96 aa, Homo sapiens; identical to SEQ ID NO: 38558
  Payload ID: 7714
  Gene Symbol: HDAC10
  Gene Name: histone deacetylase 10
  ENSP ID: ENSP00000407640

SEQ ID NO: 38562 - protein, 96 aa, Homo sapiens; identical to SEQ ID NO: 38558
  Payload ID: 7714
  Gene Symbol: HDAC10
  Gene Name: histone deacetylase 10
  ENSP ID: ENSP00000486864

SEQ ID NO: 38563 - protein, 347 aa, Homo sapiens
  Payload ID: 7715
  Gene Symbol: HDAC11
  Gene Name: histone deacetylase 11
  Uniprot ID: Q96DB2
  ENSP ID: ENSP00000295757
MLHTTQLYQHVPETRWPIVYSPRYNITFMGLEKLHPFDAGKWGKVINFLKEEKLLSDSMLVEAREASEEDLLVVHTRRYLNELKWSFAVATITEIPPVIFLPNFLVQRKVLRPLRTQTGGTIMAGKLAVERGWAINVGGGFHHCSSDRGGGFCAYADITLAIKFLFERVEGISRATIIDLDAHQGNGHERDFMDDKRVYIMDVYNRHIYPGDRFAKQAIRRKVELEWGTEDDEYLDKVERNIKKSLQEHLPDVVVYNAGTDILEGDRLGGLSISPAGIVKRDELVFRMVRGRRVPILMVTSGGYQKRTARIIADSILNLFGLGLIGPESPSVSAQNSDTPLLPPAVP

SEQ ID NO: 38564 - protein, 118 aa, Homo sapiens
  Payload ID: 7715
  Gene Symbol: HDAC11
  Gene Name: histone deacetylase 11
  ENSP ID: ENSP00000384019
MGLEKLHPFDAGKWGKVINFLKEEKLLSDSMLVEAREASEEDLLVVHTRRYLNELKRPSGGRWSWSGAQRMMSTWIRWRGTSRNPSRSTCPTWWYTMQAPTSSRGTALGGCPSAQRAS

SEQ ID NO: 38565 - protein, 268 aa, Homo sapiens
  Payload ID: 7715
  Gene Symbol: HDAC11
  Gene Name: histone deacetylase 11
  ENSP ID: ENSP00000384123
MLHTTQLYQHVPETRWPIVYSPRYNITFMGLEKLHPFDAGKWGKVINFLKEEKLLSDSMLVEAREASEEDLLVVHTRRYLNELKFLFERVEGISRATIIDLDAHQGNGHERDFMDDKRVYIMDVYNRHIYPGDRFAKQAIRRKVELEWGTEDDEYLDKVERNIKKSLQEHLPDVVVYNAGTDILEGDRLGGLSISPAGIVKRDELVFRMVRGRRVPILMVTSGGYQKRTARIIADSILNLFGLGLIGPESPSVSAQNSDTPLLPPAVP

SEQ ID NO: 38566 - protein, 181 aa, Homo sapiens
  Payload ID: 7715
  Gene Symbol: HDAC11
  Gene Name: histone deacetylase 11
  ENSP ID: ENSP00000384706
MLHTTQLYQHVPETRWPIVYSPRYNITFMGLEKLHPFDAGKWGKVINFLKEAIRRKVELEWGTEDDEYLDKVERNIKKSLQEHLPDVVVYNAGTDILEGDRLGGLSISPAGIVKRDELVFRMVRGRRVPILMVTSGGYQKRTARIIADSILNLFGLGLIGPESPSVSAQNSDTPLLPPAVP

SEQ ID NO: 38567 - protein, 204 aa, Homo sapiens
  Payload ID: 7715
  Gene Symbol: HDAC11
  Gene Name: histone deacetylase 11
  ENSP ID: ENSP00000385252
MGLEKLHPFDAGKWGKVINFLKEEKLLSDSMLVEAREASEEDLLVVHTRRYLNELKWSFAVATITEIPPVIFLPNFLVQRKVLRPLRTQTGGTIMAGKLAVERGWAINVGGGFHHCSSDRGGGFCAYADITLAIKFLFERVEGISRATIIDLDAHQGNGHERDFMDDKRVYIMDVYNRHIYPGDRFAKQAIRRKVELEWGTEDD

SEQ ID NO: 38568 - protein, 247 aa, Homo sapiens
  Payload ID: 7715
  Gene Symbol: HDAC11
  Gene Name: histone deacetylase 11
  ENSP ID: ENSP00000385475
MLHTTQLYQHVPETRWPIVYSPRYNITFMGLEKLHPFDAGKWGKVINFLKEEKLLSDSMLVEAREASEEDLLVVHTRRYLNELKGNGHERDFMDDKRVYIMDVYNRHIYPGDRFAKQAIRRKVELEWGTEDDEYLDKVERNIKKSLQEHLPDVVVYNAGTDILEGDRLGGLSISPAGIVKRDELVFRMVRGRRVPILMVTSGGYQKRTARIIADSILNLFGLGLIGPESPSVSAQNSDTPLLPPAVP

SEQ ID NO: 38569 - protein, 146 aa, Homo sapiens
  Payload ID: 7715
  Gene Symbol: HDAC11
  Gene Name: histone deacetylase 11
  ENSP ID: ENSP00000385528
MLHTTQLYQHVPETRWPIVYSPRYNITFMGLEKLHPFDAGKWGKVINFLKEEKLLSDSMLVEAREASEEDLLVVHTRRYLNELKRPSGGRWSWSGAQRMMSTWIRWRGTSRNPSRSTCPTWWYTMQAPTSSRGTALGGCPSAQRAS

SEQ ID NO: 38570 - protein, 319 aa, Homo sapiens
  Payload ID: 7715
  Gene Symbol: HDAC11
  Gene Name: histone deacetylase 11
  ENSP ID: ENSP00000395188
MGLEKLHPFDAGKWGKVINFLKEEKLLSDSMLVEAREASEEDLLVVHTRRYLNELKWSFAVATITEIPPVIFLPNFLVQRKVLRPLRTQTGGTIMAGKLAVERGWAINVGGGFHHCSSDRGGGFCAYADITLAIKFLFERVEGISRATIIDLDAHQGNGHERDFMDDKRVYIMDVYNRHIYPGDRFAKQAIRRKVELEWGTEDDEYLDKVERNIKKSLQEHLPDVVVYNAGTDILEGDRLGGLSISPAGIVKRDELVFRMVRGRRVPILMVTSGGYQKRTARIIADSILNLFGLGLIGPESPSVSAQNSDTPLLPPAVP

SEQ ID NO: 38571 - protein, 166 aa, Homo sapiens
  Payload ID: 7715
  Gene Symbol: HDAC11
  Gene Name: histone deacetylase 11
  ENSP ID: ENSP00000396122
MGLEKLHPFDAGKWGKVINFLKEEKLLSDSMLVEAREASEEDLLVVHTRRYLNELKWSFAVATITEIPPVIFLPNFLVQRKVLRPLRTQTGGTIMAGKLAVERGWAINVGGGFHHCSSDRGGGFCAYADITLAIKFLFERVEGISRATIIDLDAHQGNGHERDFMD

SEQ ID NO: 38572 - protein, 168 aa, Homo sapiens
  Payload ID: 7715
  Gene Symbol: HDAC11
  Gene Name: histone deacetylase 11
  ENSP ID: ENSP00000398651
MGRVSSAAGSGDPRPPPWLRLHTTQLYQHVPETRWPIVYSPRYNITFMGLEKLHPFDAGKWGKVINFLKEEKLLSDSMLVEAREASEEDLLVVHTRRYLNELKGVASTTAPATVAGASVPMRTSRSPSSFCLSVWRASPGLPSLILMPIRAMGMSETSWTTSVCTSWM

SEQ ID NO: 38573 - protein, 53 aa, Homo sapiens
  Payload ID: 7715
  Gene Symbol: HDAC11
  Gene Name: histone deacetylase 11
  ENSP ID: ENSP00000399792
MLHTTQLYQHVPETRWPIVYSPRYNITFMGLEKLHPFDAGKWGKVINFLKVSV

SEQ ID NO: 38574 - protein, 236 aa, Homo sapiens
  Payload ID: 7715
  Gene Symbol: HDAC11
  Gene Name: histone deacetylase 11
  ENSP ID: ENSP00000401487
MGLEKLHPFDAGKWGKVINFLKEEKLLSDSMLVEAREASEEDLLVVHTRRYLNELKWSFAVATITEIPPVIFLPNFLVQRKVLRPLRTQTGGTIMGVASTTAPATVAGASVPMRTSRSPSSFCLSVWRASPGLPSLILMPIRAMGMSETSWTTSVCTSWMSTTATSTQGTALPSRPSGGRWSWSGAQRMMSTWIRWRGTSRNPSRSTCPTWWYTMQAPTSSRGTALGGCPSAQRAS

SEQ ID NO: 38575 - protein, 91 aa, Homo sapiens
  Payload ID: 7715
  Gene Symbol: HDAC11
  Gene Name: histone deacetylase 11
  ENSP ID: ENSP00000402298
MGLEKLHPFDAGKWGKVINFLKEEKLLSDSMLVEAREASEEDLLVVHTRRYLNELKWSFAVATITEIPPVIFLPNFLVQRKVLRPLRTQTG

SEQ ID NO: 38576 - protein, 107 aa, Homo sapiens
  Payload ID: 7715
  Gene Symbol: HDAC11
  Gene Name: histone deacetylase 11
  ENSP ID: ENSP00000411792
MGRVSSAAGSGDPRPPPWLRLHTTQLYQHVPETRWPIVYSPRYNITFMGLEKLHPFDAGKWGKVINFLKEEKLLSDSMLVEAREASEEDLLVVHTRRYLNELKWSFA

SEQ ID NO: 38577 - protein, 236 aa, Homo sapiens; identical to SEQ ID NO: 38574
  Payload ID: 7715
  Gene Symbol: HDAC11
  Gene Name: histone deacetylase 11
  ENSP ID: ENSP00000412514

SEQ ID NO: 38578 - protein, 296 aa, Homo sapiens
  Payload ID: 7715
  Gene Symbol: HDAC11
  Gene Name: histone deacetylase 11
  Uniprot ID: Q96DB2
  ENSP ID: ENSP00000429794
MGLEKLHPFDAGKWGKVINFLKEEKLLSDSMLVEAREASEEDLLVVHTRRYLNELKRKVLRPLRTQTGGTIMAGKLAVERGWAINVGGGFHHCSSDRGGGFCAYADITLAIKFLFERVEGISRATIIDLDAHQGNGHERDFMDDKRVYIMDVYNRHIYPGDRFAKQAIRRKVELEWGTEDDEYLDKVERNIKKSLQEHLPDVVVYNAGTDILEGDRLGGLSISPAGIVKRDELVFRMVRGRRVPILMVTSGGYQKRTARIIADSILNLFGLGLIGPESPSVSAQNSDTPLLPPAVP

SEQ ID NO: 38579 - protein, 458 aa, Homo sapiens
  Payload ID: 7716
  Gene Symbol: HDAC2
  Gene Name: histone deacetylase 2
  Uniprot ID: Q92769
  ENSP ID: ENSP00000357621
MKPHRIRMTHNLLLNYGLYRKMEIYRPHKATAEEMTKYHSDEYIKFLRSIRPDNMSEYSKQMQRFNVGEDCPVFDGLFEFCQLSTGGSVAGAVKLNRQQTDMAVNWAGGLHHAKKSEASGFCYVNDIVLAILELLKYHQRVLYIDIDIHHGDGVEEAFYTTDRVMTVSFHKYGEYFPGTGDLRDIGAGKGKYYAVNFPMRDGIDDESYGQIFKPIISKVMEMYQPSAVVLQCGADSLSGDRLGCFNLTVKGHAKCVEVVKTFNLPLLMLGGGGYTIRNVARCWTYETAVALDCEIPNELPYNDYFEYFGPDFKLHISPSNMTNQNTPEYMEKIKQRLFENLRMLPHAPGVQMQAIPEDAVHEDSGDEDGEDPDKRISIRASDKRIACDEEFSDSEDEGEGGRRNVADHKKGAKKARIEEDKKETEDKKTDVKEEDKSKDNSGEKTDTKGTKSEQLSNP

SEQ ID NO: 38580 - protein, 161 aa, Homo sapiens
  Payload ID: 7716
  Gene Symbol: HDAC2
  Gene Name: histone deacetylase 2
  ENSP ID: ENSP00000417026
KVCYYYDGDIGNYYYGQGHPMKPHRIRMTHNLLLNYGLYRKMEIYRPHKATAEEMTKYHSDEYIKFLRSIRPDNMSEYSKQMQRFNVGEDCPVFDGLFEFCQLSTGGSVAGAVKLNRQQTDMAVNWAGGLHHAKKSEASGFCYVNDIVLAILELLKYVNLY

SEQ ID NO: 38581 - protein, 103 aa, Homo sapiens
  Payload ID: 7716
  Gene Symbol: HDAC2
  Gene Name: histone deacetylase 2
  ENSP ID: ENSP00000427861
MKPHRIRMTHNLLLNYGLYRKMEIYRPHKATAEEMTKYHSDEYIKFLRSIRPDNMSEYSKQMQRFNVGEDCPVFDGLFEFCQLSTGGSVAGAVKLNRQQTDMA

SEQ ID NO: 38582 - protein, 109 aa, Homo sapiens
  Payload ID: 7716
  Gene Symbol: HDAC2
  Gene Name: histone deacetylase 2
  ENSP ID: ENSP00000428024
MAYSQGGGKKKVCYYYDVCVFSILGDIGNYYYGQGHPMKPHRIRMTHNLLLNYGLYRKMEIYRPHKATAEEMTKYHSDEYIKFLRSIRPDNMSEYSKQMQRFNVGEDCP

SEQ ID NO: 38583 - protein, 86 aa, Homo sapiens
  Payload ID: 7716
  Gene Symbol: HDAC2
  Gene Name: histone deacetylase 2
  ENSP ID: ENSP00000428599
MKPHRIRMTHNLLLNYGLYRKMEIYRPHKATAEEMTKYHSDEYIKFLRSIRPDNMSEYSKQMQRFNVGEDCPVFDGLFEFCQLSTG

SEQ ID NO: 38584 - protein, 71 aa, Homo sapiens
  Payload ID: 7716
  Gene Symbol: HDAC2
  Gene Name: histone deacetylase 2
  ENSP ID: ENSP00000428653
MKPHRIRMTHNLLLNYGLYRKMEIYRPHKATAEEMTKYHSDEYIKFLRSIRPDNMSEYSKQMQRFNVGEDC

SEQ ID NO: 38585 - protein, 60 aa, Homo sapiens
  Payload ID: 7716
  Gene Symbol: HDAC2
  Gene Name: histone deacetylase 2
  ENSP ID: ENSP00000428861
MKPHRIRMTHNLLLNYGLYRKMEIYRPHKATAEEMTKYHSDEYIKFLRSIRPDNMSEYSK

SEQ ID NO: 38586 - protein, 52 aa, Homo sapiens
  Payload ID: 7716
  Gene Symbol: HDAC2
  Gene Name: histone deacetylase 2
  ENSP ID: ENSP00000428989
MKPHRIRMTHNLLLNYGLYRKMEIYRPHKATAEEMTKYHSDEYIKFLRSIRP

SEQ ID NO: 38587 - protein, 65 aa, Homo sapiens
  Payload ID: 7716
  Gene Symbol: HDAC2
  Gene Name: histone deacetylase 2
  ENSP ID: ENSP00000429236
MKPHRIRMTHNLLLNYGLYRKMEIYRPHKATAEEMTKYHSDEYIKFLRSIRPDNMSEYSKQMQRF

SEQ ID NO: 38588 - protein, 100 aa, Homo sapiens
  Payload ID: 7716
  Gene Symbol: HDAC2
  Gene Name: histone deacetylase 2
  ENSP ID: ENSP00000429901
MKPHRIRMTHNLLLNYGLYRKMEIYRPHKATAEEMTKYHSDEYIKFLRSIRPDNMSEYSKQMQRFNVGEDCPVFDGLFEFCQLSTGGSVAGAVKLNRQQT

SEQ ID NO: 38589 - protein, 458 aa, Homo sapiens; identical to SEQ ID NO: 38579
  Payload ID: 7716
  Gene Symbol: HDAC2
  Gene Name: histone deacetylase 2
  Uniprot ID: Q92769
  ENSP ID: ENSP00000430008

SEQ ID NO: 38590 - protein, 488 aa, Homo sapiens
  Payload ID: 7716
  Gene Symbol: HDAC2
  Gene Name: histone deacetylase 2
  Uniprot ID: Q92769
  ENSP ID: ENSP00000430432
MAYSQGGGKKKVCYYYDGDIGNYYYGQGHPMKPHRIRMTHNLLLNYGLYRKMEIYRPHKATAEEMTKYHSDEYIKFLRSIRPDNMSEYSKQMQRFNVGEDCPVFDGLFEFCQLSTGGSVAGAVKLNRQQTDMAVNWAGGLHHAKKSEASGFCYVNDIVLAILELLKYHQRVLYIDIDIHHGDGVEEAFYTTDRVMTVSFHKYGEYFPGTGDLRDIGAGKGKYYAVNFPMRDGIDDESYGQIFKPIISKVMEMYQPSAVVLQCGADSLSGDRLGCFNLTVKGHAKCVEVVKTFNLPLLMLGGGGYTIRNVARCWTYETAVALDCEIPNELPYNDYFEYFGPDFKLHISPSNMTNQNTPEYMEKIKQRLFENLRMLPHAPGVQMQAIPEDAVHEDSGDEDGEDPDKRISIRASDKRIACDEEFSDSEDEGEGGRRNVADHKKGAKKARIEEDKKETEDKKTDVKEEDKSKDNSGEKTDTKGTKSEQLSNP

SEQ ID NO: 38591 - protein, 428 aa, Homo sapiens
  Payload ID: 7717
  Gene Symbol: HDAC3
  Gene Name: histone deacetylase 3
  Uniprot ID: O15379
  ENSP ID: ENSP00000302967
MAKTVAYFYDPDVGNFHYGAGHPMKPHRLALTHSLVLHYGLYKKMIVFKPYQASQHDMCRFHSEDYIDFLQRVSPTNMQGFTKSLNAFNVGDDCPVFPGLFEFCSRYTGASLQGATQLNNKICDIAINWAGGLHHAKKFEASGFCYVNDIVIGILELLKYHPRVLYIDIDIHHGDGVQEAFYLTDRVMTVSFHKYGNYFFPGTGDMYEVGAESGRYYCLNVPLRDGIDDQSYKHLFQPVINQVVDFYQPTCIVLQCGADSLGCDRLGCFNLSIRGHGECVEYVKSFNIPLLVLGGGGYTVRNVARCWTYETSLLVEEAISEELPYSEYFEYFAPDFTLHPDVSTRIENQNSRQYLDQIRQTIFENLKMLNHAPSVQIHDVPADLLTYDRTDEADAEERGPEENYSRPEAPNEFYDGDHDNDKESDVEI

SEQ ID NO: 38592 - protein, 218 aa, Homo sapiens
  Payload ID: 7717
  Gene Symbol: HDAC3
  Gene Name: histone deacetylase 3
  ENSP ID: ENSP00000429099
MAKTVAYFYDPDVGNFHYGAGHPMKPHRLALTHSLVLHYGLYKKMIICDIAINWAGGLHHAKKFEASGFCYVNDIVIGILELLKYHPRVLYIDIDIHHGDGVQEAFYLTDRVMTVSFHKYGNYFFPGTGDMYEVGAESGRYYCLNVPLRDGIDDQSYKHLFQPVINQVVDFYQPTCIVLQCGADSLGCDRLGCFNLSIRGHGECVEYVKSFNIPLLVL

SEQ ID NO: 38593 - protein, 53 aa, Homo sapiens
  Payload ID: 7717
  Gene Symbol: HDAC3
  Gene Name: histone deacetylase 3
  ENSP ID: ENSP00000430782
MAKTVAYFYDPDVGNFHYGAGHPMKPHRLALTHSLVLHYGLYKKMIPSVSRAL

SEQ ID NO: 38594 - protein, 1084 aa, Homo sapiens
  Payload ID: 7718
  Gene Symbol: HDAC4
  Gene Name: histone deacetylase 4
  Uniprot ID: P56524
  ENSP ID: ENSP00000264606
MSSQSHPDGLSGRDQPVELLNPARVNHMPSTVDVATALPLQVAPSAVPMDLRLDHQFSLPVAEPALREQQLQQELLALKQKQQIQRQILIAEFQRQHEQLSRQHEAQLHEHIKQQQEMLAMKHQQELLEHQRKLERHRQEQELEKQHREQKLQQLKNKEKGKESAVASTEVKMKLQEFVLNKKKALAHRNLNHCISSDPRYWYGKTQHSSLDQSSPPQSGVSTSYNHPVLGMYDAKDDFPLRKTASEPNLKLRSRLKQKVAERRSSPLLRRKDGPVVTALKKRPLDVTDSACSSAPGSGPSSPNNSSGSVSAENGIAPAVPSIPAETSLAHRLVAREGSAAPLPLYTSPSLPNITLGLPATGPSAGTAGQQDAERLTLPALQQRLSLFPGTHLTPYLSTSPLERDGGAAHSPLLQHMVLLEQPPAQAPLVTGLGALPLHAQSLVGADRVSPSIHKLRQHRPLGRTQSAPLPQNAQALQHLVIQQQHQQFLEKHKQQFQQQQLQMNKIIPKPSEPARQPESHPEETEEELREHQALLDEPYLDRLPGQKEAHAQAGVQVKQEPIESDEEEAEPPREVEPGQRQPSEQELLFRQQALLLEQQRIHQLRNYQASMEAAGIPVSFGGHRPLSRAQSSPASATFPVSVQEPPTKPRFTTGLVYDTLMLKHQCTCGSSSSHPEHAGRIQSIWSRLQETGLRGKCECIRGRKATLEELQTVHSEAHTLLYGTNPLNRQKLDSKKLLGSLASVFVRLPCGGVGVDSDTIWNEVHSAGAARLAVGCVVELVFKVATGELKNGFAVVRPPGHHAEESTPMGFCYFNSVAVAAKLLQQRLSVSKILIVDWDVHHGNGTQQAFYSDPSVLYMSLHRYDDGNFFPGSGAPDEVGTGPGVGFNVNMAFTGGLDPPMGDAEYLAAFRTVVMPIASEFAPDVVLVSSGFDAVEGHPTPLGGYNLSARCFGYLTKQLMGLAGGRIVLALEGGHDLTAICDASEACVSALLGNELDPLPEKVLQQRPNANAVRSMEKVMEIHSKYWRCLQRTTSTAGRSLIEAQTCENEEAETVTAMASLSVGVKPAEKRPDEEPMEEEPPL

SEQ ID NO: 38595 - protein, 148 aa, Homo sapiens
  Payload ID: 7718
  Gene Symbol: HDAC4
  Gene Name: histone deacetylase 4
  ENSP ID: ENSP00000391226
  MOD_RES (1)..(1): Any amino acid
XWLYLFPHPPHPPHCGSGLYLQSHHLQQAWIPHSACSSAPGSGPSSPNNSSGSVSAENGIAPAVPSIPAETSLAHRLVAREGSAAPLPLYTSPSLPNITLGLPATGPSAGTAGQQDAERLTLPALQQRLSLFPGTHLTPYLSTSPLER

SEQ ID NO: 38596 - protein, 123 aa, Homo sapiens
  Payload ID: 7718
  Gene Symbol: HDAC4
  Gene Name: histone deacetylase 4
  ENSP ID: ENSP00000392912
MPSTVDVATALPLQVAPSAVPMDLRLDHQFSLPVAEPALREQQLQQELLALKQKQQIQRQILIAEFQRQHEQLSRQHEAQLHEHIKQQQEMLAMKHQQELLEHQRKLERHRQEQELEKQHREQ

SEQ ID NO: 38597 - protein, 162 aa, Homo sapiens
  Payload ID: 7718
  Gene Symbol: HDAC4
  Gene Name: histone deacetylase 4
  ENSP ID: ENSP00000405226
MDVATALPLQVAPSAVPMDLRLDHQFSLPVAEPALREQQLQQELLALKQKQQIQRQILIAEFQRQHEQLSRQHEAQLHEHIKQQQEMLAMKHQQELLEHQRKLERHRQEQELEKQHREQKLQQLKNKEKGKESAVASTEVKMKLQEFVLNKKKALAHRNLNH

SEQ ID NO: 38598 - protein, 175 aa, Homo sapiens
  Payload ID: 7718
  Gene Symbol: HDAC4
  Gene Name: histone deacetylase 4
  ENSP ID: ENSP00000410551
  MOD_RES (1)..(1): Any amino acid
XAWPCVSTPQPPVFLRCHETRFWAVLAAVLPRSHCSLPFPVAGFGYLTKQLMGLAGGRIVLALEGGHDLTAICDASEACVSALLGNELDPLPEKVLQQRPNANAVRSMEKVMEIHSKYWRCLQRTTSTAGRSLIEAQTCENEEAETVTAMASLSVGVKPAEKRPDEEPMEEEPPL

SEQ ID NO: 38599 - protein, 29 aa, Homo sapiens
  Payload ID: 7718
  Gene Symbol: HDAC4
  Gene Name: histone deacetylase 4
  ENSP ID: ENSP00000438111
MSSQSHPDGLSGRDQPVELLNPARVNHMP

SEQ ID NO: 38600 - protein, 972 aa, Homo sapiens
  Payload ID: 7718
  Gene Symbol: HDAC4
  Gene Name: histone deacetylase 4
  Uniprot ID: P56524
  ENSP ID: ENSP00000440481
MLAMKHQQELLEHQRKLERHRQEQELEKQHREQKLQQLKNKEKGKESAVASTEVKMKLQEFVLNKKKALAHRNLNHCISSDPRYWYGKTQHSSLDQSSPPQSGVSTSYNHPVLGMYDAKDDFPLRKTASEPNLKLRSRLKQKVAERRSSPLLRRKDGPVVTALKKRPLDVTDSACSSAPGSGPSSPNNSSGSVSAENGIAPAVPSIPAETSLAHRLVAREGSAAPLPLYTSPSLPNITLGLPATGPSAGTAGQQDAERLTLPALQQRLSLFPGTHLTPYLSTSPLERDGGAAHSPLLQHMVLLEQPPAQAPLVTDWYLSGLGALPLHAQSLVGADRVSPSIHKLRQHRPLGRTQSAPLPQNAQALQHLVIQQQHQQFLEKHKQQFQQQQLQMNKIIPKPSEPARQPESHPEETEEELREHQALLDEPYLDRLPGQKEAHAQAGVQVKQEPIESDEEEAEPPREVEPGQRQPSEQELLFRQQALLLEQQRIHQLRNYQASMEAAGIPVSFGGHRPLSRAQSSPASATFPVSVQEPPTKPRFTTGLVYDTLMLKHQCTCGSSSSHPEHAGRIQSIWSRLQETGLRGKCECIRGRKATLEELQTVHSEAHTLLYGTNPLNRQKLDSKKLLGSLASVFVRLPCGGVGVDSDTIWNEVHSAGAARLAVGCVVELVFKVATGELKNGFAVVRPPGHHAEESTPMGFCYFNSVAVAAKLLQQRLSVSKILIVDWDVHHGNGTQQAFYSDPSVLYMSLHRYDDGNFFPGSGAPDEVGTGPGVGFNVNMAFTGGLDPPMGDAEYLAAFRTVVMPIASEFAPDVVLVSSGFDAVEGHPTPLGGYNLSARCFGYLTKQLMGLAGGRIVLALEGGHDLTAICDASEACVSALLGNELDPLPEKVLQQRPNANAVRSMEKVMEIHSKYWRCLQRTTSTAGRSLIEAQTCENEEAETVTAMASLSVGVKPAEKRPDEEPMEEEPPL

SEQ ID NO: 38601 - protein, 1123 aa, Homo sapiens
  Payload ID: 7719
  Gene Symbol: HDAC5
  Gene Name: histone deacetylase 5
  Uniprot ID: Q9UQL6
  ENSP ID: ENSP00000225983
MNSPNESADGMSGREPSLEILPRTSLHSIPVTVEVKPVLPRAMPSSMGGGGGGSPSPVELRGALVGSVDPTLREQQLQQELLALKQQQQLQKQLLFAEFQKQHDHLTRQHEVQLQKHLKQQQEMLAAKQQQEMLAAKRQQELEQQRQREQQRQEELEKQRLEQQLLILRNKEKSKESAIASTEVKLRLQEFLLSKSKEPTPGGLNHSLPQHPKCWGAHHASLDQSSPPQSGPPGTPPSYKLPLPGPYDSRDDFPLRKTASEPNLKVRSRLKQKVAERRSSPLLRRKDGTVISTFKKRAVEITGAGPGASSVCNSAPGSGPSSPNSSHSTIAENGFTGSVPNIPTEMLPQHRALPLDSSPNQFSLYTSPSLPNISLGLQATVTVTNSHLTASPKLSTQQEAERQALQSLRQGGTLTGKFMSTSSIPGCLLGVALEGDGSPHGHASLLQHVLLLEQARQQSTLIAVPLHGQSPLVTGERVATSMRTVGKLPRHRPLSRTQSSPLPQSPQALQQLVMQQQHQQFLEKQKQQQLQLGKILTKTGELPRQPTTHPEETEEELTEQQEVLLGEGALTMPREGSTESESTQEDLEEEDEEDDGEEEEDCIQVKDEEGESGAEEGPDLEEPGAGYKKLFSDAQPLQPLQVYQAPLSLATVPHQALGRTQSSPAAPGGMKSPPDQPVKHLFTTGVVYDTFMLKHQCMCGNTHVHPEHAGRIQSIWSRLQETGLLSKCERIRGRKATLDEIQTVHSEYHTLLYGTSPLNRQKLDSKKLLGPISQKMYAVLPCGGIGVDSDTVWNEMHSSSAVRMAVGCLLELAFKVAAGELKNGFAIIRPPGHHAEESTAMGFCFFNSVAITAKLLQQKLNVGKVLIVDWDIHHGNGTQQAFYNDPSVLYISLHRYDNGNFFPGSGAPEEVGGGPGVGYNVNVAWTGGVDPPIGDVEYLTAFRTVVMPIAHEFSPDVVLVSAGFDAVEGHLSPLGGYSVTARCFGHLTRQLMTLAGGRVVLALEGGHDLTAICDASEACVSALLSVELQPLDEAVLQQKPNINAVATLEKVIEIQSKHWSCVQKFAAGLGRSLREAQAGETEEAETVSAMALLSVGAEQAQAAAAREHSPRPAEEPMEQEPAL

SEQ ID NO: 38602 - protein, 1037 aa, Homo sapiens
  Payload ID: 7719
  Gene Symbol: HDAC5
  Gene Name: histone deacetylase 5
  Uniprot ID: Q9UQL6
  ENSP ID: ENSP00000337290
MNSPNESDGMSGREPSLEILPRTSLHSIPVTVEVKPVLPRAMPSSMGGGGGGSPSPVELRGALVGSVDPTLREQQLQQELLALKQQQQLQKQLLFAEFQKQHDHLTRQHEVQLQKHLKQQQEMLAAKQQQEMLAAKRQQELEQQRQREQQRQEELEKQRLEQQLLILRNKEKSKESAIASTEVKLRLQEFLLSKSKEPTPGGLNHSLPQHPKCWGAHHASLDQSSPPQSGPPGTPPSYKLPLPGPYDSRDDFPLRKTASEPNLKVRSRLKQKVAERRSSPLLRRKDGTVISTFKKRAVEITGAGPGASSVCNSAPGSGPSSPNSSHSTIAENGFTGSVPNIPTEMLPQHRALPLDSSPNQFSLYTSPSLPNISLGLQATVTVTNSHLTASPKLSTQQEAERQALQSLRQGGTLTGKFMSTSSIPGCLLGVALEGDGSPHGHASLLQHVLLLEQARQQSTLIAVPLHGQSPLVTGERVATSMRTVGKLPRHRPLSRTQSSPLPQSPQALQQLVMQQQHQQFLEKQKQQQLQLGKILTKTGELPRQPTTHPEETEEELTEQQEVLLGEGALTMPREGSTESESTQEDLEEEDEEDDGEEEEDCIQVKDEEGESGAEEGPDLEEPGAGYKKLFSDAQPLQPLQVYQAPLSLATVPHQALGRTQSSPAAPGGMKSPPDQPVKHLFTTGPISQKMYAVLPCGGIGVDSDTVWNEMHSSSAVRMAVGCLLELAFKVAAGELKNGFAIIRPPGHHAEESTAMGFCFFNSVAITAKLLQQKLNVGKVLIVDWDIHHGNGTQQAFYNDPSVLYISLHRYDNGNFFPGSGAPEEVGGGPGVGYNVNVAWTGGVDPPIGDVEYLTAFRTVVMPIAHEFSPDVVLVSAGFDAVEGHLSPLGGYSVTARCFGHLTRQLMTLAGGRVVLALEGGHDLTAICDASEACVSALLSVELQPLDEAVLQQKPNINAVATLEKVIEIQSKHWSCVQKFAAGLGRSLREAQAGETEEAETVSAMALLSVGAEQAQAAAAREHSPRPAEEPMEQEPAL

SEQ ID NO: 38603 - protein, 282 aa, Homo sapiens
  Payload ID: 7719
  Gene Symbol: HDAC5
  Gene Name: histone deacetylase 5
  ENSP ID: ENSP00000465227
  MOD_RES (1)..(1): Any amino acid
XVKLRLQEFLLSKSKEPTPGGLNHSLPQHPKCWGAHHASLDQSSPPQSGPPGTPPSYKLPLPGPYDSRDDFPLRKTASSVCNSAPGSGPSSPNSSHSTIAENGFTGSVPNIPTEMLPQHRALPLDSSPNQFSLYTSPSLPNISLGLQATVTVTNSHLTASPKLSTQQEAERQALQSLRQGGTLTGKFMSTSSIPGCLLGVALEGDGSPHGHASLLQHVLLLEQARQQSTLIAVPLHGQSPLVTGERVATSMRTVGKLPRHRPLSRTQSSPLPQSPQALQQLV

SEQ ID NO: 38604 - protein, 79 aa, Homo sapiens
  Payload ID: 7719
  Gene Symbol: HDAC5
  Gene Name: histone deacetylase 5
  ENSP ID: ENSP00000465229
MSGREPSLEILPRTSLHSIPVTVEVKPVLPRAMPSSMGGGGGGSPSPVELRGALVGSVDPTLREQQLQQELLALKQQQQ

SEQ ID NO: 38605 - protein, 40 aa, Homo sapiens
  Payload ID: 7719
  Gene Symbol: HDAC5
  Gene Name: histone deacetylase 5
  ENSP ID: ENSP00000465393
MSGREPSLEILPRTSLHSIPVTVEVKPVLPRAMPSSMGGG

SEQ ID NO: 38606 - protein, 1122 aa, Homo sapiens
  Payload ID: 7719
  Gene Symbol: HDAC5
  Gene Name: histone deacetylase 5
  Uniprot ID: Q9UQL6
  ENSP ID: ENSP00000468004
MNSPNESDGMSGREPSLEILPRTSLHSIPVTVEVKPVLPRAMPSSMGGGGGGSPSPVELRGALVGSVDPTLREQQLQQELLALKQQQQLQKQLLFAEFQKQHDHLTRQHEVQLQKHLKQQQEMLAAKQQQEMLAAKRQQELEQQRQREQQRQEELEKQRLEQQLLILRNKEKSKESAIASTEVKLRLQEFLLSKSKEPTPGGLNHSLPQHPKCWGAHHASLDQSSPPQSGPPGTPPSYKLPLPGPYDSRDDFPLRKTASEPNLKVRSRLKQKVAERRSSPLLRRKDGTVISTFKKRAVEITGAGPGASSVCNSAPGSGPSSPNSSHSTIAENGFTGSVPNIPTEMLPQHRALPLDSSPNQFSLYTSPSLPNISLGLQATVTVTNSHLTASPKLSTQQEAERQALQSLRQGGTLTGKFMSTSSIPGCLLGVALEGDGSPHGHASLLQHVLLLEQARQQSTLIAVPLHGQSPLVTGERVATSMRTVGKLPRHRPLSRTQSSPLPQSPQALQQLVMQQQHQQFLEKQKQQQLQLGKILTKTGELPRQPTTHPEETEEELTEQQEVLLGEGALTMPREGSTESESTQEDLEEEDEEDDGEEEEDCIQVKDEEGESGAEEGPDLEEPGAGYKKLFSDAQPLQPLQVYQAPLSLATVPHQALGRTQSSPAAPGGMKSPPDQPVKHLFTTGVVYDTFMLKHQCMCGNTHVHPEHAGRIQSIWSRLQETGLLSKCERIRGRKATLDEIQTVHSEYHTLLYGTSPLNRQKLDSKKLLGPISQKMYAVLPCGGIGVDSDTVWNEMHSSSAVRMAVGCLLELAFKVAAGELKNGFAIIRPPGHHAEESTAMGFCFFNSVAITAKLLQQKLNVGKVLIVDWDIHHGNGTQQAFYNDPSVLYISLHRYDNGNFFPGSGAPEEVGGGPGVGYNVNVAWTGGVDPPIGDVEYLTAFRTVVMPIAHEFSPDVVLVSAGFDAVEGHLSPLGGYSVTARCFGHLTRQLMTLAGGRVVLALEGGHDLTAICDASEACVSALLSVELQPLDEAVLQQKPNINAVATLEKVIEIQSKHWSCVQKFAAGLGRSLREAQAGETEEAETVSAMALLSVGAEQAQAAAAREHSPRPAEEPMEQEPAL

SEQ ID NO: 38607 - protein, 68 aa, Homo sapiens
  Payload ID: 7719
  Gene Symbol: HDAC5
  Gene Name: histone deacetylase 5
  ENSP ID: ENSP00000468485
MLLVPKAQGLVEMLQTIYETESCFSADGMSGREPSLEILPRTSLHSIPVTVEVKPVLPRAMPSSMGGG

SEQ ID NO: 38608 - protein, 1215 aa, Homo sapiens
  Payload ID: 7720
  Gene Symbol: HDAC6
  Gene Name: histone deacetylase 6
  Uniprot ID: Q9UBN7
  ENSP ID: ENSP00000334061
MTSTGQDSTTTRQRRSRQNPQSPPQDSSVTSKRNIKKGAVPRSIPNLAEVKKKGKMKKLGQAMEEDLIVGLQGMDLNLEAEALAGTGLVLDEQLNEFHCLWDDSFPEGPERLHAIKEQLIQEGLLDRCVSFQARFAEKEELMLVHSLEYIDLMETTQYMNEGELRVLADTYDSVYLHPNSYSCACLASGSVLRLVDAVLGAEIRNGMAIIRPPGHHAQHSLMDGYCMFNHVAVAARYAQQKHRIRRVLIVDWDVHHGQGTQFTFDQDPSVLYFSIHRYEQGRFWPHLKASNWSTTGFGQGQGYTINVPWNQVGMRDADYIAAFLHVLLPVALEFQPQLVLVAAGFDALQGDPKGEMAATPAGFAQLTHLLMGLAGGKLILSLEGGYNLRALAEGVSASLHTLLGDPCPMLESPGAPCRSAQASVSCALEALEPFWEVLVRSTETVERDNMEEDNVEESEEEGPWEPPVLPILTWPVLQSRTGLVYDQNMMNHCNLWDSHHPEVPQRILRIMCRLEELGLAGRCLTLTPRPATEAELLTCHSAEYVGHLRATEKMKTRELHRESSNFDSIYICPSTFACAQLATGAACRLVEAVLSGEVLNGAAVVRPPGHHAEQDAACGFCFFNSVAVAARHAQTISGHALRILIVDWDVHHGNGTQHMFEDDPSVLYVSLHRYDHGTFFPMGDEGASSQIGRAAGTGFTVNVAWNGPRMGDADYLAAWHRLVLPIAYEFNPELVLVSAGFDAARGDPLGGCQVSPEGYAHLTHLLMGLASGRIILILEGGYNLTSISESMAACTRSLLGDPPPLLTLPRPPLSGALASITETIQVHRRYWRSLRVMKVEDREGPSSSKLVTKKAPQPAKPRLAERMTTREKKVLEAGMGKVTSASFGEESTPGQTNSETAVVALTQDQPSEAATGGATLAQTISEAAIGGAMLGQTTSEEAVGGATPDQTTSEETVGGAILDQTTSEDAVGGATLGQTTSEEAVGGATLAQTTSEAAMEGATLDQTTSEEAPGGTELIQTPLASSTDHQTPPTSPVQGTTPQISPSTLIGSLRTLELGSESQGASESQAPGEENLLGEAAGGQDMADSMLMQGSRGLTDQAIFYAVTPLPWCPHLVAVCPIPAAGLDVTQPCGDCGTIQENWVCLSCYQVYCGRYINGHMLQHHGNSGHPLVLSYIDLSAWCYYCQAYVHHQALLDVKNIAHQNKFGEDMPHPH

SEQ ID NO: 38609 - protein, 210 aa, Homo sapiens
  Payload ID: 7720
  Gene Symbol: HDAC6
  Gene Name: histone deacetylase 6
  ENSP ID: ENSP00000365795
MTSTGQDSTTTRQRRSRQNPQSPPQDSSVTSKRNIKKGAVPRSIPNLAEVKKKGKMKKLGQAMEEDLIVGLQGMDLNLEAEALAGTGLVLDEQLNEFHCLWDDSFPEGPERLHAIKEQLIQEGLLDRCVSFQARFAEKEELMLVHSLEYIDLMETTQYMNEGELRVLADTYDSVYLHPNSYSCACLASGSVLRLVDAVLGAEIRNGMAII

SEQ ID NO: 38610 - protein, 1215 aa, Homo sapiens; identical to SEQ ID NO: 38608
  Payload ID: 7720
  Gene Symbol: HDAC6
  Gene Name: histone deacetylase 6
  Uniprot ID: Q9UBN7
  ENSP ID: ENSP00000365804

SEQ ID NO: 38611 - protein, 210 aa, Homo sapiens; identical to SEQ ID NO: 38609
  Payload ID: 7720
  Gene Symbol: HDAC6
  Gene Name: histone deacetylase 6
  ENSP ID: ENSP00000365831

SEQ ID NO: 38612 - protein, 142 aa, Homo sapiens
  Payload ID: 7720
  Gene Symbol: HDAC6
  Gene Name: histone deacetylase 6
  ENSP ID: ENSP00000392815
MTSTGQDSTTTRQRRSRQNPQSPPQDSSVTSKRNIKKGAVPRSIPNLAEVKKKGKMKKLGQAMEEDLIVGLQGMDLNLEAEALAGTGLVLDEQLNEFHCLWDDSFPEGPERLHAIKEQLIQEGLLDRCVSFQARFAEKEELM

SEQ ID NO: 38613 - protein, 161 aa, Homo sapiens
  Payload ID: 7720
  Gene Symbol: HDAC6
  Gene Name: histone deacetylase 6
  ENSP ID: ENSP00000393916
MTSTGQDSTTTRQRRSRQNPQSPPQDSSVTSKRNIKKGAVPRSIPNLAEVKKKGKMKKLGQAMEEDLIVGLQGMDLNLEAEALAGTGLVLDEQLNEFHCLWDDSFPEGPERLHAIKEQLIQEGLLDRCVSFQARFAEKEELMLVHSLEYIDLMETTQYMNE

SEQ ID NO: 38614 - protein, 171 aa, Homo sapiens
  Payload ID: 7720
  Gene Symbol: HDAC6
  Gene Name: histone deacetylase 6
  ENSP ID: ENSP00000394377
MTSTGQDSTTTRQRRSRQNPQSPPQDSSVTSKRNIKKGAVPRSIPNLAEVKKKGKMKKLGQAMEEDLIVGLQGMDLNLEAEALAGTGLVLDEQLNEFHCLWDDSFPEGPERLHAIKEQLIQEGLLDRCVSFQARFAEKEELMLVHSLEYIDLMETTQYMNEGELRVLADTY

SEQ ID NO: 38615 - protein, 84 aa, Homo sapiens
  Payload ID: 7720
  Gene Symbol: HDAC6
  Gene Name: histone deacetylase 6
  ENSP ID: ENSP00000397697
  MOD_RES (1)..(1): Any amino acid
XTPQISPSTLIGSLRTLELGSESQGASESQAPGEENLLGEAAGGQDMADSMLMQGSRGLTDQALLDVKNIAHQNKFGEDMPHPH

SEQ ID NO: 38616 - protein, 269 aa, Homo sapiens
  Payload ID: 7720
  Gene Symbol: HDAC6
  Gene Name: histone deacetylase 6
  ENSP ID: ENSP00000402189
MTSTGQDSTTTRQRRSRQNPQSPPQDSSVTSKRNIKKGAVPRSIPNLAEVKKKGKMKKLGQAMEEDLIVGLQGMDLNLEAEALAGTGLVLDEQLNEFHCLWDDSFPEGPERLHAIKEQLIQEGLLDRCVSFQARFAEKEELMLVHSLEYIDLMETTQYMNEGELRVLADTYDSVYLHPNSYSCACLASGSVLRLVDAVLGAEIRNGMAIIRPPGHHAQHSLMDGYCMFNHVAVAARYAQQKHRIRRVLIVDWDVHHGQGTQFTFDQDPR

SEQ ID NO: 38617 - protein, 167 aa, Homo sapiens
  Payload ID: 7720
  Gene Symbol: HDAC6
  Gene Name: histone deacetylase 6
  ENSP ID: ENSP00000402751
MTSTGQDSTTTRQRRSRQNPQSPPQDSSVTSKRNIKKGAVPRSIPNLAEVKKKGKMKKLGQAMEEDLIVGLQGMDLNLEAEALAGTGLVLDEQLNEFHCLWDDSFPEGPERLHAIKEQLIQEGLLDRCVSFQARFAEKEELMLVHSLEYIDLMETTQYMNEGELRVL

SEQ ID NO: 38618 - protein, 51 aa, Homo sapiens
  Payload ID: 7720
  Gene Symbol: HDAC6
  Gene Name: histone deacetylase 6
  ENSP ID: ENSP00000403370
MTSTGQDSTTTRQRRSRQNPQSPPQDSSVTSKRNIKKGAVPRSIPNLAEVK

SEQ ID NO: 38619 - protein, 991 aa, Homo sapiens
  Payload ID: 7721
  Gene Symbol: HDAC7
  Gene Name: histone deacetylase 7
  Uniprot ID: Q8WUI4
  ENSP ID: ENSP00000080059
MHSPGADGTQVSPGAHYCSPTGAGCPRPCADTPGPQPQPMDLRVGQRPPVEPPPEPTLLALQRPQRLHHHLFLAGLQQQRSVEPMRLSMDTPMPELQVGPQEQELRQLLHKDKSKRSAVASSVVKQKLAEVILKKQQAALERTVHPNSPGIPYRTLEPLETEGATRSMLSSFLPPVPSLPSDPPEHFPLRKTVSEPNLKLRYKPKKSLERRKNPLLRKESAPPSLRRRPAETLGDSSPSSSSTPASGCSSPNDSEHGPNPILGSEALLGQRLRLQETSVAPFALPTVSLLPAITLGLPAPARADSDRRTHPTLGPRGPILGSPHTPLFLPHGLEPEAGGTLPSRLQPILLLDPSGSHAPLLTVPGLGPLPFHFAQSLMTTERLSGSGLHWPLSRTRSEPLPPSATAPPPPGPMQPRLEQLKTHVQVIKRSAKPSEKPRLRQIPSAEDLETDGGGPGQVVDDGLEHRELGHGQPEARGPAPLQQHPQVLLWEQQRLAGRLPRGSTGDTVLLPLAQGGHRPLSRAQSSPAAPASLSAPEPASQARVLSSSETPARTLPFTTGLIYDSVMLKHQCSCGDNSRHPEHAGRIQSIWSRLQERGLRSQCECLRGRKASLEELQSVHSERHVLLYGTNPLSRLKLDNGKLAGLLAQRMFVMLPCGGVGVDTDTIWNELHSSNAARWAAGSVTDLAFKVASRELKNGFAVVRPPGHHADHSTAMGFCFFNSVAIACRQLQQQSKASKILIVDWDVHHGNGTQQTFYQDPSVLYISLHRHDDGNFFPGSGAVDEVGAGSGEGFNVNVAWAGGLDPPMGDPEYLAAFRIVVMPIAREFSPDLVLVSAGFDAAEGHPAPLGGYHVSAKCFGYMTQQLMNLAGGAVVLALEGGHDLTAICDASEACVAALLGNRVDPLSEEGWKQKPNLNAIRSLEAVIRVHSKYWGCMQRLASCPDSWVPRVPGADKEEVEAVTALASLSVGILAEDRPSEQLVEEEEPMNL

SEQ ID NO: 38620 - protein, 954 aa, Homo sapiens
  Payload ID: 7721
  Gene Symbol: HDAC7
  Gene Name: histone deacetylase 7
  Uniprot ID: Q8WUI4
  ENSP ID: ENSP00000351326
MHSPGADGTQVSPGAHYCSPTGAGCPRPCADTPGPQPQPMDLRVGQRPPVEPPPEPTLLALQRPQRLHHHLFLAGLQQQRSVEPMRLSMDTPMPELQVGPQEQELRQLLHKDKSKRSAVASSVVKQKLAEVILKKQQAALERTVHPNSPGIPYRTLEPLETEGATRSMLSSFLPPVPSLPSDPPEHFPLRKTVSEPNLKLRYKPKKSLERRKNPLLRKESAPPSLRRRPAETLGDSSPSSSSTPASGCSSPNDSEHGPNPILGSEADSDRRTHPTLGPRGPILGSPHTPLFLPHGLEPEAGGTLPSRLQPILLLDPSGSHAPLLTVPGLGPLPFHFAQSLMTTERLSGSGLHWPLSRTRSEPLPPSATAPPPPGPMQPRLEQLKTHVQVIKRSAKPSEKPRLRQIPSAEDLETDGGGPGQVVDDGLEHRELGHGQPEARGPAPLQQHPQVLLWEQQRLAGRLPRGSTGDTVLLPLAQGGHRPLSRAQSSPAAPASLSAPEPASQARVLSSSETPARTLPFTTGLIYDSVMLKHQCSCGDNSRHPEHAGRIQSIWSRLQERGLRSQCECLRGRKASLEELQSVHSERHVLLYGTNPLSRLKLDNGKLAGLLAQRMFVMLPCGGVGVDTDTIWNELHSSNAARWAAGSVTDLAFKVASRELKNGFAVVRPPGHHADHSTAMGFCFFNSVAIACRQLQQQSKASKILIVDWDVHHGNGTQQTFYQDPSVLYISLHRHDDGNFFPGSGAVDEVGAGSGEGFNVNVAWAGGLDPPMGDPEYLAAFRIVVMPIAREFSPDLVLVSAGFDAAEGHPAPLGGYHVSAKCFGYMTQQLMNLAGGAVVLALEGGHDLTAICDASEACVAALLGNRVDPLSEEGWKQKPNLNAIRSLEAVIRVHSKYWGCMQRLASCPDSWVPRVPGADKEEVEAVTALASLSVGILAEDRPSEQLVEEEEPMNL

SEQ ID NO: 38621 - protein, 1014 aa, Homo sapiens
  Payload ID: 7721
  Gene Symbol: HDAC7
  Gene Name: histone deacetylase 7
  ENSP ID: ENSP00000369984
MSDLRKRELGALFTSRGTGGVEWDGTQVSPGAHYCSPTGAGCPRPCADTPGPQPQPMDLRVGQRPPVEPPPEPTLLALQRPQRLHHHLFLAGLQQQRSVEPMRLSMDTPMPELQVGPQEQELRQLLHKDKSKRSAVASSVVKQKLAEVILKKQQAALERTVHPNSPGIPYRTLEPLETEGATRSMLSSFLPPVPSLPSDPPEHFPLRKTVSEPNLKLRYKPKKSLERRKNPLLRKESAPPSLRRRPAETLGDSSPSSSSTPASGCSSPNDSEHGPNPILGSEALLGQRLRLQETSVAPFALPTVSLLPAITLGLPAPARADSDRRTHPTLGPRGPILGSPHTPLFLPHGLEPEAGGTLPSRLQPILLLDPSGSHAPLLTVPGLGPLPFHFAQSLMTTERLSGSGLHWPLSRTRSEPLPPSATAPPPPGPMQPRLEQLKTHVQVIKRSAKPSEKPRLRQIPSAEDLETDGGGPGQVVDDGLEHRELGHGQPEARGPAPLQQHPQVLLWEQQRLAGRLPRGSTGDTVLLPLAQGGHRPLSRAQSSPAAPASLSAPEPASQARVLSSSETPARTLPFTTGLIYDSVMLKHQCSCGDNSRHPEHAGRIQSIWSRLQERGLRSQCECLRGRKASLEELQSVHSERHVLLYGTNPLSRLKLDNGKLAGLLAQRMFVMLPCGGVGVDTDTIWNELHSSNAARWAAGSVTDLAFKVASRELKNGFAVVRPPGHHADHSTAMGFCFFNSVAIACRQLQQQSKASKILIVDWDVHHGNGTQQTFYQDPSVLYISLHRHDDGNFFPGSGAVDEVGAGSGEGFNVNVAWAGGLDPPMGDPEYLAAFRIVVMPIAREFSPDLVLVSAGFDAAEGHPAPLGGYHVSAKCFGYMTQQLMNLAGGAVVLALEGGHDLTAICDASEACVAALLGNRVDPLSEEGWKQKPNLNAIRSLEAVIRVHMGALTLSQIPGHGSSQQQAGGAFSWPGHPCRAAVVMVNTGAACSAWPPVQTPGCLECQGLTKKKWRQ

SEQ ID NO: 38622 - protein, 78 aa, Homo sapiens
  Payload ID: 7721
  Gene Symbol: HDAC7
  Gene Name: histone deacetylase 7
  ENSP ID: ENSP00000387792
MDLRVGQRPPVEPPPEPTLLALQRPQRLHHHLFLAGLQQQRSVEPMRLSMDTPMPELQVGPQEQELRQLLHKDKSKRS

SEQ ID NO: 38623 - protein, 153 aa, Homo sapiens
  Payload ID: 7721
  Gene Symbol: HDAC7
  Gene Name: histone deacetylase 7
  ENSP ID: ENSP00000388561
MDLRVGQRPPVEPPPEPTLLALQRPQRLHHHLFLAGLQQQRSVEPMRLSMDTPMPELQVGPQEQELRQLLHKDKSKRSAVASSVVKQKLAEVILKKQQAALERTVHPNSPGIPYRTLEPLETEGATRSMLSSFLPPVPSLPSDPPEHFPLRKT

SEQ ID NO: 38624 - protein, 153 aa, Homo sapiens; identical to SEQ ID NO: 38623
  Payload ID: 7721
  Gene Symbol: HDAC7
  Gene Name: histone deacetylase 7
  ENSP ID: ENSP00000389501

SEQ ID NO: 38625 - protein, 51 aa, Homo sapiens
  Payload ID: 7721
  Gene Symbol: HDAC7
  Gene Name: histone deacetylase 7
  ENSP ID: ENSP00000390415
MDLRVGQRPPVEPPPEPTLLALQRPQRLHHHLFLAGLQQQRSVEPMRLSMD

SEQ ID NO: 38626 - protein, 274 aa, Homo sapiens
  Payload ID: 7721
  Gene Symbol: HDAC7
  Gene Name: histone deacetylase 7
  ENSP ID: ENSP00000396159
MHSPGADGTQVSPGAHYCSPTGAGCPRPCADTPGPQPQPMDLRVGQRPPVEPPPEPTLLALQRPQRLHHHLFLAGLQQQRSVEPMRLSMDTPMPELQVGPQEQELRQLLHKDKSKRSAVASSVVKQKLAEVILKKQQAALERTVHPNSPGIPYSLPSDPPEHFPLRKTVSEPNLKLRYKPKKSLERRKNPLLRKESAPPSLRRRPAETLGDSSPSSSSTPASGCSSPNDSEHGPNPILGSEADSDRRTHPTLGPRGPILGSPHTPLFLPHGLEP

SEQ ID NO: 38627 - protein, 112 aa, Homo sapiens
  Payload ID: 7721
  Gene Symbol: HDAC7
  Gene Name: histone deacetylase 7
  ENSP ID: ENSP00000397236
MDLRVGQRPPVEPPPEPTLLALQRPQRLHHHLFLAGLQQQRSVEPMRLSMDTPMPELQVGPQEQELRQLLHKDKSKRSAVASSVVKQKLAEVILKKQQAALERTVHPNSPGI

SEQ ID NO: 38628 - protein, 133 aa, Homo sapiens
  Payload ID: 7721
  Gene Symbol: HDAC7
  Gene Name: histone deacetylase 7
  ENSP ID: ENSP00000400811
MHSPGAGCPRPCADTPGPQPQPMDLRVGQRPPVEPPPEPTLLALQRPQRLHHHLFLAGLQQQRSVEPMRLSMDTPMPELQVGPQEQELRQLLHKDKSKRSAVASSVVKQKLAEVILKKQQAALERTVHPNSPG

SEQ ID NO: 38629 - protein, 101 aa, Homo sapiens
  Payload ID: 7721
  Gene Symbol: HDAC7
  Gene Name: histone deacetylase 7
  ENSP ID: ENSP00000401872
MHSPGAALHGHADARVAGGTPGTRAAAASPQGQEQAKCCSQQRGQAEASGGDSEKTAGGPRKNSPSQQPRHSLQNPGAPGDGRSHPLHAQQLFASCSQPAQ

SEQ ID NO: 38630 - protein, 88 aa, Homo sapiens
  Payload ID: 7721
  Gene Symbol: HDAC7
  Gene Name: histone deacetylase 7
  ENSP ID: ENSP00000403149
MDLRVGQRPPVEPPPEPTLLALQRPQRLHHHLFLAGLQQQRSVEPMRLSMDTPMPELQVGPQEQELRQLLHKDKSKRSAVASSVVKQK

SEQ ID NO: 38631 - protein, 952 aa, Homo sapiens
  Payload ID: 7721
  Gene Symbol: HDAC7
  Gene Name: histone deacetylase 7
  Uniprot ID: Q8WUI4
  ENSP ID: ENSP00000404394
MDLRVGQRPPVEPPPEPTLLALQRPQRLHHHLFLAGLQQQRSVEPMRLSMDTPMPELQVGPQEQELRQLLHKDKSKRSAVASSVVKQKLAEVILKKQQAALERTVHPNSPGIPYRTLEPLETEGATRSMLSSFLPPVPSLPSDPPEHFPLRKTVSEPNLKLRYKPKKSLERRKNPLLRKESAPPSLRRRPAETLGDSSPSSSSTPASGCSSPNDSEHGPNPILGSEALLGQRLRLQETSVAPFALPTVSLLPAITLGLPAPARADSDRRTHPTLGPRGPILGSPHTPLFLPHGLEPEAGGTLPSRLQPILLLDPSGSHAPLLTVPGLGPLPFHFAQSLMTTERLSGSGLHWPLSRTRSEPLPPSATAPPPPGPMQPRLEQLKTHVQVIKRSAKPSEKPRLRQIPSAEDLETDGGGPGQVVDDGLEHRELGHGQPEARGPAPLQQHPQVLLWEQQRLAGRLPRGSTGDTVLLPLAQGGHRPLSRAQSSPAAPASLSAPEPASQARVLSSSETPARTLPFTTGLIYDSVMLKHQCSCGDNSRHPEHAGRIQSIWSRLQERGLRSQCECLRGRKASLEELQSVHSERHVLLYGTNPLSRLKLDNGKLAGLLAQRMFVMLPCGGVGVDTDTIWNELHSSNAARWAAGSVTDLAFKVASRELKNGFAVVRPPGHHADHSTAMGFCFFNSVAIACRQLQQQSKASKILIVDWDVHHGNGTQQTFYQDPSVLYISLHRHDDGNFFPGSGAVDEVGAGSGEGFNVNVAWAGGLDPPMGDPEYLAAFRIVVMPIAREFSPDLVLVSAGFDAAEGHPAPLGGYHVSAKCFGYMTQQLMNLAGGAVVLALEGGHDLTAICDASEACVAALLGNRVDPLSEEGWKQKPNLNAIRSLEAVIRVHSKYWGCMQRLASCPDSWVPRVPGADKEEVEAVTALASLSVGILAEDRPSEQLVEEEEPMNL

SEQ ID NO: 38632 - protein, 141 aa, Homo sapiens
  Payload ID: 7721
  Gene Symbol: HDAC7
  Gene Name: histone deacetylase 7
  ENSP ID: ENSP00000410068
MDLRVGQRPPVEPPPEPTLLALQRPQRLHHHLFLAGLQQQRSVEPMRLSMDTPMPELQVGPQEQELRQLLHKDKSKRSAVASSVVKQKLAEVILKKQQAALERTVHPNSPGIPYSLPSDPPEHFPLRKTVSEPNLKLRYKP

SEQ ID NO: 38633 - protein, 159 aa, Homo sapiens
  Payload ID: 7721
  Gene Symbol: HDAC7
  Gene Name: histone deacetylase 7
  ENSP ID: ENSP00000411058
MHSPGAGCPRPCADTPGPQPQPMDLRVGQRPPVEPPPEPTLLALQRPQRLHHHLFLAGLQQQRSVEPMRLSMDTPMPELQVGPQEQELRQLLHKDKSKRSAVASSVVKQKLAEVILKKQQAALERTVHPNSPGIPYSLPSDPPEHFPLRKTVSEPNLKL

SEQ ID NO: 38634 - protein, 138 aa, Homo sapiens
  Payload ID: 7721
  Gene Symbol: HDAC7
  Gene Name: histone deacetylase 7
  ENSP ID: ENSP00000412155
MDLRVGQRPPVEPPPEPTLLALQRPQRLHHHLFLAGLQQQRSVEPMRLSMDTPMPELQVGPQEQELRQLLHKDKSKRSAVASSVVKQKLAEVILKKQQAALERTVHPNSPGIPYRTLEPLETEGATRSMLSSFLPPVP

SEQ ID NO: 38635 - protein, 384 aa, Homo sapiens
  Payload ID: 7721
  Gene Symbol: HDAC7
  Gene Name: histone deacetylase 7
  ENSP ID: ENSP00000446538
  MOD_RES (1)..(1): Any amino acid
XLIYDSVMLKHQCSCGDNSRHPEHAGRIQSIWSRLQERGLRSQCECLRGRKASLEELQSVHSERHVLLYGTNPLSRLKLDNGKLAGLLAQRMFVMLPCGGVGVDTDTIWNELHSSNAARWAAGSVTDLAFKVASRELKDVHHGNGTQQTFYQDPSVLYISLHRHDDGNFFPGSGAVDEVGAGSGEGFNVNVAWAGGLDPPMGDPEYLAAFRIVVMPIAREFSPDLVLVSAGFDAAEGHPAPLGGYHVSAKCFGYMTQQLMNLAGGAVVLALEGGHDLTAICDASEACVAALLGNRVDPLSEEGWKQKPNLNAIRSLEAVIRVHSKYWGCMQRLASCPDSWVPRVPGADKEEVEAVTALASLSVGILAEDRPSEQLVEEEEPMNL

SEQ ID NO: 38636 - protein, 110 aa, Homo sapiens
  Payload ID: 7721
  Gene Symbol: HDAC7
  Gene Name: histone deacetylase 7
  ENSP ID: ENSP00000447191
  MOD_RES (1)..(1): Any amino acid
XDLVLVSAGFDAAEGHPAPLGGYHVSAKCFGYMTQQLMNLAGGAVVLALEGGHDLTAICDASEACVAALLGNRVSRLPPPSMLLSGRWIPFQKKAGNRNPTSMPSALWRP

SEQ ID NO: 38637 - protein, 61 aa, Homo sapiens
  Payload ID: 7721
  Gene Symbol: HDAC7
  Gene Name: histone deacetylase 7
  ENSP ID: ENSP00000448305
  MOD_RES (1)..(1): Any amino acid
XSTGDTVLLPLAQGGHRPLSRAQSSPAAPASLSAPEPASQARVLSSSETPARTLPFTTGSL

SEQ ID NO: 38638 - protein, 152 aa, Homo sapiens
  Payload ID: 7721
  Gene Symbol: HDAC7
  Gene Name: histone deacetylase 7
  ENSP ID: ENSP00000448448
EPLETEGATRSMLSSFLPPVPSLPSDPPEHFPLRKTVSEPNLKLRYKPKKSLERRKNPLLRKESAPPSLRRRPAETLGDSSPSSSSTPASGCSSPNDSEHGPNPILGSEALLGQRLRLQETSVAPFALPTVSLLPAITLGLPAPARALMPRC

SEQ ID NO: 38639 - protein, 974 aa, Homo sapiens
  Payload ID: 7721
  Gene Symbol: HDAC7
  Gene Name: histone deacetylase 7
  Uniprot ID: Q8WUI4
  ENSP ID: ENSP00000448532
MHSPGAGCPRPCADTPGPQPQPMDLRVGQRPPVEPPPEPTLLALQRPQRLHHHLFLAGLQQQRSVEPMRLSMDTPMPELQVGPQEQELRQLLHKDKSKRSAVASSVVKQKLAEVILKKQQAALERTVHPNSPGIPYRTLEPLETEGATRSMLSSFLPPVPSLPSDPPEHFPLRKTVSEPNLKLRYKPKKSLERRKNPLLRKESAPPSLRRRPAETLGDSSPSSSSTPASGCSSPNDSEHGPNPILGSEALLGQRLRLQETSVAPFALPTVSLLPAITLGLPAPARADSDRRTHPTLGPRGPILGSPHTPLFLPHGLEPEAGGTLPSRLQPILLLDPSGSHAPLLTVPGLGPLPFHFAQSLMTTERLSGSGLHWPLSRTRSEPLPPSATAPPPPGPMQPRLEQLKTHVQVIKRSAKPSEKPRLRQIPSAEDLETDGGGPGQVVDDGLEHRELGHGQPEARGPAPLQQHPQVLLWEQQRLAGRLPRGSTGDTVLLPLAQGGHRPLSRAQSSPAAPASLSAPEPASQARVLSSSETPARTLPFTTGLIYDSVMLKHQCSCGDNSRHPEHAGRIQSIWSRLQERGLRSQCECLRGRKASLEELQSVHSERHVLLYGTNPLSRLKLDNGKLAGLLAQRMFVMLPCGGVGVDTDTIWNELHSSNAARWAAGSVTDLAFKVASRELKNGFAVVRPPGHHADHSTAMGFCFFNSVAIACRQLQQQSKASKILIVDWDVHHGNGTQQTFYQDPSVLYISLHRHDDGNFFPGSGAVDEVGAGSGEGFNVNVAWAGGLDPPMGDPEYLAAFRIVVMPIAREFSPDLVLVSAGFDAAEGHPAPLGGYHVSAKCFGYMTQQLMNLAGGAVVLALEGGHDLTAICDASEACVAALLGNRVDPLSEEGWKQKPNLNAIRSLEAVIRVHSKYWGCMQRLASCPDSWVPRVPGADKEEVEAVTALASLSVGILAEDRPSEQLVEEEEPMNL

SEQ ID NO: 38640 - protein, 224 aa, Homo sapiens
  Payload ID: 7721
  Gene Symbol: HDAC7
  Gene Name: histone deacetylase 7
  ENSP ID: ENSP00000449171
MDLRVGQRPPVEPPPEPTLLALQRPQRLHHHLFLAGLQQQRSVEPMRLSMDTPMPELQVGPQEQELRQLLHKDKSKRSAVASSVVKQKLAEVILKKQQAALERTVHPNSPGIPYRTLEPLETEGATRSMLSSFLPPVPSLPSDPPEHFPLRKTVSEPNLKLRYKPKKSLERRKNPLLRKESAPPSLRRRPAETLGDSSPSSSSTPASGCSSPNDSEHGPNPILG

SEQ ID NO: 38641 - protein, 205 aa, Homo sapiens
  Payload ID: 7721
  Gene Symbol: HDAC7
  Gene Name: histone deacetylase 7
  ENSP ID: ENSP00000482003
  MOD_RES (1)..(1): Any amino acid
XIYDSVMLKHQCSCGDNSRHPEHAGRIQSIWSRLQERGLRSQCECLRGRKASLEELQSVHSERHVLLYGTNPLSRLKLDNGKLAGLLAQRMFVMLPCGGVGVDTDTIWNELHSSNAARWAAGSVTDLAFKVASRELKNGFAVVRPPGHHADHSTAMGFCFFNSVAIACRQLQQQSKASKILIVDWVVMIRIIADNISTPLITSRH

SEQ ID NO: 38642 - protein, 146 aa, Homo sapiens
  Payload ID: 7722
  Gene Symbol: HDAC8
  Gene Name: histone deacetylase 8
  Uniprot ID: Q9BY41
  ENSP ID: ENSP00000362655
MEEPEEPADSGQSLVPVYIYSPEYVSMCDSLAKIPKRASMVHSLIEAYALHKQMRIVKPKVASMEEMATFHTDAYLQHLQKVSQEGDDDHPDSIEYGLGYDCPATEGIFDYAAAIGGATITAAQCLIDGMCKVAINWSGGWHHAKK

SEQ ID NO: 38643 - protein, 158 aa, Homo sapiens
  Payload ID: 7722
  Gene Symbol: HDAC8
  Gene Name: histone deacetylase 8
  Uniprot ID: Q9BY41
  ENSP ID: ENSP00000362657
MEEPEEPADSGQSLVPVYIYSPEYVSMCDSLAKIPKRASMVHSLIEAYALHKQMRIVKPKVASMEEMATFHTDAYLQHLQKVSQEGDDDHPDSIEYGLGYDCPATEGIFDYAAAIGGATITAAQCLIDGMCKVAINWSGGWHHAKKETCVYVALYKAF

SEQ ID NO: 38644 - protein, 139 aa, Homo sapiens
  Payload ID: 7722
  Gene Symbol: HDAC8
  Gene Name: histone deacetylase 8
  Uniprot ID: Q9BY41
  ENSP ID: ENSP00000362660
MEEPEEPADSGQSLVPVYIYSPEYVSMCDSLAKIPKRASMVHSLIEAYALHKQMRDEASGFCYLNDAVLGILRLRRKFERILYVDLDLHHGDGTGDVSDVGLGKGRYYSVNVPIQDGIQDEKYYQICERYEPPAPNPGL

SEQ ID NO: 38645 - protein, 156 aa, Homo sapiens
  Payload ID: 7722
  Gene Symbol: HDAC8
  Gene Name: histone deacetylase 8
  ENSP ID: ENSP00000362661
MEEPEEPADSGQSLVPVYIYSPEYVSMCDSLAKIPKRASMVHSLIEAYALHKQMRIVKPKVASMEEMATFHTDAYLQHLQKVSQEGDDDHPDSIEYGLGYDCPATEGIFDYAAAIGGATITAAQCLIDGMCKVAINWSGGWHHAKKYEPPAPNPGL

SEQ ID NO: 38646 - protein, 248 aa, Homo sapiens
  Payload ID: 7722
  Gene Symbol: HDAC8
  Gene Name: histone deacetylase 8
  ENSP ID: ENSP00000362669
MEEPEEPADSGQSLVPVYIYSPEYVSMCDSLAKIPKRASMVHSLIEAYALHKQMRDEASGFCYLNDAVLGILRLRRKFERILYVDLDLHHGDGVEDAFSFTSKVMTVSLHKFSPGFFPGTGDVSDVGLGKGRYYSVNVPIQDGIQDEKYYQICESVLKEVYQAFNPKAVVLQLGADTIAGDPMCSFNMTPVGIGKCLKYILQWQLATLILGGGGYNLANTARCWTYLTGVILGKTLSSEIPDHEFFTA

SEQ ID NO: 38647 - protein, 253 aa, Homo sapiens
  Payload ID: 7722
  Gene Symbol: HDAC8
  Gene Name: histone deacetylase 8
  ENSP ID: ENSP00000362672
MEEPEEPADSGQSLVPVYIYSPEYVSMCDSLAKIPKRASMVHSLIEAYALHKQMRIVKPKVASMEEMATFHTDAYLQHLQKVSQEGDDDHPDSIEYGLGYDCPATEGIFDYAAAIGGATITAAQCLIDGMCKVAINWSGGWHHAKKDEASGFCYLNDAVLGILRLRRKFERILYVDLDLHHGDGVEDAFSFTSKVMTVSLHKFSPGFFPGTGDVSDVGLGKGRYYSVNVPIQDGIQDEKYYQICERALFIRTP

SEQ ID NO: 38648 - protein, 377 aa, Homo sapiens
  Payload ID: 7722
  Gene Symbol: HDAC8
  Gene Name: histone deacetylase 8
  Uniprot ID: Q9BY41
  ENSP ID: ENSP00000362674
MEEPEEPADSGQSLVPVYIYSPEYVSMCDSLAKIPKRASMVHSLIEAYALHKQMRIVKPKVASMEEMATFHTDAYLQHLQKVSQEGDDDHPDSIEYGLGYDCPATEGIFDYAAAIGGATITAAQCLIDGMCKVAINWSGGWHHAKKDEASGFCYLNDAVLGILRLRRKFERILYVDLDLHHGDGVEDAFSFTSKVMTVSLHKFSPGFFPGTGDVSDVGLGKGRYYSVNVPIQDGIQDEKYYQICESVLKEVYQAFNPKAVVLQLGADTIAGDPMCSFNMTPVGIGKCLKYILQWQLATLILGGGGYNLANTARCWTYLTGVILGKTLSSEIPDHEFFTAYGPDYVLEITPSCRPDRNEPHRIQQILNYIKGNLKHVV

SEQ ID NO: 38649 - protein, 64 aa, Homo sapiens
  Payload ID: 7722
  Gene Symbol: HDAC8
  Gene Name: histone deacetylase 8
  ENSP ID: ENSP00000362685
MEEPEEPADSGQSLVPVYIYSPEYVSMCDSLAKIPKRASMVHSLIEAYALHKQMRSWMRAVTSL

SEQ ID NO: 38650 - protein, 286 aa, Homo sapiens
  Payload ID: 7722
  Gene Symbol: HDAC8
  Gene Name: histone deacetylase 8
  Uniprot ID: Q9BY41
  ENSP ID: ENSP00000362691
MEEPEEPADSGQSLVPVYIYSPEYVSMCDSLAKIPKRASMVHSLIEAYALHKQMRDEASGFCYLNDAVLGILRLRRKFERILYVDLDLHHGDGVEDAFSFTSKVMTVSLHKFSPGFFPGTGDVSDVGLGKGRYYSVNVPIQDGIQDEKYYQICESVLKEVYQAFNPKAVVLQLGADTIAGDPMCSFNMTPVGIGKCLKYILQWQLATLILGGGGYNLANTARCWTYLTGVILGKTLSSEIPDHEFFTAYGPDYVLEITPSCRPDRNEPHRIQQILNYIKGNLKHVV

SEQ ID NO: 38651 - protein, 299 aa, Homo sapiens
  Payload ID: 7722
  Gene Symbol: HDAC8
  Gene Name: histone deacetylase 8
  ENSP ID: ENSP00000396424
MEEPEEPADSGQSLVPVYIYSPEYVSMCDSLAKIPKRASMVHSLIEAYALHKQMRIVKPKVASMEEMATFHTDAYLQHLQKVSQEGDDDHPDSIEYGLGYDCPATEGIFDYAAAIGGATITAAQCLIDGMCKVAINWSGGWHHAKKDEASGFCYLNDAVLGILRLRRKFERILYVDLDLHHGDGTGDVSDVGLGKGRYYSVNVPIQDGIQDEKYYQICESVLKEVYQAFNPKAVVLQLGADTIAGDPMCSFNMTPVGIGKCLKYILQWQLATLILGGGGYNLANTARCWTYLTGVILGK

SEQ ID NO: 38652 - protein, 131 aa, Homo sapiens
  Payload ID: 7722
  Gene Symbol: HDAC8
  Gene Name: histone deacetylase 8
  ENSP ID: ENSP00000398997
MVHSLIEAYALHKQMRIVKPKVASMEEMATFHTDAYLQHLQKVSQEGDDDHPDSIEYGLGYDCPATEGIFDYAAAIGGATITAAQCLIDGMCKVAINWSGGWHHAKKDEASGFCYLNDAVLGILRLRRKFE

SEQ ID NO: 38653 - protein, 56 aa, Homo sapiens
  Payload ID: 7722
  Gene Symbol: HDAC8
  Gene Name: histone deacetylase 8
  ENSP ID: ENSP00000400180
MEEPEEPADSGQSLVPVYIYSPEYVSMCDSLAKIPKRASMVHSLIEAYALHKQMRL

SEQ ID NO: 38654 - protein, 55 aa, Homo sapiens
  Payload ID: 7722
  Gene Symbol: HDAC8
  Gene Name: histone deacetylase 8
  ENSP ID: ENSP00000409778
MEEPEEPADSGQSLVPVYIYSPEYVSMCDSLAKIPKRASMVHSLIEAYALHKQMS

SEQ ID NO: 38655 - protein, 256 aa, Homo sapiens
  Payload ID: 7722
  Gene Symbol: HDAC8
  Gene Name: histone deacetylase 8
  Uniprot ID: Q9BY41
  ENSP ID: ENSP00000414486
MEEPEEPADSGQSLVPVYIYSPEYVSMCDSLAKIPKRASMVHSLIEAYALHKQMRIVKPKVASMEEMATFHTDAYLQHLQKVSQEGDDDHPDSIEYGLGYDCPATEGIFDYAAAIGGATITAAQCLIDGMCKVAINWSGGWHHAKKDEASGFCYLNDAVLGILRLRRKFERILYVDLDLHHGDGVEDAFSFTSKVMTVSLHKFSPGFFPGTGDVSDVGLGKGRYYSVNVPIQDGIQDEKYYQICERYEPPAPNPGL

SEQ ID NO: 38656 - protein, 185 aa, Homo sapiens
  Payload ID: 7722
  Gene Symbol: HDAC8
  Gene Name: histone deacetylase 8
  ENSP ID: ENSP00000416489
MEEPEEPADSGQSLVPVYIYSPEYVSMCDSLAKIPKRASMVHSLIEAYALHKQMRIVKPKVASMEEMATFHTDAYLQHLQKVSQEGDDDHPDSIEYGLGYDCPATEGIFDYAAAIGGATITAAQCLIDGMCKVAINWSGGWHHAKKDEASGFCYLNDAVLGILRLRRKFERILYVDLDLHHGDVY

SEQ ID NO: 38657 - protein, 1025 aa, Homo sapiens
  Payload ID: 7723
  Gene Symbol: HDAC9
  Gene Name: histone deacetylase 9
  Uniprot ID: Q9UKV0
  ENSP ID: ENSP00000383912
MHSMISSVDVKSEVPVGLEPISPLDLRTDLRMMMPVVDPVVREKQLQQELLLIQQQQQIQKQLLIAEFQKQHENLTRQHQAQLQEHIKLQQELLAIKQQQELLEKEQKLEQQRQEQEVERHRREQQLPPLRGKDRGRERAVASTEVKQKLQEFLLSKSATKDTPTNGKNHSVSRHPKLWYTAAHHTSLDQSSPPLSGTSPSYKYTLPGAQDAKDDFPLRKTESSVSSSSPGSGPSSPNNGPTGSVTENETSVLPPTPHAEQMVSQQRILIHEDSMNLLSLYTSPSLPNITLGLPAVPSQLNASNSLKEKQKCETQTLRQGVPLPGQYGGSIPASSSHPHVTLEGKPPNSSHQALLQHLLLKEQMRQQKLLVAGGVPLHPQSPLATKERISPGIRGTHKLPRHRPLNRTQSAPLPQSTLAQLVIQQQHQQFLEKQKQYQQQIHMNKLLSKSIEQLKQPGSHLEEAEEELQGDQAMQEDRAPSSGNSTRSDSSACVDDTLGQVGAVKVKEEPVDSDEDAQIQEMESGEQAAFMQQPFLEPTHTRALSVRQAPLAAVGMDGLEKHRLVSRTHSSPAASVLPHPAMDRPLQPGSATGIAYDPLMLKHQCVCGNSTTHPEHAGRIQSIWSRLQETGLLNKCERIQGRKASLEEIQLVHSEHHSLLYGTNPLDGQKLDPRILLGDDSQKFFSSLPCGGLGVDSDTIWNELHSSGAARMAVGCVIELASKVASGELKNGFAVVRPPGHHAEESTAMGFCFFNSVAITAKYLRDQLNISKILIVDLDVHHGNGTQQAFYADPSILYISLHRYDEGNFFPGSGAPNEVGTGLGEGYNINIAWTGGLDPPMGDVEYLEAFRTIVKPVAKEFDPDMVLVSAGFDALEGHTPPLGGYKVTAKCFGHLTKQLMTLADGRVVLALEGGHDLTAICDASEACVNALLGNELEPLAEDILHQSPNMNAVISLQKIIEIQSKYWKSVRMVAVPRGCALAGAQLQEETETVSALASLTVDVEQPFAQEDSRTAGEPMEEEPAL

SEQ ID NO: 38658 - protein, 577 aa, Homo sapiens
  Payload ID: 7723
  Gene Symbol: HDAC9
  Gene Name: histone deacetylase 9
  ENSP ID: ENSP00000384017
MLQTIYESDSCFSSDGVAGREQLLAQQRMHSMISSVDVKSEVPVGLEPISPLDLRTDLRMMMPVVDPVVREKQLQQELLLIQQQQQIQKQLLIAEFQKQHENLTRQHQAQLQEHIKLQQELLAIKQQQELLEKEQKLEQQRQEQEVERHRREQQLPPLRGKDRGRERAVASTEVKQKLQEFLLSKSATKDTPTNGKNHSVSRHPKLWYTAAHHTSLDQSSPPLSGTSPSYKYTLPGAQDAKDDFPLRKTESSVSSSSPGSGPSSPNNGPTGSVTENETSVLPPTPHAEQMVSQQRILIHEDSMNLLSLYTSPSLPNITLGLPAVPSQLNASNSLKEKQKCETQTLRQGVPLPGQYGGSIPASSSHPHVTLEGKPPNSSHQALLQHLLLKEQMRQQKLLVAGGVPLHPQSPLATKERISPGIRGTHKLPRHRPLNRTQSAPLPQSTLAQLVIQQQHQQFLEKQKQYQQQIHMNKLLSKSIEQLKQPGSHLEEAEEELQGDQAMQEDRAPSSGNSTRSDSSACVDDTLGQVGAVKVKEEPVDSDEDAQIQEMESGEQAAFMQQVIGKDLAPGFVIKVII

SEQ ID NO: 38659 - protein, 590 aa, Homo sapiens
  Payload ID: 7723
  Gene Symbol: HDAC9
  Gene Name: histone deacetylase 9
  Uniprot ID: Q9UKV0
  ENSP ID: ENSP00000384382
MHSMISSVDVKSEVPVGLEPISPLDLRTDLRMMMPVVDPVVREKQLQQELLLIQQQQQIQKQLLIAEFQKQHENLTRQHQAQLQEHIKELLAIKQQQELLEKEQKLEQQRQEQEVERHRREQQLPPLRGKDRGRERAVASTEVKQKLQEFLLSKSATKDTPTNGKNHSVSRHPKLWYTAAHHTSLDQSSPPLSGTSPSYKYTLPGAQDAKDDFPLRKTASEPNLKVRSRLKQKVAERRSSPLLRRKDGNVVTSFKKRMFEVTESSVSSSSPGSGPSSPNNGPTGSVTENETSVLPPTPHAEQMVSQQRILIHEDSMNLLSLYTSPSLPNITLGLPAVPSQLNASNSLKEKQKCETQTLRQGVPLPGQYGGSIPASSSHPHVTLEGKPPNSSHQALLQHLLLKEQMRQQKLLVAGGVPLHPQSPLATKERISPGIRGTHKLPRHRPLNRTQSAPLPQSTLAQLVIQQQHQQFLEKQKQYQQQIHMNKLLSKSIEQLKQPGSHLEEAEEELQGDQAMQEDRAPSSGNSTRSDSSACVDDTLGQVGAVKVKEEPVDSDEDAQIQEMESGEQAAFMQQVIGKDLAPGFVIKVII

SEQ ID NO: 38660 - protein, 1066 aa, Homo sapiens
  Payload ID: 7723
  Gene Symbol: HDAC9
  Gene Name: histone deacetylase 9
  Uniprot ID: Q9UKV0
  ENSP ID: ENSP00000384657
MHSMISSVDVKSEVPVGLEPISPLDLRTDLRMMMPVVDPVVREKQLQQELLLIQQQQQIQKQLLIAEFQKQHENLTRQHQAQLQEHIKELLAIKQQQELLEKEQKLEQQRQEQEVERHRREQQLPPLRGKDRGRERAVASTEVKQKLQEFLLSKSATKDTPTNGKNHSVSRHPKLWYTAAHHTSLDQSSPPLSGTSPSYKYTLPGAQDAKDDFPLRKTASEPNLKVRSRLKQKVAERRSSPLLRRKDGNVVTSFKKRMFEVTESSVSSSSPGSGPSSPNNGPTGSVTENETSVLPPTPHAEQMVSQQRILIHEDSMNLLSLYTSPSLPNITLGLPAVPSQLNASNSLKEKQKCETQTLRQGVPLPGQYGGSIPASSSHPHVTLEGKPPNSSHQALLQHLLLKEQMRQQKLLVAGGVPLHPQSPLATKERISPGIRGTHKLPRHRPLNRTQSAPLPQSTLAQLVIQQQHQQFLEKQKQYQQQIHMNKLLSKSIEQLKQPGSHLEEAEEELQGDQAMQEDRAPSSGNSTRSDSSACVDDTLGQVGAVKVKEEPVDSDEDAQIQEMESGEQAAFMQQPFLEPTHTRALSVRQAPLAAVGMDGLEKHRLVSRTHSSPAASVLPHPAMDRPLQPGSATGIAYDPLMLKHQCVCGNSTTHPEHAGRIQSIWSRLQETGLLNKCERIQGRKASLEEIQLVHSEHHSLLYGTNPLDGQKLDPRILLGDDSQKFFSSLPCGGLGVDSDTIWNELHSSGAARMAVGCVIELASKVASGELKNGFAVVRPPGHHAEESTAMGFCFFNSVAITAKYLRDQLNISKILIVDLDVHHGNGTQQAFYADPSILYISLHRYDEGNFFPGSGAPNEVGTGLGEGYNINIAWTGGLDPPMGDVEYLEAFRTIVKPVAKEFDPDMVLVSAGFDALEGHTPPLGGYKVTAKCFGHLTKQLMTLADGRVVLALEGGHDLTAICDASEACVNALLGNELEPLAEDILHQSPNMNAVISLQKIIEIQSKYWKSVRMVAVPRGCALAGAQLQEETETVSALASLTVDVEQPFAQEDSRTAGEPMEEEPAL

SEQ ID NO: 38661 - protein, 562 aa, Homo sapiens
  Payload ID: 7723
  Gene Symbol: HDAC9
  Gene Name: histone deacetylase 9
  Uniprot ID: Q9UKV0
  ENSP ID: ENSP00000388568
MMMPVVDPVVREKQLQQELLLIQQQQQIQKQLLIAEFQKQHENLTRQHQAQLQEHIKLQQELLAIKQQQELLEKEQKLEQQRQEQEVERHRREQQLPPLRGKDRGRERAVASTEVKQKLQEFLLSKSATKDTPTNGKNHSVSRHPKLWYTAAHHTSLDQSSPPLSGTSPSYKYTLPGAQDAKDDFPLRKTASEPNLKVRSRLKQKVAERRSSPLLRRKDGNVVTSFKKRMFEVTESSVSSSSPGSGPSSPNNGPTGSVTENETSVLPPTPHAEQMVSQQRILIHEDSMNLLSLYTSPSLPNITLGLPAVPSQLNASNSLKEKQKCETQTLRQGVPLPGQYGGSIPASSSHPHVTLEGKPPNSSHQALLQHLLLKEQMRQQKLLVAGGVPLHPQSPLATKERISPGIRGTHKLPRHRPLNRTQSAPLPQSTLAQLVIQQQHQQFLEKQKQYQQQIHMNKLLSKSIEQLKQPGSHLEEAEEELQGDQAMQEDRAPSSGNSTRSDSSACVDDTLGQVGAVKVKEEPVDSDEDAQIQEMESGEQAAFMQQVIGKDLAPGFVIKVII

SEQ ID NO: 38662 - protein, 148 aa, Homo sapiens
  Payload ID: 7723
  Gene Symbol: HDAC9
  Gene Name: histone deacetylase 9
  ENSP ID: ENSP00000392564
MHSMISSVDVKSEVPVGLEPISPLDLRTDLRMMMPVVDPVVREKQLQQELLLIQQQQQIQKQLLIAEFQKQHENLTRQHQAQLQEHIKLQQELLAIKQQQELLEKEQKLEQQRQEQEVERHRREQQLPPLRGKDRGRERAVASTEVKQ

SEQ ID NO: 38663 - protein, 546 aa, Homo sapiens
  Payload ID: 7723
  Gene Symbol: HDAC9
  Gene Name: histone deacetylase 9
  Uniprot ID: Q9UKV0
  ENSP ID: ENSP00000395655
MHSMISSVDVKSEVPVGLEPISPLDLRTDLRMMMPVVDPVVREKQLQQELLLIQQQQQIQKQLLIAEFQKQHENLTRQHQAQLQEHIKELLAIKQQQELLEKEQKLEQQRQEQEVERHRREQQLPPLRGKDRGRERAVASTEVKQKLQEFLLSKSATKDTPTNGKNHSVSRHPKLWYTAAHHTSLDQSSPPLSGTSPSYKYTLPGAQDAKDDFPLRKTESSVSSSSPGSGPSSPNNGPTGSVTENETSVLPPTPHAEQMVSQQRILIHEDSMNLLSLYTSPSLPNITLGLPAVPSQLNASNSLKEKQKCETQTLRQGVPLPGQYGGSIPASSSHPHVTLEGKPPNSSHQALLQHLLLKEQMRQQKLLVAGGVPLHPQSPLATKERISPGIRGTHKLPRHRPLNRTQSAPLPQSTLAQLVIQQQHQQFLEKQKQYQQQIHMNKLLSKSIEQLKQPGSHLEEAEEELQGDQAMQEDRAPSSGNSTRSDSSACVDDTLGQVGAVKVKEEPVDSDEDAQIQEMESGEQAAFMQQVIGKDLAPGFVIKVII

SEQ ID NO: 38664 - protein, 588 aa, Homo sapiens
  Payload ID: 7723
  Gene Symbol: HDAC9
  Gene Name: histone deacetylase 9
  Uniprot ID: Q9UKV0
  ENSP ID: ENSP00000401669
MMSSPAQPDLMWNLVPWVLFCGCCRIFPDGVAGREQLLAQQRMHSMISSVDVKSEVPVGLEPISPLDLRTDLRMMMPVVDPVVREKQLQQELLLIQQQQQIQKQLLIAEFQKQHENLTRQHQAQLQEHIKELLAIKQQQELLEKEQKLEQQRQEQEVERHRREQQLPPLRGKDRGRERAVASTEVKQKLQEFLLSKSATKDTPTNGKNHSVSRHPKLWYTAAHHTSLDQSSPPLSGTSPSYKYTLPGAQDAKDDFPLRKTESSVSSSSPGSGPSSPNNGPTGSVTENETSVLPPTPHAEQMVSQQRILIHEDSMNLLSLYTSPSLPNITLGLPAVPSQLNASNSLKEKQKCETQTLRQGVPLPGQYGGSIPASSSHPHVTLEGKPPNSSHQALLQHLLLKEQMRQQKLLVAGGVPLHPQSPLATKERISPGIRGTHKLPRHRPLNRTQSAPLPQSTLAQLVIQQQHQQFLEKQKQYQQQIHMNKLLSKSIEQLKQPGSHLEEAEEELQGDQAMQEDRAPSSGNSTRSDSSACVDDTLGQVGAVKVKEEPVDSDEDAQIQEMESGEQAAFMQQVIGKDLAPGFVIKVII

SEQ ID NO: 38665 - protein, 110 aa, Homo sapiens
  Payload ID: 7723
  Gene Symbol: HDAC9
  Gene Name: histone deacetylase 9
  ENSP ID: ENSP00000404763
MMMPVVDPVVREKQLQQELLLIQQQQQIQKQLLIAEFQKQHENLTRQHQAQLQEHIKELLAIKQQQELLEKEQKLEQQRQEQEVERHRREQQLPPLRGKDRGRERAVAST

SEQ ID NO: 38666 - protein, 1069 aa, Homo sapiens
  Payload ID: 7723
  Gene Symbol: HDAC9
  Gene Name: histone deacetylase 9
  Uniprot ID: Q9UKV0
  ENSP ID: ENSP00000408617
MHSMISSVDVKSEVPVGLEPISPLDLRTDLRMMMPVVDPVVREKQLQQELLLIQQQQQIQKQLLIAEFQKQHENLTRQHQAQLQEHIKLQQELLAIKQQQELLEKEQKLEQQRQEQEVERHRREQQLPPLRGKDRGRERAVASTEVKQKLQEFLLSKSATKDTPTNGKNHSVSRHPKLWYTAAHHTSLDQSSPPLSGTSPSYKYTLPGAQDAKDDFPLRKTASEPNLKVRSRLKQKVAERRSSPLLRRKDGNVVTSFKKRMFEVTESSVSSSSPGSGPSSPNNGPTGSVTENETSVLPPTPHAEQMVSQQRILIHEDSMNLLSLYTSPSLPNITLGLPAVPSQLNASNSLKEKQKCETQTLRQGVPLPGQYGGSIPASSSHPHVTLEGKPPNSSHQALLQHLLLKEQMRQQKLLVAGGVPLHPQSPLATKERISPGIRGTHKLPRHRPLNRTQSAPLPQSTLAQLVIQQQHQQFLEKQKQYQQQIHMNKLLSKSIEQLKQPGSHLEEAEEELQGDQAMQEDRAPSSGNSTRSDSSACVDDTLGQVGAVKVKEEPVDSDEDAQIQEMESGEQAAFMQQPFLEPTHTRALSVRQAPLAAVGMDGLEKHRLVSRTHSSPAASVLPHPAMDRPLQPGSATGIAYDPLMLKHQCVCGNSTTHPEHAGRIQSIWSRLQETGLLNKCERIQGRKASLEEIQLVHSEHHSLLYGTNPLDGQKLDPRILLGDDSQKFFSSLPCGGLGVDSDTIWNELHSSGAARMAVGCVIELASKVASGELKNGFAVVRPPGHHAEESTAMGFCFFNSVAITAKYLRDQLNISKILIVDLDVHHGNGTQQAFYADPSILYISLHRYDEGNFFPGSGAPNEVGTGLGEGYNINIAWTGGLDPPMGDVEYLEAFRTIVKPVAKEFDPDMVLVSAGFDALEGHTPPLGGYKVTAKCFGHLTKQLMTLADGRVVLALEGGHDLTAICDASEACVNALLGNELEPLAEDILHQSPNMNAVISLQKIIEIQSKYWKSVRMVAVPRGCALAGAQLQEETETVSALASLTVDVEQPFAQEDSRTAGEPMEEEPAL

SEQ ID NO: 38667 - protein, 22 aa, Homo sapiens
  Payload ID: 7723
  Gene Symbol: HDAC9
  Gene Name: histone deacetylase 9
  ENSP ID: ENSP00000409003
MHSMISSVDVKSEVPVGLEPIS

SEQ ID NO: 38668 - protein, 1011 aa, Homo sapiens
  Payload ID: 7723
  Gene Symbol: HDAC9
  Gene Name: histone deacetylase 9
  Uniprot ID: Q9UKV0
  ENSP ID: ENSP00000410337
MHSMISSVDVKSEVPVGLEPISPLDLRTDLRMMMPVVDPVVREKQLQQELLLIQQQQQIQKQLLIAEFQKQHENLTRQHQAQLQEHIKELLAIKQQQELLEKEQKLEQQRQEQEVERHRREQQLPPLRGKDRGRERAVASTEVKQKLQEFLLSKSATKDTPTNGKNHSVSRHPKLWYTAAHHTSLDQSSPPLSGTSPSYKYTLPGAQDAKDDFPLRKTASEPNLKVRSRLKQKVAERRSSPLLRRKDGNVVTSFKKRMFEVTESSVSSSSPGSGPSSPNNGPTGSVTENETSVLPPTPHAEQMVSQQRILIHEDSMNLLSLYTSPSLPNITLGLPAVPSQLNASNSLKEKQKCETQTLRQGVPLPGQYGGSIPASSSHPHVTLEGKPPNSSHQALLQHLLLKEQMRQQKLLVAGGVPLHPQSPLATKERISPGIRGTHKLPRHRPLNRTQSAPLPQSTLAQLVIQQQHQQFLEKQKQYQQQIHMNKLLSKSIEQLKQPGSHLEEAEEELQGDQAMQEDRAPSSGNSTRSDSSACVDDTLGQVGAVKVKEEPVDSDEDAQIQEMESGEQAAFMQQPFLEPTHTRALSVRQAPLAAVGMDGLEKHRLVSRTHSSPAASVLPHPAMDRPLQPGSATGIAYDPLMLKHQCVCGNSTTHPEHAGRIQSIWSRLQETGLLNKCERIQGRKASLEEIQLVHSEHHSLLYGTNPLDGQKLDPRILLGDDSQKFFSSLPCGGLGVDSDTIWNELHSSGAARMAVGCVIELASKVASGELKNGFAVVRPPGHHAEESTAMGFCFFNSVAITAKYLRDQLNISKILIVDLDVHHGNGTQQAFYADPSILYISLHRYDEGNFFPGSGAPNEVGTGLGEGYNINIAWTGGLDPPMGDVEYLEAFRTIVKPVAKEFDPDMVLVSAGFDALEGHTPPLGGYKVTAKCFGHLTKQLMTLADGRVVLALEGGHDLTAICDASEACVNALLGNELEPLAEDILHQSPNMNAVISLQKIIEIQSMSLKFS

SEQ ID NO: 38669 - protein, 70 aa, Homo sapiens
  Payload ID: 7723
  Gene Symbol: HDAC9
  Gene Name: histone deacetylase 9
  ENSP ID: ENSP00000411422
MMMPVVDPVVREKQLQQELLLIQQQQQIQKQLLIAEFQKQHENLTRQHQAQLQEHIKLQQELLAIKQQQE

SEQ ID NO: 38670 - protein, 138 aa, Homo sapiens
  Payload ID: 7723
  Gene Symbol: HDAC9
  Gene Name: histone deacetylase 9
  ENSP ID: ENSP00000412497
MHSMISSVDVKSEVPVGLEPISPLDLRTDLRMMMPVVDPVVREKQLQQELLLIQQQQQIQKQLLIAEFQKQHENLTRQHQAQLQEHIKLQQELLAIKQQQELLEKEQKLEQQRQEQEVERHRREQQLPPLRGKDRGRE

SEQ ID NO: 38671 - protein, 38 aa, Homo sapiens
  Payload ID: 7723
  Gene Symbol: HDAC9
  Gene Name: histone deacetylase 9
  ENSP ID: ENSP00000415095
MHSMISSVRSSCGPGAHLTFRPKDRPQDDDARGGPCCP

SEQ ID NO: 38672 - protein, 513 aa, Homo sapiens
  Payload ID: 7723
  Gene Symbol: HDAC9
  Gene Name: histone deacetylase 9
  Uniprot ID: Q9UKV0
  ENSP ID: ENSP00000430036
MMMPVVDPVVREKQLQQELLLIQQQQQIQKQLLIAEFQKQHENLTRQHQAQLQEHIKELLAIKQQQELLEKEQKLEQQRQEQEVERHRREQQLPPLRGKDRGRERAVASTEVKQKLQEFLLSKSATKDTPTNGKNHSVSRHPKLWAAHHTSLDQSSPPLSGTSPSYKYTLPGAQDAKDDFPLRKTESSVSSSSPGSGPSSPNNGPTGSVTENETSVLPPTPHAEQMVSQQRILIHEDSMNLLSLYTSPSLPNITLGLPAVPSQLNASNSLKEKQKCETQTLRQGVPLPGQYGGSIPASSSHPHVTLEGKPPNSSHQALLQHLLLKEQMRQQKLLVAGGVPLHPQSPLATKERISPGIRGTHKLPRHRPLNRTQSAPLPQSTLAQLVIQQQHQQFLEKQKQYQQQIHMNKLLSKSIEQLKQPGSHLEEAEEELQGDQAMQEDRAPSSGNSTRSDSSACVDDTLGQVGAVKVKEEPVDSDEDAQIQEMESGEQAAFMQQVIGKDLAPGFVIKVII

SEQ ID NO: 38673 - protein, 549 aa, Homo sapiens
  Payload ID: 7723
  Gene Symbol: HDAC9
  Gene Name: histone deacetylase 9
  ENSP ID: ENSP00000478829
MHSMISSVDVKSEVPVGLEPISPLDLRTDLRMMMPVVDPVVREKQLQQELLLIQQQQQIQKQLLIAEFQKQHENLTRQHQAQLQEHIKLQQELLAIKQQQELLEKEQKLEQQRQEQEVERHRREQQLPPLRGKDRGRERAVASTEVKQKLQEFLLSKSATKDTPTNGKNHSVSRHPKLWYTAAHHTSLDQSSPPLSGTSPSYKYTLPGAQDAKDDFPLRKTESSVSSSSPGSGPSSPNNGPTGSVTENETSVLPPTPHAEQMVSQQRILIHEDSMNLLSLYTSPSLPNITLGLPAVPSQLNASNSLKEKQKCETQTLRQGVPLPGQYGGSIPASSSHPHVTLEGKPPNSSHQALLQHLLLKEQMRQQKLLVAGGVPLHPQSPLATKERISPGIRGTHKLPRHRPLNRTQSAPLPQSTLAQLVIQQQHQQFLEKQKQYQQQIHMNKLLSKSIEQLKQPGSHLEEAEEELQGDQAMQEDRAPSSGNSTRSDSSACVDDTLGQVGAVKVKEEPVDSDEDAQIQEMESGEQAAFMQQVIGKDLAPGFVIKVII

SEQ ID NO: 38674 - protein, 517 aa, Homo sapiens
  Payload ID: 7724
  Gene Symbol: HINFP
  Gene Name: histone H4 transcription factor
  Uniprot ID: Q9BQA5
  ENSP ID: ENSP00000318085
MPPPGKVPRKENLWLQCEWGSCSFVCSTMEKFFEHVTQHLQQHLHGSGEEEEEEEEDDPLEEEFSCLWQECGFCSLDSSADLIRHVYFHCYHTKLKQWGLQALQSQADLGPCILDFQSRNVIPDIPDHFLCLWEHCENSFDNPEWFYRHVEAHSLCCEYEAVGKDNPVVLCGWKGCTCTFKDRSKLREHLRSHTQEKVVACPTCGGMFANNTKFLDHIRRQTSLDQQHFQCSHCSKRFATERLLRDHMRNHVNHYKCPLCDMTCPLPSSLRNHMRFRHSEDRPFKCDCCDYSCKNLIDLQKHLDTHSEEPAYRCDFENCTFSARSLCSIKSHYRKVHEGDSEPRYKCHVCDKCFTRGNNLTVHLRKKHQFKWPSGHPRFRYKEHEDGYMRLQLVRYESVELTQQLLRQPQEGSGLGTSLNESSLQGIILETVPGEPGRKEEEEEGKGSEGTALSASQDNPSSVIHVVNQTNAQGQQEIVYYVLSEAPGEPPPAPEPPSGGIMEKLQGIAEEPEIQMV

SEQ ID NO: 38675 - protein, 100 aa, Homo sapiens
  Payload ID: 7724
  Gene Symbol: HINFP
  Gene Name: histone H4 transcription factor
  ENSP ID: ENSP00000431468
MPPPGKVPRKENLWLQCEWGSCSFVCSTMEKFFEHVTQHLQQHLHGSGEEEEEEEEDDPLEEEFSCLWQECGFCSLDSSADLIRHVYFHCYHTKLKQWGL

SEQ ID NO: 38676 - protein, 54 aa, Homo sapiens
  Payload ID: 7724
  Gene Symbol: HINFP
  Gene Name: histone H4 transcription factor
  ENSP ID: ENSP00000433836
MPPPGKVPRKENLWLQCEWGSCSFVCSTMEKFFEHVTQHLQQHLHGSGEEEEEE

SEQ ID NO: 38677 - protein, 419 aa, Homo sapiens
  Payload ID: 7724
  Gene Symbol: HINFP
  Gene Name: histone H4 transcription factor
  Uniprot ID: Q9BQA5
  ENSP ID: ENSP00000436815
MPPPGKVPRKENLWLQCEWGSCSFVCSTMEKFFEHVTQHLQQHLHGSGEEEEEEEEDDPLEEEFSCLWQECGFCSLDSSADLIRHVYFHCYHTKLKQWGLQALQSQADLGPCILDFQSRNVIPDIPDHFLCLWEHCENSFDNPEWFYRHVEAHSLCCEYEAVGKDNPVVLCGWKGCTCTFKDRSKLREHLRSHTQEKVVACPTCGGMFANNTKFLDHIRRQTSLDQQHFQCSHCSKRFATERLLRDHMRNHVNHYKCPLCDMTCPLPSSLRNHMRFRHSEDRPFKCDCCDYSCKNLIDLQKHLDTHSEEPAYRCDFENCTFSARSLCSIKSHYRKVHEGDSEPRYKCHVCDKCFTRGNNLTVHLRKKHQFKWPSGHPRFRLGHFCIPLPGFAALYAPTSPGTRNMKMAICGCSWFATRV

SEQ ID NO: 38678 - protein, 242 aa, Homo sapiens
  Payload ID: 7725
  Gene Symbol: HTATIP2
  Gene Name: HIV-1 Tat interactive protein 2, 30kDa
  Uniprot ID: Q9BUP3
  ENSP ID: ENSP00000387876
MAETEALSKLREDFRMQNKSVFILGASGETGRVLLKEILEQGLFSKVTLIGRRKLTFDEEAYKNVNQEVVDFEKLDDYASAFQGHDVGFCCLGTTRGKAGAEGFVRVDRDYVLKSAELAKAGGCKHFNLLSSKGADKSSNFLYLQVKGEVEAKVEELKFDRYSVFRPGVLLCDRQESRPGEWLVRKFFGSLPDSWASGHSVPVVTVVRAMLNNVVRPRDKQMELLENKAIHDLGKAHGSLKP

SEQ ID NO: 38679 - protein, 276 aa, Homo sapiens
  Payload ID: 7725
  Gene Symbol: HTATIP2
  Gene Name: HIV-1 Tat interactive protein 2, 30kDa
  Uniprot ID: Q9BUP3
  ENSP ID: ENSP00000392985
MAGPAALSAAAAAALAAALLLLRREDPGPGAGPSMAETEALSKLREDFRMQNKSVFILGASGETGRVLLKEILEQGLFSKVTLIGRRKLTFDEEAYKNVNQEVVDFEKLDDYASAFQGHDVGFCCLGTTRGKAGAEGFVRVDRDYVLKSAELAKAGGCKHFNLLSSKGADKSSNFLYLQVKGEVEAKVEELKFDRYSVFRPGVLLCDRQESRPGEWLVRKFFGSLPDSWASGHSVPVVTVVRAMLNNVVRPRDKQMELLENKAIHDLGKAHGSLKP

SEQ ID NO: 38680 - protein, 242 aa, Homo sapiens; identical to SEQ ID NO: 38678
  Payload ID: 7725
  Gene Symbol: HTATIP2
  Gene Name: HIV-1 Tat interactive protein 2, 30kDa
  Uniprot ID: Q9BUP3
  ENSP ID: ENSP00000394259

SEQ ID NO: 38681 - protein, 242 aa, Homo sapiens; identical to SEQ ID NO: 38678
  Payload ID: 7725
  Gene Symbol: HTATIP2
  Gene Name: HIV-1 Tat interactive protein 2, 30kDa
  Uniprot ID: Q9BUP3
  ENSP ID: ENSP00000397752

SEQ ID NO: 38682 - protein, 133 aa, Homo sapiens
  Payload ID: 7725
  Gene Symbol: HTATIP2
  Gene Name: HIV-1 Tat interactive protein 2, 30kDa
  Uniprot ID: Q9BUP3
  ENSP ID: ENSP00000432107
MAETEALSKLREDFRMQNKSVFILGASGETGRVLLKEILEQGLFSKVTLIGRRKLTFDEEAYKNVNQEVVDFEKLDDYASAFQGHDVGFCCLGTTRGKAGAVRKAYALFPFCWPVISRILFLLTLFLCACCNA

SEQ ID NO: 38683 - protein, 133 aa, Homo sapiens; identical to SEQ ID NO: 38682
  Payload ID: 7725
  Gene Symbol: HTATIP2
  Gene Name: HIV-1 Tat interactive protein 2, 30kDa
  Uniprot ID: Q9BUP3
  ENSP ID: ENSP00000432338

SEQ ID NO: 38684 - protein, 133 aa, Homo sapiens; identical to SEQ ID NO: 38682
  Payload ID: 7725
  Gene Symbol: HTATIP2
  Gene Name: HIV-1 Tat interactive protein 2, 30kDa
  Uniprot ID: Q9BUP3
  ENSP ID: ENSP00000436548

SEQ ID NO: 38685 - protein, 196 aa, Homo sapiens
  Payload ID: 7725
  Gene Symbol: HTATIP2
  Gene Name: HIV-1 Tat interactive protein 2, 30kDa
  ENSP ID: ENSP00000436729
MAETEALSKLREDFRMQNKSVFILGASGETGRVLLKEILEQGLFSKVTLIGRRKLTFDEEAYKNVNQEVVDFEKLDDYASAFQGHDVGFCCLGTTRGKAGAGEVEAKVEELKFDRYSVFRPGVLLCDRQESRPGEWLVRKFFGSLPDSWASGHSVPVVTVVRAMLNNVVRPRDKQMELLENKAIHDLGKAHGSLKP

SEQ ID NO: 38686 - protein, 755 aa, Homo sapiens
  Payload ID: 7726
  Gene Symbol: HTATSF1
  Gene Name: HIV-1 Tat specific factor 1
  Uniprot ID: O43719
  ENSP ID: ENSP00000218364
MSGTNLDGNDEFDEQLRMQELYGDGKDGDTQTDAGGEPDSLGQQPTDTPYEWDLDKKAWFPKITEDFIATYQANYGFSNDGASSSTANVEDVHARTAEEPPQEKAPEPTDARKKGEKRKAESGWFHVEEDRNTNVYVSGLPPDITVDEFIQLMSKFGIIMRDPQTEEFKVKLYKDNQGNLKGDGLCCYLKRESVELALKLLDEDEIRGYKLHVEVAKFQLKGEYDASKKKKKCKDYKKKLSMQQKQLDWRPERRAGPSRMRHERVVIIKNMFHPMDFEDDPLVLNEIREDLRVECSKFGQIRKLLLFDRHPDGVASVSFRDPEEADYCIQTLDGRWFGGRQITAQAWDGTTDYQVEETSREREERLRGWEAFLNAPEANRGLRRSDSVSASERAGPSRARHFSEHPSTSKMNAQETATGMAFEEPIDEKKFEKTEDGGEFEEGASENNAKESSPEKEAEEGCPEKESEEGCPKRGFEGSCSQKESEEGNPVRGSEEDSPKKESKKKTLKNDCEENGLAKESEDDLNKESEEEVGPTKESEEDDSEKESDEDCSEKQSEDGSEREFEENGLEKDLDEEGSEKELHENVLDKELEENDSENSEFEDDGSEKVLDEEGSEREFDEDSDEKEEEEDTYEKVFDDESDEKEDEEYADEKGLEAADKKAEEGDADEKLFEESDDKEDEDADGKEVEDADEKLFEDDDSNEKLFDEEEDSSEKLFDDSDERGTLGGFGSVEEGPLSTGSSFILSSDDDDDDI

SEQ ID NO: 38687 - protein, 244 aa, Homo sapiens
  Payload ID: 7726
  Gene Symbol: HTATSF1
  Gene Name: HIV-1 Tat specific factor 1
  ENSP ID: ENSP00000411381
MSGTNLDGNDEFDEQLRMQELYGDGKDGDTQTDAGGEPDSLGQQPTDTPYEWDLDKKAWFPKITEDFIATYQANYGFSNDGASSSTANVEDVHARTAEEPPQEKAPEPTDARKKGEKRKAESGWFHVEEDRNTNVYVSGLPPDITVDEFIQLMSKFGIIMRDPQTEEFKVKLYKDNQGNLKGDGLCCYLKRESVELALKLLDEDEIRGYKLHVEVAKFQLKGEYDASKKKKKCKDYKKKLSMQQ

SEQ ID NO: 38688 - protein, 223 aa, Homo sapiens
  Payload ID: 7726
  Gene Symbol: HTATSF1
  Gene Name: HIV-1 Tat specific factor 1
  ENSP ID: ENSP00000412420
MSGTNLDGNDEFDEQLRMQELYGDGKDGDTQTDAGGEPDSLGQQPTDTPYEWDLDKKAWFPKITEDFIATYQANYGFSNDGASSSTANVEDVHARTAEEPPQEKAPEPTDARKKGEKRKAESGWFHVEEDRNTNVYVSGLPPDITVDEFIQLMSKFGIIMRDPQTEEFKVKLYKDNQGNLKGDGLCCYLKRESVELALKLLDEDEIRGYKLHVEVAKFQLKGE

SEQ ID NO: 38689 - protein, 755 aa, Homo sapiens; identical to SEQ ID NO: 38686
  Payload ID: 7726
  Gene Symbol: HTATSF1
  Gene Name: HIV-1 Tat specific factor 1
  Uniprot ID: O43719
  ENSP ID: ENSP00000442699

SEQ ID NO: 38690 - protein, 659 aa, Homo sapiens
  Payload ID: 7727
  Gene Symbol: HKR1
  Gene Name: HKR1, GLI-Kruppel zinc finger family member
  Uniprot ID: P10072
  ENSP ID: ENSP00000315505
MRVNHTVSTMLPTCMVHRQTMSCSGAGGITAFVAFRDVAVYFTQEEWRLLSPAQRTLHREVMLETYNHLVSLEIPSSKPKLIAQLERGEAPWREERKCPLDLCPESKPEIQLSPSCPLIFSSQQALSQHVWLSHLSQLFSSLWAGNPLHLGKHYPEDQKQQQDPFCFSGKAEWIQEGEDSRLLFGRVSKNGTSKALSSPPEEQQPAQSKEDNTVVDIGSSPERRADLEETDKVLHGLEVSGFGEIKYEEFGPGFIKESNLLSLQKTQTGETPYMYTEWGDSFGSMSVLIKNPRTHSGGKPYVCRECGRGFTWKSNLITHQRTHSGEKPYVCKDCGRGFTWKSNLFTHQRTHSGLKPYVCKECGQSFSLKSNLITHQRAHTGEKPYVCRECGRGFRQHSHLVRHKRTHSGEKPYICRECEQGFSQKSHLIRHLRTHTGEKPYVCTECGRHFSWKSNLKTHQRTHSGVKPYVCLECGQCFSLKSNLNKHQRSHTGEKPFVCTECGRGFTRKSTLSTHQRTHSGEKPFVCAECGRGFNDKSTLISHQRTHSGEKPFMCRECGRRFRQKPNLFRHKRAHSGAFVCRECGQGFCAKLTLIKHQRAHAGGKPHVCRECGQGFSRQSHLIRHQRTHSGEKPYICRKCGRGFSRKSNLIRHQRTHSG

SEQ ID NO: 38691 - protein, 640 aa, Homo sapiens
  Payload ID: 7727
  Gene Symbol: HKR1
  Gene Name: HKR1, GLI-Kruppel zinc finger family member
  Uniprot ID: P10072
  ENSP ID: ENSP00000375994
MATGLLRAKKEAFVAFRDVAVYFTQEEWRLLSPAQRTLHREVMLETYNHLVSLEIPSSKPKLIAQLERGEAPWREERKCPLDLCPESKPEIQLSPSCPLIFSSQQALSQHVWLSHLSQLFSSLWAGNPLHLGKHYPEDQKQQQDPFCFSGKAEWIQEGEDSRLLFGRVSKNGTSKALSSPPEEQQPAQSKEDNTVVDIGSSPERRADLEETDKVLHGLEVSGFGEIKYEEFGPGFIKESNLLSLQKTQTGETPYMYTEWGDSFGSMSVLIKNPRTHSGGKPYVCRECGRGFTWKSNLITHQRTHSGEKPYVCKDCGRGFTWKSNLFTHQRTHSGLKPYVCKECGQSFSLKSNLITHQRAHTGEKPYVCRECGRGFRQHSHLVRHKRTHSGEKPYICRECEQGFSQKSHLIRHLRTHTGEKPYVCTECGRHFSWKSNLKTHQRTHSGVKPYVCLECGQCFSLKSNLNKHQRSHTGEKPFVCTECGRGFTRKSTLSTHQRTHSGEKPFVCAECGRGFNDKSTLISHQRTHSGEKPFMCRECGRRFRQKPNLFRHKRAHSGAFVCRECGQGFCAKLTLIKHQRAHAGGKPHVCRECGQGFSRQSHLIRHQRTHSGEKPYICRKCGRGFSRKSNLIRHQRTHSG

SEQ ID NO: 38692 - protein, 386 aa, Homo sapiens
  Payload ID: 7727
  Gene Symbol: HKR1
  Gene Name: HKR1, GLI-Kruppel zinc finger family member
  ENSP ID: ENSP00000437774
MYTEWGDSFGSMSVLIKNPRTHSGGKPYVCRECGRGFTWKSNLITHQRTHSGEKPYVCKDCGRGFTWKSNLFTHQRTHSGLKPYVCKECGQSFSLKSNLITHQRAHTGEKPYVCRECGRGFRQHSHLVRHKRTHSGEKPYICRECEQGFSQKSHLIRHLRTHTGEKPYVCTECGRHFSWKSNLKTHQRTHSGVKPYVCLECGQCFSLKSNLNKHQRSHTGEKPFVCTECGRGFTRKSTLSTHQRTHSGEKPFVCAECGRGFNDKSTLISHQRTHSGEKPFMCRECGRRFRQKPNLFRHKRAHSGAFVCRECGQGFCAKLTLIKHQRAHAGGKPHVCRECGQGFSRQSHLIRHQRTHSGEKPYICRKCGRGFSRKSNLIRHQRTHSG

SEQ ID NO: 38693 - protein, 598 aa, Homo sapiens
  Payload ID: 7727
  Gene Symbol: HKR1
  Gene Name: HKR1, GLI-Kruppel zinc finger family member
  ENSP ID: ENSP00000438261
MLETYNHLVSLEIPSSKPKLIAQLERGEAPWREERKCPLDLCPESKPEIQLSPSCPLIFSSQQALSQHVWLSHLSQLFSSLWAGNPLHLGKHYPEDQKQQQDPFCFSGKAEWIQEGEDSRLLFGRVSKNGTSKALSSPPEEQQPAQSKEDNTVVDIGSSPERRADLEETDKVLHGLEVSGFGEIKYEEFGPGFIKESNLLSLQKTQTGETPYMYTEWGDSFGSMSVLIKNPRTHSGGKPYVCRECGRGFTWKSNLITHQRTHSGEKPYVCKDCGRGFTWKSNLFTHQRTHSGLKPYVCKECGQSFSLKSNLITHQRAHTGEKPYVCRECGRGFRQHSHLVRHKRTHSGEKPYICRECEQGFSQKSHLIRHLRTHTGEKPYVCTECGRHFSWKSNLKTHQRTHSGVKPYVCLECGQCFSLKSNLNKHQRSHTGEKPFVCTECGRGFTRKSTLSTHQRTHSGEKPFVCAECGRGFNDKSTLISHQRTHSGEKPFMCRECGRRFRQKPNLFRHKRAHSGAFVCRECGQGFCAKLTLIKHQRAHAGGKPHVCRECGQGFSRQSHLIRHQRTHSGEKPYICRKCGRGFSRKSNLIRHQRTHSG

SEQ ID NO: 38694 - protein, 22 aa, Homo sapiens
  Payload ID: 7727
  Gene Symbol: HKR1
  Gene Name: HKR1, GLI-Kruppel zinc finger family member
  ENSP ID: ENSP00000465297
MLETYNHLVSLEIPSSKPKLIA

SEQ ID NO: 38695 - protein, 91 aa, Homo sapiens
  Payload ID: 7727
  Gene Symbol: HKR1
  Gene Name: HKR1, GLI-Kruppel zinc finger family member
  ENSP ID: ENSP00000465862
MLETYNHLVSLEIPSSKPKLIAQLERGEAPWREERKCPLDLCPDEVSLCCLGWSAVARSRLTATSTSWFQAVLCLSLPISWDYRIEARNST

SEQ ID NO: 38696 - protein, 107 aa, Homo sapiens
  Payload ID: 7727
  Gene Symbol: HKR1
  Gene Name: HKR1, GLI-Kruppel zinc finger family member
  ENSP ID: ENSP00000465884
MLETYNHLVSLEIPSSKPKLIAQLERGEAPWREERKCPLDLCPESKPEIQLSPSCPLIFSSQQALSQHVWLSHLSQLFSSLWAGNPLHLGKHYPEDQKQQQDPFCFS

SEQ ID NO: 38697 - protein, 91 aa, Homo sapiens
  Payload ID: 7727
  Gene Symbol: HKR1
  Gene Name: HKR1, GLI-Kruppel zinc finger family member
  ENSP ID: ENSP00000465899
MLETYNHLVSLEIPSSKPKLIAQLERGEAPWREERKCPLDLCPDGALLCCQAGIQWCYIGSLQPLPPGFKQFPCLSLLSSWDYRIEARNST

SEQ ID NO: 38698 - protein, 77 aa, Homo sapiens
  Payload ID: 7727
  Gene Symbol: HKR1
  Gene Name: HKR1, GLI-Kruppel zinc finger family member
  ENSP ID: ENSP00000466360
MLETYNHLVSLEIPSSKPKLIAQLERGEAPWREERKCPLDLCPESKPEIQLSPSCPLIFSSQQALSQHVWLSHLSQL

SEQ ID NO: 38699 - protein, 386 aa, Homo sapiens; identical to SEQ ID NO: 38692
  Payload ID: 7727
  Gene Symbol: HKR1
  Gene Name: HKR1, GLI-Kruppel zinc finger family member
  ENSP ID: ENSP00000466467

SEQ ID NO: 38700 - protein, 171 aa, Homo sapiens
  Payload ID: 7727
  Gene Symbol: HKR1
  Gene Name: HKR1, GLI-Kruppel zinc finger family member
  ENSP ID: ENSP00000466472
MATGLLRAKKEAFVAFRDVAVYFTQEEWRLLSPAQRTLHREVMLETYNHLVSLEIPSSKPKLIAQLERGEAPWREERKCPLDLCPDGALLCCQAGIQWCYIGSLQPLPPGFKQFPCLSLLSSWDYRCTPPHLANFLYFSRDGVSPCWPGWSQSPDLVIHPPQPPKVLGLQA

SEQ ID NO: 38701 - protein, 132 aa, Homo sapiens
  Payload ID: 7727
  Gene Symbol: HKR1
  Gene Name: HKR1, GLI-Kruppel zinc finger family member
  ENSP ID: ENSP00000466498
MGIGCSGDFCDIPDPNCGALERTALHFVGRVFPPRPLLFLFTSPDLSSETLPFSRKSTQETRKMATGLLRAKKEKFHLLNQNSLLSWSEGKRPGERRENVHWTSVQGEWFQLSPIQYEVGCRSVTDNSSYFE

SEQ ID NO: 38702 - protein, 41 aa, Homo sapiens
  Payload ID: 7727
  Gene Symbol: HKR1
  Gene Name: HKR1, GLI-Kruppel zinc finger family member
  ENSP ID: ENSP00000466533
MATGLLRAKKESFALVAQAGVQWRNLGLPQVTGITGMRHHT

SEQ ID NO: 38703 - protein, 46 aa, Homo sapiens
  Payload ID: 7727
  Gene Symbol: HKR1
  Gene Name: HKR1, GLI-Kruppel zinc finger family member
  ENSP ID: ENSP00000466856
MLETYNHLVSLEIPSSKPKLIAQLERGEAPWREERKCPLDLCPDTE

SEQ ID NO: 38704 - protein, 641 aa, Homo sapiens
  Payload ID: 7727
  Gene Symbol: HKR1
  Gene Name: HKR1, GLI-Kruppel zinc finger family member
  ENSP ID: ENSP00000467562
MATGLLRAKKEAFVAFRDVAVYFTQEEWRLLSPAQRTLHREVMLETYNHLVSLEIPSSKPKLIAQLERGEAPWREERKCPLDLCPAESKPEIQLSPSCPLIFSSQQALSQHVWLSHLSQLFSSLWAGNPLHLGKHYPEDQKQQQDPFCFSGKAEWIQEGEDSRLLFGRVSKNGTSKALSSPPEEQQPAQSKEDNTVVDIGSSPERRADLEETDKVLHGLEVSGFGEIKYEEFGPGFIKESNLLSLQKTQTGETPYMYTEWGDSFGSMSVLIKNPRTHSGGKPYVCRECGRGFTWKSNLITHQRTHSGEKPYVCKDCGRGFTWKSNLFTHQRTHSGLKPYVCKECGQSFSLKSNLITHQRAHTGEKPYVCRECGRGFRQHSHLVRHKRTHSGEKPYICRECEQGFSQKSHLIRHLRTHTGEKPYVCTECGRHFSWKSNLKTHQRTHSGVKPYVCLECGQCFSLKSNLNKHQRSHTGEKPFVCTECGRGFTRKSTLSTHQRTHSGEKPFVCAECGRGFNDKSTLISHQRTHSGEKPFMCRECGRRFRQKPNLFRHKRAHSGAFVCRECGQGFCAKLTLIKHQRAHAGGKPHVCRECGQGFSRQSHLIRHQRTHSGEKPYICRKCGRGFSRKSNLIRHQRTHSG

SEQ ID NO: 38705 - protein, 54 aa, Homo sapiens
  Payload ID: 7727
  Gene Symbol: HKR1
  Gene Name: HKR1, GLI-Kruppel zinc finger family member
  ENSP ID: ENSP00000467822
MLETYNHLVSLEIPSSKPKLIAQLERGEAPWREERKCPLDLCPGGMVSAFAHSV

SEQ ID NO: 38706 - protein, 127 aa, Homo sapiens
  Payload ID: 7727
  Gene Symbol: HKR1
  Gene Name: HKR1, GLI-Kruppel zinc finger family member
  ENSP ID: ENSP00000468176
MATGLLRAKKEEEWRLLSPAQRTLHREVMLETYNHLVSLEIPSSKPKLIAQLERGEAPWREERKCPLDLCPAESKPEIQLSPSCPLIFSSQQALSQHVWLSHLSQLFSSLWAGNPLHLGKHYPEDQK

SEQ ID NO: 38707 - protein, 37 aa, Homo sapiens
  Payload ID: 7727
  Gene Symbol: HKR1
  Gene Name: HKR1, GLI-Kruppel zinc finger family member
  ENSP ID: ENSP00000468528
MRVNHTVSTMLPTCMVHRQTMSCSGAGGITVVLNVLK

SEQ ID NO: 38708 - protein, 21 aa, Homo sapiens
  Payload ID: 7727
  Gene Symbol: HKR1
  Gene Name: HKR1, GLI-Kruppel zinc finger family member
  ENSP ID: ENSP00000468572
MLETYNHLVSLEIPSSKPKLI

SEQ ID NO: 38709 - protein, 189 aa, Homo sapiens
  Payload ID: 7728
  Gene Symbol: HCG27
  Gene Name: HLA complex group 27 (non-protein coding)
  ENSP ID: ENSP00000453364
  MOD_RES (1)..(1): Any amino acid
XFSTHLSPNPSWCFKRVKIPDRAPGWTRNYCPAGLHFHSGRWLVVPDKEDPEGNHTLPCRAPGFSSAKLTLTRLQEGKEPTPDSRLKGTRTREMRHTRAGQLWGSFQRGAEIRLPGGAPGPGGAPQCDWVKCFQRTRVEVGGISSRPCRHLPQNPRAPPSSLLNGNAGDVLSHPLSTHTSPLIWKFFSL

SEQ ID NO: 38710 - protein, 163 aa, Homo sapiens
  Payload ID: 7728
  Gene Symbol: HCG27
  Gene Name: HLA complex group 27 (non-protein coding)
  ENSP ID: ENSP00000453627
  MOD_RES (1)..(1): Any amino acid
XQWRLKSARRRSPLCWLVVPDKEDPEGNHTLPCRAPGFSSAKLTLTRLQEGKEPTPDSRLKGTRTREMRHTRAGQLWGSFQRGAEIRLPGGAPGPGGAPQCDWVKCFQRTRVEVGGISSRPCRHLPQNPRAPPSSLLNGNAGDVLSHPLSTHTSPLIWKFFSL

SEQ ID NO: 38711 - protein, 266 aa, Homo sapiens
  Payload ID: 7729
  Gene Symbol:
  Gene Name: HLA-DRB4
  ENSP ID: ENSP00000412031
MVCLKLPGGSCMAALTVTLTVLSSPLALAGDTQPRFLEQAKCECHFLNGTERVWNLIRYIYNQEEYARYNSDLGEYQAVTELGRPDAEYWNSQKDLLERRRAEVDTYCRYNYGVVESFTVQRRVQPKVTVYPSKTQPLQHHNLLVCSVNGFYPGSIEVRWFRNGQEEKAGVVSTGLIQNGDWTFQTLVMLETVPRSGEVYTCQVEHPSMMSPLTVQWSARSESAQSKMLSGVGGFVLGLLFLGTGLFIYFRNQKGHSGLQPTGLLS

SEQ ID NO: 38712 - protein, 269 aa, Homo sapiens
  Payload ID: 7729
  Gene Symbol:
  Gene Name: HLA-DRB4
  ENSP ID: ENSP00000483579
MSWKKALRIPGGLRAATVTLMLAMLSTPVAEGRDSPEDFVYQFKAMCYFTNGTERVRYVTRYIYNREEYARFDSDVEVYRAVTPLGPPDAEYWNSQKEVLERTRAELDTVCRHNYQLELRTTLQRRGEPKVTVYPSKTQPLQHHNLLVCSVNGFYPGSIEVRWFRNGQEEKAGVVSTGLIQNGDWTFQTLVMLETVPRSGEVYTCQVEHPSMMSPLTVQWSARSESAQSKMLSGVGGFVLGLLFLGTGLFIYFRNQKGHSGLQPTGLLS

SEQ ID NO: 38713 - protein, 1292 aa, Homo sapiens
  Payload ID: 7730
  Gene Symbol: HMGXB3
  Gene Name: HMG box domain containing 3
  Uniprot ID: Q12766
  ENSP ID: ENSP00000421917
MDASYDGTEVTVVMEEIEEAYCYTSPGPPKKKKKYKIHGEKTKKPRSAYLLYYYDIYLKVQQELPHLPQSEINKKISESWRLLSVAERSYYLEKAKLEKEGLDPNSKLSALTAVVPDIPGFRKILPRSDYIIIPKSSLQEDRSCPQLELCVAQNQMSPKGPPLVSNTAPETVPSHAGMAEQCLAVEALAEEVGALTQSGAVQEIATSEILSQDVLLEDASLEVGESHQPYQTSLVIEETLVNGSPDLPTGSLAVPHPQVGESVSVVTVMRDSSESSSSAPATQFIMLPLPAYSVVENPTSIKLTTTYTRRGHGTCTSPGCSFTYVTRHKPPKCPTCGNFLGGKWIPKEKPAKVKVELASGVSSKGSVVKRNQQPVTTEQNSSKENASKLTLENSEAVSQLLNVAPPREVGEESEWEEVIISDAHVLVKEAPGNCGTAVTKTPVVKSGVQPEVTLGTTDNDSPGADVPTPSEGTSTSSPLPAPKKPTGADLLTPGSRAPELKGRARGKPSLLAAARPMRAILPAPVNVGRGSSMGLPRARQAFSLSDKTPSVRTCGLKPSTLKQLGQPIQQPSGPGEVKLPSGPSNRTSQVKVVEVKPDMFPPYKYSCTVTLDLGLATSRGRGKCKNPSCSYVYTNRHKPRICPSCGVNLAKDRTEKTTKAIEVSSPLPDVLNATEPLSTAQREIQRQSTLQLLRKVLQIPENESELAEVFALIHELNSSRLILSNVSEETVTIEQTSWSNYYESPSTQCLLCSSPLFKGGQNSLAGPQECWLLTASRLQTVTAQVKMCLNPHCLALHSFIDIYTGLFNVGNKLLVSLDLLFAIRNQIKLGEDPRVSINVVLKSVQEQTEKTLTSEELSQLQELLCNGYWAFECLTVRDYNDMICGICGVAPKVEMAQRSEENVLALKSVEFTWPEFLGSNEVNVEDFWATMETEVIEQVAFPASIPITKFDASVIAPFFPPLMRGAVVVNTEKDKNLDVQPVPGSGSALVRLLQEGTCKLDEIGSYSEEKLQHLLRQCGIPFGAEDSKDQLCFSLLALYESVQNGARAIRPPRHFTGGKIYKVCPHQVVCGSKYLVRGESARDHVDLLASSRHWPPVYVVDMATSVALCADLCYPELTNQMWGRNQGCFSSPTEPPVSVSCPELLDQHYTVDMTETEHSIQHPVTKTATRRIVHAGLQPNPGDPSAGHHSLALCPELAPYATILASIVDSKPNGVRQRPIAFDNATHYYLYNRLMDFLTSREIVNRQIHDIVQSCQPGEVVIRDTLYRLGVAQIKTETEEEGEEEEVAAVAE

SEQ ID NO: 38714 - protein, 1260 aa, Homo sapiens
  Payload ID: 7730
  Gene Symbol: HMGXB3
  Gene Name: HMG box domain containing 3
  ENSP ID: ENSP00000422231
MDASYDGTEVTVVMEEIEEAYCYTSPGPPKKKKKYKIHGEKTKKPRSAYLLYYYDIYLKVQQELPHLPQSEINKKISESWRLLSVAERSYYLEKAKLEKEGLDPNSKLSALTAVVPDIPGFRKILPRSDYIIIPKSSLQEDRSCPQLELCVAQNQMSPKGPPLVSNTAPETVPSHAGMAEQCLAVEALAEEVGALTQSGAVQEIATSEILSQDVLLEDASLEVGESHQPYQTSLVIEETLVNGSPDLPTGSLAVPHPQVGESVSVVTVMRDSSESSSSAPATQFIMLPLPAYSVVENPTSIKLTTTYTRRGHGTCTSPGCSFTYVTRHKPPKCPTCGNFLGGKWIPKEKPAKVKVELASGVSSKGSVVKRNQQPVTTEQNSSKENASKLTLENSEAEAPGNCGTAVTKTPVVKSGVQPEVTLGTTDNDSPGADVPTPSEGTSTSSPLPAPKKPTGADLLTPGSRAPELKGRARGKPSLLAAARPMRAILPAPVNVGRGSSMGLPRARQAFSLSDKTPSVRTCGLKPSTLKQLGQPIQQPSGPGEVKLPSGPSNRTSQVKVVEVKPDMFPPYKYSCTVTLDLGLATSRGRGKCKNPSCSYVYTNRHKPRICPSCGVNLAKDRTEKTTKAIEVSSPLPDVLNATEPLSTAQREIQRQSTLQLLRKVLQIPENESELAEVFALIHELNSSRLILSNVSEETVTIEQTSWSNYYESPSTQCLLCSSPLFKGGQNSLAGPQECWLLTASRLQTVTAQVKMCLNPHCLALHSFIDIYTGLFNVGNKLLVSLDLLFAIRNQIKLGEDPRVSINVVLKSVQEQTEKTLTSEELSQLQELLCNGYWAFECLTVRDYNDMICGICGVAPKVEMAQRSEENVLALKSVEFTWPEFLGSNEVNVEDFWATMETEVIEQVAFPASIPITKFDASVIAPFFPPLMRGAVVVNTEKDKNLDVQPVPGSGSALVRLLQEGTCKLDEIGSYSEEKLQHLLRQCGIPFGAEDSKDQLCFSLLALYESVQNGARAIRPPRHFTGGKIYKVCPHQVVCGSKYLVRGESARDHVDLLASSRHWPPVYVVDMATSVALCADLCYPELTNQMWGRNQGCFSSPTEPPVSVSCPELLDQHYTVDMTETEHSIQHPVTKTATRRIVHAGLQPNPGDPSAGHHSLALCPELAPYATILASIVDSKPNGVRQRPIAFDNATHYYLYNRLMDFLTSREIVNRQIHDIVQSCQPGEVVIRDTLYRLGVAQIKTETEEEGEEEEVAAVAE

SEQ ID NO: 38715 - protein, 112 aa, Homo sapiens
  Payload ID: 7730
  Gene Symbol: HMGXB3
  Gene Name: HMG box domain containing 3
  ENSP ID: ENSP00000426631
  MOD_RES (1)..(1): Any amino acid
XLKQLGQPIQQPSGPGEVKLPSGPSNRTSQVKVVEVKPDMFPPYKYSCTVTLDLGLATSRGRGKCKNPSCSYVYTNRHKPRICPSCGVNLAKDRTEKTTKAIVSLMWGTSCW

SEQ ID NO: 38716 - protein, 1538 aa, Homo sapiens
  Payload ID: 7730
  Gene Symbol: HMGXB3
  Gene Name: HMG box domain containing 3
  Uniprot ID: Q12766
  ENSP ID: ENSP00000479027
MQRTQPRPCYLNAPQQCPGAERPGRPTAGSHSFLLRPGPLAGSSPFALLDPLQAFEQFVWVRSQARAGLLRLRQGSHAVTRCRPLPVRREGRRDGSPWRSVVCRYCRCSRQTGASVTTVSLPSSSSSPGLDPRGPRQASVRSLRSEPVLLFLPFRTPYRDSEEGKREGLSRLRAVCRRAGPRGRGSFSPRDARASPRLHFLVAAVTTGAASRRQRGARVRQPSPSSSRRAKRLRECERRSLHAPPAMDASYDGTEVTVVMEEIEEAYCYTSPGPPKKKKKYKIHGEKTKKPRSAYLLYYYDIYLKVQQELPHLPQSEINKKISESWRLLSVAERSYYLEKAKLEKEGLDPNSKLSALTAVVPDIPGFRKILPRSDYIIIPKSSLQEDRSCPQLELCVAQNQMSPKGPPLVSNTAPETVPSHAGMAEQCLAVEALAEEVGALTQSGAVQEIATSEILSQDVLLEDASLEVGESHQPYQTSLVIEETLVNGSPDLPTGSLAVPHPQVGESVSVVTVMRDSSESSSSAPATQFIMLPLPAYSVVENPTSIKLTTTYTRRGHGTCTSPGCSFTYVTRHKPPKCPTCGNFLGGKWIPKEKPAKVKVELASGVSSKGSVVKRNQQPVTTEQNSSKENASKLTLENSEAVSQLLNVAPPREVGEESEWEEVIISDAHVLVKEAPGNCGTAVTKTPVVKSGVQPEVTLGTTDNDSPGADVPTPSEGTSTSSPLPAPKKPTGADLLTPGSRAPELKGRARGKPSLLAAARPMRAILPAPVNVGRGSSMGLPRARQAFSLSDKTPSVRTCGLKPSTLKQLGQPIQQPSGPGEVKLPSGPSNRTSQVKVVEVKPDMFPPYKYSCTVTLDLGLATSRGRGKCKNPSCSYVYTNRHKPRICPSCGVNLAKDRTEKTTKAIEVSSPLPDVLNATEPLSTAQREIQRQSTLQLLRKVLQIPENESELAEVFALIHELNSSRLILSNVSEETVTIEQTSWSNYYESPSTQCLLCSSPLFKGGQNSLAGPQECWLLTASRLQTVTAQVKMCLNPHCLALHSFIDIYTGLFNVGNKLLVSLDLLFAIRNQIKLGEDPRVSINVVLKSVQEQTEKTLTSEELSQLQELLCNGYWAFECLTVRDYNDMICGICGVAPKVEMAQRSEENVLALKSVEFTWPEFLGSNEVNVEDFWATMETEVIEQVAFPASIPITKFDASVIAPFFPPLMRGAVVVNTEKDKNLDVQPVPGSGSALVRLLQEGTCKLDEIGSYSEEKLQHLLRQCGIPFGAEDSKDQLCFSLLALYESVQNGARAIRPPRHFTGGKIYKVCPHQVVCGSKYLVRGESARDHVDLLASSRHWPPVYVVDMATSVALCADLCYPELTNQMWGRNQGCFSSPTEPPVSVSCPELLDQHYTVDMTETEHSIQHPVTKTATRRIVHAGLQPNPGDPSAGHHSLALCPELAPYATILASIVDSKPNGVRQRPIAFDNATHYYLYNRLMDFLTSREIVNRQIHDIVQSCQPGEVVIRDTLYRLGVAQIKTETEEEGEEEEVAAVAE

SEQ ID NO: 38717 - protein, 601 aa, Homo sapiens
  Payload ID: 7731
  Gene Symbol: HMGXB4
  Gene Name: HMG box domain containing 4
  Uniprot ID: Q9UGU5
  ENSP ID: ENSP00000216106
MAYDDSVKKEDCFDGDHTFEDIGLAAGRSQREKKRSYKDFLREEEEIAAQVRNSSKKKLKDSELYFLGTDTHKKKRKHSSDDYYYGDISSLESSQKKKKKSSPQSTDTAMDLLKAITSPLAAGSKPSKKTGEKSSGSSSHSESKKEHHRKKVSGSSGELPLEDGGSHKSKKMKPLYVNTETLTLREPDGLKMKLILSPKEKGSSSVDEESFQYPSQQATVKKSSKKSARDEQGALLLGHELQSFLKTARKKHKSSSDAHSSPGPEGCGSDASQFAESHSANLDLSGLEPILVESDSSSGGELEAGELVIDDSYREIKKKKKSKKSKKKKDKEKHKEKRHSKSKRSLGLSAVPVGEVTVTSGPPPSIPYAGAAAPPLPLPGLHTDGHSEKKKKKEEKDKERERGEKPKKKNMSAYQVFCKEYRVTIVADHPGIDFGELSKKLAEVWKQLPEKDKLIWKQKAQYLQHKQNKAEATTVKRKASSSEGSMKVKASSVGVLSPQKKSPPTTMLLPASPAKAPETEPIDVAAHLQLLGESLSLIGHRLQETEGMVAVSGSLSVLLDSIICALGPLACLTTQLPELNGCPKQVLSNTLDNIAYIMPGL

SEQ ID NO: 38718 - protein, 92 aa, Homo sapiens
  Payload ID: 7731
  Gene Symbol: HMGXB4
  Gene Name: HMG box domain containing 4
  ENSP ID: ENSP00000395532
MAYDDSVKKEDCFDGDHTFEDIGLAAGRSQREKKRSYKDFLREEEEIAAQVRNSSKKKLKDSELYFLGTDTHKKKRKHSSDDYYYGGQWFLF

SEQ ID NO: 38719 - protein, 285 aa, Homo sapiens
  Payload ID: 7731
  Gene Symbol: HMGXB4
  Gene Name: HMG box domain containing 4
  ENSP ID: ENSP00000401658
MDLLKAITSPLAAGSKPSKKTGEKSSGSSSHSESKKEHHRKKVSGSSGELPLEDGGSHKSKKMKPLYVNTETLTLREPDGLKMKLILSPKEKGSSSVDEESFQYPSQQATVKKSSKKSARDEQGALLLGHELQSFLKTARKKHKSSSDAHSSPGPEGCGSDASQFAESHSANLDLSGLEPILVESDSSSGGELEAGELVIDDSYREIKKKKKSKKSKKKKDKEKHKEKRHSKSKRSLGLSAVPVGEVTVTSGPPPSIPYAGAAAPPLPLPGLHTDGHSEKKKKKE

SEQ ID NO: 38720 - protein, 284 aa, Homo sapiens
  Payload ID: 7731
  Gene Symbol: HMGXB4
  Gene Name: HMG box domain containing 4
  ENSP ID: ENSP00000415500
MDLLKAITSPLAAGSKPSKKTGEKSSGSSSHSESKKEHHRKKVSGSSGELPLEDGGSHKSKKMKPLYVNTETLTLREPDGLKMKLILSPKEKGSSSVDEESFQYPSQQATVKKSSKKSARDEQGALLLGHELQSFLKTARKKHKSSSDAHSSPGPEGCGSDASQFAESHSANLDLSGLEPILVESDSSSGGELEAGELVIDDSYREIKKKKKSKKSKKKKDKEKHKEKRHSKSKRSLGLSAVPVGEVTVTSGPPPSIPYAGAAAPPLPLPGLHTDGHSEKKKKK

SEQ ID NO: 38721 - protein, 514 aa, Homo sapiens
  Payload ID: 7732
  Gene Symbol: HBP1
  Gene Name: HMG-box transcription factor 1
  Uniprot ID: O60381
  ENSP ID: ENSP00000222574
MVWEVKTNQMPNAVQKLLLVMDKRASGMNDSLELLQCNENLPSSPGYNSCDEHMELDDLPELQAVQSDPTQSGMYQLSSDVSHQEYPRSSWNQNTSDIPETTYRENEVDWLTELANIATSPQSPLMQCSFYNRSSPVHIIATSKSLHSYARPPPVSSSSKSEPAFPHHHWKEETPVRHERANSESESGIFCMSSLSDDDDLGWCNSWPSTVWHCFLKGTRLCFHKGSNKEWQDVEDFARAEGCDNEEDLQMGIHKGYGSDGLKLLSHEESVSFGESVLKLTFDPGTVEDGLLTVECKLDHPFYVKNKGWSSFYPSLTVVQHGIPCCEVHIGDVCLPPGHPDAINFDDSGVFDTFKSYDFTPMDSSAVYVLSSMARQRRASLSCGGPGGQDFARSGFSKNCGSPGSSQLSSNSLYAKAVKNHSSGTVSATSPNKCKRPMNAFMLFAKKYRVEYTQMYPGKDNRAISVILGDRWKKMKNEERRMYTLEAKALAEEQKRLNPDCWKRKRTNSGSQQH

SEQ ID NO: 38722 - protein, 108 aa, Homo sapiens
  Payload ID: 7732
  Gene Symbol: HBP1
  Gene Name: HMG-box transcription factor 1
  ENSP ID: ENSP00000417631
MVWEVKTNQMPNAVQKLLLVMDKRASGMNDSLELLQCNENLPSSPGYNSCDEHMELDDLPELQAVQSDPTQSGMYQLSSDVSHQEYPRSSWNQNTSDIPETTYRENEV

SEQ ID NO: 38723 - protein, 111 aa, Homo sapiens
  Payload ID: 7732
  Gene Symbol: HBP1
  Gene Name: HMG-box transcription factor 1
  ENSP ID: ENSP00000417927
MVWEVKTNQMPNAVQKLLLVMDKRASGMNDSLELLQCNENLPSSPGYNSCDEHMELDDLPELQAVQSDPTQSGMYQLSSDVSHQEYPRSSWNQNTSDIPETTYRENEVDWL

SEQ ID NO: 38724 - protein, 454 aa, Homo sapiens
  Payload ID: 7732
  Gene Symbol: HBP1
  Gene Name: HMG-box transcription factor 1
  ENSP ID: ENSP00000418017
QMPNAVQKLLLVMDKRASGMNDSLELLQCNENLPSSPGYNSCDEHMELDDLPELQAVQSDPTQSGMYQLSSDVSHQEYPRSSWNQNTSDIPETTYRENEVDWLTELANIATSPQSPLMQCSFYNRSSPVHIIATSKSLHSYARPPPVSSSSKSEPAFPHHHWKEETPVRHERANSESESGIFCMSSLSDDDDLGWCNSWPSTVWHCFLKGTRLCFHKGSNKEWQDVEDFARAEGCDNEEDLQMGIHKGYGSDGLKLLSHEESVSFGESVLKLTFDPGTVEDGLLTVECKLDHPFYVKNKGWSSFYPSLTVVQHGIPCCEVHIGDVCLPPGHPDAINFDDSGVFDTFKSYDFTPMDSSAVYVLSSMARQRRASLSCGGPGGQDFARSGFSKNCGSPGSSQLSSNSLYAKAVKNHSSGTVSATSPNKCKRPMNAFMLFAKKYRVEYTQMYPGKDNR

SEQ ID NO: 38725 - protein, 70 aa, Homo sapiens
  Payload ID: 7732
  Gene Symbol: HBP1
  Gene Name: HMG-box transcription factor 1
  ENSP ID: ENSP00000418022
MVWEVKTNQMPNAVQKLLLVMDKRASGMNDSLELLQCNENLPSSPGYNSCDEHMELDDLPELQAVQSDPT

SEQ ID NO: 38726 - protein, 514 aa, Homo sapiens; identical to SEQ ID NO: 38721
  Payload ID: 7732
  Gene Symbol: HBP1
  Gene Name: HMG-box transcription factor 1
  Uniprot ID: O60381
  ENSP ID: ENSP00000418738

SEQ ID NO: 38727 - protein, 85 aa, Homo sapiens
  Payload ID: 7732
  Gene Symbol: HBP1
  Gene Name: HMG-box transcription factor 1
  ENSP ID: ENSP00000419143
SQLSSNSLYAKAVKNHSSGTVSATSPNKCKRPMNAFMLFAKKYRVEYTQMYPGKDNRRSLAVSPKLESSGTISAHCNLRLPGSKP

SEQ ID NO: 38728 - protein, 124 aa, Homo sapiens
  Payload ID: 7732
  Gene Symbol: HBP1
  Gene Name: HMG-box transcription factor 1
  ENSP ID: ENSP00000420137
MVWEVKTNQMPNAVQKLLLVMDKRASGMNDSLELLQCNENLPSSPGYNSCDEHMELDDLPELQAVQSDPTQSGMYQLSSDVSHQEYPRSSWNQNTSDIPETTYRENEVDWLTELANIATSPQSP

SEQ ID NO: 38729 - protein, 28 aa, Homo sapiens
  Payload ID: 7732
  Gene Symbol: HBP1
  Gene Name: HMG-box transcription factor 1
  ENSP ID: ENSP00000420281
MVWEVKTNQMPNAVQKLLLVMDKRASGM

SEQ ID NO: 38730 - protein, 514 aa, Homo sapiens; identical to SEQ ID NO: 38721
  Payload ID: 7732
  Gene Symbol: HBP1
  Gene Name: HMG-box transcription factor 1
  Uniprot ID: O60381
  ENSP ID: ENSP00000420500

SEQ ID NO: 38731 - protein, 154 aa, Homo sapiens
  Payload ID: 7732
  Gene Symbol: HBP1
  Gene Name: HMG-box transcription factor 1
  ENSP ID: ENSP00000475809
  MOD_RES (1)..(1): Any amino acid
XMDSSAVYVLSSMARQRRASLSCGGPGGQDFARSGFSKNCGSPGSSQLSSNSLYAKAVKNHSSGTVSATSPNKCKRPMNAFMLFAKKYRVEYTQMYPGKDNRAISVILGDRWKKMKNEERRMYTLEAKALAEEQKRLNPDCWKRKRTNSVCFNK

SEQ ID NO: 38732 - protein, 171 aa, Homo sapiens
  Payload ID: 7733
  Gene Symbol:
  Gene Name: HMP19 protein [Source:EntrezGene
  Acc:51617]
  Uniprot ID: Q9Y328
  ENSP ID: ENSP00000307722
MVKLNSNPSEKGTKPPSVEDGFQTVPLITPLEVNHLQLPAPEKVIVKTRTEYQPEQKNKGKFRVPKIAEFTVTILVSLALAFLACIVFLVVYKAFTYDHSCPEGFVYKHKRCIPASLDAYYSSQDPNSRSRFYTVISHYSVAKQSTARAIGPWLSAAAVIHEPKPPKTQGH

SEQ ID NO: 38733 - protein, 94 aa, Homo sapiens
  Payload ID: 7733
  Gene Symbol:
  Gene Name: HMP19 protein [Source:EntrezGene
  Acc:51617]
  ENSP ID: ENSP00000427809
MVKLNSNPSEKGTKPPSVEDGFQTVPLITPLEVNHLQLPAPEKVIVKTRTEYQPEQKNKGKFRVPKIAEFTCLPHSTGPVKVDQDPAAYKYLQE

SEQ ID NO: 38734 - protein, 145 aa, Homo sapiens
  Payload ID: 7733
  Gene Symbol:
  Gene Name: HMP19 protein [Source:EntrezGene
  Acc:51617]
  ENSP ID: ENSP00000429689
MVKLNSNPSEKGTKPPSVEDGFQTVPLITPLEVNHLQLPAPEKVIVKTRTEYQPEQKNKGKFRVPKIAEFTVTILVSLALAFLACIVFLVVYKAFTYDHSCPEGFVYKHKRCIPASLDAYYSSQDPNSRSRFYTVISHYSVAKQS

SEQ ID NO: 38735 - protein, 99 aa, Homo sapiens
  Payload ID: 7733
  Gene Symbol:
  Gene Name: HMP19 protein [Source:EntrezGene
  Acc:51617]
  ENSP ID: ENSP00000429863
MVKLNSNPSEKGTKPPSVEDGFQTVPLITPLEVNHLQLPAPEKVIVKTRTEYQPEQKNKGKFRVPKIAEFTVHRTWHFSTSCRGAGMLDQFQSMKCGWK

SEQ ID NO: 38736 - protein, 158 aa, Homo sapiens
  Payload ID: 7733
  Gene Symbol:
  Gene Name: HMP19 protein [Source:EntrezGene
  Acc:51617]
  ENSP ID: ENSP00000430208
MVKLNSNPSEKGTKPPSVEDGFQTVPLITPLEVNHLQLPAPEKVIVKTRTEYQPEQKNKGKFRVPKIAEFTVTILVSLALAFLACIVFLVVYKAFTYDHSCPEGFVYKHKRCIPASLDAYYSSQDPNSRSRFYTVISHYSVAKQSTARAIGPWLSAAA

SEQ ID NO: 38737 - protein, 171 aa, Homo sapiens; identical to SEQ ID NO: 38732
  Payload ID: 7733
  Gene Symbol:
  Gene Name: HMP19 protein [Source:EntrezGene
  Acc:51617]
  Uniprot ID: Q9Y328
  ENSP ID: ENSP00000431119

SEQ ID NO: 38738 - protein, 631 aa, Homo sapiens
  Payload ID: 7734
  Gene Symbol: HNF1A
  Gene Name: HNF1 homeobox A
  ENSP ID: ENSP00000257555
MVSKLSQLQTELLAALLESGLSKEALIQALGEPGPYLLAGEGPLDKGESCGGGRGELAELPNGLGETRGSEDETDDDGEDFTPPILKELENLSPEEAAHQKAVVETLLQEDPWRVAKMVKSYLQQHNIPQREVVDTTGLNQSHLSQHLNKGTPMKTQKRAALYTWYVRKQREVAQQFTHAGQGGLIEEPTGDELPTKKGRRNRFKWGPASQQILFQAYERQKNPSKEERETLVEECNRAECIQRGVSPSQAQGLGSNLVTEVRVYNWFANRRKEEAFRHKLAMDTYSGPPPGPGPGPALPAHSSPGLPPPALSPSKVHGVRYGQPATSETAEVPSSSGGPLVTVSTPLHQVSPTGLEPSHSLLSTEAKLVSAAGGPLPPVSTLTALHSLEQTSPGLNQQPQNLIMASLPGVMTIGPGEPASLGPTFTNTGASTLVIGLASTQAQSVPVINSMGSSLTTLQPVQFSQPLHPSYQQPLMPPVQSHVTQSPFMATMAQLQSPHALYSHKPEVAQYTHTGLLPQTMLITDTTNLSALASLTPTKQVFTSDTEASSESGLHTPASQATTLHVPSQDPASIQHLQPAHRLSASPTVSSSSLVLYQSSDSSNGQSHLLPSNHSVIETFISTQMASSSQ

SEQ ID NO: 38739 - protein, 41 aa, Homo sapiens
  Payload ID: 7734
  Gene Symbol: HNF1A
  Gene Name: HNF1 homeobox A
  ENSP ID: ENSP00000438565
MVSKLSQLQTELLAALLESGLSKEASTSSPRTSSWPHFLGS

SEQ ID NO: 38740 - protein, 638 aa, Homo sapiens
  Payload ID: 7734
  Gene Symbol: HNF1A
  Gene Name: HNF1 homeobox A
  ENSP ID: ENSP00000438804
MVSKLSQLQTELLAALLESGLSKEALIQALGEPGPYLLAGEGPLDKGESCGGGRGELAELPNGLGETRGSEDETDDDGEDFTPPILKELENLSPEEAAHQKAVVETLLQEDPWRVAKMVKSYLQQHNIPQREVVDTTGLNQSHLSQHLNKGTPMKTQKRAALYTWYVRKQREVAQQFTHAGQGGLIEEPTGDELPTKKGRRNRFKWGPASQQILFQAYERQKNPSKEERETLVEECNRAECIQRGVSPSQAQGLGSNLVTEVRVYNWFANRRKEEAFRHKLAMDTYSGPPPGPGPGPALPAHSSPGLPPPALSPSKVHGVRYGQPATSETAEVPSSSGGPLVTVSTPLHQVSPTGLEPSHSLLSTEAKLVSAAGGPLPPVSTLTALHSLEQTSPGLNQQPQNLIMASLPGVMTIGPGEPASLGPTFTNTGASTLVIGLASTQAQSVPVINSMGSSLTTLQPVQFSQPLHPSYQQPLMPPVQSHVTQSPFMATMAQLQSPHALYSHKPEVAQYTHTGLLPQTMLITDTTNLSALASLTPTKQEAALLPQVFTSDTEASSESGLHTPASQATTLHVPSQDPASIQHLQPAHRLSASPTVSSSSLVLYQSSDSSNGQSHLLPSNHSVIETFISTQMASSSQ

SEQ ID NO: 38741 - protein, 452 aa, Homo sapiens
  Payload ID: 7734
  Gene Symbol: HNF1A
  Gene Name: HNF1 homeobox A
  ENSP ID: ENSP00000439721
MVSKLSQLQTELLAALLESGLSKEALIQALGEPGPYLLAGEGPLDKGESCGGGRGELAELPNGLGETRGSEDETDDDGEDFTPPILKELENLSPEEAAHQKAVVETLLQEDPWRVAKMVKSYLQQHNIPQREVVDTTGLNQSHLSQHLNKGTPMKTQKRAALYTWYVRKQREVAQQFTHAGQGGLIEEPTGDELPTKKGRRNRFKWGPASQQTSPGLNQQPQNLIMASLPGVMTIGPGEPASLGPTFTNTGASTLVIGLASTQAQSVPVINSMGSSLTTLQPVQFSQPLHPSYQQPLMPPVQSHVTQSPFMATMAQLQSPHALYSHKPEVAQYTHTGLLPQTMLITDTTNLSALASLTPTKQVFTSDTEASSESGLHTPASQATTLHVPSQDPASIQHLQPAHRLSASPTVSSSSLVLYQSSDSSNGQSHLLPSNHSVIETFISTQMASSSQ

SEQ ID NO: 38742 - protein, 247 aa, Homo sapiens
  Payload ID: 7734
  Gene Symbol: HNF1A
  Gene Name: HNF1 homeobox A
  Uniprot ID: P20823
  ENSP ID: ENSP00000440361
MVSKLSQLQTELLAALLESGLSKEALIQALGEPGPYLLAGEGPLDKGESCGGGRGELAELPNGLGETRGSEDETDDDGEDFTPPILKELENLSPEEAAHQKAVVETLLQEDPWRVAKMVKSYLQQHNIPQREVVDTTGLNQSHLSQHLNKGTPMKTQKRAALYTWYVRKQREVAQQFTHAGQGGLIEEPTGDELPTKKGRRNRFKWGPASQQILFQAYERQKNPSKEERETLVEECNRCALWTACDQ

SEQ ID NO: 38743 - protein, 662 aa, Homo sapiens
  Payload ID: 7734
  Gene Symbol: HNF1A
  Gene Name: HNF1 homeobox A
  ENSP ID: ENSP00000443112
MVSKLSQLQTELLAALLESGLSKEALIQALGEPGPYLLAGEGPLDKGESCGGGRGELAELPNGLGETRGSEDETDDDGEDFTPPILKELENLSPEEAAHQKAVVETLLQEDPWRVAKMVKSYLQQHNIPQREVVDTTGLNQSHLSQHLNKGTPMKTQKRAALYTWYVRKQREVAQQFTHAGQGGLIEEPTGDELPTKKGRRNRFKWGPASQQILFQAYERQKNPSKEERETLVEECNRAECIQRGVSPSQAQGLGSNLVTEVRVYNWFANRRKEEAFRHKLAMDTYSGPPPGPGPGPALPAHSSPGLPPPALSPSKVHGVRYGQPATSETAEVPSSSGGPLVTVSTPLHQVSPTGLEPSHSLLSTEAKLVSAAGGPLPPVSTLTALHSLEQTSPGLNQQPQNLIMASLPGVMTIGPGEPASLGPTFTNTGASTLVIGLASTQAQSVPVINSMGSSLTTLQPVQFSQPLHPSYQQPLMPPVQSHVTQSPFMATMAQLQSPHALYSHKPEVAQYTHTGLLPQTMLITDTTNLSALASLTPTKQVRSRPAGPPLACDRAPHPHIPRAQEAALLPQVFTSDTEASSESGLHTPASQATTLHVPSQDPASIQHLQPAHRLSASPTVSSSSLVLYQSSDSSNGQSHLLPSNHSVIETFISTQMASSSQ

SEQ ID NO: 38744 - protein, 278 aa, Homo sapiens
  Payload ID: 7734
  Gene Symbol: HNF1A
  Gene Name: HNF1 homeobox A
  Uniprot ID: P20823
  ENSP ID: ENSP00000443964
MVSKLSQLQTELLAALLESGLSKEALIQALGEPGPYLLAGEGPLDKGESCGGGRGELAELPNGLGETRGSEDETDDDGEDFTPPILKELENLSPEEAAHQKAVVETLLQEDPWRVAKMVKSYLQQHNIPQREVVDTTGLNQSHLSQHLNKGTPMKTQKRAALYTWYVRKQREVAQRRNASREGCPHHRHRGWAPTSSRRCVSTTGLPTGAKKKPSGTSWPWTRTAGPPQGQARDLRCPLTAPLACLHLPSPPVRSTVCAMDSLRPVRLQKYPQAAAVP

SEQ ID NO: 38745 - protein, 119 aa, Homo sapiens
  Payload ID: 7734
  Gene Symbol: HNF1A
  Gene Name: HNF1 homeobox A
  Uniprot ID: P20823
  ENSP ID: ENSP00000445445
MVSKLSQLQTELLAALLESGLSKEALIQALGEPGPYLLAGEGPLDKGESCGGGRGELAELPNGLGETRGSEDETDDDGEDFTPPILKELENLSPEEAAHQKAVVETLLQVHPCRAGRAD

SEQ ID NO: 38746 - protein, 356 aa, Homo sapiens
  Payload ID: 7734
  Gene Symbol: HNF1A
  Gene Name: HNF1 homeobox A
  ENSP ID: ENSP00000453965
  MOD_RES (1)..(1): Any amino acid
XWLVGFWGGSGCKEFGLCLPAGRQTQPTRWGRRLAWWTRAAWPCGSRAMVSKLSQLQTELLAALLESGLSKEALIQALGEPGPYLLAGEGPLDKGESCGGGRGELAELPNGLGETRGSEDETDDDGEDFTPPILKELENLSPEEAAHQKAVVETLLQEDPWRVAKMVKSYLQQHNIPQREVVDTTGLNQSHLSQHLNKGTPMKTQKRAALYTWYVRKQREVAQQFTHAGQGGLIEEPTGDELPTKKGRRNRFKWGPASQQILFQAYERQKNPSKEERETLVEECNRAECIQRGVSPSQPQPAEYRSQAGLSSWGPPPPCQHPDSTAQLGADIPRPQPAAPEPHHGLTSWGHDHRAW

SEQ ID NO: 38747 - protein, 542 aa, Homo sapiens
  Payload ID: 7734
  Gene Symbol: HNF1A
  Gene Name: HNF1 homeobox A
  ENSP ID: ENSP00000476181
MVSKLSQLQTELLAALLESGLSKEALIQALGEPGPYLLAGEGPLDKGESCGGGRGELAELPNGLGETRGSEDETDDDGEDFTPPILKELENLSPEEAAHQKAVVETLLQEDPWRVAKMVKSYLQQHNIPQREVVDTTGLNQSHLSQHLNKGTPMKTQKRAALYTWYVRKQREVAQQFTHAGQGGLIEEPTGDELPTKKGRRNRFKWGPASQQILFQAYERQKNPSKEERETLVEECNRAECIQRGVSPSQAQGLGSNLVTEVRVYNWFANRRKEEAFRHKLAMDTYSGPPPGPGPGPALPAHSSPGLPPPALSPSKVHGVRYGQPATSETAEVPSSSGGPLVTVSTPLHQVSPTGLEPSHSLLSTEAKLVSAAGGPLPPVSTLTALHSLEQTSPGLNQQPQNLIMASLPGVMTIGPGEPASLGPTFTNTGASTLVIGLASTQAQSVPVINSMGSSLTTLQPVQFSQPLHPSYQQPLMPPVQSHVTQSPFMATMAQLQSPHGERPVPHTAGDDDRGWLSMDAGERGAWQALQSACVSGTSVFP

SEQ ID NO: 38748 - protein, 235 aa, Homo sapiens [sequence omitted]

SEQ ID NO: 38749 - protein, 227 aa, Homo sapiens
  Payload ID: 7734
  Gene Symbol: HNF1A
  Gene Name: HNF1 homeobox A
  ENSP ID: ENSP00000483994
MASLPGVMTIGPGEPASLGPTFTNTGASTLVIGLASTQAQSVPVINSMGSSLTTLQPVQFSQPLHPSYQQPLMPPVQSHVTQSPFMATMAQLQSPHALYSHKPEVAQYTHTGLLPQTMLITDTTNLSALASLTPTKQVFTSDTEASSESGLHTPASQATTLHVPSQDPASIQHLQPAHRLSASPTVSSSSLVLYQSSDSSNGQSHLLPSNHSVIETFISTQMASSSQ

SEQ ID NO: 38750 - protein, 457 aa, Homo sapiens
  Payload ID: 7735
  Gene Symbol: HNF1B
  Gene Name: HNF1 homeobox B
  ENSP ID: ENSP00000477524
MVSKLTSLQQELLSALLSSGVTKEVLVQALEELLPSPNFGVKLETLPLSPGSGAEPDTKPVFHTLTNGHAKGRLSGDEGSEDGDDYDTPPILKELQALNTEEAAEQRAEVDRMLSEDPWRAAKMIKGYMQQHNIPQREVVDVTGLNQSHLSQHLNKGTPMKTQKRAALYTWYVRKQREILRQFSQQSHGPGQSDDACSEPTNKKMRRNRFKWGPASQQILYQAYDRQKNPSKEEREALVEECNRAECLQRGVSPSKAHGLGSNLVTEVRVYNWFANRRKEEAFRQKLAMDAYSSNQTHSLNPLLSHGSPHHQPSSSPPNKLSGVRYSQQGNNEITSSSTISHHGNSAMVTSQSVLQQVSPASLDPGHNLLSPDGKMISVSGGGLPPVSTLTNIHSLSHHNPQQSQNLIMTPLSGVMAIAQMSSTSLVMPTHHLLRAQQQGPCFPHHHPLGSCHGKAQ

SEQ ID NO: 38751 - protein, 425 aa, Homo sapiens
  Payload ID: 7735
  Gene Symbol: HNF1B
  Gene Name: HNF1 homeobox B
  ENSP ID: ENSP00000478682
MVSKLTSLQQELLSALLSSGVTKEVLVQALEELLPSPNFGVKLETLPLSPGSGAEPDTKPVFHTLTNGHAKGRLSGDEGSEDGDDYDTPPILKELQALNTEEAAEQRAEVDRMLSEDPWRAAKMIKGYMQQHNIPQREVVDVTGLNQSHLSQHLNKGTPMKTQKRAALYTWYVRKQREILRQFNQTVQSSGNMTDKSSQDQLLFLFPEFSQQSHGPGQSDDACSEPTNKKMRRNRFKWGPASQQILYQAYDRQKNPSKEEREALVEECNRAECLQRGVSPSKAHGLGSNLVTEVRVYNWFANRRKEEAFRQKLAMDAYSSNQTHSLNPLLSHGSPHHQPSSSPPNKLSGVRYSQQGNNEITSSSTISHHGNSAMVTSQSVLQQVSPASLDPGHNLLSPDGKMDLSLRRRFAPSQHLDEYPQPLPP

SEQ ID NO: 38752 - protein, 457 aa, Homo sapiens; identical to SEQ ID NO: 38750
  Payload ID: 7735
  Gene Symbol: HNF1B
  Gene Name: HNF1 homeobox B
  ENSP ID: ENSP00000479629

SEQ ID NO: 38753 - protein, 557 aa, Homo sapiens
  Payload ID: 7735
  Gene Symbol: HNF1B
  Gene Name: HNF1 homeobox B
  Uniprot ID: P35680
  ENSP ID: ENSP00000480291
MVSKLTSLQQELLSALLSSGVTKEVLVQALEELLPSPNFGVKLETLPLSPGSGAEPDTKPVFHTLTNGHAKGRLSGDEGSEDGDDYDTPPILKELQALNTEEAAEQRAEVDRMLSEDPWRAAKMIKGYMQQHNIPQREVVDVTGLNQSHLSQHLNKGTPMKTQKRAALYTWYVRKQREILRQFNQTVQSSGNMTDKSSQDQLLFLFPEFSQQSHGPGQSDDACSEPTNKKMRRNRFKWGPASQQILYQAYDRQKNPSKEEREALVEECNRAECLQRGVSPSKAHGLGSNLVTEVRVYNWFANRRKEEAFRQKLAMDAYSSNQTHSLNPLLSHGSPHHQPSSSPPNKLSGVRYSQQGNNEITSSSTISHHGNSAMVTSQSVLQQVSPASLDPGHNLLSPDGKMISVSGGGLPPVSTLTNIHSLSHHNPQQSQNLIMTPLSGVMAIAQSLNTSQAQSVPVINSVAGSLAALQPVQFSQQLHSPHQQPLMQQSPGSHMAQQPFMAAVTQLQNSHMYAHKQEPPQYSHTSRFPSAMVVTDTSSISTLTNMSSSKQCPLQAW

SEQ ID NO: 38754 - protein, 293 aa, Homo sapiens
  Payload ID: 7735
  Gene Symbol: HNF1B
  Gene Name: HNF1 homeobox B
  ENSP ID: ENSP00000481082
MVSKLTSLQQELLSALLSSGVTKEVLVQALEELLPSPNFGVKLETLPLSPGSGAEPDTKPVFHTLTNGHAKGRLSGDEGSEDGDDYDTPPILKELQALNTEEAAEQRAEVDRMLSEDPWRAAKMIKGYMQQHNIPQREVVDVTGLNQSHLSQHLNKGTPMKTQKRAALYTWYVRKQREILRQFSQQSHGPGQSDDACSEPTNKKMRRNRFKWGPASQRLRSAKEPQQEREALVEECNRQNVCSEGCPPPKPTAWAPTWSLRSVSTTGLQTAGRRRHSGKSWPWTPIAPTRLTA

SEQ ID NO: 38755 - protein, 293 aa, Homo sapiens; identical to SEQ ID NO: 38754
  Payload ID: 7735
  Gene Symbol: HNF1B
  Gene Name: HNF1 homeobox B
  ENSP ID: ENSP00000481245

SEQ ID NO: 38756 - protein, 548 aa, Homo sapiens
  Payload ID: 7735
  Gene Symbol: HNF1B
  Gene Name: HNF1 homeobox B
  ENSP ID: ENSP00000482529
MVSKLTSLQQELLSALLSSGVTKEVLVQALEELLPSPNFGVKLETLPLSPGSGAEPDTKPVFHTLTNGHAKGRLSGDEGSEDGDDYDTPPILKELQALNTEEAAEQRAEVDRMLSEDPWRAAKMIKGYMQQHNIPQREVVDVTGLNQSHLSQHLNKGTPMKTQKRAALYTWYVRKQREILRQFNQTVQSSGNMTDKSSQDQLLFLFPEFSQQSHGPGQSDDACSEPTNKKMRRNRFKWGPASQQILYQAYDRQKNPSKEEREALVEECNRAECLQRGVSPSKAHGLGSNLVTEVRVYNWFANRRKEEAFRQKLAMDAYSSNQTHSLNPLLSHGSPHHQPSSSPPNKLSGVRYSQQGNNEITSSSTISHHGNSAMVTSQSVLQQVSPASLDPGHNLLSPDGKMISVSGGGLPPVSTLTNIHSLSHHNPQQSQNLIMTPLSGVMAIAQSLNTSQAQSVPVINSVAGSLAALQPVQFSQQLHSPHQQPLMQQSPGSHMAQQPFMAAVTQLQNSHMSSTSLVMPTHHLLRAQQQGPCFPHHHPLGSCHGKAQ

SEQ ID NO: 38757 - protein, 531 aa, Homo sapiens
  Payload ID: 7735
  Gene Symbol: HNF1B
  Gene Name: HNF1 homeobox B
  Uniprot ID: P35680
  ENSP ID: ENSP00000482711
MVSKLTSLQQELLSALLSSGVTKEVLVQALEELLPSPNFGVKLETLPLSPGSGAEPDTKPVFHTLTNGHAKGRLSGDEGSEDGDDYDTPPILKELQALNTEEAAEQRAEVDRMLSEDPWRAAKMIKGYMQQHNIPQREVVDVTGLNQSHLSQHLNKGTPMKTQKRAALYTWYVRKQREILRQFSQQSHGPGQSDDACSEPTNKKMRRNRFKWGPASQQILYQAYDRQKNPSKEEREALVEECNRAECLQRGVSPSKAHGLGSNLVTEVRVYNWFANRRKEEAFRQKLAMDAYSSNQTHSLNPLLSHGSPHHQPSSSPPNKLSGVRYSQQGNNEITSSSTISHHGNSAMVTSQSVLQQVSPASLDPGHNLLSPDGKMISVSGGGLPPVSTLTNIHSLSHHNPQQSQNLIMTPLSGVMAIAQSLNTSQAQSVPVINSVAGSLAALQPVQFSQQLHSPHQQPLMQQSPGSHMAQQPFMAAVTQLQNSHMYAHKQEPPQYSHTSRFPSAMVVTDTSSISTLTNMSSSKQCPLQAW

SEQ ID NO: 38758 - protein, 425 aa, Homo sapiens; identical to SEQ ID NO: 38751
  Payload ID: 7735
  Gene Symbol: HNF1B
  Gene Name: HNF1 homeobox B
  ENSP ID: ENSP00000484132

SEQ ID NO: 38759 - protein, 557 aa, Homo sapiens; identical to SEQ ID NO: 38753
  Payload ID: 7735
  Gene Symbol: HNF1B
  Gene Name: HNF1 homeobox B
  Uniprot ID: P35680
  ENSP ID: ENSP00000484591

SEQ ID NO: 38760 - protein, 531 aa, Homo sapiens; identical to SEQ ID NO: 38757
  Payload ID: 7735
  Gene Symbol: HNF1B
  Gene Name: HNF1 homeobox B
  Uniprot ID: P35680
  ENSP ID: ENSP00000488080

SEQ ID NO: 38761 - protein, 548 aa, Homo sapiens; identical to SEQ ID NO: 38756
  Payload ID: 7735
  Gene Symbol: HNF1B
  Gene Name: HNF1 homeobox B
  ENSP ID: ENSP00000488519

SEQ ID NO: 38762 - protein, 746 aa, Homo sapiens
  Payload ID: 7736
  Gene Symbol: HNRNPUL2-BSCL2
  Gene Name: HNRNPUL2-BSCL2 readthrough (NMD candidate)
  ENSP ID: ENSP00000456010
MEVKRLKVTELRSELQRRGLDSRGLKVDLAQRLQEALDAEMLEDEAGGGGAGPGGACKAEPRPVAASGGGPGGDEEEDEEEEEEDEEALLEDEDEEPPPAQALGQAAQPPPEPPEAAAMEAAAEPDASEKPAEATAGSGGVNGGEEQGLGKREEDEPEERSGDETPGSEVPGDKAAEEQGDDQDSEKSKPAGSDGERRGVKRQRDEKDEHGRAYYEFREEAYHSRSKSPLPPEEEAKDEEEDQTLVNLDTYTSDLHFQVSKDRYGGQPLFSEKFPTLWSGARSTYGVTKGKVCFEAKVTQNLPMKEGCTEVSLLRVGWSVDFSRPQLGEDEFSYGFDGRGLKAENGQFEEFGQTFGENDVIGCFANFETEEVELSFSKNGEDLGVAFWISKDSLADRALLPHVLCKNCVVELNFGQKEEPFFPPPEEFVFIHAVPVEERVRTAVPPKTIEECEVILMVGLPGSGKTQWALKYAKENPEKRYNVLGAETVLNQMRMKGLEEPEMDPKSRDLLVQQASQCLSKLVQIASRTKRNFILDQCNVYNSGQRRKLLLFKTFSRKVVVVVPNEEDWKKRLELRKEVEGDDVPESIMLEMKANFSLPEKCDYMDEVTYGELEKEEAQPIVTKYKEEARKLLPPSEKRTNRRNNRNKRNRQNRSRGQGYVGGQRRGYDNRAYGQQYWGQPGNRGGYRNFYDRYRGDYDRFYGRDYEYNRYRDYYRQYNRDGPSIFHIQENVMRHRYQRLDRHFTF

SEQ ID NO: 38763 - protein, 570 aa, Homo sapiens
  Payload ID: 7737
  Gene Symbol: HJURP
  Gene Name: Holliday junction recognition protein
  ENSP ID: ENSP00000393253
MLGTLRAMEGEDVEDDQLLQKLRASRRRFQRRMQRLIEKYNQPFEDTPVVQMATLTYETPQGLRIWGGRLIKERNEGEIQCAGNRAGRDVRVTPLPSLASPAVPAPGYCSRISRKSPGDPAKPASSPREWDPLHPSSTDMALVPRNDSLSLQETSSSSFLSSQPFEDDDICNVTISDLYAGMLHSMSRLLSTKPSSIISTKTFIMQNWNSRRRHRYKSRMNKTYCKGARRSQRSSKENFIPCSEPVKGTGALRDCKNVLDVSCRKTGLKLEKAFLEVNRPQIHKLDPSWKERKVTPSKYSSLIYFDSSATYNLDEENRFRTLKWLISPVKIVSRPTIRQGHGENRQREIEIRFDQLHREYCLSPRNQPRRMCLPDSWAMNMYRGGPASPGGLQGLETRRLSLPSSKAKAKSLSEAFENLGKRSLEAGRCLPKSDSSSSLPKTNPTHSATRPQQTSDLHVQGNSSGIFRKSVSPSKTLSVPDKEVPGHGRNRYDEIKEEFDKLHQKYCLKSPGQMTVPLCIGVSTDKASMEVRYQTEGFLGKLNPDPHFQGFQKLPSSPLGCRKSLLGSTA

SEQ ID NO: 38764 - protein, 68 aa, Homo sapiens
  Payload ID: 7737
  Gene Symbol: HJURP
  Gene Name: Holliday junction recognition protein
  ENSP ID: ENSP00000395207
  MOD_RES (1)..(1): Any amino acid
XRPRLSEPQGSGRQGNSLGASDGVDNTVRPGDQGSSSQPNSEERGENTSYRMEEKSDFMLEKLETKSV

SEQ ID NO: 38765 - protein, 663 aa, Homo sapiens
  Payload ID: 7737
  Gene Symbol: HJURP
  Gene Name: Holliday junction recognition protein
  Uniprot ID: Q8NCD3
  ENSP ID: ENSP00000401944
MLGTLRAMEGEDVEDDQLLQKLRASRRRFQRRMQRLIEKYNQPFEDTPVVQMATLTYETPQGLRIWGGRLIKERNEGEIQCAGNRAGRDVRVTPLPSLASPAVPAPGYCSRISRKSPGDPAKPASSPREWDPLHPSSTDMALVPRNDSLSLQETSSSSFLSSQPFEDDDICNVTISDLYAGMLHSMSRLLSTKPSSIISTKTFIMQNWNSRRRHRYKSRMNKTYCKGARRSQRSSKENFIPCSEPVKGTGALRDCKNVLDVSCRKTGLKLEKAFLEVNRPQIHKLDPSWKERKVTPSKYSSLIYFDSSATYNLDEENRFRTLKWLISPVKIVSRPTIRQGHGENRQREIEIRFDQLHREYCLSPRNQPRRMCLPDSWAMNMYRGGPASPGGLQGLETRRLSLPSSKAKAKSLSEAFENLGKRSLEAGRCLPKSDSSSSLPKTNPTHSATRPQQTSDLHVQGNSSGIFRKSVSPSKTLSVPDKEVPGHGRNRYDEIKEEFDKLHQKYCLKSPGQMTVPLCIGVSTDKASMEVRYQTEGFLGKLNPDPHFQGFQKLPSSPLGCRKSLLGSTAIEAPSSTCVARAITRDGTRDHQFPAKRPRLSEPQGSGRQGNSLGASDGVDNTVRPGDQGSSSQPNSEERGENTSYRMEEKSDFMLEKLETKSV

SEQ ID NO: 38766 - protein, 122 aa, Homo sapiens
  Payload ID: 7737
  Gene Symbol: HJURP
  Gene Name: Holliday junction recognition protein
  ENSP ID: ENSP00000403668
MLGTLRAMEGEDVEDDQLLQKLRASRRRFQRRMQRLIEKYNQPFEDTPVVQMATLTYETPQGLRIWGGRLIKERNEGEIQDSSMKPADRTDGSVQAAAWGPELPSHRTVLGAACSASKPFEK

SEQ ID NO: 38767 - protein, 694 aa, Homo sapiens
  Payload ID: 7737
  Gene Symbol: HJURP
  Gene Name: Holliday junction recognition protein
  Uniprot ID: Q8NCD3
  ENSP ID: ENSP00000407208
MLGTLRAMEGEDVEDDQLLQKLRASRRRFQRRMQRLIEKYNQPFEDTPVVQMATLTYETPQGLRIWGGRLIKERNEGEIQPAVPQSPLKNELRRKYLTQVDILLQGAEYFECAGNRAGRDVRVTPLPSLASPAVPAPGYCSRISRKSPGDPAKPASSPREWDPLHPSSTDMALVPRNDSLSLQETSSSSFLSSQPFEDDDICNVTISDLYAGMLHSMSRLLSTKPSSIISTKTFIMQNWNSRRRHRYKSRMNKTYCKGARRSQRSSKENFIPCSEPVKGTGALRDCKNVLDVSCRKTGLKLEKAFLEVNRPQIHKLDPSWKERKVTPSKYSSLIYFDSSATYNLDEENRFRTLKWLISPVKIVSRPTIRQGHGENRQREIEIRFDQLHREYCLSPRNQPRRMCLPDSWAMNMYRGGPASPGGLQGLETRRLSLPSSKAKAKSLSEAFENLGKRSLEAGRCLPKSDSSSSLPKTNPTHSATRPQQTSDLHVQGNSSGIFRKSVSPSKTLSVPDKEVPGHGRNRYDEIKEEFDKLHQKYCLKSPGQMTVPLCIGVSTDKASMEVRYQTEGFLGKLNPDPHFQGFQKLPSSPLGCRKSLLGSTAIEAPSSTCVARAITRDGTRDHQFPAKRPRLSEPQGSGRQGNSLGASDGVDNTVRPGDQGSSSQPNSEERGENTSYRMEEKSDFMLEKLETKSV

SEQ ID NO: 38768 - protein, 268 aa, Homo sapiens
  Payload ID: 7737
  Gene Symbol: HJURP
  Gene Name: Holliday junction recognition protein
  ENSP ID: ENSP00000414051
GRGRGRRPAAAEAQGQSPPLPEAHAAADREVQPALRGHPGGANGHADLRDATGIENLGWKTNKGKKRRRDPDSKSGEVDATSDQEESVAWALAPAVPQSPLKNELRRKYLTQVDILLQGAEYFECAGNRAGRDVRVTPLPSLASPAVPAPGYCSRISRKSPGDPAKPASSPREWDPLHPSSTDMALVPRNDSLSLQETSSSSFLSSQPFEDDDICNVTISDLYAGMLHSMSRLLSTKPSSIISTKTFIMQNWNSRRRHRYKSRMNKTY

SEQ ID NO: 38769 - protein, 748 aa, Homo sapiens
  Payload ID: 7737
  Gene Symbol: HJURP
  Gene Name: Holliday junction recognition protein
  Uniprot ID: Q8NCD3
  ENSP ID: ENSP00000414109
MLGTLRAMEGEDVEDDQLLQKLRASRRRFQRRMQRLIEKYNQPFEDTPVVQMATLTYETPQGLRIWGGRLIKERNEGEIQDSSMKPADRTDGSVQAAAWGPELPSHRTVLGADSKSGEVDATSDQEESVAWALAPAVPQSPLKNELRRKYLTQVDILLQGAEYFECAGNRAGRDVRVTPLPSLASPAVPAPGYCSRISRKSPGDPAKPASSPREWDPLHPSSTDMALVPRNDSLSLQETSSSSFLSSQPFEDDDICNVTISDLYAGMLHSMSRLLSTKPSSIISTKTFIMQNWNSRRRHRYKSRMNKTYCKGARRSQRSSKENFIPCSEPVKGTGALRDCKNVLDVSCRKTGLKLEKAFLEVNRPQIHKLDPSWKERKVTPSKYSSLIYFDSSATYNLDEENRFRTLKWLISPVKIVSRPTIRQGHGENRQREIEIRFDQLHREYCLSPRNQPRRMCLPDSWAMNMYRGGPASPGGLQGLETRRLSLPSSKAKAKSLSEAFENLGKRSLEAGRCLPKSDSSSSLPKTNPTHSATRPQQTSDLHVQGNSSGIFRKSVSPSKTLSVPDKEVPGHGRNRYDEIKEEFDKLHQKYCLKSPGQMTVPLCIGVSTDKASMEVRYQTEGFLGKLNPDPHFQGFQKLPSSPLGCRKSLLGSTAIEAPSSTCVARAITRDGTRDHQFPAKRPRLSEPQGSGRQGNSLGASDGVDNTVRPGDQGSSSQPNSEERGENTSYRMEEKSDFMLEKLETKSV

SEQ ID NO: 38770 - protein, 726 aa, Homo sapiens
  Payload ID: 7738
  Gene Symbol: HLCS
  Gene Name: holocarboxylase synthetase (biotin-(proprionyl-CoA-carboxylase (ATP-hydrolysing)) ligase)
  Uniprot ID: P50747
  ENSP ID: ENSP00000338387
MEDRLHMDNGLVPQKIVSVHLQDSTLKEVKDQVSNKQAQILEPKPEPSLEIKPEQDGMEHVGRDDPKALGEEPKQRRGSASGSEPAGDSDRGGGPVEHYHLHLSSCHECLELENSTIESVKFASAENIPDLPYDYSSSLESVADETSPEREGRRVNLTGKAPNILLYVGSDSQEALGRFHEVRSVLADCVDIDSYILYHLLEDSALRDPWTDNCLLLVIATRESIPEDLYQKFMAYLSQGGKVLGLSSSFTFGGFQVTSKGALHKTVQNLVFSKADQSEVKLSVLSSGCRYQEGPVRLSPGRLQGHLENEDKDRMIVHVPFGTRGGEAVLCQVHLELPPSSNIVQTPEDFNLLKSSNFRRYEVLREILTTLGLSCDMKQVPALTPLYLLSAAEEIRDPLMQWLGKHVDSEGEIKSGQLSLRFVSSYVSEVEITPSCIPVVTNMEAFSSEHFNLEIYRQNLQTKQLGKVILFAEVTPTTMRLLDGLMFQTPQEMGLIVIAARQTEGKGRGGNVWLSPVGCALSTLLISIPLRSQLGQRIPFVQHLMSVAVVEAVRSIPEYQDINLRVKWPNDIYYSDLMKIGGVLVNSTLMGETFYILIGCGFNVTNSNPTICINDLITEYNKQHKAELKPLRADYLIARVVTVLEKLIKEFQDKGPNSVLPLYYRYWVHSGQQVHLGSAEGPKVSIVGLDDSGFLQVHQEGGEVVTVHPDGNSFDMLRNLILPKRR

SEQ ID NO: 38771 - protein, 726 aa, Homo sapiens; identical to SEQ ID NO: 38770
  Payload ID: 7738
  Gene Symbol: HLCS
  Gene Name: holocarboxylase synthetase (biotin-(proprionyl-CoA-carboxylase (ATP-hydrolysing)) ligase)
  Uniprot ID: P50747
  ENSP ID: ENSP00000382071

SEQ ID NO: 38772 - protein, 92 aa, Homo sapiens
  Payload ID: 7738
  Gene Symbol: HLCS
  Gene Name: holocarboxylase synthetase (biotin-(proprionyl-CoA-carboxylase (ATP-hydrolysing)) ligase)
  ENSP ID: ENSP00000392923
MEDRLHMDNGLVPQKIVSVHLQDSTLKEVKDQVSNKQAQILEPKPEPSLEIKPEQDGMEHVGRDDPKALGEEPKQRRGSASGSEPAGDSDRG

SEQ ID NO: 38773 - protein, 86 aa, Homo sapiens
  Payload ID: 7738
  Gene Symbol: HLCS
  Gene Name: holocarboxylase synthetase (biotin-(proprionyl-CoA-carboxylase (ATP-hydrolysing)) ligase)
  ENSP ID: ENSP00000396370
MEDRLHMDNGLVPQKIVSVHLQDSTLKEVKDQVSNKQAQILEPKPEPSLEIKPEQDGMEHVGRDDPKALGEEPKQRRGSASGSEPA

SEQ ID NO: 38774 - protein, 77 aa, Homo sapiens
  Payload ID: 7738
  Gene Symbol: HLCS
  Gene Name: holocarboxylase synthetase (biotin-(proprionyl-CoA-carboxylase (ATP-hydrolysing)) ligase)
  ENSP ID: ENSP00000396443
MEDRLHMDNGLVPQKIVSVHLQDSTLKEVKDQVSNKQAQILEPKPEPSLEIKPEQDGMEHVGRDDPKALGEEPKQRR

SEQ ID NO: 38775 - protein, 726 aa, Homo sapiens; identical to SEQ ID NO: 38770
  Payload ID: 7738
  Gene Symbol: HLCS
  Gene Name: holocarboxylase synthetase (biotin-(proprionyl-CoA-carboxylase (ATP-hydrolysing)) ligase)
  Uniprot ID: P50747
  ENSP ID: ENSP00000479939

SEQ ID NO: 38776 - protein, 268 aa, Homo sapiens
  Payload ID: 7739
  Gene Symbol: HCCS
  Gene Name: holocytochrome c synthase
  Uniprot ID: P53701
  ENSP ID: ENSP00000326579
MGLSPSAPAVAVQASNASASPPSGCPMHEGKMKGCPVNTEPSGPTCEKKTYSVPAHQERAYEYVECPIRGTAAENKENLDPSNLMPPPNQTPAPDQPFALSTVREESSIPRADSEKKWVYPSEQMFWNAMLKKGWKWKDEDISQKDMYNIIRIHNQNNEQAWKEILKWEALHAAECPCGPSLIRFGGKAKEYSPRARIRSWMGYELPFDRHDWIINRCGTEVRYVIDYYDGGEVNKDYQFTILDVRPALDSLSAVWDRMKVAWWRWTS

SEQ ID NO: 38777 - protein, 268 aa, Homo sapiens; identical to SEQ ID NO: 38776
  Payload ID: 7739
  Gene Symbol: HCCS
  Gene Name: holocytochrome c synthase
  Uniprot ID: P53701
  ENSP ID: ENSP00000370139

SEQ ID NO: 38778 - protein, 268 aa, Homo sapiens; identical to SEQ ID NO: 38776
  Payload ID: 7739
  Gene Symbol: HCCS
  Gene Name: holocytochrome c synthase
  Uniprot ID: P53701
  ENSP ID: ENSP00000370140

SEQ ID NO: 38779 - protein, 335 aa, Homo sapiens
  Payload ID: 7740
  Gene Symbol: HOXA1
  Gene Name: homeobox A1
  Uniprot ID: P49639
  ENSP ID: ENSP00000343246
MDNARMNSFLEYPILSSGDSGTCSARAYPSDHRITTFQSCAVSANSCGGDDRFLVGRGVQIGSPHHHHHHHHRHPQPATYQTSGNLGVSYSHSSCGPSYGSQNFSAPYSPYALNQEADVSGGYPQCAPAVYSGNLSSPMVQHHHHHQGYAGGAVGSPQYIHHSYGQEHQSLALATYNNSLSPLHASHQEACRSPASETSSPAQTFDWMKVKRNPPKTGKVGEYGYLGQPNAVRTNFTTKQLTELEKEFHFNKYLTRARRVEIAASLQLNETQVKIWFQNRRMKQKKREKEGLLPISPATPPGNDEKAEESSEKSSSSPCVPSPGSSTSDTLTTSH

SEQ ID NO: 38780 - protein, 137 aa, Homo sapiens
  Payload ID: 7740
  Gene Symbol: HOXA1
  Gene Name: homeobox A1
  ENSP ID: ENSP00000347851
MDNARMNSFLEYPILSSGDSGTCSARAYPSDHRITTFQSCAVSANSCGGDDRFLVGRGVQIGSPHHHHHHHHRHPQPATYQTSGNLGVSYSHSSCGPSYGSQNFSAPYSPYALNQEADPPRSLSLPRIGDIFSSADF

SEQ ID NO: 38781 - protein, 410 aa, Homo sapiens
  Payload ID: 7741
  Gene Symbol: HOXA10
  Gene Name: homeobox A10
  Uniprot ID: P31260
  ENSP ID: ENSP00000283921
MSARKGYLLPSPNYPTTMSCSESPAANSFLVDSLISSGRGEAGGGGGGAGGGGGGGYYAHGGVYLPPAADLPYGLQSCGLFPTLGGKRNEAASPGSGGGGGGLGPGAHGYGPSPIDLWLDAPRSCRMEPPDGPPPPPQQQPPPPPQPPQPAPQATSCSFAQNIKEESSYCLYDSADKCPKVSATAAELAPFPRGPPPDGCALGTSSGVPVPGYFRLSQAYGTAKGYGSGGGGAQQLGAGPFPAQPPGRGFDLPPALASGSADAARKERALDSPPPPTLACGSGGGSQGDEEAHASSSAAEELSPAPSESSKASPEKDSLGNSKGENAANWLTAKSGRKKRCPYTKHQTLELEKEFLFNMYLTRERRLEISRSVHLTDRQVKIWFQNRRMKLKKMNRENRIRELTANFNFS

SEQ ID NO: 38782 - protein, 94 aa, Homo sapiens
  Payload ID: 7741
  Gene Symbol: HOXA10
  Gene Name: homeobox A10
  Uniprot ID: P31260
  ENSP ID: ENSP00000379633
MCQGNSKGENAANWLTAKSGRKKRCPYTKHQTLELEKEFLFNMYLTRERRLEISRSVHLTDRQVKIWFQNRRMKLKKMNRENRIRELTANFNFS

SEQ ID NO: 38783 - protein, 202 aa, Homo sapiens
  Payload ID: 7741
  Gene Symbol: HOXA10
  Gene Name: homeobox A10
  ENSP ID: ENSP00000479619
MSCSESPAANSFLVDSLISSGRGEAGGGGGGAGGGGGGGYYAHGGVYLPPAADLPYGLQSCGLFPTLGGKRNEAASPGSGGGGGGLGPGAHGYGPSPIDLWLDAPRSCRRRAATRGWPVPRAAPGARFRSPARASLRLGRCGPEGASPRFAAAPHAGLRQRRGLAGRRGGARVVLGRGGALPGPFREQQSLAGEGFPGQFQR

SEQ ID NO: 38784 - protein, 313 aa, Homo sapiens
  Payload ID: 7742
  Gene Symbol: HOXA11
  Gene Name: homeobox A11
  Uniprot ID: P31270
  ENSP ID: ENSP00000006015
MDFDERGPCSSNMYLPSCTYYVSGPDFSSLPSFLPQTPSSRPMTYSYSSNLPQVQPVREVTFREYAIEPATKWHPRGNLAHCYSAEELVHRDCLQAPSAAGVPGDVLAKSSANVYHHPTPAVSSNFYSTVGRNGVLPQAFDQFFETAYGTPENLASSDYPGDKSAEKGPPAATATSAAAAAAATGAPATSSSDSGGGGGCRETAAAAEEKERRRRPESSSSPESSSGHTEDKAGGSSGQRTRKKRCPYTKYQIRELEREFFFSVYINKEKRLQLSRMLNLTDRQVKIWFQNRRMKEKKINRDRLQYYSANPLL

SEQ ID NO: 38785 - protein, 283 aa, Homo sapiens
  Payload ID: 7742
  Gene Symbol: HOXA11
  Gene Name: homeobox A11
  ENSP ID: ENSP00000448962
  MOD_RES (1)..(1): Any amino acid
XIRFKEAAAVENHVKLGYCGEPKVQPVREVTFREYAIEPATKWHPRGNLAHCYSAEELVHRDCLQAPSAAGVPGDVLAKSSANVYHHPTPAVSSNFYSTVGRNGVLPQAFDQFFETAYGTPENLASSDYPGDKSAEKGPPAATATSAAAAAAATGAPATSSSDSGGGGGCRETAAAAEEKERRRRPESSSSPESSSGHTEDKAGGSSGQRTRKKRCPYTKYQIRELEREFFFSVYINKEKRLQLSRMLNLTDRQVKIWFQNRRMKEKKINRDRLQYYSANPLL

SEQ ID NO: 38786 - protein, 388 aa, Homo sapiens
  Payload ID: 7743
  Gene Symbol: HOXA13
  Gene Name: homeobox A13
  Uniprot ID: P31271
  ENSP ID: ENSP00000222753
MTASVLLHPRWIEPTVMFLYDNGGGLVADELNKNMEGAAAAAAAAAAAAAAGAGGGGFPHPAAAAAGGNFSVAAAAAAAAAAAANQCRNLMAHPAPLAPGAASAYSSAPGEAPPSAAAAAAAAAAAAAAAAAASSSGGPGPAGPAGAEAAKQCSPCSAAAQSSSGPAALPYGYFGSGYYPCARMGPHPNAIKSCAQPASAAAAAAFADKYMDTAGPAAEEFSSRAKEFAFYHQGYAAGPYHHHQPMPGYLDMPVVPGLGGPGESRHEPLGLPMESYQPWALPNGWNGQMYCPKEQAQPPHLWKSTLPDVVSHPSDASSYRRGRKKRVPYTKVQLKELEREYATNKFITKDKRRRISATTNLSERQVTIWFQNRRVKEKKVINKLKTTS

SEQ ID NO: 38787 - protein, 376 aa, Homo sapiens
  Payload ID: 7744
  Gene Symbol: HOXA2
  Gene Name: homeobox A2
  Uniprot ID: O43364
  ENSP ID: ENSP00000222718
MNYEFEREIGFINSQPSLAECLTSFPPVADTFQSSSIKTSTLSHSTLIPPPFEQTIPSLNPGSHPRHGAGGRPKPSPAGSRGSPVPAGALQPPEYPWMKEKKAAKKTALLPAAAAAATAAATGPACLSHKESLEIADGSGGGSRRLRTAYTNTQLLELEKEFHFNKYLCRPRRVEIAALLDLTERQVKVWFQNRRMKHKRQTQCKENQNSEGKCKSLEDSEKVEEDEEEKTLFEQALSVSGALLEREGYTFQQNALSQQQAPNGHNGDSQSFPVSPLTSNEKNLKHFQHQSPTVPNCLSTMGQNCGAGLNNDSPEALEVPSLQDFSVFSTDSCLQLSDAVSPSLPGSLDSPVDISADSLDFFTDTLTTIDLQHLNY

SEQ ID NO: 38788 - protein, 443 aa, Homo sapiens
  Payload ID: 7745
  Gene Symbol: HOXA3
  Gene Name: homeobox A3
  Uniprot ID: O43365
  ENSP ID: ENSP00000324884
MQKATYYDSSAIYGGYPYQAANGFAYNANQQPYPASAALGADGEYHRPACSLQSPSSAGGHPKAHELSEACLRTLSAPPSQPPSLGEPPLHPPPPQAAPPAPQPPQPAPQPPAPTPAAPPPPSSASPPQNASNNPTPANAAKSPLLNSPTVAKQIFPWMKESRQNTKQKTSSSSSGESCAGDKSPPGQASSKRARTAYTSAQLVELEKEFHFNRYLCRPRRVEMANLLNLTERQIKIWFQNRRMKYKKDQKGKGMLTSSGGQSPSRSPVPPGAGGYLNSMHSLVNSVPYEPQSPPPFSKPPQGTYGLPPASYPASLPSCAPPPPPQKRYTAAGAGAGGTPDYDPHAHGLQGNGSYGTPHIQGSPVFVGGSYVEPMSNSGPALFGLTHLPHAASGAMDYGGAGPLGSGHHHGPGPGEPHPTYTDLTGHHPSQGRIQEAPKLTHL

SEQ ID NO: 38789 - protein, 443 aa, Homo sapiens; identical to SEQ ID NO: 38788
  Payload ID: 7745
  Gene Symbol: HOXA3
  Gene Name: homeobox A3
  Uniprot ID: O43365
  ENSP ID: ENSP00000379640

SEQ ID NO: 38790 - protein, 84 aa, Homo sapiens
  Payload ID: 7745
  Gene Symbol: HOXA3
  Gene Name: homeobox A3
  ENSP ID: ENSP00000429426
MQKATYYDSSAIYGGYPYQAANGFAYNANQQPYPASAALGADGEYHRPACSLQSPSSAGGHPKAHELSEACLRTLSAPPSQPPS

SEQ ID NO: 38791 - protein, 54 aa, Homo sapiens
  Payload ID: 7745
  Gene Symbol: HOXA3
  Gene Name: homeobox A3
  ENSP ID: ENSP00000430566
MQKATYYDSSAIYGGYPYQAANGFAYNANQQPYPASAALGADGEYHRPACSLQS

SEQ ID NO: 38792 - protein, 443 aa, Homo sapiens; identical to SEQ ID NO: 38788
  Payload ID: 7745
  Gene Symbol: HOXA3
  Gene Name: homeobox A3
  Uniprot ID: O43365
  ENSP ID: ENSP00000484411

SEQ ID NO: 38793 - protein, 320 aa, Homo sapiens
  Payload ID: 7746
  Gene Symbol: HOXA4
  Gene Name: homeobox A4
  Uniprot ID: Q00056
  ENSP ID: ENSP00000353151
MTMSSFLINSNYIEPKFPPFEEYAQHSGSGGADGGPGGGPGYQQPPAPPTQHLPLQQPQLPHAGGGREPTASYYAPRTAREPAYPAAALYPAHGAADTAYPYGYRGGASPGRPPQPEQPPAQAKGPAHGLHASHVLQPQLPPPLQPRAVPPAAPRRCEAAPATPGVPAGGSAPACPLLLADKSPLGLKGKEPVVYPWMKKIHVSAVNPSYNGGEPKRSRTAYTRQQVLELEKEFHFNRYLTRRRRIEIAHTLCLSERQVKIWFQNRRMKWKKDHKLPNTKMRSSNSASASAGPPGKAQTQSPHLHPHPHPSTSTPVPSSI

SEQ ID NO: 38794 - protein, 320 aa, Homo sapiens; identical to SEQ ID NO: 38793
  Payload ID: 7746
  Gene Symbol: HOXA4
  Gene Name: homeobox A4
  Uniprot ID: Q00056
  ENSP ID: ENSP00000408845

SEQ ID NO: 38795 - protein, 140 aa, Homo sapiens
  Payload ID: 7746
  Gene Symbol: HOXA4
  Gene Name: homeobox A4
  ENSP ID: ENSP00000448015
  MOD_RES (1)..(1): Any amino acid
XKSPLGLKGKEPVVYPWMKKIHVSAVNPSYNGGEPKRSRTAYTRQQVLELEKEFHFNRYLTRRRRIEIAHTLCLSERQVKIWFQNRRMKWKKDHKLPNTKMRSSNSASASAGPPGKAQTQSPHLHPHPHPSTSTPVPSSI

SEQ ID NO: 38796 - protein, 320 aa, Homo sapiens; identical to SEQ ID NO: 38793
  Payload ID: 7746
  Gene Symbol: HOXA4
  Gene Name: homeobox A4
  Uniprot ID: Q00056
  ENSP ID: ENSP00000479166

SEQ ID NO: 38797 - protein, 270 aa, Homo sapiens
  Payload ID: 7747
  Gene Symbol: HOXA5
  Gene Name: homeobox A5
  Uniprot ID: P20719
  ENSP ID: ENSP00000222726
MSSYFVNSFCGRYPNGPDYQLHNYGDHSSVSEQFRDSASMHSGRYGYGYNGMDLSVGRSGSGHFGSGERARSYAASASAAPAEPRYSQPATSTHSPQPDPLPCSAVAPSPGSDSHHGGKNSLSNSSGASADAGSTHISSREGVGTASGAEEDAPASSEQASAQSEPSPAPPAQPQIYPWMRKLHISHDNIGGPEGKRARTAYTRYQTLELEKEFHFNRYLTRRRRIEIAHALCLSERQIKIWFQNRRMKWKKDNKLKSMSMAAAGGAFRP

SEQ ID NO: 38798 - protein, 233 aa, Homo sapiens
  Payload ID: 7748
  Gene Symbol: HOXA6
  Gene Name: homeobox A6
  Uniprot ID: P31267
  ENSP ID: ENSP00000222728
MSSYFVNPTFPGSLPSGQDSFLGQLPLYQAGYDALRPFPASYGASSLPDKTYTSPCFYQQSNSVLACNRASYEYGASCFYSDKDLSGASPSGSGKQRGPGDYLHFSPEQQYKPDSSSGQGKALHDEGADRKYTSPVYPWMQRMNSCAGAVYGSHGRRGRQTYTRYQTLELEKEFHFNRYLTRRRRIEIANALCLTERQIKIWFQNRRMKWKKENKLINSTQPSGEDSEAKAGE

SEQ ID NO: 38799 - protein, 230 aa, Homo sapiens
  Payload ID: 7749
  Gene Symbol: HOXA7
  Gene Name: homeobox A7
  Uniprot ID: P31268
  ENSP ID: ENSP00000242159
MSSSYYVNALFSKYTAGASLFQNAEPTSCSFAPNSQRSGYGAGAGAFASTVPGLYNVNSPLYQSPFASGYGLGADAYGNLPCASYDQNIPGLCSDLAKGACDKTDEGALHGAAEANFRIYPWMRSSGPDRKRGRQTYTRYQTLELEKEFHFNRYLTRRRRIEIAHALCLTERQIKIWFQNRRMKWKKEHKDEGPTAAAAPEGAVPSAAATAAADKADEEDDDEEEEDEEE

SEQ ID NO: 38800 - protein, 30 aa, Homo sapiens
  Payload ID: 7749
  Gene Symbol: HOXA7
  Gene Name: homeobox A7
  ENSP ID: ENSP00000428563
MSSSYYVNALFSKYTAGASLFQNAEPTSCS

SEQ ID NO: 38801 - protein, 272 aa, Homo sapiens
  Payload ID: 7750
  Gene Symbol: HOXA9
  Gene Name: homeobox A9
  Uniprot ID: P31269
  ENSP ID: ENSP00000343619
MATTGALGNYYVDSFLLGADAADELSVGRYAPGTLGQPPRQAATLAEHPDFSPCSFQSKATVFGASWNPVHAAGANAVPAAVYHHHHHHPYVHPQAPVAAAAPDGRYMRSWLEPTPGALSFAGLPSSRPYGIKPEPLSARRGDCPTLDTHTLSLTDYACGSPPVDREKQPSEGAFSENNAENESGGDKPPIDPNNPAANWLHARSTRKKRCPYTKHQTLELEKEFLFNMYLTRDRRYEVARLLNLTERQVKIWFQNRRMKMKKINKDRAKDE

SEQ ID NO: 38802 - protein, 106 aa, Homo sapiens
  Payload ID: 7750
  Gene Symbol: HOXA9
  Gene Name: homeobox A9
  ENSP ID: ENSP00000379634
MATTGALGNYYVDSFLLGADAADELSVGRYAPGTLGQPPRQAATLAEHPDFSPCSFQSKATVFGASWNPVHAAGANAVPAAVYHHHHHHPYVHPQAPVAAAAPDGS

SEQ ID NO: 38803 - protein, 550 aa, Homo sapiens
  Payload ID: 7751
  Gene Symbol: HOMEZ
  Gene Name: homeobox and leucine zipper encoding
  Uniprot ID: Q8IX15
  ENSP ID: ENSP00000350049
MVRGWEPPPGLDCAISEGHKSEGTMPPNKEASGLSSSPAGLICLPPISEELQLVWTQAAQTSELDSNEHLLKTFSYFPYPSLADIALLCLRYGLQMEKVKTWFMAQRLRCGISWSSEEIEETRARVVYRRDQLHFKSLLSFTHHAGRPPEEVPPPPVPAPEQVGIGIGPPTLSKPTQTKGLKVEPEEPSQMPPLPQSHQKLKESLMTPGSGAFPYQSDFWQHLQSSGLSKEQAGRGPNQSHGIGTASWNHSTTVPQPQARDKPPPIALIASSCKEESASSVTPSSSSTSSSFQVLANGATAASKPLQPLGCVPQSVSPSEQALPPHLEPAWPQGLRHNSVPGRVGPTEYLSPDMQRQRKTKRKTKEQLAILKSFFLQCQWARREDYQKLEQITGLPRPEIIQWFGDTRYALKHGQLKWFRDNAVPGAPSFQDPAIPTPPPSTRSLNERAETPPLPIPPPPPDIQPLERYWAAHQQLRETDIPQLSQASRLSTQQVLDWFDSRLPQPAEVVVCLDEEEEEEEEELPEDDEEEEEEEEEDDDDDDDDVIIQD

SEQ ID NO: 38804 - protein, 552 aa, Homo sapiens
  Payload ID: 7751
  Gene Symbol: HOMEZ
  Gene Name: homeobox and leucine zipper encoding
  Uniprot ID: Q8IX15
  ENSP ID: ENSP00000453979
MLKSRISMRSRHPRRAISEGHKSEGTMPPNKEASGLSSSPAGLICLPPISEELQLVWTQAAQTSELDSNEHLLKTFSYFPYPSLADIALLCLRYGLQMEKVKTWFMAQRLRCGISWSSEEIEETRARVVYRRDQLHFKSLLSFTHHAGRPPEEVPPPPVPAPEQVGIGIGPPTLSKPTQTKGLKVEPEEPSQMPPLPQSHQKLKESLMTPGSGAFPYQSDFWQHLQSSGLSKEQAGRGPNQSHGIGTASWNHSTTVPQPQARDKPPPIALIASSCKEESASSVTPSSSSTSSSFQVLANGATAASKPLQPLGCVPQSVSPSEQALPPHLEPAWPQGLRHNSVPGRVGPTEYLSPDMQRQRKTKRKTKEQLAILKSFFLQCQWARREDYQKLEQITGLPRPEIIQWFGDTRYALKHGQLKWFRDNAVPGAPSFQDPAIPTPPPSTRSLNERAETPPLPIPPPPPDIQPLERYWAAHQQLRETDIPQLSQASRLSTQQVLDWFDSRLPQPAEVVVCLDEEEEEEEEELPEDDEEEEEEEEEDDDDDDDDVIIQD

SEQ ID NO: 38805 - protein, 324 aa, Homo sapiens
  Payload ID: 7751
  Gene Symbol: HOMEZ
  Gene Name: homeobox and leucine zipper encoding
  ENSP ID: ENSP00000475307
QMEKVKTWFMAQRLRCGISWSSEEIEETRARVVYRRDQLHFKSLLSFTHHAGRPPEEVPPPPVPAPEQVGIGIGTASWNHSTTVPQPQARDKPPPIALIASSCKEESASSVTPSSSSTSSSFQVLANGATAASKPLQPLGCVPQSVSPSEQALPPHLEPAWPQGLRHNSVPGRVGPTEYLSPDMQRQRKTKRKTKEQLAILKSFFLQCQWARREDYQKLEQITGLPRPEIIQWFGDTRYALKHGQLKWFRDNAVPGAPSFQDPAIPTPPPSTRSLNERAETPPLPIPPPPPDIQPLERYWAAHQQLRETDIPQLSQASRLSTQQ

SEQ ID NO: 38806 - protein, 301 aa, Homo sapiens
  Payload ID: 7752
  Gene Symbol: HOXB1
  Gene Name: homeobox B1
  Uniprot ID: P14653
  ENSP ID: ENSP00000355140
MDYNRMNSFLEYPLCNRGPSAYSAHSAPTSFPPSSAQAVDSYASEGRYGGGLSSPAFQQNSGYPAQQPPSTLGVPFPSSAPSGYAPAACSPSYGPSQYYPLGQSEGDGGYFHPSSYGAQLGGLSDGYGAGGAGPGPYPPQHPPYGNEQTASFAPAYADLLSEDKETPCPSEPNTPTARTFDWMKVKRNPPKTAKVSEPGLGSPSGLRTNFTTRQLTELEKEFHFNKYLSRARRVEIAATLELNETQVKIWFQNRRMKQKKREREEGRVPPAPPGCPKEAAGDASDQSTCTSPEASPSSVTS

SEQ ID NO: 38807 - protein, 232 aa, Homo sapiens
  Payload ID: 7752
  Gene Symbol: HOXB1
  Gene Name: homeobox B1
  Uniprot ID: P14653
  ENSP ID: ENSP00000459066
MDYNRMNSFLEYPLCNRGPSAYSAHSAPTSFPPSSAQAVDSYASEGRYGGGLSSPAFQQNSGYPAQQPPSTLGVPFPSSAPSGYAPAACSPSYGPSQYYPLGQSEGDGGYFHPSSYGAQLGGLSDGYGAGGAGPGPYPPQHPPYGNEQTASFAPAYADLLSEDKETPCPSEPNTPTARTFDWMKVKRNPPKTGRAQMWPPLLRGPKHLCFPCSDMSWVWAGFFSFSGSGRHR

SEQ ID NO: 38808 - protein, 284 aa, Homo sapiens
  Payload ID: 7753
  Gene Symbol: HOXB13
  Gene Name: homeobox B13
  Uniprot ID: Q92826
  ENSP ID: ENSP00000290295
MEPGNYATLDGAKDIEGLLGAGGGRNLVAHSPLTSHPAAPTLMPAVNYAPLDLPGSAEPPKQCHPCPGVPQGTSPAPVPYGYFGGGYYSCRVSRSSLKPCAQAATLAAYPAETPTAGEEYPSRPTEFAFYPGYPGTYQPMASYLDVSVVQTLGAPGEPRHDSLLPVDSYQSWALAGGWNSQMCCQGEQNPPGPFWKAAFADSSGQHPPDACAFRRGRKKRIPYSKGQLRELEREYAANKFITKDKRRKISAATSLSERQITIWFQNRRVKEKKVLAKVKNSATP

SEQ ID NO: 38809 - protein, 356 aa, Homo sapiens
  Payload ID: 7754
  Gene Symbol: HOXB2
  Gene Name: homeobox B2
  Uniprot ID: P14652
  ENSP ID: ENSP00000331741
MNFEFEREIGFINSQPSLAECLTSFPAVLETFQTSSIKESTLIPPPPPFEQTFPSLQPGASTLQRPRSQKRAEDGPALPPPPPPPLPAAPPAPEFPWMKEKKSAKKPSQSATSPSPAASAVPASGVGSPADGLGLPEAGGGGARRLRTAYTNTQLLELEKEFHFNKYLCRPRRVEIAALLDLTERQVKVWFQNRRMKHKRQTQHREPPDGEPACPGALEDICDPAEEPAASPGGPSASRAAWEACCHPPEVVPGALSADPRPLAVRLEGAGASSPGCALRGAGGLEPGPLPEDVFSGRQDSPFLPDLNFFAADSCLQLSGGLSPSLQGSLDSPVPFSEEELDFFTSTLCAIDLQFP

SEQ ID NO: 38810 - protein, 431 aa, Homo sapiens
  Payload ID: 7755
  Gene Symbol: HOXB3
  Gene Name: homeobox B3
  Uniprot ID: P14651
  ENSP ID: ENSP00000308252
MQKATYYDNAAAALFGGYSSYPGSNGFGFDVPPQPPFQAATHLEGDYQRSACSLQSLGNAAPHAKSKELNGSCMRPGLAPEPLSAPPGSPPPSAAPTSATSNSSNGGGPSKSGPPKCGPGTNSTLTKQIFPWMKESRQTSKLKNNSPGTAEGCGGGGGGGGGGGSGGSGGGGGGGGGGDKSPPGSAASKRARTAYTSAQLVELEKEFHFNRYLCRPRRVEMANLLNLSERQIKIWFQNRRMKYKKDQKAKGLASSSGGPSPAGSPPQPMQSTAGFMNALHSMTPSYESPSPPAFGKAHQNAYALPSNYQPPLKGCGAPQKYPPTPAPEYEPHVLQANGGAYGTPTMQGSPVYVGGGGYADPLPPPAGPSLYGLNHLSHHPSGNLDYNGAPPMAPSQHHGPCEPHPTYTDLSSHHAPPPQGRIQEAPKLTHL

SEQ ID NO: 38811 - protein, 431 aa, Homo sapiens; identical to SEQ ID NO: 38810
  Payload ID: 7755
  Gene Symbol: HOXB3
  Gene Name: homeobox B3
  Uniprot ID: P14651
  ENSP ID: ENSP00000417207

SEQ ID NO: 38812 - protein, 90 aa, Homo sapiens
  Payload ID: 7755
  Gene Symbol: HOXB3
  Gene Name: homeobox B3
  ENSP ID: ENSP00000417400
MRPGLAPEPLSAPPGSPPPSAAPTSATSNSSNGGGPSKSGPPKCGPGTNSTLTKQIFPWMKESRQTSKLKNNSPGTAEGCGGGGGGGGGG

SEQ ID NO: 38813 - protein, 299 aa, Homo sapiens
  Payload ID: 7755
  Gene Symbol: HOXB3
  Gene Name: homeobox B3
  Uniprot ID: P14651
  ENSP ID: ENSP00000418035
MKESRQTSKLKNNSPGTAEGCGGGGGGGGGGGSGGSGGGGGGGGGGDKSPPGSAASKRARTAYTSAQLVELEKEFHFNRYLCRPRRVEMANLLNLSERQIKIWFQNRRMKYKKDQKAKGLASSSGGPSPAGSPPQPMQSTAGFMNALHSMTPSYESPSPPAFGKAHQNAYALPSNYQPPLKGCGAPQKYPPTPAPEYEPHVLQANGGAYGTPTMQGSPVYVGGGGYADPLPPPAGPSLYGLNHLSHHPSGNLDYNGAPPMAPSQHHGPCEPHPTYTDLSSHHAPPPQGRIQEAPKLTHL

SEQ ID NO: 38814 - protein, 358 aa, Homo sapiens
  Payload ID: 7755
  Gene Symbol: HOXB3
  Gene Name: homeobox B3
  Uniprot ID: P14651
  ENSP ID: ENSP00000418729
MRPGLAPEPLSAPPGSPPPSAAPTSATSNSSNGGGPSKSGPPKCGPGTNSTLTKQIFPWMKESRQTSKLKNNSPGTAEGCGGGGGGGGGGGSGGSGGGGGGGGGGDKSPPGSAASKRARTAYTSAQLVELEKEFHFNRYLCRPRRVEMANLLNLSERQIKIWFQNRRMKYKKDQKAKGLASSSGGPSPAGSPPQPMQSTAGFMNALHSMTPSYESPSPPAFGKAHQNAYALPSNYQPPLKGCGAPQKYPPTPAPEYEPHVLQANGGAYGTPTMQGSPVYVGGGGYADPLPPPAGPSLYGLNHLSHHPSGNLDYNGAPPMAPSQHHGPCEPHPTYTDLSSHHAPPPQGRIQEAPKLTHL

SEQ ID NO: 38815 - protein, 431 aa, Homo sapiens; identical to SEQ ID NO: 38810
  Payload ID: 7755
  Gene Symbol: HOXB3
  Gene Name: homeobox B3
  Uniprot ID: P14651
  ENSP ID: ENSP00000418892

SEQ ID NO: 38816 - protein, 358 aa, Homo sapiens; identical to SEQ ID NO: 38814
  Payload ID: 7755
  Gene Symbol: HOXB3
  Gene Name: homeobox B3
  Uniprot ID: P14651
  ENSP ID: ENSP00000419676

SEQ ID NO: 38817 - protein, 431 aa, Homo sapiens; identical to SEQ ID NO: 38810
  Payload ID: 7755
  Gene Symbol: HOXB3
  Gene Name: homeobox B3
  Uniprot ID: P14651
  ENSP ID: ENSP00000420595

SEQ ID NO: 38818 - protein, 119 aa, Homo sapiens
  Payload ID: 7755
  Gene Symbol: HOXB3
  Gene Name: homeobox B3
  ENSP ID: ENSP00000446783
MNGICRVRARGGERRKGGEICRLPLALGLDVNIYYVCLFSPRRWLRPRRPPTRSPAEQSPEAEFLRRLLIRLPPAPKTCCRPRGSALGRLVCWEPASDNRFGVLIACSSSPPWAIVGGW

SEQ ID NO: 38819 - protein, 297 aa, Homo sapiens
  Payload ID: 7755
  Gene Symbol: HOXB3
  Gene Name: homeobox B3
  ENSP ID: ENSP00000449977
MNGICRVRARGGERRKEGCGGGGGGGGGGGSGGSGGGGGGGGGGDKSPPGSAASKRARTAYTSAQLVELEKEFHFNRYLCRPRRVEMANLLNLSERQIKIWFQNRRMKYKKDQKAKGLASSSGGPSPAGSPPQPMQSTAGFMNALHSMTPSYESPSPPAFGKAHQNAYALPSNYQPPLKGCGAPQKYPPTPAPEYEPHVLQANGGAYGTPTMQGSPVYVGGGGYADPLPPPAGPSLYGLNHLSHHPSGNLDYNGAPPMAPSQHHGPCEPHPTYTDLSSHHAPPPQGRIQEAPKLTHL

SEQ ID NO: 38820 - protein, 251 aa, Homo sapiens
  Payload ID: 7756
  Gene Symbol: HOXB4
  Gene Name: homeobox B4
  Uniprot ID: P17483
  ENSP ID: ENSP00000328928
MAMSSFLINSNYVDPKFPPCEEYSQSDYLPSDHSPGYYAGGQRRESSFQPEAGFGRRAACTVQRYAACRDPGPPPPPPPPPPPPPPPGLSPRAPAPPPAGALLPEPGQRCEAVSSSPPPPPCAQNPLHPSPSHSACKEPVVYPWMRKVHVSTVNPNYAGGEPKRSRTAYTRQQVLELEKEFHYNRYLTRRRRVEIAHALCLSERQIKIWFQNRRMKWKKDHKLPNTKIRSGGAAGSAGGPPGRPNGGPRAL

SEQ ID NO: 38821 - protein, 269 aa, Homo sapiens
  Payload ID: 7757
  Gene Symbol: HOXB5
  Gene Name: homeobox B5
  Uniprot ID: P09067
  ENSP ID: ENSP00000239151
MSSYFVNSFSGRYPNGPDYQLLNYGSGSSLSGSYRDPAAMHTGSYGYNYNGMDLSVNRSSASSSHFGAVGESSRAFPAPAQEPRFRQAASSCSLSSPESLPCTNGDSHGAKPSASSPSDQATSASSSANFTEIDEASASSEPEEAASQLSSPSLARAQPEPMATSTAAPEGQTPQIFPWMRKLHISHDMTGPDGKRARTAYTRYQTLELEKEFHFNRYLTRRRRIEIAHALCLSERQIKIWFQNRRMKWKKDNKLKSMSLATAGSAFQP

SEQ ID NO: 38822 - protein, 224 aa, Homo sapiens
  Payload ID: 7758
  Gene Symbol: HOXB6
  Gene Name: homeobox B6
  Uniprot ID: P17509
  ENSP ID: ENSP00000225648
MSSYFVNSTFPVTLASGQESFLGQLPLYSSGYADPLRHYPAPYGPGPGQDKGFATSSYYPPAGGGYGRAAPCDYGPAPAFYREKESACALSGADEQPPFHPEPRKSDCAQDKSVFGETEEQKCSTPVYPWMQRMNSCNSSSFGPSGRRGRQTYTRYQTLELEKEFHYNRYLTRRRRIEIAHALCLTERQIKIWFQNRRMKWKKESKLLSASQLSAEEEEEKQAE

SEQ ID NO: 38823 - protein, 224 aa, Homo sapiens; identical to SEQ ID NO: 38822
  Payload ID: 7758
  Gene Symbol: HOXB6
  Gene Name: homeobox B6
  Uniprot ID: P17509
  ENSP ID: ENSP00000420009

SEQ ID NO: 38824 - protein, 217 aa, Homo sapiens
  Payload ID: 7759
  Gene Symbol: HOXB7
  Gene Name: homeobox B7
  Uniprot ID: P09629
  ENSP ID: ENSP00000239165
MSSLYYANTLFSKYPASSSVFATGAFPEQTSCAFASNPQRPGYGAGSGASFAASMQGLYPGGGGMAGQSAAGVYAAGYGLEPSSFNMHCAPFEQNLSGVCPGDSAKAAGAKEQRDSDLAAESNFRIYPWMRSSGTDRKRGRQTYTRYQTLELEKEFHYNRYLTRRRRIEIAHTLCLTERQIKIWFQNRRMKWKKENKTAGPGTTGQDRAEAEEEEEE

SEQ ID NO: 38825 - protein, 243 aa, Homo sapiens
  Payload ID: 7760
  Gene Symbol: HOXB8
  Gene Name: homeobox B8
  Uniprot ID: P17481
  ENSP ID: ENSP00000239144
MSSYFVNSLFSKYKTGESLRPNYYDCGFAQDLGGRPTVVYGPSSGGSFQHPSQIQEFYHGPSSLSTAPYQQNPCAVACHGDPGNFYGYDPLQRQSLFGAQDPDLVQYADCKLAAASGLGEEAEGSEQSPSPTQLFPWMRPQAAAGRRRGRQTYSRYQTLELEKEFLFNPYLTRKRRIEVSHALGLTERQVKIWFQNRRMKWKKENNKDKFPSSKCEQEELEKQKLERAPEAADEGDAQKGDKK

SEQ ID NO: 38826 - protein, 128 aa, Homo sapiens
  Payload ID: 7760
  Gene Symbol: HOXB8
  Gene Name: homeobox B8
  ENSP ID: ENSP00000460254
  MOD_RES (1)..(1): Any amino acid
XYSRYQTLELEKEFLFNPYLTRKRRIEVSHALGLTERQVKIWFQNRRMKWKKENNKDKFPSSKCEQEELEKQKLERAPEAADEGDAQKGDKKNGSVQGPWAGSCALGAPRKTCSISARISGAPRETES

SEQ ID NO: 38827 - protein, 242 aa, Homo sapiens
  Payload ID: 7760
  Gene Symbol: HOXB8
  Gene Name: homeobox B8
  ENSP ID: ENSP00000460659
MSSYFVNSLFSKYKTGESLRPNYYDCGFAQDLGGRPTVVYGPSSGGSFQHPSQIQEFYHGPSSLSTAPYQQNPCAVACHGDPGNFYGYDPLQRQSLFGAQDPDLVQYADCKLAAASGLGEEAEGSEQSPSPTQLFPWMRPQAAGRRRGRQTYSRYQTLELEKEFLFNPYLTRKRRIEVSHALGLTERQVKIWFQNRRMKWKKENNKDKFPSSKCEQEELEKQKLERAPEAADEGDAQKGDKK

SEQ ID NO: 38828 - protein, 250 aa, Homo sapiens
  Payload ID: 7761
  Gene Symbol: HOXB9
  Gene Name: homeobox B9
  Uniprot ID: P17482
  ENSP ID: ENSP00000309439
MSISGTLSSYYVDSIISHESEDAPPAKFPSGQYASSRQPGHAEHLEFPSCSFQPKAPVFGASWAPLSPHASGSLPSVYHPYIQPQGVPPAESRYLRTWLEPAPRGEAAPGQGQAAVKAEPLLGAPGELLKQGTPEYSLETSAGREAVLSNQRPGYGDNKICEGSEDKERPDQTNPSANWLHARSSRKKRCPYTKYQTLELEKEFLFNMYLTRDRRHEVARLLNLSERQVKIWFQNRRMKMKKMNKEQGKE

SEQ ID NO: 38829 - protein, 342 aa, Homo sapiens
  Payload ID: 7762
  Gene Symbol: HOXC10
  Gene Name: homeobox C10
  Uniprot ID: Q9NYD6
  ENSP ID: ENSP00000307321
MTCPRNVTPNSYAEPLAAPGGGERYSRSAGMYMQSGSDFNCGVMRGCGLAPSLSKRDEGSSPSLALNTYPSYLSQLDSWGDPKAAYRLEQPVGRPLSSCSYPPSVKEENVCCMYSAEKRAKSGPEAALYSHPLPESCLGEHEVPVPSYYRASPSYSALDKTPHCSGANDFEAPFEQRASLNPRAEHLESPQLGGKVSFPETPKSDSQTPSPNEIKTEQSLAGPKGSPSESEKERAKAADSSPDTSDNEAKEEIKAENTTGNWLTAKSGRKKRCPYTKHQTLELEKEFLFNMYLTRERRLEISKTINLTDRQVKIWFQNRRMKLKKMNRENRIRELTSNFNFT

SEQ ID NO: 38830 - protein, 127 aa, Homo sapiens
  Payload ID: 7762
  Gene Symbol: HOXC10
  Gene Name: homeobox C10
  ENSP ID: ENSP00000421946
MYSAEKRAKSGPEAALYSHPLPESCLGEHEVPVPSYYRASPSYSALDKTPHCSGANDFEAPFEQRASLNPRAEHLESPQLGGKVSFPETPKSDSQTPSPNEIKTEQSLAGPKGSPSESEKERAKAAD

SEQ ID NO: 38831 - protein, 378 aa, Homo sapiens
  Payload ID: 7763
  Gene Symbol: HOXC11
  Gene Name: homeobox C11
  ENSP ID: ENSP00000243082
MFNSVNLGNFCSPSRKERGADFGERGSCASNLYLPSCTYYMPEFSTVSSFLPQAPSRQISYPYSAQVPPVREVSYGLEPSGKWHHRNSYSSCYAAADELMHRECLPPSTVTEILMKNEGSYGGHHHPSAPHATPAGFYSSVNKNSVLPQAFDRFFDNAYCGGGDPPAEPPCSGKGEAKGEPEAPPASGLASRAEAGAEAEAEEENTNPSSSGSAHSVAKEPAKGAAPSRRPPHPQEALPLFEIPDPGTGARVFLQRVYQQREAAAAVPDAEPDGPTSENLVSEQKDERKETEQRPAAVFLGKSSAVTCRPGPFGGGGRGKLFYFIFIFYFLTRLLSAGGKLDCGQGWPPPLWPALHSGTSWTLYLTLAVGQGPGLERG

SEQ ID NO: 38832 - protein, 304 aa, Homo sapiens
  Payload ID: 7763
  Gene Symbol: HOXC11
  Gene Name: homeobox C11
  Uniprot ID: O43248
  ENSP ID: ENSP00000446680
MFNSVNLGNFCSPSRKERGADFGERGSCASNLYLPSCTYYMPEFSTVSSFLPQAPSRQISYPYSAQVPPVREVSYGLEPSGKWHHRNSYSSCYAAADELMHRECLPPSTVTEILMKNEGSYGGHHHPSAPHATPAGFYSSVNKNSVLPQAFDRFFDNAYCGGGDPPAEPPCSGKGEAKGEPEAPPASGLASRAEAGAEAEAEEENTNPSSSGSAHSVAKEPAKGAAPNAPRTRKKRCPYSKFQIRELEREFFFNVYINKEKRLQLSRMLNLTDRQVKIWFQNRRMKEKKLSRDRLQYFSGNPLL

SEQ ID NO: 38833 - protein, 282 aa, Homo sapiens
  Payload ID: 7764
  Gene Symbol: HOXC12
  Gene Name: homeobox C12
  Uniprot ID: P31275
  ENSP ID: ENSP00000243103
MGEHNLLNPGFVGPLVNIHTGDTFYFPNFRASGAQLPGLPSLSYPRRDNVCSLSWPSAEPCNGYPQPYLGSPVSLNPPFGRTCELARVEDGKGYYREPCAEGGGGGLKREERGRDPGAGPGAALLPLEPSGPPALGFKYDYAAGGGGGDGGGGAGPPHDPPSCQSLESDSSSSLLNEGNKGAGAGDPGSLVSPLNPGGGLSASGAPWYPINSRSRKKRKPYSKLQLAELEGEFLVNEFITRQRRRELSDRLNLSDQQVKIWFQNRRMKKKRLLLREQALSFF

SEQ ID NO: 38834 - protein, 330 aa, Homo sapiens
  Payload ID: 7765
  Gene Symbol: HOXC13
  Gene Name: homeobox C13
  Uniprot ID: P31276
  ENSP ID: ENSP00000243056
MTTSLLLHPRWPESLMYVYEDSAAESGIGGGGGGGGGGTGGAGGGCSGASPGKAPSMDGLGSSCPASHCRDLLPHPVLGRPPAPLGAPQGAVYTDIPAPEAARQCAPPPAPPTSSSATLGYGYPFGGSYYGCRLSHNVNLQQKPCAYHPGDKYPEPSGALPGDDLSSRAKEFAFYPSFASSYQAMPGYLDVSVVPGISGHPEPRHDALIPVEGYQHWALSNGWDSQVYCSKEQSQSAHLWKSPFPDVVPLQPEVSSYRRGRKKRVPYTKVQLKELEKEYAASKFITKEKRRRISATTNLSERQVTIWFQNRRVKEKKVVSKSKAPHLHST

SEQ ID NO: 38835 - protein, 264 aa, Homo sapiens
  Payload ID: 7766
  Gene Symbol: HOXC4
  Gene Name: homeobox C4
  Uniprot ID: P09017
  ENSP ID: ENSP00000305973
MIMSSYLMDSNYIDPKFPPCEEYSQNSYIPEHSPEYYGRTRESGFQHHHQELYPPPPPRPSYPERQYSCTSLQGPGNSRGHGPAQAGHHHPEKSQSLCEPAPLSGASASPSPAPPACSQPAPDHPSSAASKQPIVYPWMKKIHVSTVNPNYNGGEPKRSRTAYTRQQVLELEKEFHYNRYLTRRRRIEIAHSLCLSERQIKIWFQNRRMKWKKDHRLPNTKVRSAPPAGAAPSTLSAATPGTSEDHSQSATPPEQQRAEDITRL

SEQ ID NO: 38836 - protein, 264 aa, Homo sapiens; identical to SEQ ID NO: 38835
  Payload ID: 7766
  Gene Symbol: HOXC4
  Gene Name: homeobox C4
  Uniprot ID: P09017
  ENSP ID: ENSP00000399808

SEQ ID NO: 38837 - protein, 222 aa, Homo sapiens
  Payload ID: 7767
  Gene Symbol: HOXC5
  Gene Name: homeobox C5
  Uniprot ID: Q00444
  ENSP ID: ENSP00000309336
MSSYVANSFYKQSPNIPAYNMQTCGNYGSASEVQASRYCYGGLDLSITFPPPAPSNSLHGVDMAANPRAHPDRPACSAAAAPGHAPGRDEAAPLNPGMYSQKAARPALEERAKSSGEIKEEQAQTGQPAGLSQPPAPPQIYPWMTKLHMSHETDGKRSRTSYTRYQTLELEKEFHFNRYLTRRRRIEIANNLCLNERQIKIWFQNRRMKWKKDSKMKSKEAL

SEQ ID NO: 38838 - protein, 235 aa, Homo sapiens
  Payload ID: 7768
  Gene Symbol: HOXC6
  Gene Name: homeobox C6
  Uniprot ID: P09630
  ENSP ID: ENSP00000243108
MNSYFTNPSLSCHLAGGQDVLPNVALNSTAYDPVRHFSTYGAAVAQNRIYSTPFYSPQENVVFSSSRGPYDYGSNSFYQEKDMLSNCRQNTLGHNTQTSIAQDFSSEQGRTAPQDQKASIQIYPWMQRMNSHSGVGYGADRRRGRQIYSRYQTLELEKEFHFNRYLTRRRRIEIANALCLTERQIKIWFQNRRMKWKKESNLTSTLSGGGGGATADSLGGKEEKREETEEEKQKE

SEQ ID NO: 38839 - protein, 153 aa, Homo sapiens
  Payload ID: 7768
  Gene Symbol: HOXC6
  Gene Name: homeobox C6
  Uniprot ID: P09630
  ENSP ID: ENSP00000377864
MLSNCRQNTLGHNTQTSIAQDFSSEQGRTAPQDQKASIQIYPWMQRMNSHSGVGYGADRRRGRQIYSRYQTLELEKEFHFNRYLTRRRRIEIANALCLTERQIKIWFQNRRMKWKKESNLTSTLSGGGGGATADSLGGKEEKREETEEEKQKE
